United States Patent Application Publication US 2006/0134663 A1 - sequence listing, part 44

SEQ ID NO: 84632 - DNA, 487 bp, Homo Sapiens
atagcgttaccataggaaactgttccaaactgagttagctttaattataattattttattcataaatggtgatagtccccagatctgtacacctttatcactccctgccgtagatatactttaggttagtatttctacattcgtggcaagcattttggtaacaccagtggttttcattgtgacttttatcactatcactaagaatgcaatttaagttgccttttggcatcatagatcatagaaactttctctctgaatcatacccatgtgtgaattttcattttatatgatagtgtagcatattagaagcatattttaaaacagagcctttgagaaattgaaaaacaattatttgaagttccccatagtaccttaaaggaacaaaaagaatgtgggataggagtaacttgaattcgtgtttagtatggtgggctttgaatttttttcactatcaaaaatagtgcttttgtttagttaaaaattgtag

SEQ ID NO: 84633 - DNA, 481 bp, Homo Sapiens
tcaggctgtcctgtttaaccttgtcgaccaagttgggtagacaaggctatgtggattcatgagcacttaggtttattttattctggtcaccattttcttagactgcttttctttgctaccatattcccccctgataccatctcactttttgtcccttcctttcatgcctccctagctcttctgtcttccaaggtgaaattcacaagattactgttgctctgcccctgagggtttacttatttgtgatttttgcacattagaatgttagtagcatgaggtgaggattccatggctctaacaataggagttatccttatgcagagcattcttagctctatgacttttgcaggaagaatgtagaacctattacttatctcatatctccatgtatcttaactaagatatgttctactaagttgagtatattcttttcctataaacatatacatgaaatatttccataagtaccaaatcatgtagt

SEQ ID NO: 84634 - DNA, 155 bp, Homo Sapiens
cacctttctcactggtattgatcactttctcttccttagtaaagctccatttgcttctctcctaacctggacattataggaagcactgatgctgtattaaaatttagagaaagctcccagtctgtctttcccaacatcccttcagtttcaataag

SEQ ID NO: 84635 - DNA, 624 bp, Homo Sapiens
atttggcagtaggaatttgattttcttccatctattttaaatgatcatcttgagtacgtggcaaaaagaggttatgacctaatcacactcctctgagtccttagaggaagaacactaatctggtcagaataaattgtatcttttctatctttatatccatagcccaagagtttgctgaattgaaataaaaatgggatagaaaagtgaattcaaggagaatgtccagagccctaataccagaaggcagtctgcacagccaggtcagcattcttgaacaaatgcacttccattctcactcaaaatgccgactgcctttcttctttttctgactgacatttaaaattaaaaaccaaagttgctgggctgtgatctatggcagccttccagccctttgaaaagataaagttagacagaagtggtggtgaaatgaaaatgaagaataaggagtggtcaggatctatgaaagaattacagctagttctgatggattgatttttcctttctctcttatccagtctctggggtgctcgagagctagatctgctgaccttaacttctgaggactttgagcaagtaccatactgttcggatgattttcaaaaaagtgacatttagcattttgat

SEQ ID NO: 84636 - DNA, 783 bp, Homo Sapiens
  misc_feature (665)..(665): n is a, c, g, or t
attcggcacgaggtaagtcaatgggatgatggagcatctgcctgggctcagagccttggctcccatgggtccctctcagctgccagctccagcctgctgccctggccccacctggccttgcctgttccaccctacacagtaactgctgctacccagcaccccaggagggcatgggtgcatgccaggtcaggacagggctcacaggcccagacatggcacccgcgttttgccccaagctgacagcacaagggcacatgcagtgggtggctgggcagggggacgagcctctccccgaccctaacccagaggcctcatgtgtcccagttcaaaggttgcagtccccatggggattgtcttctctcccgtgtcggttgggcccatgagacacagagatacctggctcaacctcactcaccccagccagggcatcacacgcccatcctgggctggcagaggtggggagctccttgcacatgctaaattgcagggcgagcctccagatacccgtgggatcctacactcaccgcatgagtattccagtgcccagcaagcatgacattaagtagcaaattaaaatgccttgaccaattgacagaccatagaagaaaggaggaacctttgtattttgagcgcctaggatggcacttttatcttgctctttgaanaaggggctctcatttgcattttgcactgcaaatgatgtggcaggtcctggctccaggaatgggaagctgatcattgcccttatttggcatcaggaaaggcctatcttcaaccttaaaa

SEQ ID NO: 84637 - DNA, 359 bp, Homo Sapiens
ttctcctaagagagaacacccttgtgagctaggcagggcaagtggagcaatcgcaatttgcagatgagttaattgatgctcaagcaatgagatgacttctcagggcccttggcctgatcattaagggcagggtgggatgagatgacaggtgggcctctcttcttggacagctctctgctgacagctgccccagagctacatttgaggcctggtgtcttgctgtgttcaggcttcatatctgatgagagtacctccaagtatagccgggaaaactgcagctctgccttccctcttcatgcagctaccgtttcaggaagcgggaggctagggtggggttgaggctacattgtgctaccatg

SEQ ID NO: 84638 - DNA, 534 bp, Homo Sapiens
agcctggatgcagctacggcccacagaacccttgccttcccagtgctgcggcagtggctgctcaccctgtgtgtttgacctctatcaccgagatctggcaaggtgggaggcagcccaagccagcaaggacaggagcctgctgcgtgggccagagtcacagagctgcccctccaagctgaacccagagaccttcgtggccttctgcatcattgccatggacaggctcactaaggacacctaccgtgtccggtttgctctacccgggaacagccagactcggcctgcggcccggccagcacctcatcctacgagggatagtagatgacttagaaattcagagagcctatacgcccatcagccctgccaacgcagaaggatactttgaagtgttaattaagatgaagaaactgaagctcaaaaagatgacatcatttgtctcaaggcctcttgggtaatatgatccaaatggaaggacaaaagttcagtgtcagttctgtttaacaagtatgtattaaacatttactctaaaccagg

SEQ ID NO: 84639 - DNA, 1115 bp, Homo Sapiens
  misc_feature (21)..(21): n is a, c, g, or t
  misc_feature (98)..(219): n is a, c, g, or t
gaagggctgggtaccggtccnggaattcctcgggatctacccagagactgggaggaacctggaaaatcctcacgtgaggtgaagcgcaggcgagtagnnnnnnnnnnnnnnnnnnnnnnnnnnnnnnnnnnnnnnnnnnnnnnnnnnnnnnnnnnnnnnnnnnnnnnnnnnnnnnnnnnnnnnnnnnnnnnnnnnnnnnnnnnnnnnnnnnnnnnnnnntgctggccaaggagcagggcctgcgcccgtggtctcatagagcctggcctgttctggaagagcacccagttgttccttctaggctgcccaagccccactgatgatggctgagagggaagaggacgacgacactgaggaagcctggatgcagctacggcccacagaacccttgccttcccagtgctgcggcagtggctgctcaccctgtgtgtttgacctctatcaccgagatctggcaaggtgggaggcagcccaagccagcaaggacaggagcctgctgcgtgggccagagtcacagagctgcccctccaagctgaacccagagaccttcgtggccttctgcatcattgccatggacaggctcactaaggacacctaccgtgtccggtttgctctacccgggaacagccagcttggcctgcggcccggccagcacctcatcctacggtacactcagagggatagtagatgacttagaaattcagagagcctatacgcccatcagccctgccaacgcagaagaatactttgaagtgttaattaagtgctacaagatggggctgatgtcccgggtatgttgagtcctgggagagtaggagacacagctttctggcgaggaccctttcggagatttcttctataaaccaaacccagtatggtgagctcctcttgctgggctgcgggcacgggcctgggcccccatggtgccctatctgcagagcatcacagaccatggagaatgaccagacttttggtcacttcctggtcggttgcttcaaagaccctttgagagcttctaccttaaaaaaccttcctcccagaaccaaggcccgttttcctggaatggtcccgtacccttctttgtacctcagccccggagagcttccctccaaaca

SEQ ID NO: 84640 - DNA, 576 bp, Homo Sapiens
  misc_feature (157)..(170): n is a, c, g, or t
tgaaagtttgcaggtcgtgaagaccaattagttgctatggtgtcaataagtgcaaattgctgtaggttgttggtgaatagggaaatctccactgggtcagtgcccagggcaatgaggtactaaaggcacggcaggtggtttgaaggcagacaccttnnnnnnnnnnnnnngccacaactgtgctggactttggtgttccacccataaacagtgatacgttccagctcctttctcagtctctgcatgtatatcaaggtgctgatctcagctggtacatcactgtgtggtctgaattaattttattctaaggattatattctctttagacatggtacagcaattgagattagaccaaattgcttattctgtggaactctggattatcagtaaaacatcaagatttgactaattaatgatccttccaaacagtcttcattttaaaggattccattttagagttaacagaaaagaaaagagataatctctgagtggaaatgtggaaaccaaatgttcagccttttttaaaacccaattcagaactcaacctagacatgccattatgttacagtaacagtg

SEQ ID NO: 84641 - DNA, 518 bp, Homo Sapiens
tacttcataaaatttcaattcatataacaattttatatttgtgtggcctcaaatatataaagcaaagttcacagaactatatctaagtagagataactcaacaattgtctcattaatagaagcaaataaaacttcattaagagcagagaagatatgaacaacgtattacaatctaatggctttatgtagatgactgcatgcggcatctgcagaacatgcattcttttcaagtgcccacaaatcttcactaaggttaaacacatgctgggccataaagcaaatctcaacacaattcaaaggacagcagtcacatggaccatgttttgtaacaacaataacaaaaatataactaggaaattcccatgtttggaagttaaaaaatatacttctaaataagccatggaatctgttgtgatttcccaattttcattcctgactttgattatttgtgcttttctttctcaatcacatcagaggtttaccaattttgtcttttcaaagcagcaaccttgactttg

SEQ ID NO: 84642 - DNA, 417 bp, Homo Sapiens
ctcaataatttagtatcaatgtagatgcaaccacccatttcagtcacaatgcctacccaagtgtttcacctagttaaatccttcagttgagttttctaatagaggcatgtaatgcgcaaacacgtgggaacctaccatgacttttgagtatgaagcccagtggtacacaaatggtgcatatgtagaaaatctgctgagctgagccaaagatacaaggatatttcagaaattacctatcatttaaaaaggagattagtttgtaggtttgatgacagcaattcctgaaagttttccaaataacagttcttaaaacaacattgttgaaaaatgaagaaattctttccagacataacagtaaaactttctctgaagttatcttcttgtgcacgtgtaataattcagagggatagtggaaac

SEQ ID NO: 84643 - DNA, 466 bp, Homo Sapiens
cggcacgaggatgcctgttaggcaccagaatagacataaaaagggagccggcaatacaacctggagttgagatgagagttttggagtcatcagcatataggtgggatttaaagtcatgagaaaggctgagaggtgagatctcaataggagcacaagtagatgaaaaagagaagctgtccaagaattggaccttgggtaccccactgttgagacgctggagtgctagcgaagaaccagcagaggaagttgaggaggcagccaacagaataggaaggtagctaagaaagggtgttgtcccagaagtcaagggaagtgttttaagagaagtgtgtcttcatctgtgtcaaatgctgttgataggttaaattagctcaagacagagaactggctactggtgggcttgacaagaggcctgaaatgctttggtttgcattcctttatctttcatacacaacttacctaaagt

SEQ ID NO: 84644 - DNA, 198 bp, Homo Sapiens
acattcatggtcctatgggcacactccacagaatacacaccacagaagatgccatgtaaacactgtccctggagttgtgcagtgccattaccctgggctgcttcctctcctaagagctgactgtgctgcaaatagtcagttccactataagatgacttatgtgttcctgaaaatcattgtgctatataaaattgtgtg

SEQ ID NO: 84645 - DNA, 445 bp, Homo Sapiens
aagcactgaggtatggaggtagaaccaggtaggggcagcacattagcagcccaggaaggaaaaaaattgaggagggagtggctcccattcttcattgattcagaggttaaaccacaagctagtgagaacatatattatttttgtaacaaaacagaggatgtacaaactttacatagcagattgtgtatgaaagaactcactcttccattcagagttgaagaaatatttatagggtgcttactctgtgccagacactgtgactattatctaggtaacattgcacacaagtgtgttcctaacttctgaagcggacatcattacactctccatgcccctgggtgccatccgaaaaccatgagttatgttatttcacatggcattaaggagcacatggcattccttttcatggaaatctaaatacgcacagatgtctgattgtgcttct

SEQ ID NO: 84646 - DNA, 320 bp, Homo Sapiens
  misc_feature (298)..(298): n is a, c, g, or t
ttaactatggggcgtctttcaatttggtgctcacggaccaatttgccaaatgctgcattctttgactcatcacgggatgatgtcattgctcctgggctggttggacaatgctgggaaccagtgaaggaaactcaaagctgaaaacaggtgacttgagtcacccttctagatccagccctgccatgaatttgtcacatatttatgagccagtcacaggtttcctttgtcataaaagattaattctattcaacattttatttaaaaaatagttgttgagggacaccgtgaagaaagtganaggacaacccacagaatgggag

SEQ ID NO: 84647 - DNA, 414 bp, Homo Sapiens
gcagcttgaagggcctgcttgaactctgtcgctaattgaacaaatgagccatcagcatagtcgtgtgttactctggccacttactagctgcctgactgcagcggctgaggaggctgacagctgggtttagacacggttagacagggccaaggcaagggagggggttgaaaatgtgtaccagcgggtgattaacatgacagccacacaatctgagtcaggcagaggccaaggccaacctgggaaggtggaagggtaggaaggagggtttggaggaaatattttggaggtcatggtggtgctgaacaactgttcagtgagagtagaggagggagtgaacaacaatgttggccagagggtgggatgcttcaaattgagagtgtattttttggtggtaggtagagtttggtacttgca

SEQ ID NO: 84648 - DNA, 255 bp, Homo Sapiens
tggatattctacatctactatgtcttccagctattttttctggttgccagttttgatgcttgtcttcttccacagatacttcagatagtataaaaatttcccttactaaaaaagaatgtacttttactgataaaatactccaactcatgttagttaccaagctttagtatattttattccataattcttgtgaagtggtctttctccaacattatcagcagcacaatgcccataaaagtattgactgtttatccc

SEQ ID NO: 84649 - DNA, 452 bp, Homo Sapiens
  misc_feature (433)..(433): n is a, c, g, or t
gcattcttggggtgaattcatagcaccaagcctttggactctactttatttattgttacttaaacatctccttggttccattttaagttagaaaaatgtatctgtgtgggagtaaaaagatttcctttttaaaatcatttcagatatcaccatacttgattgggaactccatgtagataccttgaatattaaagtacttctttctactgctttcaagatagcagcacagccatcactaagttaaagcttattttaaaagctggggttacctgaggtttatcgtccttttcttcttttgaaattcttctgtgtgaaacttacaggttcaggcattctttgaaaatcagtcagaggcaaccttccggcttcgttgtgtccaggaggctttggaagtcattcagttgaatatccagtggatggagaagaacctcanaagtctcacatggtggctg

SEQ ID NO: 84650 - DNA, 462 bp, Homo Sapiens
  misc_feature (20)..(20): n is a, c, g, or t
  misc_feature (124)..(158): n is a, c, g, or t
  misc_feature (342)..(350): n is a, c, g, or t
agagtaatataataccattntgtgatcctcatgagaggatgaaataacatacagtgatatgtcttctaaaaagattattaatttgtattatttctataaattaagtctggtgctaaaagagggnnnnnnnnnnnnnnnnnnnnnnnnnnnnnnnnnnnatgttttgttttgcatttaatcctcataataccaggttagaccagggaagcactgtatgaagtaattaaggaaacagactctggagtcagactgtctaggttcaaatccctgatccttgtttaccaggtgtgtgaccttgagcaagttacctagcttctctgtgcctcagtttccatttctttnnnnnnnnngaggatagtaagtaacgggttgttttggtgatttagtaaatgaatacatacaaagaacttggaactttacctagtacttgataataaacactagctgttaccactattatcc

SEQ ID NO: 84651 - DNA, 487 bp, Homo Sapiens
caacaaagcattggtaagcatggaaacttgcttaatgcaaccaagaaaacacgagtcctacagagattaatgctggcagcaccaatcacaaaatacaacttagtaaaaagaattttctgttttctggattaggctgagaaaagtgtcttctgatatgtatcatcatgcacatacaaatatataaagccacacagaatagacaaatgataaacaaggcacagtggcaatagctacttcagaaagcctgctacattagaaatcgaacttaagtgtgcaaagggggagaatgctaagtagataaatacttaagtaataggctgttcaataggtctttcccatttagagcactgagacattttctcttccctctctttgtgggagagaagggaggtgctccaatgcaaatcaaaccagggaggaagctagaaaaccacttgcaggacagtaaaatgcttaccagaaaggaagattgacatcttacttcact

SEQ ID NO: 84652 - DNA, 517 bp, Homo Sapiens
  misc_feature (442)..(475): n is a, c, g, or t
ttctgaagtaaaaatataagttagagtattaagattatctggtaaatagtaatatattatctctgctaagaggaagttaacaattcatatcctgagtgaacctgaaaacctgaatttcctacacttctagatggatgaaactgcaatgtggcaaattaaatattgttacagctcagctctcttggctgagctttaatacaattctcaatggagtcatcagattttcttaaacctaacccacctaccctgagttgaatgattgcttcttagctatacactatagtcctctcaaaataatctaaagtaaagcactaaagacaaatattttcttcattcaatagcaattctttcataactttaattattgtacctattaagattttggctgtcactatgcaatgtgggaaaatgcttcttctgtcagagacccttatgtaaactnnnnnnnnnnnnnnnnnnnnnnnnnnnnnnnnnntgtatttttgtacatgcatacaatgtgcaatgattaaattag

SEQ ID NO: 84653 - DNA, 491 bp, Homo Sapiens
tatactagcttagtattattgggagaatgtaatgattttctgtatttcaaaagtgtaaaatacaaagtgggccatggcatgagataaaccagtgaatatgttctgggaacaggtcatagaagggcgtgtatgctgtcctaaggagcttaaacttcaacttcagttcatgggagccaatgacaagatctgagcaggggaaggttgtggctagaggggcattttagacagacaagatcctctgtggattacacctaggctaagcaacgggttaaagttgttgtcttaagacgatggtccaggtaaaagataataaagttttaaattaggatgttagtaggaatgagaaagagggatggatttcagaaatagtaaggaaatgtattagcaggacttgattagtgattgacttggggaaggaggggaagatagagttcaggatgactccgagactgtctggtgtcggtggctaatgactgaagctattaatagag

SEQ ID NO: 84654 - DNA, 286 bp, Homo Sapiens
  misc_feature (131)..(153): n is a, c, g, or t
aagatcgcaccactacatactagcatgggcaacagagtgagactctgtctaaaatatatatatgttatttacaaaagaaatgtgtacacatacaaagaaacaagatagaacaccacagctcagggggattnnnnnnnnnnnnnnnnnnnnnnnccccacaaaacaataaatagaaaatatccccaagtgaccccagatgttggagctagaagataaagacttcaaagcaactattgcaaataggttaaaaaactaaggagaactatgcttaaagaattgaagtata

SEQ ID NO: 84655 - DNA, 306 bp, Homo Sapiens
tgattctttcaatccatggacatgtaatatctttcaatttttggtgtcttcttcaatttcttaaaaagtacattaaactggatgaaaatacagcataacaaaatgtgtggaatgcaactaaagacagtacagagagggaaatacatagcacttaatgcatacagtagaaaaaaaggaaaggtttgaaattaataatctaaattctcactttaagaactaagaaacgaagagcaaaatagtcccaaatcaagcacaaggaaggaactaataaaattaagagcagaaatcaatgaaattaaaaacaga

SEQ ID NO: 84656 - DNA, 470 bp, Homo Sapiens
ggcagttccaggggacaggagggaagatgtgcagagtcgtttgagtcccctcccctcgtgccctcctctctgttttaatgacttctgcctgcgccctggcttggcgggggtctgcgcgtgcctcacttctgattaaagagactgagcagggatcatgctcttccagtagcttgtgcccggcagcttctctgggtaactcgggtcccctcaaagctttctcatggccctgctggagactcagtttgccctggttcagtgtctcttttctgggtttggtaaatagaaagtagaaatgagaactagtatctaacacatgtctgtgttgcctccagaaactaagtgtgatggagagctcaaaatcacacgccgcagagccagtcagatcacacccgccagcctgccttgcatccagctctgcgctgcacagacagccacgaggggaccgcaacaaggaccacgagcgtctccga

SEQ ID NO: 84657 - DNA, 576 bp, Homo Sapiens
  misc_feature (194)..(226): n is a, c, g, or t
  misc_feature (566)..(566): n is a, c, g, or t
ttctaaaatatcaccagatgggtatataaacttagaatggctcaactcccagatgtatattaacaccaaaactccaataagcctatactgtcataataaaaataatttgcctaaatatcttccaattcacattagatgtattaatataaatcatatcccatctgagttgctacaactccacttggtattttaannnnnnnnnnnnnnnnnnnnnnnnnnnnnnnnnccgatacagaacctgggagtttgggcttagttctctgtttacagagttcatagaaactgatttttcttaaggtttatttcataattctcaatcagcttattaagaaaagaaaaactagatggctaagtcctcttgtgtataattgttatcaaatcccagaatgtctttaatcatagtggagttcacaatgataaagttcaaatcagcttacctgccccattgctcccatactacttcttatagctgccactcctcttaggaactggagccagttaacgacccactttctcaatggtgcaatggtgactgtgacttaaaccttcacaagacatccaatganaaataaagac

SEQ ID NO: 84658 - DNA, 552 bp, Homo Sapiens
  misc_feature (362)..(371): n is a, c, g, or t
gattaaatgtgtgtgtgaccttttgtttttattatagcagttggagtaatccaaactttaacctatcacattgatattgaaactgttctctaataccaagaaggcctgttaacattgtaatatggtggactcaaaccagttgaactacatttaacctacctaaatggcaacatcctctcagttgttatacagaagcttaggatatatccttggtttgttagaaaaatgaaattgaatgttgttaaagtggtactttgtaaatctggcttttacactaaaagcaccctctcagcttgtagtattttaatttgataatattcagcctgaatttgtttgaaattctgtgaggaacagttgcattnnnnnnnnnnttcagcatgctttttctggaatttatttttatggcaatttaagttttatatctcctacttgattgacatgttatttgtaattagctggtaaattgtgtgcatgagctatcagtgctgtaaatttttaggaaaataagcaatcattaaatagaaaaatttgtgttggaagctttcattgctt

SEQ ID NO: 84659 - DNA, 404 bp, Homo Sapiens
ctttttttcccctccctaagcagtggttctcaatttggggctattttactccagaaggggcttttggcaatgtttggagacatttttggttgttacagcaagacttggagctaccagcctctagtgggtagaggccaaggatgctgctgaacattctacaatgcactggactgtccccacaaaagaatgttctgtcctgaattgttgatagtgccaaggttaagaaaccctcccataagggatgttttctaggcttaaacagtggcctgtatgtgtctttctccttatttctttatttcaagaaaagaaaaacgctgccaaagcaaaagccatgcagtatgttcataataaattaccttttaaaacaaatcccaggcctactcttcccgaaaatgggaaagaca

SEQ ID NO: 84660 - DNA, 565 bp, Homo Sapiens
  misc_feature (178)..(188): n is a, c, g, or t
  misc_feature (533)..(533): n is a, c, g, or t
agatgcgagggtgaacaccaatacgaagtatggaagagcagaaaaccaggagacatctgggtccctgaggccactatggagctgcactagtggcattggactgctcacctctagactttttaaggtgagaaaaataaagccagtaatttgttgtttaatctgctgttttttggatccnnnnnnnnnnngcagcttaacaatatttattaagtgataagctcacagggttgaggatcaaaagagaaccatctatgtgaagagtataaaacagttcttgacacacaggaagtggccaatcaatgataactattatttttgggagattatctgactaccagcagagaacaaaaatcaaacagaataaacaacttgggaagggaagaaaagggctgaacagaagtgatgatagggtgataaaaaattcagaatcatagagccaaacaaggtacataagtggtctgacatatagtacataatcaatatgtataattccttttcctatcctatctgtgagaacacaaactaatgccatntagtcacgagaaccttgatcaacaagggagac

SEQ ID NO: 84661 - DNA, 381 bp, Homo Sapiens
tttttaggaaattcctctccttaactgcaatcatatatttgaaagacaaggacaattggatttgtctaaagtttgccaaaattaatcgaaacattttgggcatttaatattccactaaacagatttatttcacccaggaacatgaaaaaatgttgggttttttctttctttttccccttcagcagctccaaatggctgtcaaactgggaatcaaactgccattaaaaagaaaaataatttgaaaacaaatgaaaacagatttttttcttttctaagtggaaaagtctacatttgtaagaaatgatcccacttaggaagataagaaagcattttcaaaacaactgccttggtaacatgatgactcaggaaaagagaaatttt

SEQ ID NO: 84662 - DNA, 523 bp, Homo Sapiens
ttacgcttcaagcactaggtgaagccaagattttctgaattatgtttcattggggaatttttacctttttttcctgtttatgacagtcatttcatctggttttataatgaggtcaggaacaggtgaatgtaaaataatactagtaagctgagtgatttctgtgttaatgattaggctattttttaaattaaaaagttctggtatttgaaacatgctcagtactttaagtacacttactagtaattaatcagaatgaaagattttaatgttctctgattatgtacaaatcattatggctacctgtctgcaagaagtcaggagaaactggtatctcggctaaaactgggggaaaaactggtgtcgtctttgcttatttttcccattctcccagtaaatacaaagcattagcatttgtataatataggggtgtacttaactctttccccctaaaaggccaactttccccctttataaaatacaggtctgctcattaaaccaataacctttaaaaaatgagaaaaaa

SEQ ID NO: 84663 - DNA, 495 bp, Homo Sapiens
atttccactagtcagtaagaatgggaataataccgcactagattgctggaatgatcaaataaaacagttatttggaacatgtgatgtaagccatgtaactatgaactgtgattgtgatgatgaggaagtggaggaggtggatggaagtggtaaggatgacaagttttaatgaggctttaaaccctttgtggaaactatctaaaatcaaacattcgcatgtttttaaatacccataacagtatctagagcagtggttttcaattagaagcatttggaagtatgcacagggaatgggagttacaattttttgatgtcgcatgactgagactactactagaatataatgggcaagtatgccaaaggtttctgcaacacgtgggccattcccacacaccaaagaactgtccacccaaaatgccaatagtgtcctgttgggaagcactgatgaatgtccaacacagaggaagcattcattaaacatttactaaataaatg

SEQ ID NO: 84664 - DNA, 307 bp, Homo Sapiens
gatcagatcattggactctgatgaccagccctagcactcgtttggtgtgcgttggacatgcacatgaactgatcaagcttgatttcttcctctgtaaaacaggaattctcaaagcttcatattgggattaaatgagattaaatgaaataatggatggtacatgtcagtgttggtcatagggaagtaaaagattgaatacaccaagggacaatggtcagatcatctataaaaatagaactgtgacccaggatctgcatcaaccagcccagtaaactaacctgttatctagccatgccagacttgtagg

SEQ ID NO: 84665 - DNA, 440 bp, Homo Sapiens
caataataatgataaggctctttctcattgttgtcagtgtaatttatctatttaattatagaacctagttccaggatgcttaatctgaagtatatacttggggcaaaatgaattatatcttaataataatctggaatttttctctctaacttgacatattttaattcttgctagattttcaaaatgtcatacctcgaaccaccaccagatggctatgagaatgttacaaatattgtgccaccatataatgctttctcagcccaaggcatgccagaggtaaaataaaatacatttgtaacccaagtctttaaatggttcttttgctatataaaacctgtatagaggactaaaaccagggaaattaggtgaatcattcatgcggattcattgtttgatattcagtactatgaaaacctcatccctcaaatttaaaaaattat

SEQ ID NO: 84666 - DNA, 496 bp, Homo Sapiens
  misc_feature (471)..(471): n is a, c, g, or t
tttttgttgaaaaaagttttgaattttattttaaaacaagtcaaagatatatacttatttttggtgtttccgcataggcataaggaacacttttggattttaaaaataacaacttattggatgatagtgaagttacagagattatagtaggtatacctggagataccagcaggaacatagtagaaataataagccaaaaacacttttatttatactgtaaccaatctccttggaaaactttagaaaacacaaaaatatacaagcatacattccatttattcagcctgatgacgtcatcacacatacagcctctggaaaaccccactctacactcaagagagaatgaaaagtgaaaaagacaaaggacattttagtattatgaaaatgcttttgacctcaaaagcccctgaatcaaagggaaaggtgaaaaggaaatcgccattggcaatggtagaggctatggaagattgngtcttgcaaaatttattagaagacg

SEQ ID NO: 84667 - DNA, 506 bp, Homo Sapiens
  misc_feature (494)..(494): n is a, c, g, or t
gaggactactctttaatcagaggtgggctgttagtcttgttagattcttagcacatcaatatctaagaccaactttaccaaatgaaactgtttccattgtttggttaaatatatttttcttccatttgttatttatcacagtggagctaaacaaagtattaaaaataaggaatggcagaaacttgaccaacgaaaagcaaagaaaacccaagaaatagagtggaaaaaaggttgaactaagtttttccaaacttagaatgaatgacctgagacaacttatgtatgacaatatgtctcctggagtggtaacccaacttttgggtacaaatccttcttgtctattcaaagttgagactacaagggacgttaatgtatctgcacaataaaacgtatgcactataataacactattgacataagtcatggttttaaaaaagttaacactgaagcagaaacagagtttgggaatctatggcaaggttcatttacctttntctcttcttctt

SEQ ID NO: 84668 - DNA, 212 bp, Homo Sapiens
tccaaagcctgggatttttccatgagatattcttccatggcactttattttatagagtttgggtgaatctccaaccagccagagataaaagttttaagccttggtagttgaatattgactggttagccacatagcttgtgctcaggattcatatacttccccttaactagaatgtaaattaggaagaaaggggggttgaacacatggctcag

SEQ ID NO: 84669 - DNA, 394 bp, Homo Sapiens
atgtgttgtcgtgcaggtagaggcttgtgtatcatccataattgtatgtagctaataaactatttaattctcttaaaaaaacactgtagactgggtagcttataaacaacagacacttatttctctcagttctagagactggaagtccatgatcaaggcgccaccagattcggcgtctggtgaggcatctctggttcacagatgacaccttctgagtcctcacacgatggaaagggcaatggatccttcttttcctcaacttcccaggctcaagcaatcctcccaccgcagcctcccatgtagctgggaccacaggcacacaccatcacgctcaactaattttgtaattttttgtagaagcggggtctcgccatgttgcccagactggtcttga

SEQ ID NO: 84670 - DNA, 605 bp, Homo Sapiens
gaaaaacctgtgaatgtgggtaatgtgggagagccttcagccaaacctcattgctttataaaccccttagaactctccctactagctggaaactctggtgacgtgatgaatgtgggaagggctttggtggatgttccaccaaaacacgttagagaatttgtacattagagaatttgtgctagagcaactcttcaaatttagtgaaactgggaaaacccattagtagagttcaagcttcagtattcatctcaaagagaaaccttgggaacatgatgaatgtggaggaaagttcctttaccaacttggagatgtataaaactagagctgaaaagaagctgagaaatcaccttgtctggtgattttctgcctggtggggccatttgtataacgacacttgtgcattgcctcctcatgctgttactgacggggcagggtgtcatgcatgggtgcagaggatggaggctgagaaaggtagacagctacccatgatctagcccagtcgtattttagagctaataaaactgatgttcagaaagtgacatgccttggcctatagtcctaactgggctgggcctctttcctgtggttcacagctgtagtatgga

SEQ ID NO: 84671 - DNA, 466 bp, Homo Sapiens
  misc_feature (184)..(221): n is a, c, g, or t
cagtactcatgtgcacacacactttaaacagaagagcctgcacattgtaaaggcaaaagagaaagtaaatgtttaactaggtagtattgttttattatacatacttctagtcagaaggaagagagactgtgaaagcaaacccaaacaagctaagtgtggatgtgggcatttctacttctattannnnnnnnnnnnnnnnnnnnnnnnnnnnnnnnnnnnnntaaactagaaagttaaagaggggaaaagtacttgattctgttaagcatcctaccatattacaacagagaggtgtttggagattcttgtgccttcacaggcttgtatctccattctgcttgaactcaggtaaaatattgagggtcatgtcttcactcttggattgcaaatttgcctcacttcttctagaagctttccttgtggctcgggagagtctccttctgaaagtatctcccgccaagaaata

SEQ ID NO: 84672 - DNA, 443 bp, Homo Sapiens
tgagtttaatggcaaacattttcaccctagaaataaaatatggccactttcctcccatgccgatagcattccggaaaacatggtgaacattcctaaaacccactgggctttctgtaagaagtgtggcaagcaccaaccccacaaaacggcacaataccaggactccctgtatgcccagggaaagcggcgttatgacaagaagcagagtgactatggtgggtagactaaggcaattttctggaaaacgggtaaaattacaaaggaggttgtgctgaggcttgagtgtgctgaccccatctgcagatctaagaaaatgctggctgttaagacatgcaaacattttcaactgggaggagataacaaaagaaagggccaagtgatccagttctaagcatcatcttttgttttattatgaggacaataaaatcttgaggttatgtcca

SEQ ID NO: 84673 - DNA, 248 bp, Homo Sapiens
gaattcggcacgagccaaagcagatgaattatacaaatctattaactgtagcataaatttgtaactaactttatgcaaatactcatactttatcaattatacttaagtacaaacattcaggtgctaattgtattttgtagttctataaatctctacagatcaaagataggagacaataaatgaacattcttaaaatgcctagtctccatgaaagaaaaagcaaaatagaaatgccaactattgctttt

SEQ ID NO: 84674 - DNA, 508 bp, Homo Sapiens
ctaagggacagaccctggtgccactggccaactattggccttgttccctaagctctgcaaaccccagtctccaagcatcaaatgggaatgataatgatatctgacctcagagttggtgtgtggaacataaacagagtcacacagctcaggtccttgagcacacaagcaggtgctcagtgagtgtcaggctttatttttgggtaatccaaagctgtctgcaaggggaactccactttgctctgtctgagctacagagaccttgttttcacagatcagggcatcatgaccccaggttctccatttggcttgtgccccttgacttctcctctctattacctttgctcagtgctagggatactcatgcaagcgtgcaggtggaagcctaccaggggcgagaagtacacagagaaatctccaccctgctgaagaaagcagcagcattaccacgcaagagctccagagaaacctcttttctcagaactgctggctcagcgggagcaaggtgact

SEQ ID NO: 84675 - DNA, 247 bp, Homo Sapiens
taaacatagatttcatctcagtatcatctacacacaatttttaatgctcttcaattcctatgacagtgattttcaaacctggatgtttatccaaccactcagaaagttctttcaaaatacagattcctgaagcctatctcagactttttgatcaaaatctccagggatggtgggcttagacgctcccaggtaatcctcatgcagctgaatgaggttatgagaagtgaaagctcaaactaaatcttac

SEQ ID NO: 84676 - DNA, 602 bp, Homo Sapiens
  misc_feature (504)..(545): n is a, c, g, or t
ctcagggctgtgtctgggacttaagttggatcgtacacagaattaggtcattctcctttccctctctctcttctccaggattctcctgccccctttcctcatcatacccacttgccagttcatatgatcagaaagacaggtttctttgagtgttagccttttcactatacagcagttccttacaagggggacagcctttagcacagagttaaggaaaagagagaaaaaagggggattctgtccacacttttcaggcaatactgatcccttttcccagttcctctggtagacactttctcttgagttttatgttccccagttgccatggttggtgtctgctctgaggctagggccagccttggggcagggctgggaggtgagagagaaagcaacataaagccctgggctttgtcctataccttctggcatgcaggggtcattttccttggtcttctggataaaaataggtttactgtctgtgcccactggatggttcaaagctgnnnnnnnnnnnnnnnnnnnnnnnnnnnnnnnnnnnnnnnnnncgtcaataaatgggttgttattaagatttcaacttcagtccccaatctacctgatat

SEQ ID NO: 84677 - DNA, 632 bp, Homo Sapiens
  misc_feature (63)..(109): n is a, c, g, or t
acaatttgaatgagctcgaaagtgaattcttccccagggccttgcagaaaggaacacaatttnnnnnnnnnnnnnnnnnnnnnnnnnnnnnnnnnnnnnnnnnnnnnnntgtggcaatgtgttatgcagcatagaaaactaatacaggacactgacctgcattgcaacaccagaattgtgtcctagctggaggctggcctgcaatgagaactgcatgtggccacagtttctcggcaggcatgccaggcatggcacttcacccctctcctctgactgttaccactcagttctaacatcccctgagagcccttcctcaacttctccaggccaacaggtggcttcctttctgtgctcaccacacccttcgtgaaaacagctacttggtgcttcctttgatctatgtgcacatgttgcctgcttcccaccaggccacaagcacctgtgggaggaagggaactggaaacatttgtctttgaatcccaagccccgggcagacagcaggcatatggtggctgaaatggtaaagtgaaatttctaccagtgtgtaatcaaaggtccttgtctacaaggtatcttaattaccttttttaaaaaagaaattcagtagttttgggggaactggtggtttttgt

SEQ ID NO: 84678 - DNA, 557 bp, Homo Sapiens
  misc_feature (210)..(210): n is a, c, g, or t
gtaacgcagactgtgggacactggctaaggccagtggcctacctctctaaaaaactagatggggtttctaagggttggcccccatgtttgagggccttggcaggaacagccctactagcacaagaagtggataagctaactcttgggcaaaacctaaacataaaggccccccatgctgtggtgactttaataaataccaaaggacgtcanttagctaaacaaaatactaagactaactaagataccaaagcttgctctgtgaaaaaatcccccacataaccattgaaagtttgcaacaccctaaaccccgccaccttgctcctggtatcagagagcccagttaaacttaactgtgtagaggtgttggactcagtttattctagcaggcccaacctccaagaccatccttaaacatcagtagactgggagctgtacgtgcatgggagcagttcgccaacccctgcaaagtgactctgaagaagatgacaagccctgccccagtcacacctggaagctgactggtccttgcatggtcaaagcatgaggaaactcatcgc

SEQ ID NO: 84679 - DNA, 319 bp, Homo Sapiens
gccatacattccaactttgaggattaagctgccgtcaatctattatttatttttagtaagaccaagagataaattttaatgattcaattaaaaatcataaggtcagattgatgaaatgactcaatataaactgctcgaccttccactagtacatacttgctcattgtaaaacctgtatgaaagtgtagcagaaacagccaccctatttgcagtttttctaagtaacttggtaggttgaaagatccaaggtcaaaagaacttatccagtgtagcaaataacagtaaaataagataaagtggcccgggcatggtggctcat

SEQ ID NO: 84680 - DNA, 414 bp, Homo Sapiens
gtgtgagccaccacgcccagccagcctttgatatgtcgaggaaggcctccaagcagcaagcaccctcaacttcctgaaactgcagaaatcagtaatgataaagatgtgcctggttagttcccaaagtcaaagagccaaatgggcctgccatgagagtgccttccgacataacaggtatggaacacacacccacacactccatgagacgacgtcatcagcactgtagggccctagattatttcagtacaataactacttacacttcacagacagtactaagtccaaacatgcttactaaaatcataccagacccacccttaaacccacttacacaataatgccttctgaaatagaaaataaattgattatgtgtttggtaaaagtgtaaccaagtatgcacttttacattaagtt

SEQ ID NO: 84681 - DNA, 672 bp, Homo Sapiens
gtttgctcagtgttcagatgggatgtctagctatacatcaatgattgttcaaaatatgctcaggggcacagatgccggtactatcctaaattcaggagaacagaaccacagggatttgcaaagtgatattagaggaaaacagttggttgcttttaccaacactttctattaaaagcatggtcatgttttaagagtttataaagatgttaaagacacctggggccacctgtttcttctggccacagacaagctatttgaagtgggctatactgcttacatgctttcctcactttccgccctcagtaattctccaattttaatttcaacctgcatttctgcccatgctgaggacatgtaggaattccttgactgccagcctgagccgtggcgtggggcacttcagtctgcagtctgactacatttggctctgtgttaatgcagcccgagccctgaaccagaggtctggacactgactttcatctccatctgtggagctttgttctcttaaattggcagtcacatacatccttgtcagcatgaaatcagggcttgcaggagttaaatctgcttgaaacatctgacaccactttaacagaacaaccaaacctggttaatccaaatcactttgcaaactctgtatttatttggattaaaaagctttagatgaaaaac

SEQ ID NO: 84682 - DNA, 326 bp, Homo Sapiens
gttaaatgggtgtcttagtccattcaaactgctataaaaatataccttagattggataattcatgaacaaaatttatttatcttggctgggaagttcaagatcaaggccccagcagattcagtgtctggagagggcccaccctgctccacagatggtgccttgttgctgtgctctcacatggaagaaggggcaaggcaattcctttcaacctcttttataaggccactaatcccatttatgaaggcaaagatctcaaaacttaattcattttccaatgtggctgcccccctcttaatactcaccaataaattctacttcctgtcca

SEQ ID NO: 84683 - DNA, 358 bp, Homo Sapiens
gcaccttgcatctgatagaggcttgtaagagcagattgacaggtgaatgtcacaggtccataagaaggacaaatagatctaagttgggcaaaagattctatttgttggttctcccttctaagatgataatatgcccctgcacttgagaccttacttgaaacttaaagaaatgtgattggttatggtgctgggagaaaggggtgcacctggggaggacactgagaaagataaacaaaggggaaggaagagaggacaacctgtaactttttagaaaaggctactacttttaactgttgggagaaaatgctatttgcttggcactcaccaattgttcaatattaccattattccggaactt

SEQ ID NO: 84684 - DNA, 508 bp, Homo Sapiens
  misc_feature (498)..(498): n is a, c, g, or t
aggcgctcaagtccatcaggagggaaccagcccatccacgtggaggtgttgaagagtcaggagcccgcgcacaggaggctgcctgggtttgaatcctggcaagttttaaactcactaagcctcagttattccatctgcaacagaacctgcctccctgggattgctgggaagattcagggagaaaacttgggtcaagccattggctcccaaataagcaaatcctccacaggggaagtccccaggcttcgggctggagcccagggaggtgcggaccccaggggaggtcagaggcaaccctcacacaggactgttccacgttctgtttctgtaacgcgggggccttcgcgcccgtctgcctgtgcacctgcgaactaattctgagcaactgtgcgctccctggcactttctgaagtcaaaatctgaacatttccaagtttaaatagttgcaaagagtatgatttccaaaatcatgtcaatattgccatcctaaaataaaangtgtgacatc

SEQ ID NO: 84685 - DNA, 379 bp, Homo Sapiens
  misc_feature (364)..(364): n is a, c, g, or t
ttttttaaatgtatatgaagtgtgtaacaggaaataaatttgttcttcaaatactagaatactagaacaagaggttaaatcttaacacttgaaagggggtttaaggaataggaaaagatgaacggccctatcagtgaaagagaactgggctggggaaaaagaccagttgtatgttgcaacctctgaaaagctgaaggatgtttctaagccttagtaactgtctgtaaaaggaggccggagttctagcttttagcagtctatgattactacataaatcatttctacaaactaaataggtaggattttagaatgagaaaatgtatgcaaggattctgggctctgaaaaaaagagaaaatgtagganagatgactaattgtc

SEQ ID NO: 84686 - DNA, 341 bp, Homo Sapiens
  misc_feature (14)..(14): n is a, c, g, or t
  misc_feature (28)..(28): n is a, c, g, or t
tgtaatatgaagtntgttaacgggaaantaaatttgttccttccaaatactagaatactagaacaagaggttaaaaccttaaacacttgaaagggggtttaaggaataggaaaagatgaacggccctatcagtgaaagagaactgggctggggaaaaagaccagttgtatgttgcaacctctgaaaagctgaaggatgtttctaagccttagtaactgtctgtaaaaggaggccggagttctagcttttagcagtctatgattactacataaatcatttctacaaactaaataggtaggattttagaatgagaaaatgtatgcaaggattctgggctctga

SEQ ID NO: 84687 - DNA, 389 bp, Homo Sapiens
cggcacgagggtggaagggagagaaagagaaagaagaaaatggcagaaatgcacagtgccagttccagatttagactttaagatggctgacttcactgtcttggagcctggtgccatcacttaaagaagtctgatcatgctgcaggagagagaccactccatttggaaagaggtcctgaagaacaacaaagacatggagagaggcccagccagcccccaactgtcccagccaggtcagccaagggcatgtgaatgaagggaagccagcttgcatcttgcagtctgtgttgaactaccccagtcaacaccatatggagcagagatgagccgtctcactgagccctgccaatattgaagaagcaggacaaataaattgttgtttaaagaaa

SEQ ID NO: 84688 - DNA, 406 bp, Homo Sapiens
  misc_feature (29)..(29): n is a, c, g, or t
  misc_feature (35)..(35): n is a, c, g, or t
  misc_feature (55)..(55): n is a, c, g, or t
  misc_feature (80)..(80): n is a, c, g, or t
  misc_feature (151)..(151): n is a, c, g, or t
ggtgtgaaaaatggggaattttccaaagnccccancctggtaaaaatggtaatanggtggtccatgccaggggtttgggncccaaagaaaagcatggccagaaaaaaaaggcccaggtgaatggtaaattatccccgaattccagaaatanatactgtgatggggagcccagatccgcagtggtggagagttcctaatgttgactgtttgcaggcccaaaagatgattgctttataattttaacaaatcattgtccttttagtaacatccttgtttagtgtcttctcaagctttctttactgaggaattcagcttgtgacacagatacatcccactagcttgtgaggtggaactagtaataaagaccttgaatttggattgaaaagtttcctatctttacattgtt

SEQ ID NO: 84689 - DNA, 1014 bp, Homo Sapiens
  misc_feature (651)..(670): n is a, c, g, or t
ctttctttgatttgatccgctactgtgtcagtgtttgcaatcagattgcgtctcacctgcacatacatgtcttcagaatcaaggtctctacagctcattctaatcatcattaatgatgtaattggtatataggaacatcatgttttctgcaggaaagaaagtaacatattaaggagaatgggggtggataagaacaaatataatttataataatcaatgttgtataacttttattctttattattggtaacacgccctaactatcctgtgtgagaatgggaatttcaagtcccatcttgtaaattgtatatgttgtcatgcagggtttgggccaagaaagcatgcagaaaaaaatgccatgtgattgtaattatcctggattcagaataatactgtgatggggagccagatccgcagtggtggagagttctaatgttgactgtttgcaggccaaaagatgattgctttataattttaacaaatcattgtcttttagtaacatccttgtttagtgtcttctcaagctttctttactgaggaattcagcttgtgacacagatacatcccactagcttgtgaggtggaactagtaataaagaccttgaatttggattgaaaagtttcctatctttacattgttgaggaagtccnnnnnnnnnnnnnnnnnnnnaattgctcaagaaatgattctctcacaggcttgggaaatcctgttagcatgcagaataatgtggtaactttgtcaatttcccattttatttttttaaataaatatatgatctaaaagccaactttttctcagttttactcagtggaaagataaactaagttttaatgttatttttttaaatttaagcaaaatttatttctgttctttaataaataagaaaatgtggtccactgcattgttgtgatgtgtcttgtgacatttctattttgtagaaactttaaaaaggagaactatgttcatttttcctgtcaatggtttttttgtgttgtagttgtcacctgtcc

SEQ ID NO: 84690 - DNA, 459 bp, Homo Sapiens
  misc_feature (117)..(117): n is a, c, g, or t
  misc_feature (401)..(401): n is a, c, g, or t
ttgtcctcccacaggaagggggctccacctgttgtctccagggagactgataaggtctaaggtctagagaattaatacagtctcttctctaggctttctctaataccagagcatgcncaggggatattctcgaaggggagtgccattcatagcctctcctaaagttacgtgtcccacaaaataagtagctcatgaactggggctcccacaaaacacactttggaaagttctgcattagacacctgggcatcatgcaaatctacccagccagcccagcactttccagcctattccagtgcagtgatccataaagaaggaagtgcctgttattttctcacacatggttatgctcaaatggacccctcccttagaacacttcctcatcactccaccatcccccnaaatgggaagaactcttttttgaatgatttaataatgaagagcaaacttcagaacaat

SEQ ID NO: 84691 - DNA, 523 bp, Homo Sapiens
ggattcccagggacttcaggatcaagtcctagttgttcagcatggcatccaagactctttatgatctggcccttgcttacctctcagccttagctctcccaactcttgcacagtcactgctcttcagccatagtggatcactcaccattcccagatgtaccaggctctcgcacacctctgcacctttgcacgtgctgtttgctgtgcgtggaatgcccttcactgtcaccaccctgctcatccactctactaatgcctcttcattcttttatactcagctttctttaaagttcttctaagctgagttaggtgtctgtcctttatgatcccgcagtattccatgaatacgtatattctcacatttattgtactgtattataattgttgaaaacttgtctgtcccatttagaatgtgagctccttgagagcagaacggtgtcttcattatctctgtatccccaaggctttgcacagtgccttgctcatagtaggttttcaataaatgattattaaataaataaaa

SEQ ID NO: 84692 - DNA, 737 bp, Homo Sapiens
  misc_feature (347)..(347): n is a, c, g, or t
  misc_feature (496)..(496): n is a, c, g, or t
  misc_feature (546)..(546): n is a, c, g, or t
  misc_feature (548)..(548): n is a, c, g, or t
  misc_feature (594)..(594): n is a, c, g, or t
  misc_feature (607)..(607): n is a, c, g, or t
cacatatgttaaacaaaaacactaatgctttctatgaacaccccattctctggtgctttatcagacttgccaactcattaattagagctattgaaaagaattccgtctatagacctcatgggcagagattacaatgcttggtttccccattgatttttcatcaatcggactaacagtagcaaatcattgagagtcagagttggggtaaagattccagggaaagcgaacatttgtaaattgtgttcctttgggaaaaataataataacgataattaaaatagtaaccaacttttggaacacttactatgcaccagggtcccatgtttccatttatgtttatctccatnttaattattcacaacaagccttgcagtagttacaataatcggttcacttctaaaaatgagaatccaaggttcccagaggcaacgtgaactttggggtctaatctttgtttaaagtcacactgctagtaagtggggaacctggaattcanacttaggtctggtgctccagagtccattgtaatcaatataactactagcntncagtaatgtcaatgtatgagaaaaattaagattactcataacattntcaggatatttcncaccaccacacacacacctttaaaactaggcatgctgacgcacattcattagggatgtagcattataaggacgatacagttcacacctaccattaaaaaactaaaagagtgcccaaatataaaatggcat

SEQ ID NO: 84693 - DNA, 461 bp, Homo Sapiens
atcaaaaggaagctcaggtgggtcacaaaaataacatgaatttcaaataagtagaaatagggaaatataagcttataattactagttatgcaaatacaatttagaaggatgattgatgttcaaacataatcagggcctcagcttccttatatgtaaaatgatatactcctatttaatatgtaagggtgtcaggaggactaaatcaaacacaatacaagaaatgcctacactgtatctgctcaataaatgtgagttaccttctcttcctttcccattgaaatcataattgatcatatttttaatataattcataatttttccaacactcaacacagtaaacaattagtaaactgaagtacagagaattagacagctatgaaaaagtaaaaaagaataccaggaatgtaagtcagaaactacaaattcctgtgtaacactctacatattaagccaggcatatg

SEQ ID NO: 84694 - DNA, 525 bp, Homo Sapiens
  misc_feature (13)..(13): n is a, c, g, or t
  misc_feature (33)..(33): n is a, c, g, or t
  misc_feature (51)..(51): n is a, c, g, or t
  misc_feature (76)..(76): n is a, c, g, or t
  misc_feature (125)..(125): n is a, c, g, or t
actgggaagcccngggagaggaacctggaatgncccgggctttcctacacnggctttcaagttaccccatcccaangggcaaacttgaggactaggccctctaggctcctatttttccactgtcncccggataatttaaaaagaacccattacatagcattcaccccaaccatatctggaaagattaagagctaatgaaataaacagaaattagattaggctctgagataattaggtttaaaattgctcgaactctggtttgattacatacacatgcataaacattattctgccactgtctatatgtctgtcggtctgtctgactatacatctctaactaattttagtcagaaacattttactcttttatcatgttttaatatcccaaaataaagtgacatagttcagaaaaactgagaaaaagttcactgtcatcagaaaatacagggaacttctaaaatgcgaattcgtcagaaacttttagcatagcaagaactttgctaaaagtctgtataaccaggccaa

SEQ ID NO: 84695 - DNA, 491 bp, Homo Sapiens
  misc_feature (14)..(14): n is a, c, g, or t
  misc_feature (34)..(34): n is a, c, g, or t
  misc_feature (94)..(94): n is a, c, g, or t
  misc_feature (115)..(115): n is a, c, g, or t
  misc_feature (120)..(121): n is a, c, g, or t
  misc_feature (143)..(144): n is a, c, g, or t
  misc_feature (193)..(193): n is a, c, g, or t
  misc_feature (211)..(211): n is a, c, g, or t
  misc_feature (422)..(422): n is a, c, g, or t
gaagggaaatgtcnagagacctatgtgaaccatngagcatctccattcttataataagaaagctgggtaaaatgagggctgaaagttactgggnctgcattcccagacgtgatanaagcnnaatctaagtcattgaatgtcanngcacaaaataccagggtcattaatggacccctttgctgataaaacaggnttggcagtaaaaggagcnccagccaaaacctaaaatggtgaccaagactgatcctctggtcgtcctcactgctacactcccatcagcaccatgacagtttacaaatgccatggcaacgtcaggaggttaccctatatggtctaaaaagggagaggcattaattaatccaccccttgtttagtatatcatcaagaaataaccataaaaataggcaaccagcagcccttgnggctgctctgtctatggagtagccattcttttattcctttactctcttaataaacttactttcactttg

SEQ ID NO: 84696 - DNA, 507 bp, Homo Sapiens
  misc_feature (128)..(128): n is a, c, g, or t
tgcggccgctgcagagatgaatggccccggatctgtggaggctcgcctgcccctggggaccccgtcctcggcctggggggtagtgtcaggtgtgtttgaaccagagcaattccatcttgaataggganctctctaaactaaggctaagaccggttgggctacattcccagtaagttaaggcattcttagtcacaggatgagataggaggtcggtacaagatacaggtcataaaaaccttgccgataaaacagcttgcaataaagaagccgcccaaaacccaccaaaaccaagatagcgatgagagtgacctctggtcgtcctcgctgctacactctcaccagggccatgacagttacaaatgccatggcaacgtcaggaagttaccctatatggtctaaaaaggggaggcgtgaataatccacccgatgtttagcatatcattaagaaataaccataaaaatgggcaaccagcagtcctcggggctgctctgtctatggagtagcca

SEQ ID NO: 84697 - DNA, 500 bp, Homo Sapiens
aaagcacctccaaaaacggtttcttgtctagcagaaaagctccggctcttagagctgagctggcaacctttagtatgcaaacgccagccattagaaactggatccacccaacatggcgattcccatcattgtcctcttgcccttgccccacacgttcctggcaacatggctgcccccacatatccccaagtatgtagaacatcatggcaccctgcatttgcatattaaaagactagggtgggagggtcagtttttttcgagggctacatgaatgacttacctggtcaaaccaatcccctgagccctgtgcaaatcaaacaccatctcctccagcctcttcatatagctggctggtatcctggcatgtggggtctcctctttcagctttggagcccccctccctctgtctctgtatggaggagcttcttccttctgacttctcccatctttcttgcctattaaactctctgctccttaaaatcacaccaggtgtgtcagtg

SEQ ID NO: 84698 - DNA, 641 bp, Homo Sapiens
  misc_feature (509)..(544): n is a, c, g, or t
aaaatatttaagggcctaccacatcagtgaagattttaaggctcagtgttgtaccttgaacaacctatcattaaaaaagaggtgcaaaactgtgcccaaaattcatgaccccagaagcttaaattttggaggcagcatttacttcacttgacaacgatatattcagttgctttataggctgactcacagataccagtttagagtggtatctagagcaaaaataaataataaataaatatgctctgcagcaagtttaaactttgatttaagctgtcctttattttggccatatcacctggcaggtcctatggaattacagaggtcatggtaggttaattatgctgagcatcgtctctagtaagtcacagggagagagatgctgggtagaccagtaggcttctgaaacaaagccatgccctctatagcagagaactttattatttatttatttatttatggctctgtaaagatctagaagaccatcaactttatatgaatcatatgtcaannnnnnnnnnnnnnnnnnnnnnnnnnnnnnnnnnnnccctacaaaacaatctgagaaatctgaacattgactggatatttgacagccttaggaatgattattaaagatgtgatcatagaattgtgattacatt

SEQ ID NO: 84699 - DNA, 573 bp, Homo Sapiens
  misc_feature (535)..(535): n is a, c, g, or t
gcacaagcctcatggtcagcaagcacaattgccatacttcttttaggggagagatgagatgcaaaattctgatttcaaaactctgtatttgcaaagtctgaatgatacctattgatatttgtcaagaaattaatttctaaaatgctgagaattatagttgaaatattcctttttgggatgtcagaacctaggttgtagttatttttaaaactgctgttgttgttattttattttcccccagaatttaggggccatttgggataattcaaaactgcctttcctattgtattcacagaaaacagatcctctagtccctcccctacttctactcaggataattgtcgaacagtgctgggcagtgaaaaataatgagccagggacaccccatcttctaccaatccaaggttaaattagaaaagatcagccctagtcttaacaaaatatccctttcgaatgagaaatcattgctatctaccttatgcccttagctggacctgaatattctccctattgctcactactccaaaagccacanatacttaataaacagtaactgtcagcaagcaatgtcat

SEQ ID NO: 84700 - DNA, 426 bp, Homo Sapiens
tgagccactgcacccggccaagctttacaactttatttttagggacagggtctcacttttttgcccactactgcagcttccaggagaaaaagttattcgcctctgccgtggaatattctatagcctaatccacgtgagcaaaagacacaactctaccaagatataaaatgtgtactacatatacagtcgtgagcactaggctgtgacctcgaatgccaacaactatggccaaattactgacagacataagcctgagaactaagccagacactcaacagaaacaagcctcccttttcagagacattttctaaaaccataaaaataagagacaaaaattaggacatattcaggtaacaagagcttccttcccccagataatttctgttgtataaaacccagagattaaaaacaacgatattggaatag

SEQ ID NO: 84701 - DNA, 262 bp, Homo Sapiens
  misc_feature (108)..(108): n is a, c, g, or t
  misc_feature (161)..(161): n is a, c, g, or t
  misc_feature (215)..(215): n is a, c, g, or t
aaattgaaaatatcatttacgaggtcaggggcaggggatttcaacatgaaatgcagaatgtgacaaaagagtctaatgatacagtatcacttaaaaggtaaggggganaaaggtcttgaccttaagtgacttttcaaaatgagttaaaggtttgttaaggncttgaagggcaaagccaactgttattacttgacgtttgttactcttaggttggnttaaagttctttttccccctgggggcttaaggggtttaaccaactct

SEQ ID NO: 84702 - DNA, 582 bp, Homo Sapiens
  misc_feature (53)..(84): n is a, c, g, or t
  misc_feature (88)..(214): n is a, c, g, or t
  misc_feature (244)..(351): n is a, c, g, or t
aatcctttatccagcaaatatattctttaggaaagaaaatgaaataaagacannnnnnnnnnnnnnnnnnnnnnnnnnnnnnnnatgnnnnnnnnnnnnnnnnnnnnnnnnnnnnnnnnnnnnnnnnnnnnnnnnnnnnnnnnnnnnnnnnnnnnnnnnnnnnnnnnnnnnnnnnnnnnnnnnnnnnnnnnnnnnnnnnnnnnnnnnnnnnnnntgcgtggtaccacgcccagctaattttttnnnnnnnnnnnnnnnnnnnnnnnnnnnnnnnnnnnnnnnnnnnnnnnnnnnnnnnnnnnnnnnnnnnnnnnnnnnnnnnnnnnnnnnnnnnnnnnnnnnnnnnnnnnnatgagccaccatacctggctgaaataaagacattgtcagaagaaggaaagctaaaataattcattgctagtagtcctcctttaacagaaatggtaaaggaagttcatggggaaggaaaatgattgcaaagaaggaagagcaaccaaaatggcaaatctctggataaaccaaatagacttatatgtttgttaaaatatatgtaactgctgaaataaaaaaattgtaacatca

SEQ ID NO: 84703 - DNA, 520 bp, Homo Sapiens
  misc_feature (17)..(17): n is a, c, g, or t
aataattaaaagggcangaccccgggaattggaaaacctaaggcaatctgggtccctagagtgtggctccttaacctacaacataaatacggctttcattacttgtggatcctaattaggttcaactcacagagcacaaacttcattcccaacttcttgggggaactcccaacctatccaccccacctccccatcataaatcacctataagtaaaagatactatgcaagtattccattttttccactctatattgaatatatatctttagttaatgccatctttcaaatatacaatttaagaaaacaaaatgaaacaaaacaaacttacgattggaattgaaatttttcagatttcagggcaattcataatcagtttggtggctagagtagctgaactcattcttcctctcttgccctcctctccggaggtacctagggcttgttcctgcctggattgtagctacagagaagtgcagctcaagacctgctgctggaaagaaggactcctggggtcagctt

SEQ ID NO: 84704 - DNA, 491 bp, Homo Sapiens
  misc_feature (477)..(477): n is a, c, g, or t
ggcacgtgtatcagttttttgtggtgaggacatgcaaattattttcctctagctttttttgaaatatacaatatatttccattatctgagaatatgctgtatttagcaaaaaataatttgcgattactaggtacttcagtgcatgtagagagggtattttctcagttaaaagtaatgtattctatggagaccagtcaattgaaggtttcaacaatttcaaatttattagcataaagcacaactttgaaaacaaatgcaggcaattttatgaaaaaatgggaaaacaattaaaactgtatttcaaaaatacattgtccacaagtagaattaataatgacccaatattacttgtacaactaagatggtgtttaaattaaatgaatatataacataaataatcatactacttgttatttaatgtgctgataatcaatacaaatattcttttgcttttatgaatagaaatagatattgctntcttaaagaaacat

SEQ ID NO: 84705 - DNA, 360 bp, Homo Sapiens
  misc_feature (343)..(343): n is a, c, g, or t
tctactataaagtaaaaattattgtaggccttctaaggaatttataattcattaaaatacatataataacactaaaaagctaattaatatataatattctagttaaaaattaggcatatatgactatatgcaatagtgtggaaaacaattaggcatggaaattattgttagagtttattatttttcaaaagataatgataaaacacacctgtaaatttaatataattataaattcgtcaaatctcaggatggtaaaaccttaaatataccatttgtaactgacattatgtattctctttcttcttcagagggaaaaccctgaaggaactatgggaaatttctnttttattttatttattt

SEQ ID NO: 84706 - DNA, 810 bp, Homo Sapiens
acgagggaaaactaggattaggagcagaccatttgaaatctgtgcatctttgtaatttaagcactaatgtaaacctaataaaaagatagtagtgtgcttaaagataagttaaaatttttaaacaaataatttggtaaatttagaactttccctttaaaaacagtaaaggtgaccagaagtggtggcactactcagggctagctgtatttaactgttgttacctgcaaatgcaaaaactaaataacattttaggaaaaattggaaatgaaccaatgtgatttctgaatgtactgacataattcccttatttactgattgcatatgagctaatgtatgtgttgtagtagaatagttccagtagttctttaccttttctgtgcttatcatgcctccttcctttctactgttaatgttcaagttttaatcttccagacttctcatttgttctgtaacagtatcttctagccacgtgtgccccttctaatctctcttgtggaatttgtccttcacaatactacaagaattctattgcattgaaaaccccaaatcttattaagccagcctccatcattagagcatgtttctcaaactcttggtgtgtgcaaatcattcttattctgtgatttctattttcatgctttttcagtttgcttcatttgccatatgatagaggttttcttcagaccatattttggaaagtatgctcttagttttaaattctactatgggttatttccaagacccatagtagaatttaacaaattctttcaaataaaaaattttaaagccttcgcttattatcaactaacc

SEQ ID NO: 84707 - DNA, 571 bp, Homo Sapiens
gtatggactcattaacctcctagccctgtaactctgtcaatctcaattctcaccagtttcaatcagatacagctgcctctagtttcattctggttggtttagtgtggttgtgtgtgctcatgcaattttctgcattgcaggggaaagaaagtatcttcaatatgtgtctatatctgtgcatgaggcagtgtgtatggtcagtctttccttaccgaaagtctcagcataaaatgtattgatagaggtgtacgctggtatataggaaagtaccctgtgacaaatatagttgattctttttatttctctttgcatagagatgaacacacagctacagtgctctcaggaggcctaggagttgacttagtccaaaggaatgactgtgctatttttgcactttccctcacattatttctcaaggcttgagggaatttaaatgtgacttacttggcaatgacaagtgtctgtcccttcagtgcctcctgaatgagatcatttacacaaatcacttcaccatagctcattgtatttttcatagacaaatagtatcacttaaatagaatctagacttcaa

SEQ ID NO: 84708 - DNA, 276 bp, Homo Sapiens
aagaaaccctctccaggagacttctgcttacctctcagtgatcaaaaaccttttcaccacagttacttaccacgtcctaccgatccgcattctcgcaagtgtccttcactccatttactctactgcatttttcactgtatttctcatgccaaaacttgggcttctccaccagtctgcacacgttcatgctctcaattctcacagccatctatttcattctccactaaactgttagagggatttctgtagaaattaaagaaattcctatcactccta

SEQ ID NO: 84709 - DNA, 1154 bp, Homo Sapiens
aacgtttgtcatatcttgagacgtatcctgcagccatgtttttacgtgagtgttttagtcaaagtacatggtagacagtctttcacaataaaaggaaaaggattttttttcctccaaatgtacatttatcaacctaatgattgatttttttaaaaagagatttcgccccagtctggtttatgaaagttcattgccctaaactgtgctgattgtttttaatcaagttataaatttccaacctagatcatgtatctaccaactctcctgcattttccaaaaggcattgagcttaaatattagtcttgcttagagtaggttatccacttacatgctgcgctaaagccatgcctttgaaactccttgtttaaaacatgatatgatttttgtgggcagtttcagaaaagaaaacaaacaaacaaaaatcgaccctttaattattacttgcaactcaacagatctccctgccgtactgccttttccaggaactttacttcagggctgtccagattgcagttgtgccccgtgtatgtggatctagttcacagagtctttggaagccagcagtcgtgccctccgtatactgtccactcattttatgtagatttggtatcctcagcagccagtgttaacaccactgtcacgtagtgtacagattcatcttttatgtatttaaagtaatccatactatgatttggtttttccctgcaccattaattctggcatcagatcagtttttgtgttgtgaagttctactgtggtttgacccaagaccacaaccatgagaccctgaagtaaagataaggtacacatacattatttgagtaactgtttccttgggggccaatctgtgtatgcttttagaagtttacagaatgcttttatttttgtctataacaaacagtctgtcatttatttctgttgataaaccatttggacagagtgaggacgtttgccctgttatctcctagtgctaacaatacactccagtcatgagccgggctttacaaataaagcacttttgatgactcacaagatgaatccttttttcctctgtcccaattgtgtgtctctgttccaaacacattttaaatactcggtcctgacagtgtctttacctcatccttgaagaaataaaagtggaaaaaaatcttaaa

SEQ ID NO: 84710 - DNA, 447 bp, Homo Sapiens
  misc_feature (183)..(183): n is a, c, g, or t
gttggttctgggttggggcacactctaatatttaatcagggcatttacaagtttgccttagctttctctttcttcttgcactttgtgtaaggactagtcaaagttgaaagcctgtggtcttatcaggtcttttccaaccatgcatcctaccctgggtatgtgtaggttccctgttatatgtgnagaactttttaaagcattgattcccaaaacaaaattctcattcccagcttttccttctagattttggtgtgtttattattgcctcaattgttcttttttgtcccaggaatcagtgctagttcttttgcctctcaatgtttttgaggaacacttccctgccctgagagaattctgagttaggtaaaacataggaaagcccctctccttcagaaaacccacacagaagtcaaaacaaacaaaattccttgagaacaaagaccactc

SEQ ID NO: 84711 - DNA, 424 bp, Homo Sapiens
  misc_feature (263)..(337): n is a, c, g, or t
  misc_feature (341)..(349): n is a, c, g, or t
  misc_feature (359)..(359): n is a, c, g, or t
ctacaacctaatgaagatacacggcagaggtttccggagctacattggttggtttgcttccaggccacgtaagtcctgtccatcccgcatgcaatctctgctttcctgatttcccagcatcaggtagagaaggtgccatttgtacccccaccttcctggagctgcctcaagtgctcaaactcttgacatttccagggaactatggagccagctttccattttgcttcccaacacctcaatagggacaagagtcttttctttannnnnnnnnnnnnnnnnnnnnnnnnnnnnnnnnnnnnnnnnnnnnnnnnnnnnnnnnnnnnnnnnnnnnnnnnnngtgnnnnnnnnnattattatancttaagttctggggtacatgtgcagaacgtgcaggtttgttacataggtggccaaaccatggcca

SEQ ID NO: 84712 - DNA, 648 bp, Homo Sapiens
  misc_feature (436)..(436): n is a, c, g, or t
  misc_feature (440)..(468): n is a, c, g, or t
  misc_feature (499)..(547): n is a, c, g, or t
  misc_feature (576)..(576): n is a, c, g, or t
gtgttctaggcattggggatatagcagtgtacagaagtgggaaaatgttctaatggagaagacagcaaacaaagtaaatatataagatatgcaatataatagatagtgataattggtaaagatgtaagagcagaaagtaaattgtagaaaaccagatagtgatgcaaataatcattgtgtaatataagtgcaaataacctttgtcccatagagatgcagatgttgtgaggctggtaaacagactacaacccaacagttagttttattaccctatggcggcacttaaccagtttttatgtaatttagtaatcgtagtctagcatttttgtttgttctagtatagtctagcatttgttttttctttcagtgactacctgtcctatgcccctttgaattggctttctcctgttgttgactctcttatctatgagctctntgannnnnnnnnnnnnnnnnnnnnnnnnnnnngagacagggtcttgctctgtcagccaggctnnnnnnnnnnnnnnnnnnnnnnnnnnnnnnnnnnnnnnnnnnnnnnnnnggctcaagcaatccttctgcttcagcctnctgagtagctgggaccacaggcacatgccaccacaggtggctaagtctttttattttagtagagacaagtct

SEQ ID NO: 84713 - DNA, 681 bp, Homo Sapiens
  misc_feature (86)..(86): n is a, c, g, or t
atgataagagccacttctgtcattcacacagatgtgctcacatccgtgggtgttaagagcacactatcaagagctgaacacgtttncttgtcggcattcaaggtgtatccttggctacactcacagtggtgcttgccttccccatcactgatgcagacgtgctggcactggtgtgttccaagcacacaggggtccagcgcacagaaggtttcctggaatctagaggaaagtttctcaatgaccccataggtctccacgtagaaaacatgctcctctaggggctcactggccatcatcttgagggacgccatgtctgcccggtccacgcccacagcatagagctcaataccagatgcttgggcccgagccgccacctcattcacctggtcctggggcctcccatctgtaacaatgatggccaccttagggatgttagaagagggctctcgagcccctgcctccactgtgaaggcttcgtccattgctgtctggatggctaggcctgacatggtgcctgttgacaagggtgtgattcgacccacagcctgcttcagggactgcttatctgtgtaggcctggagttggaactcgatcttcacagtgctagcatagttcaccactgccacccgcgtgtcggctggcccaatgtccagagtgtcgatcatccgggaaacaaaaatt

SEQ ID NO: 84714 - DNA, 393 bp, Homo Sapiens
atttgcttcattcttttactactgtaaaccaagaggtgatttcatgcagagagaaatggaatagggcccaaatattccttctttttagataatcttattccttgttgatatatggacctagatctgtgagctagaacttccttattaaaattagattttatagtttaattggccttttgtacaaaatagacatcttgcccacttgatttccattatgaagaagggtgtccttgcatttcagctttctttccaaatcttgaatcaaagcttcttttgatccttgtatttcatgatcaggagttcttgggtatgggcttagcatttgcagtttggggatggctttgcatttattaggttggccagctgagggactgttgatagctttaaaaaggg

SEQ ID NO: 84715 - DNA, 511 bp, Homo Sapiens
  misc_feature (26)..(26): n is a, c, g, or t
agccttcccttgacctggaaacaacncaaaggctggtgattaagtagtggcactaacttaagtctttctcagactgggaaacaagggcagcacaacaattcagttcctgtgcagtgtttacattccaatgctcactgtaagtcttccgcaatccgggaagcaatcgcagaatggcggttaagctccagtgttaagtagtaaaagcctaacaccaccaaaaaccaccagcaaaagctggaacaggcaaatgggggaggtctcctcctatatgcaggcatcaatgtaaagatgtaaggattatgaaaacccagagaactatgacatcaccaaaagaaacaaacaaagttttagtaatagagctagaaaaatttaaagatctatgaaatatatgacaaaattcagaatagtcctcttaaagaagtttagggaatcacaagaaaatgtggatagataactaaatgaaattttgaaatatccagaaactagtgagctattttacaaagaaatagaa

SEQ ID NO: 84716 - DNA, 192 bp, Homo Sapiens
ctccaaggaaactaaatccataatgtggaatatgtgttgtgttcaccaaacaactcagatcagcagagtctggatagaaaaacaataaagagaataaatgtagggagtggtgagagggtccaactcttatcagatatcatgaagtgccagaataaaacaaaattcatagaggaatagagactcaccatgaag

SEQ ID NO: 84717 - DNA, 222 bp, Homo Sapiens
acgagggaagaatcctctggggctttaagaaattagaattaacaataaaagcatgaactataatagtgtaaaacaatgtatgcatatgataggcatatatgcataggcctagaaacaatgacaccctggcaattagcacagctgttcttgtttgggttttaaataatagtcacagctaaaagaaagtaggactccagagctgtgtaaagatgaatttggata

SEQ ID NO: 84718 - DNA, 497 bp, Homo Sapiens
aaggaaaaggaggtgttgcttcagccacatcttaaaggaggtaacacttgaccagaaggaaaagggatctggatgttcttggtacagaaaccacaagttcatatgaacagaagtgtcaacagctgaaaaagtaaggggacaagtagtcccatgggactgcagccaaatgtacaaggttagcgaccagataagactctggacgggtcagcaggaggggccaggtgatggatgccagaccactgggtcctggggtactttaccacattgtgcttcctagtccccaagatgtggtcctcaaaaaaacgaaaagtcacggtcaaatgaatttgggagatgccaagttaaagctctcccaagcagggaaatatagaggaccaaaccccttttgtaggaaaaccctagaaaacctcacttggggaattctgctataagcagtgaaacaccatggaaggattctgagctgttgacaacagattttcatttagaaattcattctg

SEQ ID NO: 84719 - DNA, 323 bp, Homo Sapiens
  misc_feature (87)..(115): n is a, c, g, or t
caaagatatagattgatgatgagaatgccatcacaaagttatttgtacaaaaataatttagagatcatctgaagagccaacgaaaannnnnnnnnnnnnnnnnnnnnnnnnnnnngctgtgctgtacagatatatctttataatgtgcttgatttatatccaaatgaaacaggctacagaacagtattacagagtaatcctattttggcacttatataaatacacatatataggaaaatgtctggaataaaaatatttcaaaatacttacctacctctaaaaggtgagattaagaataacctgggccaggcatggtggctcat

SEQ ID NO: 84720 - DNA, 280 bp, Homo Sapiens
  misc_feature (146)..(146): n is a, c, g, or t
  misc_feature (188)..(188): n is a, c, g, or t
  misc_feature (216)..(216): n is a, c, g, or t
  misc_feature (251)..(251): n is a, c, g, or t
gtactgtgattacactgaagcaggatatttccctgacccctttgtgggacttgagacaggggtaccttgtttacttcagcctgccactcttcaactcctttgcttggaaaggaacgccttgagcaaatggagccatggggaacttnggggttgagttgagtgctgggaaccagcttgggctgcttttngcacgggcagggagttgaactcttgttncaggctcttcaagccagcatcccagggcgggggtnccttcaacttcccaaaagcccccttaagg

SEQ ID NO: 84721 - DNA, 444 bp, Homo Sapiens
  misc_feature (11)..(11): n is a, c, g, or t
tacattggggncattctgtgcatttatttatagttacaaaggcttagctttggaattaccaaactgacctcttaattcattagtgttgccaggaagggggctgaattgtgaggtctcctggggctctatgatccaatgctactgcaactgctttcgtgattacccggcacaggatttgcactttccatatgtggattttctgtccctaggaggaatccaacctttctcagatgttagtataccattctcagtaactaacgggagggtccaagacagagactttgagaagagctatgaagccgagaagggcagattcttccatttagaaaaggaagaatccatttaatacatctccaagtctgggtcctggcaggataggatcaaaagcccaaagactggcgttatgttagttctctaattaatctgcttacataaaaacaagga

SEQ ID NO: 84722 - DNA, 675 bp, Homo Sapiens
gtagcacttgaaagtttttaaactaatcttctaccagaaatggaagtgaaatttcatagtgaggttacccaccaaacaccacaaggagtgagagggctagaagagagaattccagccaagcaagggcacaaaggaaagcaatttggccaagcagtgacatttcctcatttgtttgcctgattatatagagaatcatcttggagagactccaggaagtaaaatacaaaaagatttgggaactctccccagacgtcaaaaaagagcaggcatcctcatcaacaggccatatacatgaagtaggcctctaatactaagatctcctacttttcctttggtgtgagggaaggaaagctttgaaagtgaggctcactcgggggctaacaatcattaaagaatacaaattaccaatttaaactagcctagactttcactgtaagtaggcaaagacaatggaaaatgactaggtgttataaatgacaatcaggagctgtaaaggagaccaagcagtcctcaaaaagagttaagtcaaggcaagaaagcacagaaaactttttaaaaaattctaatcaacaacctcagtgagagttaacagggatttaaaaggatattacattgacaaagcaagagaaactgctacagaaacagcagatgacaagaagagaaaataaacagcag

SEQ ID NO: 84723 - DNA, 413 bp, Homo Sapiens
  misc_feature (34)..(34): n is a, c, g, or t
  misc_feature (44)..(44): n is a, c, g, or t
cggggcccccttttccttgaaggtaggcccctcntaaaccctangttctcccctctttccccttggtgtgaggggaagggaaagcctttgaaagtgaggctcacctcgggggctaacaatccattaaagaatacaaattacccaatttaaactagccctagactttcactgtaagtaggcaaagacaatggaaaatgactaggtgttataaatgacaatcaggagctgtaaaggagaccaagcagtcctcaaaaagagttaagtcaaggcaagaaagcacagaaaactttttaaaaaattctaatcaacaacctcagtgagagttaacagggatttaaaaggatattacattgacaaagcaagagaaactgctacagaaacagcagatgacaagaagagaaactatacagcag

SEQ ID NO: 84724 - DNA, 653 bp, Homo Sapiens
  misc_feature (565)..(573): n is a, c, g, or t
attttcatctgctcaggattgctaactgatgttgaagatcaagcagccaaaggaatccataaatgataacataaaagattacgttgggaagaatttggataccaagaactatgattccaaaattccagagaacagtgagtttccatttgtctcattaaaggagccacgagttcagaataacctcaaaaggttggacacttttggaatttaaacaactcattcatatagagcaccagcctaatggaggtgcatcggttatccatgcctacagtaacgaactctcccacctgtctcctatggagatggagaggtttgcagaagagtttgtgggtctagtgttcagtgaaaatgaaaactctgcagctttctacgtgatgggtattgttcatggggcagctacttatttacctgactttttagactatttttcatttaattttcccaattcaccagtgaaaatggagatattgggaaagaaagatatagagacaacgactatgtccaattttcatgctcagagtctcactgtactccagcctggacgacagagtgagactccatctcnnnnnnnnngaaagaaattcatgataatgctatcctctaggtgggaaggagaaaccaaaaacaaatatagaagacttacaaattaaaaa

SEQ ID NO: 84725 - DNA, 503 bp, Homo Sapiens
ggacgagggtaaacggaaacagccattaaccgttaatgctaggaaactctgttgtaaaagggagcagagtaattggcaacagctaagagggatcttaggatctttttaaagatgggggatatttataacatccttgtatgatggaaactaaataaaagagagttttctttccttcctccaggtttcagggctctgaatcctatttcaattgtgagaatgctaaaaaggtacatctgtgatgtgacaggtaagatggggtcctttggagagtcgcctgcttcttctttctggcttcagggagagagagaatagcaagggcaaggctcgctgggcagcttaaatgtggaactgagtttgaagaacatgttcttcatgcaccctcacagtccacaaaatgactttaaccatctttttattcccctcccactgttccctcagctggagtttcagcagttaaagatataaagaaaaatgtttaaattctaaagagcagaaagttcaat

SEQ ID NO: 84726 - DNA, 550 bp, Homo Sapiens
aattctcttgcttcccaatccaaggcaattccaaggtggtggtggacagcggggacaacagtcacatatactctgagggaaaggaaccttcctctctgatcagaggagctctgatctcaagatgtaggagcaaacatctgctgcttttttcctctgtctttctgcctcttggcccgaaatgcaagcagtcacaggaagtacgtcctattctaatgtctcatctctgtggctggaaaagtaaaaaggggaaccccagggaaggaggaagtcatggagaaatcgacttacacaaatataaccaattgattcttggtaaaggtacaatggcaattcaatggagaaagattgtgttttcaacaaaggtgctggaataattagacatccatatctaaaaaaggaaacctgacctaaaacagatcttacagaaatattaattcaaaataaatcatatatatctaaatgtaaaactataaaacttttaagagaaaacataaaatctttataacctttagttagtcaaagagttcttggaaatcacccccactgtact

SEQ ID NO: 84727 - DNA, 632 bp, Homo Sapiens
  misc_feature (123)..(123): n is a, c, g, or t
  misc_feature (236)..(244): n is a, c, g, or t
  misc_feature (250)..(527): n is a, c, g, or t
ttcctgcttctcccactctgaaaggtgcctctgctcctgagcatactcggtgctatcctctgggtgaacaggccttggaggactccttggacagagtcatgaacaggagaacttgcaacaccncatgcccattggaaccctgtccagagacacagcccctctgactgcaaaaaggacttctgaccctgaccctcatatttctttccatcttatcaccggatactttttaaaagttnnnnnnnnntgtagnnnnnnnnnnnnnnnnnnnnnnnnnnnnnnnnnnnnnnnnnnnnnnnnnnnnnnnnnnnnnnnnnnnnnnnnnnnnnnnnnnnnnnnnnnnnnnnnnnnnnnnnnnnnnnnnnnnnnnnnnnnnnnnnnnnnnnnnnnnnnnnnnnnnnnnnnnnnnnnnnnnnnnnnnnnnnnnnnnnnnnnnnnnnnnnnnnnnnnnnnnnnnnnnnnnnnnnnnnnnnnnnnnnnnnnnnnnnnnnnnnnnnnnnnnnnnnnnnnnnnnnnnnnnnnnnnnnnnntctcagataaacaaataaataaataaaatacatcccatacacaagagtatgtatatgaggtatctatacagttcaaggactaaaaataaacatgtgtacccacca

SEQ ID NO: 84728 - DNA, 533 bp, Homo Sapiens
gcccccagtgtactcccactttccccaccaggaccataaggcagagcaacagggttgccctggggctcctccgctgttcccaggagtccatgctggggccagctccacacccaccatctaaagagccagctcctccatccccgtggcccagtcttcttttctccatgatacttatcgcaacctgaaaccatcatgtctgtgtatccgtgtacgtacactgactaccccctcccaacacgaacaacactcagggacagcagggaccacacgactattgaatgcccagccctagagtgacagctggcccacaacagtgcacaggaaagatttgttagaaggacgagtcagtcaaatcagtggcttttgaagattaagaaaataaacatcttactatgatttttgattaagaattaaaaggtgatttcctggcccccttgaaaagcactgggcacatcttaatgaatgcacaatgtgtccaatttgatgtgaaacaaaactatcaatttggtgtcagaaccacaagttgtgtggca

SEQ ID NO: 84729 - DNA, 522 bp, Homo Sapiens
cagggggattccagctgtatgtgttcaggttaactgtgtcaagacattccaacacatattcattcattctaacgtatgacaaaaacgctagcagatcaagtatgtatgtcctatggagggaccctgtgatacatagcagtgctgagcatccttaaaatgtttttctaactgatgcattggtcttgaggtcaacagttatgacatccctgaggacacctccccttgactatttcaaaatgtccagatctactttcaaagaactcctatagctgtggtgatcaaacacctatcattctcatggcagccccgagtccccaattttctgcccactgctgacacaaaccagcatttcttaaacttgtcttttgccttctactatcatttctgtcatactgggtatctcttgtactagtacttaatattttcctttaaatcacattttaaaacttaactaactctaagcaataatatccatgaaaacatggattttatttgctggttatattgtatagctattaaaat

SEQ ID NO: 84730 - DNA, 617 bp, Homo Sapiens
atataccagggaacttctgcttaagaggcttctatgtaatgaaattctcttgaaaacagagaaactatttcctgtttattttctaaattgagacgtcactttttaaaaattggtacctgtaatttagccatttcctactcagcaatgtctcatttaaactattatttgtttagcgtgtttcaaagagcagatgtaagcttgagcccatcctctgtcctatgactaagtcgatattagcaggggttaggactgttagttttccagttcctactggaggcaaattctttgtttaccactgttctctgtatttcaaaagcacctggaaatcaataaaatttgttattcagaacaaaagccttctctatatatcagtatttcccaaaatgtgtttggaaatataggtatgttaatccaaagggatggtacgaggctgtattatttaaggaaatggtcccatagcttagcatgtttgggaaatccatttcttttctgcatttctcagattctttattacattaatataaattgggaattttcaaatattttttctgaccagaaggcatactttccatccatcatcttgtccatggaacacactgccccacaacacaaattaa

SEQ ID NO: 84731 - DNA, 697 bp, Homo Sapiens
  misc_feature (546)..(609): n is a, c, g, or t
ataattgaggaacttacctgacacatcattatcacccaaagtccatagttcccattagggttcattcttgcacttgggtattctgcagcttttggacaacataaagggacagggatccatctttgcagggtcgtacaaaaaagtttcactgctggaaaaatcctccgggggctctgccgttcctccctccctccccctaagtcctggcaacccctgatctttcttctgtctcccgggtttttggcttttcaaaatgttggactcacacagcgtgctatacagtaggtagcaacgttcaggttggctcttaataatgtttcctctgcatcttttcaaggcttgcttgaaaaggctccatttttagtactgagtaatagtccattgtctggatgtcccatgctgtgtttataaagttaccccatcagatatttgtgtgtgtggctgtggcggtcagtgcgattagtcctgtcatcttgcttggaaacaaaagcctcagtgcatgtgcattcttgaattttattgaagaaatgagtttgttgttggtgnnnnnnnnnnnnnnnnnnnnnnnnnnnnnnnnnnnnnnnnnnnnnnnnnnnnnnnnnnnnnnnnttcaagcaattctccggcctaagctctgagtagctgggatacaggtgccggcacatggccggcaattttggattttagtggagacggg

SEQ ID NO: 84732 - DNA, 440 bp, Homo Sapiens
  misc_feature (56)..(56): n is a, c, g, or t
  misc_feature (294)..(310): n is a, c, g, or t
  misc_feature (328)..(387): n is a, c, g, or t
  misc_feature (419)..(419): n is a, c, g, or t
  misc_feature (430)..(430): n is a, c, g, or t
caaaaagagtaacgcggataattcaagcgacttattcccaactgatccaggcagantcgtttctgataaggacagagggtcctcaacgacttctgtggcccaggtccgttctggtttgcctcgcccccaaggctgggagaaacccgcctatggaggctctttcccctccaaggacccagctgtcccctttaaagtggcacgatcttggctcattgcaacctctgcctcctgggcttgtaccacagcctcctgagtagctggggattacgggtgtgtgccaccgacctgactaannnnnnnnnnnnnnnnngagacggagttggcttcnnnnnnnnnnnnnnnnnnnnnnnnnnnnnnnnnnnnnnnnnnnnnnnnnnnnnnnnnnnnggggttcaaggaattctacttgtctcaggctnccaagtagctngggattacag

SEQ ID NO: 84733 - DNA, 554 bp, Homo Sapiens
  misc_feature (17)..(17): n is a, c, g, or t
aggctggccacagatanacgctttaacatcttcagcaaaccggtggatatgaagaggtttcagattatcttgaagtaatcaaggaaccaatggactttatcaacagtaataactaaaattgataaacataattacctgactgcaaaggatttcctgaaagatattgacctcatctgtagcaatgctttagagtataatccagataaggacccaggagataaaataattaggcacagggcttgtaccctgaaggacactgcacatgctatcattgcagctgaattagatccagaatttaataaactttgtgaggaaattaaggaagcaagaataaaaagaggcttatcagtaacatcagaacaaataaatcctcatagtactggagctcggaagacagaaactagagtcgaagaggcatttcggcacaaacaaagaaatccaatggatgtgtggcacaactctgcaaataaatgtgcatttcgggttcggagaaaatcaaggcggagatcacagtggggtaaaggaattattaagaaaaggaaagttaataattt

SEQ ID NO: 84734 - DNA, 318 bp, Homo Sapiens
tttggccattcagtggccaatctcctctccaactgtccccagccgaactcttctccgtgttcacacactcctcttctctccgccaggccattctgccattctgctcttctgttcatctcatctgcttgtggagcctggggtttggggtttatacgggtacaggataggggagcatggcaggtcaaaaggcaacttttgggggcgaaaacaggaatgcctgtcctcatttagggccgcaggtttccaggcttgagggtgggcctttgccagggaactgccctcttctatccagtatttccctgtctcctgtgtgtatca

SEQ ID NO: 84735 - DNA, 582 bp, Homo Sapiens
aatactatacaagataaagacttaaaacaaactttggcaattaaggcagtataccaagatgcaaatgcctggttggaatggatcaaatattctttccgcacattaaacaaaagcaatcgttatgcttgtgcacatggcaggccagaggcccagattgtccccttttcactaaggtagtcatccagttgaccaggtgtgggctgcatgatagctctttttcaggattctacagcctggagtaataagtcgtgccaagctctctccgctatgtcctgaagtctggcaccctgcgagtcagcccctgagggccatccagcttccatctcccaacactaagttcacttcatgtctctaacaacagggagaaaacttagcattccttggagacctgaagggatgcagtgagcttaagaattttcaagagcttatcaatcagtcagcccttgttcatccccgagcagatgtgtggtggtattgtggtggacctttactgggcactctgccaaataactggagtggcacttgtactttagtccaattggctatccctttcaccctggcatttcatcaaccagaaggaaa

SEQ ID NO: 84736 - DNA, 572 bp, Homo Sapiens
  misc_feature (148)..(148): n is a, c, g, or t
  misc_feature (487)..(487): n is a, c, g, or t
  misc_feature (517)..(517): n is a, c, g, or t
  misc_feature (548)..(548): n is a, c, g, or t
agaatcatagaagttaaagacttaaaacaaactttggcaattaaggcagtataccaagatgcaaatgcctggttggaatggatcaaatattctttccgcacattaaacaaaagcaatcgttatgcttgtgcacatggcaggccagacnaggaattgtccccttttcactaaggtagtcatccagttgaccaggtgtgggctgcatgatagctctttttcaggattctacagcctgggagtaataagtcgtgccaagctctctccgctatgtcctgaagtctggcaccctgcgagtcagcccctgagggccatccagcttccatctcccaacacttaagttcactttcatgtcttcttaacaacagggggaggaaaactttaggcatttcctttggggaggaccttggaaggggatggcagtggaggcttttaaggaatttttccaaggaggctttatccaatccagttcaggccctttgtttccatnccccgaggcggatgttgttgtgggtatttnttgggtgggacctttacttggggcacttttnccgaataactgggagttgggcatt

SEQ ID NO: 84737 - DNA, 422 bp, Homo Sapiens
ctgcctcttcccagaaaggaatttttctaatttgtggattttgagatgtttgtctacttaaataagctatctgtaaccccccaccctgaaaaaacataactttactgagacccttaaatcaaatgctccgacagctttaacagtagctccctaaaaacagttttcactagtttgtctgtgaatgaagtacaatgtttaggtgagttagcaggtttatttcatagaggatgatgacaaggagcttaagtttctcttgtagtatcaggcagcaaaccccttccatgagcccatggtttggaatagggaatggcctgtgaggtattgcttaggagagtgaattgatacttaacctgcagagactacattatggagagcaatcattcagtgctccaagaaagcacagagtaaaactaccccctctt

SEQ ID NO: 84738 - DNA, 477 bp, Homo Sapiens
agaataaggtcccacattaacaaaagagaaaacacacagagattgattggctctaggttatatagctaactggtaacaaaccaatttttattaaaattaattttaaaaatttaacttttaaagtttatcttaaatgatgaacatcgcttgtgtttttcttgcatgtagtttctattttaggagaatttgcctaggggtagttctgaaaccaagtaaaagtaattggattatgaaggtcttctaccttaaactagctgtcaactttaaactcaaccatttaataattaaatttaaactttacatttgtttaatttagtaatgtttcttcacattaatcaatttttcaaattaggaaagtaataaatgacaaaaatggaagaacatttattaaagatagaaaaaatgtttaatggtcttgtacatataaatggtgttaatgttttggcttcattttaataaagctttcaaaaccatagt

SEQ ID NO: 84739 - DNA, 626 bp, Homo Sapiens
  misc_feature (127)..(127): n is a, c, g, or t
  misc_feature (174)..(174): n is a, c, g, or t
  misc_feature (227)..(227): n is a, c, g, or t
  misc_feature (239)..(239): n is a, c, g, or t
acgtaaaaaaacccagaggtgctacgggtggcagtatataccagccactttccccccaagtgggcaagtctgctgcttaactgtgcatatatgtgtgtgtgcatgcacatatgttgctcatgcttgnatatgaagatgtgctctttgatcatgtgggtcttgacacatgtcatnttcagcattaaattcccatcacctagcagaagtgttcccttaaagatccattnccgcttggctgnttgtgcataaacattccattgggattgattgcttgtgtcaaattaattttttcccttcccaggaacagtgtctgccatgtgcaaaatggggggaaatccccaggcctctagccaaatgcaaagctcagatataggggtaaagtcaggcttgggtcaagaattgttctagataagccacagagcctgcaccctggatacttaatgctaacctttcccaatatgctttgtgactgtttcctaggcaacaggaaaaccctaggctgggtagagatggctgcatatgagaggcttgggttttttcagcatcagctgcagtaccacatcctcctctatatcttccttttcctgctttgtttaaaaggctgcagaggctgggtgttgtggctc

SEQ ID NO: 84740 - DNA, 440 bp, Homo Sapiens
  misc_feature (20)..(20): n is a, c, g, or t
  misc_feature (25)..(25): n is a, c, g, or t
  misc_feature (37)..(37): n is a, c, g, or t
  misc_feature (387)..(387): n is a, c, g, or t
aaataaggcccttaggtacnaaatnccccctcccccngggcaatccccaaaggtaccaatatattccatccaataaagctggttaaaaatacctgggtcccagaaacaaaagtgcccggaccctatgaatgctgtgtcatgcaaatgcatttcacttttcgtcatgtgtgcaaccctatgaataaaacagaataacgtaggcattttcataagaggacaattgtgaactacatagtaaatcatattgtgctcagatatcaacttccaataattatttaggaatagctgttgaattcccaaaactaaaaacccaacaatatgaaatgcgtctgagaaagaaagggatgtatcatgtcaactaaccctacaaaagatgcttttcacaangaagccttaatttgagtgtccagattgagactgagaatgtaaataaactgaaa

SEQ ID NO: 84741 - DNA, 509 bp, Homo Sapiens
  misc_feature (11)..(11): n is a, c, g, or t
aggaaaatatngttataaacatgtgctattgtgcatctcttcccaactccattcaataacatcacagccgggagcttgaaatcacaggaattgcaaacgctagggctcagcccctccagcaggtggctaaatgtttaccagcaccccacggccagacagagatgctgctgactctagagttgtgggctgtccagtgccgtctgccttttctgtgctggggaagggtaaacaggaagcagggtgtgaatcagcatggaagagcacaacagcctgggagaagcaggtgacaaggtggcaagggtgaagtagggaaggtgggagtgcagcccagcccgggatttatagggattgacactgcttgaggattttacagaccacagaggctctgtgctggcaactgagcacttttgactcaactctgtaccaagggccccagaataaaaaagaacctgtaaacacggcttgaagagtctcagaaacagcctgagaatgggacccaagtcagcact

SEQ ID NO: 84742 - DNA, 202 bp, Homo Sapiens
tttatattgaccaacggtttattaaataatatgcttttcagaggaatataaccaagaaaaaaatttacttcttgtccaaatttgtcttcatagtttagtttggaaatcccttctgaaagactcaatgctttaggctagagtttctttaagagtttttcaactttccttgttaaccaagtaagggaaaactgtgttatgctag

SEQ ID NO: 84743 - DNA, 451 bp, Homo Sapiens
tagaatgaagtttcagactaggagccaaaagagtcatacttcccagttttattgctgggccttttacccacacttcattcccttttgtctttcttgcttggaaggtctgttcagggggatgagaactggtaggagatggaggtggaggagggggtagcaatgagtggaacgcattgatgtgagtcctgctcctattgtgtcatcctgagaccttattaaaaagaagcaagaccctagacccataatcaagcacagcatcactaatgatgggtcaaccggatgttgtttctcctgatgtaaggcaatagagtttatacggcatacctagctagtatgtattctggctgaaaatacccaacaggagccaccaccaatgatttatatttaatctaacctacacataagaaataaagaagataaataaactaaatgaaatcactggaaaggaact

SEQ ID NO: 84744 - DNA, 458 bp, Homo Sapiens
  misc_feature (336)..(336): n is a, c, g, or t
aattctctggattaccaggcagagactgttgttctctgttcatcctttcccccacacaaatggagtctctctctgtgtctctgttatgaattacttggactggggggtggaatgacacaagcacccctgtgtccaaccttcaactaagtactgcactgagtcacacctgaagccagcatagcactgggttttgcttaaggcctgttgtaaccactccccggctactgcctatgtttgttttaaggccctgggtctctacaatcagccagtagtgaagccagccaggcctgtgtctttcctttcagggctagaagttctcccaggcggctccagcangtgctttgcaaagagccaggggctagaataaaaaatcttagcagtctacctagtcttctattgtaccctatggctaagctgacactcaaataaaaggttaatttttaagtttggtacttaaa

SEQ ID NO: 84745 - DNA, 411 bp, Homo Sapiens
  misc_feature (16)..(16): n is a, c, g, or t
ctctccaaaggaggangttagggttaactgtcaattatgttggaatatttgggaatagtttgggatatttgaagagcatgagaaaagtttgaaataagaactatagagaataggagaaacttgaataggaaaacattagatgcctggtcagaatatacatttctttcaaaattggagaccaataaagtgatactagtctgcctggttttaaaatcttctaaatattcagcagctttggtgtaggggcaaagagacaaataaatgcatccatgcattaaggtttttcgtttgtttatttttccagaagaatgtgatagacctcaaaggagagagtgtattgggcagataaaatgatgcatcataagtatgacgtcatacttactgaaagaaaattcagagataaataaaaag

SEQ ID NO: 84746 - DNA, 525 bp, Homo Sapiens
  misc_feature (350)..(350): n is a, c, g, or t
  misc_feature (425)..(425): n is a, c, g, or t
  misc_feature (444)..(444): n is a, c, g, or t
  misc_feature (457)..(457): n is a, c, g, or t
  misc_feature (479)..(479): n is a, c, g, or t
  misc_feature (492)..(492): n is a, c, g, or t
aaaaaaaagagaactttcaatctgataaaagggtgatgcatagctatcaaagaaccttctgctataacaatcccagaggctgggtggcttaaacaacaaacatttatttctcacagttctgaggcctggaagtccaagatcagggtgccagcatgattggttcttggtaaaggttctcttcctggtttacaacagctatcttatccttgtatccttacacggtggaaataagggagctctggtctctttacctctgtctggttttggttggagttaggctgatttaaagtccatattaaagagcaaaatatcaagaatagcaaaaacaattttgaaggaacaacagggantctttccctactgggatataaaaatttactttcaatttaatactcaaggataggtataggtataggacatataanccatatatacccgatgggnaccggaatagganaactccggacctttgttttatnatgggttcccttnttacctggaccattaggtgggccttaccaggtc

SEQ ID NO: 84747 - DNA, 602 bp, Homo Sapiens
  misc_feature (61)..(131): n is a, c, g, or t
gtcaatggttatcaccttcaatagtttcaatatgtcccccaaagttatgtgtttgaaactnnnnnnnnnnnnnnnnnnnnnnnnnnnnnnnnnnnnnnnnnnnnnnnnnnnnnnnnnnnnnnnnnnnnnnncccattatctcaggagtgtgttggttataaaagcaagtttggctccctcttttcctcacacactctttttcccttctgccttcacctttgccgtgggtggacacagcaagaaggccctcatcagatgctggccccttggtcttgaatttccctagcctctacaactaagccaaataaatttctgtttattataaataacccagtctcagatattctgttacagaaacacaaaatggactaagacaccacccttttccaaaatctctccttgtgatggctccctttactaacctttcttttagctattccctttatgatagtttcttaattttttctatcaaaagctaaatatggcacacttgttctttacagaaaaataaagatattttaaacaaaatactagggccatggtatgtaataaaatttgaaacaataatttcaaataataaagattgaaaatgcttaacccag

SEQ ID NO: 84748 - DNA, 457 bp, Homo Sapiens
  misc_feature (355)..(355): n is a, c, g, or t
taatacaacaaaaatttattctcacagttctggaggccagaagtacaaacttagtatcactgggctgaaatcaaggtgtggacaagagcttgcttcctccagaaactatagggaaacatcccttcctggcctcttccagctttgtgtggccgctggaattccttggcttgtggccgaatctcactccaatcttcaaggccagcaccatccactcagtctgctctgtcttcccatggccttttcctccatgtatttgtgtcaaatctccttctgcctccctcttacaaggatgcatgtgattgcatttaacaccaccagagtaatccaggaggtaatctcttcttaggcaagggcncattgatttaatcacatcttcagaggacttttgccacataaaggtaacattcagaagttccagggattaggacctaatatctttggaggccattaataaacc

SEQ ID NO: 84749 - DNA, 515 bp, Homo Sapiens
tgtgaatcacagtgacctgaacattactcaatgccttccttattaaaaacatgaaatcggtgctaagaatctacttatttcttaaggaccatacagcatgtggaaaggattaaaaaactggatgaagtattttttaatacagcaattttcccaacaagggaaaaatatcccccagtaacccgtttcatcccttcctacccaactcggagattatgatctccattataagaaagcacttaacaaacttgagggattaaagaaacatttccctgcaatttcaaaaatctttaccaacgtatcccgcagcagtgaattaatatccaattacaattcaaaatagagagagaatgttcagatgaacctttttaaacaaggtaaataatacaaccctgattagtaggcagagcagaaaaccatcaacaaaagctcaaagcaaacagaagttatctccccttttcagcttgaaaagcaaagtaacagaaatgtttgataacagaaagcggtgtactttccca

SEQ ID NO: 84750 - DNA, 518 bp, Homo Sapiens
acataccctcaatatgatgtgttagaagtggccctatacctctgcattcttcttccttgaaatgcataactccagtctaatcatgagataaatatccttgaaacccataactctagtcaaatcatgagataaacatcagaaataccttaactgagggcccagtactcctcaaaattgttaagggttatcaaaaacaagaaagtcctgagaaactgtcataacccaagaagaggctaaggagatatgacaactaaatgtaatatggtacccctggatgggacccctggaatggaaaaaaaagacattaggtaaaaactaagcgaatctgaataaaatacagattttagtttataatgggtttatcaattatgacagatgtacgatactgatgttggatgttaataatacgggaacctgagtgtggggtacacaagacctgtatactatcttcacagtttttttgtatgtcaagaactactctaaaatatagtttttaaaataaatcaaattgaaaaatt

SEQ ID NO: 84751 - DNA, 420 bp, Homo Sapiens
  misc_feature (240)..(356): n is a, c, g, or t
cagttccccccaaagaaagttggaaaatgaagtttgtcctctgtgagttgaactaattagatccacaagtaatgaaagcagtattgtgttgtagttaagagcacactctagaaccagattgcttagtttcaaatcctggttctgccttttattatctgtgtactttgggcaagttacttgccctttgtgtgcttcatttttctcatctagaaaatggagaggccaggcgtagtgctcatnnnnnnnnnnnnnnnnnnnnnnnnnnnnnnnnnnnnnnnnnnnnnnnnnnnnnnnnnnnnnnnnnnnnnnnnnnnnnnnnnnnnnnnnnnnnnnnnnnnnnnnnnnnnnnnnnnnnnaggcatgatgcgggtgcctgtaatcccagctacccaggacctgaggcgggagaaacacttgaac

SEQ ID NO: 84752 - DNA, 129 bp, Homo Sapiens
gagatgatgaaaatgttctaaaattgtcgtgatagttgcataactctgtcattataccaaaaaaatcattgaattgtataatttaaaaagtatgtgaaatatatctcaataaaatattttaaaagacga

SEQ ID NO: 84753 - DNA, 137 bp, Homo Sapiens
gagtctagtagtattactgtctgaaactggtcagtttttaggggcaacttcaaaatgttatttgtgtctttcttgtaaatacctgccaagattaatacccaatcaaatgccatgacttggaaatagggcaaatattc

SEQ ID NO: 84754 - DNA, 422 bp, Homo Sapiens
  misc_feature (11)..(11): n is a, c, g, or t
  misc_feature (81)..(81): n is a, c, g, or t
atttcccgagnaggaaaggtggttttaaacctgaagtggtaaggaggaaaggattaatggccccctaaatggatttttttntccccccctaatggtattagggcaaaatcccctcaatgatggatacctgctcctcaaagaatataaaattgatgagaaaaactttgtggtggttatggtgacccaaagtaagtttcaacctcattctgtatatctttatgcatgtaggtctttttaaaaatgatgatcacaagtccacacaatggacacagtttatacacatccatagtggtgtacacttaactactatgaaaggtttttaagaatttaccttaagtgaaacataaagttattaatgttttacattaattacacattaaactataatatagttttaataaaattttatgtaaattaaaact

SEQ ID NO: 84755 - DNA, 428 bp, Homo Sapiens
tattccatattttccgagtaggaaagttggttttaaccggaaagtgtaaagagaaagattatgcccttaaatggatttttttttccccttaatgtattagggcaaaatccctcaatgatgatacctgctctcaaagaatataaaattgatgagaaaaactttgtggtggttatggtgaccaaagtaagtttcaacctcattctgtatatctttatgcatgtaggtctttttaaaaatgatgatcacaagtccacacaatggacacagtttatacacatccatagtggtgtacacttaactactatgaaaggtttttaagaatttaccttaagtgaaacataaagttattaatgttttacattaattacacattaaactataatatagttttaataaaattttatgtaaattaaaacaaaagaaaaaaa

SEQ ID NO: 84756 - DNA, 1465 bp, Homo Sapiens
  misc_feature (114)..(114): n is a, c, g, or t
  misc_feature (191)..(199): n is a, c, g, or t
  misc_feature (235)..(235): n is a, c, g, or t
atagagagatatagcgcgcgcctcgtgtgcgacgtgaaaaacacagtggtaggtggagtattggcgccccgcgggtgtactataagtcctcgagcttttataatagtggggggnttttcaatgccccggataagagccggatgggggcttttttgtcttatatatactgtcgcgcaagggtggatgttttnnnnnnnnntttcaaaaaaggcgggagggtaccttccgccccgtnttggattttgatgtgacaccaaggggggcgtttcggtgtgtgaaaaaattctggagtgcttgtctatatatagggggggtgtgggccaaagagttagacgattagaggagttctggggaggggtgtaggcggtgtgaggggtcccccacaatttgtaagcgagggggggaattctgcgttccaagggtgcgtggtctcgcccaaaatattttgtccttgaccgtgttaagacggagcgatttggaaaagccccccggtgttcgcatacccaaaaatttttaccgcgacccttgacggtatttggcccattttttggtcgaaagaaagaggggggggtagtgggccccgagaaagaaagaggagtttccacgcccgggagtggtaacctgggtccaggtatgagctggtttgggggctagggtggccgcacttaggtggtcttgctggctggactttttgctgccagggttttgtctttggttggaggttgcaactagccaggtggcagattcaggaagaatgctgtcggggatggctggaagtgagggatgcaggtgtggaagtgggggccaaggcagggacaggggttggagcctgagccacagttgtggtggtggaggaagtaactgctgtagtgctggcaggagctgactgctgagttgtagctggtgctggtgtggacactgctttgggtttggtcaccataaccaccacaaagtttttctcatcaattttatattctttgagagcagtatcatcattgaggattttgcctgcataaattaatttttgacctgctactggaaaggcatctttccccttttcagattcaatcttctctttcagtgctttcaccgtctcctcggggtcaatgtctatcttgaaggtctgctgctggagggtcttcagggtgacctgcatggtgccgccgcgcagctcggctgccgggcctgcgccgggtgctggccgctgggcggggtctgtggcctggcggggccccggggtcgcccgcgctcctcgcgctctggggaggaaggcggtgggggtgggggcttgtcacattcgcccagcggagcggcctctcccccagcccgtgccccggaccgcgccgctgcctccgcgactgcggccttccccgcgaactcgggccgccgtgcttcctcacgcgccgagcgccagccacggagtctgcagaaggcgcgagggggtcggcgagacaagcagggaatc

SEQ ID NO: 84757 - DNA, 518 bp, Homo Sapiens
  misc_feature (41)..(41): n is a, c, g, or t
  misc_feature (57)..(57): n is a, c, g, or t
  misc_feature (73)..(73): n is a, c, g, or t
  misc_feature (81)..(81): n is a, c, g, or t
  misc_feature (88)..(88): n is a, c, g, or t
  misc_feature (116)..(116): n is a, c, g, or t
  misc_feature (146)..(310): n is a, c, g, or t
ttaattggagactaaagtctaactctgtaaccccaggctgnagtgcaagtggtgggnatctctgctggccctnaaaagccngcccccnggggtcaatgcccgttctccctgccctnaagccctcccccaagtggctggggactgcnnnnnnnnnnnnnnnnnnnnnnnnnnnnnnnnnnnnnnnnnnnnnnnnnnnnnnnnnnnnnnnnnnnnnnnnnnnnnnnnnnnnnnnnnnnnnnnnnnnnnnnnnnnnnnnnnnnnnnnnnnnnnnnnnnnnnnnnnnnnnnnnnnnnnnnnnnnnnnnnnnnnnagaactatggaaatttctaagaaacaaaaacccaaacagtccttcttattcagacttctttgtaaaaccgaccaaaataactctctctttttcttaattgcttgaagtgatactcacattcagttccactagttgtctctaagcagtggtataaccagaataattggagtcccacctgaaagaaaagatggataaatttaactacctt

SEQ ID NO: 84758 - DNA, 442 bp, Homo Sapiens
  misc_feature (9)..(24): n is a, c, g, or t
  misc_feature (293)..(293): n is a, c, g, or t
atccaaaannnnnnnnnnnnnnnncgtgcacacgtgtacatatgtgcttgcgtataggattggaatctggttgaaaagtatatgcatcttcaactttggagaataatttgacattatttaataaaatataccaatttaaacattactgtcagagtgtgagagttttacattcctcaaacatttctagtgtttcatttcttagcattatctaaaatgggattcataaggttctagatggttagcagctgttagggtcagcaatttctccggccaactgtagggaggacttgggnatgtgtaggaaaacatttattctagcaaatgaacaggcttctgatactgtgtggctcaggatctatgactaacttattctggtataaagccacccagaattcatttgaccagtttacttaaaaactagcaaatttttaggccaggtgcg

SEQ ID NO: 84759 - DNA, 427 bp, Homo Sapiens
tctttccctaagttatcgcggacatctttgcttaattcatgggctttttcctaattctccttagtccttctagaacacaggtcagcagatgtttatgaatccagtccccgtgatctgagtctaggtcccagtggggattgcatactgggaacagcttgctcactggtagggaatttgtccctttcttcagctgtcattctatcatttacttgactaagataccaggtatctccaaattctcaggctgcagctaaagccgcattcttttcattaaaggccatggtttgatctaacaatagcatgacgtctctccaagtgaagtcgaagatttgccctaggtctaccttggcaagatcaggtctaccttgatctgctttaaatcagagagagagaaggggacatatacccgggttgtgctaaattccct

SEQ ID NO: 84760 - DNA, 443 bp, Homo Sapiens
ttcctaaaaatgccccaagacctcccaagactaggtgagatctgaagtaatgaaatgccctcccatttcacctaaaggcctgaaattgtccctgactgcctcaggccccacggcccaagaagagcctttcaagctgtgatccccaatacttgtggctgctgtgagaataaggaaagcagtctaggcctccagtggaaggatcagatgtttgcccttcatacctcagagagccttcatccaagtaagatgggtggtgaggagctgtggatgacagcatgaaggatgaggactgatgcagcagccataattagattataggtttccatgggatgtgccatgactgcttacaaattggcccagccatggaattgagttatcaactaagctgattcctgaggcacagatcatcctgtcctccacaacatgattaaagactacaaacc

SEQ ID NO: 84761 - DNA, 411 bp, Homo Sapiens
  misc_feature (20)..(20): n is a, c, g, or t
  misc_feature (65)..(65): n is a, c, g, or t
caccgggatgatatgggaanaaatggatggggttaaggtaaaaaggctggatccacagatggggntccccctcaaggttaaaatagtttaaagtgcccagaagaaaaggtgggcacccagcgaattaagaacccatctttgaatggtccccttggttaaatacttaacttttgtcatcagtgtctgcatttatgaaatgaagaggaattcactaatatgctacgtgatcttttgtttgtcatgaaaagagttactgttgtgtagttctctgttccagggctgcctctgctccacaaagcactgagaagcagtggccctgtacaaccatactgcctctcaacactgtgtaataggctaacaccgcccagcgaaccttcctgggagatataaaatacataggtttaggctggc

SEQ ID NO: 84762 - DNA, 462 bp, Homo Sapiens
  misc_feature (245)..(245): n is a, c, g, or t
gcacgagcctatgttaagcatcttctatgaagtatactgagctaggtgctaaagactaatataatatgcaaggtatattcataaacactttagacagagcatatggccagaaaagtcaattggagcctgcaagggagtttcttacataatgttgatatctttttccacatccttaagctttcagttaagactaatttaatagtgataagggaagatagggtgggggagaaaggagacagaggatnggaagcagaaagttctgttagaatactgccagtacttacatgtaaccatggtgtgattttggacttgttcagattaaaatgccagtgtaatatctagttggagatgtctaaagcaggaagttggaaattcacaatctgacaaaagtagtctgaactatagctatagttatggaagccacttattgagggttgataacagttacattataatagatca

SEQ ID NO: 84763 - DNA, 708 bp, Homo Sapiens
  misc_feature (186)..(186): n is a, c, g, or t
  misc_feature (486)..(486): n is a, c, g, or t
gaattcggcacgagattccaagcagtggggattgtatgtgcaaagatcctacagtgaaagagagggtggcacttaggaagaactgattgtttttccttgtggtcaaggtagagttctggaatacagtgagaaacaaggctgaaggagtagacagtatttacattatagacattttcctaagccggnccattctctgtccttacattagattgaggttttctgatagctaaatcctgaatctcagtgcactggtaggctcatctagcctaaattcccacttaatggggtaaaaagaatttccaactggggccccatcccaatcttcaaaactgtttataggctaaaaaactgctccttactcagtacttaatatgtaccaggcagtgtagtaagcctttaaagagatgaattcactcctctaatcattcgtttacatgctggaatatgatcttgctttaaactgccagtcttgtcgaatcagggtcnatatatttcaagggaccttaaatcagctccccttgttaccacagtccctggattccctgctgcctgtgctctgattaaggagactccagcagctctgcaataaggattgagttgattaacatctggttgaaaatctcttcgcccatatgaacctgagacaaagccatccaaagagtaattgatggcaaagacccgcagttgtctctaagatggcaactcgag

SEQ ID NO: 84764 - DNA, 584 bp, Homo Sapiens
aagggctcgagtgattctgtaaagggcaactctcccctttcccagggacccacagcccatctttgtgtatctttttaaggccagattgagtatcccactcatatataaaactcggtagggttactagcagttagacaaagactatgaaacggtaggaaaaaagaaaaatcaacctcactgattattcacatattgcattatgagtgctcttttttaaacctaaagaataatttatattatttctgtagaaaatcaaatgaacactgtctactcataaaacctaaaggtcacggcacatgtggtttcactttccatcttgagttagcttcagcacacagagaccccctccaaagggtcagtgcaggagagcaggcagaaggcaggcctctctggcccagtgtgtgtctcctttattgctgtagaaatctcagccttgcatacccatttcctcacgacttggaggccaggcgaactgattttcatgggaggattgagtttttcttcaatttgatatttgaaaataaatacttctccaatgatatgaattatgattttcctgttcaaaaaccacctcgagagccgca

SEQ ID NO: 84765 - DNA, 487 bp, Homo Sapiens
agaaacatgaaaatgggccaccacaggatatgtttgattcccccaaggaaaatgaaaaagccttcagtaaaactgatgaatggatagatataagtgtctctgacaggagtgaatgtacaaaacatacttctgggaataatttggtttcaccagatacagactacagagctggttcttcgtttgaactctctccatctgatagctctgatggaacatacatgtgggaatgaagaaggcttggaacccattggaaatgtccatccagttgggagctatgagtcctttgaaatgaacagcatagtatgtatggatttatatactcttggaatattttgtttaccctactatagagagacttgtgatatgattgattttgttaaaaatttatgaattaactttactactttgagaaatggaaattcatatttgttaagagcctataaaatatctgactctaatatgaaataaagcatggagaatttaaaaa

SEQ ID NO: 84766 - DNA, 430 bp, Homo Sapiens
ccaggcccattcttaatgggggaaacactgaaggtgtccaaatgaggaaacactgaaggcctgcaggttaagtaaggagcaagatgaggacattcattatcaccattgtttgggaggtgcaagtaagtgtagtaagtaaggtaaggcaaaaaggattatggatgttgaaaaggaagccatacatttatcaccatttccaggaatagtgatacagtagagggaaagaacattcctgagaataagatgaaagtttgaagtggaagaaagagaggttgaaacattttctgtttggtgccctctgtgtttttggtgaatgaaggctttttgctgaaagtggaggggatgagggtgaaattgggcaactaagaagaataggaaggaaagttatggagaagccactgtgatggacaattatgtggaatagtccaag

SEQ ID NO: 84767 - DNA, 1156 bp, Homo Sapiens
  misc_feature (592)..(606): n is a, c, g, or t
tcccgggatgagcgccttctgcaggtgtttttcgggcgaacctcttcaccttgtgtggttcggcgtctccttttgtgtattaacccggacttttccgactggaaaataggggtttgggaagcagcgggagtcccgtgagcgtgaacgccgggctttgcaggtcttcactcatccttccctgccaaggccctgacaccttacaggctgaccttaaacctgccttgcttaaaaggaggtttttgtgttgttttgtggcaagtacattttggaaaagaagggccttgttggaagcccaggttgtggcatcgcgggtggctgcgggccaccctgtccgtctgtgagcatccctgctcgcagatgtggctgcaggcagttgctctcgggtttccttccaggagctgggaagccggaggaaagctgcggttcctgttccgccgagcttctgaccttcctctgcaggacgtgtgctactattactatcgtaaaagaacacccctgtctacctcccacaaagttagaagcaaagggcattctcgagggaagagcaccctttcacaagtgacatgttttccttggagaacattaaaggggnnnnnnnnnnnnnnngggttttggccccttctgcccaaatatacaaaccattttgtattcaaggcctcctccatcccaccgacgagactttagaacgaccttcaaatgtttctcctctcccctgcgcggaaaaaacatttttcttcctgggctcaattccgtagggcctaatggacaagcgccaaaagaaaaaaccccctttaggacaaacttcggaccgaattcactttattctctacccgattctccccccccttgcccacttacaatttcgccccgggggcgaacttccccctctttttccgcctcttccaacccccctataataattgccttccccgcccctcccgtcttcccaaaaacgaaaattcccgtatatccctcccctttcccccaatttggataaaaaactctcccccccttttacaccaattgcccaaagattttataatactactcactccgcgccataccgtggcggggataaccccacaccccttattcccctccccgccgctcagattaacttcctccctcattccccagccgctatgtttatgcacca

SEQ ID NO: 84768 - DNA, 1035 bp, Homo Sapiens
caatgacccaacatctcttcggaaaaacctcagcatccagagatacgctgtcatccctttagtcgaccaactcgggcctcattggctgggttccccactgtgacacactgcacgccctcatccgggactacagggagaagaagaagatccttctcaacatcgagcatcgcatcatgttgcggatggctccggactatgaccacttgactctgatgcagaaggtggaggtgtttgagcatgccgtcaataatacagctggggacgacctggccaagctgctgtggctgaaaagccccagctccgaggtgtggtttgaccgaagaaccaattatacccgttctttagcggtcatgtcaatggttgggtatattttaggcctgggagatagacacccatccaacctgatgctggaccgtctgagtgggaagatcctgcacattgactttggggactgctttgaggttgctatgacccgagagaagtttccagagaagattccatttagactaacaagaatgttgaccaatgctatggaggttacaggcctggatggcaactacagaatcacatgccacacagtgatggaggtgctgcgagagcacaaggacagtgtcatggccgtgctggaagcctttgtctatgaccccttgctgaactggaggctgatggacacaaataccaaaggcaacaagcgatcccgaacgaggacggattcctactctgctggccagtcagtcgaaattttggacggtgtggaacttggagagccagcccataagaaaacggggaccacagtgccagaatctattcattctttcattggagacgggttgggtgaaacaagaggccctaaataagaaagctatcccagattattaacagggttccgaggataagctccactgggtcgggacttcctctccttgatggacccttttgggatggttcccaccgccaaagttgaagctggctccttccaaaaaaagcgggacttttccccatggaaaaccccctctggcccaatgggcttttaat

SEQ ID NO: 84769 - DNA, 1040 bp, Homo Sapiens
cagtaactattacggttcctaaggtagcgaggcctgggtggcgaattcggcacgaggctcagacagaagaatctaaggtcaaactttacaaagataatcaaggaaatcttaaaggagacggtctttgctgttatttgaaaagagaatctgtggaacttgcattaaaacttttggatgaagatgaaattagaggctacaaattacatgttgaggtggcaaagtttcaactgaagggagaatatgatgcctcaaagaagaagaagaagtgcaaagactataagaagaagctgtctatgcaacaaaagcagttggattggagacctgagaggcgagccggaccatcccggatgcgccatgagcgagttgtcatcatcaagaatatgtttcatcctatggattttgaggatgatccgttggtgctgaatgagatcagagaagaccttcgagtagagtgttcgaagtttggacaaattaggaaactccttctctttgataggcacccagatggtgtggcctctgtgtcctttcgggatccagaggaagctgattattgtattcagactctcgatggaagatggtttagtggccgtcaaatcactgcccaggcatgggatgggactacagattatcaggtggaggaaacctcaagagaaagggaggaaaggctgagaggatgggaggctttcctcaatgctcctgaggccaacagaggccttaggcgttcagattctgtctctgcttccgaaagggcagggccttctagagcaaggcatttttcagagcaccccagcacatctaaaatgaatgctcaagaaactgcaactggaatggcgtttgaagaacctatagatgagaagaagtttgaaaagacagaagatgggggagaatttgaagaaggtgcttctgaaaacaatgctaaggaaagtagccccgaaaaagaggctgaagaaggctgccctgaaaaagaatctgaagagggctgccccaaaagagggtttgaaggcagctgctcccaaaaagagtctgaagaaggcaatccc

SEQ ID NO: 84770 - DNA, 430 bp, Homo Sapiens
  misc_feature (82)..(82): n is a, c, g, or t
aagggatgggggatgcaagccaggtgggcgtgaagaggctgaccgcatctggttaggcaggacggtgtcactgaaacttggnaaacgccggtgtaccctgctgaaatattgaagtcagttaggagtagagtctgcttagcacaagagggatacaagccctctctcacagcctccccaagggagaatgcaatgaaactttggaaaatgtaaccaaacacagtctcatctttgtgtctcctgattcagctgtgcaaatcagttattcactcttctgaagtgatctgtccttttaggaccaattcctcaacagccatcgtggttcagtacctcattatcatcataaatatttgacttagcaagctagatggtgaaacagtgaagattatatacaatgttttaaaaggcattctgtgaccatttttaagagtta

SEQ ID NO: 84771 - DNA, 380 bp, Homo Sapiens
cttcagggggacacaggggacaaggaggagctattggcagagcgctcggttcctgcaagttccaacttctgctaaaattggttaattggttcctttgcatgattcagggcacacaggcttctctgtccacaaaatttgctcgcctgcacacccagagaaatggacttggcttggtttttctgaacttttgcctctgcggaatcagcagtggacgtgtgagctggggcctctgtccctgtcatgtgaggaggtcaggcaggacaagcaggaagcactgggcaatgagtcaggaggcctggtggggagcttgggtgagtctgttttcctctctggacctcagtcttctcctctggttgatgtaataaaatcctacaaactga

SEQ ID NO: 84772 - DNA, 382 bp, Homo Sapiens
ggggcggcggcggcttccgcccttcttagctgcgctgccggaggaaacggaagaaggagcaagctatggaggggaacagggatgaggctgagaaatgtgtcgagtatcgccgggaggccctgaacgccggcaaccgcgagaaggcccagcgcttcctgcagaaggccgagaagctctacccactgccctcggcccgcgcactattggaaataattatgaaaaatggaagcacggctggaaatagccctcattgccgaaaaccatcaggtagtggcgatcaaagcaagcctaattgcacaaaggacagcacatctggtagtggtgaaggtggaaaaggctataccaaagaccaagtagatggagttctcagccttgaaaaaaa

SEQ ID NO: 84773 - DNA, 690 bp, Homo Sapiens
tgactgaggacagcatagacgacaccttcctcccagtgcctgaatacataaaccagtccgttcccaaaaggcccgctggctctgtgcagaatcctgtctatcacaatcagcctctgaaccccgcgcccagcagagacccacactaccaggacccccacagcactgcagtgggcaaccccgagtatctcaacactgtccagcccacctgtgtcaacagcacattcgacagccctgcccactgggcccagaaaggcagccaccaaattagcctggacaaccctgactaccagcaggacttctttcccaaggaagccaagccaaatggcatctttaagggctccacagctgaaaatgcagaatacctaagggtcgcgccacaaagcagtgaatttattggagcatgaccacggaggatagtatgagccctaaaaatccagactctttcgatacccaggaccaagccacagcaggtcctccatcccaacagccatgcccgcattagctcttagacccacagactggttttgcaacgtttacaccgactagccaggaagtacttccacctcgggcacattttgggaagttgcattcctttgtcttcaaactgtgaagcatttacagaaacgcatccagcaagaatattgtccctttgagcagaaatttatctttcaaagaggtatatttgaaaaa

SEQ ID NO: 84774 - DNA, 295 bp, Homo Sapiens
agatattgtgaggagtaaaaaatctgccctttaaagaatatcaattcattacttcaaatagtatcgagatacttgggcaggtagtggttttctgtgtgtatttttgtttgaaatgcttacccgtaacatctgggagcaggaatactatgcctctgaaacttttgaactctcacagaagcttgtttgctggctgggagaagctagcggttacacttattaatgaatagattgttttaagggatatagtattcttcgtttaagaaaaatttaacttgcaccttttgaccttacattg

SEQ ID NO: 84775 - DNA, 454 bp, Homo Sapiens
tcaattaatgcacgcataatatagagacagaagtcattgttaccacttctcttattttgcctttgacaagtttatattgagcacggttatcaggcaatgtgggagattctggagaaccaggtttgcctcataactagggttaccatatactctagtttgcctggggcaaccctgatttatgcctgttgtcccagtgtgattattactagtgtaatttttcactttgagaagtgtccaggtttggaggataaattatctttctaataattgatacccttctcataacctaacgggttccttttagtattttatctgggttaaaattaccagctgtaatttggcagctctaataagactgcagcaatacttatcttccatttgaacagattgttacttgaccaagggaagttaatagcaaaagtaactgcagggcccctgtatgtcatgggcaaaa

SEQ ID NO: 84776 - DNA, 804 bp, Homo Sapiens
  misc_feature (543)..(543): n is a, c, g, or t
  misc_feature (567)..(567): n is a, c, g, or t
  misc_feature (596)..(596): n is a, c, g, or t
aactaaactaaatggtcaatactgccatctctcttgataatgacaaagtgtttgcacaggatgcctacaggtgtgtgtgtcgctcctcactaatggatccgtagtcatatagctgtgagaggcactcctgggttgaaaatgaaggcaattatcacattactgtcagtcctgactgagtcacctctagagtttatgctttcagccttaatagaaatgaagacaattatataaaatcctcacataattgatcacaaatgtgatcacagccactcttgactaagattggtgccggccaatctgctgtgagggaatgaagagaggagaggaacttgcgatgtcagtccctgattctactgcaagtttccaagcacatgaaatcccattctagctttggagaccccaatgtgacaagaatctccctgtgctttaaatcatctctcacccatgctaagctgtgatccctcaccaagtctatgaaacctggaaaaggagtgagagtgcgcggggtgtgtgtgtgttttatatattcaggggtcgttccanaaggggcaaactattgctctttangtcctgggccagggaggggaaggggaggncactgtctgctcctgaaagctctgtggggagaaagggctcctgcctgactcctcgtgccgaattcttgggctcgaaggccaaattcctatagggagtccggtaaattcgaatcatgtcatagctggttctgtgtgaaattgtttccgtcacattctaaaaaaatagagcggaagataacgggaagctggggtgctaaggatgagctac

SEQ ID NO: 84777 - DNA, 1053 bp, Homo Sapiens
  misc_feature (43)..(77): n is a, c, g, or t
ccgggaacgagcgcagcgagtcagttagcgaggaagcggccgnnnnnnnnnnnnnnnnnnnnnnnnnnnnnnnnnnncagtcgacggtaccggacatatgcccgggaattcggccattacggccgggtcttttctctatgaaaagcaactgagtacaattgttatgatctactcatttgctgacacatcagttatatcttgtggcatatccattgtggaaactggatgaacaggatgtataatatgcaatcttacttctatatcattaggaaaacatcttagttgatgctacaaaacaccttgtcaacctcttcctgtcttaccaaacagtgggagggaattcctagctgtaaatataaattttgtcccttccatttctactgtataaacaaattagcaatcattttatataaagaaaatcaatgaaggatttcttattttcttggaattttgtaaaaagaaattgtgaaaaatgagcttgtaaatactccattattttattttatagtctcaaatcaaatacatacaacctatgtaatttttaaagcaaatatataatgcaacaatgtgtgtatgttaatatctgatactgtatctgggctgattttttaaataaaatagagtctggaatgctatatttggtaaatattttaacagacaaccagatgccagcatcagaagtctgtttgagaactaagagaacagaaacatctatcataagatatatctatcttaaaaacacaaggtcactatttttactgaatatattcgcttggataactcataccttaataataggtgtgtttcgacatatcgcttcctcatttcgaaatgaactcacattctaatccagcaaattttcaaacactactgctgatacacttccaatctgtctactttttattcgaattttaccccattaaaatctttaactttactgactttactaatgttcagatctatgcctcggaaacgcccacgcttccaggaatttccacacctcgaggactctattttccaattcaaggctaaaatcactaaccccgcttcaac

SEQ ID NO: 84778 - DNA, 1286 bp, Homo Sapiens
  misc_feature (1212)..(1246): n is a, c, g, or t
acaagggttgtgtagtgggggggtttttgtttgtggacaatcactttaatagatgtccataggtagttcatatgaatgcttaagttacaaaattagctgccatggtccaaatgtatgggactttaggaaagcttttcttactcaaaagataactaagactatcaactttgatttctaaaatgtaatttaaaggtttgtaaaacaaggccactactataattatataatattaaagtaattaagttttatgttagttattttaataacaacttcatgaactgttaaaaatattacatttgcatctctcagtttacatatttctgtattaacttggagaaaaacccatgtgaaaagtttccatgcagttacaaaggcagcagcacatgctgttttcacagcaacttgttattgcctcagaacaggcctgcactaaagcatcaacaaaaaatacccaccaccccactcccaccagaaaacccaacccttacccatccccggcaaaaattacctggtacaagcaatgacctaaaaatgctttcttggtaagaagcatttataaaatgcagagatctgaacaagctaagtgctcgtgcagatacatgggcctctcctccaagagttggttccgcaagaggtggaaagaactctcaatagtttaggaaagctcattttcaaaagtatacttacacatattcatggccatttctttgaaagaacatacccagcctcaactgtggaaaagataaaagcagagggagaagcaacggcacacagccataatatagagaacagagcttctccatgaacatccaccaggctgcagcaaccaagaaggaaaaaacatttgtgatttcacacagaccaatgatcttacctaggtgaagcattaatttttcatgcatttgttactcaagaaaataaacatacaaccacttaaaatacagcattcacgttgtcactggttcgtggtatcaggtaaggaaaaaatgatgctcctgtccctagaattttccatgtacatgtcagtatcctaatgcctacagacttcctattaattttgttatcagcatctcccacctaaaaacatatactacattatgttctgggtccctgaaatttcattactacatacagtgttctaatttttactttttctcaagtcccggccgtaatggccgaattcccgggcatatgtccggtaccgtcgactgnnnnnnnnnnnnnnnnnnnnnnnnnnnnnnnnnnncgccgcttcctcgctcacatactgcgctgcgctcgtcgtt

SEQ ID NO: 84779 - DNA, 394 bp, Homo Sapiens
  misc_feature (76)..(84): n is a, c, g, or t
taaaaatatatacttttttattgttaagaaacattttcataaataagtacttatttcattccttactgaaatggcnnnnnnnnnactgacccattgaaaccatattggctatgttcaacataactagagatatctttggcgttttcctcccttagcttcatatcttgtagaacatctcgtacaaaaaaagtagatttacagaaaaacatacatataaatcacgtattaatccccaaatgtagtaaataacatagcaaaaactttatcaaatccatttcatgcacaagctggacagatctgttatatacaatctctatatgcatctgcagtgttttataaattggtgctttgacattaaaaaggaggtttacaaaaaggcccctcttgtactatc

SEQ ID NO: 84780 - DNA, 686 bp, Homo Sapiens
cagtcgacggtaccggacatatgcccgggaattcggccattacggccgggtgagatgatattgtacttgtataggattctagcaattcataataaatatgtaagactaggctttactgtcttatgcttatggacattgtatatttgtattttatgaccaagtagaccaagtcagaaagatctctctcgagcgtaccataaacctgcagagagaagtctcgaaaggctccaccaggtaccaagggcagctgcttttcctgtcttttgtgcatgggcgacccattacagtatgagataagattgagttctgatgcgttaaacggaggtggcagaaatttgtcaagaaggccttatccatttcgattgtgtgacagattgaaatttattgtttacattggggaatgtatctcaaatttttaaatagaagagtaataaacagactttaaagcaaatattaagatttttactcattcaaggcaagtaaatgaatggaattatctgagctctatggcactggttgtttagagtgactgatgaagtgcaactttcaaaaacatttttgatgacatcaccagcctactgcagaagtgcagggcaccagtaaacaccatgtattattgaagatgaatctgtttgtatgtatccttgtcaaatatattctataatgaaataaaatttgaaaagtgg

SEQ ID NO: 84781 - DNA, 477 bp, Homo Sapiens
aacagacaatagtaaaatactacagtcagctcactatacacacaaatcatgaacagcagcttttcattaaggtttccaatatcttactcatttaccaactcgaagaatttaaaagaaaaaaggtacagcaggctctacccattctctctctcttgctctcacaacacatttatagctgtacatccagaccgattatacaggcatctacagaataggtacagaaaggaattttgtaaaaatttccatacacataatccttcaatgtctccatttgtaggagaattttacaaatgaagacacgacagcagggtcatctgtattcgatcatctcctgcaaacatggtaaagggtgaaccattgaacttcatagctcagtccatctcctcagcattttccagaatcaagcaaaataacaacagcaaaaccacgccacagtgaaacctaccaatccaaaacaaaaccacacacacagaaaca

SEQ ID NO: 84782 - DNA, 856 bp, Homo Sapiens
  misc_feature (20)..(20): n is a, c, g, or t
  misc_feature (34)..(34): n is a, c, g, or t
  misc_feature (579)..(595): n is a, c, g, or t
gacattgtggtcctggaccnagaacagtcctatnccacccagagaccactattttaccaactccctcctgtcaatttttgagatgatcttggatcttcgctggacttatgttctttcctacaagcccaagggaggttaaagtggtggccaaaggattttgtagtgccaatgggatcacagtctcagcagaccagaagtatgtctatgtagctgatgtagcagctaagaacattcacataatggaaaaacatgataactgggatttaactcaactgaaggtgatacagttgggcaccttagtggataacctgactgtcgatcctgccacaggagacattttggcaggatgccatcctaatcctatgaagctactgaactataaccctgaggaccctccaggatcagaagtacttcgcatccagaatgttttgtctgagaagcccagggtgagcaccgtgtatgccaacaatggctctgtgcttcagggcacctctgtggcttctgtgtaccatgggaaaattctcataggcaccgtatttcacaaaactctgtactgtgagctctagactctagatagtnnnnnnnnnnnnnnnnngtctacatattttgtaaaagtaaactgataattgtatgataagtggcactgtaagtaaatagcaaacaccaaccagtgagtgtggcttttcttatggatagaagtaaaggagcagacagagattccttgatagccatcaaattgcaagtcaggttaatgacagtccaacaagaagccaaactttacggatctttgttagcagccccaatgttctttctacaataaaacatgtggactatgtccagtgaggtctccgactca

SEQ ID NO: 84783 - DNA, 307 bp, Homo Sapiens
taagaccattatcagtttatctgctcctgctagaaaaggacatactttttgtcaatttacattaacaaaggctctgctactccccatttactcgctgcaatgaaaactggtaagccaagggtaaagcttaagtatcagggactatgaatttagggtagaagtgaaaataaccaaagtggaactaaatcccctattctggagtgcaactgagatcaagtaaacttcgctggactttcttcttaactataaaactattaaccagaaggtaaagtcacacaattttacctcccaacaaacttttaaaaaa

SEQ ID NO: 84784 - DNA, 411 bp, Homo Sapiens
  misc_feature (35)..(35): n is a, c, g, or t
  misc_feature (80)..(80): n is a, c, g, or t
cctgcggaaaaaaacccgtgggacttgatgtcaanaaaacccaatctgtggccggcaagccgaagcctctctttggggtnccttatttaaaaatccttttaaaacatgggaggctttgacggacaggaaccgggggatccggatgggcttctcccaggatcacttggaaaaggtagtcctctgtgttcatgtccgggttgtcggtgatgatgtcgaacggggagcgcccggccatcatctcaaacatgaggactcccagcgcccaccagtccacgctgaacccgtactcctctccccgcaggatttcgggggcgatgtaattcggggttccgcagaaagtgctcgttgtgtcaccagggcccaggccttccttgcacatgccgtagtctgtgagcttgatgtgcccgtccg

SEQ ID NO: 84785 - DNA, 1248 bp, Homo Sapiens
atttcgatagtaaagcacattgtacaccagcttatccttccacgcatgacacctcaaggccagaggttctccttccgtgaagactctgctggagacctgcagtagtggccagcctctgtggatttccagctgtatggggtcacttcgccctgagagacctctctggcacctgtattcaccactgtcattgacactggcagaggtgattctgtagctgggggtcgaggtctgagtggctgtgccattgagaaaccactgtgtggagctgctcccaggcagatggagcacctcacagtgcaaggttacggtttcctcttggaacacgctgacccatggaggctgcaaagtgatcactgcctttgtggtgtctacttggagattacaagaagaaaaagaaaaagatcaagtggagtaaaggggagggctctgagcaactggtgaggcttttgtggatagcacaagggaaaaatacatatttagatttatttgaaaaataggcaagtggaaacctacaaaagccagcctttaagagtgtcctcctgctgcagagacctctgttcattgttattaaatcctcatctgggtgttgggaatctggggctcctgaggattaaattactgatgtaggttttttctgttgggagcaatgaagcagggttttagacttgggcaagccaagcggagctgttttccttatcctctgagctatactgtctctgagagtacattgcagggcttcagcagcttgtacattggaaacggaggttcaaactcctctctttgaagccttcagtatttgcctggctctttctgaggagaaaaaacccactctgctttcttgtaaaggggactggtttaggggatgttgggaaacccagcagactacttcagtgtcagcagactactttagtgtttgtgcaattctggccctttcctgctgttatatatacattcaggcatttcgctcagaggaaagagctcattcagaaaactttagaaagaaagcttacaatcatagtttttatgaaaatcatgctctgaatatgggagattttacataatttataaatctttcttctttctctgctttccctatatgctcttctgcaggttaataggacccatcctttggaagtaggaaagtggcatagaaggagaagctgagttagagatcactcacccacttgcccatcaactggaacccaaaggagcagagttgtcaagaaccacatgttgtctccaagctgg

SEQ ID NO: 84786 - DNA, 1078 bp, Homo Sapiens
ggagccaccagcagaacctcttcaatatcttgcatgttacagatttcactgctcccaccagcttggagacaacatgtggttcttgacaactctgctcctttggggctggctactactgcaggtctccagcagagtcttcacggaaggagaacctctggccttgaggtgtcatgcgtggaaggataagctggtgtacaatgtgctttactatcgaaatggcaaagcctttaagtttttccactggaattctaacctcaccattctgaaaaccaacataagtcacaatggcacctaccattgctcaggcatgggaaagcatcgctacacatcagcaggaatatctgtcactgtgaaagagctatttccagctccagtgctgaatgcatctgtgacatccccactcctggaggggaatctggtcaccctgagctgtgaaacaaagttgctcttgcagaggcctggtttgcagctttacttctccttctacatgggcagcaagaccatgcgaggcaggaacacatcctctgaataccaaatactaactgctagaagagaagactctgggttatactggtgcgaggctgccacagaggatggaaatgtccttaagcgcagccctgagttggagcttcaagtgcttggcctccagttaccaactcctgtctggtttcatgtccttttctatctggcagtgggaataatgtttttagtgaacactgttctctgggtgacaatacgtaaagaactgaaaagaaagaaaaagtggaatttagaaatctctttggattctggtcatgagaagaaggtaatttccagccttcaagaagacagacatttagaagaagagctgaaatgtcaggaacaaaaagaagaacagctgcaggaaggggtgcaccggaatggaacccagggggccacgtagcagcggctcagtgggtggccatcgatctggaccgtcccctgtccacttgctccccgtgagcactgcgtacaaacatccaaaagttcaacaacaccagaactgtgtgtctcatggtatataactcttaaggcaaataaatgaactgacttcaactgg

SEQ ID NO: 84787 - DNA, 983 bp, Homo Sapiens
gtgtcacttgacttgatgcccacctgccagatagtaaaggacattgaaaccagaccggaggtggtaactggaggccaagccacttgaagctccaactcagggctgtgctaaaggacagtgcccatccttctgtggcaaccttcgcaccagtataaccccagagtcttctccttctagcagttagtatttggtattcagaggatgtgttcctgcctcgcagggtcttgctgcccatgtagaaggagaagtaaagctacaaaccaggcctctgcaagagcaactttgtttcacagctcagggtgaccagattcccctccaggagtggggatgtcacagatgcattcagcactggagctggaaatagctctttcacagtgtattgtgatattcctgctgatgtgtagcgatgctttcccatgcctgagcaatggtaggtgccattgtgacttatgttggttttcagaatggtgaggttagaattccagtggaaaaacttaaaggctttgccatttcgatagtaaagcacattgtacaccagcttatccttccacgcatgacacctcaaggccagaggttctccttccatgaagactctgctggagacctgcagtagtagccagcctctgtggatttccagctgtatggggtcacttcgccctgagagacctctctggcacctgtattcaccactgtcattgacactggcagaggtgattctgtagctgggggtcgaggtctgagtggctgtgccattgagaaaccactgtgtggagctgctcccaggcagatggagcacctcacagtgcaaggttacggtttcctcttggaacacgctgacccatggaggctgcaaagtgatcactgcctttgtggtgtccacttgcccatcaactggaacccaaaggagcagagttgtcaagaaccacatgttgtctccaagctggtgggagtagtgaaatccctaattccggccgtaccagccg

SEQ ID NO: 84788 - DNA, 726 bp, Homo Sapiens
  misc_feature (29)..(29): n is a, c, g, or t
  misc_feature (60)..(60): n is a, c, g, or t
  misc_feature (104)..(104): n is a, c, g, or t
  misc_feature (145)..(145): n is a, c, g, or t
  misc_feature (215)..(215): n is a, c, g, or t
  misc_feature (232)..(232): n is a, c, g, or t
  misc_feature (353)..(353): n is a, c, g, or t
aaaaatggtgaacttgctctgtggcccangctggtcttcgaaatcctggactcaaacgancctcctgccctgggcctccctaaaagattcaagctgcttttggnatcaaaccggatcgcctttaaagaccttttaaactcgaaanacctgtcaacatccttaggatccgcgaaggactgaaacagagtttctgaagcgtccctcggcgcaagtanccgctccacctcccatntcgcgctaccaaccgcgccgcagccccaggagtcgccgcggagccagcgtcgccctccagctgttgcgcgtcggaagccggaagcagggactgagcgacagactaggaaacgccggtttcntccggggctccccagcgccccacctttaccccggaggccgccctcttccatttgctcttgggcgtcagggcggtaccccactccgctcgaccctttggatccactcgcacttcctcccgtccagagtcaaaggccccggaagtgacgtttacgcgccgcgcgtaacgtgcgttcgctggcggtgccgggggcggggcgagcaggagggtgggtgtgaggcgggagctggccgcggagcccagacctacccgggcgaagcgggcgagcggtggtttggacgccggcggagacgcgggcgaggtacggagcggacggactggggctgagagctgctcggctctcagctacaggagcggggcggcggggcgtctcg

SEQ ID NO: 84789 - DNA, 2217 bp, Homo Sapiens
  misc_feature (848)..(873): n is a, c, g, or t
gaaaatgaacttcagtttcagattaaggaatgtcatttaaatgctgacactgtttccagcaagttgcaaaacaacaatgtttatactattgccaagaggaatgtggaagggcaggacatgctgtaccaatccctgaagctcactaatggcatttggattttggccgaactacgtatccagccaggaaaccccaattacacgctgtcactgaagtgtagagctcctgaagtctctcaatacatctatcaggtctacgacagcattttgaaaaactaacaagactggtccagtacccttcaaccatgctgtgatcggtgcaagtcaagaactcttaactggaagaaattgtattgctgcgtagaatctgaacacactgaggccacctagcaaggtagtaactagtctaacctgtgctaacattagggcacaacctgttggatagttttagcttcctgtgaacatttgtaaccactgcttcagtcacctcccacctcttgccacctgctgctgctatctgtccttacttgtgggcttctccatgctgtgccaatggctggctttttctacaccctcttttgagtgtagtttggtattttgtaattgagagctcatttcaaaagcagaaaaagacaacaaatattaaagcaaggaaaagtgtaactgaaacactgcactttactgttttatacttttgtacatatgagaaatcaagggattagtgcaaccagtagaaagcattgaaatgactgtcattaaccacacagtcctggaggcagagatgcagttacctaccctagcttttgatgggttctcttacctgtagtagccttatccctggtcatttggannnnnnnnnnnnnnnnnnnnnnnnnncccctccaaactccttttccttggccaagccttcatgcttccccctttccatattataatctcatttgattgctctgcagttgggaacggtgatcttcttgaatgatgtttcagtgtgcaaaaactatagagcctgtcagcaccaaagctgacagaagttataccttactcctttcctttcccctgaacaaacctgctaatcccactaattcaggaatttgagtagagatggggaacaagaacccagatgctgtcccctcaccccctctcctgtatttctcaggtccagttcaaatctaaaattctacttttagagttgaaacagagtaataacttatctaaccctcttttcctacaaaggagaaagataaaaggcacaaaggttaccgccaaggcccgtcagctgtgtagtggcaaagccgagaccgagtctcctaagtccccgtcagtgtggttttcaccacaggactgtctcttgtcgttttcccctaatgccttctcctgccttttctgtgcctagtttttggctcttcacatattccatattgattttgacgctctgtatattggcatcaggtggcagctgaatatcttttgaattactcgaaggtaaagccagatgccagaatgaaggtgtaggccagtgtttcccatatgcccctggagccccacttattgaggccagcagaataggtgcagagatgaagtgagcttagagatgttgcaaatgctctttatcccttcagctctctgatctgctctttcttcatgatacttagtctgcagggcatattaagatcatcccagaggttcaggcagttcctgtcatctctgaaaagactgggggatatgaaatcttccccctaccccacttaatgcgttggcatatgatttttcaaagaatgcttcatgcccaaaataccagcctgtttagcagtgttacactgtttgatctgcgggcacttgttgcattgcctggcacccaatattcagggtccatgactaagactggtcttctcagatgccctgttaatcaggggcacttcaggctccacaggcgtcatgtggactgggactaactcactggactcagagaggaatcgtggaaacagagcaaaataccacacctatttatgtctgaataaccgttcatacagtgcagctgggggggcggccccaagcattttaaacctggaatccaggaatttggggcggggggattttcttgccccccgatgctgggtgaactgatgtttgggtgcccgcttgtgcaccgggacctggttgcgaaaaaggtgtttcaacaccaaggggaatttcgcgcaaaatgggtcggggctatcg

SEQ ID NO: 84790 - DNA, 521 bp, Homo Sapiens
  misc_feature (11)..(11): n is a, c, g, or t
  misc_feature (73)..(116): n is a, c, g, or t
  misc_feature (142)..(193): n is a, c, g, or t
  misc_feature (354)..(427): n is a, c, g, or t
ccatgttgggnccaggctgggtcctcaaaactccctggacctcaaggtggatcaagccccactaatgacctcnnnnnnnnnnnnnnnnnnnnnnnnnnnnnnnnnnnnnnnnnnnngccataaactaaattaatatgcaaannnnnnnnnnnnnnnnnnnnnnnnnnnnnnnnnnnnnnnnnnnnnnnnnnnntcgtgttctatttcctatgggtcacccaggcaagctctgatcatcctaatcactcagggcctaagtaaagtgttacttctggccacagcatttaattgctaatgtaagaccatccaaaacattttttatccttctttcaagcatttctttgtttaaggatnnnnnnnnnnnnnnnnnnnnnnnnnnnnnnnnnnnnnnnnnnnnnnnnnnnnnnnnnnnnnnnnnnnnnnnnnncccttttggacttgttaccttcttagaccaatctttttcatattttgcataattcttactcgatcacctatgttacccatatctcactcaatcc

SEQ ID NO: 84791 - DNA, 1292 bp, Homo Sapiens
  misc_feature (1252)..(1252): n is a, c, g, or t
  misc_feature (1265)..(1265): n is a, c, g, or t
  misc_feature (1271)..(1271): n is a, c, g, or t
ggcacgaggggccgctgacatgttgaggactacgcgcggcccaagcctgggccccccgtctgctccaggccgcgcgtgggcctgagggcgggctgggtggcactggcctgcgggccgggtcggcgagctggcgggcgcgggcgtggcctggctgcagcccacgggccgggagacgggtgtgcaggtgtacaacagcctcaccgggaggaaggaacccctaatcgtggcgcacgccgaagccgcctcctggtatagctgtggaccaactgtatatgatcatgcgcaccttggccatgcttgctcatatgttagatttgatatcattcgaaggatcctaaccaaggtttttggatgcagcatagtcatggtgatgggtattacagatgtagatgataaaatcatcaaaagagccaatgagatgaatatttcccccgcttccctcgccagtctttatgaggaagacttcaagcaggacatggcagccctgaaggttctcccacccacggtgtacctgagggtaaccgaaaatattcctcagataatttctttcattgaaggaatcattgctcgtgggaacgcttattcaacggcaaaaggcaatgtctacttcgatctgaagtctagaggagacaagtatggcaaattggtcggcgtggtccctggtccagtcggagagccagcggactctgacaagcgtcatgccagtgacttcgccctgtggaaggcggccaaaccccaggaggtgttctgggcctctccctggggacccgggaaagcccgggctggcaccatcgagtgctctgccatcgctagtatggtaatttggaaagtcaactggatatccattcaggtgggatagatttagcttttccacatcatgagaacgaaattgcacagtgcgaagtctttcatcagtgcgagcagtggggaaattattttctgcattctgggcatttgcacgccaaaggaaaagaagaaaaaatgtccaaatcattaaagaactacattactattaaggactttctgaagaccttttcccccgatgtcttccggttcttctgcctgcggagcagataccgctcagccatcgactacagtgacagcgccatgctccaagctcagcagctgctcctgggggctgggctctttcctgggaggacgcacgtgccttacatggaaggggggcagctggccttgcgggttcccgttcagggaaaggcgattgttgttgggggaggagggtttttccagncaccaagaggggnccgttnaaggggcttttggcaagatgg

SEQ ID NO: 84792 - DNA, 430 bp, Homo Sapiens
  misc_feature (33)..(33): n is a, c, g, or t
  misc_feature (55)..(55): n is a, c, g, or t
  misc_feature (106)..(106): n is a, c, g, or t
  misc_feature (121)..(121): n is a, c, g, or t
  misc_feature (181)..(181): n is a, c, g, or t
  misc_feature (188)..(188): n is a, c, g, or t
  misc_feature (360)..(360): n is a, c, g, or t
gcccacaagtacctgcctgtgagcacacacgtnttagagcagccagacccgggangctgttgggggaaggagacacaccaggaactcacccgcagaggccagcagnccctcagcacaggtngggcctgggtcactgtgttccttctttcttctgttttcttctctggtgtgtgcaaagcanacagtanacaaaacaatttgtgcgaatcctaagactcacatgctgggggatggggaggagatgtacctgcttgttaaaaagggaggaagtggctgtcattgacctaagtggtaagaagccacctcttcctcaccagcagctgcgtgttcccatgtcgcaggaatccgcaacatctttgnaaaaagaggaatggaggtagaagtggcccttacccctaaccagtctcctgcctggctgagtcttgaggag

SEQ ID NO: 84793 - DNA, 754 bp, Homo Sapiens
ctcggtggcaaggctgctcagagtcccgcccacatatgagacaggcacttggctgaagacaggcaactctcgtcccaaccatcattcaccctgagtgacgtacttcatcctccaatgactggacaactgcgatgccttttcctcccttttcctgtacactcccagcaacaaactcctcatgataactgcacacaatctgaaaaccactgaaagacaagccaaccacagcagccaagcccactccttgcagcatgggtactggtggcacaccagacagtgacactgccccacaaaggcctgggcccgtgggggctgctgcctggcatgacatctctccagacttctggcttaaaaccaactttccatccgagaagcctcctcagtagttactctgctcatgagacagatctgggctccaagccaggaaaggtgaacagaaaccacaagtgtccagccctcggtgctggagtggacgttaattgtcagccaccagactgtcccggcacctacagagaatgtttcacagttctggcatttaaatcctttgatagtggattgtgctgctgttagccttagtttcagtgctttacaagtctcgcttattatctcattggtatttaggtatacaaaacagttgattattcaccacgccaatatctgggtctctgtatctcatgtagaacataagaaaatgggaactaatagggaaatttatttatagcatgaaaataaacctggtgaaaaggagtctgaa

SEQ ID NO: 84794 - DNA, 483 bp, Homo Sapiens
taaaggtcttcttttggtcccaacctcacttccagcctcatttcttgccagtcccagacttgctccctgagcttctgccacctgcccttccttcatttcctcgacattccagccttgttcccacctccagcactttgcatatgctgttccctttgccaagaatgctcttcccctaccctgtgcatggctgagttctgcagaccctcaggccttggcttcaacgttgcctcgtccaagaggccttcctcgactactttacttgtggagttcctctatcacaaggcctctgttctttcccttcatggagaatttgccactgcatatccatttgtgtaatttacttgttggttgactgtgcctcccactcgagtgtaagctcatgaggccaggtgccatgcctggttcagtctccactctgtacccagcattgagcacagggcctggtccatagttggcgttcaataaatacttgttgaagaagtg

SEQ ID NO: 84795 - DNA, 493 bp, Homo Sapiens
  misc_feature (35)..(35): n is a, c, g, or t
  misc_feature (45)..(45): n is a, c, g, or t
  misc_feature (54)..(54): n is a, c, g, or t
  misc_feature (60)..(60): n is a, c, g, or t
  misc_feature (246)..(246): n is a, c, g, or t
  misc_feature (397)..(397): n is a, c, g, or t
  misc_feature (419)..(419): n is a, c, g, or t
  misc_feature (453)..(453): n is a, c, g, or t
  misc_feature (458)..(458): n is a, c, g, or t
  misc_feature (465)..(465): n is a, c, g, or t
  misc_feature (473)..(473): n is a, c, g, or t
cccagggaggacttgaacctctcggcccaagtganactccagccncaacgtccnaaagtnttaggatttacaggtgtgaaccaccatgcctggcacaaaataccatttcattctcaggattaatgttgtaccatggagacaaggggaagttttctctttctctttggtagatgaagcaacttgaagacagatatttggaggtcttgtctgaggttcatttaaaatggggcagaggccaaggccttncttaactctccatccagttctctgtagtagcccttcctaccccagctttggtgactgaggtcaacccccagtgtttcctcattgtactgaggcatggtgtgacttttcaaaagggctctgttgactgctcgttggatttgctgtcgagggngcgagataggcccaggacttgnaccctgaccatgtgactgggacacatacttgaancttantgggatnggagaggntcacagtgccttcacaggca

SEQ ID NO: 84796 - DNA, 610 bp, Homo Sapiens
ttttatgaagaaacaaacaatatatttcgcttaaaataagaagcacgtggaaaaagaaagactttgaaagagttggccaatgtcttctcacaattttttgtatagcttttaaaaatgtctgcatggctcagtggagatggtgtccacgtcttccctccacctggaacctgcattcaatccttcacaagtgctgtctatgtatgagaccagctgggtgactcggttaaacccctcgcctctctaaacaaagtatgtgatttaccctgaatcattcttcagcaagtactaaaaaggtataatttcttaaaatgaatgcgattgatcgacttttggcttgcaaaaatgacttctcattggaaaagagacacaccttagaaagatgaaaatgtgaaaaacaacagtcataaaatggaatcgctccatgctcggactctctgccaccagacatctgactgtgcagccatcagctgagaggctgcttgcagttccccatccaggacccacggtgcctggtgctaaggagcgactggactgaggaagcctctcatcaccagctgtgttgcagctttaaattctgcccccagttgtggtatttaaaattctgtatgtt

SEQ ID NO: 84797 - DNA, 218 bp, Homo Sapiens
gcacaagcaaccctcccatctcagccttctgagtagctgggactataggcacaggcacatgccaccacacctggctaattaagagcatacattttcaattttttgtttccaaaaaattcagtgtgatgaataaggttatattaatggtgagcttcttgatctgtgtgctgaaaattttcacccacacatacatttgaactttaaaacagttctcgtgc

SEQ ID NO: 84798 - DNA, 850 bp, Homo Sapiens
gtacagtatctagataatgcacaaaagccataaaaacttagtaacacaaggaagaatgagctaagaattaaagaacatgagggtaaaggcatttcctgctggttaagtatgtctgtggtaatatggtgaagttagagatctgaagaggccatggaaccagtctcacatgcttttgtatccttccctaagaaaaatgtgttttcatgtacagtaagtcattgtcttcacttcaccctcccccagttgtaaatctccttgctgtacatttctgttaaatccacaacactggttatatattccaggtgcatttaaaaaatgtgtgcatattacttcatgcataataaaataaaatgtgtacgtatgctaggccagggccatagtaaagtttgaaacagtgtactttggaaagaacagacctcaaatgcacccccatttactggctggtattttaacggaaatcaatatgtgaagttaagcagtgacgataaaaaaattacaaaaatcacaaagcaaaatatctttgaacctctagccaataccaacagtcccgtcaatcacaaacatgcagtgtgtagcatgttttccgaacatggttcaggggcatgctcactcatctttatcagttccaaccaatgccttcatactaacaactgtagtatcaactctaaaaagggtatatacttgatagagtggttccatttaggattaggtttaatccaggttcacattatttaagtttctataatttcagagttaaaagtgggtcataaggccagaaacacagtttgctccaacgagataaatttggatctccggggagacacctgttttggccggtttttaggatcac

SEQ ID NO: 84799 - DNA, 703 bp, Homo Sapiens
ccttccagcagggccgggccgctcctctgcctcaaggtccacgggcatgacgaaacccaagactcccacaggggaatcttccctcagttcgtcacggccccggtacctttggcaggacgttcagggtcctctcctccccccgcccagtgagagacccaccctccagtgagggacccgcagggccgatcaggtatgacaagacgtggagtgagttgcttccaaaacccagcctgcccaaatgtaccaataatcctgtcagtcaagatagtctaacaaaagcaggcataagtaaactcagactgctttgtgcttttaagtggcacacgacacgtgtgatcgtgacctcgtgtaaaccccgggggaaagtgggaccaatatttctgttggtgttttagagatgaggacactgagtagctaataaagttaaatggtcacgagctagttaataaagaagaggcaagaactttcatcttccatctctgaagtgtacttgccagtccactaccctgcctccctagagagaatttcggcggtcttaattgggaaaataagtccccacctcccgcaggagggctctgttattccaacaagaggggaagttcttcaagagctaatgaacttctcctgtacttctctcttcattcgccaggctttgaggccatttccctattcattaaagactaatgtttaaaaagtcaaaaaa

SEQ ID NO: 84800 - DNA, 587 bp, Homo Sapiens
ggaaagggccagatcacagctgtcactcactgtagtcatgaaccgaagccatagcatcactatagtaagataaaagaggtaccaagaggacaggaggaaacaaaatcagtcttgagtcacatatgggcatcatgggtatttataaaaggcttagacggttccttcctaaatttgaatttatgtcaagagataatcatttcaggaagtgtgagttcctctcttcaaactgttttggacaatcccattctgatatgagctgcatagagccaagctcatttatagggaacatctgtgtgggagggaagggggggagtggaagagcataggaaaagagacctcctgaagctgaacttggacacctcttgtgtcttttcccgggtttcctttgagttgtacatttgcttggttgtgttgacaaggaaggtctattgaaacttttatggtccattatgtgggtttatgtatataacatgaaaaagtgacacgtggaagaggagtttcactgaaatctgcactctttttgtgaatgtctgtgttccagaaggttcctagagttgttggatgatggctctgattactgactcctt

SEQ ID NO: 84801 - DNA, 414 bp, Homo Sapiens
  misc_feature (25)..(25): n is a, c, g, or t
  misc_feature (356)..(356): n is a, c, g, or t
  misc_feature (363)..(363): n is a, c, g, or t
tgcgtcatccactctgtgaaagccntgagacaagcagcaacttctctcaatcctcctctctaggacaagacaggaactgggacactcaccttactaccctaattcgctgagcctcggaagaaaagcagcttagatttttaatccccatcccaagatggaggccctcctgctcctgctgccttgttctcaccccctttcgtgatgtgcgaggccatcggaaggtgtggaatttctccactgattcctctcattgtccctttctccctaactacactttccttttattaaaaattaatcaaatagatagataaataagctcagggcttttaaaaaatatgtaggagacttaggatttntccattnttttcctatggaatgttaaaatttacacttattacaaaaaacatccatttt

SEQ ID NO: 84802 - DNA, 349 bp, Homo Sapiens
  misc_feature (283)..(283): n is a, c, g, or t
gatgtcatgttactagatgcttgggaacagatatttatttggattggcaaagatgctaatgaagttgagaaaaaagaatctctgaagtctgccaaaatgtaccttgagacagacccttctggaagagacaagaggacaccaattgtcatcataaaacagggccatgagccacccacattcacaggctggttccctgggctgggattcccagcaagtggtaaattggtatttgtaaaaagcaaacaaacattacaaggcagttatctcattgctgttttggganaggaacgggaaaagctttttgcttatttgtcttttgaaaattaaggctgggcgcggtggctcaaac

SEQ ID NO: 84803 - DNA, 441 bp, Homo Sapiens
  misc_feature (250)..(250): n is a, c, g, or t
  misc_feature (368)..(368): n is a, c, g, or t
taatgctaggtttcaaaggaggggaatatgtctatcactgctacataggcattctgtttaaaacccacccagatgccttaatggggctctgtcaagagtgggaaggtccccacagctgtttctcaaagccagtagaccactcagtgtgggcagtggggagcttgtgcttggcaggcctcccacgtcgccatcatttctttttgaacacttgacggcacacctggtcaccacaggtcagctccaggtacancttgtccccctcaatccactgcttccagccgcggttctccttctcccccttttgcacacacacaaaggacatcaccttcccaggggaccagtgccttaacaagccggttatccagggntctttgtgtactcgtcaaactcttactcccaacagtgaaatccacatcatagttgcggaatgtgcctagtggg

SEQ ID NO: 84804 - DNA, 469 bp, Homo Sapiens
  misc_feature (355)..(416): n is a, c, g, or t
aaatatatatttgatcttcctatctagttccttgttcagagctcctaaaacccttgtaatttccaaagtgatggagtacatcttttgttctagtatttggtctttgacccagttcctgacacaaagctcctaaattcctttaaatttcccagtgataggagaattttttgttctaatgaggtcactcttgatgggcacctggataactcaggatgggggctgctcacaaagaccacatcatgattggaagtttcaaactttcagtctcccacctccagagaggggagaggggctggagatttgtgtcaataatccatcaggcctatgtcaacaagacataatccgttaactatgnnnnnnnnnnnnnnnnnnnnnnnnnnnnnnnnnnnnnnnnnnnnnnnnnnnnnnnnnnnnnnctttatgaagtcagcaagtcctgtgctcaggatgcttctggaccttgccccag

SEQ ID NO: 84805 - DNA, 525 bp, Homo Sapiens
aactgtcatcaatgttagcagaacttgagcaaagaccctcaacccagccatccttgtagtaatcccatcttccaggtggagggaaaaggagccatactcatagctatgtgaaaatatcctcggccttttttaatgaagagattagagaatattgtgagcaaggcatcttctggtgggcagagcaatccaggttcttcaactccagcccctggtgcagcccagctcagcagcagactttgcaaggccttgtattcttttcaagccaggcaagatgatgagttgaatttggaaaagggtgacattgtgattatacacgagaaaaaagaagaaggatggtggtttggatctttgaatgggaaaaaaggccattttcctgccgcttatgtggaggagttaccttcaaatgctggcaacacagctacaaaggcataaaacaagactctgaacatactaccttcacactcggtaatcaacaatacagtgtggttcaaataagaataaagtgctcttaccttataaaaaaaa

SEQ ID NO: 84806 - DNA, 985 bp, Homo Sapiens
  misc_feature (401)..(411): n is a, c, g, or t
  misc_feature (457)..(709): n is a, c, g, or t
  misc_feature (795)..(795): n is a, c, g, or t
  misc_feature (816)..(816): n is a, c, g, or t
ttgacagtcactgagcatcctagacgcgcggtttggtgtctgtcaatacttttggaaaatctcagccattattacttccaacatgtcttctccttcgctctttctgctccttccggcacccgccgcccactcgcaccttctgtatttgtctctctgctccgctcgctccgctcgtggttccctctgcgtttctgtgttcgcgctcccggcccccttcctcagacacgcgcagcctccggccgggcggcggcgcactgcgtttccacctcgcatttcctgtactccagcgcgccttgtccttcccagagcgtccatctctttgcttatgttaccatctgctccggtgcgctgcctccgttttctagtagcgcctttagcatattgatcatcataattttccnnnnnnnnnnngagacattgtcttgctctgtggccctggctggtgaaatgggggctnnnnnnnnnnnnnnnnnnnnnnnnnnnnnnnnnnnnnnnnnnnnnnnnnnnnnnnnnnnnnnnnnnnnnnnnnnnnnnnnnnnnnnnnnnnnnnnnnnnnnnnnnnnnnnnnnnnnnnnnnnnnnnnnnnnnnnnnnnnnnnnnnnnnnnnnnnnnnnnnnnnnnnnnnnnnnnnnnnnnnnnnnnnnnnnnnnnnnnnnnnnnnnnnnnnnnnnnnnnnnnnnnnnnnnnnnnnnnnnnnnnnnnnnnnnnnaattcccagtctgatattcccacttcgtgtcacatctgatctggtctgaggctgctttgccttttggacgtgcttttctgcctttncagactatattttggcaaganggacgggcaacacctgatgtggattgggtcatctgcggactggcttatgatgacaagctgactgagtgaacactcgcgcctgttatgtgtttgctctgatactgactgcaacaaaacacacgaactgaaatggatcgtctgactcgagttgagtcaatgagtgaaatca

SEQ ID NO: 84807 - DNA, 513 bp, Homo Sapiens
caggtatgggtgaaattggaaattactaatctattggaaatcagttcctgacatagtaaagtttgctttcataactgcagcaaaaaaggtcaacttgccaagtcactgctgccatgtgtgtactgtattattttcagaaaaaaatataatagtctgagtccaagttatcttgatttaaaattgatagagaaaagaaactgtcgagcaagttatataacaactaacaacattgcactttctgtatatgaaatcaatatttaaataacttatttttctccattgctgttcttaaaaacattgtaagtagctgtaatataccagtaccaatatgttcttgcaattgcttcagcccaagaaagctgtgtattgttttaaaaattgtaaaaattattgtgatgattcatttagcataaagagaggtggacggaagggttttcctatgtatcaaaacttgtctataattatgtcatctatgtacctagaaaaaagtaaataaatttcttcagttgaaaa

SEQ ID NO: 84808 - DNA, 304 bp, Homo Sapiens
tccccaaaatagtactttgaagtgatagtcctttatgcaatgtcttagcaatagtctctataatgcccatccaggagaagtgggtagtaattcttcatcatgaaaatgatatattacatatttagtatcttccctttgcagtattgcacttttgtttaactagaatacacctatgagatagccaaagtttcaaacacagttatcttagtttaccggtggagtatttcaacaccaaccacatttcccttcctccctctaattctacccacatgatctttattccttcctttcgccccttaaaaaa

SEQ ID NO: 84809 - DNA, 432 bp, Homo Sapiens
  misc_feature (138)..(148): n is a, c, g, or t
  misc_feature (154)..(281): n is a, c, g, or t
  misc_feature (397)..(397): n is a, c, g, or t
  misc_feature (406)..(406): n is a, c, g, or t
actgtgctccagtctgggcgaaagacagaatgaggccctgcacaggagaaggcaggcaggcaggcagaaagacaacagctgtattatgttcttctcagggtaggaagcaaaaataacagaatacagcacttaattaannnnnnnnnnncccttnnnnnnnnnnnnnnnnnnnnnnnnnnnnnnnnnnnnnnnnnnnnnnnnnnnnnnnnnnnnnnnnnnnnnnnnnnnnnnnnnnnnnnnnnnnnnnnnnnnnnnnnnnnnnnnnnnnnnnnnnnnnnnnnggagggagccacccacacccagcttgatttttgttatttgtttagtaggagacggcattttcttcccatgttggggttcaggcttggtctttcggaacttggccgacccccagttnggatccttnccccgcccccggcctttcccaaagtt

SEQ ID NO: 84810 - DNA, 750 bp, Homo Sapiens
gggaatctcggaaaggcgagaaagaagctgtctccatcttgtctgtatccgctgctcttgtgacgttgtggagatggggagcgtcctggggctgtgctccatggcgagctggataccatgtttgtgtggaagtgccccgtgtttgctatgccgatgctgtcctagtggaaacaactccactgtaactagattgatctatgcacttttcttgcttgttggagtatgtgtagcttgtgtaatgttgataccagggaatggaagaacaactgaataagattcctgggattttgtgagaatgagaaaggtgttgtcccctgtaacattttggttggctataaagctgtatatcgtttgtgctttggtttggctatgttctatcttcttctctctttactaatgatcaaagtgaagagtagcagtgatcctagagctgcagtgcacaatggattttggttctttaaatttgctgcagcaattgcaattattattggggcattcttcattccagaaggaacttttacaactgtgtggttttatgtaggcatggcaggtgccttttgtttcatcctcatacaactagtcttacttattgattttgcacattcatggaatgaatcgtggggttgaaaaaatgggaagaagggaaactcgagatgttgggtatgcagcccttggttatcagcttacagcctctggaattatcctgctggcctttaagtttgctaatcggccccgggttcctttgggcta

SEQ ID NO: 84811 - DNA, 251 bp, Homo Sapiens
gcctactactactatacggctgcgagaagacgacagaagggacggggaagccgagctccagagcaacgaccagggccgaggaggtgcctggagtgcccaccctgggagacagaccccacctccttgggtagtgagcagtgagcagaaagctgtgaacaggctgggctgctggaggtggggcgaggcaggccgactgtactaaagtaacgcaataaacgcattatcagccaaagctggaatggccccagcag

SEQ ID NO: 84812 - DNA, 1254 bp, Homo Sapiens
gaggactcggccgctgtcaccagcatgcaaatttcttccaagaggcaccagctgtacgtagcctcgcggagcgcggtggcccagatcgcgttgcaccgctgcgctgcccacggccgcgtctgcaccgaatgctgtctggcgcgtgacccctactgcgcctgggacggggtcgcgtgcacgcgcttccagcccagtgccaagaggcggttccggcggcaagacgtaaggaatggcgaccccagcacgttgtgctccggagactcgtctcgtcccgcgctgctggaacacaaggtgttcggcgtggagggcaacagcgcctttctggagtgtgagccccgctcgctgcaggcgcgcgtggagtggactttccagcgcgcaggggtgacagcccacacccaggtgctggcagaggagcgcaccgagcgcaccgcccggggactactgctgcgcaggctgcggcgccgggactcgggcgtgtacttgtgcgccgccgtcgagcagggctttacgcaaccgctgcgtcgcctgtcgctgcacgtgttgagtgctacgcaggccgaacgactggcgcgggccgaggaggctgcgcccgccgcgccgccgggccccaaactctggtaccgggactttctgcagctggtggagccgggcggaggtggcagcgcgaactccctgcgcatgtgccgcccgcagcctgcgctgcagtcactgcccctggagtcgcggagaaagggccgtaaccggaggacccacgcccctgagcctcgcgctgagcgggggccgcgcagcgcaacgcactggtgaccagactgtccccacgccgggaaccaagcaggagacgacaggcgagagaggagccagacagaccctgaaaagaaggacgggttggggccgggcacatggggggtcaccggccgatggagacaccaaccgacaggccctggctgagggcagctgcgcgggcttatttattaacaggataacccttgaatgtagcagccccgggagggcggcacaggtcgggcgcaggattcagccggagggaagggacggggaagccgagctccagagcaacgaccagggccgaggaggtgcctggagtgcccaccctgggagacagaccccacctccttgggtagtgagcagtgagcagaaagctgtgaacaggctgggctgctggaggtggggcgaggcaggccgactgtactaaagtacgcattaacgcattatcgccaagctggaatggcccagcag

SEQ ID NO: 84813 - DNA, 372 bp, Homo Sapiens
tgcatcacagcttggccccaatattctctctctgatggggaaaaatggccacctgagggcagtataaattacaatactatcctgcagcttgatcttttctgtaacagggaaggtaaatggagtgaaatatcttatgtccaagctttcttttcattgaaggagaatacacaactatgcaaacttgcaatttacatcctacaagaggacctctcagcttacccccacatcctagcatccctatagctccccttcctattaatgataagcctcctctaatctccccctcccagaaggaaacaagcaaagaaatctccaaaggaccacaaaaacgcctgggctatcagttatgtccccttcaagctgtagcgggag

SEQ ID NO: 84814 - DNA, 333 bp, Homo Sapiens
  misc_feature (219)..(219): n is a, c, g, or t
  misc_feature (297)..(297): n is a, c, g, or t
ggaggtcagaagctgctaggagagagatttttccccaagtcagcaaccttgcagcattggtctctatgaggagcaactcaaattcagctagatttaaaatgctagagtcttcccagtgcactagcagagtcctacacaagagcctgagacaagaaaagacagaggcgaacgacacgtatcagcattcttgggatcatacacccactcttcattctcctnaacagtcattcagcttttggattttcagcatttgaccaattccaggcaggaaattttcttaccccaggaaccagtggntttccagggcctcttttaaaaaacccagtgggtatt

SEQ ID NO: 84815 - DNA, 864 bp, Homo Sapiens
  misc_feature (801)..(822): n is a, c, g, or t
tcgtcactcatgctgctgcagatggcgggtgtaggactgggttccctggctgttgtgatcattctcacattcctctccttctcagcggtgtgatggcagatggacactgagtggggaggatgcactgctgctgggcaggtgttctggcagcttctcaggtgcccgcacagaggctccgtgtgacttccgtccagggagcatgtgggcctgcaactttctccattcccagctgggccccattcctggatttaagatggtggctatccctgaggagtcaccataaggagaaaactcaggaattctgagtcttccctgctacaggaccagttctgtgcaatgaacttgagactcctgatgtacactgtgatattgaccgaaggctacatacagatctgtgaatcttggctgggacttcctctgagtgatgcctgagggtcagctcctctagacattgactgcaagagaatctctgcaacctcctatataaaagcatttctgttaattcattcagaatccattctttacaatatgcagtgagatgggcttaagtttgggctagagtttgactttatgaaggaggtcattgaaaaagagaacagtgacgtaggcaaatgtttcaagcactttagaaacagtacttttcctataattagttgatatactaatgagaaaatatactagcctggccatgccaataagtttcctgctgtgtctgttaggcagcattgctttgatgcaatttctattgtcctatatattcaaaagtaatgtctacattccagtaaaaatatcccgtaattnnnnnnnnnnnnnnnnnnnnnngaccgcgtatgcggccgcaagcttattccctttaggtgaggg

SEQ ID NO: 84816 - DNA, 270 bp, Homo Sapiens
  misc_feature (22)..(22): n is a, c, g, or t
  misc_feature (37)..(37): n is a, c, g, or t
  misc_feature (55)..(55): n is a, c, g, or t
  misc_feature (90)..(90): n is a, c, g, or t
aaattaaacattaataaggganatttgggctttccanagggcccacacacaggtngtcctgccgcgggaaagccccccatgcctcccaanccaaagggaattttaagtagtgccctcctaagcaagcacccgatgagtcagtccccacgtattttccttttttgtcagtattgtttgggaaggagacatgccgggatgtgtcatcgtgccaaataccacatttcctgttggcacagtttcacagaagtaaacataagcatgttttaacag

SEQ ID NO: 84817 - DNA, 388 bp, Homo Sapiens
  misc_feature (12)..(12): n is a, c, g, or t
tgcagcacgcgntggcttatagcttctgtggaaacttaaacattattcaatagaataatttcctggaaaatcttttgaaagtggtcacagccctgaccttgctctggtgccctgggtccgccagcatgctgtttccattaccctcgggaaggtttgggtgcccaagagacaagtcccaagagttaagtgcataaagaaagctaggttcataaaagaattaatatctgccttctttcaaggagggaaactgccacttccaaccattttatgcatctatcacttctcttctatcttcatcattcaacccttcaactgggcctacctaggatgacagggtaaaaattataggatttttaactcttaagaaataactgccgaagtcatttct

SEQ ID NO: 84818 - DNA, 1016 bp, Homo Sapiens
  misc_feature (922)..(922): n is a, c, g, or t
gtcaaggagcgagcctgggtggcgaattcggcaggtgtttgcaaatattgtgtgggctccgcgcgctgcgggctgcgggagggtccggccgggcgtctctgcgagcctggagtttgcatgaaactttcacctgcgctccggggagactttcggctccggctcccaccgcgcgcctcgccgccctcgcgaccgcgggctccgtccaacccggcccgacatggacgtgctccccatgtgcagcatcttccaggagctccagatcgtgcacgagaccggctacttctcggcgctgccgtctctggaggagtactggcaacagacctgcctagagctggaacgttacctccagagcgagccctgctatgtttcagcctcagaaatcaaatttgacagccaggaagatctgtggaccaaaatcattctggctcgggagaaaaaggaggaatccgaactgaagatatcttccagtcctccagaggacactctcatcagcccgagcttttgttacaacttagagaccaacagcctgaactcagatgtcagcagcgaatcctctgacagctccgaggaactttctcccacggccaagtttacctccgaccccattggcgaagttttggtcagctcgggaaaattgagctcctctgtcacctccacgcctccatcttctccggaactgagcagggaaccttctcaactgtggggttgcgtgcccggggagctgccctcgccagggaaggtgcgcagcgggacttcggggaagccaggtgacaagggaaatggcgatgcctcccccgacggcaggaggagggtgcaccggtgccactttaacggctgcaggaaagtttacaccaaaagctcccacttgaaagcacaccagcggacgcacacagggagaaaagccttacagatgctcctgggnaaagggggggaatggccgttttgcaaaaagggaatgagttaaccaggcaacttccgaaaacacaccgggggcccaagccttttaaatgctcccc

SEQ ID NO: 84819 - DNA, 1368 bp, Homo Sapiens
  misc_feature (950)..(958): n is a, c, g, or t
acattcctgttgtatctgttcaacacaagcaaggatagtatctcagagtatgctcactggctcagttctgtgtgactccgtgaccgaatgtacgcgtgcactggagagcctcttggttgctgaaaccaacctttcttcctgctctcctctttaagagcaaaccccaacatgtataaggtcacagcaagtggtagccaggaaaagctgtgggacccctcatttgagtcacatccatatggcatggagaaagaaaacctctctgccagaaggaactgaactctggaagtcctaaggaaggtcaccatgctcagcagataggaaagcattgccaagggctgtccctcaagagcttagttttcttagggagaccagaaagacatcagatcctgactgccctgttttgctcaagttctgaaatgagtggcatgatgaagagctggtggagctgagggaaagagtcaaccatgtggggtggggtagtgaggaaggtgtatgaggaaacaaactgggccctgacgaaacaggcggattggggaaggagaaagaaggaagggagagaaacctaaccaaagaaacatgggaagctggaaagtcgagggcacagccggaataaaggcacagatgggcaccccacaggaggggccttggccaggttgggatgcagagaaaaacaggcaggagggtgtcaatctatagcatcctgaaccccaaaaggtctgtaactggattctctaagccttgagaagttcacaccaaagcttcagaccagggaaaatattttggaaagatcagtctttccaagagtgagctcctttccaagaagctggacaggaaacccaataaatgtggatctgaaaaaaccaaatccaagagagaagcaaaatgggctgggggtgtgcaataagagaagcaaggaaaatggaaagactgtagctgaggatcttttattnnnnnnnnntggatgggactttggtgatgagagagaaaaagggcaaaagtctgcagttaggaatttaggtgaccgaagactgtcctagacagttgggagggacaggctgatggacagaagagagaaattcctttcaatgacaaccaagctgaactattcgataccagcagaactgggttctttagggattaagccaagacaaagacttgggaatcactcactccgaggatgaagaatgggttaatggctgaggagacagtcaaaggaatagagaggcctggctttgagggcctcttcaccaccagcacaagataaggcaaaggaccatttgtcagagaccgacgcgtggtcgacgatatcccgggaattccgaccgtaccagcctgctttttgtacaaacttgtttatagtcaccatgc

SEQ ID NO: 84820 - DNA, 747 bp, Homo Sapiens
  misc_feature (585)..(585): n is a, c, g, or t
gaggcttgtaactatgaacagtggttaaaaaaagcaggctggtaccgctccggatttcccgggatatcgtcgacccacgcgtcgcgcttccgacacaacacagttatcttcatcctaggcaaggagcaccaactcaaggagctacaccccttgcatcggcttgaccgccttacctcaggggtgcttatgtttgccaagacagctgcagtctctgagagaattcacgagcaggttcgggaccggcagctggagaaggagtacgtgtgccgggtggaaggggagttccccactgaggaagtgacctgtaaagaacccatcttagtggtgtcttacaaagtaggggtgtgccgtgtagatccccggggcaagccctgtgagacagtgttccagaggctaagctacaatggccagtccagtgtggtacggtgccggccactcacaggccgcacacaccagattcgagtccaccttcagttcttgggccatcccattctcaacgaccccatctacaactcagttgcctgggggtccttctcgaggccggggcggctacattcccaagacaaacgagggagttgctacggngacctgggtaggcagagcaccaggccaaaacagagcctggatgtgctagatctctgtgagggtgacctgtccccaggactcacagactctacggcccctcctcagagttgggcaaggacgacctggaagagttggctgcagctggccagaagatggaggaag

SEQ ID NO: 84821 - DNA, 455 bp, Homo Sapiens
  misc_feature (28)..(28): n is a, c, g, or t
  misc_feature (36)..(36): n is a, c, g, or t
taaaaaaaacccttctgccttgggcttncccaaaantgctggggaagttggaatcacttttttgtccttggctagagggacagtgaagaaagcgatttgcccaatccctaaaaaggatctgaaaagtgaaatcccaagacctgtcaaaagtggggtatctgataaatccccaggaatagagtttatgctcaaaaccactgctccttacatgacatgtgaaccgtaagtaaagcagcccttgaatgaattgtctgggtaacctataaaaaatcaagccctgaaattgtatgaaactgataaggaattctagtacctccagggcactgcttcaattagcaataatcgcacctcagataaacctcattggtcatcacactgccactgcaaaacttctagggtattgtctcaatagaagcaaatgaaaatgctttattgctgggtgtggtggctcacac

SEQ ID NO: 84822 - DNA, 796 bp, Homo Sapiens
tggtctgaatatcgctgagggttaaatgatagataaaatagtggcatcctaacagcgatgaagagatatcacagtttaaacagaatttactgaagaatctggaataatgtaccaatgcagtgactgccagtcagtagacctaggtctcttgacaggaattaaagttgtgtcttttctaaaaatggcactcctgaccttcttctggtttggtgtttattttgacattctcttaggtatacatatatttacttgccatttaacgctaacttactgaattttccccttggcccagtttcatatttagtgatagatgagactgtggctgtaaacagcagcaactcccaagaagagtactcagggcgagagatttaaaaacatatctgataaccccattagaggtaggttagaaaaaggccttttatttgggactgtgtagttatcaaggcatcctgcagatgcaaccttttctctcccttctttctctgacatgctcctaggtaaataagatatgaggaaaatcaaacgtatatcctgttaaagcacttaaagggggtaaaaagtacagccctcaacaaaacgtgttttcacattgaaattcatctttcctctttgaaccgacaagcttttcaagaaaccctttcttggtttcataatactgtactgccgatttataaactatattttagtctacccttgaaagaatgaaaactgtagtacttcattaggacctcatatgaccatgatctcaagaaaagatgctttttcaatgtctttaggcctgaatatggtaggaaat

SEQ ID NO: 84823 - DNA, 465 bp, Homo Sapiens
ccttatttttctctggttctgagttatatggtaggggagggattctggtgggatgaccccagctgggtaaatgggctgttgctccggcccctagttaatgcatgtgaagactcctcaggcccgctcctttaagcttaatcctctaaattcttggtcttgtaggaagatgacgattcagagactgaaaaacctgaggctgatgacccaaaggtatttggtgttggctgtggtgggtggctggatgcaaacaaggtgtttgaacactgtggctcagttcgtatgtttggtcaagatctgtcccactgacaaactgtgcaactgtggatttccgtctgggagtttttgctgggactggttctcgagagcggggcccaggcgagtttgtgagcctgggggtgggcgatggctgttggactcctctctgtggtctgaaagggctcgcagtgtgggttctagatccaggga

SEQ ID NO: 84824 - DNA, 544 bp, Homo Sapiens
  misc_feature (47)..(47): n is a, c, g, or t
  misc_feature (70)..(70): n is a, c, g, or t
tgactcaacgtaaagggtcaagaagagggaaggtcaagcttctcccnaggtccaagaagcagggcgtggnaatccactcaaggagggtgacgtccgcgaatgccatgccagacagccccaccttgccgttccgccagatgcacacggtgtagtgcaccctggactcctgctcctccaccaccttgggcgcctccctcctgcggcggttcctccgaccctcaaacagctgcaggggtgtcacgggctgcagaggggcatctgggtcatccttggctggaagctcatcgtactcatagtcctcatagtcctcgtttgcttccatcgtgtactcgacgtggcctttgactgtcacttctatctgtaggtcctggcaggtcgtgttcttcatgtccaggacattgtaggtacgaaggaccttcagggttcctttgctgtttcctcccaccttcacattgatcttgctgcccgaggaaaactgcagctcctcctccaggccgcgaatctggcggttgttcagctgcagcgcgtgggacttgaacccatt

SEQ ID NO: 84825 - DNA, 1388 bp, Homo Sapiens
  misc_feature (39)..(39): n is a, c, g, or t
  misc_feature (95)..(95): n is a, c, g, or t
  misc_feature (185)..(186): n is a, c, g, or t
  misc_feature (288)..(288): n is a, c, g, or t
  misc_feature (294)..(294): n is a, c, g, or t
  misc_feature (344)..(344): n is a, c, g, or t
gctaactgctggtgttgcctcttggaacctcggaagttntctctttcgcacctgcagggtttagtctccgggactgcttgggaggacacctgganatccgaaggcaggactacacaccgggcgaatccaccagcgccaccaagcccttgaaaacccgaggccgccgcgcgactccatttccccanncccgcgcggcaggggcttggacgttgccaaggagaccggtagtgccccgcctccacgcagggaaacaggcgggaaccacgtgacccggaaggctgtagcaancgtccnggcgcgcactgggccaatgagaaccgaagggctggacttccggcggtggnactgtcacttcgccgcccgcgtcaggccacaccggtggtctgggctggggaccgcgggtcgggtccggtttccaggaggttcctggtgctcgatggctggcggcgaggaagtgaccagatggccttctgaggatgtggcttgtgtacttctcccagtgaggagtgggggctcctgtgacacagcccagagggcccgtgtacctgccgcgtgatgctagacaacttcgcacttgtggcctcgctgggactctccacctctcgacctcgtgtggtcatccaactggagcgtggcgaggagccctgggttcccagtggaacggacacaaccctgtccaggaccacctacaggaggcgcaaccctggttcctggagtttgacagaggatagagatgtttctggagaatggccacgagctttcccagataccccacctgggatgactactagcgtcttccctgttgccggtgcctgccacagtgtaaaaagcctgcagagacaacggggtgcctccccatctcgggagagaaaacccacgggggtgtcggtgatctactgggagaggctcctgctaggctcaggcagtgggcaagccagcgtcagcctgcgactgacctccccgcttaggcctcccgagggcgtccggccttagggaaaagacactcacagagcatgcgtgtgctggggaggcagcccaggacgcctgagcggcagaaaccatgtgcacaggaggtccctgggagaacctttgggagcgcccaggacctggaggctgcccggcggtcggggacatcaccgaatggggggcagttttgggaggagcctcatagactccctcgggggccaggagccctccaacctgggaagaagctggggcgagggctcttcccccccttgggggagaaagtcctttttaaagggaggggggtggaaccaaaaagggtttccgtgaaaaagctttcccgaacttccgtcaagaggcctaatgggcacccctcaccccgggggaaggcggccgccctaacgaagggtgcccgccccaaggcg

SEQ ID NO: 84826 - DNA, 260 bp, Homo Sapiens
aggcttgtgggtgactgagacgcagacgggagtttgagaagccctcgtctatgccagtgctacacaacttgtggtctgccgtgtgaactgttactggaccatggcaagataacacagaagttgagagtgagcacttagaaatgtttatattaacttgacataactgtgacatccaagcatggggagccttgggaaaagagttttattatatttcacaaatatatccagtccacagtcgagttgactgtgactttaaaagg

SEQ ID NO: 84827 - DNA, 333 bp, Homo Sapiens
gttgcttaccccatataatttattacctgtttaaaaattctttcttacattttgtacatgttggctgacagaataaatgcaggcaatttacaaaccaaggggactgcagggaaaatcaggattggcagccagggagagaaaagaggcacacccggagctggtatccctcacctccaccactcagcaaggcgccggacagatatccggagggcactctgcctctgccggggggtttttttagaaaaggaattgcatagaagatacagcaagagggaactccacaacaacaaaagtgttccatatcggaaaagccaaggttgtcatgttttgttt

SEQ ID NO: 84828 - DNA, 445 bp, Homo Sapiens
agctgagcccaagggacctgagtgctgccacaagcctggaacagtcctgcagaggctacaatccccggatggggacccttcccaccctctgcaagctcctgagatttgttttagcaaacagatggattctctccaggccatgggatttgggaaccaccatgccaatctacaggcactcattgctactgaaggggacaccaatgctgctatccgcaagctcaagagatcccagagattctaaccaccatgcctacttgtttgcttgctacctgcctgctgacccacctgaccatctcatttgccttttgcacctttcctgatgcttccagccaggagaagtcctggaataagagttatcaaccaatgtgtcttgtactgaataatagatcattggccgtggctgaaacatctgtcaataaaatggctacactcacataatgcgaaa

SEQ ID NO: 84829 - DNA, 552 bp, Homo Sapiens
  misc_feature (111)..(111): n is a, c, g, or t
  misc_feature (213)..(213): n is a, c, g, or t
  misc_feature (265)..(265): n is a, c, g, or t
gtggggcaaggttcttggaggcccgggaaaggtgaccttaatggcattccatagctggcaagtccctgactgaaacagtgaaggcacagcaggcaccctgggaggccttgntcagcatagccccgagctctctgcgggaccacggagcagcagagatggcattcccaaaatgccaagagaaaggagggctttaatggcctcggaaaccctttncttgaacccctgtcaacgggaccctcaactggcctaatgtaaactgcacttnctgctttgtgaagctgtggggtgttcactgccttgtcaataacctgcgaccgtgacccccacacaggcttctgctcaaccccgggcatgcccagacttctcagcacggtgctaccgactttgctgttcaaggggttgtgaagagttctcagccagaagtgatgggcagcgatgcatctgctccatctcctccctcccagcaacccgcctgtgtttcaagggccagggcaaggaaaagacttgagctgcctctggacctgtgatggcaggaacccatcctgaccctcc

SEQ ID NO: 84830 - DNA, 950 bp, Homo Sapiens
ggtgctaaggtgggtgtcctggctgcaagtatggaagccaaggcctcctctcagcaggagaaggaagacaagccagctgaaaccaagaagctgaggatcgcctggccaccccccactgaacttggaagttcaggaagtgccttggaggaagggatccaaaatgtcaaagcccaaatggcctcctgaagacgaaatcagcaagcccgaagttcctgaggatgtcgatctagatctgaagaacctaagacgatcttcttcactgaaggaaagaagccgcccaatcactgtagcagcttcatttcaaagcacctctgtcaagagcccaaaaactgtgtccccacctatcaggaaaggctggagcatgtcagagcagagtgaagagtctgtgggtggaagagttgcagaaaggaaacaagtggaaaatgccaaggcttctaagaagaatgggaatgtgggaaaaacaacctggcaaaacaaagaatctaaaggagagacagggaagagaagtaaggaaggtcatagtttggagatggagaatgagaatcttgtagaaaatggtgcagactccgatgaagatgataacagcttcctcaaacaacaatctccacaagaacccaagtctctgaattggtcgagttttgtagacaacacctttgctgaagaattcactactcagaatcagaaatcccaggatgtggaactctgggagggagaagtggtcaaagagctctctgtggaagaacagataaagagaaatcggtattatgatgaggatgaggatgaagagtgacaaattgcaatgatgctgggccttaaattcatgttagtgttagcgagccactgccctttgtcaaaatgtgatgcacataagcaggtatcccagcatgaaatgtaatttacttggaagtaactttggaaaagaattccttcttaaaatcaaaaacaaaaca

SEQ ID NO: 84831 - DNA, 831 bp, Homo Sapiens
  misc_feature (51)..(80): n is a, c, g, or t
  misc_feature (376)..(378): n is a, c, g, or t
atacataaattttcgtcacctttataaacagcgcagacggcgctatggacnnnnnnnnnnnnnnnnnnnnnnnnnnnnnngatttagatggcttcttgccagtttgagcctaatctgattcttacagttttaccttcttgaaccaatgtaaaagtttttttaatgttaaatgattaaattctcagtgaggctatcttccttttccccagtaacattcctgaatttactgttatcttattgtagtacttgcatgacatggattcctgatatctgatgagaggttcattcttgtgtattcagttaatgacaccaaaaggctcagcccaccccaaccctatctcatgttcagtctgtctaatacatgccagagattttnnnttcaaaaagtgctttatccctacaatgtactgacagttcttacagttgagatttgttcttttcagctattgcttgtgaaaaaaagcaagactatgtcactctatagaaggctgttaaagtgactcaggcaggaattaattattctgtacctaaggggttacttgtttaatgggatggcattgactttttgaaaatcaagtggactgagtcattgataaaacatttctaagagtggggctagagaacatactttacatctgacatcctttggcctaacaacatctattattatagtgctcagcagtgtgggcattgaagaggcgcagaatgctttgaaagaaactaatcagaatcttggaacatcatgatcatgccattcttaagtaaatcaactattttcaacactgaagaaaaatgaaacattatttagaaaacaatgagattacaagttcc

SEQ ID NO: 84832 - DNA, 1681 bp, Homo Sapiens
  misc_feature (64)..(64): n is a, c, g, or t
  misc_feature (100)..(108): n is a, c, g, or t
  misc_feature (400)..(430): n is a, c, g, or t
gagtgacatagtcttgctttttttcacaagcaatagctgaaaagaacaaatctcaactgtaagnactgtcagtacattgtagggataaagcactttttgnnnnnnnnntctctggcatgtattagacagactgaacatgagatagggttggggtgggctgagccttttggtgtcattaactgaatacacaagaatgaacctctcatcagatatcaggaatccatgtcatgcaagtactacaataagataacagtaaattcaggaatgttactggggaaaaggaagatagcctcactgagaatttaatcatttaacattaaaaaaacttttacattggttcaagaaggtaaaactgtaagaatcagattaggctcaaactggcaagaagccatctaaatcnnnnnnnnnnnnnnnnnnnnnnnnnnnnnnngtccatagcgccgtctgcgctgtttataaaggtgacgaaaatttatgtataaacctaaaaatatcattataagataaatctgaagaaaaaaggaaaatctaactttgattttcactggatatggcaatgtgaaactgaatcgtccggtctcattgaatattggaatggactgaatcactgagacagcttccgccaaacatcccagtggatataagggaatccacagagtgtaacgaagccatgtgagcaccttccaatccatgtcaatgcacgtcagcatgtagaaagagtacctgaaaatttcaattgcactccacaaataaaacacaaagaaaaccacagctttgttctgcatttcttccatggtgccaaagatgataaacaaaataaaatttcttccaagaagctggatcagagaaggcagcaccggtgacgtagtgactccaattgctgcattgatagtttccacaactgccagcatctggcagaaatacatcatgtcagccacagtatggaatgtgtcataaaaggactcttttcccaagatacagaatcgcacagtcaggttgacaaagatccaggagaatcccaagaattgcacaagattatacataaacaggtatcctttccttaagtttgtaagagtttcaggagagccttcgctttccagtcggagtttatttaggcgctcttcttccttagctctgagctccatttccgcatcagattcatccagccaacgatcaaagtcaggagccaaaaacagtggtcgcttttcctgctttgtgagtctctcccaccactgactcactttcttctgtactgtaatgtttacctgcctctgggtcagtttgtaaacaggctctggtttcacaaggtctaagaactccaggtgaaattcatagacattgtctcctttggcaccatgtccttgagctttgaaatgcagcacgttttcagtgatgctgatggcagggttctgtacgtcactcagctccacgcgcagatatagctcgcggtgtcgctgagcccagtagacatgcggcgtcaacacctgattctccatggccacactgcccagggcgcggggaggctaggctcgctgcgcctcgctgcctcaggtagtgctctgctggcgcgagcagaaagcaggcctcaaaccctagcgctcctgagcgcctgcaacccggcacctcgacgacgcgtgggtcgacgatatcccgggaattccggaccggtaccagccttgcc

SEQ ID NO: 84833 - DNA, 593 bp, Homo Sapiens
  misc_feature (321)..(321): n is a, c, g, or t
cctttacaccctacttctgagcttaattcagttgatgttatgtccaaattcaggctgagtgctcaggctgaagcaactctgtagcccacagtccgtgctggccactgtcggggtgaggcacattctaggcctggcatcgctgatgccctctgcaccaagtccttgacccaggccgaggacaggaagggcattgctggcctgtagctcctgttaccccacccagagccaggcgccagacgggaggctcccaggcgggaaggcccaggcccacccacgggcgtctggccggtcaagctcccagcctgggccgtggtctccctnggggacgccgctggcctcccagcttaggcccaggtgccaggtgtcatggggtctcctgcccatcttcccaaggatgccattgctgtcttcatcgtcttcccccgtgtgagacactggttgtctggtactcggcgacagtgtaccagacgcgcaccctatgtgaggtgctttaagggccctgtcctcaggaagcgcagtctggtggaagagatgagcgctgaacaaatcactaaataacacaaaacaacaatgtaagcagcactttcttgtgt

SEQ ID NO: 84834 - DNA, 500 bp, Homo Sapiens
ccaaggccagtagaaagctatggctgcaaaaccctggggtggacgatgtttgatgattagacggtcatctctaactactaaactaatatctgcattcttgttaacataaatctctccttggctattttaatagccacagtcccaaacttcatcccagcttagatttctcagcactgaggtaaactctgcattgtcatcccagcgtacacctttaatgttttattgatttcactggcactgtatttggacctgtccttgtatatgtagagacatatgtggcttcattggtaatttacaagcaaaagatgacatgacgtgacacctgtatgaaaatgtgatgattgaactccctgtgtacagcgagtgaattaaaatgtctgcctctccagacatttcttaatgattccacttaatagactctatgtgtgctgaatgttcctgtgtacatatgtgtgttaaataaaacaattgtattgaagactgtttttctcacaataaaa

SEQ ID NO: 84835 - DNA, 583 bp, Homo Sapiens
  misc_feature (409)..(508): n is a, c, g, or t
acggaagccgtctgactcccagagtctgacccccggctagtaccctatagagagggggctctccaaaggggctgctggggcatgtgtgcctgtggcagaaaagaggagaccctggaattcagcaccctgggtgccattcccagcgtttagtttctagaggcctcagtttctccatcagcttatgggatccttgtctttactgacaagaatggaatagaaatgtaaaagtactctgaaaagcaattgccctgtaacttatctagaaagaaaagaccctgagactccagaatctgctgttgccatagccccatatgtgtgaattctgcaactagccaaggctagttcctttcaattccatttaaaaaacaaaaaccagcaggtgtggtggctcatggcgtaatgggcctgnnnnnnnnnnnnnnnnnnnnnnnnnnnnnnnnnnnnnnnnnnnnnnnnnnnnnnnnnnnnnnnnnnnnnnnnnnnnnnnnnnnnnnnnnnnnnnnnnnnnttagccgggtgtggtggcacacgcctgtagtctcagctactcaggtggctgaggtgggaggatcgtttgagccct

SEQ ID NO: 84836 - DNA, 1737 bp, Homo Sapiens
  misc_feature (699)..(759): n is a, c, g, or t
gaggcatagtgaatatagaacagttgtacaaaaagcaggctggtacggccgtaatcccgggatatcgtcgaccacgcgtcggtgtgctgaaatcttgcattggttgcctttggtgtcttgaaaagtgcctaaattatttaaatcagaatgcatacacagccacagctatcaaccagcaccaacttactgcagcctcagcgaaaggatgccgtttgtcattctggtggagaatgctttgcgagtggctaccatcaacacagtaggagattttatgttattccttggcaaggtgctgatagtctgcagcacaggtttagctgggattatgctgctcaactaccagcaggactacacagtatgggtgctgcctctgatcatcgtctgcctctttgctttcctagtcgctcattgcttcctgtctatttatgaaatggtagtggatgtattattcttgtgttttgccattgatacaaaatacaatgatgggagccctggcagagaattctatatggataaagtgctgatggagtttgtggaaaacagtaggaaagctaagtgaaagaagctggtaagggaggcgtcgctgattccagagagctaaagccgagtggcttcgggagcaagttctgcttgaacctagccgacggttatggaaacccattgacattccaaaacaatatatacacataactatgtatnnnnnnnnnnnnnnnnnnnnnnnnnnnnnnnnnnnnnnnnnnnnnnnnnnnnnnnnnnnnncacacacacacataaatcagccaaaatcagagaaaaggaacagggatttaataccttttttatgcttatttttgtcaaacatgtactcctttcatacgggtggcttttacaaggcaacttccgtcatttaatgttttcaactgtaattgtcttaatggaaatgttaaaattcatatctgattaacatttttaataacttagaggagattttaactttatttaaaaataggtaaaattattgtacctaattatgtctaaagtttattcaggggtaatttccctgatgtctgtataaaatcaagatcttattttactgatgcataagtcctagtgggtcaagactaggcatatgctttcagataaataaggaattactccaatcagttttccccaatcaaagaagccatgtcattttacttttagaaacatacaattgggcccaatatgggaattttcataatagttcatacatttgtcagccaacattaaaaggtaaccaactcctcagggatttgtagtttacccctaacgccttctttaaaagaaaggagggtaaaaaaagaaaagggtagataatctttcgtatggcaacttttcccttaataattttgcctttccttcctttttgacctttactagcatcccctccacacattttggtggtggccctgattttaaaaagaaagctggggggcaaccaagcggaagttttacgcctttaaaactttctggcggaatttggattttgccaaatttaaggaaatgcctggaaaggaaataaagaaagggggaccagaaacattgggaagcttaaacggcacttgaaaaaaattcccgggggccttggggccttccggctttcagaaaatacacctcccagggggtttaaggcggtacaaccgcgccattttctatttaaaagggcgttgggtaataaaaatcttgaaaaaacccacttgggcgaggggggcctcccct

SEQ ID NO: 84837 - DNA, 558 bp, Homo Sapiens
aggttcttcctcagacatggaaaagcgactcagagcagagatgcaaaaggcagaagacaaagcagtagagcataaggagattttggatcagctggagtcactcaaattagaaaatcgtcatctttctgaaatggtgatgaaattggaattgggtttacatgagtgttccttgcctgtatctccccttggttcaatagctaccagatttttggaagaggaggaactgaggtctcatcacattctagagcgcttggatgcccatattgaagaactaaaaagagagagtgaaaagacagtgagacaattcacagccttaaagtagcctcttaaaaaaatcacaatcttggaaataaaaataaacaccaaagagttactgtcatctgaagtagcagctctttaaaaacatgaagagataaaattataaaaatgatacatctaaagcagtggtgaagaaagctgaaaaactgatacttttgataggcattttctctgcactggtttgtttaaaggacttcttccagcaataagttgaaagaataaaccactttgctagaaaaa

SEQ ID NO: 84838 - DNA, 739 bp, Homo Sapiens
  misc_feature (260)..(303): n is a, c, g, or t
  misc_feature (315)..(315): n is a, c, g, or t
  misc_feature (483)..(590): n is a, c, g, or t
tggctatggaaatgtcacctaggatgccctccttcccttcggtctgccttcagctgcctcaggcgtgaagacaacttcccatcggaacctcttctcttccctttctccagcacacagatgagacgcacgagagggagaaacagctcaatagataccgctgaccttcatttgtggaatcctcagtcatcgacacacaagacaggtgactaggcagggacacagatcaaacactatttccgggtcctcgtggggggattggnnnnnnnnnnnnnnnnnnnnnnnnnnnnnnnnnnnnnnnnnnnngcacgcgcacgncaacaacacacacacaatttccatatctagttcacagagcacactcacttccccttttcacagtacgcaggctgagtaaaacccgccccaccctccacccgttggctgacgaaaccccttctctacaattgatgaaaaagatgatctgggccgggcacgctacgtcannnnnnnnnnnnnnnnnnnnnnnnnnnnnnnnnnnnnnnnnnnnnnnnnnnnnnnnnnnnnnnnnnnnnnnnnnnnnnnnnnnnnnnnnnnnnnnnnnnnnnnnnnnngaacgattagccgggctggtggcgtgggcttggaatcacgaccgctcgggagactggggcgggcgacttgttccaaccggggaggccgaggttgcgatgagctgagatcgtgccgtggcgatgcggcctggatgacggagcgagacccc

SEQ ID NO: 84839 - DNA, 487 bp, Homo Sapiens
  misc_feature (46)..(46): n is a, c, g, or t
agaaaccgcgggaactggagagcaagtgcagctttaatccccccgncgtgatttagatggaaagcagccctgaagacccagttaagagaacccgcgagcagagcgcgctggactagcacccaacagacgtgagttcgagaccgtcctgccccttaatccctgtgtgacccttggtcccattttttaagtctgtgagcctcgcagtgttctcattccctgaaaagagcctgcccccatctccggactgcagtgagaacaaaaggagactatgaacatgactttttgccacttttgaagccccacactgaggaaagattttcctagcacttgggagattttctttagcaccagctgccaagaatgctgggaaggagacagccccatcccagaaggaagacaccttaaatcagaactttatttttcctcctatgaaaatacaatctaatactggagaagtgtaaaaattaaggagtcattagaagccaaa

SEQ ID NO: 84840 - DNA, 409 bp, Homo Sapiens
  misc_feature (185)..(185): n is a, c, g, or t
  misc_feature (323)..(323): n is a, c, g, or t
  misc_feature (352)..(352): n is a, c, g, or t
  misc_feature (365)..(365): n is a, c, g, or t
aatgctgaagactctatagcaattaaataactctccatttttccttcttccaagcccctggagccaccattctactttctgtctctatgaagtctgactgctctaggtacctcatgtaagtggaatcatacagtgtttgtctttttatgattggcttattttacttactataatggccttaaggntcatccatgttgtagcatgtgtcacaatttcctttttaaggtggaacaatatactccattgtaaatacacacaccactcatctgttgatgaacacttggggttgcttttgcctcttgtggaataaggctgctatgaantataagtgtacaactatctctttgggganccggctttcgatncttttggggtaggggacccagaggggcactactcggatccatat

SEQ ID NO: 84841 - DNA, 1004 bp, Homo Sapiens
ttccgaaggggaatttggcaaggggggctttggtggaattaggggggtttataaaatttgcccaccaaagagaaagccttcccgttcccccaaaagccctgttgcatggggtattggattcccattctggggccacccattttgtgtgtcagggccaggggccttacaggccccgagaaaatttcagcccttcgcctcttaaggttgattaaggaaaccaaaccggaaagatttctttctgaaagaagcagccagcctcgtgaaggagcgggcccagccgccgggcccgagggtcgccttttgttcggagtggcacgattgtccgttcccagacattctcgcctgaagcacgaagccagtatgtttgcagactttatcgtagtgacagcgacagttcaacgctgccccggaagtccccctttgtccgaaatactttggaaagacgaacccttcgctataagcagtcatgcaggtcttccctggctgagctcatggcccgcacctccctggacttggagctggatctccaggcgtcgagaacacggcagaggcagctgaatgaggagctctgcgccctccgtgagctgcggcagcggttggaggacgcccagctccgtggccagactgacctcccaccctgggtgcttcgggacgagcggctccgtggcctgctgcgggaggccgagcggcagacaagacagaccaaacttgactaccgtcatgagcaggcggctgagaagatgctgaagaaggcctccaaggagatctaccagctgcgtgggcagagccacaaagagcccatccaagtgcagacctttagggagaagatagcattcttcacaaggccaaggatcaacatacctcctctcccagccgacgacgtctgatggagtgcattgtgcacatgaagtatttatccacctgttttattttcatgaagttcttagactagctgaatttgtctttaaaatatttgtgcaaagctattaatatacacattttgt

SEQ ID NO: 84842 - DNA, 885 bp, Homo Sapiens
  misc_feature (551)..(551): n is a, c, g, or t
cagtcgacggtagcggacatatgcccgggaattcggccattacggccggggcaaagtgaccgaggtcatgcactcgggccgcaggcttctggggacctacttccgggtagccttcttcgggcagggattctttgaagatgaagatggaaaggagtatatttacaaggaacccaaactcacaccgtgtcggaaatttctcagagactccttaaactgtactcggataaatttggttctgaaaatgtcaaaatgatacaggattctggcaaggtcaaccctaaggatctggattctaagtatgcatacatccaggtgactcacgtcatccccttctttgacgaaaaagagttgcaagaaaggaaaacagagtttgagagatcccacaatatccgccgcttcatgtttgagatgccatttacgcagaccgggaagaggcagggcggggtggaagagcagtgcaaacggcgcaccatcctgaccagccatacactgcttcccttatgtgaagaagcgcatccctgtcatgtaccagcaccacacgtgaccggaanccaatcgaggtggccattggaccgagatgagtaagaaggtggcggagctccggcagctgtgctctcgggcgagggtgggacatgatcaaaatgggaggtcaaaattccagggacagcgtgagtgtacaggttaaatgctggaccattagcaatattgagcgagcttcttaagatgataccaaacaaaggggaaattcgtgacaaataaacggtgcaagctggtttaaagggaagtttacaggcaaatttgtgggaaggtggggggccagcttaacgggaaaaagaagcggtgattaacggaagaacaattgagagattgatgggaagaaggtag

SEQ ID NO: 84843 - DNA, 791 bp, Homo Sapiens
caggaaacgtttactgaaccagctttaaaaccgtgctaattcataattaaatgtgtgaccaatataggtatctgctgtacaaaattttatatagatgctcatcaacttaagatgggcttacatgctgataaacccatcataagttgaaaatattgtatgtctgttgaaaatgcgtgtaagacacctaacttactgaacattatagcctagcctagtctaacttaagcttgctcggaacacttaacgttaacctacagttgggcaaaatcatctaatacagagcctattctgtaacagagtgttgaatatctcatgtaagagtattttactgcatatcaccagtctggaaaaggatcagaattcgaagtatggtttctcctgaatgcatatcgccacaccattgtaaagttgaaaaatcataatttccccaacttacaatttttgtccattgtccatctgtacaatggaccttactgcatgagtaaggtaagcagagtccactgtcctggggcttaataaggtaatgggaatagaaatgtaagactctctcccttccctcttttcttgccaaaggaattaaaggagttccctttcctgagagctttttagaagtgttgaagttaaccctcccaacttttttctctcataatgggaaagcataagcagtgaaatgggagttaaagttcttttctcttgccaaccttctccccttttaacttttattagggaaaaagctggcaacatacaaatagactccatgtgtaaatagagacaattgactgtagatagaa

SEQ ID NO: 84844 - DNA, 724 bp, Homo Sapiens
ccgactgccaagggcgtggtgaccattgagcagatcgtggacacgctgcccgaccgcggccgctcctgctggcatctgggtgcagtgtgggcgctgagccagttccaggaaaacgagctgttcctgggcatgtacccagaagagcattttatcgagaagcctgtgaaggaagccatggcccgattccgcaagaacctcgaggccattgtcagcgtgattgctgagcgcaacaagaagaagcagctgccatattactacttgtccccagaccggattccgaacagtgtggccatctgagcacactgccagtctcactgtgggaaggccagctgccccagccagatggactccagcctgcctggcaggctgtctggccaggcctcttggcagtcacatctcttcctccgaggccagtacctttccatttattctttgatcttcagggaactgcatagattgatcaaagtgtaaacaccatagggacccattctacacagagcaggactgcacagcgtcctgtccacacccagctcagcatttccacaccaagcagcaacagcaaatcacgaccactgatagatgtctattcttgttggagacatgggatgattattttctgttctatttgtgcttagtccaattccttgcacatagtaggtacccaattcaattactattgaatgaattaagaattggttgccataaaaataaatcagttcattta

SEQ ID NO: 84845 - DNA, 453 bp, Homo Sapiens
ataggtaataattgcacatggttcaaagctaaaaggtatgaagtattatgtagggatacgtccctcccattctgtcccacagccaccacctctctcctcagccagcaatgacatcagcgtcgacttgcctttcccggggttgtgcagagttagatatgcacatacatgtggtataagcacatgtacagaggagtacacatagcatataaacatgtctgtagcacatatatattctttcccctcttttaaaacaaatggtagcaaaccaaccacacactgttctgtatcttgctctgtttgcttgatacatcttgtaagtggctcctaattactatgtaaagattgaccttatttaaatttttttatgttgaaatcatcaatattcccatcattatggtgtgttctttgattgacaaatcagctctcaataaaccacttataagaatatgtaaa

SEQ ID NO: 84846 - DNA, 169 bp, Homo Sapiens
gcttcaggaattcggcacgaggtttgattatgaagcaaagagaaggatagagatagtagtggaaaggaagaatggacggagcagctgaatcccaacaggagagaacttcgaatattatccctcaagatattagaaaataaaaaagggaagacagactgagcacagcgac

SEQ ID NO: 84847 - DNA, 905 bp, Homo Sapiens
  misc_feature (23)..(23): n is a, c, g, or t
  misc_feature (37)..(37): n is a, c, g, or t
  misc_feature (45)..(45): n is a, c, g, or t
  misc_feature (56)..(56): n is a, c, g, or t
  misc_feature (63)..(63): n is a, c, g, or t
  misc_feature (97)..(97): n is a, c, g, or t
ttcaattccttgggggttctgcnatggcaaggctgcnggggcaanaggcccaagcnatctccnatggccccctggatttaacctgcctaacaattgncaaaaggaagcccccaagaggtaacagctgccttaattctcccaactcccaatggctgctgccccaggctctgactcagttttgcccctggaaatgtcctcttgctttcccttttagtaacttattcatcaaatcatctgtaaggctgactcccacatgctcaagccttaatttggctacattttcagccggcgtggcttctctattaaatggtaatggcttcaggttaacatcaagctggacctctaagtcagaagatcgggtatgaggcaaaatcatatggtgcttgacgtactggggcccccccagcatggtctccagtaaaaagacagtttctaagaattcaggctttgaattcatatccttctctgctaaataccacagcaattcagacccctcttgctgaaggtgagtactaagacgattgcctctgtaatctggacactcaatgccaactgtaccatcgagggtatatagttccttaaggaggtcaaacttagttctctcctgagctaacctgacaaaccctggactgagagcgaaatcaattaactctactggaaagtactccaaaaatgccaggcccagcaggcaggtgggcaggtgttctgggtactggttgaattcaggcatctttctgtgaatctcacttatcaggctggagtaaaattcttctgcattgggtggcttataattcagagttccaaatgaccacagaatcttggcaacatctttacttcgacagtgtgccactctaggaggcaaagacgcagccactgcattcattactccttcattcaggaagcgt

SEQ ID NO: 84848 - DNA, 513 bp, Homo Sapiens
  misc_feature (116)..(116): n is a, c, g, or t
  misc_feature (200)..(200): n is a, c, g, or t
aagaaaaaaagctcctccctcagtgacttaattagggtgtcctaattaaggcagcacaacatcaaagaggcaggtccagggacccccgctccaggtcaacttctggttgcaggatncctcagccctccagcgggctcagacagagggccttggctgtcggctaagtccctggctctgctccccgcctccctgtttccctnattggggtgcctcatccaattattcaggccctcgatcacatcctgctgccgagcgggctttgaaggttcagtaaacagccacttcaaaacaaagaggggccattaaaccaaactcaaagacttccttaatggctgcgtgctcggctgcaggagaggagtccggcctcaaaagggagggctccctgggaactaatcccctgagctctcccagcctccttctgcaaatatctgcccgcttcctctctgcactcaatcactcggggtgcagagtggttactggagcgacccttgacagagggctcctccaggaaaa

SEQ ID NO: 84849 - DNA, 480 bp, Homo Sapiens
  misc_feature (16)..(16): n is a, c, g, or t
  misc_feature (454)..(454): n is a, c, g, or t
ttggcaatgtttccanggctggggtaataaattccatttaatgtccttccccagtttttccctcctctggacctccttcccctgtgtatctgtccagccagtggtcccccgggagcagcacctatgcacttcattaataagaagggattaaagaaaaaagcccccagtctcctaatacacttggataatttggtgccatcccacaaggcgatagacccctgctgcatagatgtcattagaaaggtacaatttcattactttttactgcagagccttgagtgaaatacaaaatatgttgtctcatatgtaggggcaaaaaagtctaaagctttcattcatttcatgcccctaaaaatagtagaatgcaaaaaatgtattttatggttttcacatgtatattccttcctttagtagtccttgaatcatacttcctattaaatattgagcaaattanagtttaaaataaaataaccaaaaaat

SEQ ID NO: 84850 - DNA, 597 bp, Homo Sapiens
  misc_feature (13)..(13): n is a, c, g, or t
  misc_feature (45)..(45): n is a, c, g, or t
  misc_feature (55)..(55): n is a, c, g, or t
  misc_feature (77)..(77): n is a, c, g, or t
  misc_feature (99)..(99): n is a, c, g, or t
  misc_feature (136)..(136): n is a, c, g, or t
  misc_feature (404)..(404): n is a, c, g, or t
  misc_feature (466)..(466): n is a, c, g, or t
  misc_feature (496)..(496): n is a, c, g, or t
  misc_feature (526)..(526): n is a, c, g, or t
  misc_feature (546)..(546): n is a, c, g, or t
aagggaaaaaaantgaagtccaccggtggggccgctcaaaaaacnagggaacccncgggttaaagccctcgtgtttnacccaaaatttgtcccgtggtngggaaccaagtctcccggtcggtaatggtatccaacntgttgggctttagccattaccccccagaaaattgctcctccctgaggacaaggctctgtctctgatgctgctggcctccctcaagtgctgccctcctccgtttggggcttggtggatacaagtgctgacacacaaaggcaggcaggcaagctcggcacagggtgtcctccaggcccctctgatggcagggaccagcgagacctgggggaaactgcacagtctgtgccttgtctgtgctctcaggagactgaggggaattagtggggtngggagagattttatgttggattaaaaactgacctccaggccggcatggtgtctcatgcctgnatcccagcactttggaggccaaggtggagntcacttgagccctggagtttgagcttcagnagctatgattacaccacttnctcttccagcctgggcaaacagagtggcaccctgtctctaaaaacaaacaa

SEQ ID NO: 84851 - DNA, 163 bp, Homo Sapiens
aaataaataaataaattatgagtgagtattttctagaaattcaacttgctaagcctgtaatacttaagggtagtttatctagatacagtactttcttccctgataagtagtatcattggagcccttaggtataggagaagaggaagaagtttaaaaagtgtaa

SEQ ID NO: 84852 - DNA, 296 bp, Homo Sapiens
aaattgtcaaacttggtaaaaagcaccagcatggccaagtttctctagggacttcatttcattttcaggttttcaatccagctataaggaatatgtaatggacttatatacagcacacagcaggcagcaaggctgactgacatgtcatagttttcatagtagtcacaaatactatgatgggtttcatggtcttggttgtgaaatagatatctgaaacaccgtgagcttagaataaaaagtagtagtgagattttccactttctgcctgtatacctttgagctcttaaatatttaaa

SEQ ID NO: 84853 - DNA, 250 bp, Homo Sapiens
gcacgagatttgcccagacagagaacttgagaatcaacccctatttctttacagttaaaaataaaaataacatgtggctatatgaggtatgctagcatatcaaagattgctgagaattagatgatcataggaaagaaccatagaatttaacttctagtatataagttactattaatgaaaatagtatttaaaactggaaaaactgaacataaatgcttaagaaggaaattgatgtttaggaaaggtaaag

SEQ ID NO: 84854 - DNA, 487 bp, Homo Sapiens
  misc_feature (109)..(109): n is a, c, g, or t
  misc_feature (140)..(256): n is a, c, g, or t
gtttcactctgtcacccaggctggagtatagagtacagtggcaatcatagctcactgcaagcttcaacctcccaggctcagatgatcctcccaactcagcctcctgggnagctgggaccccaccatgtgccactgatctnnnnnnnnnnnnnnnnnnnnnnnnnnnnnnnnnnnnnnnnnnnnnnnnnnnnnnnnnnnnnnnnnnnnnnnnnnnnnnnnnnnnnnnnnnnnnnnnnnnnnnnnnnnnnnnnnnnnngggtgagccaccacacccggccccagctattttcattagaccatgaactccatgaggatggaaatgccctggtctgctcactagtataaatacaataccctgtatggtgccaatacaatagtataggttttcaataaatgtgtttattaaataaataaataacatgttggtagcctgataaaatttaatttcaagctaaatcgctttaaatggttatgaagatagaaagta

SEQ ID NO: 84855 - DNA, 526 bp, Homo Sapiens
  misc_feature (26)..(26): n is a, c, g, or t
  misc_feature (145)..(145): n is a, c, g, or t
ccagcctcgaaattaaccccctcacnaaagggaacaaaaagctgggagcctccccacccggtggcggcccgctcctagaacctaggggatcccccccgggctgccaggaattcgggcacgagagtatatcccctgcaatgggaanccctacctcagcaataaacctaatgaaataccacatgtaacccacttggatgaatccttaaatgcattttacctaagtaaaagaagccaaactcaaaaggctgcttactgtttgattcccattcatattattttctcaaaaagcaaaacaatagggatggagaaaaaacttcagtggatgtcaggggttaaggttggaatgctccttgactacaaagtggtagcatgaggaatttgtcttaataattgaaattttccgtgtctttattgtagttacataagtatatgcatttgtcaaaacccataggcttgtacactaaaaaggatgaattttactgtgtgtaatttttttaaataaatgttatttttatggaggaaagaa

SEQ ID NO: 84856 - DNA, 598 bp, Homo Sapiens
  misc_feature (523)..(523): n is a, c, g, or t
  misc_feature (554)..(554): n is a, c, g, or t
ggatctagaggatccggcgcacatttacaccatctcccagcaagacaccagttgaaaaccccttgaatattatgttgaacattgtcaaaaacgaattgcaggaaccctgtgacagtcccaaagttaaggaagaacgaattgatacaccaccagcttgtacagaggaaagcatagcaacaccctctgaaattaaaacagaaaatgacacagtcgagtcagtttaaataaaatgagaaaggtatgtttttcttttttaaaaaagctgctgttggatctagaaggtgaagaatttttttatgtatatatagacatatctatataaattgtctggctgaggcagggccttcagctatcatttggttaataaatacattttagtatttgcatttcctactgcctgcagagtttcaggtgcttgttgtgtgaaagttctgtagatgtgtgcaaatttaacgaaatgaaattgtatgtgtaaaaatgtacgatttttcactgtgcaactgttaaattattaaataaaaanatatttttgcctattcctgggggtgttaatnttttatggcacaccctccaataggtttcctgtaccttttattgg

SEQ ID NO: 84857 - DNA, 444 bp, Homo Sapiens
ggggaaccagcattgctatggctccagggatctccttggactgcacaatatgaagaggcggcagctggctcggcttggctaccgtgtggtagagttatcctactgggaatggctcccactactgaaacgaactcgcttagaaaagttggcgtttcttcatgagaaagtattcacctctgctctctgaagggcatttaggggcatttctatggcaaagctataggtgtatactgtaccaggtgttgcaaaatgattataaaagccagaatgtaagtttggcgataaaatagtgtgttgaggagacttaattgtatccaaggcaggttagagctagtgtatgttactgtgaattgtaatgtagttggattgtacaaattactgcaaatgtatacatgttactcttagtaaataataaacatcttaatatgtcctacggtcaaaaaa

SEQ ID NO: 84858 - DNA, 340 bp, Homo Sapiens
gatctcctattgggctttgcctttggttccctgtttcccccccctaaaaaaacctaacttcctaaaaacattctgcctcaagacaaccatttcaagttaataggacacatgctcctaaaggaaaccatcccaggagaaacatttgcacaagttctcctatgacttgagattgcatctgagaagggtgcagggggagaacagacagaaacagcccactctgtgtgcagaacgccgtgtgtcctcagtgtttctcggggcccatagctcattagctgcagttggtatgaagcctgcaacctgtgaggccataaaattccgaataataattcatcaggtcctt

SEQ ID NO: 84859 - DNA, 1149 bp, Homo Sapiens
  misc_feature (198)..(209): n is a, c, g, or t
cagtcgacggtaccggacatatgcccgggaattcggccattacggccgggtatccaacaggtcaaaaagagttcttcacggtcttggatataagtaactcttggcctcagaggaaggaaaagcaactcaacactcatggtcaagtgtgattagactttcctgaaatctctgccattttagatactgtgaaacaaactnnnnnnnnnnnngctttggtttggtattggtttactatgagtcgttatttaatttctcttgaaaataatttcctcaaagcccaagtcagtaaaatgttatcagccagtcttccaaaatggtcataaactttataaactggcttggggtaaactgagcagaaggtgatacacagaagggaaaatgtgcactcatgctagtgtgaattgggtaagtcgcgtgactctgcaggctgttcctgtattattttcacactcatattgcttaacatattacatattagggattgtaagaaaacctttaacttaaacaattaaagactatatataattaaactactctgccctggacactctctgagaaacagatctactgggccctttttcatgagccattaggtggaagacagcaaagagatcttctctagtgctcagggttacctctgaacacacagcaagcatgtccctgcctcccatgaatcttacccttgttaatccaaatctctgcaaacctgtggcatcaaccagtggtgctcgttttattgtttaaaaatggccttctcactctctacctgaaaagttgattattcttacaatggagggaatccaatggcctcatcaaagcctcaaagagggatatggaaaatcatccactgttctagaggtatgctgtaatgccaggtaagaaatcctgtgctggtatacccattgtattaccattccctcttgccccctgctctgcaggaagacagattaagtctctctgctgctcttcttgaataggggaaatgtgacgtggggcaatgatagaaggaaagtcgaggccttgccgccttttgcctcctggcctcttggagtctgagtcactccacgactatgcacctggttagcatttataaagcatgtcccctcttagagtcccattctactcacacacagagctcctaaacatcgg

SEQ ID NO: 84860 - DNA, 844 bp, Homo Sapiens
cagtcgacggtaccggacatatgcccgggaattcggccattacggccggggaagtctcagaggctggagagcagagcaccaagatcgttctggcaggaacagccagtgggaggttccagctgagcgctccccagaggtgagctgatccccagccacagcacacaggaccaggctgcgagaacagcatcatcagcatcatgctattacaatcccaaaccatgggggtttctcacagctttacaccaaagggcatcactatccctcaaagagagaaacctggacacatgtaccaaaacgaagattacctgcagaacgggctgccaacagaaaccaccgttcttgggtttggcattactggatccctctcaattatctctggaaaacaatcaactaagccctttgacctgagcagcttgacctcaaatgcagtgagttctgttactgcaggagcaggcctcttcctccttgctgacagcaatggtagccctgaggactgcctctcaacattgtggctcagaaatggattatctatcctcattgccttattcggagtactattatccaatatatgaaatcaaagattgtctcctgaccagtgtcagtttaacaggtgtcctagtggtgatgctcatcttcactgtgctggagctcttattagctgcatacagttctgtcttttggtggaaacagctctactccaacaaccctgggagttcattttccctcgaccaagtcacaagatcatatccaacaggtcaaaaagagttcttcaacggtctggatatacgtaactcttggcctcagaggaaggaaagcaattcaacactcatggtcaagtgtgatc

SEQ ID NO: 84861 - DNA, 963 bp, Homo Sapiens
gggtccggaattcccgggatctctaagaaagggacaggaagtctcagaggctggagagcagagcaccaagatcgttctggcaggaacagccagtgggaggttccagctgagcgctccccagagcatcatcagcatcatgctattacaatcccaaaccatgggggtttctcacagctttacaccaaagggcatcactatccctcaaagagagaaacctggacacatgtaccaaaacgaagattacctgcagaacgggctgccaacagaaaccaccgttcttgggacagtccagatcctgtgttgcctgttgatttcaagtctgggggccatcttggtttttgctccctacccctcccacttcaatccagcaatttccaccactttgatgtctgggtacccattttcaggagctctgtgtttcgccattactggatccctctcaattatctctggaaaacaatcaactaagccctttgacctgagcagcttgacctcaaatgcagtgagttctgttactgcaggagcaggcctcttcctccttgctgacagcatggtagccctgaggactgcctctcaacattgtggctcagaaatggattatctatcctcattgccttattcggagtactattatccaatatatgaaatcaaagattgtctcctgaccagtgtcagtttaacaggtgtcctagtggtgatgctcatcttcactgtgctggagctcttattagctgcatacagttctgtcttttggtggaaacagctctactccaacaaccctgggagttcattttcctcgacccagtcacaagatcatatccaacaggtcaaaaagagttcttcacggtcttggatataagtaactcttggcctcagaggaaggaaaagcaactcaacactcatggtcaagtgtgattagactttcctgaaatctctgccattttagatactgtgaaacaaact

SEQ ID NO: 84862 - DNA, 307 bp, Homo Sapiens
gcacgaggagagagaaaacagagataactacggtacgctcgttcatttacacacataaatacgacgcttttcatacgtaaaataaacgtctttatcgacgatcccttctttatagagcgatgtgtatttatttgtataacacaaacacctacatctatcatacagaagtctatttccatacaaccgatacggtatttaccatacggcaagagtatttcaatgcagaggatacacgttgtcgttgttttgcatataagcgtacaggaaacggtttacatttaatacatataaggtaaacgcgtggaaa

SEQ ID NO: 84863 - DNA, 869 bp, Homo Sapiens
  misc_feature (827)..(827): n is a, c, g, or t
gggacagcatggccgccggtactgcagctgccttagcgtttttgagtcaggagagccgaacgcgggccgggggtgtcgggggcctacaggtcccggccccggtcactatggacagttttttcttcagctgtgagctctccggccacacccgctccttcacctttaaggtagaggaagaggatgatgcggagcacgtgctggcactaaccatgctctgcctcaccgagggagccaaagacgagtgtaatgtggtagaagttgtggcccggaaccatgaccatcaggagatcgcagtccctgtggccaacctcaagctgtcctgccaacccatgctcagtctggatgacttccagctccaaccacctgtaaccttccgcctgaagtcgggctctggccctgtgcggatcactgggcggcaccagattgttacgatgagcaatgatgtgtctgaggaggagagcgaggaagaggaagaggacagtgatgaggaagaagttgagctgtgccccatccttcctgccaaaaagcaggggggcaggccctagccctcctaggtcagctccatgtgccatgcaccgccatgcaccctgttccctgacaagtttcaacaattgtaaatatttcttccttgaagaggagagcttgggtgggggttgggtgggagggacttgggtctttggtgctaggagagggcctgtgctccacacagccgtggttttctgattttcaccatgcccggggcctcccttcccacctgcctgtgagaattgggaggttagtgcctgaagctcagagctacacatttttaattagtttttacatttttnggataaaggttgaaataaagtggtgtggaatttttaaaaaaa

SEQ ID NO: 84864 - DNA, 341 bp, Homo Sapiens
catccagatgtggtttgattcagcccagggcaaccccaacgaggaagtggcgaggttctatgctgcagccatgcatgtgaatgctggtgagatgcttcatgggactgggggtctcctgctcagtctggccctgatgctgcaactctggctccttggctgagttcagtcctcccagactacctgccctcagcttggataaccaggctgggctcagctcagctcccacaaatgacagccccttaagcatgcttctattagtcacctaaccctctgtcacccagtctgttgctgctccatggtggggccaagagtcacttctaataaacagactgttttctaat

SEQ ID NO: 84865 - DNA, 305 bp, Homo Sapiens
  misc_feature (20)..(20): n is a, c, g, or t
  misc_feature (59)..(59): n is a, c, g, or t
ggaattcagcacgaggctgnagcccttcacatatattgattcctaacccttatgtcaancattgccaagatagattaggaagaacaaagaacctatattagtagtttaaaataatggcttttaaactgctttacaccttgtttattcaaaatcaaagtgagccccttgaaatttaatcagggactggacggtagggggcacccatggtacttatgttgctctggctatgttgagagcgtcttaagtcataaacacagatttgttgaatgagtttgatactttgaaaattatcacctaggaggctg

SEQ ID NO: 84866 - DNA, 606 bp, Homo Sapiens
  misc_feature (29)..(29): n is a, c, g, or t
  misc_feature (92)..(92): n is a, c, g, or t
  misc_feature (126)..(126): n is a, c, g, or t
  misc_feature (148)..(148): n is a, c, g, or t
  misc_feature (156)..(156): n is a, c, g, or t
aagtccccagggtggaaatggaccctggnaccagacctttaaaggggtaaaaaattaggatttaaaaccctacccctgagactcctataaanagaaaaaaagggtagccaggggggaaacacctancctttcctttttggcctagaanaagtgtcnttggtgccaaacccctaaatccaccagataggggaatatacctacataaccctgcagttccttttcctttgtgaatccctgacacactgatagatgggggattgtcgatcagagaaccttattaatatttagtactggaagaactctgtctcccacagttgccagtaataaaaagaaacattggctactatgagcaccaatcactgggttatagctttcaaaattattgatgctgcagtgctttagagctatttccttgaatttaagaaacaaatcttaacagttttatggtgctgatgcttagttgtctcatgccattaaattgtaaaagtgagttgatgcaatacatgtgactttctgctataatgcaaatatttattttttaaatttattttaaaatgccgtgaaaactgtttaataaagatttattgttttaatatttaaactttc

SEQ ID NO: 84867 - DNA, 920 bp, Homo Sapiens
  misc_feature (842)..(860): n is a, c, g, or t
cagtcgacggtaccggacatatgcccgggaattcggccattacggccggggcagttggtcctggaaaagaaagaaaccaagagattatggggactcaatgggcttcttaagagagaataagttgaaatcaatgaccagaagaccctgatggaagtggaggagaatcatctcaggcaaactttttgtgtgccagtaacagaaaccctctttgtgtgatcacatgcaaagtataggatatttgcaatatagccatggggaggagtgcagggcccaagggtagattttagccaggcctcccaggaacagaactcggatccgaaaagcccagagaagctagagctgcccctccaacactctcggatccacatggtctgtgttctctagacccccctgcatgttagcggtgttctctctctgtggactgactgtccttctcagtgaacatgtccacccgacagctcctgagtttatatcatctcaaccctcacaacccacagaggctgtgtctcctagtcacagctttaaattactggaaaaataaatgactggccaaacttggagcaggtgtccatcccagccctgtgtagttagagcaggaatcaagatctcaacacaaatgtggctgccaagcactcagccccggggcgaggggtcaagttcttctcagagaaagaggaataagttggttctcagaagacatcacaagatacgtgtgtacccaacaatctctgatctctgctgatcttttgcttagacgttaacttgatgcatcattggaaaggtgtttctctcatctctgtcctaaggcttgataaagtcattaaaattgtgttctttgactnnnnnnnnnnnnnnnnnnngaccgcgtatgcggccgcaagcttattccctttagtgagggtaattttagcttggcactg

SEQ ID NO: 84868 - DNA, 305 bp, Homo Sapiens
tgacgaccgtacctggcccacagaaatagatttgaggcagactttggggagccatgagtgtcaacatctacttgtgaaagcagcaggaccctcattcatcaagaaataatcctatttccctaaaagctgactgaatacactgagatggcaagtagctttaccctaactggatgggaggaaagaaaacgcttcccaggatgtgggggcagagtgttccaaaggcttttaaccttaacatatgctttgcttaaacaaatacctgaaacacctacactacaaaaatgcataatctcattatttattta

SEQ ID NO: 84869 - DNA, 825 bp, Homo Sapiens
aaaccaagacttaatttaccatgttgtgcctaatacaaaaaggatttcatttatctggtaaggcagtcttagtaggggtgtagccaccatctctcgtgttttgttcaccccttacttccccacttgctaaacccaataaccccaccgtttacttaccagtaatgtggttactatttgaagcatctaaatctattggagatgacaatttagagagctggacaaaaatcatataatttcaagtataacaaacttaaatggcatattcaatggtaagaacattaaaagtatctgctccattatattaacttagtgttgctctttttttcttcttcatttttaaatttcaaaagaggccacattcctatgacacttggccaagaaatgtaggaaattaaaaagtccttattaaaatgtctcctgccagatggaaaggagacttgattcaattaggccttttgcatctttggaagtggggaggggatgaaataaagacacctttccgtcctgtgcaataactactttgtccttttgttgtcaatattcttgtattgggattagtctctctgtggggcaaaacaacctctgaaactggccttacattttgttaaaattatcctcaggttggcacaaaagagcattatctccaaggccagtaaggtagtaactcctggaagcaataggcggaaagcagaggtttctctccttcatgccaaggtcatggtcactccaaaggtgagggatgaaacagtaaatatataatacagaaatatccctattctctttaaatgaggaaaacaaagaaaagtaagtatccaaagataacaa

SEQ ID NO: 84870 - DNA, 381 bp, Homo Sapiens
  misc_feature (215)..(215): n is a, c, g, or t
  misc_feature (277)..(295): n is a, c, g, or t
cggggaaagggccttgagtagaccatttcctcagaaaaagatatgcaaatgcccaacaagcatatggtaatatgagcaatattacccagtcattaggaaaatgcaaatcaaaacccataatgagctattaccctcacacctgttaggatggccactatcaaataaacagaaaataacaagtattgacaagaatgtggtgaaattgggaccttttngccttgcacatgggaatgtaaaatgatgaggccgctctggaaaacagtacggggggtcctcnnnnnnnnnnnnnnnnnnngtactatatgacccaacaatcccacttctgggtatagatccaaaagaattaaagacaggatctttgaatcttaaattcagctgatt

SEQ ID NO: 84871 - DNA, 893 bp, Homo Sapiens
agaattcatagtggggagaagccttacgagtgtaaagactgtgggaaggcttttatttgtggttcaagcctcattcagcataaaagaattcacacaggtgagaaaccctatgaatgtcaagaatgtgggaaggcctttactcgagtcaattaccttactcagcatcagaagatccacaccggtgagaagcctcacgaatgtaaggagtgtgggaaggcctttcgctggggttcgagcctcgttaagcacgagaggatacatacgggcgagaagccgtacaagtgcacagaatgtgggaaggccttcaattgtggctatcacctcactcagcacgagagaatccacacaggcgaaaccccgtataaatgtaaggagtgtgggaaggctttcatttatggatcgagcctcgtgaaacatgagagaattcataccggggtgaaaccctatgggtgtacagaatgtgggaagagctttagtcacggccatcagcttacacaacatcagaaaacgcacagtggggcgaaatcctacgaatgtaaggagtgcgggaaggcatgtaaccacctaaaccatctccgagaacatcagaggatccacaacagttgaagagccttttgaacgcagtagcccgctcgtatctatggtttcgctttccacagtttgttacctgcagtcaactgcagttatattaaatggaaaattccagaaataaagaattttaagtctcaaatggtgtgcccttctgagtagcgtgatgaaatctctcgctgtccggctccagccggccggggatgtgagtcatcccttggtccagcacatccacgctgtatacgccacccaccctgctagtgacttagtagccgtcttggtgatcagatcaactatcccagcat

SEQ ID NO: 84872 - DNA, 374 bp, Homo Sapiens
  misc_feature (21)..(21): n is a, c, g, or t
  misc_feature (57)..(57): n is a, c, g, or t
  misc_feature (71)..(71): n is a, c, g, or t
  misc_feature (107)..(107): n is a, c, g, or t
  misc_feature (131)..(131): n is a, c, g, or t
cgtttgcccccagattaaggntttccaagaccccaacccagctgcaagccttcctancccccctattaaancctaaaggaagcacaaattaaatagaaatatcaaancccattggcttttggaaggtgggnagaaaacagcactgacccaaaatatttttaatccccactttcttaaaaaataaggtatcaaacaaagaataatttactttcaaaagtacaaacttagcagttgtgtgctcctcacagttgtatagtgtgattttttcatcaattttagttacataatcactaaataatctgcactagaactcacattcacatagctggttttaaagctgaacacaactgaaccttgaatggaattggggacag

SEQ ID NO: 84873 - DNA, 402 bp, Homo Sapiens
  misc_feature (301)..(301): n is a, c, g, or t
  misc_feature (310)..(310): n is a, c, g, or t
  misc_feature (329)..(329): n is a, c, g, or t
  misc_feature (337)..(337): n is a, c, g, or t
  misc_feature (351)..(351): n is a, c, g, or t
tgctgggataatagccatgagccacggcacccagcctaaagcacgattcttttttaggccctctcttaattagcccagtcatccctcaaccttagcgaatgggccagtgcagagagaggttgccttcacagattccccctgcctgggtacaaagctcagtgggacacaaagatgatcggatacgtgcctggggccctctcttgcggatctcaatcaggttgcggcatggttttcaccagggccttaagcatgttgaggagggaaagagagtcgtattaaaaatgccctgtattttgggaantgggaaaantagttgagtttccagtccntgttggantttttgggcaaaantcaacccaggaaccatttaggggacccttggggtttcttcatctgttaaaa

SEQ ID NO: 84874 - DNA, 465 bp, Homo Sapiens
tgtccatcccccgagaggcctctggaccaccccatctgagcaggccactcttccttctctatcttaccatcttgtttctgtcccagtagttagggctacctccagtaatcctatttgtccctttactgtttagtgcgtctcgcttgactagaagctccatgaaagcaagagaccctacctgcctccttcgccactagaccttctgatgctctttccccacccttggaggaggaggaaaggaagaaaatgggccctgagcgatcaccacataccaggccctgggggtctagtggcgaaggaggcaagtaaggtctcttgctttcatggagcttctagtcaaagcgagacgcactaaacagtaaagggacaaataggattactggaggtagccctaactactgggacagaaacaagatggtaagatagagaaggaagagtggcctgctcagatggggtgtccagagc

SEQ ID NO: 84875 - DNA, 1254 bp, Homo Sapiens
  misc_feature (121)..(164): n is a, c, g, or t
  misc_feature (170)..(197): n is a, c, g, or t
  misc_feature (517)..(569): n is a, c, g, or t
gcacgaggctgttctaaagttcagcacggaagcaggaagacttttgcattgccattaaatatatttttaagacattgaattttttggtcttcctctaaaaaagcctcattttattaatgcnnnnnnnnnnnnnnnnnnnnnnnnnnnnnnnnnnnnnnnnnnnntttctnnnnnnnnnnnnnnnnnnnnnnnnnnnnttacatctccaatgaattagtgtaacctctccatgactatcagagaagataggcactggggaagcccccacgggaggagaggtcgacagccctccaatcaagtgtcgagggagcagaaaacggcagaacattctgccggtcaagttcagcagttttaggtaacatctgcgagaactgccacacactggtattttcagaatactgaaaacataaaacaagggtagtcttgtccggaattttttcgacaagtaacatgtactgcgagattgcttttcttctttttctttttccatcaataacataggggctggaatgcctcnnnnnnnnnnnnnnnnnnnnnnnnnnnnnnnnnnnnnnnnnnnnnnnnnnnnngttcagggcagcctcactggttgacataataacattttattaaagataatacgttttttaaaaatcaaatctgccaaacccggaccaccctggaattgctagcacgcctacagggatttttggttacagaaaggcatgcccaagattcaggagagcagagacatctgagcttgtaaatagaataaaaggcgtttgcaatgtgaagtacctacataaacatctacatcgagaagattaaacaagtctgttaaaggtaaaaagagatattcatccccttcccaaagcccttccctcccacctcccactacccaatacagttgattttcaaaagtaggttgcttcagttacatataataattattatttagtaatccgtcttcaaagtccaatcccaaatttcacttccattgagaaatgtcagtcccacactgggctcggtgtggacgtaaacatcgcaggtacctgcactggaatccaacaagcagctgtctacttggaccatttcaataaggccgaggaccgcgctccagacacacagcgcaggggctactacaggaggtcctgtgggacccccgccacggaaatccggctttaccttgaactgaggtaggactgtggtcgttttgagtgtaagccagtaaataccagattttaccacttccataggtacgggtgcactctcccc

SEQ ID NO: 84876 - DNA, 1813 bp, Homo Sapiens
  misc_feature (70)..(159): n is a, c, g, or t
  misc_feature (1105)..(1111): n is a, c, g, or t
  misc_feature (1113)..(1114): n is a, c, g, or t
  misc_feature (1116)..(1118): n is a, c, g, or t
  misc_feature (1120)..(1120): n is a, c, g, or t
  misc_feature (1122)..(1122): n is a, c, g, or t
  misc_feature (1125)..(1125): n is a, c, g, or t
  misc_feature (1138)..(1138): n is a, c, g, or t
  misc_feature (1295)..(1304): n is a, c, g, or t
  misc_feature (1308)..(1318): n is a, c, g, or t
  misc_feature (1506)..(1506): n is a, c, g, or t
  misc_feature (1694)..(1694): n is a, c, g, or t
  misc_feature (1699)..(1699): n is a, c, g, or t
  misc_feature (1703)..(1703): n is a, c, g, or t
gggggcttccccagtgcctatcttctctgatagtcatggagaggttacactaattcattggagatgtaannnnnnnnnnnnnnnnnnnnnnnnnnnnnnnnnnnnnnnnnnnnnnnnnnnnnnnnnnnnnnnnnnnnnnnnnnnnnnnnnnnnnnnnnngaggcttttttagaggaagaccaaaaaattcaatgtcttaaaaatatatttaatggcaatgcaaaagtcttcctgcttccgtgctgaactttagaacagaggattgtattgcaagacaaagttgaatgtaaagtgatctccctgaacatttttaaggttttacttttctgaaattatacatcacagcagtgcataggccatataatgttagctggaaggtcaatttcagtgtatgatatactttattaagatgtataaaacatcctgaagtttttatttagttttgggaataggcatcaatgggtggtatttgctttgtaactccccccaggtacgatagggactgaatatggaccctgctgaaagcagtgtattgacgcatatttaactcgccctctatccgtagagtagtcatgacactatacagatggttcgtgttcatactgcagcttaaaacaagcaaaatacacagatgataatatgctaaattttcctctatcctgtacatttcacaaaaaggcatatgcaatatttacatttttaatttagtttacagaatggaaccaaaatgtataaatgttatgtttgctaaaacttcacaatgtatattgggtctttgtacattttgcctgacttaccttaaatttaaaatattttttgctatataaactttaacagttattaaacagtgttttctttttgggtacgtattgtttctggatatcaagatgttaaatatatttcttgctattgtgatatgacaagagacttaacttatcttgctctgtcttccactgtacacgctgtatataggggtcaatgtgatgctgctggagacgagaataaactggactagaatagtgcattgtatttagtctgtattgatcatggatgccctccttaatagccatatgcaataaaataaagtacattatttatgaaaaannnnnnnannannnananaanaaaccatgtcggnccgcctcgggccctccaagaaacctttcttagaccatttcgttttgggcgccgcggggccccagttaagggaaaggtgaaacactggggccataagctgggtttcccctaaggaagaatccctgggtcaatggaactaagtggctttggggaatttnnnnnnnnnnaatnnnnnnnnnnncggcccccggggggggcaaaacccgaagacgggtttctttgaaaccaaaatccccaaaaaagggaaagttttcctggagagggtccattttaccgcgggaaatcttatttctcaaccagggggaagttctcccaaaggccaagacgcctccgaaataattccgacaaatttctccccggcccccccgncccgcctgtgtgccaatatttttataatagcgaagaaagaaaaataggggcgtgtggtaaatattttcccactcttacagaccatatattttttggggccgcccacacaatgtgggtggaaaaacaccccatctttctctcactaaataagcgggggcgccacttggtggaagtgaagaaaaaacccncgcantaanaaactttgcctgcccactagtggtgaggccgagatatatttctagaagacagcaaccaccctcgttagtttgaacttcgccccaccttcgttgtggtatgtaggtacaac

SEQ ID NO: 84877 - DNA, 1195 bp, Homo Sapiens
  misc_feature (18)..(18): n is a, c, g, or t
aaggaagcgaggcctggngtggcgaattcggcacgagggaagacagtgtattagctcacaattagatgagcttctctgtccacccacaacagtataaggggagaaatgatgagaaggctcttcttgaacagctggtatccttccttagtggcaaagatgaaactgagctagctgaactagacagagctctgggaattgacaaacttgttcaggggggtggattagatgtattatcagagagatttccaccacaacaagcaacgccacctttgatcatggaagaaagacccaacctttattcccagccttactcttctccttctcctactgccaatctccctagccctttccaaggcatggtcaggcaaaaaccttcactggggacgatgcctgttcaagtaacacctccccgaggtgctttttcacctggcatgggcatgcagcccaggcaaactctaaacagacctccggctgcacctaaccagcttcgacttcaactacagcagcgattacagggacaacagcagttgatacaccaaaatcggcaagctatcttaaaccagtttgcagcaactgctcctgttggcatcaatatgagatcaggcatgcaacagcaaattacacctcagccacccctgaatgctcaaatgttggcacaacgtcagcgggaactgtacagtcaacagcaccgacagaggcagctaatacagcagcaaagagccatgcttatgaggcagcaaagctttgggaacaacctccctccctcatctggactaccagttcaaatggggaacccccgtcttcctcagggtgctccacagcaaatcccctatacaccaaactatggtacaaatccaggaaccccacctgcttctaccagcccgttttcacaactagcagcaaatcctgaagcatccttggccaaccgcaacagcatggtgagcagagccatgacaggaaacataggaggacagtttggcactggaatcaatcctcagatgcagcagaatgtcttccagtatccaggagcaggaatggttccccaaggtgaggccaactttgctccatctctaagccctgggagctccatggtgccgatgccaatccctcctcctcagagttctctgctccagcaaactccacctgcctccgggtatcagtcaccagacatgaaggcctggcagcaaggagcgat

SEQ ID NO: 84878 - DNA, 572 bp, Homo Sapiens
  misc_feature (21)..(21): n is a, c, g, or t
tatatttatgtgtcttatttntatatttctttatttattacacagtgtagtgtataatactgtagtttgtattaatacaataatatattttagtatgaaaatttggaaagttgataagatttaaagtagagatgcaattggttctcctgcattgagatttgatttaacagtgttatgttaacatttatacttgccttggactgtagaacagaacttaaatgggaatgtattagttttacaactacaatcaagtcattttacctttacccagtttttaatataaaacttaaattttgaaattcactgtgtgactaatagcatgatgctctgcagttttattaagaaatcagcctaaccatacaactctcatttccttagtaagccaaattaggattaacttctataaacagtgttgggaacaatgtttaacattttgtgccaatttgttcctgtattcatgtatgtaagttacagatctgactcttcatttttaagttccttgttacatcatggtcattttctagttttttaccagactcccatctcacaataaaatgcatcaacaagcatga

SEQ ID NO: 84879 - DNA, 385 bp, Homo Sapiens
aacgatggtcctcagctaagctgcatagctcttagcacacaggacaggtcaagcgttcacacatcaacactataactatgcggcggaaatagctccccgctagccgtcaactactcaggagactacctgtgagatccctggggtgagctgtgattcctatcccaggaatgtgcatctccgaccacttcttctttattctaattatgacaacatggtcagtgcagttgagtcagtacttctcctgtcttttcccagcaagctcctcctccttggagcccagcacacacccgcttagacccaacacaacctcagagagggacgcctcagctggtctctctccctggaagagtccatgtgacttcccagccagatgtgccccgttttg

SEQ ID NO: 84880 - DNA, 906 bp, Homo Sapiens
tttcaaaaaaaatctcaaaatataatacattaacagacaatgatatagctctaccaaacattcacacgcaggcaacagaataagcctttgggtttaccaaggacattttacagtcaaagggccacctgccctccttccttccctgactacattctcagggaagcttttccttgcagacacttcgttgcaaggtcagctttctctctcagcacgttggcttcgtcggcgcttctgtgggcctgtgcgttctttagcaagaagtggctgatgaaaagcttcaaaccctcacgtaacacccccagctttgggttgtcagatactcttgtgaaaattaaactgaggtcttcaacttctgtttccattaataggatacttaatacttttcgtaaaaaacggactctgggtttgtccaattcactgaattcaactacctttaagatggaaagggaaagcgattttgtcttcaacaagtgggccaccagatgaaccaaattagagaaattcgtagctggcaagttttccaagtcccgaaatttgtcccatatgctgaactggaaagtcatctgaaatctcctttcatattcacagaatttgctagccaggaaagcatagaagggattgtaagttttctcttgaaggcagcaatccatgagaacgtgaatgatttctctctcctgctgatccttaagtccaagcttcagaagcttttcaaaagcatccaaaaaatcttcacttgtcattattgtgcagaatatgtttctccggatgtctgtgttcatcctctgcttccgggcgagttctaggatctttgaactgaccgtccccacaagctgcttctgcaggtgcgtatggtgactgttgtcgatcatcggggccccactccaggcggaccccacaatccacccc

SEQ ID NO: 84881 - DNA, 1345 bp, Homo Sapiens
  misc_feature (65)..(189): n is a, c, g, or t
  misc_feature (1198)..(1206): n is a, c, g, or t
aagtgattcttgttcatcagcctcccgagtagctgggactacaggcatgtgccactatgcccagnnnnnnnnnnnnnnnnnnnnnnnnnnnnnnnnnnnnnnnnnnnnnnnnnnnnnnnnnnnnnnnnnnnnnnnnnnnnnnnnnnnnnnnnnnnnnnnnnnnnnnnnnnnnnnnnnnnnnnnnnnnnnggccttacgtaatatattttcttaatggctgcataatatcacatcaaataggcatttttcaaacctctttccttattaaacatgtagactatatccattttttactaaaataaataacatttcagataatatctttgcactgataatgttgccaagccatttctaaagtgaccttatcaatttaattaccattggatgagggtgtagctttcatcgcaccattgtagattgtcttttttatttcaatttgcgtttatttataactggttgcaaaggtacacagaacacacgctccttcaacttatctttgataaacccaagcaaggatacaaaaagttggacgacattgagtagagtcatggtatacggtgctgaccctacagtatcagtggaaaagataaggaaaatgtcactactcacctatgttatgcaaaacagttaggtgtgctggggctggatactgctcttttacttgagcattggttgattaaagtttaggtaccatccaggctggtctagagaagtctttggagttaaccatgctctttttgttaaagaagagagtaatgtgtttatcctgggctcatagtccgtcaccgaaaatagaaaatgccatccataggtaaaatgctgacctatagaaaaaaatgaactctacttttatagcctagtaaaaatgctctacctgagtagttaaaagcaattcatgaagcctgaagctaaagagcactctgatggttttggcataatagctgcatttccagacctgacctttggccccaaccacaagtgctccaagccccaccagctgaccaaagaaagcccaagttctccttctgtccttcccacaacctccctgctcccaaaactatgaaattaatttgaccatattaacacagctgactcctccagtttacttaaggtagaaagaatgagtttacaacagatgaaaataagtgctttgggcgaactgtattccttttaacagatccaaactattttacatttnnnnnnnnngttaaactaaacttctttactgctgatatgtttcctgtattctagaaaaatttttacactttcacattatttttgtacactttccccatgttaagggatgatggcttttataaaatgtgtattcattaaatgttacttt

SEQ ID NO: 84882 - DNA, 820 bp, Homo Sapiens
  misc_feature (72)..(106): n is a, c, g, or t
tgataatcatataggggctccgccttatagccgaacgacgagcgcagcgagtagtgagcgaggaagcggcgnnnnnnnnnnnnnnnnnnnnnnnnnnnnnnnnnnncagtcgacggtaccggacatatgcccgggaattcggccattacggccgggggagctgcaggcgcggcgaaacttccctctacccgcccggcccgcggcgcgcaccgttggcgctggacgcttcctccttggaagcgcctctccctcagttatggagaaaacttgtatagatgcacttcctcttactatgaattcttcagaaaagcaagagactgtatgtatttttggaactggtgattttggaagatcactgggattgaaaatgctccagtgtggttattctgttgtttttggaagtcgaaacccccagaagaccaccctactgcccagtggtgcagaagtcttgagctattcagaagcagccaagaagtctgacatcataatcatagcaatccacagagagcattatgattttctcacagaattaactgaggttctcaatggaaaaatattggtagacatcagcaacaacctcaaaatcaatcaatatccagaatctaatgcagagtaccttgctcatttggtgccaggagcccacgtggtaaaagcatttaacaccatctcagcctgggctctccagtcaggagcactggatgcaagtcggcaggcaatactcaagaaggagaatccatttagcacctcctcagcctggctcagtgattcatatgtggctttgggaatacttgggtttttctgtttgtactcttggggaatc

SEQ ID NO: 84883 - DNA, 291 bp, Homo Sapiens
tcaatgggaagtttctaaggtagccgtgtaattgaaggtggaccttggaggggaggcaggattggggtggaaagaggataggaggtattctagatagataggagctggctaaggaaagatcccagaaactgggtgggaacttaaatattcagctgccatgacgatggttggtatgtagggttcgtatgaatgaaacgtgactacccagggcagataatgaaaggctttcaatcccagagtaagagatatagggccagggcgtggtgtcttcattgcctgttaatcccagca

SEQ ID NO: 84884 - DNA, 353 bp, Homo Sapiens
caaagccgttcctaatgatggtgatgaaaaatatgagaagaccataattaaaagtggagatcagacgttttacaaattcatgaagcgaattgctgcttgtcaggagcagattttgaggtattcctgggagtggagagccactctttttgacctgccctacatcagaagtcaccgagctcccagcctgcagccagtgtgggaggccaaaggatatttgagtttcagcttatgccagcactgggtcagcatgcttcaagagtgctaatttagggtctttctgtgggaattttggaacaattcttagttttacacatgtgaggaagagttgctgggccccccaaattcattcagga

SEQ ID NO: 84885 - DNA, 499 bp, Homo Sapiens
tctgagggactatcagcagagagaaggcattgccatggatcagttgctttcccaaagccttcctaatgatggtgatgaaaaatatgagaagaccataattaaaagtggagatcagacgttttacaaattcatgaagcgaattgctgcttgtcaggagcagattttgaggtattcctggagtggagagccactctttttgacctgccctacatcagaagtcaccgagctcccagcctgcagccagtgtggaggccaaaggatatttgagtttcagcttatgccagcactggtcagcatgctcaagagtgctaatttaggtctttctgtggaatttggaacaattctagtttacacatgtgagaagagttgctggcccccaaatcatcagactcccatggaagaattttgtattatacaagaagacccagatgaattattgtttaagtagagcatttccttttattaatataaattaaaacaaatgtttacatccaaaaaa

SEQ ID NO: 84886 - DNA, 473 bp, Homo Sapiens
  misc_feature (23)..(23): n is a, c, g, or t
  misc_feature (82)..(82): n is a, c, g, or t
  misc_feature (90)..(90): n is a, c, g, or t
  misc_feature (96)..(96): n is a, c, g, or t
  misc_feature (105)..(105): n is a, c, g, or t
  misc_feature (142)..(196): n is a, c, g, or t
aagctccccggagtagctggggntaacaaagtgggcaccaacggcacccaagcctaaattttggtaactttggtaagaagangggggttncacccnggttggctnaaggctgggtctcccatctccctggagctcaaggtgnnnnnnnnnnnnnnnnnnnnnnnnnnnnnnnnnnnnnnnnnnnnnnnnnnnnnnngagcctggtctctcttccctttttatattcctcaccagtgatatcatctccagtcccatggtttcaatcatataaccgaatgtcataaggacatccaacatgacatctccccctccgtctccccaagctctttctctaaggtccaggctctatagttccagctgttctataagaacccaaaccaaaactgaataaaaacaaaagcctccccacaaaaccacaggctgtggaaataaggttctttggaacttaatggctagattgatagttattacaa

SEQ ID NO: 84887 - DNA, 493 bp, Homo Sapiens
  misc_feature (118)..(118): n is a, c, g, or t
  misc_feature (450)..(450): n is a, c, g, or t
  misc_feature (479)..(479): n is a, c, g, or t
gcttcagtccctctccagctccagctctccgacctctggctcccgcgtggcaggggtccctcggcggctcctccagctccaaggtcaggtctctgcgagcgggcagggctcccagccngacagctctccactcagctccgctcagcctctctcctgtggaagtagaaccgtcacacaccacagccctgccgccccaaacccctctctcgggtttgaaatctgcccagctgttgcaacggctgcgacctcctctctgtggttggctttctttatccctcctcgcctccctaagccctggcttcaacctataccctgggccctacttcagagtccagacgaggatccgcccaacggagcgaggttctgcacatggaagcccaagaacgaaccctttccatgtggagtgttcacatggaagatggccgccaccatgaaggacctggttgcaancccctcgccgtgcaggccacgttccaaancctcaaggctccca

SEQ ID NO: 84888 - DNA, 335 bp, Homo Sapiens
  misc_feature (163)..(163): n is a, c, g, or t
  misc_feature (241)..(241): n is a, c, g, or t
tcatcttggagcatctccagccacttccttcccccactctgatatggtgtgacagaggtacaactggctgggagctgccttctggcctctccctatgaccaagtagagtgaccactgccagactttagctgatctctatatgtagtcgaccaaatgacctggngaagcatcaaggcaccctcacaactgtgtttccccagagagttttagccagaaaaatacagagtctttgggggatttnggcctttgttgttttgaaagtggggaagtagggagaaagaacaggtgagagaagtaggtaggggtgttgaagagaagtattattttaatctcca

SEQ ID NO: 84889 - DNA, 1092 bp, Homo Sapiens
  misc_feature (69)..(69): n is a, c, g, or t
  misc_feature (124)..(124): n is a, c, g, or t
  misc_feature (214)..(214): n is a, c, g, or t
  misc_feature (516)..(526): n is a, c, g, or t
tgttaagacctgtattaaaactgcgtattttcccctgactacttaaatccctacccaaagcaatgaagntatcatccatgaagtagcagtccctgaggaagtccatgccagtaagaaaaggtgntagagtgctgttatgtgtaatagtcatcaaagatcacggagtaattccagtcattactagtgttcctgcagatcgccaagggagcttagntgatttttttccaggttcatcttgggagcagtttttgatcataggttcaacttttttcttgggttgcaaaactgcatctggctgcaagtctaacccaaaatattcgcagcgtatcagctgagaggatgccggcaactgttgaactacatcacagttcaaagtcccatattgtgagagcagtacttgtagtttatgtaaccagcaaatatgagttacctcgttacagtgaacaacctgcactgttagagtttaggaacttttgacattcggttatcacatatttcaaagattttcaactcacnnnnnnnnnnntacatgggcttaattactcagtaacactttactatttgtcacttaatctcaagacaatacacactcagtccaactcttttggtttgattttacatagattttcacttacttctgcaaattaaaaacaagaaatgagtgctgtatttccccctctcccacagtaagaaacaagggtttaaaatggcaattacttagatgtttatttcaatatttcttaaattcactttattaatttaaaaaactaaataatcgcatgaaagttatataaagaacatcattaatgtgaaaagatgcaagaaaaaaatcattctagtagagcaacgttagagaacaaatgcttaggtaataccctaaatatgcagccaactaccctatttttgcactgttgaccatataagcacgtttgcatttgcagaaaacagaatgacagcataggaatttgtattgctctataacggtccaacatctccacataatgccaagttcaccttagacattttatttacttatccaaatgaacagcctgtgtaagcaggattgaaaatgcatcaactttaaaaagatga

SEQ ID NO: 84890 - DNA, 133 bp, Homo Sapiens
ggtttccaggacgcggcctcctcgcttcttaaaatgtctgagctctacgaagggaacctgttagccctccgtttattgccttacttcacactgaaataagccaacgtttattttattttatttattgtattat

SEQ ID NO: 84891 - DNA, 395 bp, Homo Sapiens
  misc_feature (71)..(71): n is a, c, g, or t
atgctacaaccattgcaaatcactacagaatccatattgaagagagatctacaagtgtaataaatgtggcnaaatttttcagacgtcattcataacttgtaggtcatcagtgaacccatactggagagaaaccttacaaatatcatgactgtgacaaggtcttcagtcaagcttcatcctatgcaaaacatagaattcatacaggagagaaacctcacaagtgtgatgattggtgcaaagcctttacttcatgttcacacctcattagacatcagagaattcatactggacagatgccttacaaatgtaagggtggcaaggtcttcactctgtggtcattccatgcagaacatcagaaaattcatttttgagataattgttccaaataaaatgaa

SEQ ID NO: 84892 - DNA, 965 bp, Homo Sapiens
  misc_feature (134)..(146): n is a, c, g, or t
acaaccacccttacctgtttacattaattgcaaggagcataacgtacaggctgtatgtacaatcctgggcattgactctgtgacatttctagcatatccaaggcaccaccagtgatttctcctgtttcttggtnnnnnnnnnnnnnaaggtacgtattctgcaatatggctaaaccctttcctgattgagagttaaagcaataggagtcaagttactggtgccacagatctggaggtatgataggtcaggggctaggtgttgaacttagttaatggaagactgagagcagaacaggtttgtcatctccgcaaggccagaaagtgatcacaaaaagaggcagatgatagacactggggtagggtcataccacagggaaatacctttcctgggcttgttttctagcatatcactgacctgggatctttgggtgatcaagggtgtggttagtggaggctctgtgctgcacgtatgcagtatcctatctctttctacatcagatcaaaacactaagttggtgtactgcctcgaccttttttcagctcatcctggaacatatacagagttgagagttttagacaatctctaggtagaggagacaagatgtagacccagacagaagaaatctgcttccctaccatggctattccagcaccccaacctgtaattgccaagtcctctaaggtactaatttgtagctgctctgaagtaaggatttcggattcagctggtagggaaagactctgcacctgctgtcttagggaagaaatggttcaaatccatgtggtgacattgcattagtctccctttcactgttttcttattctgtaattgtttgttatatttcccaaaaacgtcttgatcactaagcaaagctgctagtgggattctatatttcgtgtcatcttttttattataatttattgcaaatttttttctgaataaatatatgttgtgtgaaaaaaca

SEQ ID NO: 84893 - DNA, 559 bp, Homo Sapiens
aactagggcacttgcttccttcttagctaaaagcaccagctgagatttttcaggtaattttgttgttactcacttaagactggaattagaatgtttctggtatttctcattttgttccctggctatgatagaatctcatctaatcttgacatctctcctaggggaagaatatcacaggctaatagcgtggttgggggtgaagatgatagcagttattaaatcaggaatctcttttatgtatgtccttgttacattgaggttaagagacaaaatcattggcagtgcaatctctttccaggatttcgtttgctgtggcattggttatatcagagcactttaatctgaaggatgatactgtaacttgatttatctaattagcttttaattatctacagctattttattttatttaattctctcctacagtactgggaccactgtaaacttctcagatgacttgtatttttgtagtgctatgaaatttatttacatacttataaagaaaactgtatgttcacttgaactctgaaaatgtacatgtatggctggacgcggtcgt

SEQ ID NO: 84894 - DNA, 1565 bp, Homo Sapiens
  misc_feature (382)..(382): n is a, c, g, or t
atttgcatcagtaaaatgatttttttaaaaccaacaaatcatcaattattagaaatagttgtctcacagtgatactggtttttcttttgtgctgttatgatttaacattgacaggaacactattttaaatccttacgttcaggtgtttgtaacttggccttataattaggctgaattatggcttcaaggtctacaatttatgtgtatggttcacagcctagcttctatttacatttgaaaatacagatttttaccaactttggattcttttttagttatatgtttgtctttcctttttaaattgttcaaaactattttttaatggtcaagttactaacacttgaaaatcagatactacacccaaataccagtgtttttcccntagtgtttttaaatgagtgcaccctattactactgtgcgagaattcatgttttaccagtcattgttatattacaaacagacttgcatgattaaccagttgttacacttactttttcaagttggagtatatatgactcagtgcagactggtctctcttatgtgaatgcacacatgcagaaatgcagagtcaattttacatgcccataaagacatttgtaaagaattcagctcttatggtctgttgtataaatgtgtatctaggcactttattataactggaatttgacctcacagatgttacaacttgatcagtcatttgacctaatttgtggtagctatctgtatgttttgcaatcttaatacagacatgctttccaaaaagattaatacagaaccatcctgccgttctggataagtctatccagctgtggaaagggcaacctgtggtttctctgtactggtgtttaatgggggaagaatatgaacagctttaaagagctgtgtatagtggttactactattaaaaaataagatctgcacgagtctgactggcctttgggtggcctttgtggacggctcgtagctggaaagtgttgatctgggttttctggcattcttttaagttaaaaagttaacatcgggacatgggtttgatcttttgttgtacctgatgacagtgcagagattctccacagctggataaaaatgtcacaaagctacttactgtacatgggcagtatcagatttcaaatcctaatatttcagctgtgcttttaatactcaaaatattaggggatggggtgttgaagctttcccttttttgcttttaacaatttatagaatttaacagatgtactgtctttcatgtggcctcacatttaaagttatgagaacatacacatggtttacaacttttactatatacctttccttggccaccaagtattttaaaagtgtgccaccttttaacctttactttttttaagttgaaggtgatactttttctatatatgatgaaactcatgtcaactgaagtgagtgtaatctcagatatcaacattattatattttaaaatcacgctatggaaatatcacctgaattctgtcatttgtcagatttacagtacctttttttctttaacttttagcattaaataaaaataaaattgggagcactgcaaaa

SEQ ID NO: 84895 - DNA, 951 bp, Homo Sapiens
  misc_feature (720)..(720): n is a, c, g, or t
  misc_feature (730)..(812): n is a, c, g, or t
  misc_feature (829)..(829): n is a, c, g, or t
  misc_feature (854)..(854): n is a, c, g, or t
  misc_feature (858)..(858): n is a, c, g, or t
gactccagggggtcaggaggattcaaggacaccccccaccactgtctctctccagcagagcccacacgatgaagacccccaggcagtgacgtatgccgaggtgaaacactccagacctaggagagaaatggcctctcctccttccccactgtctggggaattcctggacacaaaggacagacaggcggaagaggacaggcagatggacactgaggctgctgcatctgaagccccccaggatgtgacctacgcccagctgcacagcttgaccctcagacgggaggcaactgagcctcctccatcccaggaaagggaactctccagctgaacccagcatctacgccaccctggccatccactagcccacggggggacgcagaccccacactccatggagtctggaatgcatgggagctgcccccccagtggacaccattggaccccacccagcctggatctaccccaggagactctgggaacttttaggggtcactcaattctgcagtataaataactaatgtctctacaattttgaaataaagcaacagacttctcaataatcaatgaagtagctgagaaaactaagtcagaaagtgcattaaactgaatcacaatgtaaatattacacatcaagcgatgaaactggaaaactacaagccacgaatgaatgaattaggaaagaaaaaaagtaggaaatgaatgatcttggctttcctatangaaatttagnnnnnnnnnnnnnnnnnnnnnnnnnnnnnnnnnnnnnnnnnnnnnnnnnnnnnnnnnnnnnnnnnnnnnnnnnnnnnnnnnnncatcttgggcacatggntgaacctgtctctcctaaatacaanatanctgatgtggtgcatgctgtatccactattgggagtgagcaggatcgctgacaggatcagagtcatgagcagatgacactgtccagctgcgaag

SEQ ID NO: 84896 - DNA, 263 bp, Homo Sapiens
  misc_feature (17)..(17): n is a, c, g, or t
  misc_feature (169)..(169): n is a, c, g, or t
  misc_feature (220)..(220): n is a, c, g, or t
  misc_feature (239)..(239): n is a, c, g, or t
atcccatcctgtgtccntgcgtgcccctccctcctctgtgtgaacacacatcccatgctgtgtccatgcgtggcctccctctctccgtgtgcacacacatcccatcctgtgtccccgtgaggccttcctttccctccatgtgcacacatatcccatcctgtgtcctacngtggcctccctcctccgtgtgcatgtacaatccacgctgtgtccatcgtgncctccctccttcctccttntgcacatacatcccatgctgtgtc

SEQ ID NO: 84897 - DNA, 244 bp, Homo Sapiens
  misc_feature (44)..(62): n is a, c, g, or t
  misc_feature (165)..(203): n is a, c, g, or t
  misc_feature (227)..(227): n is a, c, g, or t
ttttgaattaagtctcatttattctagggcaaactcaaaagggnnnnnnnnnnnnnnnnnnnagcaaatcctagcacattattaacaaaaaaatctgtacatttgccatgatacacttgaaagtgaaacaaataagatataaatacagatatggatgtaacatgnnnnnnnnnnnnnnnnnnnnnnnnnnnnnnnnnnnnnnncccacccaacctgggggtgtgggnaccatgcgtgtgaacac

SEQ ID NO: 84898 - DNA, 520 bp, Homo Sapiens
acccctgcctgccgcccgttctcctcgttctagccatctcttaggactgaggaatcaaagttctgattgtggagtgcctctctctaggacggggctgcagcataggagtctcagctgcttacatccaggtccaggattatgtctgctaacagacgctggtgggtaccacctgacgatgaagactgtgtgtctgagaagctcctgaggaagactcgggaatctccactggtgcctataggcttaggaggctgcttggtggtagcagcatacaggatttaccggctgaggtctcgtggttccaccaagatgtccatacacctgattcacacccgagtggcagcgcaggcctgtgcagtgggtgcaatcatgctaggtgctgtgtacacaatgtacagcgattacgtcaagaggatggcacaggatgctggagagaagtaggactcctataggagccggggctgtccaactcccctaactcaatccctggtacattcctaataaagcagttttgaggaaaatc

SEQ ID NO: 84899 - DNA, 711 bp, Homo Sapiens
  misc_feature (141)..(141): n is a, c, g, or t
ccacccctggcctgcctaccttgcaggctgctgtgaggtttctcagatacacaatacatgtgaaagtgtttcgtgaactgtcagataagtggtttccccaggttgtgtggtcagatgcttgaagcagctgttgggacctgnggcagaaagatgagcgggaagctggactctcaagggagcagctagaggtgaacccctgggacgcctgagagccagaggacgggtgaagggtttgatgccaaggggcattatttcttttctctcacacaggtgctgtgtacacaatgtacaacgattacgtcaagaggatggcacaggatgctggagagaagtaggactcctataggagccggggctgtccaactcccctaactcaatccctggtacattcctaataaagcagttttgaggaaaatcaacagactctttttcactgggggagaacagagtaagggactggtggtagctggggagaggacttggagtaaatggctggaaatcaaagtgctctggccccctactccagggcaaggaaaattcttaggggaggcagcagtttcctgaggaggtggtggggtagacttctgatcgcaggaacccaacaactcccaagccatcttaggtcccacccagaagcagcatggagtgggagcaagggggcaataatggggccttggcgctcatgggaacactgaattaaaaggcaggcgg

SEQ ID NO: 84900 - DNA, 301 bp, Homo Sapiens
  misc_feature (46)..(46): n is a, c, g, or t
gatgggggcttgctatgttgcctaagctggtctagaacccctgggntcaggcaccctcccaagtagctaaaactataggcatgcatcaccacatcatttcattgaagtatttattaggtaccatcatgagctaggtgcagttctaggtattgagttttatcagtaaataaacatgatcatcacagaggatgtgaaggaagcatttaataaattcaagaggaattcagcctcataaactatgaaatattgggaaataattcatcatgtaaaaactggatataaagaaaaaacttttcctgca

SEQ ID NO: 84901 - DNA, 445 bp, Homo Sapiens
  misc_feature (249)..(357): n is a, c, g, or t
ttaacaagtagtaagatggtatttatgaacacaacttattatcagtaattacaataaatgtaaattcacgaaatacacaaaagacaaaatttgacagacttgattaaaacaactctactcaagagacatgacatcattataagaacattgaaaattcaaaaataagggggaaagtgaaaaaaataccattgtgagtggtagagaaagccatttcacataataaaggttcactctaccagaaaacatcannnnnnnnnnnnnnnnnnnnnnnnnnnnnnnnnnnnnnnnnnnnnnnnnnnnnnnnnnnnnnnnnnnnnnnnnnnnnnnnnnnnnnnnnnnnnnnnnnnnnnnnnnnnntcctctctcagtaatttatagaaaaacagacaaaaatatcagtaaagacgtagataatttgaccaacctgattaacaaacttgaccca

SEQ ID NO: 84902 - DNA, 794 bp, Homo Sapiens
  misc_feature (46)..(80): n is a, c, g, or t
  misc_feature (127)..(186): n is a, c, g, or t
  misc_feature (188)..(223): n is a, c, g, or t
  misc_feature (276)..(315): n is a, c, g, or t
  misc_feature (715)..(715): n is a, c, g, or t
cgaacgaccagagcgcagcgagtcatgtgagcgaggaagcggccgnnnnnnnnnnnnnnnnnnnnnnnnnnnnnnnnnnncagtcgacggtaccggacatatgcccgggaattcggccattacggcnnnnnnnnnnnnnnnnnnnnnnnnnnnnnnnnnnnnnnnnnnnnnnnnnnnnnnnnnnnncnnnnnnnnnnnnnnnnnnnnnnnnnnnnnnnnnnnnttagatcaatttgctgttatatttttatataaactatgtttatgacataagtnnnnnnnnnnnnnnnnnnnnnnnnnnnnnnnnnnnnnnnnttagattaatttgctgttatatttttatataagctatgtttatgacagactttcctataatattcttatcataatgttcttgcacttgaaagaatgtgcattctgcagttgtgtgcaggtgttatgtgtatttcaactgggtcaagttttgttaatcaggttggtcaaattatctacgtctttactgatatttttgtctgtttttctataaattactgagagaggataaagcctgccactgttattatgaatttgtttatttctcctttgagtttgttagttttgttttatgcatttagaggttgtgttattaggctcatacccatttaaaatcgatgtcttctggtagagtgaacctttattatgtgaaatggctttctctaccactcacaatggtatntttttcactttcccccttatttttgaattttcatgttcttataatgatgtcatgtctcttgaatagagtgtttaatcag

SEQ ID NO: 84903 - DNA, 894 bp, Homo Sapiens
  misc_feature (46)..(46): n is a, c, g, or t
ttgaccctgaaaacgcatgcaggcccactaaacactgacacccccnggacaagggactggctgttttccgttttttggtcagctttcctagtagagttaaatacagaagaattacagaagaactaggagttatggtctgtttaaatgactgtgagaatttataaagtaggaacaaacaggattttcaaaatacccaggtaaacgccaaagagattaccaaagacgtcaaactaaccgggttgagagctcccaggttgagccaactgtccatggtgctgaagaggaggggtttgccggggtacaatagggggctgggccatgctcatctggccaaattgattcaaaccagattgtggagttattcgaggcatcatctggtttggcacactgccacggatcatacttgggtcaggtagagggccattagaagtcattcctggttgcggctgtcccatgttaggccctggattcatggaaactggaaccatgcctgcagcatttggtagcatgttctgcttctgtagtctggtccttcgtttttcttctagttctttctggatcttatagattttctcagctagaaggtggtagtattccgctcgattgtttgcagattcatacatgtccccttcaactttccgagcatatgcaactaggttttccatccgtctgtcttttaaagcagcaggatccggcgtaggaaatatggcttggacgtagtttggtgaacaagatgagttcgaagatcctgagtaatatcttcgtgccactgtttccgaattcctattagtggatgtttgagctgctgttggcataggactccacgggatgggcacactgggcagtttcagctcatcatgtggttttgatgtatttatgtgctgaatgctatca

SEQ ID NO: 84904 - DNA, 429 bp, Homo Sapiens
  misc_feature (41)..(41): n is a, c, g, or t
  misc_feature (44)..(44): n is a, c, g, or t
  misc_feature (53)..(53): n is a, c, g, or t
  misc_feature (60)..(60): n is a, c, g, or t
  misc_feature (69)..(69): n is a, c, g, or t
  misc_feature (73)..(73): n is a, c, g, or t
  misc_feature (80)..(80): n is a, c, g, or t
  misc_feature (94)..(94): n is a, c, g, or t
  misc_feature (96)..(96): n is a, c, g, or t
  misc_feature (111)..(111): n is a, c, g, or t
  misc_feature (116)..(116): n is a, c, g, or t
  misc_feature (131)..(132): n is a, c, g, or t
aggcttcccacccgggtggcggcccgcctctaaaaactagnggnaaccccccngggctgnagggaattnggcnacaaatnggaacccccggggngngggaaaattttttgnaaaanggggggaaaaaaccnncgtagataatgcaggcagtgaagaaaaagtctggcgctgctgtggctctgactgctcctggattagttactagaccaaatgctgcaaactggtccattgctttgctttgagcaagcaccttattttatttaacccctgcatatacacttaagacattgtatccacatgtttctaattcatttacacttcacttcatcagcatctgttggggtaagcaccctgtcacctccaagttttatgagctgtgtttactaggctgcaattctttgaaccaggggatattcgtattatttccac

SEQ ID NO: 84905 - DNA, 426 bp, Homo Sapiens
  misc_feature (110)..(110): n is a, c, g, or t
  misc_feature (360)..(360): n is a, c, g, or t
tgcacccacgcttggccgcttttccttctttacacagataaatgcactgttactccacattagccaatgagccttgtagggaagtctcagtctctttctgtacaactgantttaacagtttttcttctgtctgaagataaaatgtttgtggatatttggtaatttctagtaaatggctgaaatataataattctttttctttttgcagcgtgttacacgttcccaagaagaacttcgagaagataaagcttaccaacttgagcggcatcgaatagaggcagctatggacccgaaagtctgatagtgatatgtgggataaatcagagctcctcactggactccagtacctctagccaggangcatctgaaccattcctctaaagtcggtcacccctgcttccacactgaccaaaaggtgccctggcc

SEQ ID NO: 84906 - DNA, 470 bp, Homo Sapiens
  misc_feature (60)..(60): n is a, c, g, or t
  misc_feature (391)..(391): n is a, c, g, or t
  misc_feature (418)..(418): n is a, c, g, or t
  misc_feature (446)..(446): n is a, c, g, or t
tctgggtcgtctatgtgtcatatggttttacttttctctcctttttcgttttcagaacanttttctgtctgttttggattcactgcttccattttacagaatgtcactctttagactctcagtccatcatgccatcgggtactcttgttgcagtgtaatttttattacatgcggttatttccctaacgatgtgctattcacggttcatcttcaaactcattttccatcagccagtgtctactatttagtgccctggctctatttcggtcctcctccccgggctttccctggctgctgtgctggccaaaagcatgggctttattctctccattggctgctgctcccaccttagaggtgtggacctcactaggcgtttgactgagcgagtctngttggtgggagaaggaacttttttgtnagtcattgtactagggaaaaaattctgnaacaagtaaaaatatgaaagggaa

SEQ ID NO: 84907 - DNA, 532 bp, Homo Sapiens
  misc_feature (438)..(438): n is a, c, g, or t
  misc_feature (449)..(449): n is a, c, g, or t
  misc_feature (471)..(471): n is a, c, g, or t
gattgtgtcggcaatggaaaactatggcatagaatggcattctgtgcgggatagcgaagggcagaaactgctcattggggttggacctgaaggaatctcaatttgtaaagatgactttagcccaattaataggatagcttatcctgtggtgcagatggccacccagtcaggaaagaatgtatatttgacggtcaccaaggaatctgggaacagcatcgtgctcttgtttaaaatgatcagcaccagggcggccagcgggctctaccgagcgataacagagacgcacgcattctacaggtgtgacacagtgaccagcgccgtgatgatgcagtattagccgttgatttgaagggccactttggcattcttcttgtttcttgaattgaaaaacatttaaccttgggccaagaaattttgtcttttgatatttaaaaaggnccttcaaaggnggtgtattgaccctgcccaggnggcttctgttaccaatgcttggccgtttttggacctcgttttccaaggaaaccacccagag

SEQ ID NO: 84908 - DNA, 740 bp, Homo Sapiens
  misc_feature (72)..(72): n is a, c, g, or t
  misc_feature (682)..(682): n is a, c, g, or t
  misc_feature (695)..(695): n is a, c, g, or t
  misc_feature (706)..(706): n is a, c, g, or t
ggggcagtgattggccagtcagcaggagaagctgcttatgccttgtttggtacattgtggaaaaacacactntaataaatacgcagtcatgcctgagtacccatcctccatcccgccaccccccagtatggcaaaaatctggtcagagtccatttgggaataattccatggttcctgggatcccaaagcttccagagtgctggctgatcagggagtgtacagtcagtcctgggtggcaaatgtcccattttttaagtaccagcaagtccttctccagggttgcagggccacagtctccacgaatgaagatggcttttcttagctgccctgtgacaactgggtttcacatttcctgaaactagatctgtggaaggagtccctcttttgactctcaactctgaatattggcttgtacagttctggaattttcccgctcgatcattggcctgaggttctcttttagcttgttatagttctttttgagttcctgctgatattccctctggtctgccgtgatgagacgcttgtttttctctacagcttcaccacatctcatgatgaattccttaaagcataacctcaacttgttgtgatgtcgatagagttttggatcagcaggaatttcagccaaaaacacttgggctacttccagtggtccctgatttacagtacctcccacagngccttgcagcacnatctgaagcanctttgcatcaaggcggctcctggttaagtggaac

SEQ ID NO: 84909 - DNA, 255 bp, Homo Sapiens
agacagtcaattaccacttattggagagctatagttaacagttaacgaccatatgccttgaatgagtgggcttgaggaagaaagcacagaaagggggccacatttcacatctggacagttcagagcctggcttagctgacagaagggaaatacaatagaaggtgggccttaagtggaagttagagactcacagaaagaggaacttgggagccagagggagggtagaaattcaagccccagggatcttgcatgaat

SEQ ID NO: 84910 - DNA, 831 bp, Homo Sapiens
  misc_feature (192)..(192): n is a, c, g, or t
  misc_feature (579)..(674): n is a, c, g, or t
  misc_feature (723)..(757): n is a, c, g, or t
aagtaactttcctgtccaggcctggaggaaatcatcgaaggcaaaggccaccacgtgtcgaatgtcataggaaatacaagctcagggactctcttatgacacatctgcaaacttatagatcagtctcagaatgtcatagctggaggggcctcagagatttactcaacaaataccaacacggagcttgggganggtccgataacatgcaccgaagaatcacttagttatcccggttgatcagtgctaaattcagggtgggggacgcatgtctagcagggcgacctaatctaagctggaagtcagggaagggtgagacttgaaggatgagcagagctggacccaggcaaaggggcagtgtgtatgaaagccctgtgtagctggaggtatgtgccccaggggaaggccgggggtcagatgggacagggccttatagatccagggctttgtctcatgggctttgggggttcctaaggtgccggcaaaccacgtgttcattcttctgggaagagaggtctatggctttcaccaaagtcttaaggagtttcaagaggttaagaatggccgggcacggtggctcannnnnnnnnnnnnnnnnnnnnnnnnnnnnnnnnnnnnnnnnnnnnnnnnnnnnnnnnnnnnnnnnnnnnnnnnnnnnnnnnnnnnnnnnnnnnnnncggccgtaatggccgaattcccgggcatatgtccggtaccgtcgactgnnnnnnnnnnnnnnnnnnnnnnnnnnnnnnnnnnncggccgcttcctcgctcactactccctgcgctcgtcgttcgctcgcgagctagcgccctatatgatctatcatt

SEQ ID NO: 84911 - DNA, 542 bp, Homo Sapiens
tgttaaattctcttgtgaaagttatgctaaaaaatagaattggctaaacaggaaagtacctgtgcagatgctggcacttaaggcctatggagaaaacatcaggtgttatagagagtctgttgtagggaattaacgaaaagaccactgagttaagtcaaagaatggtctatttgagtttaggtggtctggtttatggggaccctggctaaggagcatactccaaattcttggtgttaaccctctcagtagtcataagaatagtctccctggtgcactgtattctctcaaaggttttaaatgtttgcatgaagccatctttagaacgtcagatggtctctcttcaactggaatgacaagagctgaaagaaatgtgtgaccacgaggacaccgaaaccgatgagtgacatactgagactgggaaatccaaaatgatagtaacggagagtgggcgctaacatcctaagttttgggtcacacttctttgccttaagttgacaaccttgacaaaggggggatttttttaaacaaattgtggggaggcc

SEQ ID NO: 84912 - DNA, 651 bp, Homo Sapiens
  misc_feature (594)..(595): n is a, c, g, or t
  misc_feature (631)..(631): n is a, c, g, or t
aagatgttgaactgatgagaaagtattagctatggctaaatgttgtgtgtgagaagtactttgcaaacctctgaaacactttacagatattgttatcagtcaaaccggaagtagaatgtccacagtgcagtgtaacaaatgtgacatgtgcatgagttaagaaacagctgtaatgggaaagatgaaaaaacatgctttatttgtttattccattgttcagcttctctttaaattctttccacatggacaaattgcttgacaacaaagtttacttagttttctaaacacttgggatcatctctaaaattaaaaaaattaatattaaatgttggaccaaggatttcaaccatgcagtatgttgcttctggggtctgctgtcctattccagccctagtgaatagttaatgccttgaactattcctatcaccacaggttgccaggccaccaaataacgaagccaatccaggatttgtccatacagaaaatgtgtgcgctcccagctaaatctcagttaaggaggttgttctatatacagccaagtagcagaaatattcataaatgtcatttgcaaatataataaacaatgtaattganngggtatttcctttcttgtttaattctatgtgctcanttaaaagccccttatgtgga

SEQ ID NO: 84913 - DNA, 1006 bp, Homo Sapiens
tcggactgcgcggaacatggcgttctggggttggcgcgccgcggcagccctccggctgtggggccgggtagttgaacgggtcgaggccgggggaggcgtggggccgtttcaggcctgcggctgtcggctggtgcttggcggcagggacgatgtgagtgcggggctgagaggcagccatggggcccgcggtgagcccttggacccggcgcgccccttgcagaggcctcccagacccgaggtgcccagggcattccggaggcagccgagggcagcagctcccagtttcttcttttcgagtattaaaggtggaagaaggtccatatctttttctgtgggtgcttcaagtgttgttggaagtggaggcagcagtgacaaggggaagctttccctgcaggatgtagctgagctgattcgggccagagcctgccagagggtggtggtcatggtgggggccggcatcagcacacccagtggcattccagacttcagatcgccggggagtggcctgtacagcaacctccagcagtacgatctcccgtaccccgaggccatttttgaactcccattcttctttcacaaccccaagccctttttcactttggccaaggagctgtaccctggaaactacaagcccaacgtcactcactactttctccggctgcttcatgacaaggggctgcttctgcggctctacacgcagaacatcgatgggcttgagagagtgtcgggcatcctgcctcaaagctggttgaagctcatggaacctttgcctctgccacctgcacagtctgccaaagaaccctttcccaggggaggacattcggggctgacggtgatggcagacagggttccccgctgcccggtctgcaccggcgttgtgaaagcccgacattgtgttctttgggggagccctgccccagaggttcctgctgcatgtgggttgatttcccccatggcagatctgctggctcatcctggggaacctcccctggaagtggagcccttt

SEQ ID NO: 84914 - DNA, 2223 bp, Homo Sapiens
  misc_feature (237)..(251): n is a, c, g, or t
  misc_feature (482)..(522): n is a, c, g, or t
tctcgtgaagaaaaaactcgtctcctcatagttcatatccccggcgtatagcgaccaattttcttctaatttatgtacttaaccattatatcaccgctctaggcttgtttacccagccgtggtatagcgcttctgttaaacttttttataaaattttcgcgctccatgaggggcggctttaaatattcttctcctttgttaggataacatctttttgccccacacaatatgtggttnnnnnnnnnnnnnnnagcagtcttagtgggtggtccccttctgcccccgtgtggcttccctcgctgtacacagtgtttccccgtctctatagtcgtgtgttatccgcctgggccacgtgccctgagtcgcttttattcggggtctcccctatttggggccacctttggtcaccgagcccctctgtgtatctcgctttatacttggccgcccccctcgcgagactctctttgtgtcggccccccccnnnnnnnnnnnnnnnnnnnnnnnnnnnnnnnnnnnnnnnnnccctttgaggagactaaatgtatttcatgctggaaagaacagattttctctcattaaaaatagccccactaaaggagaccaacatgctagaagtgcggcaccagggcctcaagactacacttcggaacatgaagagggctggggaccgctcggcccaagtctggatcttgtaaccaacagatgccgagcttgccgttcaactaggcacagaaagcagactcggtctgggattccagttggtctgattcagttcaagagggtcacagtcagaagaaagctttttccattaggagcttcagcagagtgaagagttcaacacagcaaacaggcaggcagctcctttgtatatgtgacggggtggccctgactgtaaacacagccctaccagtcactgcagctcatggcctgagaagacattccagtggcagcctcgggtgtccactcagttcacatattctggtttcacctgcccaagctgtcttcaggcatgaggtcttgtcagaattgggatgtggatgtctcctatgttaccatttattgtgtgggggcagccatcatcctatttgtctggtccatcaagcttcccagtttcccgctgcacaaggtcccgcatctcttctgtccagcccagaagctccactaggctttccacgccgtgaaccacgtcccccagctgggccacgtccctgctgcgaggatgccaagccaagggccccaccaagtcccggttgatgagcagtcggggaactgagctccgcacggcctcggtcaagctggcaaaaggctccaccttccggggaggtcccaaggatgagcagcagatctgccatggggaaatcaaccacatgcagcaagaacctctggggcagcggctccccaaagaacacaatgtcgggcttcacaacgccggtgcagaccgggcagcggggaaccctgtctgccatcacgtcagcccgaatgtcctcccctgggaagggtctttggcagactgtgcaggtggcagaggcaaaggttccatgagcttcaaccagctttgaggcagggatgcccgacactctctcaagcccatcgatgttctgcgtgtagagccgcagaagcagccccttgtcatgaagcagccggagaaagtagtgagtgatgttgggcttgtagtttccagggtacagctccttggccaaagtgaaaaagggcttggggttgtgaaagaagaatgggagttcaaaaatggcctcggggtacgggagatcgtactgctggaggttgctgtacaggccactccccggagatctgaagtctggaatgccactgggtgtgctgatgccggcccccaccatgaccaccaccctctggcaggctctggcccgaatcagctcagctacatcctgcagggaaagcttccccttgtcactgctgcctccacttccaacaacacttgaagcacccacagaaaaagatatggaccttcttccacctttaatactcgaaaagaagaaactgggagctgctgccctcggctgcctccggaatgccctgggcacctcgggtctgggaggcctctgcaaggggcgcgccgggtccaagggctcaccgcgggccccatggctgcctctcagccccgcactcacatcgtccctgccgccaagcaccagccgacagccgcaggcctgcctcgtgccgaattcgccacccaggcctcgctac

SEQ ID NO: 84915 - DNA, 882 bp, Homo Sapiens
  misc_feature (82)..(116): n is a, c, g, or t
aaaggaaaaaaaataagatatatagggtgcgtcgttattgcgaacgacgagcgcacgagtatgtgagcgaggaagcggccgnnnnnnnnnnnnnnnnnnnnnnnnnnnnnnnnnnncagtcgacggtacggacatatgcccgggaattcggcattacggccggggagttggtccaagtgtcccggcctgaggtgtcggccggatccctccttctcccggcgcctcaagcggaagaccattcctcaagaattttgtatccaaggcccaaaagtttgttacccaagatgatgaatgctgacatggatgcagttgatgctgaaaatcaagtggaactggaggaaaaaacaagacttattaatcaagtgttggaactccaacacacacttgaagatctctctgcaagagtagatgcagttaaggaagaaaatctgaagctaaaatcagaaaaccaagttcttggacaatatatagaaaatctcatgtcagcttctagtgtttttcaaacaactgacacaaaaagcaaaagaaagtaagggattgacacccttctgttttatggaattgctgctgatcattttttctttaaaacttggatagattccaaaagttacagtacctttgtggcttcattgaatatttatgaagataatgtcagatgtagacaaaaataacacaataacaggagacttccataagttggtgtattatgttagtctatgaaaacgtgcaaatgtattgtagagactttatgattagaattgcatatatttatgaaacttaaagatgaatgtcttattgaatttgtaggtttagcactgtcttttattataagattagtaagatatacaagaaaataaccaccggttggaaaaagtgaccaaa

SEQ ID NO: 84916 - DNA, 855 bp, Homo Sapiens
  misc_feature (580)..(580): n is a, c, g, or t
cagtcgacggtaccggacatatgcccgggaattcggccattacggccggggggtccaagtgtcccggcctgaggtgtcggccggatccctccttctcccggcgcctcaagcggaagaccattcctcaagaattttgtatccaaggcccaaaagtttgttacccaagatgatgaatgctgacatggatgcagttgatgctgaaaatcaagtggaactggaggaaaaaacaagacttattaatcaagtgttggaactccaacacacacttgaagatctctctgcaagagtagatgcagttaaggaagaaaatctgaagctaaaatcagaaaaccaagttcttggacaatatatagaaaatctcatgtcagcttctagtgtttttcaaacaactgacacaaaaagcaaaagaaagtaagggattgacacccttctgttttatggaattgctgctgatcattttttctttaaaacttggatagattccaaaagttacagtacctttgtggcttcattgaatatttatgaagataatgtcagatgtagacaaaaataacacaataacaggagacttccataagtntgtgtattatgttagtctatgaaaacggtgcaatgtattgtagagactttatgattagaattgctatatttatgaaacttaaagatgactgtctcatgacacttcgtaggtttagcactggcctttatcataggattagtaagatatacagaaaataaccacgggttgtgaaaacaggaccaaaatcatgtctaaatggccagttattggtccggtcaacatcttgtggcctctctcattggcctcttcttcctatttccatccgtaggaaaacg

SEQ ID NO: 84917 - DNA, 1301 bp, Homo Sapiens
  misc_feature (252)..(252): n is a, c, g, or t
aaccgggttctcatcccagatgggggctaaacataaagggttagtccaaactttaatcccactgtttcaaaataatttccccaaaaagatctacttttggggccagaggaaaaacccaaattttggagtgaaaaatattgggttactactgtttacccgagtacttttcccaccctattcccatttttcctcaaaattttctagttgtaacagacacatgaccagaaattatatatttttcagataatacanaatgagttatttggggcaaaaagaagttttttaacaacaaatattcccaagttaattcagtttcaaagaaaaaccttcatttttagcctccatctatttccaattaattaaagagacactagcattcctatcttaacactaaatacacaaatgacaagccctagctgagacagtatcttattttggttaagtttcaacaattaaaatacaggttactctcagagatgattaactattaaaattacttttacaaatgtgacaccaatttttttccttagcggaagggaaataggaaggaagaggcaaatggagaagaggcacaagatggtggacagggtacataaagctgtgcatttagtacatgattttggtcactttttcacaacacggtggttattttcttgtatatcttactaatcctataataaaagacagtgctaaacctacaaattcaataaaacattcatctttaagtttcataaatatatgcaattctaatcataaagtctctacaatacatttgcacgttttcatagactaacataatacacaaacttatggaagtctcctgttattgtgttatttttgtctacatctgacattatcgttcataaatattcaatgaagccacaaaggtactgtaacttttggaatctatccaagttttaaagaaaaaatgatcagcagcaattccataaaacagaagggtgtcaatcccttactttcttttgctttttgtgtcagttgtttgaaaaacactagaagctgacatgagattttctatatattgtccaagaacttggttttctgattttagcttcagattttcttccttaactgcatctactcttgcagagagatcatccatgtcagcattcatcatcttgggtaacaaacttttgggccttggatacaaaattcttgaggaatggtcttccgcttgaggcgccgggagaaggagggatccggccgacacctcaggccgggacacttggaccccccggccgtaatggccgaattcccgggcatatgtccggtaccgtcgactg

SEQ ID NO: 84918 - DNA, 623 bp, Homo Sapiens
  misc_feature (203)..(426): n is a, c, g, or t
atttggtgggaggaaatcccaaggccctatggtcatggacccaggattcttccctaaggaaaccaagcttatgaacccatggttccacttaccttactggggccccgcgcgccccaaacggaatggtttagaaaagcttttttgaggggccgagggcgggccgaacaagttaaatatggtttgattagagacaaaaaatcaannnnnnnnnnnnnnnnnnnnnnnnnnnnnnnnnnnnnnnnnnnnnnnnnnnnnnnnnnnnnnnnnnnnnnnnnnnnnnnnnnnnnnnnnnnnnnnnnnnnnnnnnnnnnnnnnnnnnnnnnnnnnnnnnnnnnnnnnnnnnnnnnnnnnnnnnnnnnnnnnnnnnnnnnnnnnnnnnnnnnnnnnnnnnnnnnnnnnnnnnnnnnnnnnnnnnnnnnnnnnnnnttttcaatatttctacttaattattagctaacttgattataacaaaattctcactccaccaaaagaaacaaactcattttacatcctcaattcttttctttgtcaaatgacactgagtacaccaaattcttatcatatgtatatgtgtgtatatgtatagtaaacaactaagaaaaaaatcattataacatttagaa

SEQ ID NO: 84919 - DNA, 373 bp, Homo Sapiens
  misc_feature (18)..(18): n is a, c, g, or t
  misc_feature (27)..(27): n is a, c, g, or t
  misc_feature (66)..(66): n is a, c, g, or t
agagctaagcctgatttnatcacgacnagctgtgaaagttgcaggtaccaaaatggaactacttcnaccaatccctaaacaaatggagtcgggaggccacgaagggggagctctcatgcaggaatacctgcagcaggcctcctcacaagacgctcctgcacgtcctgcacgtttgcctgtaaccggacttactgcagggaaattcctcaggactgcagtattctagataagcagcttgcacaaggacgtcggcctggtaaggctctctccaacaaaaaactaacgcccactcctgcagcaagcgcccacagccagtggtttttgttacaaaacaactttggtgagctcatctgtattttccccttttccagag

SEQ ID NO: 84920 - DNA, 356 bp, Homo Sapiens
  misc_feature (15)..(15): n is a, c, g, or t
  misc_feature (72)..(72): n is a, c, g, or t
  misc_feature (273)..(273): n is a, c, g, or t
  misc_feature (320)..(320): n is a, c, g, or t
  misc_feature (342)..(342): n is a, c, g, or t
tcaaagtttctgggnccacaaaatctggacctgctcctaattttttgccacatatctgagtctgggtatttncttcgtggcttttagggggctttcgggttctactgccatgcctgtgattcctagtatttggaaggtaaccagaggttgcagaccagaaggaacagaaagccacctgacctaagctctagctgtggtagaaaaaggtatgtaggcctgctatggtgacatagggctagttacgttacctgtccctttgctctacacaactgnatacgtatgcatagttccttctacctcaatccaggccctgttacctntggtattgtcatcaccaaattngtaaatttggaaaa

SEQ ID NO: 84921 - DNA, 1233 bp, Homo Sapiens
agcatgctcccagccgagtccgtgatggccgctgccgtcccgaagaggatgagggggccagcacaagcgaaactgctgcccgggtcggccatccaagcccttgtggggttggcgcggccgctggtcttggcgctcctgcttgtgtccgccgctctatccagtgttgtatcacggactgattcaccgagcccaaccgtactcaactcacatatttctaccccaaatgtgaatgctttaacacatgaaaaccaaaccaaaccttctatttcccaaatcagcaccaccctccctcccacgacgagtaccaagaaaagtggaggagcatctgtggtccctcatccctcgcctactcctctgtctcaagaggaagctgataacaatgaagatcctagtatagaggaggaggatcttctcatgctgaacagttctccatccacagccaaagacactctagacaatggcgattatggagaaccagactatgactggaccacgggccccagggacgacgacgagtctgatgacaccttggaagaaaacaggggttacatggaaattgaacagtcagtgaaatcttttaagatgccatcctcaaatatagaagaggaagacagccatttcttttttcatcttattatttttgctttttgcattgctgttgtttacattacatatcacaacaaaaggaagatttttcttctggttcaaagcaggaaatggcgtgatggcctttgttccaaaacagtggaataccatcgcctagatcagaatgttaatgaggcaatgccttctttgaagattaccaatgattatattttttaaagcactgtgatttgaatttgcttatgtaattttatttgcttgactttttatatgatattgtgcaaatgtttgccataggcaattggtacttaaatgagaggtgagtctctcttttgccttggtgctttggaaattaaatgtcacaaacgagtatataattttttatctgtacttttagagctgagtttaatcaggtgtccaaaatgtgagttaaacattaccttatatttacactgttagttattatggtgttagatttattatgcttcttcctggaaggtattagtgatgctacttttaaaaggatcccaaagttgtaactaaattctgacatatctgttacttgctgactcacattcattctccgccattcaacatactatttttatccaacatttgtttggtccaaag

SEQ ID NO: 84922 - DNA, 870 bp, Homo Sapiens
tgatttataaaagcaacaaaaatatattatgccaggtgggttggcatatgttccagcagaaccctatccaacaactctgggaaaccctggttacaagtgtatttttgaagggatggggctaaatttgtccaaacagtaaatctcaccccagtgatagctttggtgcagtaagtaatcagcctccaagatgggtctgagagaggcatttcaaagaatgttccttaattctcaacacataaccaaggtcaatccattcaaacagcaaataaagaaaatccataggtactaagataactgttctctcttcatatgatactaacaggcttatggctatgattctatttttaaatccccttttactaccagcagggagtttgaaagtgtttcaatgctatataaatgtatgaatctagaggagaaaaaaatatgcatactggaatggtttctcctttagacttccaaaacttaagattttataaataaaactagtcagttttatctaaagagacatgaaatccatgtgaaaggggagagaaaatccaaagttcagtcatccagcaatttaggagtgtgcccctcctcaccttaactaagctttcacataaagcttaaagtcaccgaggaaagatttggtcaccaaccttataggcagcgctcttaactatgccaggaaatccccagtagagtgcattcttaaggcagaaggctagagctaattgcttatctcagcaccctaagtttacatcacagcagccactactgctcagacagttagggctaccaaatatgtagagttggcctttgtagaatcagaccttcaacacaatctaataaattagctagggagctgaaaaggtcaaatgttactgg

SEQ ID NO: 84923 - DNA, 366 bp, Homo Sapiens
cgtccaccattgaaactcgcttgtcaccctcaccctggtcacactggctctctgctgcagctccgcttctgcagagatctgcccgagctttcagcgtggtcatcgaaaccctcctcatggacacaccctccagttatgaggctgccatggaacttttcagccctgatcaagacatgagggaggcaggggctcagctgaagaagctggtggacaccctcccccaaaagcccagagaaagcatcattaagcttcatgggaaaaaatagcccaaagctcactgtgttaattaggcattttaggaagcttgaagatcccccaactggttcccagcctcttgccgttgccatggtttttggagttccacgg

SEQ ID NO: 84924 - DNA, 466 bp, Homo Sapiens
acttgtatttttctaattacagttctaccaaacatttgccaccacaaaatacaagtatttttattctttatttaaattagggtgagtgatatttcttcctatatagccattaagatctctggaagttttgatctactttattcaaaccactttaataaataagacttttcacctaaatgaaatacctttgaattttataaacaacttccatgaaacatatattaaaaccacctttaatttggtatgaagacactttggcaatgcagcggaataaatgatcttggcaagaccctcccccaaaagcccagagaaagcatcattaagctcatggaaaaaatagcccaaagctcactgtgtaattagcatttagaagctgaagatccccaactgctccagcctctgccgctgccatgctttgagtccacgcccaccagccttgctctcttcaataaaccacaagcatctc

SEQ ID NO: 84925 - DNA, 1226 bp, Homo Sapiens
  misc_feature (1149)..(1183): n is a, c, g, or t
tttaaaaataaatttagggggtacaagtacagtttagatacatgaatatattgtgtagtcgtaaagtctgggcttctagtgtaacacatcacgcaaatatacttgtatttttctaattacagttctaccaaacatttgccaccacaaaatacaagtatttttattctttatttaaattatggtgagtgatatttcttcctatatagccattaagatctctggaagttttgatctactttattcaaaccactttaataaataagacttttcacctaaatgaaatacctttgaattttataaacaacttccatgaaacatatattaaaaccacctttaatttggtatgaagacactttggcaatgcagcggaataaatgatcttggcaagaccccagcaagtacagtaaatgctcatgagctctatgaaaaatataggctacagaatacttcattagggccttttattgaactacagtacaaatgtgactgcttcaatatgaacatctatcttccaccaaatagcaaacaggcatcttatgtaattaaaaactaattatttcaattccaccaatggaaaagcaaaacaagttgcaaatatcaacaatacagagcctgctggtaaagatagagatgagtaagttataagctaataaagctgcagcctgaggatgccagatcaacattataaatatgaagaaaaagaaactaaatatttactcatcgcaaataactcggcataagcaccagctatgttcaggtgcggccagcacataggccaagtataaatgtacaatcacagtgaactaaagccataaaatctagttccctgacccttcaatcaaccattcaaagcaatgggaatatagcggggagacagaagtcccactttggttgctcatattacattaagccagcctgccccacccgcaatccccttcccactcgaataaaagaagtcaccgtgagtgtataattggtcaatccagtttgatccaaggtctatagatatagccatgatttgtcctatattcatgttaaatagaatgcttacataaaattaatactcaaaagacattgagctgatgtgcatgtatattccccggccgtaatggccgaattcccgggcatatgtccggtaccgtcgactgnnnnnnnnnnnnnnnnnnnnnnnnnnnnnnnnnnncggccgcttcctcgctcaccatgactcgctgcgctcgtcgttt

SEQ ID NO: 84926 - DNA, 964 bp, Homo Sapiens
  misc_feature (60)..(102): n is a, c, g, or t
  misc_feature (105)..(139): n is a, c, g, or t
acaaacacaaagaacaagaaagactgtaagactcactatagggcgctagctcccgtcatnnnnnnnnnnnnnnnnnnnnnnnnnnnnnnnnnnnnnnnnnnncgnnnnnnnnnnnnnnnnnnnnnnnnnnnnnnnnnnncagtcgacggtaccggacatatgcccgggaattcggccattacggccggggagagcccaccagactcagagacggaaccagagacgggccagagcatccccctcctccaccatgaaactcgctgtcaccctcaccctggtcacactggctctctgctgcagctccgcttctgcagagatctgcccgagctttcagcgtgtcatcgaaaccctcctcatggacacaccctccagttatgaggctgccatggaacttttcagccctgatcaagacatgagggaggcaggggctcagctgaagaagctggtggacaccctcccccaaaagcccagagaaagcatcattaagctcatggaaaaaatagcccaaagctcactgtgtaattagcatttagaagctgaagatccccaactgctccagcctctgccgctgccatgctttgagtccacgcccaccagccttgctctcttcaataaaccacaagcatctcaaaaaaccacgaacacccagcacacacagcaccaccacacgtggagccaccatggaccccacgaaaacagcacgctccacacacaacagagttaagcccacggggcgcccaacacgacacagagacaccacggcggcaccaaggggaccccacagagaaacacccggggcacagacaccaaggagaggagagatcaccagccgcacagtaaccaaacgccccgtgccgcaacccgcagacgtcctggacaccagcacacgcagtgcacatctggacaggccaaaggcggaccgtctaaaggagactccgaggacgcccacccaaacaatagccgc

SEQ ID NO: 84927 - DNA, 657 bp, Homo Sapiens
agttagaggtttaataaagaggttcaataaacagaaattttatttaacatatatttcaacatgaaatctataaattgcaaaggagcactgtgaattctttggaaaaacgtttgtttgctctactcacaagcttcatccttgtggcatgtattcagagctaggttatgtcctgctttttgtttaggcaggcataatgtctttcatggtattctcagaactctgttaaacttcactgctttgttaaatgtcactgctctgttaaacttcactgctcacaaaatctgagttaggacaaatgttcatcggggttgttgctcacatgttttcctatggctggttttcacaaaacggtatgcatctagtcctagggaagtacatgaaaggtcttcttagacggattctgctggaattatctcttgtctctgcagctgctggttctatcttctctcttctccagaagtggtattatttgtaaagtatttttgatggatgggtttttgcaaatggattcttgtatatcttcttcaatataagaataccccttgtagtttgttttggctcacttgaacttagcaggacactttgtccaaaattattaatttgctcactgtacttctgtcctacagatccacggttttgtcttttctgccctcgtgc

SEQ ID NO: 84928 - DNA, 627 bp, Homo Sapiens
  misc_feature (289)..(387): n is a, c, g, or t
aaggataatatcgtttaacaacatgtatttggtttccctcaactaccagacatacagctatttaaaactatggcaatacttaagcatctctaaatttaggtgctaaatatctattattctgttgtagtcattaggtgcccttctctgaagttatgtaaaataaaagcatctgatccttcaaggataaagttgaggatcacatggtacgtggcatttgttgttattgttttttaaagagatggaggctggctctgttggtgcggtgccatgatcatagttcactataacnnnnnnnnnnnnnnnnnnnnnnnnnnnnnnnnnnnnnnnnnnnnnnnnnnnnnnnnnnnnnnnnnnnnnnnnnnnnnnnnnnnnnnnnnnnnnnnnnnntcataacatttttcctgtatggtaagacgtatttttctcagtttataaatacgtagcactcaggttgagacgacttggattttattcttagaaatccagaatcccttgaaaaggaaatattttctgtttcttataaataaaagagtaatcttactttcagaaggattttccttagtgaaacatgtgtaacattgaatgcatgttaaataaaaatggaatttctaactttttttcaataaa

SEQ ID NO: 84929 - DNA, 525 bp, Homo Sapiens
  misc_feature (14)..(14): n is a, c, g, or t
tgcctgtatttttnatcagccacaaatccagcaacaagctgaggattcagctcataaaacaggcttggtgtcttggtgatctcacataaccaagatgctaccccgtggggaaccacatccccctggatgccctccagccttggtttgggctggagtcagggcctgtatacagtattttgaatttgtatgccactggtttgcattgctggtcaggaactctagtgctttgcatagccctggtttagaaacatgttatagcagttcttggtatagagcaaactagaagaaccagcaatcattccactgtcctgccaaggtacacctcagtactccccttcccaactgaagtggtatgaggctagctctttccaaaagcattcaagtttggcttctgatgtgactcagaatttaggaaccagatgctagatcaaataagctctgaaaatctgaggaacattgtaggaaaggtttgttaagcatctcttaagtgccatgatgagcataacagccggccggggtgactca

SEQ ID NO: 84930 - DNA, 771 bp, Homo Sapiens
ggcaattttttcaaagaattcttttttcccaaaaagaggagtaacaaaatgtcatttctgaaagaggcttactttataccaactagtgtcagcatttgggatgccagggaacagagagtgagacacctacaatcaccagtctcaaatgcgctattgtttcttttcagagtgttgcagatttgccatttctccataatatggggatagaaaatggaataaagatagaagggatgtagaatatgctttcctgccaacatggtttggagtcgactttggtatattgactagatttgaaaatacaagattgattagatgaatctacaaaaaagttgtcctcctctcaggtcccttttacactttttgactaactagcatctatattccacacttagcttttttgtcacacttatcctttgtctccgtaaatttcatttgcagtggttagtcatcagatattttagccacctacacaaaagcaaactgcatttttaaaaatctttctgagatgggagaaaatgtattctcctttcctataccgctcccccaacaaaaaaacaactagttagttctactaattagaaacttgctgtactttttcttttcttttagggggcaaggaccctctttatagctaccatttgcctacaataaattattgcagcagtttgccatactaaaaatattttttaatagacctttattattttttccctttggataaaaggggatgctggcataattaaaatttggggggtaaaatttaaacctttc

SEQ ID NO: 84931 - DNA, 837 bp, Homo Sapiens
tcaccaaggagtttccttgaataatagggagggaaccattcaggtatgcccagggaaactttaggacgctgggttccactggtctgtttgcccaaaccctgtagaagacctttccctggtttccaaaaggaatttgaaagcttcttcctgtaccaaattttttaatacgttctccatctctttcttctcgtaatctccttatttcatcagttaagcagacaatgtgctcttgcattctgcgtagccggatttcgtaacgcacatctttggcttgagggtggtagttcctggcataaaatccccgccaacaggcctgaagcttggtggctgcatcatttaatttctgaagggcaactttgtcttgtcccaaaagcaacaagatctctgggttaaaatcatgggaagtttctctgaagttgcttgagatatggtttctttattttctggttgtgtattttctggtttctttatgtctgattgtttctgctcagttgactcaggaaaaaatgtaagactgtggttatcatccttcaagatagcactgattattgttggctcaggacaaggtaatagtccagctttctcatttacctctgtattgatttcacttctcatcatttgaacagaattctcatttgcagcccataaaggctgttcctcttccttatccaacacctggctttccagccctttcacagattcatctgcaacaccatcatcttctaggcccaagttaatgccctgcagcctcagctcaactgtaggtgatagtggagacagtcctgatgcaactggcataaaagtagactctgaagagagaagactacagtttaactt

SEQ ID NO: 84932 - DNA, 1646 bp, Homo Sapiens
  misc_feature (78)..(112): n is a, c, g, or t
  misc_feature (1072)..(1129): n is a, c, g, or t
aatgtatagatcatatagggcgcccgcctgcttagtcgaacgacgagcgcagcgagtctgtgagcgaggaagcggcgnnnnnnnnnnnnnnnnnnnnnnnnnnnnnnnnnnncagtcgacggtaccggacatatgcccgggaattcggccattacggccgggctcatcttccttgtcaagtacgaccttaacaacccggacaagcacgccaagctggacttcctcaacaacctggccacgggcctggtgttcatcatcgtggtagtcaacatcttcatcacggccttcggggtccagaagcccttgatggacatggcaccccagcagtaggacacccaggaccctggatgctgcctgccctgcaactcagctgcccgaccccaggagtcgccatacctgtgaggtgtccacctccctgcacatggcactacccagactgccagagcccaggctggcctcatctgcaccatgtccccggaccagcccttgctctgactgcggccaagcaccacgcaggaggccactcttgtctctcagcagctgttcccaggaggcagctccctcctggcacatgggggctggccacaatagcccagagggtcagaactggacagctgcagagacctgtgcccagagaagggtctcgacccactcaaggacacacagcaggtccgtggatgggctggatgagtgaccagggccagcctctgtctcaggacattccagaaggacaaggagatgtctctccctctcccaaagcaccagcgtccctgcctcccgtgggccctgtccgggttgccctggtgaccccagcctctgtccacttcctaacccagggaccctgcacagccagaactgcctttggccctacggatggccactggctctggtctaaagtgcctgggcttggtggccatcaagagggagccagtcaggcctgtgagggccgtagaccttgtatataccctgcaccagcagtgaccgggcagagcccaaccccctccacgggggtcccagcacccacttttctaatcatgaatgaacaataaagcccacgctctttgtcaggctnnnnnnnnnnnnnnnnnnnnnnnnnnnnnnnnnnnnnnnnnnnnnnnnnnnnnnnnnncggcagggaacactacctgcaatcgaacaaaagaacaaacaggagacgccgccgtacccagaactagcagagaccagcgcaaacagacagcccacagggcgggcagccacagctgagtgcgctcagcccaatggacacgaagaccggacccaaagtagacggccagccccacagtgggagatgtacgggcacatcaagtggcacctatcgcggctcaaataaagaagaaggcctaaccgattcgttactcctataagaatagaattctcccagaaggtgagcaccgcatcccccttggaatatgagaatacctcaggcgccaatccacacagaaagacattcacccctggtccgattaggctactaacggaaacaagtgcgaagacttgaaagaacccaaatactcgaaccgattattcggtaaccgaagagggacgagtgaacatactgccagggacacccaataatacagatgtaatcctgtacttgaatccattgcctcaaacaatgaactagt

SEQ ID NO: 84933 - DNA, 1014 bp, Homo Sapiens
  misc_feature (93)..(93): n is a, c, g, or t
gccgggacaaggggccccccccggggaagggcaggggaacgtgtgggtgcctttggggaagaggggagaagacattctcccttgtcccttttnggaaatgtcccttgagaacagagggctgggcccctgggtcattcattcccagccccatcccacggaccctgctgttgtgtccctgagtggggtcggagacccttctctgggcacaggtctctgcagctgtcccagttctgaccctctggggctatttgtggccagccccccatgtgccaggagggagctgcctcctgggaacagctgctgagagacaagagtggcctcctgcgtggtgcttggccgcagtcagagcaagggctggtccggggacatggtgcagatgaggccagcctgggctctggcagtctgggtagtgccatgtgcagggaggtggacacctcacaggtatggcgactcctggggtcgggcagctgagttgcagggcaggcagcatccagggtcctgggtgtcctactgctggggtgccatgtccatcaagggcttctggaccccgaaggccgtgatgaagatgttgactaccacgatgatgaacaccaggcccgtggccaggttgttgaggaagtccagcttggcgtgcttgtccgggttgttaaggtcgtacttgacaaggaagatgagcagcacccccacgccgatctgcagcacaagggagatggagatgaggaccaccaggggcacatagaaggcgaagctggggccctgttccacgacggccttcagctgggacgcgttggccatcagcagcgcgatgtccagcatgctctcggctgcgctcttcttgctggcgtaatggttcacgttgatgggcccgtgcctccagccccagcgggccggcgaggcgtccggggagccgggtgtgcccggaggcaggccgccgttgagctcgtactcctcggttcccgagtccatggtgcggccgccctcgtgccgaattcgccacccaggcctcgctacctt

SEQ ID NO: 84934 - DNA, 1229 bp, Homo Sapiens
  misc_feature (1010)..(1010): n is a, c, g, or t
tagattttataatttaatctaagcgaaccacaaaccccctaagtagcgaggcctgggtggcgaattcggcacgaggcgcagctggagcctgcggctgaggctcgggcgcgctcaggcccggatcctggcggcctgggcggccgcaccatggactcgggaaccgaggagtacgagctcaacggcggcctgcctccgggcacacccggctccccggacgcctcgccggcccgctggggctggaggcacgggcccatcaacgtgaaccattacgccagcaagaagagcgcagccgagagcatgctggacatcgcgctgctgatggccaacgcgtcccagctgaaggccgtcgtggaacagggccccagcttcgccttctatgtgcccctggtggtcctcatctccatctcccttgtgctgcagatcggcgtgggggtgctgctcatcttccttgtcaagtacgaccttaacaacccggacaagcacgccaagctggacttcctcaacaacctggccacgggcctggtgttcatcatcgtggtagtcaacatcttcatcacggccttcggggtccagaagcccttgatggacatggcaccccagcagtaggacacccaggaccctggatgctgcctgccctgcaactcagctgcccgaccccaggagtcgccatacctgtgaggtgtccacctccctgcacatggcactacccagactgccagagcccaggctggcctcatctgcaccatgtccccggaccagcccttgctctgactgcggccaagcaccacgcaggaggccactcttgtctctcagcagctgttcccaggaggcagctccctcctggcacatgggggctggccacaatagcccagagggtcagaactggacagctgcagagacctgtgcccagagaagggtctcgacccactcaaggacacacagcagggtcccgtggatggggctggatgagtgaccagggccagcctctgtctcaagacattccagaaggnacaaggagatgtctctccctctcccaaagcaacagcgtcccctgcctccccggggccccctgtccggggttgcccttggatgaccccaagcctctgtccaacttccctaaaccaggggaccctgcaccagcccagaaactgcccttggggccctacggatgggccactgggcttctgggctaaaggggccttggggcttggttgggccatccaaaaagg

SEQ ID NO: 84935 - DNA, 707 bp, Homo Sapiens
cagtcgacggtaccggacatatgcccgggaattcggccattacggccgggcacacaaatttctaaaaaaggcaccaccacaggtacgcacacatgcatgcacgcgcaggcttggagaaagccttacttgcttccattgagaaatagtggtctggaataaatcatgctaaaataatcctatttttttaataggattgctggagtggtcaaggacattgtagccagaacaatacaggcaaccttttgagctaatttgtggatcatggtagaggaacatggctttttagctgcatgagtgaaaggtcattcccaaagtaagttttccctgggatgtttgttacctgtgagacaagtatgcagagagtgctgtcaagattctttacttggccccgtcctatttaacagttctatattaatgtcagatggtcttgctctgtaatttatagctgcattcaaaacgcacaagtagaagttcactagatttcaggattttgagaagatatttggatgttaaacttaacagaaacttaaactgtaaaagttcacataaagataaataggaagttctgtactttgcttaccaacctcaattccaggcttagttagatcggttacttagcagttcatcacaaacaatcctgtgtctagatgcattggtgtgactcttgaggtgtcatgtcttccccattaatagaatacttcatagat

SEQ ID NO: 84936 - DNA, 443 bp, Homo Sapiens
  misc_feature (15)..(15): n is a, c, g, or t
  misc_feature (34)..(34): n is a, c, g, or t
  misc_feature (40)..(40): n is a, c, g, or t
  misc_feature (45)..(45): n is a, c, g, or t
  misc_feature (133)..(133): n is a, c, g, or t
  misc_feature (157)..(157): n is a, c, g, or t
gatggaggtctttancccttaacaaactaatgcnggaacngaaancccaaatactgcatgttctcatttacaaatgggagctaaattatgagaacacatgaacacatagagggaaacagcagacactggggcntctgggagggtggatgggtggganggaagcagaagatcagggaaaaacaattaatgggtactaggcttaatagctgggtggtgaaataatctgcacaacaaatccctgtgacactagtttacctacataacaaacctacgcatgtgccattgacctgaaaataaaagttaaaaattattaaaaatatgtcagtaaaagtctttaaccaacacaagatggttcatcccaagagtcatcttaatttaaaaatcttcacatcttaagaagctacatgggaggctgcggcatggagaatggcttgaacccagca

SEQ ID NO: 84937 - DNA, 303 bp, Homo Sapiens
ttttggtagagagcttaggattttatttttcgtttacacagggaatccaagaaaggagacagacaaagtgagtctcaaggatgagagcagagaaaagctcgagataagagctgtgcagccgggtcaggaagtgatcggtctaggtcggaacaggagaatcagttagacacaacggatgtgtttgagcctttggaaaacggtatcgttaggcatgtggcaaaaacgttggggtacttgaaaaaaaggctggccatgggttagtaaaaagctagatatgtgaaaatattaggtaattattaactc

SEQ ID NO: 84938 - DNA, 552 bp, Homo Sapiens
  misc_feature (22)..(22): n is a, c, g, or t
  misc_feature (33)..(33): n is a, c, g, or t
aggaagggccaataactgtggnaggttccaaanggcacttggccaatccaaaaccctaccccccaacctccccctaacaacaaggcgaggtgtgaactctgaagatctccccagccctgtctacagagcagctgacagagggaaccgtttccaggtgctgttggaggttcatgtcacaggtaacaggggacagttacaatcagttgggctgggggctcccacattctgacggcttgcaggaacctgatcctggtagggctctcgggaccaggacccaggcagtgcctggtttaagagggtgtgctttgctgtgggtagaacacccttaacattaatcaatagctatcctggtgcgtccaaaccccacacccagagaggtacttaataatgccttcacctggaacatcataaacgtcataatacaacaacccgcttggggcttatcgtagaggttatgctgcaaggaactgaaaggaaataatgggctagagtgttcgagacagcagaaatgaaggaaagattaaggcatctcacacttttgccccctggggg

SEQ ID NO: 84939 - DNA, 1500 bp, Homo Sapiens
acatggaggctgagtataatgagtccttttagcatgtcccttttcaaagggagggtatgtctgtaataaagccccttgagtacttttttaccaggtcactacaggggaaagacacccttttattacaatgcaacagctaactattaagcagcacaccaccacagtggttaaccctggaaaggctggtgtaacatccaacagtgacacatcctacagaagacagactggtaagattagatgaaagcctgacatagcaatccaccaaaatacagctttccaactgtaattcacaataaaagccctaatcagtaaaactactgacacccaatcgagaaagtaattgcaaactggattctatcagtgatttcaacctagcttcctcttgtcacagtgttcagggggaggtgggaaaggagtagctcagtatatagtaaggctgacagagcggttcattttctttccaataagtcgagatgttctattactctgggtggtggacctagtggccatccggtcagtgaagagtgctctttcctcagctgcagcttttgccatctgtgctttcttgagttctttttgtaaaagtgaatttttgaacttttcggcattcaattctattcgtaattgttctgcactctttctagaagcggacagcaatactgaatgctttaccagtgccattgctgaaggtcttctctctggatctggatgaatcataacttttagcaactctgtaaattcttgggaaagcacttgtggtatccgaggtaatctaccctgtctgatttcatgccattgatctccatttctcggaagaggttcagcaccagcagcacataccactgtgagggcaagcgcaaaaatatctgcttttggtagatgggtataattctcctgtaaaacttcatttgcaagaaaacgactatcgccctcttcaacttgtggactggagatccttgttacatgcccaagatcacctattttaaacataactttgttggatgcccaatcatcttcgtctccttcttcagaggcagcatttgggattgaggttcgagatatgaaaatattactaggttttatatccatgtgaaccaaagacattgaatgaatatacctcaagcctcggccaacttgcaaaaggagatccttcaactctgcttctttaaagtaactcatgattctgtagttttcacttatagcatcagctaaacttccacctaacaaagatagaaaatattagcattttcttctttctgaaatattttctttcttccatctttaccaaatgagtctcaaccaaccaatctcaaccaagaaagtgttattttataggaccttctcccttcaacctgcttgtgaaatcaaaattttattgttttttcaataggtaatacatttgcatgggtacaaaataaaatgtaaagtctctctctcaatcatacacctcagcaatccacctgtttctttctcagagtaaaccagtattatcaggttggc

SEQ ID NO: 84940 - DNA, 462 bp, Homo Sapiens
  misc_feature (13)..(13): n is a, c, g, or t
  misc_feature (44)..(44): n is a, c, g, or t
  misc_feature (59)..(59): n is a, c, g, or t
  misc_feature (78)..(78): n is a, c, g, or t
  misc_feature (88)..(88): n is a, c, g, or t
  misc_feature (373)..(373): n is a, c, g, or t
  misc_feature (394)..(394): n is a, c, g, or t
  misc_feature (428)..(428): n is a, c, g, or t
  misc_feature (444)..(444): n is a, c, g, or t
aggatgtgctggngatgaaggccgtgtgtccgcacttgtcggcngcgccaaggtgaagnaccatctggcctgcagccngcccgcaagncaccagttcatctcctcctgcttgaggagtacggcgcctctgccaggccgcacgctccatcagcaccttccttggcactctggtaagagagaaaacgtgtttttctttctgtttggatgagctgaagagaagcatgtggcaagaggaagcttctcacgcatgtgtgcccgacctcgctgtcacacccccacacactgtgataggcccctcttctctacgggagaggacctgtttcctctcctctttgtctttcctctggactttgccacttggataaaagcattngggtggatttataagcaggtnacaactcatggtagtacttttttggggacctttngggccaggggaacgangcattgggggcaatgtta

SEQ ID NO: 84941 - DNA, 249 bp, Homo Sapiens
ttgcagatgatagaataaaaacatgtgtagaatatgtccaaggtcacacaaagagtgagtggtacagctgagttgaaccccaataagcctgactcataagcctggctgagtcatgctgcttctcagaactcttgatccagtacttttccccataagctgtaactccttcctgcagtgtatgattgccacagtcatattattgagaagtgacccctgtgtcacatcatcagtgcacgttgtattttttgg

SEQ ID NO: 84942 - DNA, 447 bp, Homo Sapiens
  misc_feature (349)..(349): n is a, c, g, or t
tcatcagttcagaccctcactgcatacaggatccctagagggttctatttaatagcttgaggaagggagactttaaaaggacgtgtgtgagtgaaataggatatagccattaccacggtgccaggacctgacagcgttccaattctttttgcagcatggggaatcaaaggtggcatgccaagttcaactcagggctgaggtatccacattgtccacatcaggcaagccctgcactgacggttgagcctcatgggagagggagcatgtgttgggaaagagatccctttgttaactgtttttgtgggtgttctctttcaatgaattaggagctcatgccccttttctggcntttgctgttgattttggatggtagagaatattcctgagagccttccttttggcccccagcttatgccacccactctcttctcttggttgacctcgtgc

SEQ ID NO: 84943 - DNA, 386 bp, Homo Sapiens
  misc_feature (310)..(310): n is a, c, g, or t
  misc_feature (316)..(316): n is a, c, g, or t
tacttttacagcttgtcaattttaatcaaaaagaaacgaaaagcccacattcaagtattaaagttaaacaagttaggagatgaaagtagactagaccacccaagtgggtaacttagcactggctgaaattacctagctttagttcagagaccactcctgaaaaggaaaagacatttctaacaactttagccaaagattctgggttctttgaagcctcaaagaaccctcctgggtaagggtactctgcatagatctgcatattctcccatgggccccaaaagactaaaaagcccaggggttgttaccccgncctcgntgttggaagggatcctcaggaggaaagtatgtttgaggaatccatggaaaaacttaatttttaaaaggta

SEQ ID NO: 84944 - DNA, 805 bp, Homo Sapiens
caactcttaacctttcaacatgaaagtctctgcagtgcttctgtgcctgctgctcatgacagcagctttcaacccacagggacttgctcagccagatgcactcaacggtcccatctacttgctgctttcacatttagcagtaagaagatctccttgcagaggctgaagagctatgtgatcaccacaagcaggtgtccccagaaggctgtcatcttcagaaccaaactggggcaaggagatctgtgctgacccaaagaagaagtgggtccagaattatatgaaacacctgggccggatagctcacaccatgaagacttgaactctgctacccctactgaaatcaagctggagtacgtgaaatgacttttccattctcctctggcctcctcttctatgctttggaatacttctaccataattttcaaataggatgcattcggttttgtgaatccaaaatgtactatgtgttaagtaatattggctattatttgacttgttgctggtttggagtttatttgagtattgctgatcttttctaaagcaaggccttgagcaagtaggttgctgtctctaagcccccttcccttccactatgagctgctggcagtgggtttgtattcggttcccaggggttgagagcatgcctgtgggagtcatggacatgaagggatgctgcaatgtaggaaggagagctctttgtgaatgtgaggtgttgctaaatatgttattgtggaaagatgaatgcaatagtaggactgctgacattttgcagaaaatacattttatttaaaatttcttaaaaaaa

SEQ ID NO: 84945 - DNA, 1309 bp, Homo Sapiens
ggctatgtgacatatagaacaggtttacaaaaagcaggctggtacggtcggaatcccgggatatcgtcgacccacgcgtcgtgatattttcaggaaaaagacaaatgccctcatagtagtgggaagtgtgaaggtgaccgtgaacatccttcctcatcgggtctgtccccgtcatttcctcccggagtcgtcgcaggtggagatggacaacgtggtgttggacttagacctccttcagtgtggctctgctgggccagaggcatcctgctgtcccgggtggctgcctcgctgtctgcaccccctctccctggggcagctttgcttcctgcccctgtgctcggggcctgggtggttactggcgtgtagatggaattgcttttttaatatgggaagatacatttatttttttccatgtgggtgggtgtctcttttggattttcttctgtttttacgtttctcttcttagaagggtgggagagaatcaagctcctgtggccacctgtgtcccagcagcagtgagtggagctgctcagggtgccctctcctgcggaccagtctctgaatgttcaaagatgagggcctggcttccgtgctctggctttgtaacttatctggaagggaaagcacatgccttcacgggcagggtatgttccttttcttctcggggtgttgacttgcattcctgtgtgaactgttccctctgccatgtttaccgtgtgatgttctgtagttgaaaatgttagttgtctgctggcacagaatttatctcgttcctttctctcccttctctcctccaaatcagtctcttcccttctccactagataactgtaaaaccttttcctggggtacatacattcgttaattcttgggcagtggtgagcacgagatgactttctgcagcgtttatcactgttgggtggagtcacgtcccttccctccaccgaagtcatcaaccagatagggaaagggaaagatgaggcccagaaaacgagttcaaactctaggtcttgtacacgtatgtaagtaaatgtcaataacccaagcctttgtcatagcagtcacttggttgacttaggatctgggtctgttgaattttgtgcttgggaatggagctggagggagtggggcctgtgtacagcagctacctctcccaggtcctctcacttgcctgccccgcgtcctggttgcatggccgcacctgtgtgtgtgcagaggtctgtgtcccatcctctgcacctcctttccgggggcctggggagccccacgtgttgccaagatcttggtgcaataaaatactcttggttttgt

SEQ ID NO: 84946 - DNA, 1074 bp, Homo Sapiens
tgagggaactcatgctttaatagacactgaaaatcacaaaggaggaaggccaagtgccttagcaatctcaataaaaatatgaagttctttttacatggtaaatttcataatataaaaagtttaatgtctggaaatggtgtaatttacaaaaaaagtccacgtaggccaaagatggctaacactgcatataaggaacgtgaatgccagtggaaaggtgtctgaggaggggcagggccacaggtgtcctgacagggaacatctttgaaggatctggcacaaacaagggcccagttcacaaaccacaggtacactcattttagatagaacagcagaataggtgatgaaaattatacagttttcacttgttgcctacttactgaaagcaaaccagattattgcatggcatttttccagcctgaactgaaattatcaaggctacagttcttcttgtgggtctgcaaatgtgtgtggctgggaggtggcagaatcggcacgggccagggaccggctgcagtgatcatatgctggagcgtcactgggacagagagagcaggatgaaggacagcgtgggtgacacctttgtctcctgctaaaaccccagcaagtttcagtgtggaccgtgaatttttaaaaaatggaatggaggtgaaaactttcattttgtgttgcacatcagtgtggatcaaaatgtaagttttagtagcaatttttctcttgatattttgacttaattaaaaaaatcaaattagttgagtcatttactggagagaattaagaaagctttgactcccttgctctgtggtcctgctgaggtttctaagagaggggagttgtacggcttatagtcattgtatttacatctgatggagtagcagagggtggggcatgccagtttcctgagctaaaaggaaatatatgcaatgctttctgcaaatggtaaggaaaaaattgttttgtaaatattatatccatggactcctcccaagtgggacaaagagccaagggctatgcaggaggcatttgcttccatccacgtggccctcacataccctgggctccccggacgccagtccc

SEQ ID NO: 84947 - DNA, 278 bp, Homo Sapiens
ggtgaatgagaaaggtgtgctggtcatggaatggcaggtgtcatatgactgattactcagagcagatgaggaaaactgtagtctctgagtcctttctaatcgcaactcttgtgaattattctgattcttttttatgcagaatttgattcgtatgatcagtactgactttctgattactgtccagcttatagtcttccagtttaatgaactaccatctgatgtttcatatttaagtgtatttaaagaaaataaacaccattattcaagcctaaaaaaaa

SEQ ID NO: 84948 - DNA, 405 bp, Homo Sapiens
  misc_feature (12)..(12): n is a, c, g, or t
  misc_feature (38)..(38): n is a, c, g, or t
aaaaaccggaanccaccgggatggtaattccaattaancctttggaaatgaagaatagatacattaatttaaaatgatcctcctaaagactgtccttccagcatcccctaaagcattgcaaaactataggcacagtttttattttatctttctggcaccctggtttgggctttgggcttagattaaaaagacgagccttctcctgcccctgctcccttttattccctgccatctgctaagctcgactttttatctctcaggccaaatttgactctgcaagggactttgcataacgtttcatcctcagaatcgctaatgatgggcagaggactgttacatgtgttgggagggattaaagtatatgacctcagtgccacttaaaaaataaatactgtctcaactatc

SEQ ID NO: 84949 - DNA, 501 bp, Homo Sapiens
tgcccgccccctttcttttcaaagcagaactacaaagatgagaaattaccagaagcctcgccttttcctaagcaccagcggaaggagctgtgccccgggatggagtgagggtggagggcgcgtcagccacgggtgggccttgtgtcgccttgtatcggcccaggtaggttgttggcctcttacttgggctgacctgacccccgaaagagaaacagacaactctgttctcaggattggggatggacggcttcggccaagcgttttagcctcattcactcaggccccactcagcactctgccagccaagaccattgatttggaaaatccggtccccacccgctaatgagctgttgacactgttgttccttgctgaattggattgttgacttgtagttcagaggcgtacaactagttggcgattagacttgttatgtgatgttaccagcctgaaatgcgatcaccccgtaggaaataaagcaggcatctctggacctcaaaaaa

SEQ ID NO: 84950 - DNA, 796 bp, Homo Sapiens
ggctgacgggcttctgtcagccaggctgccttatcagctgtccccttctggaagctttctgctcctgacgtgttgtgccccaaaccctggggctggcttaggaggcaagaaaactgcaggggccgtgaccagccctctgcctccagggaggccaactgactctgagccaggttcccccaggaactcagttttcccatatgtaagatgggaaagttaggcttgatgacccagaatctaggattctctccctggctgacaggtggggagaccgaatccctccctgggaagattcttggagttactgaggtggtaaattaacttttttctgttcagccagctacccctcaaggaatcatagctctctcctcgcacttttatccacccaggagctagggaagagaccctagcctccctggctgctggctgagctagggcctagccttgagcagtgttgcctcatccagaagaaagccagtctcctccctatgatgccagtccctgcgttccctggcccgagctggtctggggccattaggcagcctaattaatgctggaggctgagccaagtacaggacacccccagctgcagcccttgcccaggcacttggagcacacgcagccatagcaagtgcctgtgtccctgtccttcaggcccatcagtcctggggctttttctttatcaccctcagtcttaatccatccaccagagtctagaaggacagacgggccccgatctgtgatgagaatgtaaatgttgccagtgtggagtggccacgtgtgtgtgcagtatatggct

SEQ ID NO: 84951 - DNA, 955 bp, Homo Sapiens
  misc_feature (70)..(104): n is a, c, g, or t
aacgactatatagggctgccgtcgcagcgaacgacgagcgcagcgaagcagtgagcgaggaagcggccgnnnnnnnnnnnnnnnnnnnnnnnnnnnnnnnnnnncagtcgacggtaccggacatatgcccgggaattcggccattacggccggggaaggagatgggtgaatccaagttacttacggatgacataaaagatacaatcaacttggtgatccaatgccacactacaactatctgaccaacacgtttctgtttctctttagaccactctcatctccaggaaccagctctctgtgggccacacatgatgtttgacgaagatcgttgcgagtgtgtctgtaaaacaccatgtcccaaagatctaatccagcaccccaaaaactgcagttgctttgagtgcaaagaaagtctggagacctgctgccagaagcacaagctatttcacccagacacctgcagctgtgaggacagatgcccctttcataccagaccatgtgcaagtggcaaaacagcatgtgcaaagcattgccgctttccaaaggagaaaagggctgcccaggggccccacagccgaaagaatccttgattcagcgttccaagttccccatccctgtcatttttaaacagcatgctgctttgccaagttgctgtcactgttgttataacccaggtgttaacacacaaactccacttatacacaagcaccaccagtgaaatccagaccaagccttccaattcaacaccaagcttaaggagtccctggttcaactcgaatggactgtcttactagctgcaaattgcctctgcagcaccatggactggcagacgatgcggacccaatgtaactccattagcaaaagacaggaaatagtttcgagcgaatacaaaacggagtaatagacaattgaattgccacgctcgcctatgactgcataactcacacacacatgc

SEQ ID NO: 84952 - DNA, 523 bp, Homo Sapiens
  misc_feature (82)..(82): n is a, c, g, or t
  misc_feature (99)..(99): n is a, c, g, or t
ggggtcggtcccaacagtgggcttaaaatactcagtacactatgatgtaaacagacatgctgtcatccaggctttgttgttncatttataaagcacagnaagagtagattcagcaaattctaagggtcctaggattatcagaatgataaatgagcactagcttccacttaaaagtgaccagctgcattatccactaatgagagttagcatgtcctttcaaagcagatgttgtcttctctctagttatgaaagtcctagacggcaccttcttccaatggaaggctgtttcctctacactgacaatctgtttagtcatctgcatcaatgatcttagctagatcttctgggtaacttgcagcagcttctacatcagcacttgctgcttcattctgcactcatggagatggcttctttccctaaaccacaggaaccaacctctgctagcttccaatttttcttctgcagcttcatcacctctcttaggcttcacagaattgaaacgagggccttgctctggattggc

SEQ ID NO: 84953 - DNA, 559 bp, Homo Sapiens
  misc_feature (36)..(36): n is a, c, g, or t
  misc_feature (129)..(129): n is a, c, g, or t
  misc_feature (148)..(148): n is a, c, g, or t
  misc_feature (155)..(155): n is a, c, g, or t
  misc_feature (439)..(439): n is a, c, g, or t
ccaactcgaaattaccctactaaggaacaaaactgnagctccaccggtgcggccgctctaaactagtggatcccccggctgcaggaatcggcacgaggtcgtaaggctgaggatttttggtccgcacgntcctgctcctgactcaccntgttccnctcgccgaggaacaagcggtcaggaacccgcgcgcagcaccatgcttttaaggataccggaaaacacccgtggagcggaggtggaattcaccgaatcgaatcaccctaacaagccgcaacgtaaaccttggaaaaggtgtgtctgacttgataagagcgcaaaagaaaagaatctcaaagtaaagaccagtcgaatcctaccaagctttagaatcactacaagaaaaactccttgtggtgaaggtctaagacgtgggtcgtttccagatgagaattcacaagcnctcattgcttgacagccttcgagattgttaagcagattcttccatcagtattagccaggagttgaggtgaagtaccattgagatcttaagtcaactattttaataaattgatgaccagcg

SEQ ID NO: 84954 - DNA, 617 bp, Homo Sapiens
  misc_feature (394)..(443): n is a, c, g, or t
ctgccctttcaggaggcagaaggaagcaggtgtgagggcaatgcaaggagggagcacaacccccaggttccgctccgggctccgacttgtgcacaggcagagcccagacccgggaggaaaccctaccttggaattcaaagaacatttggggaatttggaaatctctttgcccccaaacccccattctgtcctacctttaatcaggtcctgctcagcagtgagagcagatgaggtgaaaaggccaagaggtttggctcctgcccactgatagcccctctccccgcagtgtttgtgtgtcaagtggcaaagctgttcttccctggtgaccctgattatatccagtaacacatagactgtgcgcataggcctgctttgtctcctctatcatgggctnnnnnnnnnnnnnnnnnnnnnnnnnnnnnnnnnnnnnnnnnnnnnnnnnnacgcaccgactagacacacaaagcagttgaatttttatatatatatctgtatattgcacaattataaactcattttgcttgtggctccacacacacaaaaaaagacctgttaaaattatacctgttgcttaattacaatatttctgataaccatagcataggaaaagagaaaat

SEQ ID NO: 84955 - DNA, 403 bp, Homo Sapiens
aactccccacctccaccaccacaataagaacaaaacctgtagggctctaaagagagggggtggtttacaagtttattgagcatttactaggaagtgacatggcgatgacctctgtacatgagttaggttcactttcatgtggcctcccactacagagatgcgtatcccagaagtcagctctctgaggagacaggctactttggccccagtttgaagcattctgtccaaatgtcctgagctctccagcagtcaagtagtgaatggataccatacttattatggttgatgaaaaaaggcagagcttatcctcaattttttttagggaagagaaggaataaaataaaagtggttccaagctgggcatggtgggctcacacctgttaatttgccagccactttgggg

SEQ ID NO: 84956 - DNA, 590 bp, Homo Sapiens
  misc_feature (41)..(41): n is a, c, g, or t
  misc_feature (47)..(47): n is a, c, g, or t
  misc_feature (56)..(56): n is a, c, g, or t
  misc_feature (65)..(65): n is a, c, g, or t
  misc_feature (72)..(72): n is a, c, g, or t
  misc_feature (102)..(102): n is a, c, g, or t
  misc_feature (114)..(114): n is a, c, g, or t
  misc_feature (119)..(119): n is a, c, g, or t
  misc_feature (142)..(142): n is a, c, g, or t
  misc_feature (148)..(148): n is a, c, g, or t
  misc_feature (167)..(167): n is a, c, g, or t
  misc_feature (532)..(532): n is a, c, g, or t
  misc_feature (537)..(537): n is a, c, g, or t
  misc_feature (547)..(548): n is a, c, g, or t
  misc_feature (566)..(566): n is a, c, g, or t
aatctccaagaaaaaaaccttaaaatctctctgcccaattnaactgnaaaaagtgncctccctgnagggttncccatggtgaatcaagatgatgtcaactgncccctggaaaanagttnccctaggaaaatgtgtgaatgtnaacttncccaggagatgattccccnatggtaacccatcctcaagtggaattggggggtgccccaggaaatgggggctgaggccggatacaagaagggacaaatgtgaagagcggaaggaaagggggagggggagaaatgcaggaaaaaacccaggaagaggaaggggaccttcccagagcagttgaaaataatatacagaatctcagaaatggaaaggtccccagagaccactaaatgcaacaacctcatttttacagaggctgctgagaggccaggacttgctcaaggtcacaccgccagttgacaggttagagcctaagccaaggctgcatgactgtcaggtttgggtggggtaataaaggattcctttcagccatttctctttgttntgttntgtttttttnnccgagcagagtcttgctntgttgccaggctggagtgcacacc

SEQ ID NO: 84957 - DNA, 566 bp, Homo Sapiens
  misc_feature (62)..(62): n is a, c, g, or t
  misc_feature (93)..(93): n is a, c, g, or t
  misc_feature (180)..(251): n is a, c, g, or t
  misc_feature (255)..(255): n is a, c, g, or t
  misc_feature (428)..(428): n is a, c, g, or t
  misc_feature (441)..(441): n is a, c, g, or t
ggggcttgctctgttgcctatactggattgcagtggtcagtcttggctcactgcaacctcgncttctaggttgaagtgacctcccacctcagntcccctgctgagtagctgggactacaagcatgtccaacatactcggctaactttggggttttttttgagaagatggggttttaccannnnnnnnnnnnnnnnnnnnnnnnnnnnnnnnnnnnnnnnnnnnnnnnnnnnnnnnnnnnnnnnnnnnnnnnagtntgtgcccccgggccggcctaatataagcatgtaaagcaaacagatttctccccgaaatgctgtagtggcaacatctcaagataaaagtgttgatattttaacattgtcttgaagttcaaaatactttctgatgtacattgtgaattcttcttgattttgggcatgtctggggnaccactcctggangtgtgcaaaatctctcgcttctgttcccatctgtccacctttccattcgcaccctcatattaatcagttatttcagttcccaagctgataactctaaaactttcgccatatccgaatctggttct

SEQ ID NO: 84958 - DNA, 799 bp, Homo Sapiens
gctattagaacttattcctacatgtaggattattaaatcaaaagaatatctatatatgtgtagtttatatttagtcctgtgagaactgctggctcatgttcttcagcctgcattctactgaggtgttggggtctttttcttcatctgtaagggctctttaaatagtaagaatgttgaccccttgtcaataaaattacaaatgtattttcccagtttactgattgccttcaattttatttacaagtctctgctatatgttttgtttctatttagtcaaacggatcactttattttctgcttctgatatcatgtctttgctaacccaccctgacactgtaaaaatgccagcctattttccttttgtctccatgtttaatttttaatttagattttaattaaaaaagaacattttatttcacactgacaaactgccattacaaaaaaggaaaaaagaacatacttaagtatggggtagcaattaatccatcctttccccataacaaatagccagcaccttcttccaaaatcttctgtaaatgtagaataactataatttccctattaatttgaaatatatttatcttattagattcttacatatactgggcttatcttctgaatgtttatttccgaatgttattctttccacttattgtccaatactgaatcaacaccagcatactttttattaaaattgttagggaaattccagttattctgttctagttctccaaaatattttagctattctagcaatgaactatagaagtcattcaatgaccatgctcatactattaaa

SEQ ID NO: 84959 - DNA, 855 bp, Homo Sapiens
tggaccggtccggaattcccgggatatcgtcgacccacgcgtccgggcgtccaggtccgctcggtaaccgtttcccgcgcgcccggccccgactccggggtaaagagccccggagcggagcagcgctggccgcgtgccgcctccggagccggcagcccccatggctgggggttatggagtgatgggtgacgatggttctattgattatactgttcacgaagcctggaatgaagccaccaatgtttacttgatagttatccttgttagcttcggtctcttcatgtatgccaaaaggaacaaaaggagaattatgaggatattcagtgtgccacctacagaggaaactttgtcagagcccaacttttatgacacgataagcaagattcgtttaagacaacaactggaaatgtattccatttcaagaaagtacgactatcagcagccacaaaaccaagctgacagtgtgcaactctcattggaatgaaacctcagaaaaagagcaacagaagtaattgtttcaagctcctgattctttctactaaatcatgaacagctttaaaaacatttctgtctgcataaaattattttacttgtaacttttccccaattgttctgtgcattgttttgcctttttaaattacatctccaagtggctcaaaaggccttgacacagggaacctgcacatatccaggatatgtgtaaccagcgatggtgacttgaccttgccaagacctgtgattccttcaggatacaatcagtgagaaataaaaacacatcttgggaagtgggaatcctggagtttatgccatttgcaatattaaaaaataaaaatgcaagttattatttcaataaaa

SEQ ID NO: 84960 - DNA, 341 bp, Homo Sapiens
  misc_feature (190)..(190): n is a, c, g, or t
  misc_feature (194)..(249): n is a, c, g, or t
  misc_feature (272)..(272): n is a, c, g, or t
  misc_feature (290)..(290): n is a, c, g, or t
aaagatacaaattgcccagtattaggaattgaaataggacattcactaacagatcctacatacatttcaaaggaggctaagggaataatgtggacaacttcaagcccaataaatttgacaatttaaatggaagagacaaattcccctggaagacacaaattaccaaaactgattcaaaaagaaatggagnctgnnnnnnnnnnnnnnnnnnnnnnnnnnnnnnnnnnnnnnnnnnnnnnnnnnnnnnnncgaggtcaagagatcgagaccancctggccaacttggtganaccccatctctactaaaaatacaaaaattagctgggagtggtggtgggcac

SEQ ID NO: 84961 - DNA, 699 bp, Homo Sapiens
  misc_feature (109)..(109): n is a, c, g, or t
  misc_feature (146)..(146): n is a, c, g, or t
  misc_feature (271)..(271): n is a, c, g, or t
  misc_feature (684)..(684): n is a, c, g, or t
gctaatggttgttccacagctaacaactcagctgatgttcttgcaagtaaggctgacactgcatccaagtctatagaatctactaacggctggtttggttgaaatacangagtcctcattttcttcattctttttgcaaggatttncttggaaggaagcaagttataccatagagtgaaaacctcactggaaaatggtaaatctgccaggctgatctgagttccagccaggcattcttcccttcggtgtttactgacagagcaaaggtccnaccctcagtgtcctcctgttgtaaggctgtttgggaaaatggcgactctgaacacatcattgaaataaaatggattctgtggggcggatgaacttttgtgcgaaacagacagctgacatcagttgaggaaggaagaacggcaaccctaaaatatacttttgaagtatgagggtatcaagaaggcatgaaggtttcggagctgtgctataatcaccatgaaacttgaactttttgcattgtatctgaggcctatctgaacctgggcggtctctacaatggctacatcctcttcactgtatgtgacatcttccatttcactaggttgtttcacgaaagcttcatagaccccactgtctccagccacagactcatcagacacagcagccgacacacaaagtggttttctccccaangcaaagtggatcact

SEQ ID NO: 84962 - DNA, 509 bp, Homo Sapiens
  misc_feature (54)..(54): n is a, c, g, or t
  misc_feature (76)..(179): n is a, c, g, or t
  misc_feature (477)..(477): n is a, c, g, or t
  misc_feature (497)..(497): n is a, c, g, or t
tgggttcaagcaattctctcacctcagcctccagagtagctgggactacaggtntgcaccaccatgcccaactaannnnnnnnnnnnnnnnnnnnnnnnnnnnnnnnnnnnnnnnnnnnnnnnnnnnnnnnnnnnnnnnnnnnnnnnnnnnnnnnnnnnnnnnnnnnnnnnnnnnnnnngccaccacacccagccttcatacttcacctactgcatgttgaagccttgggaagtctacagctcccgtagtgaactcagttcccgtcctgggatctccacccatttgcaaggcatttctgcttaggggccccttcccttgtctcaaactcaaaatgtcccaaacaatggaggtcagccgcccagcccatttattatttttatctatttccatcaagggtaccactattctcagtcatggggctttgagattcctcttctcctatctgttgacttgtgcattcaaacatccaagaacantaaccttttatttttaaaantcttcctttgag

SEQ ID NO: 84963 - DNA, 182 bp, Homo Sapiens
aacacatacacacatcttagcatacttacctgattatttcctctggatctagaagttctctcctctttctaaacctgccattttagtagtaactgaatccaagtcagcagatcttccgccagccatcagctggcaaccctgcagacctctacatgcagcattcagtataactaagctcgtgc

SEQ ID NO: 84964 - DNA, 843 bp, Homo Sapiens
caaatctgcataaaatacctcatttcaaatcaaatcttacaaatttagaagagagatatgttttccgaaaacagtggaagccctttgttccttcccgggtttgtcctgagcctgcactgtcctcgcctgcagcctcagaggggcaggcatccccgcacagacttgactggcagggcggtcacgggacctgcgggctggctccgagtggcagcccatgccttctgcggggtatgggttgacacttgacaggttgaaaccagtgcctctatggacggctgctgtggccccttcagacaatgggcagtgcccaccccgcccactggcatctgcgtgtgagggctaggccgccctgccacacatcccgccccctcccggaggcagcttcaggacaggacaccaggctggctgctttttttagcctgcccctggcccaggcccagtccttggtgtcagggagcccccaggccgcaggtggagggtgataaaatatgttctctgacaggacccagccagccacataggtggaggttttccatgtccaaatgaggtcaagatgccgaaatcccagatctgacttcacacttcccttttctagaaccttttgtaaaagttggtggcagcagaggcagccccaggccgggctgcatctctctgtgtctgttgtgccttgcccggcgcctcacggatggcaaagctctcctcacccatgggactgtagtgcaattaaacccgcgtctaggtgatgcttttaaagttgtagcttcgtgctttgtacagttttctttctggttttaatttttagttgtgctttgagtcagtgcaataaactagactttttccaaa

SEQ ID NO: 84965 - DNA, 211 bp, Homo Sapiens
agcttgtcctggtttgggtactgcctagctgggaggttgcaagcaggtcaccctggcttagtgcccttggcttttaaccccaactgccctcttcccttctgaggacagtaataaaaaataaaaatggagtgatcttagccacataccttggggtggttgtgagagccataaagatgaaagaaaggcctgcctgtctccctccttccttcct

SEQ ID NO: 84966 - DNA, 957 bp, Homo Sapiens
cggtccggaattcccgggattgggaaaaaacgatatggcaggagccagtcttggggcccgcttctaccggcagatcaaaagacatccggggatcatcccgatgatcggcttaatctgcctgggcatgggcagcgctgcgctttacttgctgcgactcgcccttcgcagccccgacgtctgctgggacagaaagaacaacccggagccctggaaccgcctgagccccaatgaccaatacaagttccttgcagtttccactgactataagaagctgaagaaggaccggccagacttctaagccaggctgggctgccagtgccatgcaagccacagccagccagcccatccacttcttccactcctccccgcaggccccaaggcatcactccggccaccctgtcccgctactgcttacacaggccgggttcccacgcagaggggaggctgctccacccctactctcctcccttgctcccagcagcggaagcgcctctgacccttggcttgagtcccacgtgggggaggaggaggcaggcagcaccagcaggggtccaccaagagcccagaccagcccctctgccctcctacccgggcctcgaagggtgtggcacaggctacgtgttgagcgtggcctacgtgagccaacaagaagcaggggcctctgagtgccaagcgacgtggcgggctccacgttagcccaggctctgagagccagcccaggggcggcgctgctcagcttgggctggtccagggcctgcccaggctggggcacctttgcctcctgaggcgcagcgcactcctcccctgcccaagcctactgcctcccgctgccgccagtaccccctccagccccacacctgggcctccccctgccactcccctcccttgctcccctctgtccccagggatcaaacagaagcagccgtgggcaaaatacaatttcatttaactatttga

SEQ ID NO: 84967 - DNA, 358 bp, Homo Sapiens
gcagaggggaggctgctccacccctactctcctcccttgctcccagcagcgaaagcgcctctgacccttggcttgagtcccacgtgggggaggaggaggcaggctctgagagccagcccaggggcggcgctgctcagcttgggctggtccagggcctgcccaggctggggcacctttgcctcctgaggcgcagcgcactcctcccctgcccaagcctactgcctcccgctgccgccagtaccccctccagccccacacctgggcctccccctgccactcccctcccttgctcccctctgtccccagggatcaaacagaagcagccgtgggcaaaatacaatttcatttaacaaattga

SEQ ID NO: 84968 - DNA, 2271 bp, Homo Sapiens
  misc_feature (1436)..(1436): n is a, c, g, or t
  misc_feature (1873)..(1881): n is a, c, g, or t
  misc_feature (2033)..(2053): n is a, c, g, or t
tttgtcccttaaagacttgggcattcctcccccctttttaaaagcttgaaaacaagggtgaaccaataaccttcccccggggcctttttttgtttccagggatggtttttaccaccatgcccgccaccagagagggtgagtagtggttttccaaagctggaggtttctgaaaacggctgtccagggtgttgttcccgcggagaacggggatggataagaagggtgctagctgcatctcgcgccttggtttggcttgcggccgccaggctggggaagccagggatggagcctggggtccgaggcctcccagcccaggtttctacctaacaattccgacatggttcacattcatcaagactaaagccatccctcgggagagaccctggctaccgacattcatgtgaagattgtctagtgaattgcttgcgacacatcccaccatcgccatcccacagttgttactggtttgtcaagcataagccatgccctaacgacaggctggcctttgacagcagatgttctacagagatgagtgcatttttatttgggtggggtagagatggtgtcttttggaccccaacaaactgtactctaaacttcacagagtccttgggacgggaaatcatcacctcatccagggacactggctatcttcaaagatgggtgcggcgactccacatcactgtgaccttctttgctaagtgtttcggaaacagaacacgaataaaatactcatctcagaaccagagcactttttggtcttctgggacatgaataattcacatacccaagtggaggccaatcaatgatctgagaatgatcaacgcaccctggcttttgcagggtggtcctggcacgttccaagttccacagaagccctgacccttccccgatggctgggttttggctccgcagatgaatgccaccttcacaataacaccgtctcactgctggaacacacaccagattgcaccctacccactgctggtgacccagcagcccccacgggctgggccatcttcctcagcccttctgcccacaggaaaaccaatgggagaagaggcccttgtcctttggccttttcccccttgctaatgacaaaaataagtccgtgtcgggttatgacagcaagcagatggaggtcaccagattcactgaaatgaagctcttctaggaacacaaagccttgtttaattttttaaaaacagcaaaaagattatttaaaaaagatctttctcctagtcttctgtgagacaaagaaattataaagatggcagaaattattagcgacgttctacctctataattcacgttcaggactgaaaatcttccttctgcattcatttctgtcagcgttagactaagtgacatgcgggcgcctctatgtcagctctgcaaaggactcgccaaccctgctcttggagaaaatgaccatncggtcgttatacggttgtgggaaagatgtagccaacacgcctaatcccagccgagcagtcggtttcgacggcttctgcagtaccttatggttctgccaatgctcccttgaggccagagggcgcgcggctcttcgctgctttcctgctggctgccaaggtgcatacacaccaaaagatgcgaggttcttcttccagccggcatggcggggacctccctcactggctgcagagcaatctcgctgctgaccccgaagactgacccttgtccagccagagttttcctgaccacctttcctgaggctgaggggaaagccaggggctccctcaggccctgcctgtggcttcttcggttctttttaaaacatgaatcacacaaagctctctatgtctgatggccattttaagattttaaaattgttttaacataaaaatattannnnnnnnnccaaaaatactccaggctctttctcttataagtcattttttttctcctgtaaaaagcccccctgccctgccttcttacataaagcacttactacgcgccaaagtgcccttgagacctaagatctgaagcaactatgagaaaggtacagaggnnnnnnnnnnnnnnnnnnnnncacgccagtgagaaagcgagcgcgagcgcgagcgcaaggggaggagagggtgggagagggcggaagggggaaagctgtccgtgggagattgtgtcttcatgtccacggggctgcatctcttgatggtgcactgaaaaagcagagctcaccagacagagtggaaaggcagggggaggggcagggagcaacagaaggaagagacaacaagcccaagacag

SEQ ID NO: 84969 - DNA, 460 bp, Homo Sapiens
  misc_feature (150)..(150): n is a, c, g, or t
ggggtcacttttaccctactcattttactaaaatccaggagagtttagcctttggaaattttatgggtctctgggagctatcataaatcaatccaggtcatacggaatgggactagctggtagactcagggatatcaataaaactaggcnaggtgaaatttgccctataattatactatatttagattaatagttatcaaaaacatttttccccaaaaaatacctcaagggtaaaacagaatggtaaagtttttttcaggataatgaattttcaaacatttccaagaccataaccagccattttaagtactgtaaactctgttatatttcatttggataagtatctaataagcaattattacatatcctctcatttaaattaccactgaaaactagaaataatctttatttaatacgactgttttaacaccatatggaacgggaaataactaaatgaaaa

SEQ ID NO: 84970 - DNA, 504 bp, Homo Sapiens
  misc_feature (20)..(20): n is a, c, g, or t
  misc_feature (29)..(29): n is a, c, g, or t
  misc_feature (38)..(38): n is a, c, g, or t
  misc_feature (78)..(78): n is a, c, g, or t
  misc_feature (186)..(286): n is a, c, g, or t
  misc_feature (295)..(319): n is a, c, g, or t
actgggcctgttcaaaggantaacaaatnaataaaaanttattatttttaagaagacaaaatctttgcctctgttggncccaggtggaactgcaagtggcaacgaacctcggccccaactggaaaaccttccgaacttccccaggttccaaaggattctcctgcctcaagcctccccgactaagcnnnnnnnnnnnnnnnnnnnnnnnnnnnnnnnnnnnnnnnnnnnnnnnnnnnnnnnnnnnnnnnnnnnnnnnnnnnnnnnnnnnnnnnnnnnnnnnnnnnnnccgtcaccnnnnnnnnnnnnnnnnnnnnnnnnngatcctctagcccaaatccctccaacacagaagcagtcggagaagcttgaaaaggttagatgataggcccatgtagcttgtctgtggaaagagctaggctgcaagacacctctgactccagttgagtgctttctcttactctcctttcccgatttaagacattaaatcatttaagacagtgtcat

SEQ ID NO: 84971 - DNA, 612 bp, Homo Sapiens
  misc_feature (37)..(37): n is a, c, g, or t
  misc_feature (45)..(45): n is a, c, g, or t
  misc_feature (83)..(83): n is a, c, g, or t
  misc_feature (104)..(104): n is a, c, g, or t
  misc_feature (117)..(117): n is a, c, g, or t
  misc_feature (141)..(141): n is a, c, g, or t
accttgcactgcccttcaacacctgcttcccttactncctccctnacagggcaaggcaagggggccttggggaggcaagtganaggccagctcaagaaggctcnagctgatccgagncgagcagagcaggagtgggcaagncaggctgcccctcaggcagaagtgccttcctagttccctgggtgttttcctgacacgtcagcgctggggcaggctctgtcaagatgagaagagtgggaaggagggtggtgctgggccttccaggtcactggtgaacgctccaccttccataccactcccaaaagacaggttcagaagccatgtcctcaggtcggctacctccagattccccttgcctgtaatgctcaccaggcatctcaggccaagtgctaagtatttttagatcagcactgttgtaaaagcttgctcgtattcattcaaaaacatcgaaatgtaattttctgccaaatgttttgtaggttttccttctaaattgttgagaactgacttcagtgttcagcttttcccctataatatgtaattttagaccctgggggaggcagtatcctaacgatttataacaagtagactatgccttttctaaagattgat

SEQ ID NO: 84972 - DNA, 495 bp, Homo Sapiens
  misc_feature (38)..(38): n is a, c, g, or t
  misc_feature (64)..(64): n is a, c, g, or t
  misc_feature (197)..(197): n is a, c, g, or t
aaaacgttctaggaagatgtgagagaaaatatgtaacnaaatcttaagtgcccaaagaaaatanaggcctgaaagggataagattgtgtctctaatagagcttcaaaagcaatacaggtcaaattaagaaagcccctctctctccaaagagccgtttcccctaagcttttggcaccctggatgccaaaagtcctccnattaggctgatgactccaaagatgtaactctagcctcttgcctgagcttcagactcgcgtcccactgcccacaggacacatccacctggatgtgactcacaggtacctccaacccatcatgtggagatactcatcctgttccccctagagctgctcttcctgctgcattctctctctcaattactgggaccaccaagctaggaacctgggagtcatccttgatactttctcttcctccttaatcctgtgtattcagcaagtaactaaaggttggtgttggccaggcatggtggctcat

SEQ ID NO: 84973 - DNA, 330 bp, Homo Sapiens
  misc_feature (20)..(20): n is a, c, g, or t
aagctcaggcaagaggctanagttacatctttggagtcatcagcctaatggaggactgtggcatccaggtgccaaaagctagggaaacggctctggaagagagaggggcttccttaattgacctgtatgctttgaagctctatagagacacaatcttatcccttcaggcctgtattttcttgggccactaagatgtggttacatattttctctcacatctcctagaacgtttgcaaaacaattcccagtcctatgatcatttctcccttcttctgagaactaattatatatggcacttaatatctattcacatgtagcactcaatggtga

SEQ ID NO: 84974 - DNA, 322 bp, Homo Sapiens
  misc_feature (141)..(259): n is a, c, g, or t
gcacgagtcacagaggtcaattgagcaaacaatgatttgcaaattgggcagttcccctgaacccagagagactctggtgctgttgggtgattggggaagatttaaggactgaaaaagggccgggtgcagtggctcacactnnnnnnnnnnnnnnnnnnnnnnnnnnnnnnnnnnnnnnnnnnnnnnnnnnnnnnnnnnnnnnnnnnnnnnnnnnnnnnnnnnnnnnnnnnnnnnnnnnnnnnnnnnnnnnnnnnnnnnncatggtggtgggtgcctatagtcccagctactcttgagtctaaagcaagagaatcgcttgaac

SEQ ID NO: 84975 - DNA, 565 bp, Homo Sapiens
  misc_feature (66)..(66): n is a, c, g, or t
gggctatgtactgctagtacagtttggtgcccctgccttgatcttgtctaaagcttcaacagtttncccactattgcttttgtaccatctgagcaacacagtgagaaagtcaagtgacatcttggtattattaggcaaactgttttgaccttgtagaccctctaaaagggccctagtatcccactggtccatacaccatacattgggaactgctgatctagagatctgttcatttgccataaatttaactataatttaactaaaaaagatggaggttatcaagtttccctaaaaggctgttactaatatgagcataaacaccggtgtccaaacaattttcccacatttcacttttggcctgaagaaactacccaggtgacacacaaatttcactacaaattaagcaacagattgttttttacctaaagtggggcatctcacaatccttattctcctaagtgttccttttaatggattttatcaaccaggtgaaaatgtgaacgtcggcaatgaactgaaatgtccacctcttcccagcgctgggcatccatagataaatattcag

SEQ ID NO: 84976 - DNA, 998 bp, Homo Sapiens
  misc_feature (970)..(987): n is a, c, g, or t
gaggcctcctctgcctggaagagattacagggaaattccaggcagcccttgtcaattgtttttatgaattctttacctgttccttttaaagacaaggaaactgaggcccaaagttctaagttgtttggcaaatggagtctcctaccctcagctcctgcaaggacctgggggacccccaggtccagcagccacatgattctgcagcagacagggacctagagcacatctggatctcagccccacccctggcaacctgcctgcctagagaactcccaagatgacagactaagtaggattctgccatttagaataattctggtatcctgggcgttgcgttaagttgcttaactttcattctgtcttacgatagtcttcagaggtgggaacagatgaagaaaccatgccccagagaaggttaagtgacttcctctttatggagccagtgttccaacctaggtttgcctgataccagacctgtggccccacctcccatgcaggtctctgtggggtctttgggatggatctcctagggctgggctggaagcctcatgtactgttgtcttctaggtaaccaccctgaagagaaggggtggcatcaggaaccgcagggaaccaagcagcctttggtccagtgctgctccttggaacagttgagtgtggcctcaaaccattctcctgggtagctcagtcataaaacaccgaatgcctgcctcaaaatagcctctgagggaagggagctgttgacaagtgaagccctcaggttgtgtgggattccagcaggttattacagcttgtggggggagggagggtccattccaccagctttgaatcccagggtcccctcagcttcactgggccacagtgtctgtcccaggaagaagcaaatggacagtgaggatgatggagagactacagctgccttgtctaaaacctgggatcttaaaagtgttattttggcttttattttttnnnnnnnnnnnnnnnnnnttggcaattgt

SEQ ID NO: 84977 - DNA, 426 bp, Homo Sapiens
  misc_feature (49)..(57): n is a, c, g, or t
  misc_feature (353)..(353): n is a, c, g, or t
  misc_feature (370)..(379): n is a, c, g, or t
taagaccccaagctctttggtgccatttaagaaaatgtttattggtgcnnnnnnnnngacagttgataacgctgcggtaaaagactccaatacatctgtagccactcagcagcatggcaaggtttccaaagcagggatgcctccctcttctcctagcagcagatgcaaaggctgtttaaatggaagcagctaggctcttaaagaagtagaacaggttttctaacctaatagaaaattagtctcagcaaatgttttgaaaaccttcaaatcatcactaaccaacagttagtggaatggaaagcctttcccggaacaaagggttattgtttagtttgtttctcttctttctttcngggggttttcttcggannnnnnnnnnccccggttaccccattttcggcccctattaggtggagttcgttattt

SEQ ID NO: 84978 - DNA, 559 bp, Homo Sapiens
  misc_feature (60)..(60): n is a, c, g, or t
  misc_feature (66)..(66): n is a, c, g, or t
  misc_feature (69)..(69): n is a, c, g, or t
  misc_feature (315)..(315): n is a, c, g, or t
  misc_feature (331)..(331): n is a, c, g, or t
  misc_feature (356)..(356): n is a, c, g, or t
  misc_feature (360)..(360): n is a, c, g, or t
tggaggttttaccagcagaactctctaaaggattgcttcaagtctctggacaccaccttncagttnccnttcaaggagcctgaaaagagaaccatcagcaggccagcagtgggaagcacaaagtattttggcacagcaaagcccgctatgacttctgcgcccgagaccgatcagagctgtcgctcaaggagggtgacatcatcaagatccttaacaagaagggacagcaaggctggtggcgaggggagatctatggccgggttggctggttccctgccaactacgtggaggaagattattctgaatactgctganccctggtccttggcanagagacgagaaactccagctctganccgncgtgggcaggcagcggaccagggctgtgacagctccggcgggtggaaactttcggatggactggaggaggccagcgtccaactggcggtgctcccgggatgtcccctgaaatggttaatttataacaccccgatttcctcttgggtcccctcaagcagacggggctcaagggggttacatttaataaaaggttgaagat

SEQ ID NO: 84979 - DNA, 1500 bp, Homo Sapiens
  misc_feature (57)..(67): n is a, c, g, or t
  misc_feature (126)..(136): n is a, c, g, or t
  misc_feature (164)..(164): n is a, c, g, or t
  misc_feature (396)..(396): n is a, c, g, or t
  misc_feature (463)..(463): n is a, c, g, or t
  misc_feature (521)..(529): n is a, c, g, or t
  misc_feature (548)..(548): n is a, c, g, or t
  misc_feature (724)..(733): n is a, c, g, or t
  misc_feature (779)..(787): n is a, c, g, or t
  misc_feature (974)..(974): n is a, c, g, or t
  misc_feature (1430)..(1430): n is a, c, g, or t
tttgcgagtttgtatgaaaagggacgcgtgggggctcccataaattagttggggggnnnnnnnnnnngttttgtagtgtggagttacccccgccccctcgctgtttatttctctcccctccccccnnnnnnnnnnncaccacgaattatgtttttttatctttnttcctctgcacaagaaggggttggccggccacaccatagaggcggtatgccgtctcggaagttttcttcccccgtgtgtgggcggggggcggatatgtttatcagaggagggggtgtctcactcgcgcccaggtgagctcccggcgttttattttggggtggaaatagcggggggtatttttcgcccaccaaaggtgtttttggggggggagcccaacaagaaaaaatatgnggggctttggtatatagggccggaacaaatttttgtgcgcccaaccactccccacgtgttataaccntcggtttaggcgatattttgggaaggcgttttggggtcctccgcgggttgcgcctccnnnnnnnnnttcggcgtgggataaaggnggtttttattaaattaactccggcgaaaaagggggcccctcccgggggcctctttgttgtagaatcacctgtcccccagtgagtggggggaggttttgggaggttttcccccgggggtgatataacgggatccccctcttcacgagaaacgcctttccccaattttgtggggaagnnnnnnnnnnccagagaaaaccgaatttgcgggttttgccccgccccgggggcggnnnnnnnnnatttgggggtgggggaatgcccaaaagcggcgtatgttccatggccccagggatttttcctttaggataaccaggcttatggacccatgtttcacctttaccctactggggcgccgccgccgccaaaacgaaatggtcttagaaaaggtttcttggaggggccgagggcggcccgacaaggtcgttntcgtggtgcgttggggttgtgtcgtggaataaaaccaactgttacttctctctttgccacccgttctctccaactccagaaaacctgatgtgctacaagaccactgtttgcaaactcaaatgaccataggaactcagcaagtcatataaatgagcgggaaatgccagatggaaaggcctatttggacagagacatgggtctaagaaatacttccctttcttcttcgctgtactttaagataaacaccaaaaacactaaaagcaagccatgatgaatggcacgtggtgcttggtcaggagcccacgggagtggtggggatgggtggccgggccacggtgaattgtgagttctggctccggctcagctcccaacaactgtggttttgtcggagcctagggtcgagttgccaaatctttgggatttttcaaaagacacccagaaaacctgtatttgggntgtaaaatatcccttttcaattttcactactaactcatatcactttaaaaacactgcctggactcagatc

SEQ ID NO: 84980 - DNA, 471 bp, Homo Sapiens
  misc_feature (411)..(411): n is a, c, g, or t
gagagaagagatggaaggagggggagagccaaagggtcggcattcccttcatccagccgggccagaagtatgggccattctcaaaaagccactgctctttggagccactcgagaggttcacagtggctcccttctgaggcagtggcagtgggctcacagcagctacactggaaccacagtgcacatgtggggatgtgggcagcctcctggatcactcagggacagtgtggactcagggcccactccctgctggggctctggacgggccttactggtgcataggagagggaaatgataagaggaaatggcttctgactaggcctttccaagcgcatctcatgttttcagcttagatgatttgatagcaggtgttgtaatcctgagggggaaatgggtgaccgaggaacactnctactcaaagccaagatgcctttatccaaggcatacaacatgagccttttggcacttcct

SEQ ID NO: 84981 - DNA, 506 bp, Homo Sapiens
  misc_feature (405)..(413): n is a, c, g, or t
cagtcacagggccaaatgaggagttcacaccagttctgggatctccagtgacacctcctggaataatggtgggggaacccagcattttcccctgcacttccggctttggaggcatcctctgagagaagaactgtggttccatctattactcgtgttaatacagctgcctcatatggcctggaccaacttgaatctgaaggtattcatgctttgaaggggatcttttcaaggactggttgagtgagtcactgagcaaatgtttttgaaaaagaattaagtaggagtatattcaatctgcagtatagatcagaggacagtaaactacagctgggccaaatctggcctgccacttgtttttgaatggtttgtaagctaagaatggtttttacattttgaaatgattgnnnnnnnnngtcaaaagaagaataatattttgtgacatagaaaagttataaaaattcaaattccagtgttcataaataaagctatattaaaacacaaaaaaa

SEQ ID NO: 84982 - DNA, 485 bp, Homo Sapiens
  misc_feature (34)..(34): n is a, c, g, or t
  misc_feature (76)..(76): n is a, c, g, or t
  misc_feature (107)..(107): n is a, c, g, or t
  misc_feature (364)..(364): n is a, c, g, or t
  misc_feature (408)..(408): n is a, c, g, or t
  misc_feature (420)..(420): n is a, c, g, or t
  misc_feature (461)..(461): n is a, c, g, or t
tttaaaagatggggtctcgttatgttgcccaggntggactcaaactcctgggctcaagcattcttcctgcctcaanctctccaagtaagttgggccacaagtgagtncccacacccagctaatactagcaatcccttaggcttcattattttttaatagtgattacttcttatctattcaaattttaattttaaaagcaatttttaaaaaccctcccatcatctaaaaaaattttgcttcaaacaagtaaaatgtcaccagattcacgtcttgtatggcctgtctccccaaagagatctatttctgggagggagagaaacaccaccgctcaaagtctaaaggcactcctcagcaggtgtgggcntctcccaatacccatccctcttaccatgcagaaagcaatagggngttctacactgncccttccctttcttgttaaacattgggggcatcttcagggnaacttaggaaggatggcctactcc

SEQ ID NO: 84983 - DNA, 291 bp, Homo Sapiens
  misc_feature (32)..(32): n is a, c, g, or t
  misc_feature (49)..(49): n is a, c, g, or t
acctgtagtctcagctactagggacctaaggnaggaggatcgtttgagnccaggattttgggccgtagtgtgctatgccgatcaggtgttcacactaagttcggcatcaatatggtgacctcctgggagcggggcaccaccagatttgctaaggaagggtgaaccagcccaggtcggaaatggagcaggtcataagtaactcctgtgctgatcagtagtgggatcgtgcctgtgaatagctgctgcattccagcctggggcaacattagtgagaccttcatctttttactt

SEQ ID NO: 84984 - DNA, 676 bp, Homo Sapiens
  misc_feature (50)..(50): n is a, c, g, or t
aagtttaaagagacatttcccagggggtcacatatctgtatatagagttngaaatttgagcacccagccaagaagttcaagattgaagccaatgctgggcaacttgtacctgacaggggtggtggtactgcacaaggatgtcaacgtggtagtagtggaagggggccccaaggcccagaagaaatttaagcgtcttatgctgcatcggataaagtgggatgaacagacatctaacacaaagggagatgatgatgaggagtctgatgaggaagctgtgaagaaaaccaacaaatgtgtactagtctgggagggtacagccaaagaccggagctttggagagatgaagtttaaacagtgtcctacagagaacatggctcgtgagcatttcaaaaagcatggggctgaacactactgggaccttgcgctgagtgaatctgtgttagagtccactgattgagactactgcaagcccttgcctctcctcccttgcctttgtctcttcagtcctctcacttattctatttcccaaccccctcccacttgtttgtgtgatctcagaactgtgccaagcagacactgggacaaagggagaatatcttgctcccctcctgagtcagcctggtgttgccctttattccccttatgtgcatatgattaaagagttatttttaaaaaa

SEQ ID NO: 84985 - DNA, 684 bp, Homo Sapiens
ggcacagttctgagatcacacaaacaagtgggagggggttgggaaatagaataagtgagaggactgaagagacaaaggcaagggaggagaggcaagggcttgcagtagtctcaatcagtggactctaacacagattcactcagcgcaaggtcccagtagtgttcagccccatgctttttgaaatgctcacgagccatgttctctgtaggacactgtttaaacttcatctctccaaagctccggtctttggctgtaccctcccagactagtacacatttgttggttttcttcacagcttcctcatcagactcctcatcatctggaagagaaatcttgttacagacttagacttgagattcaggttctaaacaaataatattcaagtctacccaaactctctaaaatattatcaccctttttatgtgttggaccaagtgttctcttttctgttgctctttattttcctcaaattagacttgaagctccaagtaggcagtaatattaattgatacaattagcatttacatagcacttgttatgaatcaagagctccaccaggtactgggaataaggaaataaaagacaagcagtcaagaataaaaacttgtcctaggcactttgggaggcaggcttcatatgtcaacatcatatatactctcaaaaaactttcaccctattccaccg

SEQ ID NO: 84986 - DNA, 387 bp, Homo Sapiens
gaaccataaaatcacgttcagctgggcaacatgtctcacaaatgttgctaggtcttcttataaaagaatattatctgatttaaataagaaattgaagtgtttttattatatatctcttttctagggtacagccaaagaccggagctttggagagatgaagtttaaacagtgtcctacagagaacatggctcgtgagcatttcaaaaagcatggggctgaacactactgggaccttgcgctgagtgaatctgtgttagagtccactgattgagactactgcaagcccttgcctctcctcccttgcctttgtctcttcagtcctctcacttattctatttcccaaccccctcccacttgtttgtgtgatctcaggactgtgcatgggac

SEQ ID NO: 84987 - DNA, 873 bp, Homo Sapiens
  misc_feature (783)..(783): n is a, c, g, or t
ggcactgcagtctccagcctgagccatgggccgccgagccctcctgctcctgcttctgtcttttctggcgccctgggccaccatagccctccggccggccttaagggccctcggcagcctacacttgccaaccaaccccacatccctcccggctgtagccaagaactattcggttctctacttccaacagaaggttgatcattttggatttaatactgtgaaaacttttaatcagcggtacctagtagctgataaatactggaagaaaaatggtggatcaatacttttctacactggtaatgaaggggacattatctggttttgtaataacacggggttcatgtgggatgtggctgaggaactgaaagctatgttggtgtttgctgaacatcgatactatggagagtctctcccctttggtgacaactcattcaaggattccagacacttgaatttcctgacatcagaacaagctctggctgattttgcagagttaatcaaacacttgaaaagaacaatcccaggagctgaaaatcaacctgtcattgccataggaggctcctatggtggcatgcttgccgcctggtttaggatgaaatatcctcatatggtagttggagctcttgcagcttctgcccctatctggcagtttgaggatttagtaccttgtggtgtatttatgaagatcgtaactacagattttaggaaaagcggtccacattgttcagagagcatccacaggtcctggggatgccattaatcgactctcaaatactgggcagngggttttgcgtgggctttactgggagccctttcccttatgccagcccatttaactttctcaggacatcccaacattttgaaaaggactgt

SEQ ID NO: 84988 - DNA, 779 bp, Homo Sapiens
ttccggcaagcctcgaggctcgcggggtttatgcacactaacttcactgagccaggagcacggaagttgtgccactgtgcaacttgggttttctttatcctgcagtctttacctcagcagaaccgcacaccacagactccctccagctctttgtgtgtggctctctcagggtccaacaagagcaagctgtgggtctgtgagtgtttatgtgtgcttttattcacttcacacttattgaaaagtgtgtatgtgagagggtggggtgtgtgtgtcaaagagagtgaggaagagaaggagagagagatcaattgattctgcagcctcagctccagcatccctcagttggggagcttccaaagccgggtgatcacttgggggtgcatagctcggagatgcagtccccctgggaaaatccttacggtggcgcctctattcttgctcctgtctcttcagtcctcagcctctccagccaacgatgaccagtccaggcccagcctctcgaatgggcacacctgtgtagggtgtgtgctggtggtgtctgtaatagaacagcttgctcaagttcacaactcgacggtccaggcctcgatggagagactgtgcagctacctgcctgaaaaactgttcttgaaaaccacctgctatttagtcattgacaagttggatcagacatcataaaactgcttagcgcagatatgaatgctgatgtggtatgtcacactctggagtttcgtaaacagaacactggccaaccattgtgtcatctctaccctcttccc

SEQ ID NO: 84989 - DNA, 367 bp, Homo Sapiens
  misc_feature (54)..(54): n is a, c, g, or t
  misc_feature (312)..(312): n is a, c, g, or t
  misc_feature (338)..(338): n is a, c, g, or t
tatctccttgtatgacaatcctcctaactgtttccgagatgatttaccttgccntccttaggcttcccattaaaaataagcacatgcttatatgggggaaaatgcaaatagtaatataatagcatataaagttaaaaagtggacatctccttctttattgtctccctccctttgaaactctgcccatacccacattctgtgtcttcatagggaataaccctgttcatccctactggatgccctgtattgtgatcaagatgggttaattgttttaggggtattaattaaattggggggatataggtcaggggncaggtacattttgggggggaaccctnccattccccgtgggccatcaaggcagctt

SEQ ID NO: 84990 - DNA, 339 bp, Homo Sapiens
aatggttgagtgcacaccctggacaaagggaggggaaagggttcttatccctgatgcacatggcccctgctgctgtgtcattcccctattggctagggttagaccacacaggccaaactaactccaactggctaatttaaagagagtgacagggtgagtggtttggcgggaaaaatagttatggcagagcaggaaatcggaatgagtcaggatggagcaggtaatcgaaaaaggttgctttatgaggaagttaagtttacaagtagaaggcaaagaattgaacatacttgacatacctgattctttaaagagaatttagactcatatctaacctcgtgc

SEQ ID NO: 84991 - DNA, 1014 bp, Homo Sapiens
tttgcagaaaacatttgagatgctcatttgatataaacatctaattccaagagagaccagtgctcaaatatagttttttcagctaccatttgatacggccataaatttggatggtccatgttacaatccttccacaattctccacttaaagacatcatttttctatgtttttaatgactattgccatctaacaattctacaattcgcctctttgcctgtaaaaaggccaactctacgtccacctgtgtctcatattgctatcttttatttatctctgcttaagattgcaaaagtttttgattttattattcacctgaacaatgtattgcaattccaatacacccccatctcttgctgttatctacagcttgtgacaaaatgaacaccttgtagaaatatcctactggttgggtttcccaagtctatgacactatgagagaagcattgctgatggattgacgaggagaccaccagatcattaaaggattagatactctgaaggcaggaaactagaaaatcccattgatgaaaggatattttaatctagcgtaaaatgtttctttgtcgtaacagcagaatttcttgacattttacaacttaatgaaacaaaagaacaatcatctttaaagtcaaacatctatcaaattataaaccaaacacatagcaccgatatcaacctcataaaacgtgcgggcccgcagggtaggaaaagaactgtctggggcactggcagcaacgtgccattccaggaactcagagtttcgaagtgaacatttttgtggcagatgcttttcctaaaaaacactgtatcatccaataaatatttgactaaaatccattttgtgcttttggggtgacgttaactgacttctttctgagggcctaataaggaaaccaagaaagctccttgtgtattttagagcaggattcgtcatcacaagcctcgatactgtcataaaattttaatttaaagcagaaaacatgctgatgtgtcagtgatagggcttaaaatat

SEQ ID NO: 84992 - DNA, 176 bp, Homo Sapiens
tgtagtgcaaccgtggtcactctggtcaaatgtggaagacgctggggctaaccgcttgttctgcagtcaagtcatctgtaaaatggtaactatttcacttgccctacacctctctcccatttctatatatctcagatggacataaaacatgctctggaaagtgaaaacgtagtcta

SEQ ID NO: 84993 - DNA, 564 bp, Homo Sapiens
  misc_feature (91)..(136): n is a, c, g, or t
tgtaataaatgtatcctaatcttatgtatgtttaactggattacatagatttttatcttttgttaaaatgtgtataccccgtggaccaacnnnnnnnnnnnnnnnnnnnnnnnnnnnnnnnnnnnnnnnnnnnnnngctcgcttgtgtaggatgaatgtcttagagtcgtttgtggtattttatgttgttgactctggctccagggcctgtgcttgaaaaggacagataagtattgcccagagctaagtggcactacttacaaagttttaaatgtcttctacatactgattcatgtttatttgagctctctttatagaattttctcttaaagtttcaaacctctaagttgtagcctgtaattatgagaacagtaaactttaagtaataataaagaatcccatccatatatccaatttgcaattgagttttgcatggttctctgattatgtccatgctgtgtccaaggaggagtaggtacatacaatcagcacagattaatatatgtaaagggtttgggacagcacctggtatagaataaataataaatgtaaactattaaaaaa

SEQ ID NO: 84994 - DNA, 562 bp, Homo Sapiens
  misc_feature (251)..(282): n is a, c, g, or t
cttcctcttactccttaggataaaggtaagttgacttgattaactttcttttgcactgggaaaataagcaaatgtttaaatgcttcaaaaaaattttcaattaaactcaaatattaaatatctataacttataaacaccaactttcaatgtaataaatgtatcctaatcttatgtatgtttaactggattacatagatttttatcttttgttaaaatgtgtataccccgtggaccaacataatattaaagnnnnnnnnnnnnnnnnnnnnnnnnnnnnnnnngtgctcgcttgtgtaggatgaatgtcttagagtcgtttgtggtattttatgttgttgactctggctccagggcctgtgcttgaaaaggacagataagtattgcccagagctaagtggcactacttacaaagttttaaatgtcttctacatactgattcatgtttatttgagctctctttatagaattttctcttaaagtttcaaacctctaagttgtagcctgtaattatgagaacagtaaactttaagtaataataaagaatcccatccatataaaaaa

SEQ ID NO: 84995 - DNA, 888 bp, Homo Sapiens
tttccggaatgcctaatatgtggattccatattctgcctctcaaatatatattgtggtttttggtactgctatatttgtcttcatccttagtttactcttctgttgctacttgattaggctaagacatcaagcacacaaagaattttatgcctacaaacaggttatattaaaagagaaagtaaaagaattgaatttacatgagctctgtgcagtgtgcctagaagacttcaagcctcgagatgagttggggatttgcccattgtaagcacgccttccacagaaagtgccttattaagtggctggaggttcgtaaagtgtgtcccctgtgcaacatgccagttctacagctggcccagttgcacagtaagcaggaccgtggaccccctcaggggccccttcctggggcagtagaacattgtatagcttaccgcaaggatcagactgttgctggacacgacgtctgtgtggagccaggaggaacacatgtggtgtctgtatggctgctctctacctaggacaccagctgccacttcttttgcctcatgaagaactcttgggccagccaaactgggaacctaggtgtctgggtcttgtgacaaccaaagcacttttgacactaccccctgccgagaaaagaggagtgggatgacccctgcgggttttgcctcaaggaaacttcatgaggggtctcttactaactccattaccctctctctcctggagcctcttctccctgtcaagcaggagggtaaagaagggaaactaagaacaggtcttttcaggcaaaccccccacttgcggaagggaaggggcttcctctgaaaggcccatgcccgccctttggtcccagcgcaaactttcgcacgccgcccctttgaacacaaata

SEQ ID NO: 84996 - DNA, 1124 bp, Homo Sapiens
cggacagtaactactaacggtcttaaggtagcgaggcctgggtggagaattcggcacgaggagatggcggccgccgagggaccggtgggcgacggcgagctgtggcagacctggcttcctaaccacgtcgtgttcttgcggctccgggagggactgaaaaaccagagtccaaccgaagctgagaaaccagcttcttcgtcgttgccttcgtcgccgccgccgcagttgctgacgagaaacgtggtctttggcctcggcggagagcttttcctgtgggacggagaagacagctccttcttagtcgttcgccttcggggccccagcggcggcggcgaagagcccgccctgtcccagtaccagagattgctttgcataaatccacccctgtttgaaatctatcaagtcttgttaagcccaacacaacatcatgtagcacttataggaataaaaggacttatggtattagaattacctaaaagatgggggaagaattctgaatttgaaggtggaaaatcaacagtgaattgtagtaccactccagttgcggagagatttttcaccagttccacctctctgactctaaagcatgctgcatggtatccaagtgaaatcctggatccccacgtagtgctgttaacatcagacaacgtaatcagaatttactcactacgtgagccgcagacacccactaacgtgataatactttcagaagccgaagaggaaagtctagtactcaataaaggaagggcgtataccgcatctctaggagagacagcagttgcatttgactttgggccattggcagcagtcccaaagactctatttggacaaaacggcaaagatgaagtagtggcatacccactggacatcttatatgaaaaatggagagaacttcctgacatacatcagtctgttacacagcccctggaaatattggaaaagctggttgggggccattgccccatgcatcctgcgggctgaaagatacctatgggttattgatgcgtggtgcttgtaactctgcttaaccctggtgtcccccaataatctttaagggattcgcctaccggaaatccaggaaatggctggaattccaccggggggtccggggcttaaaaaggggg

SEQ ID NO: 84997 - DNA, 447 bp, Homo Sapiens
  misc_feature (15)..(15): n is a, c, g, or t
tctcttccaggttangtctgataagtccttttgttgcctggccctggaaaccactttgtgctccgaaaatgccattctctggaatgtagctgtggagtagggagagagttggcccctgtgttctgtaacccaagcaagtactgtctcactgccatcttggggcagactccgcagtaaggagaatctctcttgcctttttgtgtttcttggtttcttcctttgtaaatacaaggcatagtctctgcccttcccccagattgccagaagagtggggatatattgttctagcaatataaagctctgaggcctttctgcaggactgtagacaccacttttgctgtgatagtgaagaatgtgggggagtgttgtgaggctaggcgagcggccggccttgcccatgacagctcagtctcctcccctcataacttttttacctaacagagaatt

SEQ ID NO: 84998 - DNA, 726 bp, Homo Sapiens
  misc_feature (428)..(475): n is a, c, g, or t
  misc_feature (486)..(614): n is a, c, g, or t
  misc_feature (648)..(648): n is a, c, g, or t
  misc_feature (673)..(673): n is a, c, g, or t
  misc_feature (700)..(700): n is a, c, g, or t
  misc_feature (712)..(712): n is a, c, g, or t
tcaagaaccaaacgagggggttaaacaagctgacttacatgactgagctctcagggacgtccaaggaatctgtgcatttcaaggaacaaagttcatcagcttctctcctaaggtatttgcccacaatacccagagggcttggcagcatcatgtgtgatgggtggggagctccaagcaggtgggcaggacccaggggcctggtgaccaggacagacccccactgtccatcacctttcctggccctgtcctcagctaaacttcccacaggccttctgcccaatcacacagagtgtccccaaactctctcaggcctctggcagctgaaaaccactgctttaaatccctttaccatttactatgacataaggttattgtaaacaggaaatattctattgatgctacaaatagaaagccaatgcctttaccannnnnnnnnnnnnnnnnnnnnnnnnnnnnnnnnnnnnnnnnnnnnnnnggggctggggnnnnnnnnnnnnnnnnnnnnnnnnnnnnnnnnnnnnnnnnnnnnnnnnnnnnnnnnnnnnnnnnnnnnnnnnnnnnnnnnnnnnnnnnnnnnnnnnnnnnnnnnnnnnnnnnnnnnnnnnnnnnnnnnnccaaaatttaggccgggtgcggttggttgggcgnctgttagttcccacctattttgggngggtttagggcagggagaacatttttnaacccgggaggncaggagttttccag

SEQ ID NO: 84999 - DNA, 654 bp, Homo Sapiens
  misc_feature (11)..(11): n is a, c, g, or t
  misc_feature (28)..(28): n is a, c, g, or t
  misc_feature (56)..(56): n is a, c, g, or t
  misc_feature (62)..(62): n is a, c, g, or t
  misc_feature (77)..(77): n is a, c, g, or t
  misc_feature (97)..(97): n is a, c, g, or t
  misc_feature (131)..(131): n is a, c, g, or t
tttaataaccnccccctttgggcctatngtaaacatttaaattggattgggattancccacngtttgtggacaaacncccatccccctcctgagatnaccccagtgtcttttaccattcatttttcagaangtccactttataagagcacatatgttcaaaagcaaacagagaataagaaacataagcttcagaatcattaatttatgaggcattcaaaaatgacacccactaggaaaaagggccttagaaaacatcaacttattaacttaatcaactgattttctttttaaaaacaacaaagtataattcacaaaaatatatatattaccaaaaagtgggaaaactgaatcttaagtaactgttttgaatgtcaagagggatatgaaaaaagttaactagaaaagtgggggcgaggcagggtgtgagggaaggggaacaacaaaacccaaacccatcaatgtcaaaggctaatccaagacgcagtttttggctcatgtactgataaattaacccctcatccttagacctcccatttccctctgcttccttgtcctagggaatagtctggccatgctcaaatgcattactttactttttgttttttaaaagacagtgaaattcttaggtagggaaaatatcctacgtccactag

SEQ ID NO: 85000 - DNA, 1095 bp, Homo Sapiens
  misc_feature (351)..(392): n is a, c, g, or t
  misc_feature (945)..(945): n is a, c, g, or t
  misc_feature (1024)..(1032): n is a, c, g, or t
cagtcgacggtaccggacatatgcccgggaattcggccattacggccgggtaagaatgtcagaattaaaataacagggctatcccgtaattggaaatatttcttttcttcaggatgctatagtcaatttagtaagtgaccaccaaattgttatttgcactaacaaagctcaaaacacgataagtttactcctccatctcagtaataaaaattaagctgtaatcaaccttctaggtttctcttgtcttaaaatgggtattcaaaaatggggatctgtggtgtatgtatggaaacacatactccttaatttacctgttgttggaaactggagaaatgattgtcgggcaaccgnnnnnnnnnnnnnnnnnnnnnnnnnnnnnnnnnnnnnnnnnnaaacagttttacttgtgtcatattttaaaattactaactgccatcacctgctggggtcctttgttaggtcattttcagtgactaatagggataatccaggtaactttgaagagatgagcagtgagtgaccaggcagtttttctgcctttagctttgacagttcttaattaagatcattgaagaccagctttctcataaatttctctttttgaaaaaaagaaagcatttgtactaagctcctctgtaagacaacatcttaaatcttaaaagtgttgttatcatgactggtgagagaagaaaacattttgtttttattaaatggagcattatttacaaaaagccattgttgagaattagatcccacatcgtataaatatctattaaccattctaaataaagagaactccagtgttgctatgtgcaagatcctctcttggagcttttttgccatagcaattaaaaggtgtgcctatttgtcaagtagcccatttttttgcagtgatttgaagacccaaagttgttttacagctgtgttaccgttaaaggttttttnttttatatgtattaaatcaatttatcactgtttaaagctttgaatatctgcaatctttgccaaggtacttttttatttnnnnnnnnncataactttgtaaatattaccctgtaatattatatatacttaataaaacattttaagctaaat

SEQ ID NO: 85001 - DNA, 803 bp, Homo Sapiens
  misc_feature (197)..(197): n is a, c, g, or t
cagtcgacgggaccggacatatgcccgggaattcggccattacggccggggaatgtcagaattaaaataacagggctatcccgtaattggaaatatttcttttttcaggatgctatagtcaatttagtaagtgaccaccaaattgttatttgcactaacaaagctcaaaacacgataagtttactcctccatctcangtaataaaaattaagctgtaatcaaccttctaggtttctcttgtcttaaaatgggtattcaaaaatggggatctgtggtgtatgtatggaaacacatactccttaatttacctgttgttggaaacctggagaaaatgattgtcgggcaaccgtttatttttatattgtatttaatttggttgagggcatttctctcataaacagttttacttgtgtcatattttcaaaattactaactgccatcacctgctggggtcctttgttagggtcattttcagtgactaataggggataatccaggtaactttgaagagatgagcagtgagtgaccaggcagtttttctgcctttaggctttgaccagttcttaattaagatccattgaagacccaggctttcctcattacatttctgctgttttggaaacacacaggacccgcatcggtactaagctcctctgttaagacaacatctttacactcttaccaaagtgtggtcctcctgacctggggacgcgaagcaacacctttgttcacattacactggaggcattttacaaacgcatgtgagattagatcccgtggatactttattacctctatacgaa

SEQ ID NO: 85002 - DNA, 525 bp, Homo Sapiens
  misc_feature (92)..(141): n is a, c, g, or t
tacctggattatccctattagtcactgaaaatgacctaacaaaggaccccagcaggtgatggcagttagtaattttaaaatatgacacaagnnnnnnnnnnnnnnnnnnnnnnnnnnnnnnnnnnnnnnnnnnnnnnnnnntaaacggttgcccgacaatcatttctccagtttccaacaacaggtaaattaaggagtatgtgtttccatacatacaccacagatccccatttttgaatacccattttaagacaagagaaacctagaaggttgattacagcttaatttttattactgagatggaggagtaaacttatcgtgttttgagctttgttagtgcaaataacaatttggtggtcacttactaaattgactatagcatcctgaaaaaagaaatatttccaattacgggatagccctgttattttaattctgacattcttagggatttaaacagaatggacctggagtttccaggagaaaaataatcacctttgaaggtttttagagcatgtgaaattagtc

SEQ ID NO: 85003 - DNA, 1674 bp, Homo Sapiens
  misc_feature (1553)..(1553): n is a, c, g, or t
  misc_feature (1562)..(1562): n is a, c, g, or t
  misc_feature (1575)..(1610): n is a, c, g, or t
  misc_feature (1645)..(1645): n is a, c, g, or t
atgatcgtggctgttattgactctgcacagctccaggagctggtctgccacgtgatgatgggtaacctggttatgtttcgaaaagactcagttctcaacatactcattcagagcctagactgggagacctttgagcagtattgtgcctggcagctctttctggcccacaatattcccctggagaccataatccccatcctgcagcacctcaaatacaaggagcacccagaggccctgtcctgcctactgcttcaactccgaagagaaaagcccagcgaggagatggtgaagatggtgctgagccggccctgccatcctgacgaccagttcaccaccagcatcctgcggcactggtgcatgaaacatgacgagctgctggccgagcacatcaagtccctgctcatcaagaacaacagcctgcctcgcaagagacagagcctgaggagctctagcagcaagctggcccagctgactctggagcagatcctggagcacttggacaatctgcggctcaacctgaccaacaccaagcagaacttttttagccagacgccaattctccaggcgctgcagcatgtccaagcgagctgtgacgaagcccacaagatgaaattcagtgatctcttctccctggcggaggaatatgaggactcttccaccaagccacccaagagccggcgaaaagcagctctgtccagccctcgaagtcgaaagaatgccacacagccccccaatgccgaagaagagtcgggctccagcagtgcttcagaagaggaagacacgaaaccgaagcctaccaagcggaaacgaaaagggtcctctgcagtgggctctgacagtgactgaggcccctccattcccccatcccacccccggctggactgccctctccttcttggtgattcaaaggttaatagaggctgaggagattgcaggggaaacacccttgctgcatcccctaagctcccccggtggaaggaggagctttctcctctggctgagtttgagaagctgccatgcagccccgtagccccttccctcctcctggggcctccagcccctcacactgctgttcccagtgatattcgggatctgactgaagccagaggctctgtataaatcagaccatagtggaagtcctcagccccctggccccttccgcaatctcctcccccagtctcccaaagagccatttcaagcagagaagggaaatgacaagaggggcagctggccagataagctaggatgagagcagagactcagtgtgtgggtgtcccttcctgcttccccttcaggtcttggtttgttctgaagggacgttttatagtcactatccacatgccagtgtgaaatgggcatctatgacgtggtcagggtgtccattcctaatcatggggcagatgccacaagcattcagaaaggagtctgaaagggtggccacagccccacgtggtgtgccctgggaggcttaggttggtcttgaggttgggcacctcaatctacaccagagcccaggggagtcccagagggcaagttttcacagatttttcaantgatccccnttttccttgatcnnnnnnnnnnnnnnnnnnnnnnnnnnnnnnnnnnnnggcagagataatcgtgttcttaaaattgttttttnaaatgacaataaaacaagccagattttca

SEQ ID NO: 85004 - DNA, 583 bp, Homo Sapiens
  misc_feature (176)..(176): n is a, c, g, or t
ccatatattttctctggaaaccacagtgtacactaaaatgtgaaattgaaggttttgttaaaaagaaaaagataatgagcttcatgctttgtttaattacataatgatttccattacgctatttctgtgaaatgcagcaggttcttaaacgttatttcagtggcatgggctggaanttatcacaaaaagccatgtgtgtggccctatccagaacagaaagagacaggctggtgcccaaggctgctgcctgctccaccttttgccagctctggacatctgaggacgtcccggcagatctggaatggggccctcaactgaccatttgcttctcagaatttcagtttgagacatgagaggtataatcagttacttttctccccccagagaaacccttttgtgaggggagaggagctatggtatgtggttcagctgaaacacatacaactgcatccttttggagtcctttgccaacaaaaacagaccaacagaccagatggtgtccatgttcaatatcatgtcttgatggacgcagctgatgacctcaaatacttgagtggtctcatggctgttagatggattattt

SEQ ID NO: 85005 - DNA, 448 bp, Homo Sapiens
  misc_feature (377)..(377): n is a, c, g, or t
  misc_feature (421)..(421): n is a, c, g, or t
  misc_feature (435)..(435): n is a, c, g, or t
taagatggtgtttctagaaggcacctgaagaaactatataagttttcaaaattacagctttaagaaaggaggtgctaagaaatcagtaaactatgttgtcatttcagcagcaaacacgtggatggagctgagttgaagtatacagtgatttagcgtattatgagataaatctgtccacactgattttgttattttagctttttttcttcttcaacctggggcctttctggtttgggatttatcattcatcttctatgtgtcatattcattaattcccagaaaatagggacacttatttgttgcatggctgggggaaatcctggaaagaaggactgtagttttaactttttaactaataattaacatttaggcccaanttttaatggaaaacaaggtacccaaatggcataacaaaggtttnttaatcccctaatnttctgtaaccctt

SEQ ID NO: 85006 - DNA, 554 bp, Homo Sapiens
  misc_feature (503)..(503): n is a, c, g, or t
  misc_feature (536)..(536): n is a, c, g, or t
ctgctagtgagaggaggcagagcatgctggcgccttctcaagactgcctgggccctgctcagcacacgctggctatagcggcactcgaggagggtagaggtcctgttctcctacgcccatgaaaagtgaagatctagaggcagggtggacaggaatgccaaagacagaaagaagggccacttcacctctacctctccctagcaagtggaaggcagatgctggaacacggcgggcagtgttgcagaaaactccacgtggccctcaggatgctaaagggcagggctatgcctggtatcactgttcattcatgaatctcacattcagtcagcctggctctgtctgtgccacttgggaagcctcttctgccccaggagatcccagtctaggggtggggagaacaagcacatggttcccatccagtggagcccatggaggtgaggtggagggagggagaagggaaggggcgacctgctgctctgttggagaaacagcaaagcctcttncagccagcacactggttttcctcaccctcagcnttccaggctcttccggga

SEQ ID NO: 85007 - DNA, 591 bp, Homo Sapiens
  misc_feature (520)..(520): n is a, c, g, or t
  misc_feature (526)..(526): n is a, c, g, or t
gcagccccggcggccccgcgcagccgctccctcggcggggccgtggggagcgtggcgtcgggggcccgcgcggcgcagtcccccttcagcatcccgaacagcagcagcggcccgtacggctcgcaggactcggtgcacagcagccctgaggacggcggcggcggccgggaccggccggtgggcgggagccccggcgggccgcgcctggtgatcggctccttaccagctcacctctcgccgcacatgtttggaggatttaagtgccctgtatgctcaaaatttgtatcctcagatgaaatggatttgcatcttgtaatgtgtttaacaaagccacgaataacctataatgaggatgtactgagtaaagatgctggggaatgtgcaatatgccttgaagaattgcagcagggagatactatagcacgactgccttgtctatgcatatatcataaaggctgcatagatgaatggtttgaagtaaatagatcttgccctgagcacccttcagattaagcgtcantccctnttttataggttttcttgtcttgacaagatgcttgaaaaaccaagaggatatgaaaatctgtctct

SEQ ID NO: 85008 - DNA, 346 bp, Homo Sapiens
  misc_feature (287)..(287): n is a, c, g, or t
  misc_feature (289)..(289): n is a, c, g, or t
  misc_feature (301)..(302): n is a, c, g, or t
  misc_feature (321)..(321): n is a, c, g, or t
  misc_feature (329)..(329): n is a, c, g, or t
gaggccatccccctaccccccaacacctttaaaaaaatgataataaagtacatgaaagacagttttaagagctttaaggtttccccactgaggtttggagcttctctcatgggaaccggtcccccaggctgcattcacgaattgctctcatctccattctcccacaggtttgttctccacccgtaccccccacctcgcccggctatcttactccctgcgatttctataggaaaaagtgtgttcttggcagggcgtggtgctcatgcctgtaatcccaacactttggnangccgatggcggnnggatcacctgatggtcggnagttcganaccaacctgaccaacat

SEQ ID NO: 85009 - DNA, 470 bp, Homo Sapiens
  misc_feature (11)..(11): n is a, c, g, or t
  misc_feature (26)..(26): n is a, c, g, or t
  misc_feature (36)..(36): n is a, c, g, or t
  misc_feature (41)..(41): n is a, c, g, or t
  misc_feature (70)..(70): n is a, c, g, or t
  misc_feature (274)..(274): n is a, c, g, or t
  misc_feature (409)..(409): n is a, c, g, or t
  misc_feature (420)..(420): n is a, c, g, or t
cccgggctggnaggaaatttgggaangagccctggncccangttcaaggataatatctgtctttcccccnagactcccaaccttccctgttgggacatcccttggtctggcctttccctcccagagaagccccccagaccccacccgcagccttgatttactgatgcctaatcttattttagtctttcacaccagtttttaacaactcgactgtatagatcttctggaaattttacccaaaaatgttagatgtgccaacccctcacaggggaanagtggtggggtggtggggggttaatgtgttgaaaaatctatgtatcttgtattttatttgagtcagctgtgtttttcacaacaactctgaggagttaaacatcattttctactttattaaatttaaaaaaggaanaaaaaactcgnggggggggcccggttacccatttggccctttggtgagttcgtatttacaa

SEQ ID NO: 85010 - DNA, 398 bp, Homo Sapiens
  misc_feature (337)..(337): n is a, c, g, or t
  misc_feature (345)..(345): n is a, c, g, or t
  misc_feature (356)..(356): n is a, c, g, or t
acaaatcaacatcaaagatggctcagagaatggtaaggcaacagtgagaaacatcagctgtacttgtcgagaaggtgtctgattacacagcgtgtaccatcccagctggccctttgctataacagaggagtgggtgagtgatatgttccaacagctggtctaaagaccagaggcacagtttcaggtaaagtgcaggaacagggtagaggctacaggtggaaagatctagaagctctgtgtccaacaaggtcctcacgcttcttatcagcatggactgactcaatctaaatttgggtgtcccccctccacaggttctagtaggaaacctacgcatgangaatagantgcagacaganttagttaaatccaaaaaaggcccttttctttcaacctggggg

SEQ ID NO: 85011 - DNA, 506 bp, Homo Sapiens
caggcccggaatgggcctctctggacaagagccaccctttcactgtgcatatgatgctgatgcaattcctccatcatctctggacgtgcagaccagatccagaagaaaggcctggcgtgtggccaaacagcgtgaaaccttggcacaggactgaggatcctctcctccagaaaagccccctcgaggaaataaattagtgcggttctctttgacctccaaagacaagacaagcacttatttttattttcagaagacaaaagaaccaagatgccaactggctgcgaatgctctatctccagtctgtctctgtgtactggtagaggctgggaggagtagggggcagcctgttccatttctgatagtgcccttgctcttctgtctgtcatcttgcaggatgcccgagggccagatgggcttagctaggccaaagtaacagactcaagagttattgtacattactgaccacgctcatttgttcaaaagttagaacatctggctgcaccagg

SEQ ID NO: 85012 - DNA, 705 bp, Homo Sapiens
gcggccgcggtcgggcagcgtgtccacgatctgctcaatggtcaccacgcccttggcagtcggtggcggggctcgcatggttgggggcgcattggggatccaggagcaccagtcgtactggccgaagttgaccgcggcgtgctgggcggaggcggtgaagatcaccacggtcaggtactccgacagctgctcccggctcttgaccgacttggggaagcctgaggacttgcggccccgcatgccgtacacgtagacatcgttcacgaagtcctgcagctccgggtcctcctccaccacctggtcgccctcgtagtagatgtctaccacctcggccgtgaacctggctcagggggcgcagccggggtgggcgacccagccaggtctgcggagcggtgcccggcggcaaccccctcacggacgctgggactcccccaccccgtccccattcagcgctagcagtggaggggccaggcccgccccaggtagtcaggcaggggtcccggctcctcccccaggacaccgccccgcgggcgctcacgtcctgatggcttcccacaccaggagcccgtcgtcccggtagaagtagtaggggatgtcttctttgctctccatgccccgggccttgatggcctcgggaaagcacagtggaggcatagcgtcaggtccttcatggccctctgcacatctgcacgtgccaccgcccct

SEQ ID NO: 85013 - DNA, 929 bp, Homo Sapiens
  misc_feature (647)..(647): n is a, c, g, or t
  misc_feature (767)..(767): n is a, c, g, or t
gcggccgcggtcgggcagcgtgtccacgatctgctcaatggtcaccacgcccttggcagtcggtggcggggctcgcatggttgggggcgcattggggatccaggagcaccagtcgtactggccgaagttgaccgcggcgtgctgggcggaggcggtgaagatcaccacggtcaggtactccgacagctgctcccggctcttgaccgacttggggaagcctgaggacttgcggccccgcatgccgtacacgtagacatcgttcacgaagtcctgcagctccgggtcctcctccaccacctggtcgccctcgtagtagatgtctaccacctcggccgtgaacgtcctgatggcttcccacaccaggagcccgtcgtcccggtagaagtagtaggggatgtcttctttgctctccatgccccgggccttgatggcctcgggaaagcacagggaggcataggtcaggtccttcatggccctctgcaccatctgcacgtgcccaccgccccctgtggcgttggccttgtcaaagaggccacactcgcagatgagctgctcacgggccttggtgttgattgcaatggtgaatctcacgtgtgccaccagcagcttgaaaatggggtgcacagcaggcagctggcggtacattngcaatgccaaaaacctcagacaccagatgtgttcgcagaaggtgggtgatggtctggtggacgtggaagtcactggaacgcacccagattttggccaaaagccagtcgtattttgcatcncgaagggaggaaaatagggttctcatctccccgggatttggttgagctggatggcaatggggacaatcttgttggccaggttcttatacagcaagcagatgggagcggccaggaactggagtgtgcaggggtctgtatccaggaattccggaccggtccagc

SEQ ID NO: 85014 - DNA, 598 bp, Homo Sapiens
ttgatttttgttttgaatgtggtggagtcaagagattgtagatgcctagtttgatttaaacactattgtaaacctatcttgcctattgtgtggacaccaaaagagaccaatgagcctgtttatttttcagaggtctaggaaaattgcatccgtgtgagtagatgtacagaactaatctaaaagtgactgctagtaacattttagaatataataatttcaagaattattctgagtgttttaaatgtgccctgaaatgttggcatgtcatttcagcatttccatttgaattgctcttgtaatatttttgcacaaaaaggactgagaaaaagactactttggttaaaggaaaaaaatagtataatttggtctttaattttaatgtctcctgtggaaacactggggatgaattttgttggcacagttattcaggatatttaaaacagtgttgaacagttcacaagaaattaagcaaacttggattttaaaaattaaaatactttctttccatgtgactgttttgcatagttttttccccctatgtcataacactacattccttgtttttcttaaataaaatactctgcaggtttaaaaaaaa

SEQ ID NO: 85015 - DNA, 1119 bp, Homo Sapiens
  misc_feature (1043)..(1043): n is a, c, g, or t
tattgattttagacttatcaagctaattagctcccctttagataagtacatgttgcacatgtgcacctacttgtaatctcagatatttatgcacacaagtgtgaaggtttttcagggagcagagcatctgggacaggctgattctgagctaaacagggctcctttaaggcaatatgaactgttaccttctataaattgcacattgaggaactctaatagacaaagattaggtgtcaggcagaaaacactcattgtaaatatactattagttgataaacataggactttcttattccccagtttttctttatcatataatttaaatatttattcattttgtatttaaagactacctacacatagatatatgattccaaagtcatactttctccatccccacattagccaagtgaatacagggccaaatgggttcttggaatgataataacaaagcattacaaagtgggtccccttggttccagccttgtccagagtttttggttatatatttctatttattacaatttaccttttaaattgtaaaataaacctttgtgtggacagagccaatgtttcaatcttgaatgagtaaagaaaatactttggaactgatcctcattttgaaattggttctaaattattatccatttccaatgtctgaaattctcttacttcctgctaaaactctctttctgccaaagttgtttcgtaatctgtctcaatgactataatgtaaaattaaagaagtaaccatgcttctcaagggggaattaaaagtgtttattgaattttactcaggctaattgtttggtcagaaattcctaaggccacagctttggggggttcgtgtagatgtacatggtgggtgggttataaatattgggacttaaggcagcttgttctatgtatttatctttgctcttgggtgacttagggaatgattttatttgatttaaccttctttctgtttgccccgagaatactcgccagtggcgcttgcagttgtagcatttaccccaagataactttgcctacgaaatatntcgcttttattattttcacatcattctagtatatggactttggaaacaaaagacattgttctatttatagcatttc

SEQ ID NO: 85016 - DNA, 561 bp, Homo Sapiens
  misc_feature (12)..(12): n is a, c, g, or t
  misc_feature (52)..(52): n is a, c, g, or t
tgaatacagggncctggctactgttggcccaggctggaagtgcaagtggaantaaatcatgggctcacctcaagctttgaacctcccagggctcaagtaatcctccctaatacgggcatttctcctcatcgcttcagaacccgcccccacaaccaaacattcagatgcttattaaggcaacaaaacaagtgacagacgggacaatttttccaattctagatctaattgattaggctatgtctcatgaggagactgtacttgacctctaagctagcatctggaatacaatcttccagcggcttagggaaggtcggtgatagtagtatcgtcaggatcaattccgaagtgcagcttgccgtccttggcggctgcccagggcatggaggtggaggtccactttgccacccagtctcctgttttgctaaccacgatgaggccacctaaacctttaacccttgacttcatataacccaacgataggtccgcagcctcttctaccgtctttcctgaaaacaaggaagggttgagaaacaacacacattactgaaaggaatctcatgg

SEQ ID NO: 85017 - DNA, 513 bp, Homo Sapiens
  misc_feature (19)..(19): n is a, c, g, or t
  misc_feature (47)..(47): n is a, c, g, or t
  misc_feature (60)..(60): n is a, c, g, or t
  misc_feature (82)..(82): n is a, c, g, or t
  misc_feature (88)..(88): n is a, c, g, or t
  misc_feature (101)..(101): n is a, c, g, or t
  misc_feature (108)..(108): n is a, c, g, or t
  misc_feature (123)..(123): n is a, c, g, or t
  misc_feature (299)..(299): n is a, c, g, or t
  misc_feature (399)..(399): n is a, c, g, or t
  misc_feature (418)..(430): n is a, c, g, or t
  misc_feature (433)..(433): n is a, c, g, or t
atgactgaagaattccaanaaatgaagttcaacggttatctattganctgtttcctcccntctcttgccttctccatctttntgctgnaaaaaagggaaanaagaaanaggtttccgaatggnaaatttgtcctttcaacgcgaaggcaagctgaaggcagaccgaagggaaggagggcatcctaggtgacatttccatacccacgcaccctttacaatgctggggctgccagtccaccctgtacgtcaacccacccccaaaaacagcacggtcccggggtggtccagtctgatcccanaccgcccaaccggggcatccggtggaagtcttcgccggaggatccgaaggcagcatcaacgcggttcccctggggttcgcccgcaaaggccagccggggnagggtagcgggacgtgacnnnnnnnnnnnnntcnatccgcctcagagctccctggaaggtggcaggtagccggtgggcacgccgagccagagacgtccggcaggatatagatct

SEQ ID NO: 85018 - DNA, 363 bp, Homo Sapiens
gaagttgaggttaagtgatttggaagttacaaaaactagtaagagctcaaactagcaataaaattatagtatgtttttcccttgccttcactgtaatgcttaatggttgtgtagtcttatacgtgactcctgacttcaaggatcctggtctgtacctctttaggtcaacacgttttgagtgaactggtgttggttatttggaattagatataaagtcatatattctttggtgaggaatggcttcatataggagttcacattcaaaacaagctttgacaaaataatagagtgaaaattggtagatcagagttgagctgattggaggaccaaattaaaagactggctgggcatgatggctcacac

SEQ ID NO: 85019 - DNA, 892 bp, Homo Sapiens
tcagggcatgactacgcttgtttgaaacagacagatgtttactcttccttgtaatgagtaggtttggatttaagagccgattagaggctacttcctgtaaacaagtacaggaaaatgaaactagacgggtgggggacactagaatgaaaaccagtgttagggtaaagacaaaacagactatgtacataatctgtatatggggaaaagaaagagcgaaattaccttacttaaggataataggacaagacaaattacagattgtctcagagaaaacaaatgattactctctcggacaagctgtaggtcctacctaaatgtccagcaggacattagacagtcgtacagggtacagaataattcttcgttgtgtggcactaacccacacactgcaggacatcgttctccctggctgcatccactcagtgctgggagtagtccccagttattatgaaaccaccaataacccactgaccacagtgagaaccactgattttttccactgacctactgaatatctagcatccttagattggctcaactgttactttcctaaggagtccttctacagaataggtcagatcttggcctcccaaaccccttatttttaaaatactttgcgccttgctttgataatttgtattatgtatccaaactgaaattatctgctttctgcattagaatgtaagccccctgagggttgagtcagtctgtcttgtttgctgtgccacgcctgatgcccagcccagcagcatgctttgtacactgatatattgggtaaattttgttgaataaattaagctcaactatttgtatttcaatagttgagttgtattgcttcctgttcttcaagcttaatttgaactgtctaataaaaagaagtaattaatttggt

SEQ ID NO: 85020 - DNA, 736 bp, Homo Sapiens
  misc_feature (34)..(34): n is a, c, g, or t
ttgtggctgggaataataaagatggcaccgcaanggagcctcacctttgcgtgagtgagtactcagttgggcgctgcagggtctggagtctgtgtgagacgtgtgtgattgtgatgggtgcgaatcagcgtatagcacttgagaacaaggcagaccttggagcagaatggttatgtgaaggatcacatcacccatgggtagggggggaagtcatacgtcctggaggtgctggtcctcctcctggaactgccagccttgctaggactatcaacatcaacagcattgcctggtaaaccctactgtttgtgctccccactgtgtcccatgactggtgttaaaattctccctactttgatcatctgccctgcccaggccttgggctttatgccagcacagagctcaaaggccaggtagcagcacatcctcaagcatgagagctcaaagggttacatttgagtctctgtacctgcttggaagaaataaaaatacgtgtgaattccatctcatccatgaatagttacaaattcttgactagcattctgtccagttctttgccatttttacgtcttttttacaagggagattaaaatagctcctgactcagttacagctccctgcagtgttcagcactttaggggtgggagagacattctggagtccttcagtatatatatgtgtcagttaaactatggtgccgtgtttctatttcagggtttatccatgtgtattcccattg

SEQ ID NO: 85021 - DNA, 253 bp, Homo Sapiens
  misc_feature (232)..(232): n is a, c, g, or t
atgagccaccacacccggcccatctatccgttctttactgatcctcattctatgagccaaagactgtgctaaacaccgagtatatagggaatgactaaagcatcactctcctttcaagtagcttgcaggctgatgagtggggctcagtgaaaacgctggcagcccaaaaccaacaagtcgctggcatctcaggaaaccatggctggccataaggctgtttcacatggaactntcaggctaatattcacctgca

SEQ ID NO: 85022 - DNA, 601 bp, Homo Sapiens
gaaaacagaggatcttcaagtttgcggaacaagtggttcatatacaagaggaaatgggaagatgatcttaaaaaaatagctcagttatggaaggatcaacgtatcataaaagttgctccttggtagaagacaagatgatttgattagttctagtgttccagcaccacatcaacaccaacagttacctctgcagctggcttcagaaaagcctgtttccagcacaagcactactacaaagattacaacgggttccttccctcagcaggcacacaaagcagtaccctcaaatcgtttgtgggctgaggatagtactgagaaagaaaaggacagtgttcctacggcagtgaccattcctgttgctccaactgttgtaaatgctgcagcttctaccacaaccctgactacaactactgctggcactgtctcctccacaacagaggtcagggagagacgcagatcatacctcactcctgttagggatgaagagtctgaatcccaaagaaaagcaagatctagacaagcaagacaatctagaagatcaacacagggagtgacattaactgatcttcaagaagctgagaaaacaataggaagaagtcgt

SEQ ID NO: 85023 - DNA, 432 bp, Homo Sapiens
atgaattaatgtttataaatgactgtactgaatttaaaaccgtacagtttcatttgcattttgacattactttattatacattttgcatttaaaaggctgcaccagttggcttttcttctgttttattctcaaaatatagagattctgtgatttatttgccctgtttatggattaaaaagaaaattctaatataaagcatttcaataggatgcataggtatattacgttttttaaatgctttagatctgtgattcttgacttactatttattttatccccttttaagtcagggatgctttattctattttaaagcacttatgagttacatgttgtaatccaagtttgcacaatatatttatccatatgaggaacccataaatgaatagccaatttttaaaatgccattaaaatgcatggaatgcttattaaa

SEQ ID NO: 85024 - DNA, 352 bp, Homo Sapiens
acgttgtaaaaacgacggcccagtgaaattgtaaataacgactcaactaatagggcgaaattgggtacccgggccccccctcgaagtttgggaagcataccttcctaaggagcatgcttccctaaggtcatgaccccagaagtgatgcatattactttcagccacatcatccttgtctatgatttggttgggcatgcccagctgcaatcccaggtgaaactcattaaatctgttattaaaggaagaaggggaaagtagatcctgggacaactggcagtatctaccacactgacaataccaagttctaatgaggttgtggaaaaattgaaattcacatgtactgttgatggga

SEQ ID NO: 85025 - DNA, 420 bp, Homo Sapiens
tttgatgcccaagtctgatgagacacacatctcataaattctcagacactctcagcttttcctcccgtagcacttattacacaacccagcctgtcagtaagtctgtgtctccctctagactcaaaggctctgtgcaggcggagactgagtcattaaacgttgtctctccccagccacttgcctagcacctgatgctcagtaagtacctaaccagaatagatgaggcagcaagagaatggcgctcggtgtgtggggtaaggggagtcaggaggaggacgggctgctcgtgagacagggtagggatggggctgtgccgggtttcctctcaagcccccaggctgctacccttggttctagccacctttcctcccaccctccttctcatgcaggctgccaaaattgcactttgggtctgagatt

SEQ ID NO: 85026 - DNA, 389 bp, Homo Sapiens
  misc_feature (125)..(146): n is a, c, g, or t
  misc_feature (346)..(346): n is a, c, g, or t
cttcgaaccagaacctcggcctgaccggcactttggctccaaaataactttatttttgggggagaaagcacatcacgaaccagtcaaaatcgtggtttattctgtaacgtgaagacttctgctcnnnnnnnnnnnnnnnnnnnnnncgtaaacatctgggtgtatatcaaacggcaagatgtccagtaatgtcccggcggatatgataaatttgcgcctcattttggtaagcggaaaaacaaaagagttcctgttttctcctaacggattctgcttctgacattgcaaagcatgtatatggacaattgggccaatgggactgggaagaagagccaggtcagcagtnccaaatattctacggactttattttatcaaggacggttttcta

SEQ ID NO: 85027 - DNA, 379 bp, Homo Sapiens
  misc_feature (107)..(117): n is a, c, g, or t
  misc_feature (230)..(230): n is a, c, g, or t
  misc_feature (320)..(320): n is a, c, g, or t
  misc_feature (328)..(328): n is a, c, g, or t
  misc_feature (347)..(347): n is a, c, g, or t
atactcgctgtatccttgaactcctgagctcaggtgatcctccatgcctcagcctcccaagtagctaggaccataggcatgtgcacaatgcctggctaattttgaannnnnnnnnnncataaacagggtcttgctatgtttggccatgctggtttcaaactcctggcctcaagctatatttcctcctcagcctaccaaagtgttgggattacaggtctgagccaccatgncctgccacttagggagttgttttatttttatcttgattgattggtttttctttggggaaaagtattaactgataatttatgttgggtggntgcatatntttaatatttgctggaaanatttcatcttgtcgagtaggaaagttgttttt

SEQ ID NO: 85028 - DNA, 501 bp, Homo Sapiens
  misc_feature (26)..(26): n is a, c, g, or t
  misc_feature (45)..(45): n is a, c, g, or t
  misc_feature (108)..(108): n is a, c, g, or t
  misc_feature (120)..(212): n is a, c, g, or t
  misc_feature (410)..(417): n is a, c, g, or t
  misc_feature (419)..(419): n is a, c, g, or t
atactcgctgtatccttgaactcctnagctcaggtgatcctcctncctcagcctcccaagtagctaggaccataggcatgtgcacaatgcctggctaattttgaattnttttttttcatnnnnnnnnnnnnnnnnnnnnnnnnnnnnnnnnnnnnnnnnnnnnnnnnnnnnnnnnnnnnnnnnnnnnnnnnnnnnnnnnnnnnnnnnnnnnngtgtgagccaccatgccctgccacttaggagttgttttatttttatcttgattgattggtttttctttgggaaaagtattaactgataatttatgttggtgattcatattttaatatttctggaaatattcatatttcgagtaggaaagttgttttaactggaagtgtaaggaggaaagattatggccttaaatgaannnnnnnncncccttaatgtattagggcaaaatccccaatggaggataccgctctcaaaggaattattaaaattggatgaggaaaaacttgt

SEQ ID NO: 85029 - DNA, 384 bp, Homo Sapiens
  misc_feature (11)..(11): n is a, c, g, or t
  misc_feature (22)..(22): n is a, c, g, or t
  misc_feature (82)..(92): n is a, c, g, or t
  misc_feature (96)..(188): n is a, c, g, or t
tgagctcaggngatcctcctgnctcagcctcccaagtagctaggaccataggcatgtgcacaatgcctggctaattttgaannnnnnnnnnncatnnnnnnnnnnnnnnnnnnnnnnnnnnnnnnnnnnnnnnnnnnnnnnnnnnnnnnnnnnnnnnnnnnnnnnnnnnnnnnnnnnnnnnnnnnnnngtgtgagccaccatgccctgccacttaggagttgttttatttttatcttgattgattggtttttctttggggaaaagtattaactgataatttatgttgggtgattcatatttttaatattttctggaaatattccatatttccgagtaggaaagttgtttttaaactggaagtgttaaggggaaagattatggcc

SEQ ID NO: 85030 - DNA, 479 bp, Homo Sapiens
  misc_feature (16)..(16): n is a, c, g, or t
  misc_feature (93)..(216): n is a, c, g, or t
  misc_feature (393)..(393): n is a, c, g, or t
  misc_feature (411)..(411): n is a, c, g, or t
  misc_feature (415)..(424): n is a, c, g, or t
  misc_feature (451)..(451): n is a, c, g, or t
  misc_feature (457)..(457): n is a, c, g, or t
atactcgctgtatccnttgaacatcctgagctcaggtgatcctccgtgcctcagccttcccaagtagctaggaccataggcatgtgcacaatnnnnnnnnnnnnnnnnnnnnnnnnnnnnnnnnnnnnnnnnnnnnnnnnnnnnnnnnnnnnnnnnnnnnnnnnnnnnnnnnnnnnnnnnnnnnnnnnnnnnnnnnnnnnnnnnnnnnnnnnnnnngtgtgagccaccatgccctgccacttaggagttgttttatttttatcttgattgattggtttttctttgggaaaagtattaactgataatttatgttgggtgattcatattttaatatttctgaaatattcatatttcggagtaggaaagttgttttaactggaagtgtaagggganggattaggccctttaaanggannnnnnnnnnctcttaaatgttttagggcaaaatccncaatgntggatactggctctccaaggtt

SEQ ID NO: 85031 - DNA, 386 bp, Homo Sapiens
  misc_feature (27)..(27): n is a, c, g, or t
  misc_feature (44)..(44): n is a, c, g, or t
  misc_feature (58)..(58): n is a, c, g, or t
  misc_feature (63)..(63): n is a, c, g, or t
  misc_feature (75)..(117): n is a, c, g, or t
actcagcctcccaagtagctaggaccntaggcatgtgcacaatncctggctaattttnaattnttttttttcatnnnnnnnnnnnnnnnnnnnnnnnnnnnnnnnnnnnnnnnnnnngggcctcaagctatatttcctcctcagcctaccaaagtgttggggattacaggtgtgagccaccatgccctgccacttagggagttgttttatttttatcttgattgattgggtttttctttggggaaaagtattaactggataatttatgttgggtgattcatatttttaatatttctggaaatattccatatttccgagtaggaaagtttgtttttaactggaagtgttaaggggaaaggattatggcccttaaatggatttttttt

SEQ ID NO: 85032 - DNA, 708 bp, Homo Sapiens
  misc_feature (144)..(159): n is a, c, g, or t
  misc_feature (534)..(596): n is a, c, g, or t
tttgtttttgtttaaaaccaagctactgcagcttcaagtattttgcattacatagaatattttttataaattagttaatgttatattttcaatattcagacatatactataatatatatacagtacaataaatgctctcattcnnnnnnnnnnnnnnnnggataaatccctgagaatgtatgttgacagtcgctaagtttccacatgcacaagcatcgtgtgccatgcttctggacgaacagcactgcaaagccacatgggtcagcctttttactattagtatttcattttgttggtttgtttaaatatgctgaaaatgtaaagatgagttacaaaggagtaaagctgaatccattcgaggtacttatcacaggatggaggtgttttgtttggtttttaaagccatttcaattattttttttgaggctgtgaacgtatacagaaaacaggagagctatgtggacttttgccacttgacaacatatactcagtgtaaaccaaacctttttaacctctctctcatacaaaaccagnnnnnnnnnnnnnnnnnnnnnnnnnnnnnnnnnnnnnnnnnnnnnnnnnnnnnnnnnnnnnnncacacaaactttcacaacatgacaatttagtctgcaaacgcaatataactatacacatataataccggtgtggctctgttctttaagttaaacagggtacaaaggcaggctc

SEQ ID NO: 85033 - DNA, 655 bp, Homo Sapiens
  misc_feature (25)..(25): n is a, c, g, or t
gactcccacctcaaaaagaaaattnaaataaataaaataaatttgcaaggttttaaatgaatatcacttaaagtagtaatcaacagaagttaggagaacataacaatactctttctcttagaaagtacaacaaaaatataattttttacagttttactctcaaactttcctctgtagtaacatgccttactcacctctacaataggtttgttgtgagaatcttgtaatgtaaaccctggacgttctatgaagcatttttaaacttctagtttataccctactgattcttattcaagtgttttttaaaaaatatttaaacaactattcttcttttcttgccaatatttttataatttccaagaggttttaaggatcttgagagaacatttatttaagaagtatctactactattactagccaagaaaacaaatgtaggtagaggaaagacttaacattttgtcctatatacatcttaatcatcctaacggtaaaaactcacatgaaactttaagatacaagatgatatgagaatctcaacatggaaagctgtcactataactacaagcagtgtacaaacatgcttctacttttacctacataagctgacagatgtttaaaatactgagttaacaaagatcttttagtaaagtgact

SEQ ID NO: 85034 - DNA, 846 bp, Homo Sapiens
cagtactataacggtctaaggtagcgaggcctgggtggcgaattcggcacgaggggaatcccagtggatgaaaatgctgtacatgttctggtgataacaatgggcaaggtctaggacaggcatggttcagtttaaaaatgaagatgatgcacgtaagtctgaacgcttacaccgtaaaaaacttaatgggagagaagcttttgttcatgtagttaccctagaagatatgagagagattgagaaaaatccccctgcccaaggaaaaaagggattaaagatgcctgtgccaggtaatcctgcagttccaggaatgcccaatgcgggactgcccggtgtgggactgcccagtgcaggacttcccggtgcaggcctgcccagcacaggactgcctggttcagcaataaccagtgcaggactgcctggtgcgggaatgcccagtgcaggaatacctagtgcaggaggtgaagagcatgccttcctgactgtaggatcaaagggaagccaattaatgggccttccattttaactttcctgggtaattttggtggatcaaatgctttgggccaccaatccctcctccaggattaggaggcggggctttggtgatgctaggctggtatgccttcagttggaaacagtggtttgctggtctaggactggatgtccgggtttggaggtggacaacaatctaagtgggcatcgggattgggggggcctcagaatttggaatggcctggtagcttaggcggccccgggtttggaagtggcctcctggcttggagtgccctggcattggtgggcacagtttgggctggccggccgccgggccggctgccatctatgggc

SEQ ID NO: 85035 - DNA, 531 bp, Homo Sapiens
gaagcagccaagtcggttagtggaagcatgattggtgcccagttagcctctgcaggatgtggaaacctccttccaggggaggttcagtgaattgtgtaggagaggttgtctgtggccagaatttaaacctatactcactttcccaaattgaatcaccgctcacactgctgatgatttagagtgctgtccggtggagatcccacccgaacgtcttatctaatcatgaaactccctagttccttcatgtaacttccctgaaaaatctaagtgtttcataaatttgagagtctgtgacccacttaccttgcatctcacaggtagacagtatataactaacaaccaaagactacatattgtcactgacacacacgttataatcatttatcatatatatacatacatgcatacactctcaaagcaaataatttttcacttcaaaacagtattgacttgtataccttgtaatttgaaatattttctttgttaaaatagaatggtatcaataaatagaccattaatcagaaaagaaaa

SEQ ID NO: 85036 - DNA, 625 bp, Homo Sapiens
gggtacacacacaccaaatgtgtaacagttcaccacttccagagtgtggtcatgcccaaaacatgtttaagaaaggaaagcagtagctccttgctaacgatgtttcaggaggtttggggcacttggttttaatgagcttctgtcatttagggcttctcttggccatggtccccttccttctggaactgtgatgtagtcacatcctacagcctttagtgctggttcactagtgtcagataatcagttcttggaatcgagactgccgtggcgaaggggtggcctcggaggcaggctctggagctgcttggatgtctttaggtggggtggtggctggctctcttcagcatgtaattggggaaaccctcgcgtctactaggggtgatacagatggtgattttaaagagcaaaactagacttctatgtgagaagtgctggaaaatgatttaggacatgtgtaaagttagatggaaagactgtaaatgtttaatatgaatatagtgttcttttgaagtaaggccagctgttgaacggttaaactgtgcatttctcattttgatgtgtcatgtatgttaatgtatgaaatgattaaataaaatcaaaactggtacctgtttatacataaaaa

SEQ ID NO: 85037 - DNA, 641 bp, Homo Sapiens
  misc_feature (16)..(16): n is a, c, g, or t
  misc_feature (29)..(29): n is a, c, g, or t
  misc_feature (41)..(41): n is a, c, g, or t
  misc_feature (59)..(59): n is a, c, g, or t
  misc_feature (81)..(81): n is a, c, g, or t
  misc_feature (86)..(86): n is a, c, g, or t
  misc_feature (116)..(116): n is a, c, g, or t
  misc_feature (123)..(123): n is a, c, g, or t
  misc_feature (132)..(132): n is a, c, g, or t
  misc_feature (137)..(137): n is a, c, g, or t
  misc_feature (151)..(151): n is a, c, g, or t
  misc_feature (156)..(156): n is a, c, g, or t
  misc_feature (183)..(183): n is a, c, g, or t
  misc_feature (230)..(230): n is a, c, g, or t
caaaaggcctctggtnacctctcctgganttcctgagaggnagccgagatagcccatgnccttttaccccctgacccatgntgacngggaaaccatactggaataaccattgggangggaagnagttccacnagtgntttccaccaaacancatgnaccaagttaatggttaaaccattaatnatgaaatgggtaggtgggcaggtcaaagtaaaggcccagagaaagcnatttcaagctgaacaccttgttcatgaatttaatctcttatgagaacagctagaatgatcatagtggccagtttggtagcctgatcattttggtcatatgcagaaatgttctcaatggactttgagagttagaattagttggtatacaggctcctccgtggaaatgtacacaccaagcaattgagaaaagctggaaatgcacctgtctcaagtctcattgaaaattcctttaggtatcatactccaaaagattacatggaattgaacatttttgaaataaggacaggactaatagactttcttaaagtggaaatctctcgtctttttttcccctggtactttgaaaacttaaaataaacatcgtttccagtatttgatggtttatttactaactacctgtttggaggaaaa

SEQ ID NO: 85038 - DNA, 614 bp, Homo Sapiens
  misc_feature (25)..(25): n is a, c, g, or t
  misc_feature (35)..(35): n is a, c, g, or t
  misc_feature (576)..(576): n is a, c, g, or t
  misc_feature (600)..(600): n is a, c, g, or t
gattctgagatgtgcaaagactacngagtattgcncaggataggttatctttgtccaaaggatttaaagcctgtctgtggtgacgatggccaaacctacaacaatccttgcatgctctgtcatgaaaacctgatacgccaaacaaatacacacatccgcagtacagggaagtgtgaggagagcagcaccccaggaaccaccgcagccagcatgcccccgtctgacgaatgacaggaagattgttgaaagccatgagggaaaaaataaaccccagttctgaatcacctaccttcaccatctgtatatacaaagaattcttcggagcttgtcttatttgctatagaaaacaatacagagcttttgggaatggactcactgattttcagtcttttccatctctttcctcctagactctgtgatctgagggtataaagacatctccaccaagtctgagccctcaaaatgtcctgattacaatgctgtctgtccaactgcctgttcaataaaaggtaaacttcaggcaggaacaccctttctgggggtttctttgttcactatctggggataataggatantttggctttttaaaggaaactggnattaaactctaccc

SEQ ID NO: 85039 - DNA, 354 bp, Homo Sapiens
  misc_feature (201)..(202): n is a, c, g, or t
  misc_feature (285)..(285): n is a, c, g, or t
  misc_feature (324)..(324): n is a, c, g, or t
  misc_feature (333)..(333): n is a, c, g, or t
aaagaggaacaagaagagagagagacaaagacaccagagtgtccgagccacacccagcctcttggcgtctacctgctaacccctgcagtgcagaacctgtggctccgggacaaagccaccttcacctgcttcgtggtgggcagtgacctgaaggatgctcacctgacctgggaggtggccgggaaggtccccacaggggcnntggaggaagggctgctggagcggcacagcaacggctcccagagccagcacagccgtcttgacccttgcccagggtcctttgtnggaacggcggggggaccttccgttcaccttgcacaattngaaccattncccagcctttcccaaccccag

SEQ ID NO: 85040 - DNA, 406 bp, Homo Sapiens
ctagcctattgaaacttttattgtctagcacttcaagcatacatccaactagttagataatttaaaagaaaacacacacaaaccttgaagagatttatggaaaaattaaaggtattgaatatacctcaggaaacggtgattttacagagcaaacttcagccacatatcacattacagatcaaattagtacttagtactacaactgaagacaatttaagaacaagaagagatcacggagaagcaagcagcatcccaggatgataacaggcaagcagtagctaaaacagatatgctaccccatggctcatctatttagctattcattcaactaatacttattttgggtttgctggctgccagatgaacaacctagacagagttcctgccctcaccaagactttcagtc

SEQ ID NO: 85041 - DNA, 232 bp, Homo Sapiens
tcatttaatggcacatgatgatgcacacaaaacttcaactctcagtctggaatcagcccacaggtctgcagctataaaaatcatctcgaaaacatgagatttcagagatccagttctcagtgttaccttgaagatgacaatttatgaagaaacaggtgattttaatccgaaattgccaggagaacaaattactcctcaaaagcccttggaaagtaataagatagctaggcag

SEQ ID NO: 85042 - DNA, 1116 bp, Homo Sapiens
  misc_feature (119)..(119): n is a, c, g, or t
taggctaggtagcgaggctgggggtgaatcggccgagggctgaacagaaattacatgaaaagctgtcctccagaacccatcctgggttctgtccctcagaagtctcaagcctacttcangaagaaacattgtttttgccagaaaaccagttcagctggcatattgctgcaacaactgccaaagaaggattgttggtgtccgctaccagtgtagcctatgcccatcctacaatatctgtgaagatagtgaagcagggccatatggccagtgacactaaccacgtcctgcttgaagttgcggagacctgtggtgggctcctctgaaccgttctgtcactcaaagtactctactcctcgtcttcctgctgctcgtggaacaagtcaggctccagaaacaggttgataagaactttcttaaagcagaaaagcaaaggttgcgagctgagaagaaacaacgtaaagcagaggtcaaggaacttaaaaagcagcttaaactccataggaaaattcacctgtggaattcaatccatggactccagagccccaagtctcctttaggccgacctgagagcttgctccagtctaataccctgatgctccctttgcagccctgtacctccgttatgccaatgctcagggcagcatttgtggatgagaatttgcctgatgggactcaccttcagccaggaaccaagtttatcaaaccactggaggatgaaaaatacaggaaatgtacagtggagtgcagacacaaagctcaagttcatgtggggaaactgatttggttccaaagaaaagaaggattgttgggttgccctggcctaaggccgggcagctgggagtggaatcgcgcgagtaagtgcaccaagcctagggaggggaaggatacatcccatgggggcatcccacaaggccaacactcgggccacgggcagggcgaacacaaaaagcccttcacgccaagaaacgcggcactggcaaggcagcgcaggcaggcaacgggcacgcgagaacggaaccatcccgtcgacagaaacacggacagtacaacaacaaaccaccaacgcagcggaggagcacaaatacaacagcaacacaaacagaaagagcaggcacc

SEQ ID NO: 85043 - DNA, 353 bp, Homo Sapiens
  misc_feature (277)..(277): n is a, c, g, or t
tttaaagaagctacgactactgaaatccagcttattttatcgggcaggaatttgggtccaatgatgcctgaacttttgatttttcaagagaaaaggcaagtcctgattttcaaatgttggcaactaattcaaaattatttacaacaccacaaaccaaacaaatctatctctggggcccaagtctggctcacgggccaccagctggcagcctctgccctagagttggttatatacagacttcctgggcgcctcccttctaggatgggaagtgtctagnaatggcgtggctaataacttgtttagggcagtctcccaaccaacaagccggacccctctcatgcctcaatttcaag

SEQ ID NO: 85044 - DNA, 823 bp, Homo Sapiens
  misc_feature (31)..(31): n is a, c, g, or t
  misc_feature (83)..(83): n is a, c, g, or t
  misc_feature (88)..(88): n is a, c, g, or t
  misc_feature (96)..(96): n is a, c, g, or t
gcctgcttagcctatttggtcccaaggtgcnaaatcctagaaatgcctaaggtataatttggttcaaaacccacgtttcattnctggnaaaatttnaaaaagtaccccaaaaggaaagagaacagtacattacacgcccatgtatccatcactaaggtagtatcagtattgtgaataccattaataatatgaagtgcactgagaagtatgaagtgctataaaaatgtaaggacagaatcgccatgatgctgatgtacccttgcctgaaacatgcagcgcgctcacacagacactcaagggaaagttaccaggacaagggcatcttggctttgactctgattcttgttcaagccaggcagcctggctccagagttctgctgggagctcttctcctgccgtctctggagtgcccgcctggctttctgcagctctctcttcatgtgcgtttcaaacttgctcactaatgtcttggttttcatctcttcatcaacttcccagacatcctcgagtgtcagaggacgcttgtagcctttcagaatgatgctgtcataccagctgtaggtaatgctactcaggaatgaagctatggatgatggattatttgatgactcattattttctgaaaatgctgaaaagatcaggatcaggatctggaatccgtaggagatgaagaacaggcaggagtaggctagattagaattgtcaccctgtaagagtgtccggatcagagtctgaaattggaaagtgccacagagtatcgagagaatccagaatagggacaggaaccaggagttttctgtacacaccattgtctgctgtattg

SEQ ID NO: 85045 - DNA, 541 bp, Homo Sapiens
  misc_feature (19)..(19): n is a, c, g, or t
  misc_feature (208)..(208): n is a, c, g, or t
  misc_feature (259)..(259): n is a, c, g, or t
aaaaaatgcctcgtaatanattgtcatgtttgaaatgtatcatgcttgttttgctctacatagttttttggtactacataactgtagacttaagtatctttttggtggaaataaaatatgaaatctctttaattttgttaatgttaggtctggtattcgttccattaagttccactttaaagtatggaaaaatggttataaacatccngctttaaacaatgaatggtactgcaatagtccctgtaaagaaaaatgaatnggagtaaagtccttcaagttttcatttaaagaatgggcatagctttataatacattaagtttttaatatgcggaatgtatttaatatcctaaagcgatgaattgtcttggcattatgctatcttatgaaacactttcttactctcacattgtgtctttatagttttcaatatcagcaaaacctttaaatagtcttagttgggtgttgtgtatcattgtacagcaactattagtacatgtggtatttctgatccatgtaataaagtacatgttgtcatgtaaa

SEQ ID NO: 85046 - DNA, 254 bp, Homo Sapiens
gcttgtagtgttgaattctcttaaaggaatgcttgaattttttcattattgttttattgtttttatatacttgccttatttgaatgtttagcagtatccccttcccacttatatattgtgtgatatgattttgcttgcctataggagttaaaaacttttccatgtgaaatactctgacttaaacatacatgtaacttacataactgttaagaataacagtctgatttaataaatggttcattttaaaagttaaa

SEQ ID NO: 85047 - DNA, 511 bp, Homo Sapiens
  misc_feature (33)..(33): n is a, c, g, or t
  misc_feature (130)..(130): n is a, c, g, or t
  misc_feature (132)..(132): n is a, c, g, or t
  misc_feature (141)..(141): n is a, c, g, or t
  misc_feature (232)..(232): n is a, c, g, or t
gacgaccaactgagaggtgggcccccaaagccnggctgcgagagtcaccagaagatttccggagagccaaggagtcgggaagagccacttactgagcgttgccgaacgtgtacggagatagccgaagagngnaaaggcggnggcacaagagcccttcctgcagggaacctcaggcttcagagagccgaaaagttgggaggcgtaaccacttacaggccggaagtgtccgggngtggacgcattgcgggtagccgaagaagtcccaggattgccgaagaagtcccagggatttccgaagcgagccgaagcatcgcaaccagttttcagagacagctgatcggtttggagctcttgcgccgagcagtcatggcggcggctagagctactacgccggccgatggcgaggagcccgccccggaggctgaggctctggccgcagcccgggagcggagcagccgcttcttgagcggcctggagctggtgaagcagggtgccgaggcgcgcgtgttcc

SEQ ID NO: 85048 - DNA, 756 bp, Homo Sapiens
  misc_feature (35)..(35): n is a, c, g, or t
  misc_feature (70)..(70): n is a, c, g, or t
tgggcaaaaaacaaaggtttccttcctgaaatagncatttgaaaacttcctgaagggaacaaagaacccnaaggatgggttccgggaaggacaagctttttcatggtaaattccggttcaaagcttcctcaaaccgtttccgttaaaccaacttgttctctgaacgtctcccaggtagcttgtgaaccagtctgggggcttgtcttgaggctggtctgtgtcacatggaacaagtggaaacgactgcactgcaggatcctctggggtcttcatgtctgatcccaagactctcaccagtgaagagtaatgtgcaagtggcttcttccctgccctggcagctagtcgttttgctcctacaactgggggtggggcttcatcaacgacatggtgcccttcgtggacttgcatctgcagttggtttccctgtttaactgccatcttaagcgcttcttcatattctccttgactgttgatggatacctcttcattttcctcatccaggtattttatttgaatagtattcagatcaaatgaaacttttaccatagcttcgatatcagcccaagttgtattttctggatcagaaaccagaaagctttgaatttcatttttaaaagtcacatttagagtaacctgtggttccatgctgtgaggcagcttcccgcccccggggggcgcctgccggaggccaatgcaaggaccgtccgctaccggcctagttctagatcgcgatctagaactagtccggacgcgtgg

SEQ ID NO: 85049 - DNA, 536 bp, Homo Sapiens
cagatcaggagagggcagtttcgccaccaaatgggtttcattttcagagttcttggactttggaattatggataatagactgttagttgctatagtaaagagatctaacacaagaaaatgatacattagtgtagccgagggtaggaaacaagaatgtgggaaacaggaaaatataagcagactctgaaagaggacaacagaccacacaggcaaactaaccattttcttaaccacagtggctgaaggtcttcgtgacatggaactagaggctggtttcagaaacaactgcatttctttaaaattactctgtaacaggaagaaaaacagccctctcccacacatttggggacctgagaatgacagatgcccaccccagctctctttctcttagaaagcttacctgaaaaattgcctaaaaattcaacacaacactaaaactagaaagaacaaactttttattttagagcctttgattggcttaggaatgagcattactaggggctttgttctttaatatatttcaaggcacagtctga

SEQ ID NO: 85050 - DNA, 292 bp, Homo Sapiens
aagtccttcagtgcctatatgaatgtggtgttcaggagacctggctttcatgacccagtacaagctggttccagcgtatcactaggcacagtgcactgagggttatacagtgatgaattagacaaaccagatagcctttggaaactccagctgagattagctaaaatgctatttcagatatgtatcttaatgaactggcaagagagtcaggattctaagtggaagtgggaacctggagagacaaacagaacactaatgccagatttttgcagtgagaacgtttgccaaacta

SEQ ID NO: 85051 - DNA, 538 bp, Homo Sapiens
ttagttaccccctccggccacatccactctgcaaattagaatattggtatccacctcacagagttgaaggatcagctgaagcaacctaaagcatctagctagtgcccagtgcccagcaggcacagggggtgtgcagtgggactgacagtgagggctgacagtggaagctctagctggccttagctccagctcataccctttaggtccaggagccagtgtgtgtctgtctcctctcctctgggcccagtgattgcttaggtgactggggtaacaggcaagttgggtgaagggaatgggaaaaaagtgtaccctgggatctgagggctttacccccagaactaaactgccccctggttttggtcagacctagcacagcgatcttgcttcctagctggggcaccccaccctcacctcaaagatggtgaaactgctgtgcctcctgctgttgaggcaacctggaggcagagaaacctacaagtgacacagacccaaggtggcagttccacagtgccaaggggtggcagcaccttcaagagaa

SEQ ID NO: 85052 - DNA, 975 bp, Homo Sapiens
cagaattccgaatgtaaaagcgcatgactttgtcctctttatcccctttacatctagctgcttacgtctcatgaaactgaattttcagttatctgttggtccacatttgaataagaaattatcttgaatttgaaatgctgagctgtaatagcagttgtaatttgtaagtcctgagagtgtcctgtcctccgttgttaatcccagtcaagatcatctgagagttggtctccagggaacttcagatctctaggatgttgcactggaaatggctgcaggatctttccactaattctgagaactgaaagagttaggaactctatttggagagttcctggttcccttatcgtgtgacagttctaagtcaattttgtcatgtggttttctgactcacagactagtaagaagttagtaattagagagctaagtagattagggttgttggagatgagaaacccacgttttgggaaaacctggcaagtgacaacttaacatcaaggaagtagtcagaaaagctaaaactgacaaacagaaggtagaagaaagtagctccacactcatgggatgtgaaatctacaagcgtgcatgcccggcaaatgcctctccaatgcactggagcgttttaagtggaaaccactagaatctctgtgtagtctccggaagtggctgtgagggctgcattatctctgcacagcttcctcttggtgggcccagctgtgatctttatggatggcacacatcagctttcaggaaaagcacatgaaaggtgctagggctcttggagctgactgtaggtttgggagttgtctgtctccttgctctagattacagctctgtgtgttgtgtggggtctccatggtttgccaaattatctcttcctcacttagccacaaggctgacagttaggaactatctcttcttgattgcattaggttggctgcttcctgaatgcatatcaaaaggctccttcctttagtt

SEQ ID NO: 85053 - DNA, 1225 bp, Homo Sapiens
  misc_feature (65)..(99): n is a, c, g, or t
  misc_feature (781)..(791): n is a, c, g, or t
  misc_feature (870)..(953): n is a, c, g, or t
  misc_feature (992)..(992): n is a, c, g, or t
  misc_feature (1020)..(1020): n is a, c, g, or t
  misc_feature (1042)..(1042): n is a, c, g, or t
  misc_feature (1102)..(1102): n is a, c, g, or t
  misc_feature (1137)..(1137): n is a, c, g, or t
  misc_feature (1151)..(1151): n is a, c, g, or t
tataggcgccaccgcgttaagccgaacgacgagcgcagcgagtcattgagcgaggaagcggccgnnnnnnnnnnnnnnnnnnnnnnnnnnnnnnnnnnncagtcgacggtaccggacatatgcccgggaattcggccattacggccgggggaggaaatctacaagcaccaggaagtcaagatgcaagcaccagccttcagggacaagaaacagggggtctcagccaagaatcaaggtgcccatgacccagactatgagaatatcaccttggccttcaaaaatcaggaccatgcaaagggtggtcattcacgacccacgagccaagtcccagcccagtgcaggccgccctcagactccacccaggtcccctgctggttgtacagagccatcctgagcctgtacatcctcctggccctggcctttgtcctctgcatcatcctgtcagccttcatcatggtgaagaatgctgagatgtccaaggagctgctgggctttaaaagggagctttggaatgtctcaaactccgtacaagcatgcgaagagagacagaagagaggctgggattccgttcagcagagcatcaccatggtcaggagcaagattgatagattagagacgacattagcaggcataaaaaacattgacacaaaggtacagaaaatcttggaggtgctgcagaaaatgccacagtcctcacctcaataaatgagaggacattgtggcagccaaagccacaacttggaagatggggctgcacctgccaacgaagacgggaaatgannnnnnnnnnnagcctagtgtgaacctgcccctcgtcccacgtatagaaaaacctcgagtcatggtgaatgaggtgtctcggagttgctnnnnnnnnnnnnnnnnnnnnnnnnnnnnnnnnnnnnnnnnnnnnnnnnnnnnnnnnnnnnnnnnnnnnnnnnnnnnnnnnnnnncattttgcaaagggtggacatttcagtgtatctcccagnaaaggtgatggaatggaattagggactnaggagttcacagtggaattgtnggcatgcatgcccgttgttcatgtggacatattgtggagttctcgggcatgttcacggtngggtgggctgtgttctggagcacctccagccagangttcactctgagtntggggtatttggtgacatgcattgcacgggcctgttttccctgtttgtgtaaacatactagagtatactgcggt

SEQ ID NO: 85054 - DNA, 454 bp, Homo Sapiens
  misc_feature (65)..(73): n is a, c, g, or t
tatcaaaatgctattatttcaagttgtatataaatatacaaatatttttaagacaatgaaaaagnnnnnnnnngtcaaactgtttttgaaatcaggcatgcattttacacttgcaatcaattcagactagccacatttcaaatattttataaacaccatatttaacggctaccacattgaacagcacaagtctaggtactgtagggactccaatcctgggatttagtaactccagtaccccacaaggataaggactgagggagggaaatggagcagtactttaaaatatcatatagttcagaaccagtccttagtgatagactcaaatatttgacaaaatatccaattatttcctttaaaaaagtgttacctacatcatcattataaagaagaacgaccttaaatgataaatcagttgccctactagatatttccactctctagctttcttctc

SEQ ID NO: 85055 - DNA, 493 bp, Homo Sapiens
ttgaatcaaaatgatttggctaaagcttaaccagactagaattcaggtttcctgagtcggctgtgattccattccctctgctttcttgaataaaggtcactgtgaatatggatgtcacaaattgtctcataagaaacattcaagtccaaagctgactactaaaactccttaggcaaggaaaatggccacagtcagtaactgtcattgatcttgaccttgtcaaatcgtcttaaggtgaaatctagaaaatcagtcttgacagaaaatgtgggggtggctaaaagcggagtaaatgatgattcagcagatgaccactgagtcactcatgggcttatgcccatgcatggggaagcccaggccttctggaactgctatgtaaggatgagatgcaaagtggagtttgaggtcaacaatcttattttgtaaaagcttgttacttcatctttcctctactccccattctttccacctttcctgaaacagtaaaattacc

SEQ ID NO: 85056 - DNA, 590 bp, Homo Sapiens
tgggcaacagcaatatgaaggaacgtgtcaccatctgcatcctttgaaagaaactggtcttgggaaatatctgccaatttgctttcttcctgctccacctgccactgaaaaagtgatttccctaactgtgtggtgttcattggatttcccatgtttgagaatggcagtgaagtgtttgaagagtcagaggccatctcgtgccccaccatgtgcctcacaggcgctgctgggcatcatgctgaagctgtgcaagtgagcatcattttgctgctgaacactggaggaagtctgcatgggattagcaatattctcagattccctttgatcaccaagaagggaaactaagctttggtttgggcaaaactgtgattctggaccatcaaagaggtttggttcataagcgggggactggggaggtatgggaaaaggactgtattccagagttggttcgagggtgtagtgtggctgctgctctacatgctggttctgtggagaatactggtacagggaagcctggtctatcattagttgggagcccctgacttggaatggttggcatttctgaggtggagaaaagacctgccctccat

SEQ ID NO: 85057 - DNA, 287 bp, Homo Sapiens
gctgcatgttgtttggaatttatcaccttaagaaagtgtctctgttttatatagaaacactttctcacttacaggggagaaggaaatgcagggcacatgatctggccctccccagaacaatctggatttcacggagacagcaaccagaagttaaaccatgtgactaaaaatgcatctggctactttttcatgtatgtatgagacagaaactaatccttactatcctattaggataccacttttcattgcaaagtttgtgtcaataaagtcattaattttaaacataa

SEQ ID NO: 85058 - DNA, 127 bp, Homo Sapiens
atttatctgcatccccaaaatgttacatatgctcaagagattaaaagaaaagacatcggaataattagagaaaccatggccttgaggaggacgtgcatggagaggttccacaaaggaaagcaaacag

SEQ ID NO: 85059 - DNA, 476 bp, Homo Sapiens
aagaattcaccatctctcctgactgtggcaccattcgcccccagggatttgctgctatcagggtgacattatgctccaacactgtgcagaaatacgagctggcactcgtggtggacgtggagggcatcggagaagaggtgctggcgctcttaattacagcaaggtattgctccccagcttgctcttctcctgagtcgcccccgagcctccagtaatgggctgcctcacagaaggcagctggcctgccaacccaagcacactgagtttgtcctgccttcctgggaagggaagttgaatctgacattcaaatgacaaagcagcaaatgtttctaaagcacctttggtggagataagaagaagtgtgtgtgttttgtagagtttaggcagagaatcctaagaatagtgaaaaaacgggtcagaccctctctaacgggtttgactttcaaagtatgtaaccagaaaggttttagcaggaa

SEQ ID NO: 85060 - DNA, 737 bp, Homo Sapiens
  misc_feature (127)..(238): n is a, c, g, or t
  misc_feature (447)..(447): n is a, c, g, or t
cggaaactcccgcacagtggcggaggccggcttctctgcttctccagatcccggctctgcgcctggggtttgcatcgcccaaccttggccgctgcagcagcagcactgctggctcaagaggccatannnnnnnnnnnnnnnnnnnnnnnnnnnnnnnnnnnnnnnnnnnnnnnnnnnnnnnnnnnnnnnnnnnnnnnnnnnnnnnnnnnnnnnnnnnnnnnnnnnnnnnnnnnnnnnngaaacagagaacaaacagacaaaaaaccataaggagcccactggggttgggtgggaaggtgcaggctgcggtcagagccacgtttctgcaaggtggcccgcggtggtggccagacgctatcccagggccaggggctagtggggcaggggctcagaaatgagctgctcatgcccacactggatcacgatcacatcccacccacctcaggntcgcactgcctgttccttgaagttcagggtctacctccccacccagcgtggtgctgcctcagtttacctgtttttccatgcgaccgcccacctcgctgacattctcatcccttgtctttaccctaaccgcacctatctgtgtggctctctctcatttccaacattctggctccctgtctcaccctgccccagttttggtctccaactgatctggagttttcctgtctccccatctgagtctcttgctcttggcctcctcctccctgtctaattctatttcgatgtttttg

SEQ ID NO: 85061 - DNA, 435 bp, Homo Sapiens
tttgaggcatttttactcaattaaaatgtactcatcagattacttgataaatatatattgagcatcagcaagtgccagtgcttgtgtggcctctgaagatgggattctgcctcatgaagtctagagggaaggcactaatatgtgtaaaattacaatgttgataagagctgttagaggtataatggtgctataaaattttaaaataggaggattttgacttattcagggaggaagggaaggcttctctgaagaatcgatgattctgttgagtgtgatatctgaaaggaagaatgaaagtagacaatgaaagagaccagccatggggtgaggaaaggagagcatccgggatcagattgcttcagaagcccaggcaaaatatgatggtgtttagagtaatggatttgtagtagagatgaaaagaagagagcttaagtt

SEQ ID NO: 85062 - DNA, 792 bp, Homo Sapiens
  misc_feature (71)..(100): n is a, c, g, or t
ggagcattggaagataaagaaagagatgaagatgatgaagatggagatggcgatggagatggagcaactgnnnnnnnnnnnnnnnnnnnnnnnnnnnnnngaggaccaaaagttcaaacagaccctccctcagttccaatatgtgacctgtatcctaatggtgtatttcccaaaggacaagaatgcgaatacccacccacacaagatgggcgaacagctgcttggagaactacaagtgaagaaaagaaagcattagatcaggcaagtgaagagatttggaatgattttcgagaagctgcagaagcacatcgacaagttagaaaatacgtaatgagctggatcaagcctgggatgacaatgatagaaatctgtgaaaagttggaagactgttcacgcaagttaataaaagagaatggattaaatgcaggcctggcatttcctactggatgttctctcaataattgtgctgcccattatactcccaatgccggtgacacaacagtattacagtatgatgacatctgtaaaatagactttggaacacatataagtggtaggattattgactgtgcttttactgtcacttttaatcccaaatatgatacgttattaaaagctgtaaaagatgctactaacactggaataaagtgtgctggaattgatgttccgtctgtgtgatgttggtgaggccatccaagaagttatggagtcctatgaagttgaaatagatgggaagacatatcaagtgaaaccaatccggtaatccaaatggacattccattgggccatagg

SEQ ID NO: 85063 - DNA, 651 bp, Homo Sapiens
  misc_feature (373)..(402): n is a, c, g, or t
gggggcgtggctggtgtaggcgggtggagaaggatcggggccctcgccgctctgtctcattccctcgcgctctctcgggcaacatggcgggtgtggaggaggtagcggcctccgggagccacctgaatggcgacctggatccagacgacagggaagaaggagctgcctctacggctgaggaagcagccaagaaaaaaagacgaaagaagaagaagagcaaagggccttctgcagcaggggaacaggaacctgataaagaatcaggagcctcagtggatgaagtagcaagacagttggaaagatcagcattggaagataaagaaagagatgaagatgatgaagatggagatggcgatggagatggagcaactgnnnnnnnnnnnnnnnnnnnnnnnnnnnnnngaggaccaaaagttcaaacagaccctccctcagttccaatatgtgacctgtatcctaatggtgtatttcccaaaggacaagaatgcgaatacccacccacacaagatgggcgaacagctgcttggagaactacaagtgaagaaaagaaagcattagatcaggcaagtgaagagatttggaatgattttcgagaagctgcagaagcacatcgacaagttagaaaatacgtaatgagctggatcaagcctg

SEQ ID NO: 85064 - DNA, 635 bp, Homo Sapiens
agcctgctgggcgctcccctttcatgagagccacctgcagtgacctgaactgatacatgttgattagtctgccctttctttagaaaactgctactctccttttcatatctcagaaaaacagtagaggccttttaggaccaaactccatgtcacactgatgaagagccagtgggggttagagcgtcctgttaaggcacatgctagcttcccactcaagtctggcagcgctggggcatcagcacacctcttgccacccacactgataccagaggggaaggctgtgaggtggctgggggttgagacttgaggtttctaactttcctctgcacacctgtggctacctggtgtttgtctcttgattccctccacctgcctcacaccctgcctccgtcgggattttccacctacaccattcaaaaggaacataggagagggcatgaaggggctaggctgaagcactctgatgactggggccaatttgtggctgaaaatgaatacattttttgaaatttatggtcattttcaagtgatttagaaggttgatccttagcctcatacagtgatgaaataatctgtgtgttcagagccaagcaggactttagcaagagtctgattgtattgtcactatctcgggg

SEQ ID NO: 85065 - DNA, 388 bp, Homo Sapiens
  misc_feature (128)..(344): n is a, c, g, or t
  misc_feature (369)..(369): n is a, c, g, or t
ccataataatatatgcatactgtagtttctggaagttgggaagctatcagaacaagagcatctcacttttgacacatacaatagacaccccaaacaggaaactgatgaccttattaaaatcatagatnnnnnnnnnnnnnnnnnnnnnnnnnnnnnnnnnnnnnnnnnnnnnnnnnnnnnnnnnnnnnnnnnnnnnnnnnnnnnnnnnnnnnnnnnnnnnnnnnnnnnnnnnnnnnnnnnnnnnnnnnnnnnnnnnnnnnnnnnnnnnnnnnnnnnnnnnnnnnnnnnnnnnnnnnnnnnnnnnnnnnnnnnnnnnnnnnnnnnnnnnnnnnnnnnnnnnnnnnccagggatttggtttgcagttgagnccaaggttcatgccactgg

SEQ ID NO: 85066 - DNA, 344 bp, Homo Sapiens
  misc_feature (119)..(119): n is a, c, g, or t
  misc_feature (149)..(149): n is a, c, g, or t
  misc_feature (153)..(153): n is a, c, g, or t
ctgaacaggccttaagagctagctatcaattgacaggaaaaacagagacagaagaacatattaaccaataccacagagatgcaattagctaaatccaaaccaaggtacatcataaatancaaatggccgagtttcttcaaccaataaanctgnaagaaaaaaaaaaagtggagtctggggagaggggacagcagccccacaatttcatcagcaccccaaacttcgtctatctttctgttcctccatcgtccttacagtgagactcccaccattatggtcaagagccagctgctacatctccagatactgtatccgtgtgtattccacgtctaggaaggaagaag

SEQ ID NO: 85067 - DNA, 379 bp, Homo Sapiens
  misc_feature (80)..(80): n is a, c, g, or t
  misc_feature (276)..(276): n is a, c, g, or t
  misc_feature (322)..(322): n is a, c, g, or t
  misc_feature (332)..(332): n is a, c, g, or t
  misc_feature (349)..(349): n is a, c, g, or t
acgtgaaggaataaaaaattagaatatcttattcttggagaccctaatgagcatcagtggttgctaacatcacaaaaagncacaaccagatattacgtgccttgtgatggaagtattctgtgactacctgtcaagttattcctaccaccccatcaacaaaatggcaaacttaaatctgaacaggccttaagagctagctattcaattgacaggaaaaacagagacagacggaaccatggtttaaccaatgaccacagagatggcaatttagctaanttccaaaccaaggttacatccttaaagggccaaatggcccagtttntttcaacaantaaagctggcaagtagnaaaagtaggtgggggtttgggggagtgggg

SEQ ID NO: 85068 - DNA, 798 bp, Homo Sapiens
cattgcctttgttacctaaccaaccttcactgaaaggcaaatttagttcaggagggtagtttttagctagctgtggaagtaagcctttatttattactttttggaggaaatcagagaagtgtcaatggaccgtcactcagactgagacttgagttattacagaagccaggaaaagtgtattagaaactggtgtctacaccacttttaattggtgaacaatttttctaagttatggtcatatatacccaaacaaaccaaatcaaactaaattattgcatataattttgggattgggtggcctagtttgaaagagtgatttaattaatcactatgtaagtggtgagagatgcaggacatacacattattcaagagaccacctgacatgcatctcctccgcaggaatacattcgtcctctcttagagaagtttaacgcacatagtattattttactaagagaatatctcttggtgtcatatctaggggaagagaattaactagaattaaatttaatgtttgaatctaaatcattgggcaaacttctaataataacaattaataataggttacaggaaagccagccagaggaagtgtcagcactttaaaattctagaccccaaaaaaatacaaaataagaagaaagtataacatagtaactagactatgaggagcagggatttagaggtcaaccagaggtatagaaccttagaatgggcacggaactgagaatgggctcggatgaaaacttcctatagaatccatgttggacaataaagatgtaggaatcaagagaagtagg

SEQ ID NO: 85069 - DNA, 941 bp, Homo Sapiens
  misc_feature (694)..(717): n is a, c, g, or t
ttaaggagaagcattgaggggccctgaaaggagtcacttccagtcctcctcagagattgctagcattgctcgttctccagtgtcaggctgcgcactaaggacataaactcgcgtggttgttacacatcaggaggcgatgtttatttcctgtagaaatcaaatatgcgtctcggcccccgacattgagacttgaccccgttgtacagtacacgagtgtgtctgtcctagattccccgactcctcccactgttattttaagctgagcttctctctcccaaggtttccctgtaaataatgtcagctgctgtttcacaggatgtgatgggtggtaggagagccaactctggatggggaggtgagtttggggacgacggacgaaaggctaatcactaggattagaaaacacgcaatatgatgcggccaatcggcatggacgacgaggaggacttcaacaattcacccgcgctggggaacaacagcccgtggaacagtaaacctcccgccactcaagagaccaaatcagaaaatcccccaccccaggcttcccaataagatgatcggcaccagaatccactgtcaataggcccgtgggtgatcattacaattgcaaatctttacttacacggagaggaaagcagaagagatacaaaacttttccatgcaaatatctatttctaaaccacaatgatctgannnnnnnnnnnnnnnnnnnnnnnntaattgagagggattattcccaataagcttccatgaccctttcttggaggccttcacaggtaatacagatactggcactgattgtaattaaaatgagagaaaactctagcgcatcttctggcacggttttaacaacgtgtgtgtgttgaatttcctttttatgcatcaaacgaaggccatattgtccataaatgctcagtgctcaggatctcattaatatgccg

SEQ ID NO: 85070 - DNA, 183 bp, Homo Sapiens
aatgaagtgtaaataataccaatgtataagtgtatattattatattaaatattatagtaaaaaggaatgtgtggtattttcttcagcaaaactatttttgtgatttttttattctcaactttttatttaaaaaatgttacatctgcagaaaagttgaaagtataataaactcttcagttaaaa

SEQ ID NO: 85071 - DNA, 599 bp, Homo Sapiens
  misc_feature (72)..(72): n is a, c, g, or t
  misc_feature (77)..(77): n is a, c, g, or t
  misc_feature (374)..(399): n is a, c, g, or t
gaatacagtgataagcaaatctttaaatgttacccctaaataggctccttaaaatagaatgtagcttgtaanagatnataagttaactgccctgcaagttagtggccttctaactcctcccagtggtggtgtataaacccctgaaaattcaaatataatcctaaaagcaggaagactgacatttaggggaggggaaaggatggataaaaagaacaatactcaacctaccagcctccaaagagaagtcatgcaattgtgaatacatgtcaaccaactgttattaatattccagccaaatcacactgaaaataaaaaatctggtaagagctgtagtggaaagccacattagcccaccttttaatggtatatatatnnnnnnnnnnnnnnnnnnnnnnnnnnttcttattaaaggtctatttacaaatatgctaggtaaaagacaaacatttttccataatacacagtgctgcttaaagaactgcttcagacatctccagaatatttcagtataacatgcatgacattttaaacacaatattttatatcaaggagtcttcatatttagccattaaacttaaattccaacaaaaatatttttc

SEQ ID NO: 85072 - DNA, 762 bp, Homo Sapiens
gagttgtgagtttccaagccccagctcactctgaccacttctttgcctgcccagcatcatgaagggccttgcagctgccctccttgtcctcgtctgcaccatggccctctgctcctgtgcacaagttggtaccaacaaagagctctgctgcctcgtctatacctcctggcagattccacaaaagttcatagttgactattctgaaaccagcccccagtgccccaagccaggtgtcatcctcctaaccaagagaggccggcagatctgtgctgaccccaataagaagtgggtccagaaatacatcagcgacctgaagctgaatgcctgaggggcctggaagctgcgagggcccagtgaacttggtgggcccaggagggaacaggagcctgagccagggcaatggccctgccaccctggaggccacctcttctaagagtcccatctgctatgcccagccacattaactaactttaatcttagtttatgcatcatatttcattttgaaattgatttctattgttgagctgcattatgaaattagtattttctctgacatctcatgacattgtctttatcatcctttcccctttcccttcaactcttcgtacattcaatgcatggatcaatcagtgtgattagctttctcagcagacattgtgccatatgtatcaaatgacaaatctttattgaatggttttgctcagcaccaccttttaatatattggcagtacttattatataaaaggtaaaccagcattctca

SEQ ID NO: 85073 - DNA, 931 bp, Homo Sapiens
  misc_feature (464)..(477): n is a, c, g, or t
  misc_feature (616)..(658): n is a, c, g, or t
cgatggactttctgaagctaaagaccacacctgaatcagggctgtggtaatcatcttaccatagctgtaaattgtatcaaaacaaaaaaattagtagatggatttaggaatatgtaagaaactcaacacataatataaatgcaatgaatgtttttcttctttaaatttaaagttagtatctacagatggaattgtatctacaaccaaatgcctcttatccctgaattcagagtgataattttataagtgtgaaacttaattatgtagggctccccccgtctgaatagaattaattccttaaagtctagttagggtcctgctgtctgtcatgttgccttgtaacggatgtttccacctccttctccaacctctaccccaccattagtgtattttactataaaaacagtggaaccacagccctaaagtcctgctgatataaagtccttttgtcttaattgtatttnnnnnnnnnnnnnnctactcttgatcacattagctatgaggcgaggtcaaattcaggtatctaagactaatgattttgttttgtcttgatccccagagagcaaatcaaagaaaaattacagcaagaagagaaaagtggtttatcattgtgtgnnnnnnnnnnnnnnnnnnnnnnnnnnnnnnnnnnnnnnnnnnngaacacacaaatgaggagaaggggcttctaccccgagggaggcccttccccgcctgttccttctcggtcgaaccccgacgcctttcgctggcggcggagcgcttcgccatgcatccggccgcgccctggatggcggaaaatacgccccgccgcggtacctgccccgccttcgccggccagggtatcgcctcgccccacgtcgcccgcgccggctattatctcgcgcgactttcccgccgttatgtgcgccccgcactatgacacgcgtcttcc

SEQ ID NO: 85074 - DNA, 660 bp, Homo Sapiens
gcttttgccctgaagttcagtgtagtggtttgtttggggcttgcaggaagaaacaaacacactccctctgactctccacaacccatctttgccttctgcaaccgcttctcctgcccatcgctggttttggggtaggctctttgtctgcctgaggccccgcactcgcagggcaagaagcttaaaggaatccaactccaaactcctccgaagttaaatattgaccagaacctctttcaacaggccgcggttgccaggaaccgtggagggccaactcctcccaaccgccctggtgcaaagtcccacgcggcgaagagttttggagcagcgcttacctagaaagatgtttaaattctgaaccaggaattgtctccaactccaggcgctcagggaatcgccttttccggtgtccaggcgctctgcagacaaataaacagcagaaggtgaatggcggctgcgagggaagggagttggaggccgggagtgggaagcgaggctcatgcgggcgccaaggtggccctgggggtgacgcgaacatcagggagtcaccagggcactcgtccgtgtggcgcactcattgctcgaaatgttccagtctacaaatggtccgaagatggtgatttatttttgtaaaataaatacatactccatctccacacccat

SEQ ID NO: 85075 - DNA, 604 bp, Homo Sapiens
tttgaacaaaatgaggcctaggttaagtattttatttggcttctcaagatggactgagaagttgggcaccagctccagaccaattcctggacacacatcaaacacagccctgtcatttatccagtcagtcaaaacaatcttttccatctaaccctttaatgtttatgtccttaaaagctgctaattgaatccagttcttgagatctatttgctaaaatctataccatctaatttgtaaatgatgaacaaaaatgaaaaaaaaaatatgttaactttcctggcaaaacagaagagactccactgtaaccaaagaaggaaggacaatgtttttaatatttgtcaaattttaagagaaaactattcagagacaaataggttgtaaggaaactcagagtaccctccaaactgtttttactattaagaggacacagggtatttaaaattcctcagaaaaacctgaaacaaaatcactataaatgtagttcaatattcccccttcccctaaaatataagcataatctttcctcttaataaactttaattataaattcttataatgtatcataggcagtacggaaaccacagataaacactttaagatcta

SEQ ID NO: 85076 - DNA, 462 bp, Homo Sapiens
  misc_feature (36)..(36): n is a, c, g, or t
  misc_feature (45)..(45): n is a, c, g, or t
gggggcccaatccctaatggccattggggaaggccngttccattncaacccctcaaaggttactgtagcacagaaaatatcacaatttcctgcagggacattatcagtaagttctgcagggaacaaacaattgacattaaaaatcagtactctgcaattgtcactgttattatctgctagaaactttgcataatgcattttaaaccaccaaggctggctgccacatccatgtgaaatgcttgaattttatggtgcttaaatatttaatgattcatgggaaaaatgtgaaatgtgtctaataaattgcatccctttctctaacctctggttgtaaagttaaagactttcagcatgtaacttttgcaagatgcctggtctgccattggcacttaaatatttgttgtattacgatttataatatggttcattatatataaaattctgtgatgacttccaaaaaca

SEQ ID NO: 85077 - DNA, 913 bp, Homo Sapiens
  misc_feature (891)..(891): n is a, c, g, or t
acaagcagtgtccttgctaaaaactttccagaatacagttgaactcatcattgtacgagaagtttcctcataagcactgtggacaaaaaagcggggaagacagcaagatttattggaagatacttacaggggaaattaatattttgactatttttatatataaagaagaactcaaaaaattatgttcaaatttgtacattaatgaaataatggaacttgtggttagagggaaagaaccactgtacagaatataaaggagactgttgaattcataccatataaaacttgttaggtttttaaacatagcaatcaaggctacaaaaacaaacctgtgttgtttttgtatagattgtaggtttatttttggatttcatatacatgactgaactgtgtgcaaggcaatagttagccttgattttagcccagagacagatggcagagctatctctctcatagcttttatgcccttatttttattcaactggtattaatgtttttctcctgaaactactttttttgatgtgggcaagagatttgaagtgttggcttttgctatgtgcatattgaattgaagagtgagtaggtgaaggtggtgctggtgggttcactttccaaggccagactaaaacagttattttcctattaaaaatctgggaaggcaaagaatgggggatgggggagagctaccgtgggtagtatgtttttaataagggagaataatggcaataaaaatatgggaatggcccttttttattaaagccaaaaaaggaccaataatttgccattttatggagcctcccggcaagggaacctggtttccttgggccatatagccccacttggaacctatataccatttttggggcttaacttgggggggagattcccagnttttcttttaaaaatttttttc

SEQ ID NO: 85078 - DNA, 882 bp, Homo Sapiens
  misc_feature (758)..(766): n is a, c, g, or t
gaactttgcctggggctcattctttggttaagctgaagctgccgtgggtggccaaaccgcagattctttgcaaattctgagctggcagagctcgcagccgggagccggccggggaagaggagacttgcgcgccgcaagccgcctgcctccaccctgctctccatctcccgctctagaagggctgggaagctcgcggccggggttccacctggaagctgcttgcatggctgaacccagcttaggtccctgacggggctgctggtggaattctcccccttcgaagctggggaggtttaggagggggaaggcttctgtgaagctctcaaaccactaatagagccccctccccaacagtgacggcgcagatgctcccccttttcttagttgacaccaccaggcagcttcctggccgttggtaggttcctgcagctggctgagggaacagggaccggcaggggactttgttaggggagggttgggatgggcagtgggcccctgaaagttaatatattggaacctagctcgagtgtcgttctttccaattccgaaagtagaaagagtaaaaataggggtgattggggtggggttagtagaatgcctctctcagggcgctcccccctcccccaccgttttagagagctaggcctcagccagttcttgccactcccatctcagtgcttcctgaagaggctgttttgagtgttgatgaaaagcaatgcaattatgccaaacagtattgagcagaataatttatttcnnnnnnnnncctttgctttaaatcatgaatcccgccaagtacgggggcctcacaccttgtcctcccagcaactttgggagggccagggcgggcgggattactttaaaacttaaagggcagggagt

SEQ ID NO: 85079 - DNA, 588 bp, Homo Sapiens
  misc_feature (17)..(17): n is a, c, g, or t
  misc_feature (23)..(23): n is a, c, g, or t
  misc_feature (47)..(47): n is a, c, g, or t
  misc_feature (103)..(103): n is a, c, g, or t
  misc_feature (155)..(155): n is a, c, g, or t
  misc_feature (163)..(163): n is a, c, g, or t
atgtaataaaagagagnaaaacncccattacttagttaccctggtanaacttggaattaaatatattatttggggccacaaaaatttttcaccagctggagancctattttccttccttttaaagtttgagggtgtttaaacaagtgaaatcccnaaggcaanccccagatttacatactctctgaaagaccaatttggtatttttgatactttctgaaataaagtaagttttcaatgacaatcaacaaaagggcagtgcaaagcttgaatcttttctctggaggcttgccatggatcacaggaaatacttgtaggctgggaacctacctctaatggggaaaggcccattgattatctgaaggtctcagaaggtatatgtaactaattacaaagcatagccaagactcaaaaataggtgaccaaagttggccaactttccaattaactatgtataacagtaatacttttgtcaactgagaataagttctttttaattcctctagacaatattggggtaacccttggtaattttgcaggtatagtaaagaaaacccaattttctgacagagggcacactaaccctacaa

SEQ ID NO: 85080 - DNA, 513 bp, Homo Sapiens
  misc_feature (286)..(286): n is a, c, g, or t
  misc_feature (329)..(329): n is a, c, g, or t
  misc_feature (334)..(334): n is a, c, g, or t
  misc_feature (340)..(340): n is a, c, g, or t
  misc_feature (369)..(369): n is a, c, g, or t
  misc_feature (416)..(416): n is a, c, g, or t
  misc_feature (423)..(423): n is a, c, g, or t
  misc_feature (432)..(432): n is a, c, g, or t
  misc_feature (439)..(439): n is a, c, g, or t
  misc_feature (446)..(446): n is a, c, g, or t
  misc_feature (452)..(452): n is a, c, g, or t
  misc_feature (472)..(472): n is a, c, g, or t
  misc_feature (487)..(487): n is a, c, g, or t
  misc_feature (496)..(496): n is a, c, g, or t
ccaaatagaaatttagatgtcttgtcggggctgattaacagaaaaagtaattatcaatcagttcacaggaaattatcattagctgtcttactgatactggttctctgtgagcgatcctctttataatttgtagagatgatttatttctaaaggaatggcaatgtgaataaaggtttctatatgttttagttgagaagagccctagagatcagctgtgtgtctcttgttttataattgtgaaaattgaggctcttgggaaggcacatgatttgcccaggggtcagtnggccaagccaaggattaggaggagtgggctcttcttcgttttntgggnggaacntttcttactggcatttggaccattccctnggttttttgtggatttaaccaggaagtccggccctccccggtaattngtaggcncgttccccnttttccngcgggantgggcnccctgggggaacgcaaaccnggccccgttggggtnttccaaggnttccctaacctaccccc

SEQ ID NO: 85081 - DNA, 1814 bp, Homo Sapiens
  misc_feature (1687)..(1688): n is a, c, g, or t
  misc_feature (1765)..(1765): n is a, c, g, or t
  misc_feature (1783)..(1783): n is a, c, g, or t
gggccgcaacgtgtcgagagccgtaagtaaagtgtcgcaaagcagaaggaaggcgggagtcccgactgcaaacattgaggaaagccaggcagtagaggccgctatggcgaacgttccgtgggcagaggtctgcgagaaattccaggcggcgctcgctctgtcgcgggtggaactgcataaaaatccggagaaggaaccatacaagtccaaatacagcgcccgggcgctactggaagaggtcaaggcgctgctcggccctgcgcctgaggacgaggatgagcggcctgaggccgaggacagcccgggtgccggtgaccacgccctggggctgccggctgaggtggtggagcccgaggggcccgtcgcccagcgagcggtgaggctggcagtcatcgagttccacctcggggtgaaccacatcgacacggaggagctgtcggcgggggaggagcacctggtgaaatgcctgcggctgctgcgcaggtaccggctctcgcacgactgcatctctctctgcatccaggcgcagaataacctgggtatcttgtggtctgaaagagaagaaattgaaatctgcacaggcttacctagagtcatcagaagcactatataatcagtatatgaaagaggttgggagtcctcctccttgatcctactgagcgttttcttcctgaagaagagaaacttactgaacaagagagatcaaaaagatttgaaaaggtttatactcataacctatattacctagctcaagtctaccagcatctggaaatgtttgagaaggctgctcactattgccatagtacactaaaacgccagcttgagcacaatgcctaccatcctatagagtgggctatcaatgctgctaccttgtcacagttttacatcaataagctatgctttatggaggccaggcactgtttatcagctgctaatgtcatttttggtcaaactggaaagatctcagccacagaagacactcctgaagctgaaggagaagtgccagagctttatcatcaaagaaagggggaaatagcaaggtgctggatcaaatactgtttgactctcatgcagaatgcccaactctccatgcaggacaacataggagagcttgatcttgataaacagtctgaacttagagctttaaggaaaaaagaactagatgaggaggaaagcattcggaaaaaagctgtgcagtttggaaccggtgaactgtgtgatgccatctctgcagtagaagagaaagtgagctacttgagacctttagattttgaagaagccagagaacttttcttattgggtcagcactatgtctttgaggcaaaagagttctttcagattgatggttatgtcactgaccatattgaagttgtccaagaccacagtgctctgtttaaggtgcttgcattctttgaaactgacatggagagacggtgcaagatgcataaacgcagaatagccatgctagagcccctaactgtagacctgaatccacagtattatctgttggtcaacagacagatccagtttgaaattgcacatgcttactatgatatgatggatttgaaggttgccattgctgacaggctaagggatcctgattcacacattgtaaaaaaaataaataatcttaataagtcagcactgaagtactaccagctcttcttagactccctgagagacccanntaaagtattccctgagcatataggggaagatgttcttcgacctgccatgttagctaagttttcgagttgcccgtctntaatgggcaaaatcattnactggcagatcccaaggaaagagctgggaaa

SEQ ID NO: 85082 - DNA, 435 bp, Homo Sapiens
cccatattaaaagaaattatgcaagtatcagttgcaaataaagctgtgtgatagttgcattcactgttgtttatttccccaatagctatgctttatggaggccaggcactgtttatcagctgctaatgtcatttttggtcaaactggaaagatctcagccacagaagacagtaagtttacctttgcatgttttacatagcttttaaaaaaagttttattttgaaattattttaaacttttgaaaagttgcaagaacagaagagctatcatatgcccttctaaatgcaccaatttttagtattttcctcgcttggaatcaaattttatttttctctctgaaccattggagagaaggatacatacattaggctcttttaccctttcatactttagtatatatttcctaagaagaatattttcttacataatcataga

SEQ ID NO: 85083 - DNA, 387 bp, Homo Sapiens
tttaacttaaaagtagaagtcgctatattaatactaatacagtagacctcagagcaaagaattactggagcaaagagggacattacataatgatttttaaaaattaatttactatgaagacaaaatggttttacatgtgtacacaccaagagcagagccttaaaatgcataaaccaaaaccaataaagctgaaagaagaaatcaacaaatccacaattgtaagttggacttcaacactcttctcagcaattgataaaactactagacataattttaaaagttataataatcaaaaaatggagtgaataatataaaaacaaattaagagtgtgtttgattatgagaaatgtcatttgcagactccttcctttggcagaccttgattgg

SEQ ID NO: 85084 - DNA, 995 bp, Homo Sapiens
  misc_feature (305)..(318): n is a, c, g, or t
  misc_feature (457)..(475): n is a, c, g, or t
  misc_feature (477)..(477): n is a, c, g, or t
  misc_feature (479)..(482): n is a, c, g, or t
  misc_feature (485)..(492): n is a, c, g, or t
  misc_feature (495)..(499): n is a, c, g, or t
  misc_feature (501)..(501): n is a, c, g, or t
  misc_feature (510)..(510): n is a, c, g, or t
  misc_feature (512)..(514): n is a, c, g, or t
ccacgcgtccggtaaaagggaaatattgttatacatttattaaatatacttcccccatgaagtgaaaaggtaattttgctgaatgttttaagttgaagttacttcatggatgtcatacccatgaagtgcatttggatgagatagaagaaattgttttttaaaaagtttaagtaccaaaggtagtctagtctagaacgataagttaatacgtgttggcttttctaatttgtactgtaacatccttatactttctattttaagtatatctgtttcttaagtaaacaacttagatattttccacaccnnnnnnnnnnnnnnctgatgcagagttcaggttaatattttactgcatctgataatgtattatacgtttgaagcctagtgacttttcattttgacattcttgtgatttcatatgctgtattcttcaagcaataaaattgtgatgtgttttatnnnnnnnnnnnnnnnnnnnanannnnaannnnnnnnggnnnnnangggggggcngnnngaaaaagaggctcggggggggcccagggtgagggcctcctcaagggtgtcctggcccagggggggcgccctttttttctttgccgcaaggttctccccccgacggggggccccccttttttggaacggggggatgacgggggaaacattgtggggactcttgggggaatggagcaccaaagggaccggtgagaaagaaggtgtatggggggagacacctttggagacgagggaccgctagggaggttgttgtggggggcgcacccccgggcgggcgaaaaaacgtttttttcggggggtaatagtgtgggttttacaactcgggcggggcgggaggttggtgcggcgctttaaaaagcggtggtttccgcctcgcggggcgtaagagattgcgccgccgtgtaaggcctcgtgggtttcgcaggggggattgttcttttgttttggatttttcttgtgggatttcacgggggcgtccttcg

SEQ ID NO: 85085 - DNA, 568 bp, Homo Sapiens
  misc_feature (443)..(443): n is a, c, g, or t
  misc_feature (481)..(523): n is a, c, g, or t
agaggaagacctgggtggcacaggcctggctggacgcagggctcacagagcgtcatcagcacttcatctcttcccctgcgggacctgctgtcctctgcgttgcacacaccccccgccaggctcatccctgtatcctccttggaggaaagtgccaggctggtgctacttggccctgcctgggtcacacgcctgcctcgggatgtggaggatggtcagcccagccacagcacatggattgctatgtgaaggatgatgttccacaagaaaaccaggacggcttcaccagggaggcaagagcagcagatgcccatgacagagggtgtatactctgaataaaagaatttggatttttaaaaagagacaggaagaaaaggacttccaaactctagaaagtttaaaactagtagaatgaaacatattgtgtataaatgtaaagctctttnttgagattaaatatacgtatcagttaaattttatttannnnnnnnnnnnnnnnnnnnnnnnnnnnnnnnnnnnnnnnnnngacccaagtacaggataaagatgaaattaataagtactctttaca

SEQ ID NO: 85086 - DNA, 711 bp, Homo Sapiens
atgagtaaacttgggctagggtgagccctaaagcaggtgggggcggggagagggtacttgcagtgagtgaggatagttttaaggtaatcaatagttagatcttcattttacaaatgggcctcccaacccaaagcaccctgccagagaggcatctgaggacacagcccccctccgcttccacctcctgacctcacccagctccccctccccaaaagcgggaggaggtgattggggtgtggagacagcaagcaccccatgactaggtattgatcctgcaaaccagaaagtttccagttcttggctttaagcagggcagatgaaagccctacattcgttgccccctgagagaccattaaaatcacattgatcgttactgaccataggacccacgaatcctccccatcccataaggcaggcattgccagatgacagatgggggaaactgaggcacaggaggctgtaatagcctgcctgaggttgcacacctagtaaatgatggagcagggctgggaacttaaaagtgtggctttcatcgtgaattctgggggtgtacctgcgaggactttcacagagtgggtaggatgactggcaagtcccgggttcccatccacttgtccaggcgagctgtttctcagcacttacactgataatcagagaccgaggccattgggctggccgctcttacgcgggtgctaacaaagggactcgaaa

SEQ ID NO: 85087 - DNA, 606 bp, Homo Sapiens
agaaaataagcaattaggggttagatgcaatatgaatataaaatagttctgtaaataccaaatattatttttagttctggaagttaaaaatactctccatagtaacgtgtgttataataataaatatttctttctgtttgacttttttaaaacttctacaatggtaaaagctattttaatccatgttagcaatttaattcctattaattcattttactatcataatagcaaagtattcagaataaaagaggtttatatcttctattaaaatgcagtaatactattcaaatctaatttagctggaagcaacatgggagtaaagtaatcatccaggggacccaccataaaggacattggtaaaacatttacacacgtaaacacacgtgcaggcacacttggaacaatatggacccacttcagcagacatcttctattgccatgctgagctgtttaaagttttaagaagaaaatctaagtatggaagtagaaaataagacttgttcttttggtggatatctcatttttcttgagtatttgtgctgaacattttggtgtatgtctatgaactaagaatcaagtttttgtctcattaaatatacatatatg

SEQ ID NO: 85088 - DNA, 766 bp, Homo Sapiens
  misc_feature (516)..(534): n is a, c, g, or t
aatcctgtttggttaattgtagcctccatacagtggggtcttctctgtggctggtagacaccaagctgctgtgactgaccacggtaccacgggctgccacagcccctgctctgtcttagattatggtgctttacaaagagagtggtccatgaccacacttagtgagaaggagccacaagttgtggctgagagttccctgtgaacttgagtagttcatagagtgctaaggtgacactccaccaaccagagtgagagggcagataggcaggattctatgagtggttatacttaagggggacaaaactgcccaagaagaatcttgagaatacactctttcaaggtgggggagatactctttagagggtacactgagctaatactaccagttctttatgagcactggaatgtgtttgtaaaaggagtcctaagtttagcaaggtagtctacagaaccatgctcccacattatagataaagctgcttaaacttaaaagtccacaaagctacgccgaccagnnnnnnnnnnnnnnnnnnncaaacaagaaaagcaactattctgagaccttttctgcccatcagttagatgatttaggttaaaaagaaaggtaatattgcacatgcttttaagctgtgtaacatacctgaggttatcaccagggtaggacagggtgctactaccatgtcatcttttccacaatcgtactgggttatttacttctaaatagaaacttttttttcttaaaataaaaataatttttcttggaaaa

SEQ ID NO: 85089 - DNA, 357 bp, Homo Sapiens
  misc_feature (268)..(268): n is a, c, g, or t
agatttgaagcctagcaacattgttgtgaaatcagactgcaccctgaagatccttgactttggcctggcccggacagcgtgcactaacttcatgatgaccccttacgtggtgacacgggactaccggggcgcccgaagtcatcctgggtatgggctacaaagagaacgttgatatctggtcagtgggttgcatcatgggagagctggtgaaaggttgtgtgatattccaaggcactgaccatattgatgcagtggaataaagttattngagcagctgggaacaccatcagcagagttcatgaagaaacttcagccaaccgcgaggggttttttcagacaccgagacttgaacgtatg

SEQ ID NO: 85090 - DNA, 383 bp, Homo Sapiens
  misc_feature (307)..(307): n is a, c, g, or t
gtaaaatattgagccccacttggtctaaaattcaaaaagaagaacgcctgtccatcgcctttttataagtccttctctccacacctaaaagcagctgcagctggaagggcacaaattccactgtgtaaaataaaatattaggggcaacacacttcatcaaggcagcaggaatgagagagagcagagaagatcaaggatgaagtcttgggtactgaaaaattcagtgctgggcagaaaaactgacagggcagtacaagtaacaaacagaatccaagtggggtggcccttgttgcacagagctccaggntgacctcttggagagacatgggcattcacatggaaagctaaaaacgggaagctccaagttttcattacttcaacat

SEQ ID NO: 85091 - DNA, 241 bp, Homo Sapiens
atgagccaccacgcttggccacgatgacttcttctgcaatccagcctggggtgacaaagtgaaaccctgggctcattaattaactaatttcattcattcacaaataaatagatagggagacttgcactggggaaataaagagaccctgtctttaatctccacttcagaacttggtttttttgaaactgggaaaataagatgattttgttgagggagccttcccaaatttaaattgtgtata

SEQ ID NO: 85092 - DNA, 557 bp, Homo Sapiens
gggctaatgccaccaggttcccaaaccagggcttgattaggtccagtcgtcctataagggtcttgtcctttgtagcacaagcctttgtcctaagctggtcgccatatcaggtggtgaccttactagcccaagtcagaatccgtgagttaattgcaaggcatgcacaaagaaattggtattgcagtgcatgtgacaagtgcccctggccttcttcaacagctgcctcaaccccatgctctatgtcttcatgggccaggacttccgggagaggctgatccacgcccttcccgccagtctggagagggccctgaccgaggactcaacccaaaccagtgacacagctaccaattctactttaccttctgcagaggtggcgttacaggcaaagtgaggagggagctgggggacactttcgagctcccagctccagcttcgtctcaccttgagttaggcttaaccacaggcatttcctgcttattttaggattacccactcatcacaataaaaaataaagcctttgtgtcccctgatttggggagaattaacagatatgagtt

SEQ ID NO: 85093 - DNA, 417 bp, Homo Sapiens
  misc_feature (31)..(31): n is a, c, g, or t
  misc_feature (46)..(46): n is a, c, g, or t
  misc_feature (55)..(55): n is a, c, g, or t
  misc_feature (68)..(68): n is a, c, g, or t
  misc_feature (123)..(123): n is a, c, g, or t
tggattgttgagggaacccctccccaaaatnaaatggtgtaatagnacacccaangctgaatggttanggccttccccaaaggtccgatgtggggagtgggccaacactttccctacgggaanttgggtaaacagttattgggatgaagccaacaacaacaaaaaggaaaaaaatttgcctattcaaagctgtgtcccacttttggcctgcggtgtgcctttaagaaaacaaccttaaatcagtcacaaagtggatgttttattcccattaggaatgtctttgtaattgggaactgcatgctttgaaccaaagactcagcaaaaaatgtataactgtaatcaactatatgttgtaggactacaaatggattaatggtaaatatctataaaatttatggcaaaatgttattctcaaaa

SEQ ID NO: 85094 - DNA, 1604 bp, Homo Sapiens
  misc_feature (119)..(119): n is a, c, g, or t
  misc_feature (249)..(249): n is a, c, g, or t
taactggggggtggaaagggtcccccacttgcaagtgtggggtttaactgtttgggtaaaagcgaaagtcccaaggcagtttccctgtgcaacattcccacatggcctgcatgaggcgnagtgaaacccatgtctttgggcttttcccaggcctctcatcagccgttgcttcatgatggaaacaaatttccttattgctcagttcgccattgccatcacagtcaaagagtgcaaacaccacatcacacnacgtggtctgagagctccactttagccactgtcctggccacctgctgcatggtcactttatcaagagatgctccagccatatggtaaaaactcaatgcagtgtccacatcattaatgttctttaggaaagtaaagaagttctccacctcctgaaatgtcagaccctttccttctttgaagtgcttcttgagctgcctctgcatggcggtcagcttcttggactgcaccccactgtaggcaagtagcatgccaccaaactgcctctcagtaattctcccatccacagggtcatggcgttcaaactcaagcttcagaacatcatgctgcagtttacgctgaaattcgaggaagtttttgattgtcagctttcccttcagatcagctccaaaaaagtaggttgtgagggctgaacacaagccagacttgagggtgttgccagtagttggacgatctctgtggcgcatacccatactggttttgggagcgaatgatgctctgaacctgttcaaattcttccatatctacttctccatctccattcaaatcaaacatctggaaggcaatttcaaaatttctctgaggagtggaaagaacagttgtgaggaaaatgtagtctgaaaaggatatgagcccacattctccaagggtgtaaaatatactgccttcatcagcaaatttttctcgttcctgggaaattttctttccatcaaagcgttttattatatattgatccagacccaagtgttctggttgtttttcattgggtgttatggatcgcacaaaatcttctggtgtcataaacacttctgcttcaccaggctcactgatgactttcaaggtggcaaaatatcggaagattttgtctggcgtggagtaggctcgaatcctattctcatattccatcacttttctgtctctgaatccagaacgtttcttctttttctcttctgggtgaggggcaagatctgcagtctttttctcatggttacaaacatccccttcatctttattcttccctttatcaccgatgtcactttttaggttgtctacacatggtggagattctgcatgggccctcttccacaaaagaccagtacttgcagttactgcagatgctcccaggaaagccaccatcattagtcttcgccggatctggatgggctgtgatcctccatggtaccatcgagaacccacagccagttctgccaaagcagaaagtgagttcagacgaaacatcgcgtccaaacacgagctccagcagcctctcggtcaaagccgcccacctctgacagccatagagatgaaacagcggagacaaacctccaccccctccgcccactctcacgtgacgtccc

SEQ ID NO: 85095 - DNA, 887 bp, Homo Sapiens
  misc_feature (78)..(78): n is a, c, g, or t
ctggtaccggtccggaattcccccgatatcgtcgacccacgcgtccggcagaactggctgtgggttctcgatggtacncatggaggatcacagcccatccagatccggcgaagactaatgatggtggctttcctgggagcatctgcagtaactgcaagtactggtcttttgtggaagagggcccatgcagaatctccaccatgtgtagacaacctaaaaagtgacatcggtgataaagggaagaataaagatgaaggggatgtttgtaaccatgagaaaaagactgcagatcttgcccctcacccagaagagaaaaagaagaaacgttctggattcagagacagaaaagtgatggaatatgagaataggattcgagcctactccacgccagacaaaatcttccgatattttgccaccttgaaagtcatcagtgagcctggtgaagcagaagtgtttatgacaccagaagattttgtgcgatccataacacccaatgaaaaacaaccagaacacttgggtctggatcaatatataataaaacgctttgatggaaagaaaatttcccaggaacgagaaaaatttgctgatgaaggcagtatattttacacccttggagaatgtgggctcatatccttttcagactacattttcctcacaactgttctttcccactcctcagagaaattttgaaattgccttcaagatgtttgatttgaatggagatggagaagtagatatggaagaatttgaacaggttcagagcatcatttcgctcccaaaccagtatggggtatgcgcccacagaagatcggtccaacttacctggcaacacccctcaaagtctgggcttggggtttcagccccttcccaaaccctaccttttttta

SEQ ID NO: 85096 - DNA, 1168 bp, Homo Sapiens
  misc_feature (1045)..(1054): n is a, c, g, or t
gggaccggtccggaattcccgggatggtttgtctccgctgtttcatctctatggctgtcagaggtgggcggctttgaccgagaggctgctggagctcgtgtttggacgcgatgtttcgtctgaactcactttctgctttggcagaactggctgtgggttctcgatggtaccatggaggatcacagcccatccagatccggcgaagactaatgatggtggctttcctgggagcatctgcagtaactgcaagtactggtcttttgtggaagagggcccatgcagaatctccaccatgtgtagacaacctaaaaagtgacatcggtgataaagggaagaataaagatgaaggggatgtttgtaaccatgagaaaaacactgcagatcttgcccctcacccagaagagaaaaagaagaaacgttctggattcacagacagaaaagtgatggaatatgagaataggattcgagcctactccacgccagacaaaatcttccgatattttgccaccttgaaagtcactcagagagcctggtgaagcacaagtgtttatgacaccagaagattttgtgcgatccataacacccaatgaaaaacaaccacaacacttgggtctgcatcaatatacaataaaacgctttgatggaaagacagagaaaatttcccacggacgagaaaaatttgctgatgaaggcagtatatcttacaccccttggagatgtgggcttcatatcctttttccgactacatttttcctccacaacttttctttcccactccctcagagaaaatttttgaaaattgccctttccaggattgttttgattttgaaatgggaaaatggggaaaaggtaagaatatgtggaagaaattttgaaacaggggttcacaaagcattcatttccgcctcccccaaacccaggaatgggggtaatggcggccaccagaagaaattcggttctaaactataattgtggaaaacacaccccttcaagagcccctgggcttttggggtgtttcaaagccccttccacaaaacccttacannnnnnnnnngtgagagtctggaatctctgaaagaggggaaaaacgtttgcacaatattccaaaaaacactctccccctcccaaaaattttccacgccggtaaaaaccccgtgccacacctatt

SEQ ID NO: 85097 - DNA, 475 bp, Homo Sapiens
  misc_feature (137)..(139): n is a, c, g, or t
agtgataaccccgtatcttacaggactgactttgactcaataaaccactcagcctattattggaaagtgccataggccttgagaaagtatagttacatcctcacaaatatatgaagttaagtcactacttacaaggnnnaaaaaatgtaaatacatttttctttctggaaccgaactcttattatggggaaataatagaaataaagaaaatgtaaaagcatgaaatggaatgtagtcttgatcaaacatttcagcagacctcaatttgcttacaatctgtactcaaaaagtttataattcaatcagaattcaaaaagtattttgtgtgtttgtgatgtattagcatatacacaaaacaaatgaggggaatgtatataatcttggtgaaaagttgtatgggagttttttgtacgattcctgcaacttttctataaacgtggcattatatctaaataaaaaattaccaaaaaacata

SEQ ID NO: 85098 - DNA, 597 bp, Homo Sapiens
  misc_feature (501)..(501): n is a, c, g, or t
gctatttccttctccttctgcagagaactctcctactgacactcgagtaacaaagcttttcatatgtggtggtccactttctttaataacctcaaaactaacaggcatatttcacttcagagcaatttcaaacactaagctgatctcagacttatttgcatctttgtcatcatccatatcctttcctgattcaccattctaaggagatctttctggaataggttcaatctgcagtgcttggagggctttcattgcagcattgtgtctagcagcttgtcgagtctttccttccccaaaaaattcattatttcctacagtgagctgaacataaaagatcttaggcactgggcaatgatacctctgattatacatgacccgaaagttgtaattagctctataatttggggaatgggctttgggatctaatggcctgtagatggcaggctctccccttttcatagcaagcccattcagttccacagttggagttatactgcctgngttattgttaacattacttttgggtggcttctgaactggtttgggaagcgtagattcagtcaaagctctattggcaacagcctgctgagccttctt

SEQ ID NO: 85099 - DNA, 889 bp, Homo Sapiens
atgagacgggcttgaaaaatgaggggagagttctagtccgtcatagtgcctggtgccccctgctgtggggtcgggagggatccagaagctcgctgtcgtcctggccagagttgcagggctcccctctgtgtgcctcccagggtgtggtgctgcagcaggacagctacattgaggaccagaaactggtgctgagcgagagggcgctcactcgcagcttgtcccgcccgagctccctcattgagcaggagaagcagcgcaccctggagaagcagcgccaggacctggccaacctgcagaagcagcaggcccagtacctcgaggagaagcgcaggcgcgagcgtgagtgggaagctcgtgagagggagctgcgggagcgggaggccctcctggcccagcgcgaggaggaggtgcagcaggggcagcaggacctggaaaaggagcgggaggagctccagcagaagaagggcacataccagtatgacctggagcgactgcgtgctgcccagaaacagcttgagagggaacaggaggcagctgcgccgggaggcagagcggctcagccagcggcagacagaacgggacctgtgtcaggtttcccatccacataccaagctgatgaggatcccatcgttcttccccagtcctgaggagcccccctcgccatctgcaccttccatagccaaatcagggtcattggactcagaactttcagtgtccccaaaaaggaacagcatctctcggacacacaaagataaggggccttttcacatactgagttcaaccagccagacaaacaaaggaccagaaaggcagagccaggcccctgcgtcacacctctgactactacccgcctatttggattaacaaagccaaagaaaaagaagagaga

SEQ ID NO: 85100 - DNA, 900 bp, Homo Sapiens
tttggggacactaaaggttctgagtccaatgaccctgatttggctatggaaggtgcagatggcgaggggggctcctcaggactggggaagaacgatgggatcctcatcagcctggtaatctggatgggaaacctgcacatatccaagaggaagggttttcacttggaagcctgtcagcgtccggtgatgcccaactcgaataaatccctggccgtgaattcaacctgcgctgtgtctggctgggtacttacccacctctgcgaactctacagagctcacgtctgtggactgcatagagcttgaaggtttcattagctgccctcccccaagtagtatcgtatagacatggttaaaaatatcgcctttaatgctgttaatacttttactacatacacgtacgccggcgttgtaaaaaaccagtagtacctttgatggggcgacttagaaaagaattcccattccctgaagaaacaaggagagctgcttaagattgctctacacagggatgcagataattattttaaggcaaagagattatagaagcctgttccggttagaggataagtggaaaagccgagcttacaccaaagaatcctagtcacaggttaaaccagagataaagaggatcatctactctgggttctcttagctgcctgggaaccctcctttgtcaaagcaccgattttattgggatgggggtggaatccctccttatgtcataaaaagcaacacatggcatttgctgctccccacccccaatatatttggcaacatctgcagaaagctacaactgccccctacctggaagctgtcagtataattttctttcgtggtccaagatcaatcaatccccggccgtaatggccgaattcccgggcatatgtccggtaccgtcgactg

SEQ ID NO: 85101 - DNA, 672 bp, Homo Sapiens
  misc_feature (118)..(118): n is a, c, g, or t
  misc_feature (129)..(129): n is a, c, g, or t
  misc_feature (144)..(144): n is a, c, g, or t
  misc_feature (168)..(168): n is a, c, g, or t
  misc_feature (176)..(176): n is a, c, g, or t
  misc_feature (191)..(192): n is a, c, g, or t
ttccactttcgttttcattataagaatgaaaaagccctcacaaaccatgaaaaacttgccagatttcaagcacaattgtgcactggtaaaaaggaactgccctcagatgatacagcanacattatctgntaaaacagatgatanaaaaaatcttcagttttcctgaangaaagtanaaataggcaatatcnntgatactaaagaggtatgtctgcaaaccaaggaatggtgatcttcattaacaatcccagcgttcagacatctctagcagcgaacactttgaccattaccagacatgctgagacaaagcagctaacagaaatgccacccagtgtcttaaaccagcttggtgtcaacaagcttaaggaaactggcagaagctggatggaaaagtaccacttactattggggaagtggtgatcttgttcagaattttgatgaagcttccaacagtgaggcaaactgaattgattcagcttctaaaaaataatacaatttcaagaattttaactgcttttaaaatttttgttttatatatgataaaatgtaagtctataaattccaagacccttggacactgctttttaattattgattatatacagttatttattggcaattaattagccagaaaatagtttaaaacaaagataaagcctttgcctagttaaa

SEQ ID NO: 85102 - DNA, 640 bp, Homo Sapiens
ctctccttcatcacaggccggggattccttttgtgtttctgtataacatcgatgacgagctgaagctgttgtcacttcactgccctctttggaatttcttcattgtgctgactgattctattaggggctaacaataaaggcagtctacccactactatcatgcttgggaaacaagcgtcagcttgtacatatgacaagagaggaccctgaatacaccctctcttcatcagcccaagccttactgaggtgggatgaagacctcattctctgttctttaaaacatgtttcgtgaactaatattggtccatgtattttttgtccttttgggactctaagtgggtcaagaagcaaaaacatccatgtgttgtttggggggaattggcaccattttttcctgactatgtttcaattaactaaagaataaatgatgaagaaattctccttgtagcacaactgtatgctgtgtaaattggtgtgagctcaaagcccagtcatgtgttttacctgtgggtgactctgttgtagaatggtcatattactgcatatgttatcatgacaacttgtgagtttgagtttatatttctcaaagaacaagttacccgtatatgcaacattgcgccattaaaagcttatttctctg

SEQ ID NO: 85103 - DNA, 605 bp, Homo Sapiens
aaattgtcattatatatgacttgtatggcaaacctggaaactttctctcacaggggttgtctttatttgaagtgactcaagtttgtctggtgcaaaaagcctttggatgtttctcctaaacaattatagacgattgtttagcttcacaaagccgcctcaagtggcattaacagctagggcagacaagaagctcaccaataaatggaaaaggaaaagctgggccatgagatgtcataggggactttgaaaagctccatcgtattcctgggaatctccaaccccactcacacgatcagggctgtgggcatgccagagaagacttgagaaggccctgtgcttttggttcttactgagtaagcaggcagcgaaaaccaaggcagagttgcaaactgcctgcctgggtgatgaaggcatcccctaacaaaaacacagagccccttgacaaaggctgggaggcttaccagttggaagcatttaaggatatctctgtccattaacgagctgaccactaagctaaccaaacagagacttcagtggccaaacacaacaatgaatatcggatttacaaaattatttcagcaaaaataaacacaacaaacagcaaa

SEQ ID NO: 85104 - DNA, 444 bp, Homo Sapiens
  misc_feature (97)..(98): n is a, c, g, or t
  misc_feature (194)..(194): n is a, c, g, or t
  misc_feature (201)..(201): n is a, c, g, or t
aaagtattgttcctggatgtgtttgtgagggtgtttccaaaggagattaacatttgaagtcagtggaactgggagaggcagaccccaccctcagccnntgggtgggccctgtctaatcagctgccgatgtgtgaaagggaggcatggaagagaacagaccctgctgagtccttctggccttccatctttcctcnccatgcntggaggcttcctgccctggaataacagactccaagttcttcaacttttggactcttggacttatatcagtgatttgccatgggctctggggccttcggccacagactgaaggctacaatattggcttccctccttttgaggtgttgggacttggactggcttcctggcttgcagacctattgtgggacttcaccttgtaattttgtaagtcaatactctttaataaactccccttcatatata

SEQ ID NO: 85105 - DNA, 673 bp, Homo Sapiens
tcgtggcagctcttaagtatatccatttgactggatcataaatcagtacactgccagtgagacagtggtatatgcttatttgtaagagaacaacaaatgatatataaaatactagttctagggctaagttcactattaatctaatttaatttgtgactaaacactctggatagacaaaaaagtattctttgatatgacatgttgcaaaagtcacctgtagctatgactataattgagtgttcttaatagcaaagataactattcaaatttttaaagttcttatttaggctatttgatgataaagggatgtacctgtataaaatatatatatatttattaaaggacctaattaatttttacaaaaggattttgttttgtatagtactaatctgcaaatgagcttccctagctggaatggaggtttgagagatagtatagtacagtggttaagaacaccgattctgctagtctgcttaggttcaaatcctggttctactacttactagctgggtgactgtgggtaagatatttaacctctctacttccgtactctgtaaagggataataacagtatctacattttggggtggtaatgattaaatgagttactacttgtaaaatgcttacaacaaggcctgccagaccctgacacatagtaaaagcagtatatgtg

SEQ ID NO: 85106 - DNA, 726 bp, Homo Sapiens
  misc_feature (310)..(323): n is a, c, g, or t
gtgtttctggaagtcaaaaatgggaaagcaaaaagtagctgtcctccctaaagagctttagaagatagcttaacctgtaggtacatgttatgaaataaacacatttctaacaatacaagggagtaggggcagacctgtgttgagtatttgtgtgggttcttaattttgaaggacctccaatcactacattttgttaatactgccaataaaatcattttcaacttattttttaaagtaggttttcttactttggtggaccagaagtgacagattgttatatttaggatataggcaaatacagtaaaagttnnnnnnnnnnnnnncctgacccaaagtatactctgatagactatattatattcaattttgtatccccagtcgagaacatcttgtaagccttcattaagggccacctgctgtctgttgaactagactgaacaaaatatattttctcacaagctccatccctttttctttaggacatgttatatataatccatctcagaagttgaagatgtgatgttgctcggcctttggaataatttttaaatctgtaaatgtctatatgagcagaaacaaaacattgtgtaacatgttttaagcattattgtaattcctgtgttaacagtttgtgtgtctgctgctctggttttgaaacatgtttgtatatagatacaggagttggcataaattttgttaaataaagcaacaaaaattttctttgca

SEQ ID NO: 85107 - DNA, 235 bp, Homo Sapiens
tagagcggccgcctactactactatacggctgcgagaagacgacagaagggggtaaaagcgcggcaccgacaccagctgtgtgcagcagtggcggcggcggccgaaggagaaatagaacagcgcaggcaaaagaagaaaggcgcgggctgggtgggaagaggattcggactcgtcacactgcagagcagcagagcgagaaaggatgagaagaggcagagaaggcgacggcagaag

SEQ ID NO: 85108 - DNA, 1399 bp, Homo Sapiens
ggcacgaggatcgcggccgcagtttttccttttttcttctgccgtcgccttctctgcctcttctcatcctttctcgctctgctgctctgcagtgtgacgagtccgaatcctcttcccacccagcccgcgcctttcttcttttgcctgcgctgttctatttctccttcggccgccgccgccactgctgcacacagctggtgtcggtgccgcgcttttacccccaagtcgttcccgcagcctatggcccaggccgccttgggtatttctgctcaaggtaaccacatccctctttaaaaattccgccgaaaaagagaagacgctttacccgactctttgggccgttatctcacggcgaactttctgaccaagtatacaactacccagagggcctaggagaagtgctgtatagagagcagttcgacttcaacgctgagccaccttgggaacctagctgatgataggggggttccatctcccaacttgtccattttgttgcatattctaaggacccagacataggcttggtggcccgtctcttgtctttcctggtttatgactttcggctttgtggaatacggctgagatgaaaggatttattgatgatgcaaactactccgttggcctgttggatgaaggaacaaaccttggaaatgttattgataactatgtttatgaacataccctgacagggaaaaatgcattttttgtgggagatcttggaaagattgtgaagaaacacagtcaatggcagaatgtagtggcccagataaagccattctacacagctgaagtgcaactctgctccagctgtacttgagattttggcagctcttggaaccggatttgcttgttccagtaaaaatgaaatggctttagtgcaagagttgggtgtaccaccagaaaacattatttacataagtccttgcaagcaagtgtctcagataaagtatgcagcaaaagttggagtgaatatcctgacatgtgacaatgaaattgaattgaagaaaattgcacgtaatcacccaaatgccaagattgtttttcattacgttcacttgattcatccgtcgctggatttgggagcactggcaacataatcaacacacttcctacaatcttcaggcttcacatgtgctgatgatgatgtaaaccaactctgccccaatcatctcccccttctcttaagggtcttactacatattgcaaccaaagataatattggacggcgaacaacggtaacctggaagttttggcactacccccggaacgaactggtaggcattctccttggaaatgcggctaagggaaactttgaatggtcccaaataaattggcgggctaaaattttcaaggtctccccagggcgcttggccaaaagaaattctccaggcaattatgc

SEQ ID NO: 85109 - DNA, 831 bp, Homo Sapiens
  misc_feature (102)..(102): n is a, c, g, or t
agttattcaataacatttcccaaggtttgtttccttcatccaaacagggccaagggagtagttgccatcatcaataaatcttttcatctcagccgtatcccncaaagccgaaagtcataaaccaggaaagacaagagacgggcccaccaagccctatgtctgggtccttagaatatgcaacaaactgctacaaaggcttctacagttgattgtacttcagaagaaactgatacatctctcaaataatcacaagataattctggcagcaacagcccccttgacaccaagctggatgaatatgagtcttggatttctgaagtgaagacctccatggacaagttgggagatggaacccccctatcatcagctaggttcccaaggtggctcagcgttgaagtcgaactgctctctatacagcacttctcctaggccctctgggtagttgtatacttggtcagaaagttcgccgtgagataacggcccaaagagtcgggtaaagcgtcttctctttttcggcggaatttttaaagagggatgtggttaccttgagcagaaatacccaaggcggcctgggccataggctgcgggaacgacttgggggtaaaagcgcggcaccaacaccagctgtgtgcagcagtggcggcggcggccgaaggagaaatagaacagcgcaggcaaaagaagaaaggcgcgggctgggtgggaagaggattcggactcgtcacactgcagagcagcagagcgagaaaggatgagaaaaggcagagaaggcgacggcagaagaaaaaaggaaaaactgcggccgcgatcagagcctgaaagtgtgagccc

SEQ ID NO: 85110 - DNA, 1322 bp, Homo Sapiens
  misc_feature (989)..(1009): n is a, c, g, or t
gctggtaccggtccggaattcccgggatatcgtcgacccacgcgtccgagcagctcctccacccccaccacctgtgatccgaaatggtgccagggatgctccccctcccccaccaccataccgaatgcatgggtcagaacccccgagccgaggaaagcccccacctccaccctcaaggacgccagctgggccaccccctcctcctccaccgcccctgaggaatggccacagagattctatcaccactgtccggtctttcttggatgattttgagtcaaagtattccttccatccagtagaagactttcctgctccagaagaatataaacactttcagaggatatatcccagcaaaacaaaccgagctgcccgtggagccccacctctgccacccattctcaggtgaagcctggcttggtcccgttcctcaggaaaaggatggaccttctcttcttctcagatggtcccttccattcccctgaaacctgcatgagagctcctaacatgtttctccaatgcaatcaagccctagactccaaatgtcctcccagctcacctccatctatgcatctcatctctggatttggtgatcagactctatattgacagtaggatctcaaaccctgcatccatccttcctccagcaagccctgctagccacatgaggaacaagtttccgtgtcttctgccttcctcttggggaaaggtgccttgttgtgatgaattaactcactgttaaggcagggtggagaatggtactccttccttctcctgtccactgtgggggaagcttggcaggtatattatatttcatcatttaggaggctggcatgacccaggacttatgggtgggaggggagcatttttagtgaagcaagaaaggagtttgccaagaagtgatctgttttaaaggtcatatttggagaaagggcaaggaattgggtctgctttatttttgggggtattttgtttttgttctcacctgctgnnnnnnnnnnnnnnnnnnnnngggataaattggatataaacactaaatactaatcagttgaacttaacatttaataaaaagaaagggtgaaataaactgaagaccattttagaactagtcagttctctgcagcaaagggaacaggagccatttgaaccctctgggacccctcaccccactgcttcagggtgctaggctgagggatgtttttcctcccccttaccgcccatgcccttgaaagaaaagtcactttttgtggagggcatcattcattcctgattcacaaaccccaaaaacctctggtgggagataggaagatagggcgtgggctggg

SEQ ID NO: 85111 - DNA, 546 bp, Homo Sapiens
tggaagagatcagaagagagagaaatgatccatgcactggtaaaaagaggcagggatgggttggtgtacatatgccctgcagacaaatgccacactgagtcacacatgcactggtggtcctgctgtccgtgcagaaaagttcaagagcagagtcctccacaatccttcaacctgactttctggctgtatgagttagggatgggagggagaggcaattatattttaagtgtctcctttctagaagaactgagtgttctctgaaggaccattccagctgcagaagtacttctgaatgggtgaagaaagggcactaaaatgtaccaaaagattttgggcccaagtgacatccagaccatttttcttttctattaaagtaaactgaagtttagataagggctagattaaattcaaggaaactcctgataaccatgttaagatcaaccacagtaggctgagttttactgaaaccttggtcctcttaagctactacatactgattctattataagtacattttgattctccccagaaactaaaaatacttaa

SEQ ID NO: 85112 - DNA, 402 bp, Homo Sapiens
ggctctcctcctttctaaccctgctgctgatttggaattaccttgccaagcccctttgtgccttatagtgaactttctctaagggacctgtcatctcttatcattgtttatccattttctagattctgaacccaagaaagaacaaagttcaagattttccatgtctttgtaacacttagccctgtgcaaatcagagtatgtgagtggaagaaggggtgagtcctaactgtacatctcggatataacaaatgtgcaaattctgattgattgccctgtaaaatgaattattctcatgcagtgctctacttgacttttatctttgaattcacaactaaaaacccatagcccagaaatctaaaaaaagtaattttagtggagcctttgaaaataaaagaccattgg

SEQ ID NO: 85113 - DNA, 1051 bp, Homo Sapiens
  misc_feature (66)..(100): n is a, c, g, or t
  misc_feature (203)..(211): n is a, c, g, or t
aatcactataggggcccgctgatagcgaacgacgagcgcagcgagtattgagcgaggaagcggcgnnnnnnnnnnnnnnnnnnnnnnnnnnnnnnnnnnncagtcgacggtaccggacatatgcccgggaattcggccattacggccggggtttatttccttaaatattgctacaaaaggaagatgcgggtgtaagccctgannnnnnnnnctcccaagaaaaatcttaaaggaccactttagataatatttgattcctactgtaaaatttagaaaatgatgaattcttgtccatttttgtaatcaagattttaggaaaaacagaagtacatctatctttatgaaattttgggcaggttttgtgtatcaatattttgtacttttagggaatattttattttttagttatttgtgtcaaattataattataaaaggtacagcagaaaatataccatgtttttatataggttcacacctgtacttaggagggacccgtgtccatctatatacttttggtataaaattttaaaaatgttaaagatccacaaggtcttaataaaatgattctatagctagaaaaacatttaccttcccagtgctttgcactaaaatatactgtgaaaggaaactagaaagactgtaactattgctggaaatgttctatattgaatgtacatgctcttgttggaaaaatgtactatatgtgatggaaataaaccagaatcgaagttatttcagctaaatgtgcttcagcaaaggtgcatgtggttgaaacttaaatgttttattatcaaatttaaacttattcagtgactatgagcagctacacttgaattatattctgatagttttatttctaagaaatagagtaataatttctctttaatttaaaaacagatttactttcccacatattgaaaatttgtacttatagatctaactttaataactaatagtataatatatttagggaactaaatgtgtaggtggtatttcatttataagccatcttcattagttgcacattattaaacctatatgtttgactttt

SEQ ID NO: 85114 - DNA, 336 bp, Homo Sapiens
gtgtgagccactgtgcccagcctgttacctcatttaaaacaaattttgcacatctgaacagcctaaaattgtaatgtgataagtggggtaggagtggggtgggcgtagtgggattttgaatcaatgaaggcccttgttcttgtggcatccttttgcagtgattccctgccaggcaaggcagtaaacctgggattgcctgcccaggactgtaatcacattgatgtcccagcgccatggagtatgtaatgaatgaactgccagcagaactactcactaagaactactccctgtttgtgaggattgtacctgttgagagaagttgcaaaagaattagtc

SEQ ID NO: 85115 - DNA, 528 bp, Homo Sapiens
  misc_feature (62)..(118): n is a, c, g, or t
ggtatgtcgtcgatcgagttatagtagctaggtcttatgctcgaatcaaccgagctccaacnnnnnnnnnnnnnnnnnnnnnnnnnnnnnnnnnnnnnnnnnnnnnnnnnnnnnnnnngggcgttcttattcttgtgtagcagcaatatgagtttaagttctgctgttcacaaagaatcaattacatcataaatgaactaggctcacagggattatgtatttataattcgataacagaaacaatagtagtagctatcaagtatggatcacttccggcatgtcagggactatgctaagctctttactacttcatttaattctcacaatcctcatatcgtcatacataatctgaattacaaatccccattttacacatgcagaaacagtgggcagaaccaggattcaactcttcaacacttaaactctggaatgcctgattttaaaaaccacaatagtgaaaagttccaacatacaccaaagtgtgggcaaaagaacataagtgaacttcaagtgctccttaccctggtt

SEQ ID NO: 85116 - DNA, 874 bp, Homo Sapiens
  misc_feature (23)..(23): n is a, c, g, or t
  misc_feature (31)..(31): n is a, c, g, or t
  misc_feature (43)..(43): n is a, c, g, or t
  misc_feature (76)..(76): n is a, c, g, or t
  misc_feature (123)..(123): n is a, c, g, or t
  misc_feature (189)..(189): n is a, c, g, or t
ctttaccccaaaggggaatcaanaattgtgnccccaaaaaaanaagccttcggttgaaaatccttttccctctggntgtcccctttgaaatccatgatgtgaaaaataggggggaaaaagccnagatcctgacccaaaacattttgattcaccctctcctagaagagctttaagcaactgccctgtccnaagtgttgcgcccacaacacttggacctcgtccctagtttaatgtcacagacagcccgagaccgttcttacggaaacacccccaggacaccgtcgaatgaaacggatggaatttagaatcttccaattcaaagtactccttgaatacagattccccagtgtcttatattgattcagctgtaatttcacctgatactgtcccactgggaacaggaacttccatattatctaaacaggttcaaaataaaccaaaaactggtcgaagtttattaggaggaccagcagctcttagtccattaaccccaagttttgggattttgccattagaaaccccaagtcctggagatggatcctatttacaaaactacactaatacacctcctgtaattgatgtgccatccaccggagccccttcaaaaaagtctgttgccagaatcggccaaactggaacaaagtctgtcttctcacagagtggaaatagccgagaggtaactccaattcttgcacaaacacaaagttctggtccacaaacaagtacaacacctcaggtattgagccccactattacatctcccccaaacgcactgcctcgaagaagttcacgactctttactagtgacagctccacaaccaaggagaatagcaaaaaattaaaaatgaagtttcccccttaaatccccaaccgg

SEQ ID NO: 85117 - DNA, 709 bp, Homo Sapiens
  misc_feature (680)..(680): n is a, c, g, or t
atattgttgcgtgttgctatagttcatttgtttttattgctgtttagtatttacttgtgtaaaatatctggcttaatgttttcctagctatcaccatcaaaaactctttccacagtgtgttgaatttttaatatgacaaaaatgaaaatgtaccaacaattttcagtgacttcacctccattctgaaatcctgatgtttccaaatatctctgaacacctcaagtcctagggacaactgagattatattaacattaatctctgaatgttgccaattctaggccttcacttggttcatgtaggaacaccaagtccctttcaaagcaccacatcttcctctaatcaatatttcttggagtccctagggaatgtcttacatgcattcaaacaatcaccatttctggagatacactacagggtcaccataaactctgctacccttaggttccatcactatggaagctgagtttcaccagaaggcacttttgtcctccattacgaccagcaaagccagctaagccacagctgctggcctcaaaaaatgtgatgatcaatccacactgctcccactggcctctgttacccttatcctggcctttgagtgcagggcatgatgtcctgcccgtactgagatgctgatctctgccagttcatgttcatattggcattaaaattttaaggncccttgaagagggaggagggcaaatggtc

SEQ ID NO: 85118 - DNA, 1268 bp, Homo Sapiens
ggaccggtccggaattcccgggatatcgtcgaccacgcgtccggcggctaactatggcgaccgccacggagcagtgggttctggtggagatggtacaggcgctttacgaggctcctgcttaccatcttattttggaagggattctgatcctctggataatcagacttcttttctctaagacttacaaattacaagaacgatctgatcttacagtcaaggaaaaagaagaactgattgaagagtggcaaccagaacctcttgttcctcctgtcccaaaagaccatcctgctctcaactacaacatcgtttcaggccctccaagccacaaaactgtggtgaatggaaaagaatgtataaacttcgcctcatttaattttcttggattgttggataaccctagggttaaggcagcagctttagcatctctaaagaagtatggcgtggggacttgtggacccagaggattttatggcacatttgatgttcatttagatttggaagaccgcctggcaaaatttatgaagacagaagaagccattatatactcatatggatttgccaccatagccagtgctattcctgcttactctaaaagaggggacattgtttttgtagatagagctgcctgctttgctattcagaaaggattacaggcatcccgtagtgacattaagttatttaagcataatgacatggctgacctcgagcgactactaaaagaacaagagatcgaagatcaaaagaatcctcgcaaggctcgtgtaactcggcgtttcattgtagtagaaggattgtatatgaatactggaactatttgtcctcttccagaatgggttaagttaaaatacaaatacaaaggcaagaatcttccctggaggaaagccttttcatttggagtcctaggagagcatggccgaggagtcactgaacactatggaatcaatattgatgatattgatcttatcagtgccaacatggagaatgcacttgcttctattggaggtttctgctgtggcaggtcttttgtaattgaccatcagcgactttccggccagggatactgcttttcagcttcgttacctcccctgttagctgctgcagaaattgaggccctcaacatcatggaagagaatccaggtatttttgcagtgttgaaggaaaagtgcggacaaattcataaagctttacaaggcatttctggattaaaagtggtgggggagtccctttctccagcctttcacctacaactggaagagagcactgggtct

SEQ ID NO: 85119 - DNA, 490 bp, Homo Sapiens
  misc_feature (393)..(393): n is a, c, g, or t
acagaaacgatctgatcttccagtcaaggaaaaagaagaactgattgaagagtggcaaccagaacctcttgttcctcctgtcccaaaagaccatcctgctctcaactacaacatcgtttcaggccctccaagccacaaaactgtggtgaatggaaaagaatgtataaacttcgcctcatttaattttcttggattgttggataaccctagggttaaggcagcagctttagcatctctaaaaaagtatggcgtggggacttgtggacccagaggattttatggcccatttgaatgaagatgaaggatcattgatttccttgtgtatggataatcccgggaacaggccaactaaatatttgatgaatgtatgatttcaaatacagtgaattcccntgggagtcatcaaaaaagaccggcattttatggttgtttttattaagtgtatattctttgctcctgaaaatgttattaaataattgtttaggccggg

SEQ ID NO: 85120 - DNA, 264 bp, Homo Sapiens
tgactatggcaaaatatcccttgtgaatatataacatcactttcctataagaacctgtttaatataggaattttccagcaagccatcaccgatatttgaagtggttgagctgtggacgtgactataacactaaaagagaaagccagcagaataatcgaaagacgactgacacagatagcttggcagaaaaatgagttaaactcttcaacaagcagtgtatagaagtagaattccaaatggccaacagaaaaaagtgttcatctt

SEQ ID NO: 85121 - DNA, 1893 bp, Homo Sapiens
cagtcgacggtaccggacatatgcccgggaattcggccattacggccgggggccaaagggaagtgctgcgaggtttacaaccagctgcagtggttcgatgggaaggatctttctccaagtggttcctcttgaggggagcatttctgctggctccaggactttggccatctataaagcttggcaatgagaaataagaaaattctcaaggaggacgagctcttgagtgagacccaacaagctgcttttcaccaaattgcaatggagcctttcgaaatcaatgttccaaagcccaagaggagaaatggggtgaacttctccctagctgtggtggtcatctacctgatcctgctcaccgctggcgctgggctgctggtggtccaagttctgaatctgcaggcgcggctccgggtcctggagatgtatttcctcaatgacactctggcggctgaggacagcccgtccttctccttgctgcagtcagcacaccctggagaacacctggctcagggtgcatcgaggctgcaagtcctgcaggcccaactcacctgggtccgcgtcagccatgagcacttgctgcagcgggtagacaacttcactcagaacccagggatgttcagaatcaaaggtgaacaaggcgccccaggtcttcaaggtcacaagggggccatgggcatgcctggtgcccctggcccgccgggaccacctgctgagaagggagccaagggggctatgggacgagatggagcaacaggcccctcgggaccccaaggcccaccgggagtcaagggagaggcgggcctccaaggaccccagggtgctccagcgaagcaaggagccactggcaccccaggaccccaaggagagaagggcagcaaaggcgatgggggtctcattggcccaaaaggggaaaactggaactaagggagagaaaggagacctgggtctcccaggaagcaaaggggacaggggcatgaaaggagatgcaggggtcatggggcctcctggagcccaggggagtaaaggtgacttcgggaggccaggcccaccaggtttggctggttttcctggagctaaaggagatcaaggacaacctggactgcagggtgttccgggccctcctggtgcagtgggacacccaggtgccaagggtgagcctggcagtgctgggctcccctgggcgagcaggacttccagggagcccacgggagtccaggagccacaggcctgaaaggaaggcaaaggggacacaggacttcaaggacagcaaggaagaaaaggagaatcaggagttccagccccatgcaggtgtgaagggagaacaggggagcccagggctggcaggtgcccaagggagcccctggacaagctggccagaagggagaccagggagtgaaaggatcttctggggagcaaggagtaaagggagaaaaaggtgaaagaggtgaaaactcagtgtccgtcaggattgtcggcagtagtaaccgaggccgggctgaagtttactacagtggtacctgggggacaatttgcgatgacgagtggcaaaattctgatgccattgtcttctgccgcatgctgggttactccaaaggaagggccctgtacaaagtgggagctggcactgggcagatctggctggataatgttcagtgtcggggcacggagagtaccctgtggagctgcaccaagaatagctggggccatcatgactgcagccacgaggaggacgcaggcgtggagtgcagcgtctgacccggaaaccctttcacttctctgctcccgaggtgtcctcgggctcatatgtgggaaggcagaggatctctgaggagttccctggggacaactgagcagcctctggagaggggccattaataaagctcaacatcattggca

SEQ ID NO: 85122 - DNA, 507 bp, Homo Sapiens
gcacgagggctaatcatttctgggttcactgcgactcactgtagtgctggcgatcccccttgtaacactggaactgaaagacagtgatgaaagctatgtcaagcattcattattctgaagaggaggagaaatgccacatacctttcccatgggacctgtggtggaatgaatccatacttctgcctcacttcgagcagacttttgttctcggcgctcctcacgatggagtttcatgcttcattttcacatctctctgcacaattagattgggagctccttgagggcagagtacgtgccttaatctttatctttgtaatgccacaatgaacagagtgcctcctggtacactgtaggagcttaagaaatactcactgaatgcatgaatgaatgaatgaacaaatgaaggaatgactaaggatgtttgtagtgctataatatagaatgggatttactctgctttaccagttagtttcataataaacaaatagtctgtatcgcctggtgaaa

SEQ ID NO: 85123 - DNA, 1424 bp, Homo Sapiens
  misc_feature (351)..(351): n is a, c, g, or t
  misc_feature (601)..(922): n is a, c, g, or t
  misc_feature (1261)..(1310): n is a, c, g, or t
gctatgtgaatatagaaaagtggttaaaaaagcaggctggtacaggtccggaattcccgggatatcgtcgaccacgcgtccgacagactccatcttttcacccaaatcatgaatgaccaataaaaagcaagttattccagaggaagaagcagcccttgaaatgttaaggcttaggcttgaaaggtgaagagcaggaattctctctttcaaatcctagagcataaacccatgtgtggccaagtgagatcagccctcaagggcacatgccaagggcagagcagcccatgtagacagcttcggagggcatgggggtgtagggagttcggggtagctcctcattaactatttgtngggtgagtaaaggggtgaggctcagtggcaggtacctctgcaatgacaagctgcctcccctctatgtgtttagcatatgttattagaacatgtccgacacccctaccgctgccatttgggccctttaataaagccaagtagagaaatctggcaataaaaggcaaatgtaagcatgctttctttaagacgcatcataaatggttttctttaagtgaatggaagagtttgacagagatacacctttgtaagnnnnnnnnnnnnnnnnnnnnnnnnnnnnnnnnnnnnnnnnnnnnnnnnnnnnnnnnnnnnnnnnnnnnnnnnnnnnnnnnnnnnnnnnnnnnnnnnnnnnnnnnnnnnnnnnnnnnnnnnnnnnnnnnnnnnnnnnnnnnnnnnnnnnnnnnnnnnnnnnnnnnnnnnnnnnnnnnnnnnnnnnnnnnnnnnnnnnnnnnnnnnnnnnnnnnnnnnnnnnnnnnnnnnnnnnnnnnnnnnnnnnnnnnnnnnnnnnnnnnnnnnnnnnnnnnnnnnnnnnnnnnnnnnnnnnnnnnnnnnnnnnnnnnnnnnnnnnnnnnnngagaatgctaatcatttctgggttcactgcgactcactgtagtgctggggatcccccttgtaacactggaactgaaagacagtgatgaaagctatgtcaagcattcattattctgaagaggaggagaaatgccacatacctttcccatgggacctgtggtggaatgaatccatacttctgcctcacttcgagcagacttttgttctcggcgctcctcacgatggagtttcatgcttcattttcacatctctctgcacaattagattgggaggctccttgaggcagagtacgtgcccttaatctttatctttggaatgcccacatgaacagagtggcccnnnnnnnnnnnnnnnnnnnnnnnnnnnnnnnnnnnnnnnnnnnnnnnnnnatgatgaacaaatggagggatgactagggatggtttggagggctatatataagagggggatttactcctggctttaccagtttagtttcataaataaaccaaataggcctggaa

SEQ ID NO: 85124 - DNA, 714 bp, Homo Sapiens
  misc_feature (630)..(630): n is a, c, g, or t
actgggcatagtcccctggaactggtgggtcacttggaagggatgccctttgtcatgcacttgcccttctggaaattaccccgagagccagggaaggggctcagtgagcctctggagccttcttctctcccctcccaactcagcatcaagcaggcattttatgggaagctttctaaactccaactgagttccaccagctttaattattcctctagctctcccacctttcccaaaggccttgctggaagtgtggtgcagctgagccacaaagcaaactttggtgcgagccacagtgcatcactttccttgcaaatgttcactgacagcagcacggtggaaagcatctcgctccagtgtgcgtgcagcctgaaagccatgatcatgtgccaaggctgcggtgcgttctgtcacgatgactgtattggaccctcaaagctctgtgtattgtgccttgtggtgagataataaattatggccatgggaaacattgtatatttagtgtgtgtattttgataatgattgatcttaaatcctgttaccagactttcattgttgcaatctctctttaggctggatcactcttgccttcccccatattatacactgcttaagccctgtgttacttgtctncctttgtggtttgttttgtggggttttctggtttgtcgcgttgggctgaccatggtctgtcgctctgtgtttttcttcttttcc

SEQ ID NO: 85125 - DNA, 529 bp, Homo Sapiens
  misc_feature (134)..(163): n is a, c, g, or t
  misc_feature (183)..(208): n is a, c, g, or t
cctaatatttctaattaagtttagcctgtgtatatttcatctagcaacatgagtaaaggaatgtaagtctagatatacaaaggtttaatgtctgcctttttggcgataaagtcatttactgtgtgtggaacccnnnnnnnnnnnnnnnnnnnnnnnnnnnnnnccaagactggatatcactgnnnnnnnnnnnnnnnnnnnnnnnnnntattcacagaagcaatcatagcatgctgcatccttgaactcctgggctcaagcggtcttcctgctttagcctcccactgtgtttggatggtaaggggtgaagaagactgagtaaagaggctgttgcattcagcattaattatgcatatttcccacgtagctaggactacaggcatactccaccactcctggccctatttttaactgatgctcatttcaaagtgagagatatgtcttaggatatcagattttttgaaaccataacattgactaggaagactagttaggaagtacttttcattttaaaatacacattagcaaa

SEQ ID NO: 85126 - DNA, 573 bp, Homo Sapiens
aagagagaaatacagatgtatatacacattacctaaagcaaaatgaggaccctactgggctgccatcccagctggactgctgctgtggagctcagcatcaagtacttccaggagaagcttcagcaggacctagaggcagagcatggtagaggtagaggatacagccctcataccaccgtgctgtatgtccatctttcaagtcctggtggtgcccgcagagtttgaagggaagccactgcttcagagataccaggtggtaaatgcatgcctagtggaagtgtgctcctctgcatctatgcctttgagcagaaagcctttgagtcccaattagtgggcccatgagtggccaaaatgagggactgggacctgtatagccgttaaactataaatcagggccaaaaaggaaagataaattataagtttaaagaaaatgggctaggcatggtgacttacacctctattcccaaaggaagctgaggcagaaggatcatttgaggtcaggagttcgaggttacagtgagctacaatcctgccaccgcacttatatgtgcaacagagcaagaccttgtctca

SEQ ID NO: 85127 - DNA, 409 bp, Homo Sapiens
gggttggtgagagggtgggaattggggagaatatttatttcaaaacctgtctttcaacattgtatattttggactggcataaagtctttcatagctataagagagaaaaaaacccattgagtccaacagagtatcactaatgcctgtaaaacctcctgtttatataatggtatggagaactcttcatttttatataactatcttttattgtatagatagcacacatagaccctctagatacttggatatttatcctgagttggaacaaataaaagggtaaaaagatagtctatttaaaacaagagtgtccaatcttttggcttccctgggctacagtggaagaagaattgtgttgggccatacataatgtacgctaaggatagccaatgagctaaaaaagaattgcaaa

SEQ ID NO: 85128 - DNA, 777 bp, Homo Sapiens
gtttctctgtgttacccaggctggtcccaaaactcctggcctcaagtgatctgcctgccttggcatcccaaagtataaggatgacaggtgtgagccaccatgctcagcctgtagaacttttaacccaagtctcatttcttttttgaaagggaagagtgcacaagattaactgcttctttggatgaatcattgttaataaaaagctgggcatttagaattttgccttataagcccttctccaaccataagattattttgtaccaaaaactttggtgttctctaccaaagcagttaaaaacttttagcctgctacttcttgtatttgtctactgacagccccttggtactatttaggttgggggaggggacctaaaataaatagactttaacatttcccttgggtgctaatcatagttggaagttgaatttaaggtgattatttgggtgacaattaaaaacctaaggaaaaccagaaatcttggtagtggaagaaatgtgtaaggtcaccccaatcggtagattttaatgaacgttgtggaatgtgggaagaggggatgttaagttgaatgcagaatttcactaagtacttagtgtaagtttacaggatgtagctctttttatctaagaattcacatgtaatggccaaaaggcagatttactgtttaaaaatttgaataattttacatgacatccttgacaattctaagaagtttatgtgtagaacattttacaaaattcatcagattattacagggaacactacatgattaatgactc

SEQ ID NO: 85129 - DNA, 688 bp, Homo Sapiens
ggcacgaggttaggctctaactatttagctctgtacatttcggttcagtgagattagtttttgttagcttaagcatgtatgactttaaatgtaagtatactaaaaatgagataccattttacaactgaaagttcaaggaccacttagcaggaatactggacctgaaagcctgatgtgaggcaggactgagcaaagcatgttcaggtgaaaactttaaatgggagtctgagtttgaggaaagaaaatagagagagccaaagggggaacatggttctatgtcctcattgtcaaccctacttaagacatgtaatttgaagatagtgattctcaaaatcagaattgccttcaagagcttctgtaaaacacagggtcacagggtcttgatactctatacaagaatatctgaataacaattgggagaaaacgggttccaggacagggcaatattaacaggttttcagaggattcattggcacaatgaagtttggagaactgtagcagttggagcctttgatggataataaactggaatcggacctgtcattgaatcctagaatactgaggagactgcccctgtggagggccttgtgggcggccccttggggaggtggtccctggggctttccaggaggaggtgggggaggaccttgctgatggcctacctgttggggtggtccttgtggccttc

SEQ ID NO: 85130 - DNA, 496 bp, Homo Sapiens
gcggatctgggacagaaaccgggagaggagcccaaccgcaccgagagcgcgaggccgaccgggcaaggagtgggaccgcagccgggacgacaggaaccgagagcgcgcaggaccggagcgcgaccggaccgtccgagcagagagcggacgagacaaggccagggacagggagcgggccacgcaagaccggagcaagacaaagaacgctgggacccgaacccgaggctcgaggctcgacgctggcaccgctcgcaggcctagacgccccggccggcagagaccctttttaaagccacgttcgtaagatgcgttgaacaaatagcttttgaaatagccacgatcttagattcaggatagaacattctggacttaaacattactgtaattttgtgtaaatggtttcttacaagatttcacatctttacaattctgatgcttttttaaaaaaactaaactttaatatttccatttaaaattaaaagaaatgggaaattgt

SEQ ID NO: 85131 - DNA, 416 bp, Homo Sapiens
  misc_feature (261)..(261): n is a, c, g, or t
  misc_feature (268)..(268): n is a, c, g, or t
  misc_feature (299)..(299): n is a, c, g, or t
  misc_feature (301)..(301): n is a, c, g, or t
  misc_feature (354)..(354): n is a, c, g, or t
  misc_feature (370)..(370): n is a, c, g, or t
  misc_feature (388)..(388): n is a, c, g, or t
ggtgcaatcacagctcactgcagccattggtctcccaaagttctgggattacaggtttgagccaccacacccagccagaagattctgtatagcactcccctcttatgacaaactgagaaagagaaattaatgtgtttgctcttgcacacacacacactttgatgacgtgtctgcttccaggcagcaggaacatatactatagaggatgctttatacagtttcacacattaggcaaaatcaaatataaagttctccactganaaccganagactcaaggtctattatcttatttatggantnacttgctaaatattttggggcgaggttaggttcccagccttttcactttcctncctgctaaaggttttngaattctaggatctttcntgggtatcaacaggagtggtttttccgt

SEQ ID NO: 85132 - DNA, 903 bp, Homo Sapiens
  misc_feature (579)..(603): n is a, c, g, or t
  misc_feature (797)..(838): n is a, c, g, or t
  misc_feature (870)..(870): n is a, c, g, or t
ggaattcttacaagccctttgggttggaaacattttgagcgaaacgaccgcctcttatccagtaaatgtcacctgccatttgaaggcctgccccagaggaagggaccctacccttaaatttagttctttttttccacgtgttttgaagatttaccttatgaagttttgagaaagcacagggttatacgtgtttaaatttcctttagtgaaaccctatttatttttatgtattcctggttatttatttactgccacgctactgatattcagaccttcatgatcatccatctggtgagcagagcttcatttgtatataacactttcagagccttcccacccataggtagttcttaaaccaggtgaaagagcaaagttcaagtgcctacttatgtgtcattcgctcatgtaagagtttttaagagagggctgattatcacagccctcttttttcctgaatttttaatgcagaagtttgaatgaagcaagggaaggcatgtagggacaggaaaggaaacaatggaaggaaagtgattttgtgaaaaggacagtgaagccagctattttacccccaggctggannnnnnnnnnnnnnnnnnnnnnnnnaccgagtacacagagtacccaagtgaagagaacgtcatgagtgtaagtgcaaatcagtggaaggagcggcaaactgggacatgcagaattgaatttgctcaaaaaagatgaaaggaaatgcaaactgtaaatgtataaatgtatattgtattgtatgtacattttatattcataataaaggcaatcaaactttnnnnnnnnnnnnnnnnnnnnnnnnnnnnnnnnnnnnnnnnnngaccgcgtatgcggccgcaagcttattccctnttagtgagggttaattttacgattagcacttgc

SEQ ID NO: 85133 - DNA, 1072 bp, Homo Sapiens
  misc_feature (11)..(11): n is a, c, g, or t
  misc_feature (38)..(38): n is a, c, g, or t
  misc_feature (50)..(50): n is a, c, g, or t
  misc_feature (998)..(998): n is a, c, g, or t
  misc_feature (1052)..(1052): n is a, c, g, or t
cccctttattnattttcttacccacccctctatggaanaccacacccgcnccccatacggtcctaaggtagcgaggcctgggtggcgaatccagcacgagggttgtcgccccctcccgagaaggcgggcgccgccgccgcgaccctcctgccgcacccccagcacccgcacggccgcacccacctgcccttcgccgggacccgcgagccggggaacccggagagctctgctcaggaagatccctcgcagccaggaaaggaagctccctgaatccttgcgtccccgaaggacggaggtccaagcagagtgaaaaattaaaatacccttaaggcaggttcaagcagagtgagaagctaaaatacccttaaggcctttaaaggaagaagtgtaatagatgcacgacaggcataaacaagaacaacaaaacaggtgttatgtgtacattcggagttcctgttttgctcatcccgcaccaccccaccctccacacactaacatccctttcttccccccaccagctgtaaaagatcctatgcgaaagacactggctcttttttttaatcccccaaataaattttgcccccttttaggccatgttccattatctcttaaaattggaacctaattcgagaggaagtaagaagggtctgttctgtggctgagctaggtgaaccccggggtaggggaaagatgttaacacctttgacgtctttggagttgacatggaacagcaggtagttgttatgtagagctagttctcaaagctgccctgcctgttttaggaggcgttccacaaacagattgaggctcttttagaattgaatttactcttcagtattttctaatgttcagctttctaaaaggcatatatttttcaaagaagtgaggatgcagtttctcacgttgcaacctattctgaagtggtttaaatggtatctcttagtaacttgcactcgttaaagaaacacggagctgggccatcgtcagaactaagtcanggaaggagatggatgagaaggccagaatcattcctagtacatttgctaacactntattgagaaattgaccatga

SEQ ID NO: 85134 - DNA, 982 bp, Homo Sapiens
  misc_feature (907)..(941): n is a, c, g, or t
cagcatgctttgcggtgcccagtaaccaagatggcactcttgttgtgagtgcttgctgtacccttattgttccactcaggatgatgtgccagtttctgagggtaattgggctatctatccatgcaggatagttatatggaatgaagagttctccagaccattatagaacaggaggttttacagcatagtgatactctgttggactcaatgggttttttctctctgatagctatgaaagacttatgccagtccaaatatacatgcttgaaagacaggttttgaaataatattctccccaattcccaccctctcacctacccataaagaaaaaaggtatttaaaaagatttttttctgctatgacatgaaaggaataaaaatacatatttcttaaaaagtaagatttttccttcttaatgaaacatatttccatacacacctgttaagagaaggtcgcaactgattggtttaacacagagaacagcccagtctagattcaaaaaatcatggaagaagcatcccagccaccacagcaaggaggaagcaggaaggagagagctgcagaaatatttgaaggaaaaatgggaatgagaggaaaataaaatatacccaatacataaaaacaagaagagcaaggggcaatattaggaatgaaaggaagtaatttaaaatatgacttggaattgcttaatgtgacaagtgccctttagaccttgttgtgttcagatacctaggccttggatgtcattttcattaaaacctggattctactgtcaagtgagagctcctctatttgtatttccatatataaccaggaacaggttataatatgtataaaaatccatttaccctgtttccccggccgtaatggccgaattcccgggcatatgtccggtaccgtcgactgnnnnnnnnnnnnnnnnnnnnnnnnnnnnnnnnnnncgccgcttcctcgctcataaactccgctgcgctcggtcgtt

SEQ ID NO: 85135 - DNA, 870 bp, Homo Sapiens
  misc_feature (781)..(789): n is a, c, g, or t
gagatttatgctgggtgtcttaaaggcttgggagtgtgttttctcatttgatttactcatttgctcttcagcgatttcgtagttacatttctttaaatcctaagttacaaaagtttgtctcataatttacataaaagctcttaatttcggacctatcttggagaaggctgggatttttaggaccttcccccacttaagattttccgcttaactaaccttgccagagggtgctacttcgcattttctttttgaatcattgtcgttcgaccgattaaaaatagagaaaaagtaaaatgttttatttattttagagatgttggaagttgttgtttttcctgtctaatgtcttgtatataattaggaagttgtccagaaacttgcgtctctgattttggtaaaaatcttcctgtcattcagctgtgtaggaacgaatctccaaaataaaattgtccatctttagcctgcaaaacaaattgtcgtagtgaacatatgctatattgttaattgctataacttgagtatctgatggtgggtggcctttgttcagtattgatttcctgtgcactgtaacctggcaactggatttttaatttttcttcctgtgttcagttagactttaactagaaggcagtagaaactggaagtgaaaaatttcttgagtgcaagccagtgttttattgctaaattaagattctcctgactaattggattttctcggtttaaaaatctacaagctatcatttttgggtcttgtggttagcgattgtctcttttcaggggnnnnnnnnncctttgtaaatatcaactgttcagaaccaatctcgctgttaaacacctaagatcatatttacgtgagctcaaaaaatactc

SEQ ID NO: 85136 - DNA, 602 bp, Homo Sapiens
  misc_feature (405)..(476): n is a, c, g, or t
ggcagtccctaattgtagtgaatgttggaatacagtgaccacacaaatgctccagactgattgcgaaggtgccacttctaaatcagctgggcaagtgcattgcataagctgagtatttagcttaatgattggagccagttgatgaaacacaagaatctggaagcctcctgctacttctcagaagataagacaatggcattccatccaccagtgtttactgtggtacccaaagggagctccagttactttcctctgtgcctgtaacccttggatcacctggttgcaccagacccatcctgactaaaattcctccaaaggaccaaagaggggatagggacaaaaataaaaaataaatctcatctgctctctttcctaaggacccagcagcctctatccatccatcgnnnnnnnnnnnnnnnnnnnnnnnnnnnnnnnnnnnnnnnnnnnnnnnnnnnnnnnnnnnnnnnnnnnnnnnnctgtggaggtggaataggagaatatgggctttctgtgagcagtgtttgcctaaaatatatacatcaaggttgtaggatcatggcaccactgcactctagcctgggcgcagagtgagaccctgtttc

SEQ ID NO: 85137 - DNA, 660 bp, Homo Sapiens
agcataaacagaaaaactgatttaaaatactttttgtctagtagttaataattggataatttgatgagtcatttttatacattggtcatccacagcttggaatttttatttttgtgcagttgtaattatccaccattctctatgtttaccttaaacatccaaaacaacaggggacatttttgaacaatctgtaatattcttcttgaatctttctagataaaacacacaggaataaaaaaatgaacatcccctggaaagcattgctgactgtgaagaggtaagctgtaaccactgatgcgtgcacaacatggagaaccccaaagatccaggtggtgccgagaaggaacagaagagcgaggcctcctcttgcacaagaccttatgttctcaaagcaactaacttctggtttcaaccctgcagtgtgacgaaaaactttgtatatgatgactccaaaagccaagagattaacaagaatgattaggcatgctggtcctataaaactccaaataaagttgttttcggtgctaagccaacatactttggttgtgccataatatctgtatcctagtgctgccgaaaatccaactaccacagctgggcttagatagccaaagatataaaaattcttgtgcaaaaatcccttgttgtagatgacaccca

SEQ ID NO: 85138 - DNA, 375 bp, Homo Sapiens
actgatgaactaactgtgagagaaagagatgacactggggtagctttatgaaatctgtcctctgttacaaaatgacttatctgaaacatattgaccagagagttagaactcttggaaaaagggtcattacttggggaaaactaaaccctggacattttagtgagtcattgaaaaaggaactctgagtttagacaaataagaagtggtaacggtgtttctgagttctccaggtttctgcatgccaagaacaggacctattttctccattggtagttcctgacccaaggaacaggggaaatttaaaagatgttggctaggccaggcacctggtggcttgtgccaaagcctagccaaaaatcccagcactttgggagg

SEQ ID NO: 85139 - DNA, 521 bp, Homo Sapiens
ccagaggctcccttgtcctcagagctggagcctttccacccaaagcctaaaattagaactcggaagtcctccagaatgacaccctttccagctacctctgctgcccctgagccccacccttccacctccacagcccagccagtcactcccaagcccacatctcaggccactaggagcaggacaaatagatcctctgtcaagacccctgaaacagttgtccccacagcccctgagctacagccttccacctccacagaccagcctgtcacctctgagcccacatctcagaccactaggggaagaaaaaatagatcctctgtcaagacccctgaaacagttgtccccacagcccctgagctccagccttccacctccacagaccaacctgtcacccctgagcccacatatcaggccactaggggccggacaaataggtcctctgtcaagacccctgaatcaattgtccctatagcccctgagcttcagcctttcaccttcagaaaccagcttgtcacccctga

SEQ ID NO: 85140 - DNA, 419 bp, Homo Sapiens
  misc_feature (352)..(352): n is a, c, g, or t
aagtatcaaaacacatggaccctttatagagattaaagggctttggattaaaaggtttgaagtagttgaaacctttacagaaacaaaagcaacatgtcattactttcccattaaaaatttcaaatgaacaccctcagttaatgctttgctgccatatctttttttccctttggaaatccaaaagcctgtgaatctggtccatgtcaattattttgtttacaggatattgcattactaaacccaaggtgatctccaagttggagaaaggagaagagccatggtctttagaagatgaattcctgaaccagaggtacccagggtgaggtgggcattaacagaaggagccccctgngggtacttagtctttagagggagagcacctttgaaagtttttttggaacagctttattgagatataa

SEQ ID NO: 85141 - DNA, 1446 bp, Homo Sapiens
ccatgtgaactatagaacaagctgggtacaaaaaagcaggctggtaccggtccggaattcccgggatatcgtcgaacccagcgtccggattgttccagagtaccaggaggacagtgacattagttccttcttctgctaatccccaaaacctcagaaacctcataattcttaacacctggcatttccatttctaaagatggacaggccctttggcgtggtaccaaccagataatgactgcatcaggatgaaagctgctgaactcggcatggcgcctcctcttctctgttgggatgagtgactttattgatttgagcagcatatgctgtgattggctgccctgcaaatttgtttcccttaaggaaccctcaccaactatctctgctggatttgggagttccgcatcttttgtggagggcagagtatggacatcttacacccggtggtcaagtgtgtaataaacttgagcattcgaatgggagaaaaagcaaatcgcacaatgacatattttgagtaataaccgtatttttcacagggtgacaaattgggccaataaatctgccatctttgaactcatctttggtggctagactgctacggcagcttctctgatgggaaagttccttttttggcttaacactcaccctttcttcacactcacatttaccaatgactctgctccgtttttggagcagactgttttaagttgctcaggagcctgatggaaccatgaaccgagactcttctctgtttcctgccaagacctcatctgcactaatgccttctccctgaccttgacacttccccctttagctataaaagcacttaccagccgaacgtggaacagtatcacaaaagattccatctcccaacgatttcagaactctgagctcagagagactccagattttaaaaaataatttgagtgcttggaaactattagctttttaagttccttccaaatatgttagtacctaccctttactttttccccaagaccatctcagggtggagcattctgtctaagagaagaaagataaggaggctcccacccacctctcccaagagcagacattaaacatctttgtgctttgaagagagtgaattttggatagtcttgtgattctcagactaacttccagaattatactttaacccctcccagatatggtccgcctttggaattgtgtgtacatctgcagttttgcatggtgggttgttaatatttcaaatgtgtggtttatgaatacgtctgtataatcggcttctggagtgaaacagcaaaccccaaatcttcaaagttggaaggaactttaaaaatcatccggtccaatctctttcctctttctgccacctcccaaggcagaaatcccctcttcagcttcttttgtaggtgggaatccagcctctgttagatatgtccagagatggaaactcactcccctaca

SEQ ID NO: 85142 - DNA, 457 bp, Homo Sapiens
tttagtacagggtctctagatctttcctgtcctcattcaactctcagcttgttgtggcttgtcagtgccctgaaatatgttatggccaaaatttaaaagtatacttcatagatcatataatttacaagtagagtacagcaggatttttaatggccttggtactaaagttatattgccaatagtgacccatggattagctgagttttgtttcgttctagtttttgaatggggaatgtacttttacataatacagttggctcaggttgaccttttagtcaggtgaaacttccaggttcttatctgtactaaatgcaggtaagcaaagtctccctcaatttccacatgcacagtttgcttttttaaacagatgtgcaggaattcacttgtatttgtataacttttagaaattgtctcattttaccttattcttcctgcctgctatcattcttacatattt

SEQ ID NO: 85143 - DNA, 389 bp, Homo Sapiens
  misc_feature (283)..(342): n is a, c, g, or t
tgccctctggcctccatcatcactgacatcatgctgattgtccccatgaaggccagccttgaagcttggtcagtctccctaactgtatgattgatccccacttattgcactacatcactgagttcccgtatgccaagttatggccacttacatccacgtgagtaatggttacttggattgtcctctagtatgcatttgtaaaacctgagcagaaagtcatccgggtatttctagttgggaatctaaaattttactagtattgggccgggtgcagtggctcatnnnnnnnnnnnnnnnnnnnnnnnnnnnnnnnnnnnnnnnnnnnnnnnnnnnnnnnnnnnngaccatcctggctaacatggtgaaaccgtgtctcaactaaaaattaa

SEQ ID NO: 85144 - DNA, 580 bp, Homo Sapiens
aaagaagtattagggagagaaatgagctagagatctgaaagagatttgtcaatgaaagaaaaagaaagctattcctagtttcattaacttacgtataactaatgacaataaaaatctccacttattcatttgtctatccatcacctgcttgactgctgaccacatatgagggattgaaggcactgccctcaagtctagatcctgccctcaagtctagatagactgtgtataaacagaagtgctatgagaattcaattatttccagtgtcaaggatcaggggaaaatttaaggagcaaggcgtgtgtgggctgagtctttgagtctgtatggaagttagtcatgggacaatggataaaaggacattctaggcctgagaacagaaattaatgaagacctagattgagaaaagcatgagttatatgatggaaataataaataggtcagttaggcaaaaggtgtgtgaaggtgcgggttgcctgtaactcagcagaggctgtaatgatgagcctagggaacgtgtgggtgaatccactgttagaacgagtctgtgactgtgggtctgcagtgaccagggcagaa

SEQ ID NO: 85145 - DNA, 2337 bp, Homo Sapiens
  misc_feature (735)..(735): n is a, c, g, or t
  misc_feature (923)..(923): n is a, c, g, or t
  misc_feature (943)..(943): n is a, c, g, or t
  misc_feature (1188)..(1188): n is a, c, g, or t
  misc_feature (1741)..(2022): n is a, c, g, or t
  misc_feature (2026)..(2026): n is a, c, g, or t
  misc_feature (2094)..(2094): n is a, c, g, or t
  misc_feature (2130)..(2130): n is a, c, g, or t
  misc_feature (2232)..(2232): n is a, c, g, or t
  misc_feature (2308)..(2308): n is a, c, g, or t
gagcgaggcctgggtggcgaattcggcacgaggcagcagagaacatctcagacaacgacagcacagagaacgaggccccagagccgagggagagggttccgagtgtggccgaagccccccagctcaggcctgcagggacggcagcggccaagaccagccggcaggagtgtcagctgtctcgagaatctcagcacatacccactgctgagggggcatcaggatcaaacacggaggaggagatcaggatggagctaagccctgacctcatctcagcctgcttggccctggaaaagtacctggacaatcccaacgccctcacagagcgggagctgaaagtggcctacaccacagtgctgcaggagtggctgcgcctggcctgccgcagcgacgcacaccccgagctggtgcggcggcacctggtcacgttccgggccatgtctgcgcggctgctggactacgtggtcaacatcgccgacagcaacggcaacacagccctgcactactccgtgtctcatgccaacttccccgtggtgcagcagctgctcgacagcggtgtctgcaaggtggacaaacagaaccgtgctggctacagccctattatgctcaccgccctggccaccctgaagacccaggacgacatcgagactgtccttcagctcttccggcttggcaacatcaatgccaaagccagccaggcaggacagacggccctgatgctggccgtcagccacgggncgggtggacgttgtcaaagccctgctggcctgtgaggcagatgtcaacgtgcaagatgatgacggctccacggccctcatgtgcgcctgtgagcacggccacaaggagatcgcggggctgctgctggccgtgcccagctgtgacatctcactcacagatcgcgatgggagcacagctctgatggtggnccttggacgcaaggcaaagntgagattgcgtccatgctgtattcccgcatgaacatcaagtgctcgtttgccccaatgtcagatgacgagagccctacatcatcctcggcagaagagtagccgtgagggaggcggggaccagccagaccgggagcaaaccgtcccttgtccccgtctcctccctgttcccgttcctccctgggccaccccactcacactccccaaggcccacggctcaaaggcaagcgagctctccctctgcttnccctgggggagcccccaacgcccacaggactccagctccaagtgggttttcttggctcccctgttcaaagtggccacagcgcagaacgaaagcaaaattcttgtatacattggcgccagggctgatgctggggtgtgggttttatgaagaacattgagaacaatcagctggtaattatggatggaggaagagggagaggaaaaaaatattgtatttttgaatcattgttgcaggagggggtgggaatcttaggatttgttgccagatttgaaagtcactggaacttgcatattttcattttaatcctaagtgttattacgcaccagttggggttcacccttcatccctcacatttaattgtctgatatagaatagtgttgtgtccactgccccgctagacggctttcttaggggaattttcttctggttgtttcacaagacagattctgtccttgtcacccgggacagaaaactcagtcttttcaccctcattcagatgaagggactcaggacaggctctgtgacttacagggacccaatcaattcacaatgnnnnnnnnnnnnnnnnnnnnnnnnnnnnnnnnnnnnnnnnnnnnnnnnnnnnnnnnnnnnnnnnnnnnnnnnnnnnnnnnnnnnnnnnnnnnnnnnnnnnnnnnnnnnnnnnnnnnnnnnnnnnnnnnnnnnnnnnnnnnnnnnnnnnnnnnnnnnnnnnnnnnnnnnnnnnnnnnnnnnnnnnnnnnnnnnnnnnnnnnnnnnnnnnnnnnnnnnnnnnnnnnnnnnnnnnnnnnnnnnnnnnnnnnnnnnnnnnnnnnnnnnnnnnnnnnnnnnnnnnnnaganaaaagagacaattacccagaacccctcctttcccacatggaggccttggcaatgttattttcctaganatcttcagacctgagaccggaaaagatctggtctcnggtggttctgcgtcccgcccgcagcccaactaggcacaggcgtctgttctcccgggatcagattctctcctcaagaagaaaaggcatggctgttggaacganggcggtccaaacccagtgtgtcataagtgcgtccagctcaggaactaaaacagttgcgaacacaggcactggtttnactaaactccgatgcgaaactgggacggc

SEQ ID NO: 85146 - DNA, 393 bp, Homo Sapiens
gaaaggttaagactacctccatggctaaagacagagatctcccatggggaaaaattacaataaactgaaaaatactttgcggaatttaaatctccatacagtatgtgaggaagctcgatgtcccaatattggagagtgttggggaggtggagaatatgccaccgccacagccacgatcatggtagggccagcctcaacctctatggctttagtctagaaactgaaagggactattttgtgtcttcctcctaaaaatgtgcattatgaatctctggtcagatttttcattacatttgcatttatgaaaaatattaagaaaaaacctgatggaataatccaacctgttgtaatctcacccttctctgaataaatctattattggttctttcaaaa

SEQ ID NO: 85147 - DNA, 982 bp, Homo Sapiens
  misc_feature (92)..(92): n is a, c, g, or t
  misc_feature (124)..(289): n is a, c, g, or t
  misc_feature (296)..(298): n is a, c, g, or t
  misc_feature (317)..(317): n is a, c, g, or t
  misc_feature (321)..(321): n is a, c, g, or t
  misc_feature (339)..(339): n is a, c, g, or t
  misc_feature (374)..(374): n is a, c, g, or t
ctgatcgattatcgatcattaggatgcctcgagccaagatcgcagaggatcatacacattcgctcatcagtgcacattcgctcatgcacctntcctctgggtcaagtgatctcctttcagcctnnnnnnnnnnnnnnnnnnnnnnnnnnnnnnnnnnnnnnnnnnnnnnnnnnnnnnnnnnnnnnnnnnnnnnnnnnnnnnnnnnnnnnnnnnnnnnnnnnnnnnnnnnnnnnnnnnnnnnnnnnnnnnnnnnnnnnnnnnnnnnnnnnnnnnnnnnnnnnnnnnnnnncttattnnntaagtagtgaagaccttcntgtncatgctaaggaattttanttaaactgatgaccagagcagccactagaaatttnaaacagggtgacatcctatctgcatttaagcttttttattaagaatcaagtgaatacaattttagagattgctaaatccagagaggtccattccaacacacagagaaattcagcaggctctagtcgatgccggggacaaaccagcaacatttgtcggatcgcggcaatggattggatctattgaggtgcagctggtactaaaccaattgatcggtataacgtcaaaaatcctgtttgtcagccaaggttcagaaattgcctctcaaggacgggaactggctaatcatttccaaagtgaaggaactccagttatgatcgggggaggagttttggcccacacaatactaggagttgcatggaatgagattacagggcagataaagtttctgattctagatccacattataccggtgctgaagacctgcaagttattttggaaaagggctggtgcggatggaagggcccagatttttggaacaaggatgcatactataacttatgtcttcctcagcgaccaaatatgatttaaaatatcttggagtcaaagactgcagtagagtggtattataaatttgtgaataaagaatcagtttaatttttcacatta

SEQ ID NO: 85148 - DNA, 475 bp, Homo Sapiens
ttcagaagccttggatacagagggctgactgtatacagatttcttccccccactcatctcaccttagagcatgtcttgggttttttccctaattgtaagaagactgcatgcgcaatatttttgtaagaaacctataaaaaggtgtaagtagaaagcaaaaaatcatctgtaatccctcctcagagggacataatattttaaaaccacactggctatgttcccactcaaagtatcagccatgtgtctggatcagtacaaccacctcagccaacatgtgtaacaactatagaatatttcaacatatgtcaacattgtattttatttagcccaaatataccatcaacttgtctactttcataaaagaactgtgtttttgtttttgtaggaaacacaggctagtaagggtctctcctcagctgacatgcccaactgtcataagtgtgtttttagctgagccgattactttaggaccatc

SEQ ID NO: 85149 - DNA, 573 bp, Homo Sapiens
ggagccactcaactgacataccatggattatgtgaactaacttcaacggttcaggaaggagaactttgtgtgttctttcggaataatcattttagcaccatgaccaaatacaagggtcaactgtatttgttggtaacggaccaggggtttcttactgaagagaaagttgtttgggaaagcctacacaacgtagatggtgatggaaatttctgtgactcagaatttcatcttcgacctccttcagatcctgaaactgtatacaaaggacaacaagatcagatagatcaggattatcttatggcattatctctacaacaagaacagcagagccaagagatcaattgggaacaaatcccggaaggaatcagtgatttggaactagcaaagaaactccaagaggaagaggacagacgggcttctcaatactatcaggaacaggaacaagcagcagctgctgctgctgctgcttctacacaggctcagcagggccagccagcacaagcctctccatcaagtggaagacaatctgggaatagtgaacgtaaacggaaggaaccacgagaaaaagataaa

SEQ ID NO: 85150 - DNA, 555 bp, Homo Sapiens
  misc_feature (12)..(12): n is a, c, g, or t
  misc_feature (76)..(76): n is a, c, g, or t
  misc_feature (90)..(90): n is a, c, g, or t
aaaaagtatttnaaatccaggtttcccggtttatggcctaagggaccggtggataataggggtaaaattatggtanccatatgggatatncctatgtttcccctatgtgaaataggtcctgtccaaaaatagtattggccagatatttgggaaaagtaaattgggtttcctcaggagtgatatccactgcaccccaaggaaagattttcctttcctaacacgagaagtatatgaatgcccctgaaggaaacccactggcttgatatttctgtgactcgtgttgcctttgaaactagtcccctaccacctcggtaatgagctccattacagaaagtggaacataagagaatgaaggggcagaatatcaaacagtgaaaagggaatgataagatgtattttgaatgaactgttttttctgtagactagctgagaaattgttgacataaaataaagaattgaagaaacacattttaccattttgtgaattgttctgaacttaaatgtccactaaaacaacttagacttctgtttgctaaatctgtttctttttctaat

SEQ ID NO: 85151 - DNA, 242 bp, Homo Sapiens
  misc_feature (42)..(42): n is a, c, g, or t
  misc_feature (127)..(127): n is a, c, g, or t
ttgtaatttaaaattgccaagtaagttatatatatgtatttncccataaatggtattaaaagatgagaaactgttagactgaagttctgttgtaacataaccattatttccatcacagtatgaaganctgcaaacgcagaaaacagattacagtctcttatccattttttgaaatccaaaaactacgaaaacaaaagattttctgttgttgagctaattaaatgtgaaccctgaccagaaaa

SEQ ID NO: 85152 - DNA, 322 bp, Homo Sapiens
  misc_feature (264)..(264): n is a, c, g, or t
cattggtgagttccgggaaacaaagatatatactatcaatctccacctagtagtcaggaaaacaggtaatttcagtgcatgttaaaggttttttggcttattgcgcctgagccatttgaattgtaagttgcctccagtcacttttagaaataagcatagttcgtaggtacatattgcacatttgggatatgttactaaattgcctggacagatctctcttaatcaaactttatataaatgtgctgtggaaataagtgaaacagnctattattcccggtattttcactctcctttgggtttggaaattccacagggccaaaag

SEQ ID NO: 85153 - DNA, 697 bp, Homo Sapiens
aagatagacgagaacaagcaagacaagacttgacgggtttggaagagatagtggcaaaagaacttcagactttacacaacctgcgcaaactctgtgttcaggacctggctaccagagttaataagagtgctgagattgattctgatgacaccggagcagcgctgctcagaagcaaaaaatctcctttcttgaaaataatcttgaacagctcactaaagtgcacaaacagttggtacgtgataatgcagatctccgctgtgaacttcctaagttggaaaagcgacttcaagctacagctgagagagtgaaagctttggaatcagcactgaaagaagctaaagaaaatgcatctcgtgatcgcaaacgctatcagcaagaagtagatcgcataaaggaagcagtcaggtcaaagaatatggccagaagagggcattctgcacagattgctaaacctattcgtcccgggcaacatccagcagcttctccaactcacccaagtgcaattcgtggaggaggtgcatttgttcagaacagccagccagtggcagtgcgaggtggaggaggcaaacaagtgtaatcgtttatacatacccacaggtgttaaaaagtaatcgaagtacgaagaggaacatggtatcaagcagtcattcaatgactataacctctactcccttgggattgtagaattataactttt

SEQ ID NO: 85154 - DNA, 1011 bp, Homo Sapiens
ttcaaaacagaaataagtctgcaccatgaggtaacaaaaattatcaatggtatattaagggctaatgaaacatacagttgattataatttaaaacggtatgttctgtacctgctgaatttctctgtgtgttggaatggacctctctgtgtatccctgatgtttgaaccaagagcagatagtctgcagagatcgataagcacagccccagccattgtcatctatgcgatcctgcatataatgatgatagccatatatgccctggaccacataaatctatatacagagaagaaacacagtaaaatattaacttaggatagaagtacatattctatatatgctcccgaattatgtttaatgttcttagagttagactgttactttagttccttataaaaatgccttcacagatctatggtttaacattataccttcttggctttttatttgaggttcaaagtccttaccacagggcccagcaggacctaccttctggcctcctctccaatttcatctcctaaacttttccctattgctccctctactttcggttcccatataccaggggcaatatgaccttggagcctcatggttctcttggcctggaactctcttttcccaaattaattgtacagcttgcactcttacttcactcaggtttccatttagatgtcaaaggtcttccttgactatccagtctacaaacggcccactcattctctcactaccccaccccctgcctcacctgtcatctctgtcctctttatgtttttatttttcaaagtatatcatgacttgatatactttaaatgatacattacttatcatttaaaaaatatctgcctacttacactaatatgtgagctcagtgagtacatacactgtgtcttatccatttttgggcccaagcttctacaacacgcctggcacacggttaatataaatgctgctgaataaatgctgaatgaatgaaggaaggaataaaggaatgaacaaacaaatgaagggtccat

SEQ ID NO: 85155 - DNA, 530 bp, Homo Sapiens
  misc_feature (161)..(224): n is a, c, g, or t
tggcatgaagcccagccgcggcacgacctctgctctgcgggatccgctatgtccataggatatttgccgtcccagaatgaaagggagctcaaagtgacccaaattctcaaagaaaagtttccttgagctacagtgatcaaagtcactgacatttcaggagnnnnnnnnnnnnnnnnnnnnnnnnnnnnnnnnnnnnnnnnnnnnnnnnnnnnnnnnnnnnnnnnattgaatcagaagaatttaagcacaagagaactgtccagcagcaccagatggttaatcaggcactaaaagaagaaatcaaagagatgcatggattgcggatatttacctctgtccccaaacgctgaccacgccctggctgcatagatgctgctgcttaagaccttggatgaacttcactgacatcattcttccctaagcagtcaccaaaaaatttatatattttgctcatatacatttccatattataattatagaagatgtataatctatttagatgttaattaaaggaaacaaacaactgaaaa

SEQ ID NO: 85156 - DNA, 952 bp, Homo Sapiens; identical to SEQ ID NO: 15293
  misc_feature (545)..(560): n is a, c, g, or t

SEQ ID NO: 85157 - DNA, 546 bp, Homo Sapiens
ggggcatacagtgacctcgggcggcgggtcacgtcggccgggcatggctgcatggagcccggccgcggcagcgcctctcctccgcgggatccgcgggcttccacttcaccatcggatgtttgccactcagactgagggggagctcagagtgacccaaattctcaaagaaaagtttccacgagctacagctataaaagtcactgacatttcaggaggttgtggggcgatgtatgaaattaaaattgaatcagaagaatttaaggagaagagaactgtccagcagcaccagatggttaatcaggcactaaaagaagaaatcaaagagatgcatggattgcggatatttacctctgtccccaaacgctgaccacgccctggctgcatagatgctgctgcttaagaccttggatgaacttcactgacatcattcttccctaagcagtcaccaaaaaatttatatattttgctcatatacatttccatattataattatagaagatgtataatctatttagatgttaattaaaggaaacaaacaactggcg

SEQ ID NO: 85158 - DNA, 1180 bp, Homo Sapiens
gtatataccaggcgtaaaaaagcaggctggtaccggccggattatcccagggagtatcgtcgaccacgcgtccgcttagccgccgcccggaggccggtgtgggcgtgacctgcaggcgtccaccctgcggctacgggagaagtcttagtagctgtatctggagtcttgagaaacacaaaccttacaaatgcatctttctttgtcataaaattggaattacaattttcaactgggaaacagaaacacatttcttagcgtgctcagattttatatatcaccttatcaattttttccaaaacatgatttaaagcaacatctgtcctagtataattgttgcattttaaataacaatttattgaaaaatgttaagttttaccagcctaaaaaaagtaacaaaccaattaagtgtactttgggggcagggaggagtccttgatttgaataatcaggagttttgttggtccagtttcgccttctgagcagttcttctgtatcccgggaaaagtacgctcggccccaaactggtatttgtcagacgatacatgtaaaagtttgtccttgaacgtggaacaagacttgtgtaaagtctgagacgggaactagtgatcactagctcaagaactgcaaatgagacaggaagctgttcactgtgaaacagtctcttgcttgtcgtgtatttttcgagtacttctgaagtgtgaagtaaaaaaatctggctaatttatttgtacaaatacactttgataattttttatattttcataaacttttacagatgtaaaattaaagaacttcacttgttctttggagtctgttattccattgtacgtcactacagatttttcactttatagcacagattttttaagttaagaaaacattgagaatgtatcagtttgagatgtttggtgttgaaagccaagtgtccataggttaaattacattaaagtaggtgtcacgttccaacatctagtacgatgagaaggttttgtttgtttaacatataaagcaaatttttctaatttaaatacccaaatgtaaaaatcaagtgtgtttctttagtttacttgatagagattcctgtacattgtattttatattgcggaggcttatatccctgtacatgagaacatggaacgacctaggttttgttactcgcagtagaataaacagctccagg

SEQ ID NO: 85159 - DNA, 270 bp, Homo Sapiens
tcaaacacacgaaaaagggcaagaatggctttattttcatgctttaaaatatcttgacacggaagatgtaaacacagaccaccaatgagaacttgctttggtcaatcttacctttgaagaactaggacaagccattcctaccaggccaccaccaaagacaggatatggcttttagatccacaattttaacaaaatatgcagacagaaaagaagccactatagaaaatttaggactttatccataatttcaaaattggaaagtccaatatt

SEQ ID NO: 85160 - DNA, 346 bp, Homo Sapiens
  misc_feature (313)..(313): n is a, c, g, or t
aaaacaaaattaatggcttcatattagacacagaggctatccggcaatctttcaacgtggtaatctcaatatagccatctctgtagctgacactaaggttcaacatcagattgatttcctttcctactctagttctactaaatctagccactaacctaaaaatatggcagcaaagtatctcatgtctatcaaataattaataaatggggtcaaacaggatctaaaaataaagttttcttatcatgggattagtttcagcactgtttcaggacacaacgtttatgtgtatggtatcacatcccgaaatctggangggctggaaggtttgacttatttttaccttagg

SEQ ID NO: 85161 - DNA, 539 bp, Homo Sapiens
  misc_feature (16)..(16): n is a, c, g, or t
actttgtccccctgcnaagctgccctcgggaaccgggtgggccccccctaagctgtgtggaatttcaaggaaatatggcatctttaaaggagcctgtctctggagggctgtggcccgggggcattgccagactgccccattccaagggacctccctgacctacttagacctctcaagcaactggggggttctgaatgggagcctcgccccactcccaggatgttgcccccatgttacaggtcctgtctctcaggaacatgggcctccactccagctttatggcgttggacttctctgggtttgggaatctcagggacttagatctgtcggggaattgcttgaccaccttcccaaggtttgggggcagcctggccctggagaccctggatctccgtagaaactcgctcacagcccttccccagaaggctgtgtctgagcagctctcgagaggtctgcggaccatctacctcagtcagaatccatatgactgctgtggggtggatggctggggggccctgcagcatgggcagacggtggcc

SEQ ID NO: 85162 - DNA, 339 bp, Homo Sapiens
  misc_feature (36)..(36): n is a, c, g, or t
ctcggccctccccaaagtgcctggggaaataacagncatgaagccaccgcgcccggccctacacttggtcgaagcaacattaacacttaaaataccacggattttcctaattcgtgttaaaataccacggatgatttttaaagccgtgacacattttgtacaactgtcagtacaagggggatcacctctttgcatttgatgaaattaaactaaaaagggggagagagcttgcccgaggtctgaaggttcctcattcctgttctaaaacataaaaccaccatcttcaatacatatacatttttaatgagaactcttcgtcctcctttggttcgcttatga

SEQ ID NO: 85163 - DNA, 368 bp, Homo Sapiens
cacccgtgttcatcccccttcgtcactttgatgagcactagtgctacagcaactgagacagcaaccaagaggcaagaaacctgggattgggtttcatggttgtttctaccatcaaagtcaaagaatcatcttcacacaacaacacaaatggctgggacgtcttcaaataccatctcagcaggctgggagccaaatgaagaaaatgaaatatgaaagagacagacacctcagtttttctggatcaggcattgatgatgatgaaaattttatctccagcaccatttcaaccacaccacgggcttttgaccacacaaaacaaaaccaggactggactcagtggaacccaagccattcaaatccggaagtgc

SEQ ID NO: 85164 - DNA, 352 bp, Homo Sapiens
actcagtgtcttgaaatcagcacaacaaaatggtgcctgaggagcagtgtttactttgatcattcttcaacttctgtgccccagcctttcacagagcacaaattgctttaccagagttacggtgctgaagcccacgactgtttttgtagtctggttgctgtggtgatccttagccttccatgaaactcccatctctagggaaatagaaacctttgcagctgtctcggcctttttggttttgtatctggtggaggtcttcaccgagcttgttcaagcctgagagtgatcggtttgtgtcagagtaaaatacacacatggaaacagggcatccccttcaggatgtgttgtatta

SEQ ID NO: 85165 - DNA, 837 bp, Homo Sapiens
gctcaaatcaggtttctttaggattcaatcatgtcagtctgcttggaaataacagaagcaatatagaattgacattgaaatctaggaaaattattctataatttccatttacttaagacttaatgagactctaacagcatttttaacctcctaagtatcaagtatagaaaatcttcatgaaattcacaaagtaatttggaaatttaggttgaaacataactcttatcttacgaaaaaatggtagcattttaaacaaaatagaaagttgcaaggcaaatgtttatttaaaagagcatgagccaccgtgcccggccaaagtcagctttcaaaatccaagccataattggtgaggggggagtttcagaattacatagaaaaattaatatttgaaaaaataattctgaaatttcgaatttaaaaacagatgtcctgcttctgggtgtaggtagtaaaagtataggaaaagaactgtttccttagaagcggactgtggaagggctatgtagaatgtcaaagggcaacaagagcctgtgtttttaatgtcatcctgtactcggcacaaatcaaaggccaatacaagtctgaaaagcagaaataaatatttttccaggtttttgcttgggcacatactaactgctttgggcattctaatctggtctccaaacaccaaagacccatttcgagcctgctattagcctgctgctgactctatcacttggagcaataatgtggggttatggtggtggaatcttgtatatttttgtcaaaaataaaaccttgagttaaggggatagatatagatggaaaaatacacaaataaatacggtttgaaaacac

SEQ ID NO: 85166 - DNA, 253 bp, Homo Sapiens
gcttccccaactaaagcctagaagagcttctgaggcgctgctttgtcaaaaggaagtctctaggttctgagctctggctttgccttggctttgccagggctctgtgaccaggaaggaagtcagcatgcctctagaggcaaggaggggaggaacactgcactcttaacgttccgccgtctcaacccctcacaggagcttactggcaaacatgaaaaatcggcttaccattaaagttctcaatgcaaccataaaa

SEQ ID NO: 85167 - DNA, 539 bp, Homo Sapiens
  misc_feature (40)..(40): n is a, c, g, or t
  misc_feature (46)..(46): n is a, c, g, or t
  misc_feature (68)..(68): n is a, c, g, or t
  misc_feature (79)..(79): n is a, c, g, or t
  misc_feature (85)..(85): n is a, c, g, or t
  misc_feature (142)..(142): n is a, c, g, or t
tccttttggtggccctcctcggctgcctcctcccctaaangaaaangaaacgtaaaacctcctgccantttggtaacantaagantcctgaaaacttccagtgaacactcctggatccatcaaaattccatacccagaaganttatttaagattgtttcggcaagtaaggcctaataatagtgtcccactacttgccagttcccatgatggcaaatgactgacagaagatcatatgtcacaatttgagctggactatccttagcaagaaatggctgaagatccaagccttctagcggaaatgaaacatgggtactgattttggtggaaaacattagttcatgtctgaatcttttaaggtggatgcacaaaatctcaggaaagttttgtactttacaaaacttcactccatttctcaacctaaggggagaaaagagaaaatcaattagtctacaaaaaaacttagtatatttaaatttgcaacaaaaatccccggccgtaatggccgaattcccgggcatatgtccggtaccgtcgactg

SEQ ID NO: 85168 - DNA, 439 bp, Homo Sapiens
caaaaatcagtctcctttgcatgaaaaagagccttagatttttaaacatgttagttaccagaatgctaaaataccagttgattacccaaattattttggaaatctatccataatggaagtctacaacaaacacataaaacagattacactaagagctgagaaattcaaaggaactgaagattctgagagataaactgttcaagtcttagcaatgatactgcacttctctttgacaggttctgggcttaagttagaggccctactggttccaaaccatattccactgactttgcaagtaaaataaatttgattctgaaataggaaacaaaaaaaggagaaataaccgaatagtagaagaaaaactgtttgtaggaagacgatgcagatggaatgatgtggacattgagtaaccatgtcaataaaatatataaaccaaact

SEQ ID NO: 85169 - DNA, 367 bp, Homo Sapiens
ctttatagtattggagttcccacactgagaggctttggggcccaaaataagaaggttctaggttgtcattcagactttaacattaatttcaaagtcacctttctcatgcttccttgtgtttctgtttttccatttatgattttaacaaagaaaggtatgtgtgcttttgggtggaagttaggagaatgtttgtgtctttcctagttgaatacaaccttcagagaaaaaccttatgccttggaaattactacctggcacacaaaggggcttcaacaaggaaaagcagttggaggtctcttccagattgctcttctgccgaattatttgtatctattccgagctgattatgtaataggatggaaaaagt

SEQ ID NO: 85170 - DNA, 390 bp, Homo Sapiens
aagggctttccctttaaaacagttgaatttagtgtgcatcagaatcaccaggagggcttattaaaacgtggattgccgggtcctctcattagagtttctgattcagcagatctgggatgggattgagaattttcgtttctaacaagttcccaaaggctgctgatgctgctggtcttgtgccatactttgcgaaccactgctttaaggaatgagaaaccaggggatcactcacttacttccatgaccacccttgtcacagaaaattctccatggtataatcatgaagaagaatgaccaaaccatcaaactggaaggatctagtatacataggttgaattttcaaccgtcttcgtgtccctgcagctttggcattttgataggtatcctccc

SEQ ID NO: 85171 - DNA, 711 bp, Homo Sapiens
  misc_feature (551)..(551): n is a, c, g, or t
  misc_feature (559)..(559): n is a, c, g, or t
  misc_feature (601)..(601): n is a, c, g, or t
  misc_feature (614)..(614): n is a, c, g, or t
  misc_feature (633)..(633): n is a, c, g, or t
  misc_feature (644)..(644): n is a, c, g, or t
  misc_feature (679)..(679): n is a, c, g, or t
  misc_feature (689)..(689): n is a, c, g, or t
gcgcccgctccaacatcagaatggtcatcctattacataatcagctcggaatagatacaaataattcggcagaagagcaatctggaagagacctccaactgcttttccttgttgaagcccctttgtgtgccaggtagtaaaaacgtggattgccgggtcctctcattagagtttctgattcagcagatctgggatgggattgagaattttcgtttctaacaagttcccaaaggctgctgatgctgctggtcttgtgccatactttgcgaaccactgctttaaggaatgagaaaccaggggatcactcacttacttccatgaccacccttgtcacagaaaattctccatggtataatcatgaagaagaatgaccaaaccatcaaactggaaggatctagtatacataggttgaattttcaaccgtcttcgtgtccctgcagctttggcattttgataggtatcctcccttcaaggctacatcttctgggttactaccacctttcccaggatctgtggccggcagtgctcacttccagggctaggctgagcanacatgcanccatgcaccctggtggccccatatatccgtagtcaggttgantcaggacttattnaaatataaggctgattggnttataaggggnaatatcttcaggctttggcctttggggaacagtgntcataagatnattttattactatggccttctc

SEQ ID NO: 85172 - DNA, 318 bp, Homo Sapiens
  misc_feature (11)..(11): n is a, c, g, or t
  misc_feature (22)..(22): n is a, c, g, or t
  misc_feature (44)..(44): n is a, c, g, or t
ggcccacatangccaaagtaantggttcctgtcaacaatgtaangcccattaatacccactagcaaatatggaatgccttaaacggtggccacatgaacaaagaaaattttgcccaatagatcattccaacgatcgttcagagcatttttcccattctctgtggatgcctttagaaacttcttaggaacagtatgacttgttacctatcattgctgtaagcagtgcaactgtaaaagatgcctctactcttttgatctcttctctgcatttaatgacttattctagaataatttccttaatttactaccatgctttgt

SEQ ID NO: 85173 - DNA, 269 bp, Homo Sapiens
ctgtctggtctttgcttgagttgtcaccttagccagcccgttctggcatgtcacccacgcccccaaaacttactctgagcttgttgggtgagctttaggagacatcgtgagctagagctgctgcagtggtgggcctagaaatgtcgctagctgatggtgtagcccctccagagggacatgctggacacaaccttccgtattctgcacaggagagcatccctccaactccccaccatattaatgaaatttttcatatgaatgaaaatttt

SEQ ID NO: 85174 - DNA, 410 bp, Homo Sapiens
ttcacagaaataagctaagaacaacatttcttcaaggagagtcattttattatgaatcattgtgcaaagaacataaactaaattgtaagctcttctagggcaacacccaaatatcctaattttgaattctgtacttcaaagtgattataaaggaataagactttttataaaacaaacgtatcatatagctcatatatgcaaaggagttttatcctttcaaataagtccctgtatcgcttaaaacatttttggaagttctatctaaaattttgtttcatgtgaggcaggtgtcagcaccgaaaaggtactaggtccacttcacactattccacctggttagaccatactcatgatggccagtcagttatgggaccgtaaacaaaatgatactggactagcttagaacaagt

SEQ ID NO: 85175 - DNA, 543 bp, Homo Sapiens
aggaagatgccagttcggctgggaaatagtcctgtatgttgccaagatgctgcgaccctgaatatgcgctggactccactttgcacgtgtagttgccactgtgctccaccatggccatgacggagtacacagccttgttgccatgtctgtagtggccaacaatcgccttgtccttctgaattatgatttctggaaactcctgggccaggtgagtcacttgaatggtgcacttaatgatgagctgagctccttccatgatcattccggtggggctgatgtggaacttgggtgtagagaaggattccgtcacggtgaccagttcactcttggtagattctgaggtctgcatatggatcccagaaatgatcctagcttgacatcggaaggataaaacgcggtcctgttcctcaacggggaattccagtatcacaaaattctggtctcgagaattcttctctcttttcagcttgaccattttttcatttagttcaagtttttcaattgtgaagtgtattggggccttttcctctgggacagaacagt

SEQ ID NO: 85176 - DNA, 408 bp, Homo Sapiens
tttgatctggatctggagtgagtaggagtttgcccaggaagaacagggcatcttagacatggaaaacgatgtagaaacacccaaaacaggagacaactggactcattggcatgatttgatatggaggggacacggacagctgactagaaataacgtggatctcctcttggtttaatctcctctgcaaggagagccattgagggggtttcagtggagtgaggaaaggggtgtcgtgaggtgccttgtttgtactcacactggttgttctgtgaaacaagggttggagaaggagttactggaggtaggagaccagttagagggatgttgttcataatacaggtgatggatgtttgggggcctgaacctggggccaggggctatgggttttggagagaagccaattgaatt

SEQ ID NO: 85177 - DNA, 628 bp, Homo Sapiens
  misc_feature (67)..(116): n is a, c, g, or t
  misc_feature (543)..(551): n is a, c, g, or t
tgatagctggctaagaatttcttaaacataaatagagatcaagtcaaagatccaagaagctcagcgnnnnnnnnnnnnnnnnnnnnnnnnnnnnnnnnnnnnnnnnnnnnnnnnnnaccacactcaggcacatcattttcaaactgctgaaaaccaaagcaaatattggtggcagacagagaaaaatgacatatagtatgcaaaggaacagaggcaagttcagccaatgtctcattagaaaccatgcaagccacactcgagtaacctctttaagggctggggggtggggaactgccaacccagaattctatgtccctggaagtaagtatctttgaaaaattaagacaaaacaactttttcaaacaaacaaaagctgagagaattcattatcagcagccttgtgctaccaaaaaaagagttattggaaagtctttagatacaatataataataccacaaagacagaaatttggatacaaaggaataaagatctctggatatgtttaagatgaaggttaaactattcttatgtttaatcaaactnnnnnnnnntacttaaagcaaaaataatagccaatatactgtagagttttagcatatataaaattaaaacgcagaaacaagataaa

SEQ ID NO: 85178 - DNA, 994 bp, Homo Sapiens
gcacactgagtctatagcagtcagcaatgtaccttagccgatccctgggaatggttatggaacagtagggcttgtttccatcctttttagagtgaagagatagaaaattagggctacctagtgtgggttctttttcagaactatgtattttctcctcactgcatgatgggtaaaaatgccctgggttgaaacaagaaacattatctttccacaccactgactaaaacacctgccagtggtttctttaggctccaccttttgctccgtaaactgtagactttcagactgaaatctaatcttaagtgacctcaattaaggtattttcacaaaaggctacttatagtgtagcattattgccttaaatcagaaagccctgggaagaggataaaagatatagaaatgagaaggctctgaagttataggcatttcttgctgtttaatagttacattatcacaaaaacaagccctattcatgattgaggactatggaaatagtgacttcttgaggaggcaccaaactttcctagaactgggtactctcagatagtggctgctatttcctattctatttcagtgacgtaggttggggctgaatgtaaaatagacatcatattactaaatagaatcctataaaatgcaatcacaggtgcccgggagtactagttttaaacatttccttaacaaggagaacaatccagcaaaaagctttctttctctatacagtgtatatctctaaactttttttcctcagttttagagaacatctgttttatctggtggttctttgtttgaatgcaaactcataactttcaagtctccggtgcaagagcataatctacagatcatgggcaaaatctagccacagtcctgagagtccaggcttctgggatgcccagctgggtataaaagtccctactaaccctgtttcaaattcagaggtttctttggtttagaatgcctcaatgagattttgatacatccaagagagaaaaaa

SEQ ID NO: 85179 - DNA, 1014 bp, Homo Sapiens
  misc_feature (560)..(615): n is a, c, g, or t
gggatactaaatcaataaaaaccaggactcagacactacagttttcatcagtgtaattttatgtcttgtttctttctatatgaacttgtttatttagtctttttttcataatattctcatagagtttctgctagatctagagctctgctcagtgcctcttataaaaacaatatataagtctcatatgctgtcttgagaatccaagagaatcacatgcagctctgcaacagtttttgctcaaaaatgttactgactaaagcaactgtccttcctgtttccttattgctaccaaggaccagcagggagaaatgtcttctcccagcagtgaattctgttatgcaatttattcttgatgctcaggcctggttaagctgaggcttacctttaataacagcctccaagggaatgaattattcagttaatgtaatagcacacattaaagagtgtaaaatcaatttgaggcattttattaatatcttggttcttttatacaaacaatgtatcattatcttcattctataaggtcattgttactacttctctcaaattgcactttctgnnnnnnnnnnnnnnnnnnnnnnnnnnnnnnnnnnnnnnnnnnnnnnnnnnnnnnnncctcattgtattcatagacaaatttttttcaatatattttgcaagaaaaatctttgaataagactaactgcatttaaaaggaataacctccttctccctttccccaactacaaaaatgtttggcaactttgtgtttacatttaaagatcatttgcacctttttcaaggaaaaaaagtattgagtaaacaattgtttacatatatcatttatgcttttttctagcatgtataacttttttaaataaaggtagtatttaccattaaaaaaattttagctaatgctttttatccttgtacttttgttatttaatttggaatttctgtttctatataatttattttatccgtatgtaaagttacaagtgctttcaacttgaataaaaggattgccagctagaa

SEQ ID NO: 85180 - DNA, 658 bp, Homo Sapiens
tctcagtcaagaatcagtcaaggagacttatatagactcagtcaaggagtcttgtatctcaggtaccatctgagtcaggtacaagaaaataagaaaggaaattaatctataataaaaagtcaagattaagaggtcatgctctgtgacttggtctccaaagtcaatcttccacaaaacctaagcttttagaagccccaaatagacagactattccttttctttcacattttccccttttcttcaagatctttgaagaaagcattacggaagaagcatttgttagagagtagttatatctcacatcactaggaagtctcattcctagagagtcatgccccacagagaggggaaatgtttaattcataagccgaaagaagccaaagcctaattatgaacaacagaaggaaagtataacttagtggtctgattctggttgtgtgacttattttcaattaaggcaactttttaagcaattattattctagttttagtcattgatcacaagcaagctgaaacacgaatcatgagtaatttgataactaggaaaatggaaactgtacttatgattataataacaattacttgaagaccagaacgaaaaaatgaacttagccctgagggtaaccaactaaacaagtcatttagagaatccattttc

SEQ ID NO: 85181 - DNA, 973 bp, Homo Sapiens
tatcatctcaaatttataaactttggtaacattcttaagtgatcatgcattcgtaatgtgtttgtgactgactccagagcatatgcatttttggggggtgacatcacacccaagaggattaaaatggattcttggatggggggctcttactgtttctgtgttttagaaacagatgtacagatgatacataaccgaatacacagtatacctgtggtatggaaggttcatggggtggtgacaaggaaaagtgtccaacacgtctccttccgggagtgctaatgacaaagaaaaaggctgagaatcatttgtctagttattgcaccacctgttgctatttgataacgtgttttaaagggcatgggaaagatgatgaagcagaggaatctcaggaactttctggagtcagatgaatataaatccaattcttcacgtggttgtagatctgtaccactctgagatcagtctctttatcttccatcaggccatggtccaaatgcagggggagctgagggttcagcatggaggtcgttccaccgggtctgcttgtgttacgatcaatttgtcttcagagacagcgcccgtgcttccagagacagactttgttcttaccatcccatcttcccacaatttcagtgttatttaccagcaggaaaagacgattttgactgattgagttgaatgtgctgagttgatggtgagttcaatatggctgcaaagctcggtactgtcctggtcattgtgccttccgggagagggagaacgactgtgagttcctgagcccaaaggtgatcttttcttgctttgtagttctgaggagactgcacctggacaagttgtagaaatttgggtctgtgcggtatgagatgcatgtatgcaagactaaaaggcattcagccaacggatctgcatttggtaagagccggggattgggacgaggcagagagcaagaccaagctggcttcctctccggttt

SEQ ID NO: 85182 - DNA, 422 bp, Homo Sapiens
ttgaagtgaagtcagtaattcaggggtgttggacacagccaagattgtttatacaccccttggagagaccgtccatagtttggcttgatgcatgacatgggggaagcgggtatcagaggtaggggattcctaactgtccagctttaaatctcagctccatcacctacaggctgggtggctttaagcaacagcctattctatcttcctaagcttcagtctccccacctatgaagggggagggtgataacattacctcctcacaggacccatgaattaatatatatccaaagctcttggaacagataataagcacttaataaatgtttcttgtttttgtagttattgatgatattattccaaaattcccaggaggacggttataaaatgttctcatctgccaggcacagtggctaacgcctgta

SEQ ID NO: 85183 - DNA, 239 bp, Homo Sapiens
agaggatccgtgtcatcccccttcgttcgacgatggcgcgtcttcctggctgcttgttcaagcggcgacacggacgaggtctcaaagctgctgaccggggcgccgacattcaattacgccaatgtggacggactcactgccctgaaccaggcttgcattgatgacaatgttgatatggtgaagttcctggtagaaaaatggagcaaatattaatcaacctgataatgaaggctggatac

SEQ ID NO: 85184 - DNA, 474 bp, Homo Sapiens
caaaaccactacctggaactcggtgcctccgtggttaactttcctattttgcttgtgatttaaaggctgttctgggtcaggggggaaaaggtgtctccttcggtagggaatatataacgtggtgataacctgtcactaggcagaagcatccactctgcagggacagtggcccctcgggaaagcccgccgctcctggccaaggcctctctgcagactccacgggggctcaccctctgccgtcaggcgactctgaaattccgacatttctcccttaaagtctcaacagacacaagagaagtttccatcaagcaagcactgacatatttatattaaaaaatagtgcaaaatctcaacatttatataaataactctaaacccctgctttgtaatttttttctttacaaggtaatacacactttctgacttggcactcaaaaattgccatttttttcctcttctagttcagaaaacaac

SEQ ID NO: 85185 - DNA, 502 bp, Homo Sapiens
gccaaatagagtactgatcagacctatgcagaaatgagtatagttcatacagcagctctaagacccgcctaagagctttaccataggaagaaattaaaaaagccttgttaaactattaatatctcatagtgcctctgcagcacattccaagaacagcatcagagtgaagcaacctctaaattaagagaacactatctggtccataaggccgtggttgaacaccattcactgtgaggctcctgcgggtcctctggtgatgttacaggagatagacaagctaagctggtagtagtggtggaggagttgacatctggatttcccatcctcacttcaacccaagaagcacaggtttcatactttatgtcaggttttacataaaacacttgtaaaaaggtccccgttgccaaaaacaaatttaaaaattggcatgagagtataagatctaatgatcagaataaatgcagtattataaaaacatcacatttttaaaatcacatataca

SEQ ID NO: 85186 - DNA, 1314 bp, Homo Sapiens
  misc_feature (109)..(155): n is a, c, g, or t
  misc_feature (372)..(411): n is a, c, g, or t
  misc_feature (451)..(484): n is a, c, g, or t
  misc_feature (502)..(739): n is a, c, g, or t
gtttcatttgctttgggcttacttagagtttggcaaatgagagttatgtaacgacccacaaatgaagatcagttctgcacccccccagcattctcctgtggcccttagnnnnnnnnnnnnnnnnnnnnnnnnnnnnnnnnnnnnnnnnnnnnnnnacaataaccgtatggggttttttctctttccttttttgtgagcggtatttaattcctttgctctaatatgtaatattagaacatattacaaagtagcaagaaaaatacgacattggtgtaaaaataatctacacctcatggaaagaatgaagagccagaaatagattctattctgtagaaaatcttacacaataaaggacttcaaaataagggtaannnnnnnnnnnnnnnnnnnnnnnnnnnnnnnnnnnnnnnnaaaatttgggaaaaaagtcatactatgtgccacccctgcnnnnnnnnnnnnnnnnnnnnnnnnnnnnnnnnnngagatggagtctcactgnnnnnnnnnnnnnnnnnnnnnnnnnnnnnnnnnnnnnnnnnnnnnnnnnnnnnnnnnnnnnnnnnnnnnnnnnnnnnnnnnnnnnnnnnnnnnnnnnnnnnnnnnnnnnnnnnnnnnnnnnnnnnnnnnnnnnnnnnnnnnnnnnnnnnnnnnnnnnnnnnnnnnnnnnnnnnnnnnnnnnnnnnnnnnnnnnnnnnnnnnnnnnnnnnnnnnnnnnnnnnnnnnnnnnnnnnnnnnntgggccacggcgcttggcccacccctgcatttattgagttaaattttaaaaatcctatcctaggaaattggtggtggggctcagaaaatgataccccaaagtatgaagctgtgggaggctgaatgctttgaactaaagtatctgaccatcgctcactccttttccctcccaaaaccctcctgaagcgcagggaggggccttctctgatgttctcttttgtttctaagggaagttcctgcagaaggaatgccattgtcttgagccctttccctagcatctcataaaacatggacaattaactcacagggaaaggatactgaaggtgataccatctcttctgaggactgggctgcttgagaggttttatctgcatgacaagacagcctttgtttgccatgcatttcctcccctcaacctcctagcgtctgctgccacctcctcccagaaacctcaggccccagtttttggagctcaaatgctatttagacttcatcagtctggcccttactagagtctcacattttgtgggactcctgtgcatgtatgtaataaatttgcatgccttttctcctatt

SEQ ID NO: 85187 - DNA, 734 bp, Homo Sapiens
agtatggccatagagcgctaggtgtgtcactggccccagagcagagtttccaggctgcagaagtgagcctcagctacctgacttcaccttacctcaccctctagatcctccctccaacctgtcccccaagctagagaagtgaggcttaatggtaagagcacacccagctggaagtcataaggcctgtgatcaagtgctgacccctttattgtgtgacatgggacaagcatctgtgcctctgtggcctttgctgttcttgtcttgatcagagcctacatgaactggagcctgcatctccctgcctgtccacactggggctgcaacagtgggcaatccaggaagttgtcaagcaccagggcctttttggagtggaagtagcgcttctgctttgtgggcctcggatctccccacttctgactcagccttcctccatcagtttcacatgggaaggcacagaccctggcactatcctgcagcccaatccataactctgaactcaactctggattctaattacttgtgcatgttacctgtccagagagagctatgtgtccagacaccaccagagggtctcaggaaggagccaggcaagggactccaggatgcaatggggaggggggcagaagaggtagacattcagaccaccactcctccctttaagacaactgctgtctccaccctgtctcctgctgtcttctgtaaagccaccagggtggagacaaggtagagccgag

SEQ ID NO: 85188 - DNA, 593 bp, Homo Sapiens
agacatgagccactgtgcctggcccagtgtggaaaattaagtgaggcatgtatgatgagaacggctgcacgtgggagatgctccgtggatgtttgtagaacgctggcttccgtgtttcctcgttgtggctgtggtggtgtgggtctttgcctgtggacccgtggaagacaaagaagacagttttggatggtcaagctattttcttgcttcagggctccctcccctgctttttgaagcctcacaaaccaggactgtgagggcaggaaggcttggggtctttgtgtgctgagcctcattagggttttaagaacctccctcctttcatctctagcttacgagagggatgattcattatcttccctcctcaggctgcagtagaagcagacagtctctgcctccctgcttgcctttcctccctcccattcactgttgattattgccctcaagaataacaggttgcccagctactcgagaagcttaagtgggaggattgcttgaccccaggagttcgaggctgcagtgagctatgatcgcttcactgcgctatagcctggcagacacagagagaccctatctcaagcaaacagacaaac

SEQ ID NO: 85189 - DNA, 835 bp, Homo Sapiens
cagtcgacggtaccggacatatgcccgggaattcggccattacggccgggggggagtgtgtgtatttcctcccgttctttatcagagcccccaaaataagtaggaatgggcagtggctattcacattcactacaccttttccatttgctaataaggccctgccaggctgggagggaattgtccctgcctgcttctggagaaagaagatattgacaccatctacgggcaccatggaactgcttcaagtgaccattctttttcgtctgcccagtatttgcagcagtaacagcacaggtgttttagaggcagctaataattcacttgtgttactacaacaaaaccatctataacaacaccaaacacagaatcattacagaaaaatgttgtcacaccaacaactggaacaactcctaaaggaacaatcaccaatgaattacttaaaatgtctctgatgtcaacagctacttttttaacaagtaaagatgaaggattgaaagccacaaccactgatgtcaggaagaatggactccatcatttcaaacgtaacagtaacaagtgttacacttccaaatgctgtttcaacattacaaagttccaaacccaagacctgaaactcagagttcaattaaaacaacagaaataccaggtagtgttctacaacagatgcatcaccttctaaaactggtacattaacctcaataccagttacattccagaaaaacacctcacagtctcaagtaataggcacctgagggtggaaaaatgcaagcacttcagcaaccagcgtcttattccagtattattttgccggggttatgctttgattgtaataccc

SEQ ID NO: 85190 - DNA, 1183 bp, Homo Sapiens
  misc_feature (981)..(989): n is a, c, g, or t
  misc_feature (1054)..(1090): n is a, c, g, or t
cagtcgacggtaccggacatatgcccgggaattcggccattacggccggggattcactacaccttttccatttgctaataaggccctgccaggctgggagggaattgtccctgcctgcttctggagaaagaagatattgacaccatctacgggcaccatggaactgcttcaagtgaccattctttttcttctgcccagtatttgcagcagtaacagcacaggtgttttagaggcagctaataattcacttgttactacaacaaaaccatctataacaacaccaaacacagaatcattacagaaaaatgttgtcacaccaacaactggaacaactcctaaaggaacaatcaccaatgaattacttaaaatgtctctgatgtcaacagctacttttttaacaagtaaagatgaaggattgaaagccacaaccactgatgtcaggaagaatgactccatcatttcaaacgtaacagtaacaagtgttacacttccaaatgctgtttcaacattacaaagttccaaacccaagactgaaactcagagttcaattaaaacaacagaaataccaggtagtgttctacaaccagatgcatcaccttctaaaactggtacattaacctcaataccagttacaattccagaaaacacctcacagtctcaagtaataggcactgagggtggaaaaaatgcaagcacttcagcaaccagccggtcttattccagtattattttgccggtggttattgctttgatttgtaataacactttcagtatttgttctggtgggtttgtaccgaatgtgctggaaggcagatccgggcacacccagaaaatggaaatgatcaacctccatcctgataaagaagagcgtgaaagctttcttaccgtttaagacaaatttcctcatgaattctgggtggagcacctctgcaacaaggaaaaaaacccaagaactggaccagcttgaaggaatttcctctnnnnnnnnntaagggcaattaaattacgctttaaaatccttccagcctttcttatgtgcaccaaaggggtgtgnnnnnnnnnnnnnnnnnnnnnnnnnnnnnnnnnnnnntcaatattcccccgaccttttccacataaaccctggcctggcctgtgaaaaattggtaaaccccaaaaaaacgtttttttggtgtttcccccc

SEQ ID NO: 85191 - DNA, 1214 bp, Homo Sapiens
  misc_feature (106)..(122): n is a, c, g, or t
ggggaggccgtgggtacgaccggaagccgcagcatgctgatcccattttcaatgaagaattgcttccagttactttgtaactgccaggtcccagcagctggctttnnnnnnnnnnnnnnnnntgggctcattttacagtcaatttccaatgatgtctatcaaaatctggctgtggaagactggatccatgaccatatgaatctagaaggcaaaccaattctattcttttggcagaattctccctctgttgtaattggtaggcatcaaaatccttggcaggaatgtaacctgaatctaatgagagaagaaggtataaaactggctcggagaagaagtggaggaggaacagtctaccatgatatgggtaatatcaatttgactttctttacaaccaaaaaaaagtatgatagaatggaaaatctgaaattaattgtgagagctctgaatgctgtccaaccccagctggatgtgcaggctaccaaaagatttgaccttttacttgatggacagtttaaaatctcaggaacagcttctaagatcggccggactactgcctatcaccattgcactttattatgtagtactgatggggacgttcctgtcttctttgctaaagagcccttaccaagggatcaagagcaatgccactgctagcatacccttccttagtgaaaaatcttttggaaaaggatcccactctgacctgtgaagtactaatgaatgctgttgctacagagtatgctgcctatcatcaaattgataatcacattcacctaataaacccaacggatgagacactgtttcctggaataaatagcaaagccaaagaactgcaaacttgggagtggatatatggcaaaactccaaagtttagtataaatacttcctttcatgtgttatatgaacagtcacacttggaaattaaagtattcatagacataaagaatggaagaattgaaatttgtaatattgaagcacctgatcattggttgccattggaaatacgtgacaaattaaattcaagtcttattggcagtaagttttgcccaactgaaactaccatgctaacaaatatattacttagaacatgtccacaagaccacaaactaaacagtaaatggaatattctctgtgaaaaaattaagggaataatgtgattccaagtaaatgtcttaatacagtttcaattagaaaataaaatgtctcatacttgc

SEQ ID NO: 85192 - DNA, 377 bp, Homo Sapiens
  misc_feature (141)..(317): n is a, c, g, or t
tcgctcactctccttgctgggcagacagtcagtgtatccagggtgcagtgattttggagtatccaggtgtggatgaactatttacttgtggttggagtgcttcccagattctcatagccagggcccaggcatggtgctcannnnnnnnnnnnnnnnnnnnnnnnnnnnnnnnnnnnnnnnnnnnnnnnnnnnnnnnnnnnnnnnnnnnnnnnnnnnnnnnnnnnnnnnnnnnnnnnnnnnnnnnnnnnnnnnnnnnnnnnnnnnnnnnnnnnnnnnnnnnnnnnnnnnnnnnnnnnnnnnnnnnnnnnnnnnnnnnntgcttgagcttggcagggtgagattggagtgagccatgattgtgccattgcacgccagcc

SEQ ID NO: 85193 - DNA, 1458 bp, Homo Sapiens
  misc_feature (1173)..(1226): n is a, c, g, or t
  misc_feature (1292)..(1334): n is a, c, g, or t
ggcaaggaagggaaaggtcagctgggcacagtccagttctcagcagtaatgacagaaatgaaggaaggaagctcagaatgagtgcacgggggaaatgggttttgctgatccatttccagggccggccgttactctttgttttggccacacttttcctgacaaacagccagtgttctcaacacataaatactagtccacgttaacaacaatagcatatgagaccgctctccgtaaagatgccagattggatgcaaatggactggaaataccttggaggtttcacaaaaataagacaaagggcaaaggaactttgccaaaggagatggagagcaattctttaaagttagtgggagggaggaagcaaagagctcataaatacaagcctcttaaaatgggacgcatgtgcctcgcccctactgggtgtctgcagctcagcttggtgccccacacaggacaccgactttaagtggctgcctttgcaaggctgagaggcccatgagggttgatgcctgaagtgtcagcgccatctagtggaaacatggggcatggccgctttggacggcctcagcctaaaatgagaggcagagagacacgctctatttcgcatctcacaatgcaagatgagagaaaggctgttgagttttatttcatcatcgcccgtttaggtcaaaggagatgccactttggctcccagtcatcaatcaactggcaacacccaaggaccaggctgggctacatttgcacattccatttcagcccaggtagagatggagacacttataagaacggcttcggaatgttctccagtttgattctcagatgtcaaagcctgtaggccatgagaggtccctacttaaacagaacagctatcctttggtaccctctccaaagaaaagaaagagtaaaaaaataataacttttaaaaatagcttatttatgtgcagaaggtgtgagacctgaagatgagttaacagccgcagcagtgggaggaggggtgacaggtactgctcaaatgagcagcaaccttctgccacctggcaagaacaggcgttcagtgcagggctggcctgcccctgcaggcttcagagaccactgcgtttcttagaagggaaacaacggggccgggcgcggtggctcatgcctgtaatcccagcactttcagaggccacggtnnnnnnnnnnnnnnnnnnnnnnnnnnnnnnnnnnnnnnnnnnnnnnnnnnnnnnatctgcctggcccatatagtgaaaccctgtctctactaaaaatacaaaaatcagccgggcatggtnnnnnnnnnnnnnnnnnnnnnnnnnnnnnnnnnnnnnnnnnnnacaacagtccagagatgatgccatttccggggaaagaggttgacttgaggaaggcagccatgggaataaaagctcccacagatccttttcactaaaaagaaagcaggccgggtgcagtagctca

SEQ ID NO: 85194 - DNA, 1107 bp, Homo Sapiens
aacctacgctctaggtagcgaggctgggtggctgaatcggcacgagggtgtaccaggaaattgccatcctcaagaagctggaccaccccaatgtggtgaagctggtggaggtcctggatgaccccaatgaggaccatctgtacatggtgttcgaactggtcaaccaagggcccgtgatggaagtgcccaccctcaaaccactctctgaagaccaggcccgtttctacttccaggatctgatcaaaggcatcgagtacttacactaccagaagatcatccaccgtgacatcaaaccttccaacctcctggtcggagaagatgggcacatcaagatcgctgactttggtgtgagcaatgaattcaagggcagtgacgcgctcctctccaacaccgtgggcacgcccgccttcatggcacccgagtcgctctctgagacctgcaagatcttctctgggaaggccttggatgtttgggccatgggtgtgacactatactgctttgtctttggccagtgcccattcatggacgagcggatcatgtgtttacacagtaagatcaagagtcaggccctggaatttccagaccagcccgacatagctgaggacttgaaggacctgatcacccgtatgctggacaagaaccccgagtcgaggatcgtggtgccggaaatcaagatcctggtgaagaccatgatacgtaaacgctcctttgggaacccattcgagggcaaccggcgggaggaacgctcactgtcagcgcctggaaacttgctcacgaagcaaggcagcgaagacaacctccagggcaccgacccgccccccgtgggggaggaggaagtgctcttgtgagaggcagtccctgcgtggaaagttgctgggcccccgcccccggctcccccgcacgcatgcatccactgcggccggaggaggccatggagcccgagtagctgcctggatcgctcgacctcgcatgcgcgccgcgtcgcctctggggggctgctgcaccgcgtttccatagcagcatgtcctacggaaacccagcacgtgtggagagcctcgatcgtcatctctggttatttgttttttcctatgctgttttaaaggggcc

SEQ ID NO: 85195 - DNA, 936 bp, Homo Sapiens
acctggagcccgggtgcggcagtctgcaccgcgcgtcgctttcccggccggagtctcgccgccttcccgcgccccgtcagcgccccgcagagcagtcgagatgggtgagtcaagtgaagacatagaccaaatgttcagcactttgctgggagagatggatcttctgactcagagtttaggagttgacactctccctcctcctgaccctaatccacccagagctgaatttaactacagtgtggggtttaaagatttaaatgagtccttaaatgcactggaagaccaagatttagatgctctcatggcagatctggtagcagacataagtgaggctgagcagaggacaatccaggcacagaaagagtccttgcagaatcaacatcattcagcatctctacaagcatcaattttcagtggtgcagcctctcttggttatggaacaaatgttgctgccactggtatcagccaatatgaggatgacttaccacctccaccagccgatcctgtgttagaccttccactgccaccaccacctcctgaacctctctctcaggaagaggaagaagcccaagccaaggctgataaaattaagctggcgctggaaaaactgaaggaggccaaggttaagaagctcgtcgtcaaggtgcacatgaatgataacagcacaaagtcactgatggtggatgagcggcagctggcccgagatgttctggacaaccttttcgagaaaactcattgtgactgcaatgtagactggtgtctttatgaaatctacccggaactacaaattgagaggttttttgaagaccatgaaaatgttgttgaagtcttatcagactggacaagagacacagaaaataaaatactatttttggagaaagaggagaaatatgctgtatttaaaaacccccagaatttctacttggataacagagg

SEQ ID NO: 85196 - DNA, 346 bp, Homo Sapiens
  misc_feature (147)..(147): n is a, c, g, or t
ctccacaatagaatcctaaaccttgaagcctgtgggacccatggtgtgaagcctgggcctcccgcaagttggtaaaggagcacctaagttggccgacatttttgccaggaattgaagtgtctattgcatctaatgcacaggtgtcanctctgcccaagcagcccccacactggaatggaaccagtgttctggggttctttcttggggagatctattcctttatatataaacatcattcaattaaagggaaggggtttatgtctggagttttggcctggcagctaaaaataccaggttgccaagtactgatttccttctaaattccccaaagtagcagagaaagctg

SEQ ID NO: 85197 - DNA, 643 bp, Homo Sapiens
aattagccaggcatgagcccctgtgcctggccagaaatgtatttttataagacatacatactattaggttcattgcagcattgtttataatagtaaacaaatggtcccaatgtcaatttccatcagtaaggactctatttgctgtgtattcaaatcttttataacaggaatgcgtgtattttgtgtaagaaagaatagtaggctatggaggagggggtgatagcagcagagagaagcataaaagacctctttggcaggaaggatggcttccagaccagctaagtggagcaagcatgttttgaaggacactggctctaatagggagttagcatggggtgggtcacagaacgtatttgatcaggcaaagaggactcttgccatccaagcctgttccctcagataaatggggataattcatatgtcataagccaaataaatgagggaatgaaacatacgtaactaataataaaaagtgttaaaatttattgggcatttaactgagacaatctggttccagagcctgctctcaatcccaatgatgtgctaccttcacatcctagttacgccactgactagctttgtgactttggacaagttatttaacatcccaggatctgtttttacctgtgtaaaaatgcatata

SEQ ID NO: 85198 - DNA, 451 bp, Homo Sapiens
  misc_feature (73)..(73): n is a, c, g, or t
attcccaggaccactcggcagagcccgggactgagtgagcaggaggtggcaacgggacctgcctggaaaaggnacttcctgtcaaccaaagcatacatcgcttacaatgttgaagcggttgagaaaacgcacactcagcatctgtctaacatctttagattaaaaactaaaactaaaaggtgatttttttgctacccagtctgtggagacattgaatgaaacgcgtgttagacagtcttagaggttaaagcatgcttcagtgttcaccaccgatccagagggactggttagtcaatgcagttctacttagatttctgtcttaatatatatcttaaacggaaataacttacagaacacttaagattggtctaacattgtcgggatttcaaacgattcgaacatgtacggttgcatccccagagtataaaaaccttctcacttctcattcaga

SEQ ID NO: 85199 - DNA, 407 bp, Homo Sapiens
gagattactcctattcccgttgaagtgatttgctttgttaacaaaaaattgcagctattgtctagctttcatttttttactgagaactttaaattagtcccctattagaatagggttgctactcatctttttttaaaaaccgaatttcatcatttatctaaaaagaaaatatgcagaataactggtcttgttaagagtgcaatattatatttttatgtaaaaataaaaattaatttggggggattatttattcagcatgaaacctaatatgtatatgtttgaaatacttcataatgtgcatgttgtagcaaacatttctgtaaattatcacaagctctgttacctttatatacactgcctcttcaatttggaaataaatttcataaaaatagatgtaaacaaaaaaa

SEQ ID NO: 85200 - DNA, 587 bp, Homo Sapiens
  misc_feature (223)..(223): n is a, c, g, or t
ataatgggaactcaacaaatttgttaaactgaaatcaaaggaaaagcagccccagaacaaaaatgacagctatttaggggtattcactggttttcaactgctgaaaagagaacagctgcaagaaaactattgtatgctgagccaaactagcattaaagttgaagggcaaaataaaatcactgacatgcaaggactggaaagattaccaaccacagaccctctntaagcagatacactcgagaatttctagcgaaagaaaaaaatgaagctaagaaagtggtcgataagtaacaagaaagtgttaaacaaacttgtaaaattataagttaaatctaaaaagttgttgatagcacaatggaaaaaataattaatagaactaaactaaaactaaaatctcaaatgatcttaacatagtggctttggaatggggggataggatatggggaaagtgaaagtagactaatttggaattgtgtcaaatcaataggtaactatccagggagagtatagagatgttgactaataccagatattcatagaaaaatatatgcttaaatgtgtgttaaaatttaaggataatcaccaag

SEQ ID NO: 85201 - DNA, 452 bp, Homo Sapiens
tcttccaacattgtcaagtaaagtccacggaagagctcaacagtttctttaaagtcctctccgattgctcaacatgcatattcttttcaagttaaaactgcctctcaaggccatagtatatctcaccataagtcaacaccaatctcttcttcaagaagaaaatcaagaaaactggctgttaattttggtgtttctaaaccttctgagtaaatttggctcttagaattaagttaatttcttctctttccatctacctttttataaatacatatctatgtctcataaaaattagaatgtactattttaaaataatatgtgtaaattgaaatttttttcatttttaagttatcaggcacttttcatgctgtttaaaagactgtgtatcaaattgtgcactttaagtatgtgcagtttgttgtatgtcaattacacctcaataaatctgtaataaa

SEQ ID NO: 85202 - DNA, 466 bp, Homo Sapiens
aatggattggagggaggccagactggaggcccagtggctagagaccagataggcagttacagtcttccagactgcgagacaatctctctttagtgccaagattagcataaaatcatagcattatataacccaattattctttgattcctgcatccccaatctgactcagcattctaaatttacttaagatctggggacaagggtttttggcaaatccttgaaggcaaatgatgttacagtcaatcagtatatgccttgagccagacagacatgggtacgggcctcagttctgctgcttgctagctatgtgactttgcacaagtgatttaacttctctgggccttggattccttactggtaacacgagcataatcgattcctcacagaattaagtgagaaaactatgtatgtaggacttcttatggagtgggtacttagaaataaatggtagccgttatcatttaaa

SEQ ID NO: 85203 - DNA, 411 bp, Homo Sapiens
aaaaagtcactgctcttcctatttgtacctctgtttcctactggctttgatgttttctttgaaaaagttattcagtctgtgctctgtgctcagaccttggtcaggaagaatattggaacagtggaggaatcagtccccacagggaaacagggtcttatgggtctgataagttacagatgattgaccacacttgggaacactttgaaactttacagactagagctttccaggtagctaaggtagaattccatagtgagtagcctcagtctgcaagtgtgacaaggtgatctgctttatgaggcttttaggaaaatgataggtgaggacagtgggcagtagcagggagaagataattcagggcatgaatgataggtgattacagattctctggctggacatggtggtcacgcg

SEQ ID NO: 85204 - DNA, 680 bp, Homo Sapiens
acccttcaccccaaagaccccttcacccttcaccagggaattctatcctgggtgctgtcccacctatgaccccttcaagaggccattggaaaaaggccatttacaagttaatgttacttatagctttgttactaagactcacctattgttagtgcagccaagtcacagaagtgcttattgcagttaaatagcaatttgtttccatgaaactgcaattaaagtattactgagcagccattttagattggcagtgctctgaacgcatgttaaacagccagctactcccacttgcagagtctgagatctgactagcagcaaagtgtagcacattcgccgatgctgggtacctagttaaagaggcatttgtagccctctgctcccatcgtgaacatgctgagagcaatgacaagtcagggctgatttttggaaggtgaacttgcaacttacctcaagtgaatactgttttcagttgtgcaagaagtgctttatgctagtagatatgtgcatgtttcctagagggaatgttttcaagttcagattgattctgctgagaatggacggcaactcggaggcctcaagccaataatgtactacaggccctgacatgttacagctgtgtaaacagggccattctatttcctaaatcacaactaataaagcagaggatgaaaatcaaaaaa

SEQ ID NO: 85205 - DNA, 1246 bp, Homo Sapiens
aaaatctgtaagaatctgaaggacatttacgaaaagcaacagttggaggctgccaaagaaaagagacaagaggaaaaccacggcaaacttgatgtcaattctaactgtgttaatgaagagcaaccagaggctgaagtaggtatctctcaaaaggattccaatcctgaagattccggggaaggaaagaaagaatctcttgaaagcgacgtgagttggaaggcttacaggatgctcctgcagggccacaggtgtctgaggagtaaaagccagagcaagtgccagtgtggatggtcctcaccctgcaagaagctggaaaactcctaggaatgcattgtcctcaccttgttacacctgcgtggcaccatggcaggattccacatttcatagaatacaggttttcaagcaaacccctgttgaccatgccctaatttcctattgatttctgttgtataattgaatggatattcctatggaaaattttttgtttcaaaatacaggaaaaacattcctattacctttctgaggctggctttccagcaattgtttcaaaggaaaatagatccccttaaagaaaaaatacaggctttagggaacaaagggacaagcagaacaggtgtggaagagagattttcaggaagggaaaaatttatagctacagagggtagttagaaaaatcataacttatatgtgaataaaatacatataagcagcatctacggtagtggcattctacctattaagatgcaatgaaatgaagaaaggctttatgttcaaggacctttgccatagttcagctaattgtagttttatatagaaatgatcctgaacactctgaacttgacgtagtcctgcggtgatattctatctgcagtatttgtacctccagaatggcagatccctcagcaggaacaaaggcatattgacggttctctcagcgtatgcattaaaaaaggtacttcctgaaacttttgattcaataatgactaaacatactatgtacacaattactgtaaggctaattcacgtgccatactccacctgaaagcctgagttatcttgctataagcttttcatggagcacttcctttccagaaactgatttgtaactcatttagagaatgtcctggcgtcggtttttagcatatgtggtatttaaacagagctagaatgtgatgtctgaagataatgctgcatttctgggtttcttgtgtggattttaaaataaattgtgcctacaaatataaac

SEQ ID NO: 85206 - DNA, 579 bp, Homo Sapiens
  misc_feature (390)..(406): n is a, c, g, or t
acaattcccaaataaattgtcacaataaaacaaggttgcttatgcagaacccttgaaatacaatgtatgtaaaaatatttttactactgtgctcaagaatagagattttgaggacaattcttacatatttaagaagcaaaaactttagttaatactcagactttattcaacatcagaaaatatgcaatgaagagaaaatctacaatttaaatcagcttgcagatacatttacttctggatcacaacttactcagcattagaaaattcacactggctgggcgtggtgactcaccctgtaatcctaacactttggaagtctgagggcaggaagaggccttgagtccaggaattccagaccagcgtgggcaacatagcgagacactatctctnnnnnnnnnnnnnnnnnttagccaggtgtggtggcgcacacttgtcccagctactcaggaggctaaggtggcagggtcctttgagaccagggtcctttgagccgaggctatagtatgccatgatcacgcctctaaatagacactgcattccaaactaggcaacataatggcatcctgtctctaaaataaa

SEQ ID NO: 85207 - DNA, 815 bp, Homo Sapiens
tgggaagagaggctgcaggaacagcggagaacagttcaggacaagaagaaaacagcccggcgcaccagtcgtagtaacccccccaaacaaaagggaaagactcctgctcccaaaccagccagtcccaagaagaacattaaaactaggagtgcccagaagaaaacaaacccgaaaagagtgtgagctaactagtttccaaagcggagacttccgacttccttacaggatgaggctgggcattgcctgggacagcctatgtaaggccatgtgccccttgccctaacaactcactgcagtgctcttcatagacacatcttgcagcatttttcttaaggctatgcttcagtttttctttgtaagccatcacaagccatagtggtaggtttgccctttggtacagaaggtgagttaaagctggtggaaaaggcttattgcattgcattcagagtaacctgtgtgcatactctagaagagtagggaaaataatgcttgttacaattcgacctaatatgtgcattgtaaaataaatgccatatttcaaacaaaacacgtaatttttttacagtatgttttattaccttttgatatctgttgttgcaatgttagtgatgttttaaaatgtgatcgaaaatataatgcttctaagaaggaacagtagtggaatgaatgtctaaaagatctttatgtgtttatggtctgcagaaggatttttgtgatgaaaggggattttttgaaaaatctagagaagtagcatatggaaaattataatgtgtcttttttacaatgacttcagctctgttttcagctagaaactc

SEQ ID NO: 85208 - DNA, 471 bp, Homo Sapiens
  misc_feature (339)..(391): n is a, c, g, or t
gtaacatggtactgtatgcgatttgtggcaaacatttaggtggggtcataagctattccacatttttcagaaggccactaaaaacaaccacagacttccttttggaatattaatttcagcatattattattgtagccaagcagactgttttgttttcagttaaagcttataaaaaataattaaacctaacacatgataaattttgttttcatatacaaaaaacccagagacagatggattcccttcattgcagttggtgatatttactgaaagaactaacataaatttgatatttttcctcttgaagaaaaaaatgggctggtcacggtggctcaaacnnnnnnnnnnnnnnnnnnnnnnnnnnnnnnnnnnnnnnnnnnnnnnnnnnnnnaccatcctgggcaacatggtgaaaccctgtgtctaaaagaaatacacacaaaaaattagctcagcatgctggcacatgct

SEQ ID NO: 85209 - DNA, 504 bp, Homo Sapiens
  misc_feature (326)..(435): n is a, c, g, or t
attaccaatactgagttaaatattttaggactacttcattatctaggaaatttgagaagcaaattaactctttgctcagagtattgtgataccatatcttttcttgtaaaataagatattgtttaattataaaatattgtcaaatttctgaaaaagtgtttatataagtgttaggaatatgttagccctgggagccatgtgttacttatcattgtacagatcttcttgctgacacaactgggtatggtagacggcctgatatgattaactgcaagtaaagcagaaattattaaaaacaatattgaggccaggcaaggtggctcatnnnnnnnnnnnnnnnnnnnnnnnnnnnnnnnnnnnnnnnnnnnnnnnnnnnnnnnnnnnnnnnnnnnnnnnnnnnnnnnnnnnnnnnnnnnnnnnnnnnnnnnnnnnnnnttaggtgggcatggtggtgggttcctgtaatcccaggctgaggaagataattgcttgaacccagaaggt

SEQ ID NO: 85210 - DNA, 669 bp, Homo Sapiens
gtttagcctccctttccccattctcctgccagaaaagagggagttcaagtcttctttccaggactcctgtgttttggctgagactgattcttcactgtggccttgggagaaaagctgcctaaccagttctgggccctggctagttacaaccatgtgtgagttgtttacagtacgcacaggtatgggctgaagggaaacaaagcttaagggatgactagaaaggcttgctgaaattgctatgggagggccccacctccaagccatctcccctcacaccccgctcggtttcagtttctgcagcttggttatgcgacattctcttaatccttttttgaatctggtctctacttaagcactcaagaaaactgctccacaaggattgttttagtggggttttaattttttaaaatgttcttgtttatttaaattgcttgaacaagggtttagctgtatgggaagagttcctgcctttagctatacatgtttccacccacttagacatgctgctcacccacagactcatacagcctccacagacacaaagcttctgtgtatcctacatgtacctgcaccccaattctgtcaacctccccacagctcttgactggctgtttatctattccattccactaccttcccaccccagccctcaaagtcccaaacagattg

SEQ ID NO: 85211 - DNA, 787 bp, Homo Sapiens
atcggcacgaggtaggtgcacacactgtgaacatcgattttgacgactgccaagacaacaagtgtaaaaacggagcccactgcacagatgcagtgaacggctatacgtgcatatgccccgaaggttacagtggcttgttctgtgagttttctccacccatggtcctccctcgtaccagcccctgtgataattttgattgtcagaatggagctcagtgtatcgtcagaataaatgagccaatatgtcagtgtttgcctggctatcagggagaaaagtgtgaaaaattggttagtgtgaattttataaacaaagagtcttatcttcagattccttcagccaaggttcggcctcagacgaacataacacttcagattgccacagatgaagacagcggaatcctcctgtataagggtgacaaagaccatatcgcggtagaactctatcgggggcgtgttcgtgccagctatgacaccggctctcatccagcttctgccatttacagtgtggagacaatcaatgatggaaacttccacattgtggaactacttgccttggatcagagtctctctttgtccgtggatggtgggaaccccaaaatcatcactaacttgtccaaagcagtccactctgaatttgactctccacatctatgtaggaggcatgccaggcaagagtaacgtggcatctctgcgcaggcccctgggcagaacggaaccagcttccacggtgaatcggaaccttacatcaacaggagctgaggacttccagaagtgcgatgaaacaggct

SEQ ID NO: 85212 - DNA, 763 bp, Homo Sapiens
tttacacagtactgagtccccatcaaggagacatttaacagaaactcctactgacatccattggttccttggggattactgacaatgtaacaaatcaagacagcaacttccctggctgtgaccaccaactgtggaaaacagcagcttgatagctcaatgctgtgatggagccgtccggaaaacgactcctcaacaatgaaccaaaaagagaagtggtgatctgtacacaaacgccaggagtgacaagaaccaggtgcaggagtccactggctttcccagctctcctgggttgaggacagacggctgaactggctgtgctatttggagatgggccccaccgccccttttcaactgtacggctcaggctgcttaaccatagcaactccatgggctggggtgggggcatctacagggcttcctgggggctctcccgactgccgccccccgcccttgtcttatttggaatcttttcctaatagacctcaactgaaggccgcacctccttctcgcaacacttcttttctcctccgcattctcaaatttgagacgttgatgcgtgagttcaaaccagctagcaaggacagcctggaagccgatgaagaaatgacactcaggatcagagctggacggcatcggggagaaagcctggcagagagggcaggggcacagagcagtggttatgttgggaaacaaggctggggatgaggaaatcaggtttccaggcagatttccaaaccttattcctactgtacggctgttacaa

SEQ ID NO: 85213 - DNA, 439 bp, Homo Sapiens
cttcaaaagcctttggttggacaatgtaggatattgcccaactaatccctttgaccttgagtgccttaggccatggcccccaaccccaggcagcatgaagaatggatccaagaaggggacaccctagtggcagttggacctttgaggacctatcctaggatcaggttactgatttgggacctctgaatcagtacatcataacatcgagagtgatctctgccaaaattaaaattctgtcagaacagtataagcagaaggaagacattaggtctttctgaaatatggagctgataacttctatcagttctgaattctgtactgtcccacccccaaatcatctatattgttgcatgtacttagctttgtgccttgaattgctatttcctttttatcttgcactcaaatggtatttttagagatgtttcttcaatcaaaaatt

SEQ ID NO: 85214 - DNA, 544 bp, Homo Sapiens
agatctgtttggatttgggacaggagagttgtctgttttatagggtaatgtctatgaaaataatttatcacctaggtacttagtaaataccagtttctgtctctgtttttcttcaaagctttgttgacaatgtaggatattgccaactaatcctttgacttgagtgcttagccatgccccaatccaggcagcatgaagaatgatcaagaaggggacacctagtggcagttgacctttgaggatctatctaggatcaggttactgatttgggacctctgaatcagtacatcataacatcgagagtgatctctgccaaaattaaaattctgtcagaacagtataagcagaaggaagacattaggtctttctgaaatatggagctgataacttctatcagttctgaattctgtactgtcccacccccaaatcatctatattgttgcatgtacttagctttgtgccttgaattgctatttcctttttatcttgcactcagatggtatttttagagatgtttcttcaatcaaaacaagataaagttaaa

SEQ ID NO: 85215 - DNA, 683 bp, Homo Sapiens
  misc_feature (539)..(557): n is a, c, g, or t
cagggctataaaaagtattacttggaaatgaggcatcagaccaccagatgttaccgctcggttgaatgtgtccaccgtggagtggtttggtgacgctgtaaccattcccacgccagtgacctctgctgggtcacagccactcaggaggggaagggtcaggatgagaggctgcagcctcgacacttggcgcggcctgatactgaaatagcgtctactcgtgcactgaataaaaacagaaacttgatcattttattcctgattagattttatcactctctgctaagacaatatagtctggagtataagtgggaaagcttgatttaaatactgtgaactctaataatgtggaaaatatttttcaactttaattttctgaagtataaattatttatgtaaattcattgtttttgcatatttcttaggacatgcatctttaagctttatcattgcccatatgtacagaaagagaataaagacatatgtttatggatggaacttcgtcaaagtctgactgatttactttctatatgaaagctgcnnnnnnnnnnnnnnnnnnnctcagccagatgaaaggctcttaaaaggtaccttcacaagttgcctataatgaaaccaagtttccttcctggtacgtgggaaaaccaaggacagagtgaggatgaggtcaggagacccagggcctc

SEQ ID NO: 85216 - DNA, 453 bp, Homo Sapiens
aaaatgccttctactgagtcaggactgagttcttttagctagaaacctgaatctagctctcttctataaggtaattctagcttttctctttctggctttgtttttcttaactccagagaaagaataatctccatttatctacacagaacaagttggaggcttccctcttctaaccaagaaggtctgggttgtaagctgctatcttcaaacccatattttcaggcccatacacattttccaagtcaggagcttgaaaggggtgaaaaggaaaggccacaatagtagtttcttccttcctcaaagggccaactcctcagaatccagaagctaccacttgtactcatcgaacatgagggattttctgcagttactaatagcattaaataccagataatcagatttagaaaaagttgtaaggggagaaccatcatttgatttggcagttgtggtggg

SEQ ID NO: 85217 - DNA, 625 bp, Homo Sapiens
ggtggccagctttctttattcttggtaactgtgaggaagcactcctaaaaagttgaaaagcaggtgagtctggtgggaggcgaccaattagagaaaaaggatggaccctcaagactgcttaaggactgccaagaggctccttagaaacagatacattcggggacttcattacatctgtggagtctggggatgtctggtcctgggactaaaattagcagctgcactctttgggggcgcttctttgtagagcctctctctgtcatcagctgcttctcctcccacagtaggttcagtcagaggagcttggaggtcccacgagatgcagctggctgtgatttttgctacaggccacagtcaggagcacatgaatagtagcattggcacaggccacggtggaccgtttttcagtgtacagttccagcaaaacctggtattctccctgaggaatagtaaattcaggattattgacaggcccagcatagtaaatctgctctcctttccttcttccacagaaagaaaacttgggcagagccgcctcacagatgggataggagaaattcaaaacagatgagccttgagacatgagagctaggtcaagaaaaagctctttgatgtcctctcttaa

SEQ ID NO: 85218 - DNA, 533 bp, Homo Sapiens
  misc_feature (263)..(263): n is a, c, g, or t
  misc_feature (480)..(480): n is a, c, g, or t
accccaattgagtggggtagcaattggagtccttgtgtctcttttccaccccctgccatcctcacttagaggggccatggcactagatggcactagtcccccgataatttatgtctcgttgaaataattttgtatatcattctagtcctgaaatatttttttcatatgtgtaggtgaaatggtatgaataagctaacaggaatagtatctaaaaacagaaaacatccatattaaaatgtctaaacagggagctctggcttttnagtgggaatttccagagaacataagggtgtgggcaggtgggggaactcaggccagagttggcctcgctttgtggggaaactggtttggaatcaaacagagataccttctgtttcgggttttatttggccaacactgggagatttcccattaagatcctattttcagctctcttgaaaggcccaacctaggctgacattgtcacaggggcaggacagnagttacaacaggcttggagggagcagtgggtgtcacctcaactggggatgagt

SEQ ID NO: 85219 - DNA, 1415 bp, Homo Sapiens
acttccatacctgctgctggactgtaccagacgtctgtcccagtaaagtgatgtccagctgacatgcaataatttgatggaatcaaaaagaaccccggggctctcctgttctctcacatttaaaaattccattactccatttacaggagcgttcctaggaaaaggaattttaggaggagaatttgtgagcagtgaatctgacagcccaggaggtgggctcgctgataggcatgactttccttaatgtttaaagttttccgggccaagaatttttatccatgaagactttcctacttttctcggtgttcttatattacctactgttagtatttattgtttaccactatgttaatgcagggaaaagttgcacgtgtattattaaatattaggtagaaatcataccatgctactttgtacatataagtattttattcctgctttcgtgttacttttaataaataactactgtactcaatactctaaaaatactataacatgactgtgaaaatggcaatgttattgtcttcctataattatgaatatttttggatggattattagaatacatgaactcactaatgaaaggcatttgtaataagtcagaaagggacataggattcacatatcagactgttagggggagagtaatttatcagttctttggtctttctatttgtcattcatactatgtgatgaagatgtaagtgcaagggcatttataacactatactgcattcattaagataataggatcatgatttttcattaactcatttgattgatattatctccatgcattttttatttcttttagaaatgtaattatttgttctagcaatcattgctaacctctagtttgtagaaaatcaacactttataaatacataattatgatattatttttcattgtatcactgttctaaaaataccatatgattatagctgccactccatcaggagcaaattcttctgttaaaagctaactgatcaaccttgaccactttttttgacatgtgagatcaaagtgtcaagttggctgaggttttttggaaagctttagaactaataagctgctggtggcagctttgtaacgtatgattatctaagctgattttgatgctaaattatcttagtgatctaaggggcagtttagtgaagatggaatcttgtatttaaaaatagccttttaaaattcgtactgtgggtgatgtaatttgacaacttccaatcttaggagttatattaatcacccttgattttaagtttcctgatgttggggactaatttataatcaaggacaacaaagcaagcattaagcatatcaattattctggaccgggtcccttggagaagggatcgcacgtcgacaaaaacaacgacgaagggaagggaaaaggcaacaaaaaggcggaatc

SEQ ID NO: 85220 - DNA, 1519 bp, Homo Sapiens
gcaatacttccatgcaggaggcaatgggctgaagaaaaccttcctggagaagagcccagatctgcagtctctacgctatgccctgtctctgtacacacagactactgacactctcatcaagacctttgtgcgctcgcagaccacccaagggtctggtgtggacgatcctgtgggagaagtctctattcaggtggacttgtttacacaccctggtactggggagcacaaggtcacagtgaaagtggtggctgccaatgacctcaagtggcagacagcgggtatgttccggcctttcgtggaggtgactatggttggcccacaccaaagtgataagaagaggaagttcacaaccaaatccaaaagcaacaactgggcccccaagtacaatgagacattccacttcctcctgggaaatgaggaggggcccgagtcctatgagttgcagatatgcgtgaaggattactgctttgcccgggaagatcgcgtgctagggctggctgtgatgcctctgagggatgtcacagccaagggcagctgtgcctgctggtgccccttgggccggaagatccatatggatgagacaggcctgaccattctccggattttatctcagaggagcaatgacgaggtggcccgagaatttgtgaaactcaaatcagagtctcgttccacggaggaggggagctgaacaccttcgactcctgtgccaatcaggcagcagcaatttcacaaatcagggccagtgggagttagctgtgtaaccggcttagggtctttgcagtcaagaggctgaccccttcagttaaagatatttaaggaaaaatttggggtggtgataatatggcttttcacagaaagggtcatgaacgccctggcccaacaggactgtggtactaggggctgggatgtggggttaccacatggagcagattttccattaagagagcaaggacaaacatttctgagagtgtcagccattcttggtagacacctctccactcctcatcccacctctacccatctccatgccacaccttatccagttagacacatacataccaatcattagaagaacaagtctagcaacggtgtggaacttgtgcctggctggctgggtagtcagctgagcctgtcgctgagcccggtggtctggattggagtatggccagggccaggagtacacagaatagaatttagactgtcccttgagtagaatccactgattttctgtggctccagtgagaacaaggcctttgaaactgaaccaagataaccttctacaaatggaacttgtactaattcccttttcccccagattgtactcatggaggtaggacatctcaggttacacgttggtgccttcaaaaggccttgagaagacattatttcctttggacccccaggcactagtgggccaccttggcttgggaagtctcccattgctaaataccttctaggccagcggaacgtgatggctcaagcgacgtgaacacggttggtcctacatgtttcctcctgg

SEQ ID NO: 85221 - DNA, 858 bp, Homo Sapiens
ccctccttcccctccactccgctgagaatcctggaggaatacacaattcatcgttgcacccccacctcagagtgtaatcgcatttctgcttggtagaggccgagcccagcaaaggtggctccttctgaatgtgtggtcagcatctgtacaaatgcattttatttgctatagtttgtaaagctgtaaagttaaaagagatgaaaaccttttcagcataaatatattttacttgcactgtgttttttagctaaaagtgaaaacctagattaaataaaatcaaagttgagaagaatcatcaaaagactgtttctcggtgtgaatcaagtgttgaaaaatggttggtgtattttgtcagtaattgtacataacttttggcacatgacatagaaatggctatgtaaactataattattttgctaagagactgtatgcaagccttgggccgactttacagacgtccagagcaaagccccttctttgtacctatttttttattacaaatatactaattggttctttctattttcagaggttattgtatgaaattgtctattgatagtacttttatgactgtaaatactctggctttctccgtgtgaattctcacattagactttaattcgagcgcgtgtgaactgaacgctgatcagtattttttatcaacacctgagaactgttacaccttttattttgtcttttaggaaatccctgtctttccattttttcatgtaaattttgcacagttacttgttcatatgtaaatattttactttcagaaatgaagtttttaattgctattgttttatataggattgaaagaaaattaactcctttattaaaaacaaatttatctgtaaa

SEQ ID NO: 85222 - DNA, 451 bp, Homo Sapiens
gtgtcagccactgcacccagcctagtacctcttttcttgatccaagttctactgtaaaacatttttggcttgaaagaataattctcaagttttctatgctaaaaatgactgacaattttttcacatgaccacagaacaaaccttgggcatctgtataccacttagtttactaaagttacaacatggtgttgtaactgaaataaatgatttaataacttattcaaaactctttgggaagagttcctccaggattcctacatgagtttgaggcgcttgtccaaggatggggagaaaaatgttgtctgttgaaactaggagtcccaacaggagctggcccttgcaggaaaacccttgttcctggtatgccggaaaaacttgccagaggagcagaagaggaagatggggagctgcctgatgggtcaatggatggtaaccctgaaataaaacaggt

SEQ ID NO: 85223 - DNA, 442 bp, Homo Sapiens
ctcaaatgtccccccacatccaagtcaacagttcatctcttctctctaccaaaagcttgaacgtctctcagcatttttggaagcataaggaaaggttcagaaattagaatacacattccaaaagcacttattcagcacttgctatgtgtattgcttgctatttgcactggagagaaacaagaaaagtaaaactaagagaacttagcatctgattgactgttccctttcttttatcccctatacgtcaaaggtacctaaagcttggaatttatgttatttcaaggatattggttccatcaaatacataatgaagattttgtgaagaaaaagcgatgttgttttgaacattgagagtttgaagttccacctatgggggcattcagattcagcattcccttcaggattggtgcttgggagatagattgagtcatcatttacaaaa

SEQ ID NO: 85224 - DNA, 353 bp, Homo Sapiens
gtacccattaaagccatattgctttgctgaatggttctaatagctacagatgatttctagcctgaaagaaaagcaccacgaattgtttgaagttgacttgtcagatgtggcatgcttggtctaagttttgacaggaagggtatgtgggtaggggtgtacggagcatctcatgagaccagttctcctcctgagaggtccgtgatgttggaactgttgccccagatggactttgcccttgtgagactttatacttttcaatgcagtttttccctctttaaaactcgccagcttttatgtagtgttttataaaattacaggaataaaaagaatatcttttatgctttttaaaaaaa

SEQ ID NO: 85225 - DNA, 257 bp, Homo Sapiens
ttgatccagcatgttgggtcaaaatgatctagggaaaagtagcaggagtttaattcagagaggtcataggtaggagaaggagcaaatcattgtagtgccttattgcctgtgttaatgacttcgcattttatttggagacgggagttcttgggaggattttgagcagaggaatggcacgatccttcatttagtacatgttaagtgagcaggactctgtttatatatgtgatcacaaaaatataaaagatggggctcat

SEQ ID NO: 85226 - DNA, 651 bp, Homo Sapiens
  misc_feature (482)..(530): n is a, c, g, or t
tgttgttagtttcatatttgacattgtagtaatccaccttgcattttagtctttgcaaaaaggatattgctaggtatattcttatttctgattgagtattgaatttacatttttcagaatttcattctttgtcattataatccaaaaacaatgtccacatcagacttggaacttctcacttcaaaaatgaaatacagatttagcagtgttgtacataatgatgtccaagcatttttccacctgtttactgagttttccaaccatttactatgtgttgagattggtgggttttctggctgtttttctgaggtgaatgacttgttacagagcctcagtaagaaatttcaactaaaatcacaaaaacataaagtccaggaaaccaccagaagatggatttttagtgtttttgaaatcttgtatttccttttgatatcatttactcattttaattttacgactgccaacttgttacggtattaatnnnnnnnnnnnnnnnnnnnnnnnnnnnnnnnnnnnnnnnnnnnnnnnnnaagaataaagttaagatttggtcaaactatattttcccattcaagtacaaaaatgttttcaaggctgcaaaaagtgtacagttgttaaacaagttgtaaataaagacttgtataaaaagtc

SEQ ID NO: 85227 - DNA, 694 bp, Homo Sapiens
  misc_feature (157)..(176): n is a, c, g, or t
cattggtagactgtgctctagtatcatattaaggaagctttgcctatttcaaggttacaaagacttccccgttttctcttctagaaattttatagtttcgtactttgtatttagggttctgactcattttgtgtattctgtcaggtacagatgaacnnnnnnnnnnnnnnnnnnnngcatatggacatacaattgttctagaatcatttgttgaaaaggttgtccattctccacagaattacctttctaaatctgtcaaaaaccagttgtccataaatatgtgggtctatgtgcggacactattgtaccatgcatctatttgtttaccattaaggaaatacaatcctgtcctgatttctgaggctttgtaatagatctgaaattaggtggtgttaaccatcccacatttcctttctattctaacatccttgtggtttttcttgatattttgcattcccatatgaactttaggatcagtttgtccatctctatgataaaagacatcagggatttacaatgagattgtgctgaatgtatacatccacttggggagaactggcatcttaacaacattaagtcttccactgaacactgtgtatgtgtctctccacctacttagttcttgattaatttcctcagcaatagttagttttcactacatagggcatattgcatattttgtcagatttattgt

SEQ ID NO: 85228 - DNA, 990 bp, Homo Sapiens
tctgcctgaatatcagactgcttagtagtcattgctaagttcttcgtgccactccaagccttccgtccacgcagctttatttggacccgatgtgtaacctagccaccagagcccatgtgcgcactagcttttatatttcaagctgtgttttagtcctagatcaggtagctaatttctggatgaagataggtaaatgcctagaatttacatcattaaattagttggagtaaatgtgttcaaatacatggacctgatgaatcaatggccctgttgccaagtaaaacctccattgcatttaacagtggaaagaaaatctgtcatagtgcttcccacagtctgtttgagaataagaaccaaccacttctaatatttgacacactgcacatctttttagtgtctgttgattcagacaatacacagtgagaaaagacttccattttagtaaacttattaatcataatagcatctgtatatatttgatatattatgtgataatatgtaatatctatttgataaatcatagttatttaataatgatgatattacatattaaatcactgtactggcaatacataatgtacacatagcttgccgagctctatattatgatgccaggtaacccacagtgtggactccactgtatatatgaacatcacatgcataaatgttaagcacagatagcacatatggaaaaatttgaaatgagctaaggttaaagaagatgctaaagagcaggtaccaagaaatctcagaaagcggactgaagtgttaaataaagaatgtttggcttgggaagcaatctgggcttaaattgaatgcattttatttagtgactggaaatttttgaagttcaaaaattttttaaaaacagttatgttagaatagactctgtatctgaattcttgatactaatgaccttataacaagttgggtttgatcccattcacttgagccagttggttttttgtaagtgaatttctcattaaaaaa

SEQ ID NO: 85229 - DNA, 861 bp, Homo Sapiens
  misc_feature (487)..(536): n is a, c, g, or t
agtaatctttatcccttcagagaattcttcctttaagtcttgggtgagatattttattatttttaaggtttatatatctatattgttagaacaagcatactctggcaatgttgttctttaaaaaaagcatggattgcatttatatagtgtttttttccaaaaatctgaagaaattatcaagagcacttggcagagataacttgatgaaatcaggggaaaaaattgatgtccaacttttaaatatacaaaaacttgattgacattctacataattcaaattgtgtgcaagatgttctcaataaacatttacagactgtatccccacaccaatgtcagaaattcaaagctggtcctattactgatgtgatacatcaacatcacaatgtcagctatcaaaaatcattttaaatctatgtttttccaacaactccagttccatcaatgaaaataattttaaaggatatcaagcttggaaaccataaaatannnnnnnnnnnnnnnnnnnnnnnnnnnnnnnnnnnnnnnnnnnnnnnnnnaatctagggaatgtctcttatctctttcaggagatagtattgtgcttctgaacagtcatggcgttcggggaaagaaaatgagccacactcaatgtgaatgcatacacgaaaggttttggagcacatacattaacataaatctttttaaccatacgtataggtctccagacaacactcagacatctatatacattttttaatatatacacacatacatttacatacacacgttcacacattcactcacagatgaaggaaaaaattgccactgtttggattgcaaggcagtgtaatgaaacgttctagtcactttaaaggactgcta

SEQ ID NO: 85230 - DNA, 435 bp, Homo Sapiens
tttaatgcaaacctaagtttgggatgcagaactacagagacaagaactcagcaagcacccccacttcctccaaagagtagtcaagtcccacagcacagcccggagcagtagctgttaaaagacaagggctgggctggatccggccaacattacaaggacaaccaactggtctcattccttagtcttgtgcttttaaagggcagacgatgtgccaactattttaaagctccaacacactaattctgtaaacaataatagctacagcctgcacactgcgcactggaatggattcctcaactaggcctcatcacttatgcagctgatgaaacaaacactgacagcttttttgcatttgtaaaggccccacagcagctgtggtgatcccaccatagagcaatgaattaagcctgaaacccagctgggtctgaacagaag

SEQ ID NO: 85231 - DNA, 1163 bp, Homo Sapiens
ccagggattccatctggacttttaacagagaaaagtaaaaaactttccattggcaaatgtgctgtccttcccagtagccatcaaagatccagataaacacatgctgatttcaatttgggctcatcagcagcccagttagtgtacctcaccctccacttatcagtccaagtgtattgattatcagtcaagttactgttcagggcgatccacacacgttcattagatgtttccatctgcagccacgcaaatgcattactgtagggatccagaatgctggctataagggaattgtgaagcttgcagtatgtctccgcttcatgccattgaaatttttgtctcatgagtgaatagctgcttttgccatatttaacaaagccatctgtttgaatcgttgctggaggattagtcaaggaagggtcggatcgtgtctggcatatgtagcctcgtttactgtcgcaggtatcatccatccattttcatgcttcatttgatgcacctccaataataacaacacagtcagcatcttcataagaaagactgcttcttcttccaccagggtaacctttcccccagtttgtgtaatggactcctcgtccatccgtccaaaggaacgtgtgttctgaattgacatcattcagcccagtccaggcactgaaagtggagtccttcatgtgataggtaagaaatgcttgctctttttcattttgtatggagaccagattccctccaaagcctatacaagcttttcgtgcctcttgccaattttttctttcttcttccataaatccaaagattttgaaacacttgttgctgtagaaattccaaccttccttgcaccctgatgggaccgagggcatggtaggcataactgtggtagcattgatactactgttatgtcgctggcaaatgaaggcgtttggatagccacagttaatgtcattccaaaaccctgaatttgaatacatggtcacacagttttcatcttcatttgcaaaattgggttcacctgtggcccaagacacgtaatccactttgcttccatccatccaagcaaactttttatccaagctgatcaataaaccaataaaatatgcagactgtgcatcatttctgtttacatatttccatagaaacttcttttcactttcactttgaatagaaac

SEQ ID NO: 85232 - DNA, 989 bp, Homo Sapiens
  misc_feature (86)..(120): n is a, c, g, or t
aaacactgtatcgactcactatagggcgctagctcgctcgcagcgaacgacgagcgcagcgaagtagtgagcgaggaagcggccgnnnnnnnnnnnnnnnnnnnnnnnnnnnnnnnnnnncagtcgacggtaccggacatatgcccgggaattcggccattacggccgggtactgcaagcttcacaattcccttatagccagcattctggatccctacagtaatgcatttgcgtggctgcagatggaaacatctaatgaacgtgtgtggatcgccctgaacagtaacttgactgataatcaatacacttggactgataagtggagggtgaggtacactaactgggctgctgatgagcccaaattgaaatcagcatgtgtttatctggatcttgatggctactggaagacagcacattgcaatgaaagtttttactttctctgtaaaagatcagatgaaatccctgctactgaacccccacaactgcctggcagatgcccggagtcagatcacacagcatggattcctttccatggtcactgttactatattgagtcctcatatacaagaaactggggccaagcttctctggaatgtcttcgaatgggttcctctctggtttccattgaaagtgctgcagaatccagttttctgtcatatcgggttgagccacttaaaagtaaaaccaatttttgcataggattgttcagaaatgttgaagggacgtggctgtggataaataacagtccggtctcctttgtcaactggaacacagcgagatccctctggtgaacggaatgattgtgtagctttacatgcgtcttctggggttttggagtaatattcactgttcttcctacaaaggatatattgttaaaaagaccaaaaattattgattgctaaacctactccatggaatttacttacacaaaggctgacacaaggaaaatggaccttctaaaccgtcttccacggggccggagtacatca

SEQ ID NO: 85233 - DNA, 1663 bp, Homo Sapiens
cagtcgacggtaccggacatatgcccgggaattcggccattacggccgggaacttgactgataatcaatacacttggactgataagttggagggtgaggtacatctaatgctgggctgcgtgaatgagcgcgcaaatttgaaagtcagcagtgtgttttatctggattcttgatggctgagctggaagacagcacattgcaatgaaagtttttactttctctgtaaaagatcagatgaaatccctgctactgaacccccacaactgcctggcagatgcccggagtcagatcacacagcatggattcctttccatggtcactgttactatattgagtcctcatatacaagaaactggggccaagcttctctggaatgtcttcgaatgggttcctctctggtttccattgaaagtgctgcagaatccagttttctgtcatatcgggttgagccacttaaaagtaaaaccaatttttggataggattgttcagaaatgttgaagggacgtggctgtggataaataacagtccggtctcctttgtcaactggaacacaggagatccctctggtgaacggaatgattgtgtagctttacatgcgtcttctgggtttggagtaatattcactgttcttcctacaaaggatatatttgtaaaagaccaaaaattattgatgctaaacctactcatgaattacttacaacaaaagctgacacaaggaagatggacccttctaaaccgtcttccaacgtggccggagtagtcatcatctgtgatcctcctgattttaacgggtgctggccttgccgcctatttcttttataagaaaagacatgtgcacctacctcaagagggcgcctttgaaaacactctgtattttaacagtcagtcaagcccaggaactagtgatatgaaagatctcgtgggcaatattgaacagaatgaacactcggtcatctagtacctcaatgcgattctgagatatttgaatttcataaaattgtaactgacaatttaaaatttttagttcaatgtgattgttttctttaaaatgagtactgaattgtactggtctgtccttttttcctttgcctaattgaagaaataattgcttgttttctagcctggcaagatattttcataaaagagggataacaatgctgattactaccttttaaaatattttagataaatgcacagcaccacagcaccacatctaagcattagtgatgggtagctgatgtcagcttcatgtggattttaagcactctagaaacaatgaagcttcttggcatattttaagggagctcccaaaatgtgttacctattaaattgtaactcagcaagtagaagaccatttgaaaagtcaggtacaaatatcctcaagtggcataaaaatgtagtcagttttctcttttacaagtttttatttccactccaattatttagaactttatttgtacatgtgcagaagaataaggcagctgagaatcttgtttcccccaagagagttttacaggctgagtgttgcaaatgtgttctttgtcctgttatatgtatatcaggaatacaaggatgtgaaataaaactgtaaatttgcataactggatgtacttagataatgtgaaataaacattaaagacaaggtctatttttaataaaaaa

SEQ ID NO: 85234 - DNA, 418 bp, Homo Sapiens
  misc_feature (128)..(128): n is a, c, g, or t
  misc_feature (355)..(355): n is a, c, g, or t
  misc_feature (368)..(368): n is a, c, g, or t
ggataggaatcatgaagtcatttccagcaaatgtccttaataggcaagcttgcaaaatatcaccgtgcccctgtctttcccaaaaccttccaacagctatcagcaacagctgacaagcactagctaantttgaaattgtatgttctctcctgtcaacaccagaccacacacacagctttgaaaaacacccagtgaataccataatttttaaacagagggctcatcatgttccattttcttgtgcttaaaaagtaatatgtactttctattcaggaatttaaaaaccttcaccaccctttgaagttttaggattttaaaattttattctttggggcatctggaggggaggaggggncatccaaatattnggggggccaattaagggcaggtggggaggtggaccactttccccctaggg

SEQ ID NO: 85235 - DNA, 1663 bp, Homo Sapiens
  misc_feature (1103)..(1103): n is a, c, g, or t
agcggcggagacggctgtagcacaaggatctgcatctccaatggatactgaggggtttggtgagctccttcagcaagctgaacagcttgctgctgagactgagggcatctcagagcttccccatgtggaacggaacttacaggagatccagcaggcgggagagcgcctgcgttcccgtaccctaacacgcacgtcccaggagacggcagatgtcaaggcgtcagttctcctcgggtctcggggacttgacatatcccacatctcccagcgattggagagtctgagtgcagccaccacctttgagcctcttgagcctgtgaaggacactgacattcagggcttcctgaagaatgagaaggacaatgccctgctgtctgccatcgaagagtcccggaagaggaccttcggcatggctgaggagtaccatcgggagtcaatgttggttgagtgggagcaagtgaaacagcgaattctgcacacactgctggcatcaggagaagacgcccttgactttactcaagaaagcgagccaagctacatcagtgatgtgggaccccctggtcgaagctctctggataacatcgagatggcctatgcgcggcaaatttatatctataatgagaaaattgtaaatggacacctgcagcctaacctggtggacctttgtgcttccgtcgcagagctggatgataagagcatttccgacatgtggaccatggtaaaacaaatgacagacgtgttgttgacaccggcaacggatgccctgaagaaccgcagcagcgtggaagtgcgcatggagtttgtcaggcaggccttggcgtaccttgagcagagttataagaattacacccttgtgactgtctttggaaatttgcatcaggcccagctgggcggggtgcctgggacttaccaattggttcgaagtttcctgaacattaaactgccagctcccttgcctggactacaggatggagaggtggaaggccatcctgtgtgggcgctaatttactactgcatgcgctgtggagacctgcttgccgcttcacaggtagttaatcgagcccagcaccagctggggagagttttaaaacctggttccaggnagtacatgaacagcaaggacagaagattgtccccagctacggaaaacaagctccggctgcattaccgtaggccctcaggaacaatacagatccctacaagcgggccgtgtactgtatcattggcagatgtgacgtcaccgacaaccagagtgaagtggcggacaaaactgaggattacctgtggctgaagttgaaccaagtgtgttttgacgacgatggcaccagctccccacaagacaggctcactctctcacagttccagaagcagttgttggaagactatggcgagtcccactttacggtgaaccagcaacccttcctctacttccaagtcctgttcctgacagcgcagtttgaagcagcagttgcctttcttttccgcatggagcggctgcgctgccagtgctgtccatgtagcactggtgctgtttgagctgaagctgcttttaaagtcctctggacagagtgctcagctcctcagccacgagcctggtgaccctccttgcttgcggcggctgaacttcgtgcggctcctcatgctgtacaccgggaagtttgag

SEQ ID NO: 85236 - DNA, 914 bp, Homo Sapiens
  misc_feature (392)..(455): n is a, c, g, or t
aagaaacacttggaacactcaaaggttagaggggggaaattactgacaggttcatgtacctcttgggccaaagggtcagttaatggggatttgaggtgctcagaaaatagtctgttgtactggaagtcataaaaccggaagtcaagtttatctaagttggagtcagggcttctgacaccagtacccttgggcaaatcatctctctgggcttcagtgttctcattttacaaataatgcctaattctcagggctgtatctcgagaatcaaacacatttcctagagtcctgcagtaacaacgatgactaaaatttattggtatgtcttttacgcaccaagcacttttctttactcatttaatattcattattctgcaagacagttactagctcannnnnnnnnnnnnnnnnnnnnnnnnnnnnnnnnnnnnnnnnnnnnnnnnnnnnnnnnnnnnnnnacgtatacggaaaagccaacactgtattaatactgtcacactgggaagggggaacagcttggggaaagattttgtgagggagtctccaggaggggaccggctgaacgtgggtcagactcacaaacaccgtggccttggccgctttgcgcagccgcaggtacttcagccggtacttctcattctggctcttcttcgggagctttttcatcctggccttgctggactgcagcggagcccgcggcgaggaagcgaggccgtccagcaggctcatggtccagccccgctacgggggccccaggacgctgccggcatcggatcctaagtcggggagcgggcgggagcgctggctttgtctgttccgggctagcggaatcgggcctctaggaatctagctctccgggacgttcccagggctgaccgcagggccagagacacccgcaaccgaacgggctcccggcg

SEQ ID NO: 85237 - DNA, 998 bp, Homo Sapiens
  misc_feature (869)..(948): n is a, c, g, or t
ggtaccggtccggaattcccgggatatcgtcgacccacgcgtccgcacggaagtgctgggaggcgccgggagcccgttcggttgcgggtgtctctggccctgcggtcagccctgggaacgtcccggagagctagattcctagaggcccgattccgctagcccggaacagacaaagccagcgctcccgcccgctccccgacttaggatccgatgccggcagcgtcctggggcccccgtagcggggctggaccatgagcctgctggacggcctcgcttcctcgccgcgggctccgctgcagtccagcaaggccaggatgaaaaagctcccgaagaagagccagaatgagaagtaccggctgaagtacctgcggctgcgcaaagcggccaaggccacggtgtttgaaaatgctgctatttgtgatgaaattgctcgtcttgaggaaaaatttcttaaagcaaaagaagaaagaaggtacttgctaaagaagctcctccagcttcaggctctaactgaaggggaagtacaggctgcagctccttcccacagttccagtttgcccctgacttatggtgtggccagctctgtgggaactatacagggagctgggcctatttcagggcccagcactggggctgaggaaccatttgggaagaaaactaagaaggagaaaaaagacaaaggcaaagagaacaaccaactggcagatcatcaccgaccgacctggctttcatgatgagagggcgatctaccccgggggctattgccgcccttgaattatgcccgactggaggggcccccaccagaagcggccacacccccggcccaaaccgaggccggcggtgggcctggcttccggggcgaggggggnnnnnnnnnnnnnnnnnnnnnnnnnnnnnnnnnnnnnnnnnnnnnnnnnnnnnnnnnnnnnnnnnnnnnnnnnnnnnnnntcgatctccgcgacgcggaacgcgctaactattcgccggcacgacataac

SEQ ID NO: 85238 - DNA, 424 bp, Homo Sapiens
ggcactatcccagcatctggctgtgaaggggacgttgtgctcttgctgctcacctcacctcttgtgttcaggcagctcagcacacctcctccagtcagtgcctctgagcggggaaggaggggaggagcactgcatttgcaaccatcttccagactcccctggatattctcaaaggactgagaggaaaggcagctgctttcatagctgatgttctggggtagaatgtaaggctgtgtagggatgtttctggtgggattatgtgaaaatggaggtaggcttaacatgtaagatattcagagaaactcttagttggaacaagtagaataggtttttttctatgaatgctttatagacattataatgaaaaaaactaattttaaatgtgaaaatgcctattcgtgatgtttggaagaattttgtcaga

SEQ ID NO: 85239 - DNA, 490 bp, Homo Sapiens
gatgacactctgagttccaaacttaaagttaaagagctttcggtgattgatggtcggagagctcagaattgcaacatccttctatcgaggttgaaattatccaatgacgaaatcaaacgggcaattctaacaatggacgaacaggaagatctgcccaaggacatgttggaacagctcttgaaatttgttcctgaaaaaagtgacattgacctattggaggaacataaacacgaactggatcggatggccaaggctgataggttcctttttgagatgagccgaattaatcactatcagcaaaggttgcaatcgctgtacttcaaaaagaagtttgcagagcgtgtggcagaagtgaaacctaaagtggaagcaattcgttctggctcagaagaggtgtttaggagtggtgccctcaagcagttgctggaggtggttttggcatttggaaattatatgaataaaggtcaaagagggaatgcatatggattca

SEQ ID NO: 85240 - DNA, 914 bp, Homo Sapiens
  misc_feature (78)..(112): n is a, c, g, or t
gcacacaaaactgaagatactatagggtactcgttgcagcgaagacgagcgcaggagtagtgagcgaggaagcggcgnnnnnnnnnnnnnnnnnnnnnnnnnnnnnnnnnnncagtcgacggtaccggacatatgcccgggaattcggccattacggccgggaaagttaaagaagcttcgctttcatctcttactgctcccactcaggctcccatgagcaattcaccatccaagccctcattaccttttcaaaccagtcaaagtacaggaactgagcccttctttaagcagaaaagtctgcttctaaagcagaaacagcttaataattcttcagtttcttccccccaacaaaacccatggtccaactgtaaagcattaccaaactctttaccaacagagtatccagggtgtgtccctgtttgtgaaggggtgtcgaagctagaagaatcctctaaagcaactcctgcagagatggatttggcccacaacagccaaagcatgcacgcctcttcagcttccaaatctgtgctggaggtgactcagaaagcaaccccaaatccaagtcttctagctgctgaggaccaagtgccctgtgagaagtgtggctccctggtaccggtatgggatatgccagaacacatggactatcattttgcattggagttgcagaaatcctttttgcagccccactcttcaaacccccaggttgtttctgccgtatctcatcaaggcaaaagaaatcccaagagccctttggcctgcactaataaacgccccaggcctgaagggcatgcaaacattggaatcattttttaagccattaacacattagttgctgcctcaggcttgcctggtgggattcaatatatcaatctttacagatcttatctttaatatctatctttacagatttc

SEQ ID NO: 85241 - DNA, 1356 bp, Homo Sapiens
  misc_feature (73)..(104): n is a, c, g, or t
  misc_feature (107)..(141): n is a, c, g, or t
cgcaagactgtatactaaccatcatatgggggccgcatggcggcctgttttttcaagcccggaaaacggaaannnnnnnnnnnnnnnnnnnnnnnnnnnnnnnncgnnnnnnnnnnnnnnnnnnnnnnnnnnnnnnnnnnncagtcgacggtaccggacatatgcccgggaattcggccattacggccgggagaaggaacagggagcggccaggatgctgaatctgctgctgctggcgctgcccgtcctggcgagccgcgcctacgcggcccctgccccaggccaggccctgcagcgagtgggcatcgttgggggtcaggaggcccccaggagcaagtggccctggcaggtgagcctgagagtccacggcccatactggatgcacttctgcgggggctccctcatccacccccagtgggtgctgaccgcagcgcactgcgtgggaccggacgtcaaggatctggccgccctcagggtgcaactgcgggagcagcacctctactaccaggaccagctgctgccggtcagcaggatcatcgtgcacccacagttctacaccgcccagatcggagcggacatcgccctgctggagctggaggagccggtgaacgtctccagccacgtccacacggtcaccctgccccctgcctcagagaccttccccccggggatgccgtgctgggtcactggctggggcgatgtggacaatgatgagcgcctcccaccgccatttcctctgaagcaggtgaaggtccccataatggaaaaccacatttgtgacgcaaaataccaccttggcgcctacacgggagacgacgtccgcatcgtccgtgacgacatgctgtgtgccgggaacacccggagggactcatgccagggcgactccggagggcccctggtgtgcaaggtgaatggcacctggctgcaggcgggcgtggtcagctggggcgagggctgtgcccagcccaaccggcctggcatctacacccgtgtcacctactacttggactggatccaccactatgtccccaaaaagccgtgagtcaggcctggggtgtccacctgggtcactggaggaccaacccctgctgtccaaaacaccactgcttcctacccaggtggcgactgccccccacaccttccctgccccgtcctgagtgccccttcctgtcctaagccccatgctctcttctgagccccttcccctgtcctgaggacccttccccatcctgagcccccttccctgtcctaagcctgacgcctgctaccgggccctccggccctcccctgcccaggcagatggtggtgggcgctaatcctcctgagtgctggacctcattaaagtgcatggaaatc

SEQ ID NO: 85242 - DNA, 900 bp, Homo Sapiens
  misc_feature (34)..(34): n is a, c, g, or t
  misc_feature (41)..(41): n is a, c, g, or t
  misc_feature (53)..(53): n is a, c, g, or t
ggggtattgtattattacaaacagaagccgtaancctacgncggttgcacgcnacgggctttccccccagggaagtgccccctctcagagaccctgacatcagcgtcacctggagcagagtggcccagcctcagactcagagcaccaagacccaggcccgcaggcctggacccaccccggtccccccgtcccagctccattcttcaccccacaatctgtagcccccagccctgccctgtgaggcccggccaggcccacgatgctcctccttgctccccagatgctgagcctgctgctgctggcgctgcccgtcctggcgagcccggcctacgcggcccctgccccagtccaggccctgcagcaagcgggtatcgtcgggggtcaggaggcccccaggagcaagtggccctggcaggtgagcctgagagtccgcgaccgatactggatgcacttctgtgggggctccctcatccacccccagtgggtgctgaccgcggcgcactgcctgggaccggacgtcaaggatctggccaccctcagggtgcaactgcgggagcagcacctctactaccaggaccagctgctgccggtcagcaggatcagtcatgcaccgcacagttctatcatccgcccagagtctgagcggagatcgccctgatggagctggagaagccggtgaacgtctccagccacgtccacacgatcaccgtgccccttgcctcagagacgttccccccggggatgccgtgctgggtcactggctggggcgatgtggacaatgatgagcgcctcccaccgccatttactctgaagcaggtgaaaggtccccataatggtaaacaaagtttagtgacgcagaacgcgacctaatggggatcttagagtcgaccagcagaatgc

SEQ ID NO: 85243 - DNA, 1119 bp, Homo Sapiens
ggccaaagaacagggcggtgccaagaggagaccagacagcaaggccagccccgacagggaatctggggaacgtgattgggtagcactcttggtgcactcccccaggttcagcaggatggcgatgccgctaggatgaaagcaagattggcgtacaccgccacgcaccacctgccagggccggctgggtgcgtggtacaggtttggggtcgctgatgaacgcgaagatgatgcaggcaaacgaaggtctccagcaccgcagcagcccgggtacggtggccatatagccagtgatctcgccgggccggcccgggtccaggccacttcggtggcgtaagccacacacgcgatgcaggagaagaaggtggcggcgatggcgtggtcccgcgaacggccgtgggacaggaactggacataggtggtggggtagatgatggaggccgagaggcagaagagggccgcatagcaggcgaaggtgatggggaagttgcgccaagacagggggaagcgggcctggagcccgcacagctccacgatgaggatgatcagggtcacggagaagcagaagcaccaggtgaacatggaccagttgcccatggaccccgtccaggcgcccacgctagccaccagcgagaaggccacgcaggtagacaccagctgcagcaggcgaaggagacccaggggctgtgtcagggcccgaggggaccccacgatcatgggggaccccaggcccgaagatgacgtcgtggtggttgtgatggtggtgcgggttaccgtcactggcatggcagcggtcttagcagaggaatccacggagaaagatctggtggtggagacggattaagccacacttggaacaggctgtaagagcacctgagggggaggtaggccgttagcgtccgtttggacaggctcctccctctagggatcgaacgccctgcggagacaggaacgtggcgtggtaacccagcatgggtccctggcggtgaccccgggtaagccctgtcctactcccctccccgtacagtctaactgtttgggctgcggcggacggaacccccatgcgtggattgacagatggaccacgatgaagtcgcgagaccgtggtacagactctaccct

SEQ ID NO: 85244 - DNA, 1311 bp, Homo Sapiens
gattgactctgtaggactcccccacacttcgatcgcggagaaagatctgccgctgtcgtctttgcttcagccgcagtcgccactggctgcctgaggtgctcttacagcctgttccaagtgtggcttaatccgtctccaccaccagatctttctccgtggattcctctgctaagaccgctgccatgccagtgacggtaacccgcaccaccatcacaaccaccacgacgtcatcttcgggcctggggtcccccatgatcgtggggtcccctcgggccctgacacagcccctgggtctccttcgcctgctgcagctggtgtctacctgcgtggccttctcgctggtggctagcgtgggcgcctggacggggtccatgggcaactggtccatgttcacctggtgcttctgcttctccgtgaccctgatcatcctcatcgtggagctgtgcgggctccaggcccgcttccccctgtcttggcgcaacttccccatcaccttcgcctgctatgcggccctcttctgcctctcggcctccatcatctaccccaccacctatgtccagttcctgtcccacggccgttcgcgggaccacgccatcgccgccaccttcttctcctgcatcgcgtgtgtggcttacgccaccgaagtggcctggacccgggcccggcccggcgagatcactggctatatggccaccgtacccgggctgctgaaggtgctggagaccttcgttgcctgcatcatcttcgcgttcatcagcgaccccaacctgtaccagcaccagccggccctggagtggtgcgtggcggtgtacgccatctgcttcatcctagcggccatcgccatcctgctgaacctgggggagtgcaccaacgtgctacccatccccttccccagcttcctgtcggggctggccttgctgtctgtcctcctctatgccaccgcccttgttctctggcccctctaccagttcgatgagaagtatggcggccagcctcggcgctcgagagatgtaagctgcagccgcagccatgcctactacgtgtgtgcctgggaccgccgactggctgtggccatcctgacggccatcaacctactggcgtatgtggctgacctggtgcactctgcccacctggtttttgtcaaggtctaagactctcccaagaggctcccgttccctctccaacctctttgttcttcttgcccgagttttctttatggagtacttcttccctgccccgtcctgagtgccccttcctgtcctaagccccctgctctcttctgagccccttcccctgtcctggggacccttc

SEQ ID NO: 85245 - DNA, 128 bp, Homo Sapiens
cacagcaaggcaacactacaagaaaacttaagtcagaaactgccctaatttcagtgtcggaaaatggacagtaacatatcttgtaccaagaggagcttaaaaatgccctgacaggctgggcagggtat

SEQ ID NO: 85246 - DNA, 858 bp, Homo Sapiens
cggtccggaattctccgggatgaagaaccagcagcccaagagcagacaggtcaggtggaggagtgcctcaaggtcaacctgctcaagatcaaaacagaattgtgtaaaaaggaagtgctaaacatgctgaaggaaagcaaagcagacatctttgttgacccggtacttcatactgcttgtgccctggacattaaacaccactgcgcagccatcacccctggccgcgggcgtcaaatgtcctgtctcatggaagcactggaggataagcgggtgaggttacagcccgagtgcaaaaagcgcctcaatgaccggattgagatgtggagttacgcagcaaaggtggccccagcagatggcttctctgatcttgccatgcaagtaatgacgtctccatctaagaactacattctctctgtgatcagtgggagcatctgtatattgttcctgattggcctgatgtgtggacggatcaccaagcgagtgacacgagagctcaaggacaggtagagccaccttgaccaccaaaggaactacctatccagtgcccagtttgtacagccctcttgtatagcatccccactcacctcgctcttctcagaagtgacaccaaccccgtgttagagcattagcagatgtccactgcgttgtcccatccagcctccactcgtgtccatggtgtcctcctcctcctcaccgtgcagcagcagcagctggtcgctggggttactgcctttgtttggcaaacttgggtttacctgcctgtagacaagtctctctcataccaacagaacttccggtacttccagaaccaactcacctgacctgcaactcaaaggcttttttaagaaaaccaccaaa

SEQ ID NO: 85247 - DNA, 552 bp, Homo Sapiens
catatagcaggctgaacaaagacatccaggtagcgatatgcctgtagtgattagacacagacatggctctttcattaggggatcctcaactgtcaacacctattgtcatttctcttggataatacacttccttagagaggaatctaacaaactggtgggtagggatgagaggagtggcagtgagggagtgaaggagtgccatatctatccctgcttgcaatattctcagagcacatggaaaagggaaccaggggtcaccagtcagaatagagactttcattcaggcttcattctgtccttgtgactggtgtttccaatccaaactcctccatagactgaaccttctgtcaggctgttgacccgcagcatgggggagggaatctaaagctctgacttcttagaccaaccatcagccattcattccattgaaggaaatacctggaaccttcagttccagagcctttccagagtgctagaaattaccttgcttactcaaattcacccgtagatctaggtgtttggctttctcctccgattttagtagccatcttt

SEQ ID NO: 85248 - DNA, 660 bp, Homo Sapiens
aaactcctaggttcaagggatcctcccacttcagcctccggagtagctgggacctagtgtgtgcctccatgcctggctaagtttttaaaaattgttttagagaaagggtctcactatgctgctcaggttcccgaccatttttattagttgcctagtgtgtattctttcagggtttctatatgcagattctttctgtccctctctaatagccaacaggcaggctccctgtaaacatgacaaagccactccaattttgctggccaaaaggaaaagtgtcccgggcacaagggctgagttaatggagagcaagtggtaattatctgctctattagatccctcttcctccagcccaatttcatgggaggcttggtttataaaacactggctgtctgactaaacctcaacaacagattaaccataaatgcattcctggaatttacgttcttcccgcctcagtgttgtgtaaaattatcagggaacacagacccacaggggtcaggacaggaagcagcatcaactccgattctgttagggcagcataacatttcatttaacacagataaacgcatcttcaaagtcatcggcacagtgctacaatcttaaaatgcacaagctgatcctgttattctagtgcctgtatgaggttaatgcagctttatg

SEQ ID NO: 85249 - DNA, 1949 bp, Homo Sapiens
  misc_feature (73)..(107): n is a, c, g, or t
  misc_feature (837)..(845): n is a, c, g, or t
  misc_feature (1086)..(1120): n is a, c, g, or t
  misc_feature (1939)..(1939): n is a, c, g, or t
tgatcgtcatataggggctctctttgtggccgaacgacgagcgcagcgagtcatgtgagcgaggaagcggcgnnnnnnnnnnnnnnnnnnnnnnnnnnnnnnnnnnncagtcgacggtaccggacatatgcccgggaattcggccattacggccgggggagagaagcagagtgaaccttagaaagatggctcagctatttggagcactggatattttactgaagttatttactgaggcaccatcactgtttgactgtacagtatagtttttcataaatttcatcacatttacttgttcagaatctgggcttgaatctttgagtggacaaaagcctatggtttcttttaaaaagtttcatcttgagctaatgctacagtttaaataaaatgtatgaaaggtagttatcaaaaacaattgtatatttaaaattctatgtgacatccattttttacagcgaattatagcaggttatgtgaaatttaaaaataaattttaggaaattttttttatcttgtaagtaagaattataaatctatctcagttaaaagtaggatcttgtttttattcagatattttgaaagtttagaagcattttgtatgctactttggtatttcttaagtatagtcagcaggaaagggtaacctgttttatgcaaaatttttttaatttgtcaaatgtttttaggtgtgtctactttctgaaatagtctcaatatcctgtctgtatcctaagcagataactacacaagaacaaaacgctatatagaaaagaaaatatttgaggaaatcttaaattccataagaaagtaattcttgcaagaatgttggctacatannnnnnnnnctgtcctgaataaattacatcattagctctgttgaagcttttgaagctaccactattctttctgggataaaggctaattactgatttatctgccctcaaaatcccagagttaattctaattgagtactaattaacagtaagtagttaacacagagaactaaaatttaaccgcattatatcactgtatatatttctcatgatttttgctaattagagcatttacttaaccagtaataaactnnnnnnnnnnnnnnnnnnnnnnnnnnnnnnnnnnntatacgtgtgtgtgtgtatatacttggctctgacacaactctggtgcttaattaggatatgttctattatgtattttgaatgtttatcctgctagtgcgatgaacttttgttggaaaagcagaattagaaggaacagtttttcaatcagtttcatttggtaattacaggaaaaccttgagttgctctaatttaatttttccaattaatacatttagactttaaattgcatccgtaattctcttggctgaaaaacagtggtattttaagacagttttgttatacatgtgacttacttttgactcagcctgagaggaggaaatgtaaagagataagagatttggcccaaagcagcaagagactagtaaccttgagccaggacgaagccaagacaacgtgactcccaagtagcaggagcagaggtcggtcacctgtggcattctgtttcattcccttttaaaattatgagactttataggcagtgtaaaacatcagcaggcagcgatgtgatagggatgtgccgaaaaagctggtctgatacccatggctataattacagagctttagttcaattaggattttgtaaatgagcaaatgacctttttttccagtgccccttgtaatagttaatatgagtccatgcaatcttgtgatgccattctcctgaaggtgttgatttctggtacccagccagcttagctttggctgctggaagcacagtaggtactgatgattacttcctggaaatcttgacaggcttattgtactgtgtaatggggaaaagttaaagtataatgtttggtgttaataaatgactgatnaaaaaataga

SEQ ID NO: 85250 - DNA, 464 bp, Homo Sapiens
catgctattggctcttgacatcccaatgcctttgaggcaggcagagcaaatactatattcatcttttgacagctggagaaactcaggcccagagtaggaaatatgagggattacccaatgaattcagttccagtaaaactgttcctggacccagaactcctgcctcccagtttggtagaggttccatttcatcatttggccctaggcagtggtatgctggagctggtccatactggttctcaaagatgttcattaaattttcagaaattctggagactgttgacagaatgttggtagtttgaaatcagtcatgatgtgactatttacaccatggaaattggcaaatgctaccaatataccagcagtcccaagtcattgcagacccatcttccattccaaaggctgtgtccactgcccgggcctgtgagttatggtttggtagctgcatgggaaagtggctacca

SEQ ID NO: 85251 - DNA, 161 bp, Homo Sapiens
cttataggcatgagccactgcacctggctggaacctttaaataaagctcagtgttatttatttatttaataagctgtttggaaagtcataaataagtgtgtcctgtatttttagtgcaaacatttactagggatggctgcttttggataaggatggtgggg

SEQ ID NO: 85252 - DNA, 478 bp, Homo Sapiens
tagatgaggaatctgagaggctgaatgacttgcctgagttcccacagctataaaacattgatgccgatgatggggctcagttacgctgactccaaagcttggcagtggctcagtagagtgagccttcttctccctggttcacaggcttccctggaggctggttgtggagggtctcagaaagggtcatttgggacacagccctggaagtcacaataaaagctcaatgttggggcctggagtctcttgggaacccctttctatttctactagactctagccactagcccatcctgatccccactgtctccatccggagtgtggaggccatataagacctttgcttgccatcctgcttttcagtgttgagtgttctgcttcttaagtgcaaactgaggacagccagagactttgttttagactgtttcaacttccactaagaatccagacttccagggctgttttcagccccatgttttcc

SEQ ID NO: 85253 - DNA, 334 bp, Homo Sapiens
  misc_feature (13)..(13): n is a, c, g, or t
  misc_feature (40)..(40): n is a, c, g, or t
  misc_feature (49)..(49): n is a, c, g, or t
  misc_feature (87)..(87): n is a, c, g, or t
  misc_feature (97)..(97): n is a, c, g, or t
gatggaccaattnccctttaagggggtgtggatggccccngatgggtangcccaagggaacctgttgggggaagttccggaaagaancctttccttncttttattcagtttaaagtaaactttacccctggatgtttagaatcaacattaagagttatattatggtgttcagagattaagctgacttggatacaatattttcttttgaaaatgaattttctttttcatttgtgatttttaaaaaatgttgcaccagttatgcttcatgcatcggttacatcttcatcaggttaatgtaatgtctagttcctttgcaataaaaaaaattgctgca

SEQ ID NO: 85254 - DNA, 1029 bp, Homo Sapiens
  misc_feature (554)..(554): n is a, c, g, or t
  misc_feature (556)..(556): n is a, c, g, or t
  misc_feature (558)..(560): n is a, c, g, or t
cctttcgagatccgcaccaagtcactttggatgtcatgagaagctgatagactctggggtgagcttgccaccccaccatgctgtggagaaagcaatggctgaactacaggagctccttacagtctctgaacgatgggaagaaaaggctaaggtctgcctacaggcaagacctgaggcacagtgtggcaagtttagaaagcattgtgaatgaagccaagaacattccagcctttctacccaatgtgttgtccttgaaagaagccttacaaaaggctcgagaatggaccgctaaagtggaagctattcagagtggcagcaattacgcttatttggagcagcttgagagcttgtctgcgaaaggacgccctattcctgtgcgtcttgaagcactgccgcaagtggaatcacaggtagcagcagcacgggcatggagagaacggactgggcggacgtttcttaagaagaattctagccatacattgttacaggtgctgagcccccggaccgacattggtgtatatgggagtggcaaaaataggaggaaaaaaaacccncnannnaaaacaaacaccctggcggccccctcggccccccgaaaagctttcttaaaccattcgcttggcgcgcgggccccccagggaagtgaccacggccctacccgcttcctaggcaaatcctggtcctggactaaggcttggactctccccaactaaaaacccccggagggcaacgagccgttccggacgactcccgaagcgccttttctcacggtccctcctcgccaccccccccatcgacaccaccgcagccccctgaaatcacgcctacccgccgtaccgcgttccgctacatgttcgcaccgtgactaacaacgccctttcaccacgtcccccgaacttccaccctctccttactcttgcgcccctgtagtccccttgacatatcccctggcgcgcccaagaccaccgacaacagagtggcgcacccaaccgactattctcggagccatccgcccggcgagaatgaatc

SEQ ID NO: 85255 - DNA, 734 bp, Homo Sapiens
  misc_feature (376)..(385): n is a, c, g, or t
  misc_feature (418)..(431): n is a, c, g, or t
  misc_feature (456)..(539): n is a, c, g, or t
ccgccggccgaattcccggggctggaggccccctcccggttttccatttggcgcccaagggcccatatggggacaattgtctatatccgcggtgtttttcttccaggggggagaatattattccgcaagggcaagcaagggtgtaggagactctctacacgattccaggtttcattcggccgggtttggggatgaatattccattttcggcacctacgtggtaacccatgtgcatacagttcagaagatgagtgtcagccccccggcgttatttgttttggagcctcgcatggactccggttgatagatctcagtaaggacctccagaactccatcctggacttgttcttcaccgggtcggttgccaccagggcgnnnnnnnnnngttattaatccaagcggctagtcaggaccaggnnnnnnnnnnnnnncaggtttgacgcatgttcactttcnnnnnnnnnnnnnnnnnnnnnnnnnnnnnnnnnnnnnnnnnnnnnnnnnnnnnnnnnnnnnnnnnnnnnnnnnnnnnnnnnnnngcattgtcataagctgggttttatttcaaactcaattatacaatgtagcaataggtaaatattaaaatgtaatgctaactcaaaacttgtagaatgccttcactgaattttggtataaagagtaaacaaaacttattctgcaaaaggattaggaacctttttatgcaaaaatgagtattttattttgtcagcact

SEQ ID NO: 85256 - DNA, 915 bp, Homo Sapiens
gcatgttcaaaatgccaggagggctatcccccccaagtcaagtcttggcccaggcagaaatctcataggatgtatgagctgtcagattgccaactttgtgtgacaatatgcttcttcgaagtttcaaagttctcctctcttgcttgtgggtgtcaaatgcccagaaaaggttcaccacatagccattcaccttgatatcactctccatggtcagggtgaagcttagataattttcaccatagctgtcaatgtggatatctggtggtgggatcacttttccttttatggtggtaatggatttagaatcgctccagtttcctattccacgactagtcaccgcagccactcctgacggtgtatagagtgttgaccaataagttcttgatttcatgtaaagttactagcagccctctgggaggcccacatcttggaaccactcctgctgtattctacaatgtactcacggatgaggccatgggtgtggatgggaggagcccagtggcctacaatcacaccttctgcttccctggggagtgacagctggagatttcgaggggcatctggcaatccctctggggtcctcagggtcacaaagtcattggggttgtgtgccttgctgagacactgaacctgtactttaacctgatacgtggtatctggtttcaagacttttaatacagagtttgtcttattgctgtgggtctccagagtcttccatatgctctctccaaccaccctgtagtagacattatatacacaagaagcagagggcatttttttgggcctcatccaggtcaaagtcacatccccagagaagtcagctgtccactgaagattctgtactttgtacacagtcaactcatcactgcaggccttttcatcgctctcgtccgagcagtccaggaacttcctgct

SEQ ID NO: 85257 - DNA, 958 bp, Homo Sapiens
  misc_feature (936)..(936): n is a, c, g, or t
taatataacccactatataatagtgaactaaatatgtttgtttcatagaaacaacttacatttgccaatataaggcaaatggtctatgtacagatacatcaggactgcctaactgacagtgagtgttgctagccaggctccaagctaatggagctaatacggtggagctctctgctgaatggactttcccttcaggatacgtcggatctgttctcccacagggccatcgggaaccaaatgcactggctgttcgttctccaagttccgagtacttgggtctgctcccttcctcatcaacaggcggacagcatctaattgtgtcaaccgatactgcaggctggcagcaacatggagggcagtgttgccattgtaagcctttgcattcacaaaagacaggcaactgggccgctccaaaaagaggcgaatgagttccagatttgcttcttcagctgccaaatgcagggctgtgcggccacttttgcgatccttcgcttccaccgctgctcccatttgaattaggcacttaatggtatcaaccagactcttattcttcagtaaaagctcctgaacttcaggtgaatgaggctgttgatttctctggagttcatggaccacagcattgtgggctatgactgcacagtgaaggggagtcaggccatcatagttagttgcctcaagatccacaaactgattacttcccactgctcccttctgaatcgcctgaagcacctgggagtggcccttctcagcacacacatgcagaggtgttcttccccagcagtctgtggtgttcacctgtgccccgatgttcaccagatcctgcacaatgagatgctgattggcagccactgccacctgaaaggcactctgtggatatcctgtccattgtgctctttaatatccagcatgtgaagtgcattcatctttcttgcaagnacataggaaagtgcccttctcc

SEQ ID NO: 85258 - DNA, 544 bp, Homo Sapiens
gggtccatcccccttcgtggctctgaatctaataaagtttcagtcgcttaccatcatagttagttgcctcaagatccacaaactgattacttcccactgctcccttctgaatcgcctgcagattttaaaaacagacatctgttagctacataagctgcgcatatacctattagaatccccaagaaatgaataagttaactcaaaataaaccattgcaacaggcaacctatatccgactactaatatccaactctatctctctggccttgcaatgatggaagcctggtttgctgcctcttacctgaagcacctgggagtggcccttctcagcacacacatgcagaggtgttcttccccagcagtctgtggtgttcacctgtgccccgatgttcaccagatcctgcacaatgagatgctgattggcagccactgccacctgaaaggcactctgtggatatccagaggaaaaaagatattttaaacatacaatgttatcataacaaggaatatgaaactaaactatgactgagggaaaaacccacag

SEQ ID NO: 85259 - DNA, 582 bp, Homo Sapiens
tttgcatatatattaggttataatgtaaaatgtatctcttactatgagctgcaattttttaaaagatattttaaaactgcctaaaatttttttccaaatgtgggctgaactgtaccaacccatccatgggctcttactggattgcccaagaagcacagaaaacatctgtatagctgaggtggaagaaaagaatgaacctaaatggctctaacctaaaccaccacaatatccttttgtcagcaatgccatcatctaatgaatgaacctgccaaagattatgctcaaaaagcattttgagcagtgatcataaattgttaagtgtctgcttgtcaattaagtctctttgcttatctacaaggtcataagaattattcccaatgggacttacctagaaaaataattatctttgagagcatggtaacaggccctcatctgaaaaaaactggtcagtggtggatggaaaaagaactgttcttcacaataagttaaaagacccagacaaattgttatgctactaataaaatatattttcctggttacagcaatctgtggaagtgatttctgaggggaaggtaatgctat

SEQ ID NO: 85260 - DNA, 923 bp, Homo Sapiens
tttccggatgatgaacggagctttggatcactcagaccaaccagacccagatgccattaagatgtttgtcggacagatcccccggtcatggtcggaaaaggagctgaaagaactttttgagccttacggagccgtctaccagatcaacgtcctccgggaccggagtcagaaccctccgcagagtaaagatgcatcatcccattcagatgaaacctgcagatagtgaaaagtccaacgctgtggaagacagaaaattgttcataggaatggtttcgaagaaatgtaatgagaacgacatcagggtgatgttctctccatttggccagatagaagaatgccggatcctccggggacctgatgggctgagtcgagggctgctcttcacctatcgtggtgaagtttgctgacactcagaaggacaaagagcaaaggcgcctccagcagcagctagctcagcagatgcagcagcgtcaacactgccacctgggggaacctggacagggccgggcggactgaccccacagtatctggcgctcctgcagcaggccacctcctccagcaacctgggtgcgttcagctgcattcaacaaatggcaggcatgaatgctttacagttgcagaacctggcgacgctggctgctgctgcagctgcggcccagacctcagccaaccagcaaccaatgcaaaccctctctctacacgagcagcgcccttgggagcactcacgagtcccgtggctgttcaaacaccaatccactgctggtgcagccatgaactccttgaactctctcggggactctgcaaggactggctggagccactggtggactgaataatattactgcataaccagtatggcagtctgaatggaggacctgggccacaggatgagactggcaggctggaaccatgggagccttacc

SEQ ID NO: 85261 - DNA, 1009 bp, Homo Sapiens
gtggaccggtccggaattcccgggatctgtgagcgagttggtgctgcaacgtgctggtctacagagctacacaaaggagtgatccggcccatcagagagacggccacagagttagctgggagtctaccaagtaacggcacagccaacaagatgaacggagctttggatcactcagaccaaccagacccagatgccattaagatgtttgtcggacagatcccccggtcatggtcggaaaaggagctgaaagaactttttgagccttacggagccgtctaccagatcaacgtcctccgggaccggagtcagaaccctccgcagagtaaaggttgttgtttcgtaacattttatacaagaaaagctgcacttgaggcccagaatgcactgcacaatattaaaactttacctgggatgcatcatcccattcagatgaaacctgcagatagtgaaaagtccaacgctgtggaagacagaaaattgttcataggaatggtttcgaagaaatgtaatgagaacgacatcagggtgatgttctctccatttggccagatagaagaatgccggatcctccggggacctgatgggctgagtcgaggctgtgcgtttgtcacattttctacaagggcaatggcacagaatgcaatcaaagccatgcatcagtctcagaccatggagggctgctcttcacctatcgtggtgaagtttgctgacactcagaaggacaaagagcaaaggcgcctccagcagcagctcgctcagcagatgcagcagctcaacactgccacctggggggaacctgacagggctgggcggactgacccccacagtatctggcgctcctgcagcagggcacctcctccaggcaaccgggggtgcgttcagcggcattcaaacaaatggcaggccatgaaatgcctttacagttgcaaaaacctgggccgaccctgggctgccgcctgccaactgcgggccccagaaccctcacccacccagcacccaatggcaaacc

SEQ ID NO: 85262 - DNA, 437 bp, Homo Sapiens
  misc_feature (157)..(166): n is a, c, g, or t
gaaggaaaagggtagcatggggaaacaggcatgaggcagctgattatgcagatatactaaatagttactcaaaacctaatgtcagataactaaattacttcctaggttttcaatatttaaaaattttgcttactctatgaaacaggattgtagcttnnnnnnnnnngtgctgcaagcaagagatttaacattacagaatgccaaattccccatcacactccttcaaaagggcctttagagtttattccttaattggaaactgaattcctctgaacttccttgtgctctgtgtgacctgggtctacactgtttttccagttgcattttatgatctgtcactgaaaacaatatccataaacgaaaacacaaacagatctttctgctacaacagaatcccatgatcaataaggaaaggaaggagaaatgagtgaactcaa

SEQ ID NO: 85263 - DNA, 909 bp, Homo Sapiens
agggctacaactttgctgaagctgtgaacttctgtactgctgactggttgcccattggacgtcaatgtgtaaatcattaccgacgcctaaggcgccactgtgtcttttcacacgaggaactaattttcaagatggcagcagatccagaatgcttagatgtggggctggctgccatggtctgcaaagaattgactctcatgactgaagaagaaacacgattaagagagtctgttgtacagatgggtgtcctgatgtcagaagaagaagtgtttgaacttgttcctgatgatgagcggcagtgttcagcatgcagaaccacatgttttctctctgctctcacatgttcctgtaatcctgagcggcttgtatgtctctaccatccaactgatctgtgcccctgccccatgcagaagaaatgtcttagatatcgctacccattagaagacctcccttctctgctatatggtgtaaaagtcagggcacagtcctatgacacttggggcagtcgtgttacagaagcattgtctgctaacttcaaccacaaaaaagatttgattgaattgcgagtaatgctggaagatgctgaggataggaaatacccagagaatgatctctttcgaaaactcagggatgctgtaaaagaagctgagacctgtgcttctgtggctcagctgcttctgagcaaaaagcagaaacacagacagagcccagatagtgggaggactcggaccaaactgacagtggaagaattgaaggcctttgtccaacaaccttttagtcttccgtgtgtcatcagccaagctcggcaagtaaagaatctgctagatgatgtggaagagttacatgaacgtgctcaggagagcatgacggatgaaaacccagattataccaaaatcaagatgttgatag

SEQ ID NO: 85264 - DNA, 833 bp, Homo Sapiens
  misc_feature (42)..(42): n is a, c, g, or t
agaggcacaacagtaacatgttcctctgtcagcctgtgaagnattgcagggttctgaagccacagactcagtctccccaagtcagcaatctctttctctctctctcctcaaacttcatcgcattcatagaagctgcttgcagggtcgccgggctaaccagggtgatcggcgaactttaccgtacagtacctcagtctagctgtcagatcaccccttttgctgtagcctctgttgaggtttttatatttgtgatcattggtaattcagtgtcctatgaagtgggcacagctccccacagagagcaagttgtcagcaggtctctgtgcactggtattggggcagggcagtgccctgggggtaagctaggtggctcagggagtggcagaagggccatttttccctctgccaaaaagacttccttggatttgtagatgttgacccagagtcctctgtcccctcctgaagaggattttcttactggtttctactgaaggggaggtaggggaggaggaaaaaaggaccatgtgtgatgctgttagacaagacactgacgctgattatggagggtctcctgcaggcccttgtgggctccttggcaaggccccaggctgggaaggagctccccccactgcccatcctgcccgctttgtggcgggtagagtcagtgacagggaggcagccctccttttgtgtatatagagtgagctgatttgggctcaggaaaacctagtcgcttgttgctctcgtctgtgacatttttgtacactggtttgctactcatggcaagaaacagacaaagccccatgaaaaataaaacaaaacaaaagtcattt

SEQ ID NO: 85265 - DNA, 478 bp, Homo Sapiens
  misc_feature (346)..(346): n is a, c, g, or t
ggaatttccgcgcgaggtgctctcttggaaaaaagtccgacaaatgtaagaaccagatggggtaatgtaatccagagagggtggaaattcctaagaaagaatccaaaaagaaatgctagagctgaaaaacacggtaacagaaatgaagaatgcctttgatgggctcattagcaacctaggacacagctgaggaaggaatctctgcgcttgagaatatgtcactagaaacttccaaaacttgaggaagcaaagagggaaaaaagaccgagggagtgtggggggaaagagcagaatatccaagaactgcgggacatctacaaaacctataacatgcacagtgagagtnccagaaagagaagaaaaagacaaaggaacacaaaccatgtttaaagtaataatgacttagaatttccccgaattaatgtcagacacagatccaggaagctcagagaacacaagtaggttacatgcaaaaaaa

SEQ ID NO: 85266 - DNA, 1372 bp, Homo Sapiens
  misc_feature (1243)..(1259): n is a, c, g, or t
tacgagtcgtgatatacgagggagtctttatcactgctagcatacgtagacggttctaggtgatgctgacagatgccgttggattagctgtggctggtgcgtacttcatgtagttgtgtgtgcgtcggctaggggtatcaaggaatagtcccgtgtctgttcgcacagcaaattgaggaggagcccgcaatacgaccgagtggtttgatccgagaggagtgtactagtataatagctctgctctgaggagggttgggggatgacggaccgaggatgagtctgtcgaatagagcgggtggtggacaggaccgccctgtcgtgggtgggcggacggggtatggttaaaaggaagaagagagcccgcatgcactagagtatgtcgtttattataacatgcgacaagatggggatagggcgagtctttctcaagctggagctgataccgcgcctcagattctgtgcacaaatgttgaggaacggagcggtgcccctcccgcagggttcactctgtgagattagcaagagagagacgtctttgttgccaaacagaaagtgtagatgttgcgcagcctggagattaaatatgggttattcgaataaaaataaattccacagaaatccatgccttgtgagatactggctttgcacaatgtttaaagataattgcttgtaattacaaaaaattctccaaaataggaaaagatgatgaaaagttaaattaagactcagaataaaaactgcagttctttggcgtcccttgctgggaagaggtgggcctggcgtacgaccaggtgatgagagctgaggaaggtggtgacgacatccatctggacctgtcgctgcctcatggcacagaacacaccgccccacctgagacctcccactagcaggactctgtccctggcagagctgtacctgagtggtcctgagggacagtgtctttgtggaattaatacttcaggtttagttaacaaaacaaaacaaaacaacagaagccctctcttccccctacttgtccaaaaatgtccctcaaaaatggtaatattttttcttaaaaaaatcaagttcctgcttgtgtcgaattttctgctaagtctctaaaagccacatcaaggacactggatggagagtgacacgtcaatgaaacagctatagtctaaaagtgcacaccgagcgctcagaagggagggattaaagtgctaaggtccccgatctgtctcacggaggagtcagcgttctgtannnnnnnnnnnnnnnnnctgattacagatgagctgtcctaggagcagtgcagagcctctggtcacctgcacgtcaccttcctccccacagccgccccgcccagggctccccgaaaccagttccttcctac

SEQ ID NO: 85267 - DNA, 865 bp, Homo Sapiens
  misc_feature (650)..(727): n is a, c, g, or t
gaattctttctcttcttttggttttgtcctctcattgaagttccagtggtttgaaattagttttggacacattgtcttaatgtactgaaaattgctctgctgtattttgcagcgttcttcatttaatttataatggtccatattagacacatttggtaagagaagtccaggaacacatttagggccatggaatagtattttgtaaaatccatttgggaagttgcaatacccacaatctgacatgtcctaaaatgtaagggattatctctaaggggttgatgggagaaatatttagatgtaccctgttaacagccagtcattttgatttacttatggaaatcaagtgaataaaaggcaacataatttgggaaattttattctaatatctaataaaaacagtttgagtggttgaagacatctgcatgaaattgcacctaggtgcattacttgatataactctcccctaaaactgttgtaattgcattttttcccttttcttggcacccctttagaaatgtactgaagtctcatttttcacccatttcagccatgggacatttttcataatattaatgtaaagatgtttgtgttactgtttataaattacaattgtaaataaattactagtttgcccaaaactttgttcttannnnnnnnnnnnnnnnnnnnnnnnnnnnnnnnnnnnnnnnnnnnnnnnnnnnnnnnnnnnnnnnnnnnnnnnnnnnnncccttgcttggccgcctcgcccctcgaaaaagttttctaaaccattcgctttggcgcgccggccccagaaggtaagggaacatgggcatacctgtttccaaggaaatcctggccatgactagggcttggattctcccc

SEQ ID NO: 85268 - DNA, 391 bp, Homo Sapiens
  misc_feature (12)..(12): n is a, c, g, or t
  misc_feature (353)..(353): n is a, c, g, or t
tagagtgggttngcaacagaaaactcctatgggccccagaaggccctgaaatatttaaatatatgggcctttaagaaaaagtttgcagaatcttcatcctatgtaaatagcatttaaaagtacaacattcttgatagacatacagggccgagaagacatacagggtcaagaagctctgtcagacaggcctgaaatccacgtggggcaagtcatttaacctttctgccacagttttttcaactgtaaagtagagattgatagtatctgttttttaggattcctgtgggattattaagagataaggtatattcaagatctggcaatagaatataatctatttttttcaatcaacngttagaaataaatgtaacagacttttagtttcctattt

SEQ ID NO: 85269 - DNA, 638 bp, Homo Sapiens
  misc_feature (281)..(289): n is a, c, g, or t
cattggggatgaagaagagtacgacacagatgaaattgacagttcttcaatgtcagatgatgatagaaaagaggttgtaaacattcagacttggataaacaaaccagatgtcaaacatcattttccttgtaaagaagtaaaagaaagtggacacatgtttcccagtcatctgttggttactgcaacacatatgtactgtttaagggagattgtttcacggaaaggattggcttatatacagtctcgacaagcgctgaattctgtagttaaaattacatccnnnnnnnnncatcctgaactcattaccttcaagtatggaaatagcagtgcttcaggaatagaaatcttggcaatcgaaaggtatttgattccaaatgcaggggatgcaactaaagccataaaacagcagatcatgaaagttttggatgctttggaaagttaatataaaagaaaattatataaaaagaaattaagacaaccaagagaaacatggacatatacctcctgactgaatactaactggagacctttcatttgctcatggggctgcttaaatagcaggtctaagaaagtgtaaattattataatcaatctgtggacagtaaactttttaaaaaaattttttcttctgccatttt

SEQ ID NO: 85270 - DNA, 470 bp, Homo Sapiens
  misc_feature (32)..(32): n is a, c, g, or t
tcccggccataggtcccctggaccaaggttangccccattggccccagggtaagccacaccctcagcagcaggcccagatgaaaattatattaatccagcaataagaataaaagccccttaaatggggattcccccagtcctgggctttgggggtagcagtatagtcctagtggataaatcccatggtctatattgaaatacatactgtaacattggccaagttaattcaaagattgcttcctcatttgaaaaatgggagcaaaaataactacattgatttttataaaaataaggatgcatgctgtgtctgcatatcacttattaccactgtggtagcaattagcaacaatccataatttacagttgttattatgtgttaattttctttggctcttctccctgcctaaacaacaaataagaaaagaatgtaaatatatgtgaatatatattgggtcagtgattttctggg

SEQ ID NO: 85271 - DNA, 243 bp, Homo Sapiens
atcgccagcaacaatgggcccacatttcaggtacagcagaactgacggcctctgttagagagggcatgcctgctcctgttccctcagaatcaatccttacccatcacattgtcttacattagggcccacttgactcatttaaataggtagctgcctggttcttgagtttgaaatccctgtcttaaaggatgatgaaaacaatggtttacgtctattcttactttcttattagggcctcaccga

SEQ ID NO: 85272 - DNA, 457 bp, Homo Sapiens
tcccaggctggtgctcaggaagcccctatcaagaagaagcgccccccctgtgaaggaggaggacctgaagggggcccgaggaaacctgaccaagaaccaggaaatcaagtccaagacctaccaggtcatgcgagagtgtgagcaagctggctcggccgccccgtcggtgttcagccgcacccgcacaggtaccgagactgtctttgagaagcccaaagccggacccaccaagagtgtcttcggctgagaagtgtgcgccactccccttgctgcccgaatgctcggaaacaggagccttacccaggaactcttttttatgccagaacgcttcctctcccctgctgtctctggggctgccaccctcccccacagtccaggcccttcagccaagggctctgcaccagcaccttggaagcaccaataaagaggatgcccacgtggccccagcaatcataaa

SEQ ID NO: 85273 - DNA, 250 bp, Homo Sapiens
  misc_feature (201)..(201): n is a, c, g, or t
  misc_feature (203)..(203): n is a, c, g, or t
tgcagaccgaatcaagaaggaagagagtccttcgtcctacctgccacacccctcacatacacccactgaacttgggagtggatccgtgttctaaacacgaggtaactctcggtttgcaatggatcacaaggcgccgggctttccagagtcagcaggataaagaagtcattctgtctcggactcccccatcccccggtaacngncgctggtgcctttaaatgagccggggctggccggccggagccgctat

SEQ ID NO: 85274 - DNA, 1152 bp, Homo Sapiens
  misc_feature (41)..(84): n is a, c, g, or t
  misc_feature (89)..(123): n is a, c, g, or t
  misc_feature (481)..(521): n is a, c, g, or t
aagacttttggtacgatcactatagggcgtccggcctcatnnnnnnnnnnnnnnnnnnnnnnnnnnnnnnnnnnnnnnnnnnnnccggnnnnnnnnnnnnnnnnnnnnnnnnnnnnnnnnnnncagtcgacggtaccggacatatgcccgggaattcggccattacggccggggggaaggaaactccagccagaactggcagcggttttatcaactgacaagactcttggattctatgcatgaagtggttgaaaatctccttaactattgcttccaaacattttggataagaccatgagtattgaattccccgagatgttagctgaaatcatcaccaatcagataccaaaatattcaaacggaaatatcaaaaaacttctgtttcatcaaaagtgactgccttaataagaatggttgccttaaagaaagtcgaattaatagcttttattgtataaactatcagtttgtcctgtagaggttnnnnnnnnnnnnnnnnnnnnnnnnnnnnnnnnnnnnnnnnnaaatacgcactacatgtggtttatagagggccaagacttggcaacagaagcagttgagtcgtcatcacttttcagtgatgggagagtagatggtgaaatttattagttaatatatcccagaaattagaaaccttaatatgtggacgtaatctccacagtcaaagaaggatggcacctaaaccaccagtgcccaaagtctgtgtgatgaactttctcttcatactttttttcacagttggctggatgaaattttctagactttctgttggtgtatcccccccctgtatagttaggatagcatttttgatttatgcatggaaacctgaaaaaaagtttacaagtgtatatcagaaaagggaagttgtgccttttatagctattactgtctggttttaacaatttcctttatatttagtgaactacgcttgctcattttttcttacataattttttattcaagttattgtacagctgtttaagatgggcagctagttcgtagctttcccaaataaactctaaacattaatcaatcatctgtgtgaaaatgggttggtgcttctaacctgatggcacttagctatcagaagaccacaaaaattgactcaaatctccagtattcttgtcaaaaaaa

SEQ ID NO: 85275 - DNA, 669 bp, Homo Sapiens
ataccaggtttcaggacttacacctggatgaccaatgaccctactgcagtactcctggatgtttcttatggcatttgctctggggtggagatcatatagacaatcaagtgcaaacctgctgtgttttgctcctgatctgattattaatgagcagagaatgactctaccctgcatgtacgaccaatgtaaacacatgctgtatgtttcctctgagttacacaggcttcaggtatcttatgaagagtatctctgtatgaaaaccttactgcttctctcttcagttcctaaggacggtctgaagagccaagagctatttgatgaaattagaatgacctacatcaaagagctaggaaaagccattgtcaagagggaaggaaactccagccagaactggcagcggttttatcaactgacaaaactcttggattctatgcatgaagtggttgaaaatctccttaactattgcttccaaacatttttggataagaccatgagtattgaattccccgagatgttagctgaaatcatcaccaatcagataccaaaatattcaaacggaaatatcaaaaaacttctgtttcatcaaaagtgactgccttaataagaatggttgccttaaagaaagtcgaattaatagcttttattgtataaactatcagtttgtcctgt

SEQ ID NO: 85276 - DNA, 476 bp, Homo Sapiens
  misc_feature (24)..(24): n is a, c, g, or t
  misc_feature (55)..(55): n is a, c, g, or t
  misc_feature (67)..(67): n is a, c, g, or t
  misc_feature (432)..(432): n is a, c, g, or t
aacatggagacaaaaggcccatgnctgattccctcccctctgaccctattggttncacctaaagccnaaactaagggtagaaagtggcgggcctactcctagggccacccccacatgtagattgtgtttttgggtgaaaggctggctgatcagagactcaaaagaatgcaaacatttgtctccttacttaccctatgaccccagaagtcctttaccccactttgagttgtcccacctttctggaccgaaccaatgtataccttacacatattgatgatgtctcatgtctccctaaaatgtataaaaccaagctgtgccccagccaccttggacacgtgtcgtgaggatcttctgaagctgtgtcatgggtgtgtccttaatcttgggaaaataatctttctaaattgattgagatctgtctcagagactttntgggttcacacccatatcctgaaaactacaaaacactgcttaaa

SEQ ID NO: 85277 - DNA, 729 bp, Homo Sapiens
gtgagtttaaatgagcaggagctggccgggccggagccgctacaggtcgggcctgaggcactgcagaaagtgggcctgagcctcgaggatgacggtgctgcaggaacccgtccaggctgctatatggcaagcactaaaccactatgcctaccgagatgcggtttccctcgcagaacgcctttatgcagaagtacactcagaagaagccttgttcttactggcaacctgttattaccgctcaggaaaggcatataaaacatatagactcttgaaaggacacagttgtactacaccgcaatgcaaatacctgcttgcaaaatgttgtgttgatctcagcaagcttgcagaaggggaacaaatcttatcgggtggagtgtttaataagcagaaaagccacgatgatattatcgttactgagtttggtgattcagctcgctttacccttccatcgtcgggacatgtatattgcaagacagatcggcttgccaaaggatcagaatgttaccaaaagagccttagtttaaatcctttcctctggtctcccatttgaatcatgatgtgacaactaggtgaaaaggcagatcctgaccaaacattaaaattcacatcttttacagaactttagcaagtgtctgcccaaatcttgcacaacacaagtacctaatcagtagtctatctcacagacagcctgagacagttcttacggacacagcccaggacacaactgac

SEQ ID NO: 85278 - DNA, 2423 bp, Homo Sapiens
  misc_feature (2327)..(2327): n is a, c, g, or t
  misc_feature (2352)..(2353): n is a, c, g, or t
  misc_feature (2369)..(2369): n is a, c, g, or t
  misc_feature (2371)..(2371): n is a, c, g, or t
  misc_feature (2393)..(2393): n is a, c, g, or t
cggtccggaattcccgggatcgggacgcgccggcggcggcggagactccggggctgcggcgccgcccgccccgcccgcagagtccggctgccgcgcatcgtccgcagacgccgccaccgccatgggctcctgaggctagcttgtcactttctgcaaaggtttccctcagggagcctcctgctgccaggcaccatgacagtgaggggggatgtgctggccccggatccagcgtcgcccacgaccgcagcagcctcgcccagcgtctccgtgatccccgagggcagccccactgccatggagcagcctgtgttcctgatgacaactgccgctcaggccatctctggcttcttcgtgtggacggccctgctcatcacatgccaccagatctacatgcacctgcgctgctacagctgccccaacgagcagcgctacatcgtgcgcatcctcttcatcgtgcccatctacgcctttgactcctggctcagcctcctcttcttcaccaacgaccagtactacgtgtacttcggcaccgtccgcgactgctatgaggccttggtcatctataatttcctgagcctgtgctatgagtacctaggaggagaaagttccatcatgtcggagatcagaggaaaacccattgagtccagctgtatgtatggcacctgctgcctctggggaaagacttattccatcggatttctgaggttctgcaaacaggccaccctgcagttctgtgtggtgaagccactcatggcggtcagcactgtggtcctccaggccttcggcaagtaccgggatggggactttgacgtcaccagtggctacctctacgtgaccatcatctacaacatctccgtcagcctggccctctacgccctcttcctcttctacttcgccacccgggagctgctcagcccctacagccccgtcctcaagttcttcatggtcaagtccgtcatctttctttccttctggcaaggcatgctcctggccatcctggagaagtgtggggccatccccaaaatccactcggcccgcgtgtcggtgggcgagggcaccgtggctgccggctaccaggacttcatcatctgtgtggagatgttctttgcagccctggccctgcggcacgccttcacctacaaggtctatgctgacaagaggctggacgcacaaggccgctgtgcccccatgaagagcatctccagcagcctcaaggagaccatgaacccgcacgacatcgtgcaggacgccatccacaacttctcacctgcctaccagcagtacacgcagcagtccaccctggagcctgggcccacctggcgtggtggcgcccacggcctctcccgctcccacagcctcagtggcgcccgcgacaacgagaagactctcttgctcagctctgatgatgaattctaggtgcgggctgcagtggcggaagtgctggcgccatagccacggtcaggctgtgccccacctccagcctcaccaccaggccaggaggcagctggcacagtgctcacgccgcctttatttattggaccagaaacactcacatgtcacttccagaggaacgggggacagccaggctcgcccatgggccttcaagaatatttatacatggcccaacctgcactgcccggacgaaggcagaagacactggagagcaaggcttatacccctgctgcccgaaatgagctgcggggatgctggggacagccccacccaagacgcgagggttgtgatgtggacacagtagacttggacctgctggggcccttcgggcccgcaaagaatctcaggcgtgagggccggggaggaggtgtcttgccactcagacgaggggacgaaaacactaggcccgaaatggaatgagggcccgacgggaggcacggcgagatggggaaaagaagtgcgcaaacaggtcggaagctgataccgcggagattcgcgggacgagccgtaagaaaaagaagcgacgcggatgatgctgcacggccacgggagctgttgcgatgagagaggcgcagagagcacgttggtaaccgatagtcggttcagcgcggcgcggcacccgtatgtacacggcttacgtgagacacagtcccagcggaacggtgcagccgggggaatagaaatcggcgggtgggagaacggcgcgtatgtactagctagattgtaccggggctgtggtagccgcgaccgcggacaagagggaccctattcgccccacgtccgccgccaactcgacgaccccacctgcttgtgtggagaagagcgggaggagtgatagggcgtcgtggcggcggtgtaggcgcgaggagataganagaaactgactctccggttttgggnncagaatgagagagcgnanagcgagggagagggcgaggagncgagaggggagataggcgtgtgtgtcgccg

SEQ ID NO: 85279 - DNA, 572 bp, Homo Sapiens
  misc_feature (415)..(415): n is a, c, g, or t
  misc_feature (465)..(465): n is a, c, g, or t
  misc_feature (524)..(524): n is a, c, g, or t
aacgcgctgatagcctcctccctgttgccacacacagctgtggctctttcacctccattgctgtttagaatcccagcatctgcggacccattctgctgatttgactggtttctcctggacactctcttcgcagccttggtcatctataatttcctgagcctgtgctatgagtacctaggaggagaaagttccatcatgtcggagatcagaggaaaacccattgagtccagctgtatgtatggcacctgctgcctctggggaaagacttattccatcggatttctgaggttctgcaaacaggccaccctgcagttctgtgtggtgaagccactcatggcggtcagcactgtggtcctccaggccttcggcaagtaccgggatggggactttgagtaagcagcgggtgctccccggngtgtgtgggaggagtgttggcgcaggctggtgccttggctcagggaaggnggcagccagagtggccgcacagccatgaccttcctgggtgtctggtgctcacaaccccnctgaagtctgagcccagcagtggacacccttgcagttggccccgctgc

SEQ ID NO: 85280 - DNA, 277 bp, Homo Sapiens
  misc_feature (264)..(264): n is a, c, g, or t
ttaagaaagttccttgcccaccgttgaggatcaatagctctattgatttaggcaaatgaatgagaagatttaaacatcatccagactcccaaagttggtgtaataaaagttgagatgttttgctagatgctgagagaaaaggcataaataggccatttgtgctcctgtaaacaaatgaaattttgtaatgatcaagagacagcatgatattataaaacacactttgggactcatcgagacctggctcagagttgtacctaattngcttatcagcatt

SEQ ID NO: 85281 - DNA, 441 bp, Homo Sapiens
  misc_feature (353)..(353): n is a, c, g, or t
  misc_feature (381)..(381): n is a, c, g, or t
  misc_feature (398)..(398): n is a, c, g, or t
  misc_feature (404)..(404): n is a, c, g, or t
gacagcaccagcgagacagcccacaaggctggaggctggagaatgagagactgcgctctcttggggctgagggagcaccatgcagcttcacccctcacaaagccatgcacgctgggggctctgttttcctgcacactaaatagctagcaatctatgcaaacacctttcccataaagaaaccaaaccccatagtacagtgccttgtcctagtgttcacatgttcagctctgtttgtttagatgccaaggtttccattttcagggctataaaaagtattacttgggaaatgagggcatcagaccaccagatgttaccgctcggttggaatgtgttccaccgtgggagttggtttngggtgacgctgttaaccatttccacgcncagggaccctcttgctnggggtncaaagcccatttcagggaggggggaagggttcaggtt

SEQ ID NO: 85282 - DNA, 468 bp, Homo Sapiens
aatcatgtttaagtgaacttactcttagttataaggaactgtcctgctttgtggggaagagggctgttgcttgtcaggcaaaaaagttttctcttcctacccaccatccctctctctgcttcccttgcatttggcaggctgtatgaagccaatgagctgcgaggtgttttgacaggggaggtctgcatgcagcctcttctttgtcctaacaattcctttgttgatcttgcctgtgatgaatcatagcgcctgcattgctctggtctaggcattatttgcaacacacagtatcgtaagcgagagattgttctgcctatattcagtgttttccatgcagcaattcttcttgttgacgttcacagtactgtaacgagtaacagacttgatcacagtctcctcgtgcctgtgcagggctgcacaggcatgatcttatcagggttccaatctgttagattgcctttaaacaaa

SEQ ID NO: 85283 - DNA, 397 bp, Homo Sapiens
gttcagtattagccttctattggaatgtaaattattctgacttgaacccacactgaactacctgcagcctgtaacttagaaggaaaaaacaaagtgccaccactgaactgctggccttctaacaaatatcacctattagcattcacaatgaaggcaagcatgaatcagcatgaaagtataccctatataaggtttcttttagcttctctcaagtcttgacacacacctgtgtcactgacagctagtatgcaaattgcctaaaagctccattaggctagtcttagggcaagggaagcccatctgtttcgttccgtggacactttccctcctaggatcctcatgtggggaattatgttccttggagacatggcagatgggatggattttgcggccatgt

SEQ ID NO: 85284 - DNA, 437 bp, Homo Sapiens
  misc_feature (202)..(295): n is a, c, g, or t
  misc_feature (323)..(323): n is a, c, g, or t
  misc_feature (351)..(351): n is a, c, g, or t
  misc_feature (364)..(364): n is a, c, g, or t
  misc_feature (413)..(413): n is a, c, g, or t
gggcgtgagctaggagcactccagctgtagcagaaacctgaatattaagtacacttttattgaggaaatcacatgtgcgatgtgggagagaataatgagggtataaatatactatagggactgagcatgagtaaggtgggagctgcttaatctattctatgtgctggcactgggtatgtcctcaataacctcaaggaaaatnnnnnnnnnnnnnnnnnnnnnnnnnnnnnnnnnnnnnnnnnnnnnnnnnnnnnnnnnnnnnnnnnnnnnnnnnnnnnnnnnnnnnnnnnnnnnngtccagggagttttaagacccagtcttngggcaaccattggcgaaactttcatcanttacccaaagganggaaaaaaatttagcccaggttttggttggtgttattgccctgttagtncccagattacttcttggttggcct

SEQ ID NO: 85285 - DNA, 890 bp, Homo Sapiens
ttttttttacaataatttggtttggttttaaagaaactgcatacatcatcaggagacaaacaataatttaaataccatgcagtttctgtatgtacaaaacctaggccacagagatccagtttaatttgtattctctatttacatcgttttcctcatacagccatcatctgttaaattagaacctgggagattaggggattgacggtcaccacactcactcctatacaaagacaaactatgtacagacacccaggaagcaactggaaaatgcaaccggtctggggattaacagacagatagggagaaaaagtcatttaaggtgacctttgcccaccggctgtgcacagggagagcctgaaattccattcatcaaagcaacacaccacgattttcattcggcaaataaaaatacatgttcataagcgggagaaaaataaacccagagcttttcatcacatgtaccgtcacgttgtttggtttctctaatctgacataaaggctaaagttttaaaagttttacagtgctttgagggcctttagagatgaatatatcagccatttaaaaaaagctagttggctgatggcggtctcttctgtcactgattgattgggggcgggggcagggttgggcaatgtctaatctttagaaggaagcatttgatttgagacatttcacatttttcctctcacgctaatccaaatgaaaaaaatgctcaactgggaatttacacacataaaataaactttgacttgccagctacagctttttcaaaaaagagatgcattttaagtcatctagctcacctttttattttttcccttaattaatgtcaaattgtcatcttggaaagtaacacaaattgctgcagttgtcatgacattgtagtgaa

SEQ ID NO: 85286 - DNA, 437 bp, Homo Sapiens
  misc_feature (412)..(412): n is a, c, g, or t
aacattctgatttaataaatggtatgaatatatattttgcatactttacaataaagaaaattttgaaagaaaatggatctaaaactttgtttccctccaatttacatagtaaagtcaactgcatacagttctttccatgtgtaagttttacatttgtattttctacaattaagtaaatctaaatgttaaattttaacacatatatccaattatgtacacaattacaatgtcaatttataagtcaagcttacttaacaatcataaattacaaaaaacgcactatgaataattttgttctaggaaggtatcaccatcaactcatatggatctagggtggaaccccaaaaggtaaaaaataatggatttattaaattatggggaggtgtctggtaaaacccctggttataagggnggggattcctttttaaaatatggta

SEQ ID NO: 85287 - DNA, 519 bp, Homo Sapiens
tttaagtgatagatacacacacatatacaacatacggtttccgaggagagtgagggctccatgcttgtgagagaggaggaggaggaatatgccgaataaccctcaggtttctcccagatttgaacatgttgtactgtggcatgaggtcagcagagacttactccagccctgtgaggctgaattctaccctgacaaagcagtatcaccgtaatatgaagcaagaggattcagggcatgttggcagctgtacagaatgcctgttctagaaagtaatggcaattccaaaacaagagatctatggtgtcacatgagataatcttcagcccagttaagcaataagcacccaaaatactttgaatcccaaacacaggcagctcaaaagtttaatggtagaaaagaacttttctccttgaccctattttgtgtctggaggaaataatcaggaagaagaaaactggaagaatcattagttaatttgatctgtatcataaacaacatactgattctgatctgatctgt

SEQ ID NO: 85288 - DNA, 393 bp, Homo Sapiens
  misc_feature (20)..(20): n is a, c, g, or t
  misc_feature (34)..(34): n is a, c, g, or t
  misc_feature (51)..(51): n is a, c, g, or t
  misc_feature (68)..(68): n is a, c, g, or t
  misc_feature (78)..(78): n is a, c, g, or t
ctggaaaagacagcccagcntttcccatcgcagncccccttccttcaggancgcccagaggtggatcngccgcccctngcagggaccctgcctgtcttgctgctgcttcttgggggagccggttacttcctgtggcaacagcaggaggaaaaaaagactcagttcagaaagaaaaagagagagcaagagttgagagaaatggcatggagcacaatgaagcaagaacaaagcacaagagtgaagctcctggaggaactcagatggagaagtatccagtatgcatctcggggagagagacattcagcctataatgaatggaaaaaggccctcttcaagcctggtgaggaaatgcttcagatgaggctccactttgttaaataaaatggatgatac

SEQ ID NO: 85289 - DNA, 268 bp, Homo Sapiens
aaagaaggaatcactttcctatcatctaaaccaagttccttcacactggagtattttgtcactttctcccctccgtggagtattttgtcacttctcccctccgtataggattttttgttgttgtaagagttgtagtcatattgtaaatatttttgtacctttctccttttaacgtgttattgacaaacctccccaaaagaatatgcaattgtttgattcatttctctgttatcagacaccaataaattctttttgttgggcaaaaaaa

SEQ ID NO: 85290 - DNA, 447 bp, Homo Sapiens
  misc_feature (364)..(364): n is a, c, g, or t
  misc_feature (416)..(416): n is a, c, g, or t
atcaaaaaagccctttcctaaactatatccacagtgaagttatatggtcctcccccactccaggcttgttaagaaaaaataacacagctgttcctaaaaggcagctgacaaattcaccctcatcctttttctatactcctctacccccacttgaaacaaattttggagacaaggccattgctactgtgatgagaaaggagctctcctccccagtttctgttgttcaggttagtgcaaatgtcagaaatggccactatcagttgtaaagaactgtggatcactgtggtcaagtgccccggcgttgctgttagtttggtcactgaatggaagaaagaactggcagtttagaggaatacccctgagncagaaatctcattttaatttgcatattgcagactggtaaacttacttggaanaaaaaagaaggcgctcataatgtccctctat

SEQ ID NO: 85291 - DNA, 866 bp, Homo Sapiens
cagtcgacggtaccggacatatgcccgggaattcggccattacggccgggggtgtgcagacccgcgtgtggcgcaggcaaggaccctcaaaataaacagcctctaccttgcgagccgtcttccccaggcctgcgtccgagtctccgccgctgcgggcccgctccgacgcggaagatctgactgcagccatgagcagcaatgagtgcttcaagtgtggacgatctggccactgggcccgggaatgtcctactggtggaggccgtggtcgtggaatgagaagccgtggcagaggtttccagtttgtttcctcgtctcttccagatatttgttatcgctgtggtgagtctggtcatcttgccaaggattgtgatcttcaggaggatgcctgctataactgcggtagaggtggccacattgccaaggactgcaaggagcccaagagagagcgagagcaatgctgctacaactgtggcaaaccaggccatctggctcgtgactgcgaccatgcagatgagcagaaatgctattcttgtggagaattcggacacattcaaaaagactgcaccaaagtgaagtgctataggtgtggtgaaactggtcatgtaaccatcaactgcagcaagacaagtggaagtcaactgttacccgctgtggcgaagtcaaggccaccttgcacgggaatgcacaaatgagggtacagccttaattattttccctttgtcgccctcctttttctgattgatggtgtattatttctctgaatctcttcactggcaaaggttgccagatagaggcaatccaggcagtgagctttacttgccgtgtaaaggaggaagcgttgggaaaaaaccgatttcgatttaaca

SEQ ID NO: 85292 - DNA, 942 bp, Homo Sapiens
  misc_feature (78)..(112): n is a, c, g, or t
aagacgtatgactcatatgggcgttactcgtcgagccgaacgacgagcgcagcgagtagtgagcgaggaagcggccgnnnnnnnnnnnnnnnnnnnnnnnnnnnnnnnnnnncagtcgacggtaccggacatatgcccgggaattcggccattacggccgggagcgagagcaatgctgctacaactgtggcaaaccaggccatctggctcgtgactgcgaccatgcagatgagcagaaatgctattcttgtggagaattcggacacattcaaaaagactgcaccaaagtgaagtgctataggtgtggtgaaactggtcatgtagccatcaactgcagcaagacaagtgaagtcaactgttaccgctgtggcgagtcagggcaccttgcacgggaatgcacaattgaggctacagcctaattattttcctttgtcgcccctcctttttctgattgatggttgtattattttctctgaatcctcttcactggccaaaggttggcagatagaggcaactcccaggccagtgagctttacttgccgtgtaaaaggaggaaaggggtggaaaaaaaccgactttctgcatttaactacaaaaaaagtttatgtttagttcggtagaggtgtcatgtataatgctttgttaaagaaccccctttccgtgccactggtgaatagggattgatgaatgggaagagttgagtcagaccagtaaagcccgtcctgggttccttgaaacatgttcccatgtaggaggtaaaaccaattctggaagtgtctatgaacttccataaattaactttaattttagtataatgatggtctgggattggtctgacctcagtagctattaaataacatcaagtaacatctgtatcaggcctacatagaactacagtgagtgggggtaacaaagattaatgggtgttaaggggggaaaaaa

SEQ ID NO: 85293 - DNA, 1007 bp, Homo Sapiens
  misc_feature (86)..(120): n is a, c, g, or t
  misc_feature (930)..(930): n is a, c, g, or t
aagactttggtatatctgctatagggcgctagctcgctgcagccgaacgacgagcgcagcgaagtagtgagcgaggaagcggccgnnnnnnnnnnnnnnnnnnnnnnnnnnnnnnnnnnncagtcgacggtaccggacatatgcccgggaattcggccattacggccggggagacccgcgtgtggcgcaggcaaggaccctcaaaataaacagcctctaccttgcgagccgtcttccccaggcctgcgtccgagtctccgccgctgcgggcccgctccgacgcggaagatctgactgcagccatgagcagcaatgagtgcttcaagtgtggacgatctggccactgggcccgggaatgtcctactggtggaggccgtggtcgtggaatgagaagccgtggcagaggtggttttacctcggatagaggtttccagtttgtttcctcgtctcttccagatatttgttatcgctgtggtgagtctggtcatcttgccaaggattgtgatcttcaggaggatgaagcctgctataactgcggtagaggtggccacattgccaaggactgcaaggagcccaagagagagcgagagcaatgctgctacaactgtggcaaaccaggccatctggctcgtgactgcgaccatgcagatgagcagaaatgctattcttgtggagaattcggacacattcaaaaagactgcaccaaagtgaagtgctataggtgtggtgaaactggtcatgtagccatcaactgcagcaagacaagtgaagtcaactgttaccgctgtggcgagtcagggcaccttgcacgggaatgcacaattgaggctacagccctaattattttcccttgtccgcccctccctttttctgaatgatgggtgcaattaattttctctgaaatcctcttcactgggccaaagggttggncagaataaaggcaaattccccaggcccagttgagctttacttggcccctggtaaaaggaggaaaaggggttggaaaa

SEQ ID NO: 85294 - DNA, 818 bp, Homo Sapiens
gcaggctggtacggtccggaattcccgggatatcgtcgacccacgcgtccgggaccctcaaaataaacagcctctaccttgcgagccgtcttccccaggcctgcgtccgagtctccgccgctgcgggcccgctccgacgcggaagatctgactgcagccatgagcagcaatgagtgcttcaagtgtggacgatctggccactgggcccgggaatgtcctactggtggaggccgtggtcgtggaatgagaagccgtggcagaggtggttttacctcggatagaggtttccagtttgtttcctcgtctcttccagatatttgttatcgctgtggtgagtctggtcatcttgccaaggattgtgatcttcaggaggatgcctgctataactgcggtagaggtggccacattgccaaggactgcaaggagcccaagagagagcgagagcaatgctgctacaactgtggcaaaccaggccatctggctcgtgactgcgaccatgcagatgagcagaaatgctattcttgtggagaattcggacacattcaaaaagactgcaccaaagtgaagtgctataggtgtggtgaaactggtcatgtagccatcaactgcagcaagacaagtgaagtcaactgttaccgctgtggcgagtcagggcaccttgcacgggaatgcacaattgaggctacagcctaattattttcctttgtcgcccctcctttttctgattgatggttgaattaattttcccggaatcctcttcactggccaaagggtgggcagatagaagcaaactcccagggccaggtgagcctttactt

SEQ ID NO: 85295 - DNA, 829 bp, Homo Sapiens
ggaccggtccggaattcccgggatatcgtcgacccacgcgtccggaccctcaaaataaacagcctctaccttgcgagccgtcttccccaggcctgcgtccgagtctccgccgctgcgggcccgctccgacgcggaagatctgactgcagccatgagcagcaatgagtgcttcaagtgtggacgatctggccactgggcccgggaatgtcctactggtggaggccgtggtcgtggaatgagaagccgtggcagaggtggtttccagtttgttacctcggatagtccagatatttgttatcgctgtggtgagtctggtcatcttgccaaggattgtgatcttcaggaggatgaagcctgctataactgcggtagaggtggccacattgccaaggactgcaaggagcccaagagagagcgagagcaatgctgctacaactgtggcaaaccaggccatctggctcgtgactgcgaccatgcagatgagcagaaatgctattcttgtggagaattcggacacattcaaaaagactgcaccaaagtgaagtgctataggtgtggtgaaactggtcatgtagccatcaactgcagcaagacaagtgaagtcaactgttacccgctgtggcgagtcagggcaccttgcacgggaatgcacaattgaggctacaccctaattattttcctttggcgccccctcctttttctgattgatgggtgaattaattttctccgaaaccctccttcactggccaaaaggtggcaaaaaagaggcaaactcccaaggcccaggaagctttaacttgcccggggtaaaaggaaggaaagggggggg

SEQ ID NO: 85296 - DNA, 880 bp, Homo Sapiens
ggtaccggtccggaattcccgggatatcgtcgaccacgcgtccgggcgcccgctcgcgatctagaactaggcaaggaccctcaaaataaacagcctctaccttgcgagccgtcttccccaggcctgcgtccgagtctccgccgctgcgggcccgctccgacgcggaagatctgactgcagccatgagcagcaatgagtgcttcaagtgtggacgatctggccactgggcccgggaatgtcctactggtggaggccgtggtcgtggaatgagaagccgtggcagaggtggttttacctcggatagaggtttccagtttgtttcctcgtctcttccagatatttgttatcgctgtggtgagtctggtcatcttgccaaggattgtgatcttcaggaggatgcctgctataactgcggtagaggtggccacattgccaaggactgcaaggagcccaagagagagcgagagcaatgctgctacaactgtggcaaaccaggccatctggctcgtgactgcgaccatgcagatgagcagaaatgctattcttgtggagaattcggacacattcaaaaagactgcaccaaagtgaagtgctataggtgtggtgaaactggtcatgtagccatcaactgcagcaagacaagtgaagtcaactgttaccgctgtggcgagtcagggcaccttgcacgggaatgcacaattgaggctacagccctaattattctccttttgtcgccccctccttttttctgattgatgggctggattattttcccccgaaatcctcttcactggccaaaaggttggccagattagaggcaactccccagggccggggaggtttttacttgccctgggaaaaaggagggaaaggggttgga

SEQ ID NO: 85297 - DNA, 989 bp, Homo Sapiens
gagctaggtagcgaggcctgggtggtctaatcggcacgagggtggggccgtgcgcagcggcgtatgtggggccgtgtgcagacccgcgtgtggcgcaggcaaggaccctcaaaataaacagcctctaccttgcgagccgtcttccccaggcctgcgtccgagtctccgccgctgcgggcccgctccgacgcggaagatctgactgcagccatgagcagcaatgagtgcttcaagtgtggacgatctggccactgggcccgggaatgtcctactggtggaggccgtggtcgtggaatgagaagccgtggcagaggtttccagtttgtttcctcgtctcttccagatatttgttatcgctgtggtgagtctggtcatcttgccaaggattgtgatcttcaggaggatgcctgctataactgcggtagaggtggccacattgccaaggactgcaaggagcccaagagagagcgagagcaatgctgctacaactgtggcaaaccaggccatctggctcgtgactgcgaccatgcagatgagcagaaatgctattcttgtggagaattcggacacattcaaaaagactgcaccaaagtgaagtgctataggtgtggtgaaactggtcatgtagccatcaactgcagcaagacaagtgaagtcaactgttaccgctgtggcgagtcagggcaccttgcacgggaatgcacaattgaggctacagcctaattattttcctttgtcgcccctcctttttctgattgatggttgtattattttctctgaatcctcttcactggccaaaggttggcagatagaggcaactcccaggccagtgagctttacttgcccgtgtaaaagaaggaaagggggggaaaaaaaccgactttctgcatttaactacaaaaaaagttatgtttaatttgggtagaggtggtatggataaatggcttggttaaagaaacccccttttccgtgccactggggggataagg

SEQ ID NO: 85298 - DNA, 853 bp, Homo Sapiens
ggcacgagggccgtgcgcagcggcgtatgtggggccgtgtgcagacccgcgtgtggcgcaggcaaggaccctcaaaataaacagcctctaccttgcgagccgtcttccccaggcctgcgtccgagtctccgccgctgcgggcccgctccgacgcggaagatctgactgcagccatgagcagcaatgagtgcttcaagtgtggacgatctggccactgggcccgggaatgtcctactggtggaggccgtggtcgtggaatgagaagccgtggcagaggtggttctacctcggatagaggtttccagtttgtttcctcgtctcttccagatatttgttatcgctgtggtgagtctggtcatcttgccaaggattgtgatcttcaggaggatgcctgctataactgcggtagaggtggccacattgccaaggactgcaaggagcccaagagagagcgagagcaatgctgctacaactgtggcaaaccaggccatctggctcgtgactgcgaccatgcagatgagcagaaatgctattcttgtggagaattcggacacattcaaaaaagactgcaccaaagtgaagtgctataggtgtggtgaacctggtcatgtagccatcaactgcagaggacaagtgaagtcaacgtgttaccgctgtggcgagtcaggacaccttgcacgggaatgcacaatgaggtacagcctaattatgtgccttggtcgcccgtcctttgctgatcgatggttggatatgtctctgaatcctcttcactggccacaggttggcagatagaggcactcccaggcaagtgagctttacttgccgtgtaacaggaggaaagggtggacacaca

SEQ ID NO: 85299 - DNA, 865 bp, Homo Sapiens
caccagtgcacgaaagggttcttacacaaacatatacatacacctctccaaactaacataactttttttgtagtaaacgcagaactcgtttttctccaccccttcctccttttacccggcaagtaaagctcactgccctgggacttccctctatcgccacaaccttgccccagtgaagaggattcagagaaaataatacaaccatcaatcagaaaaaggaggggcgacaaagggaaaataattacgcctgtagcctcaattgtgcattcccgtgcaaggtgccctgacttcccccaccaccggtaacagttgacttcacttgtcttgctgcagttgatggctacatgaccagtttcaccacacctataccacttcactttggtgcagtctttttgaatgtgtccgaattcctccacaagaatagcatttctgctcatctgcatggccgcagtcacgagccagatggcctggtttgccacagttgtagcagcattgctctcgctctctcttgggctccttgcagtccttggcaatgtggccacctctaccgcagttatagcaggcatcctccctgaagatcacaatccttggcaagatgaccagactcaccacagcgataacaaatatctctgccacggcttctcattccacgaccacggcctccaccagtaggacattcccgggcccagtggccagatcgtccacacttgaagcactcattgctgctcatggctgcagtcagatcttccgcgtcggagcgggcccgcagcggcggagactcggacgcaggcctggggaagacggctcgcaaggtagaggctgtttcctcgtgccgattacacacccagcctcgtacctagcctta

SEQ ID NO: 85300 - DNA, 1187 bp, Homo Sapiens
  misc_feature (1143)..(1143): n is a, c, g, or t
aacataggctaggtacgaggcctgggtgttaattcggcaccgaggaaacagctctacctgcgagccgtcttccccaggctgcgtcgagtctccgccgctgcgggcccgctccgacgcggaagatctgactgcagccatgagcagcaatgagtgcttcaagtgtggacgatctggccactgggcccgggaatgtcctactggtggaggccgtggtcgtggaatgagaagccgtggcagaggtttccagtttgtttcctcgtctcttccagatatttgttatcgctgtggtgagtctggtcatcttgccaaggattgtgatcttcaggaggatgcctgctataactgcggtagaggtggccacattgccaaggactgcaaggagcccaagagagagcgagagcaatgctgctacaactgtggcaaaccaggccatctggctcgtgactgcgaccatgcagatgagcagaaatgctattcttgtggagaattcggacacattcaaaaagactgcaccaaagtgaagtgctataggtgtggtgaaactggtcatgtagccatcaactgcagcaagacaagtgaagtcaactgttaccgctgtggcgagtcagggcaccttgcacgggaatgcacaattgaggctacagcctaattattttcctttgtcgcccctcctttttctgattgatggttgtattattttctctgaatcctcttcactggccaaaggttggcagatagaggcaactcccaggccagtgagctttacttgccgtgtaaaaggaggaaaggggtggaaaaaaaccgactttctgcatttaactacaaaaaaagtttatgtttagtttggtagaggtgttatgtataatgctttgttaaagaaccccctttccgtgccactggtgaatagggattgatgaatgggaagagttgagtcagaccagtaagcccgccctgggttcccttgatatgttcccatgtaggaggtaaaaacaattctgggaagtgtctatgaacttccataaataactttaattttagtataatgaatggggcttggaattgtctggaccttcagtagctatttaaattaacattcaagtaacatcctggtatccgggcccctacccttaaaacccttcccgntttggaagtggggaagtttaaacccaaaaagattaaacccttgc

SEQ ID NO: 85301 - DNA, 804 bp, Homo Sapiens
taaatcggagaggtgagaccggtgtgggcaggcacgacctcaaaataaacagcctctaccttgcgagccgtcttccccaggcctgcggtccgagtctccgccgctgcgggcccgctccgacgcggaagatctgactgcagccatgagcagcaatgagtgcttcaagtgtggacgatctggccactgggcccgggaatgtcctactggtggaggccgtggtcgtggaatgagaagccgtggcagaggtggttttacctcggatagaggtttccagtttgtttcctcgtctcttccagatatttgttatcgctgtggtgagtctggtcatcttgccaaggattgtgatcttcaggaggatgaagcctgctataactgcggtagaggtggccacattgccaaggactgcaaggagcccaagagagagcgagagcaatgctgctacaactgtggcaaaccaggccatctggctcgtgactgcgaccatgcagatgagcagaaatgctattcttgtggagaattcggacacattcaaaaagactgcaccaaagtgaagtgctataggtgtggtgaaactggtcatgtagccatcaactgcagcaagacaagtgaagtcaactgttaccgctgtggcgagtcagggcaccttgcacgggaatgcacaattgaggctacagctaaattattttccttgctcgccctctttttctgattgatggtgattatttcttctgaatctcttcactggccaacggtggagataaggcaatcccaggcagtgaagttattgccggtaagggggaaggg

SEQ ID NO: 85302 - DNA, 815 bp, Homo Sapiens
ggggtgtgcagacccgcgtgtggcgcaggcaaggaccctcaaaataaacagcctctaccttgcgagccgtcttccccaggcctgcgtccgagtctccgccgctgcgggcccgctccgacgcggaagatctgactgcagccatgagcagcaatgagtgcttcaagtgtggacgatctggccactgggcccgggaatgtcctactggtggaggccgtggtcgtggaatgagaagccgtggcagaggtttccagtttgtttcctcgtctcttccagacatttgttatcgctgtggtgagtctggtcatcttgccaaggattgtgatcttcaagaggatgcctgctataactgcggtagaggtggccacattgccaaggactgcaaggagcccaaaagagagcgagagcaatgctgctacaactgtggcaaaccaggccatctggctcgggactgcgaccatgcagatgagcagaaatgctattcttgtggagaattcggacacattcaaaaagactgcaccaaagtgaagtgctataggtgtggtgaaactggtcatgtaaccatcacctgcagcaagacaagggaagtcaactgttaccgctgtggcgaggtagggcaccttgcacgggaatgcacaattgaggctacagcctaattatttttccttggccgcccctccctttttctgaattgatgggtggaataatttttccccgaaatccccttcccgtggcaaaaggttgggaaaaataaaggcaaacttccagggccagtggaacttttatctggccggggaaaaagggggaaaagggggtgg

SEQ ID NO: 85303 - DNA, 1388 bp, Homo Sapiens
atgatcgaatcgagctcggtacctatgtctcgatcgttagagatatttgttatgctgtggtgagtctggctcatcttgccaaggattgtgatcttcaggaggatgcctgctataactgcggtagaggtggccacattgccaaggactgcaaggagcccaagagagagcgagagcaatgctgctacaactgtggcaaaccaggccatctggctcgtgactgcgaccatgcagatgagcagaaatgctattcttgtggagaattcggacacattcaaaaagactgcaccaaagtgaagtgctataggtgtggtgaaactggtcatgtagccatcaactgcagcaagacaagtgaagtcaactgttaccgctgtggcgagtcagggcaccttgcacgggaatgcacaattgaggctacagcctaattattttcctttgtcgcccctcctttttctgattgatggttgtattattttctctgaatcctcttcactggccaaaggttggcagatagaggcaactcccaggccagtgagctttacttgccgtgtaaaaggaggaaaggggtggaaaaaaaccgactttctgcatttaactacaaaaaaagtttatgtttagtttggtagaggtgttatgtataatgctttgttaaagaaccccctttccgtgccactggtgaatagggattgatgaatgggaagagttgagtcagaccagtaagcccgtcctgggttccttgaacatgttcccatgtaggaggtaaaaccaattctggaagtgtctatgaacttccataaataactttaattttagtataatgatggtcttggattgtctgacctcagtagctattaaataacatcaagtaacatctgtatcaggccctacatagaacatacagttgagtgggagtaaacaaaaagataaacatgcgtgttaatggctgttcgagagaaatcggaataaaagcctaaacaggaacaacttcatcacagtgttgatgttggacacatagatggtgatggcaaaggtttagaacacattattttcaaagactaaatctaaaacccagagtaaacatcaatgctcagagttagcataatttggagctattcaggaattgcagagaaatgcattttcacagaaatcaagatgttatttttgtatactatatcacttagacaactgtgtttcatttgctgtaatcagtttttaaaagtcagatggaaagagcaactgaagtcctagaaaatagaaatgtaattttaaactattccaataaagctggaggaggaaggggagtttgactaaagttctttttgtttgtttcaaattttcattaatgtatatagtgcaaaataccatattaaagaggggaatgtggaggactg

SEQ ID NO: 85304 - DNA, 985 bp, Homo Sapiens
  misc_feature (332)..(332): n is a, c, g, or t
  misc_feature (366)..(366): n is a, c, g, or t
  misc_feature (401)..(401): n is a, c, g, or t
  misc_feature (442)..(442): n is a, c, g, or t
  misc_feature (524)..(524): n is a, c, g, or t
  misc_feature (540)..(540): n is a, c, g, or t
  misc_feature (564)..(564): n is a, c, g, or t
  misc_feature (689)..(689): n is a, c, g, or t
  misc_feature (781)..(782): n is a, c, g, or t
  misc_feature (796)..(797): n is a, c, g, or t
  misc_feature (838)..(838): n is a, c, g, or t
  misc_feature (851)..(851): n is a, c, g, or t
  misc_feature (862)..(862): n is a, c, g, or t
  misc_feature (878)..(878): n is a, c, g, or t
  misc_feature (921)..(922): n is a, c, g, or t
  misc_feature (941)..(942): n is a, c, g, or t
  misc_feature (948)..(948): n is a, c, g, or t
tccacaaggagaatttgtccttaagcagctgcgaataatgcagtcatctcagagcatgtccaagctcaccttaaccccatgggtcggccttcggaagatcaatgtgtcctactggtgctgggaagatatgtccccatttacaaatactttactacagtggatgccgtctgagcccagtgatgctggattctgtggaattttatcagaacccagtacttcggggactgaaggctgcaacctgcattcaacccacttcaatggtagtgtctgtgaaaaggcctggcaaaccacagtgctaaacattgccggacaccatgtgccttgaagatagnatgtgggaattgctccaccggcatctctgagtgnatgtggtgcatcaacatgacgcagcgtgggcacgncgatgccgacgtgggcctccttcgctttgtgggccgggaanggcatgggtattcgatgagccccctcctccccgtgagcacttggccacggccgccgtaccctagaatcatttgccttgtgtncggcgcggggcggtgnctgtcggctgcggtagccgcgccncgtgccggacggcaggcggcagtcttctcagccgccttgaataaaccgcgccaccataaagacacccttccctacccatgctatctggaagccgtccagtgccggaagcttagtattccatgttnttgttgccccgcccctatctgtacacttgtcccacaacgctcgggccgtttgctacccccttccctaccgctcgttatgtgcgccccgcgcnnttttatatgtgggnngcaccccccaccacattcagttacataacgttcatcgaaanaaaaacgccccgncagcggagggnctggcgcataattttntctatattgcttgttccccgccctccggtgatttgtggtaggnncacgcggagagcgagagcnntttctntcacaaccagcctcagctaactaacccgcggatgcgc

SEQ ID NO: 85305 - DNA, 496 bp, Homo Sapiens
  misc_feature (15)..(15): n is a, c, g, or t
  misc_feature (51)..(51): n is a, c, g, or t
aggggtaatggcaanatatggtttattcactgatttttcgcctctgatttngaaaacctcagagtttgttagtcctccatgggcatacataggcttcagaggcaatcacaaaacccagtcactcaaagcgagctctcagatttaaaattgcatttgattctgtaaagacttgtcttttgcgggtaagcagggggaccattacacatccccaggagagggccagctcgattctggaggaggccaaagacggatctcacagagggcccgagctgtgggcaggccctgggaggagagggatgcaggcacgagccccagcaatcaccctcttcccggctggtgcggcgctgatcaggctacagaaatgagaagcagaagcaagattaagcatgctctcggagtcggggagagagtaggaatagctgggagaggggtctctgagcacagtcccagtaatagtggcttctacatggagcccacagagccaatcactgaggtt

SEQ ID NO: 85306 - DNA, 329 bp, Homo Sapiens
  misc_feature (309)..(309): n is a, c, g, or t
aagaaagagctctccctgagtcagttgcaaaacgtctatatttttagatgccactacttttttcttaaatattcattttgagactgtcatgagttagaccagtggttgagattagtagatggctcactagacatgtttttgttttgcagacattatatccattccagtcctctgcactgtacactgcagcagtgtgcaaactatgggacttagagggtttctgccatctttccatgtgtgaagtagcttggtttcctctgcctgtgcatttggatgtttgtggctatgtccacctcctaaaactgggcnacttgaggaaaattcatctt

SEQ ID NO: 85307 - DNA, 372 bp, Homo Sapiens
attatagttcattacagttacatagtccgaaggtcttacaactaatcactggtagcaataaatgcttcaggcccacatgatgctgattagttctcagttttcattcagttcacaatataaccaccattcctgccctccctgccaagggtcataaatggtgactgcctaacaacaaaatttgcagtctcatctcattttcatccagacttctgggaactcaaagattaacttttgactaaccctggaatatctcttatctcacttatagcttcaggcatgtatttatatgtattcttgatagcaataccataatcaatgtgtattcctgatagtaatgctacaataaatccaaacatttcaactctgttaaaa

SEQ ID NO: 85308 - DNA, 305 bp, Homo Sapiens
  misc_feature (67)..(67): n is a, c, g, or t
  misc_feature (70)..(70): n is a, c, g, or t
  misc_feature (265)..(265): n is a, c, g, or t
atgcccccaagcacggacgccagcgtgggggtggaggttcttccagctgccctgagcctgtgcgaanggngaggtccttccccagttcccacagactgtgggaagggaagagacggtggaagcgagcgggttctgggctcctgggtctctggaactaccctctgcccttgccccaacactcaggtagcgggaaggatgaccacgctcacacgacaagacctcaactttggccaaggtagggaggctggacctgcgggcccggggngggggcgtctgggccggcgggtttccttcgagggggggcc

SEQ ID NO: 85309 - DNA, 433 bp, Homo Sapiens
  misc_feature (21)..(21): n is a, c, g, or t
  misc_feature (82)..(82): n is a, c, g, or t
  misc_feature (135)..(135): n is a, c, g, or t
ccgggtagtataaccagttcnttccccaagcttgagataaaaatgatttccaaatccttgaatcctgtaaaccaaaccaatncaagtccatgggtaggataggttgtcaaaatgaaaagattccagaaagtttancaacccaatgggcacccatatgaagaaaactgagaatgtgcaaggtaaatacagaagatactggaaacagtaaggacccaggatgacccaggtgacacaattctttagctgttactgtacttgattttacaagaaaaatacttacgtgttcattacaattacattgtaagggctgtttgtttttagttttaaaaatgaacctaaggcccagagaatataattttaggtactgatcataatgtaaactattataaacttaacaatgtaagaaatcataacaataaaatttcaatttaaa

SEQ ID NO: 85310 - DNA, 527 bp, Homo Sapiens
gaaggagctaaaaatggaaattcatgaaacataaatggtatcaagaactttatcagtatgctttgttgaaagcagaaattaagataataattgagttcaattcgcctctccgcattgcctattgatacactttactaatcatgaaattctaacctaaaaggaaaacattttcctgcttgtcttagaagaaagtggaataattcccactgattgtgataatgggtttcaatttcctacacaatataaatatcccagtataaaggaaagcgttaagtcggtaagctagaggattgtaaatatcttttatgtcctctagataaaacacccgattaacagatgttaaaccttttaatgttttgatttgctttaaaaatggccttcctacacattagctccagctaaaaagacacattggagagcttagaggataagtctctggagcagaatttatcacacacaaaagttacaccaacagaataccaagcagaatgatgaggacctgtaaaataccttgtgccctattaaaa

SEQ ID NO: 85311 - DNA, 883 bp, Homo Sapiens
  misc_feature (872)..(872): n is a, c, g, or t
caactgatgtagatgcctccaggtaaagcaaaggtttacatattacacaagcaatttaagctgttttctaaacatatgccaagacagtgggagttggcagcccacactgtgtttcaggttttggagacttggattagaagtgactgttgattatgaacctttttatttgtcttctatgaactacaagcaacctagtaacccgggaaagaattcttcacagcacttaaacttgtcctcctagcggcccaagattacatacacaaatcacttgacaaaagtggtgtaagactcttgtacatagataaccacacaagacaattgtcttgttctaacccttaaagagttccacaaagtgaaatgttttataatccttttttgtgcagtaggcaaggaagaacaagaaaggaggttgggcaaagattatccaaaagaaagaaagagactcttttggggttccagttgaaacacaataaagaacataattaactttacaattctttgtgtttttcatttgactgcagggaggagatgaacagaggactgctaagcctcgcattccatcccaattacaagaaaaatggaaagttgtatgtgtcctataccaccaaccaagaacggtgggctatcgggcctcatgaccacattcttagggttgtggaatacacagtatccaggtatcactaaaaggcatcgaagcatagaaatttctcatcttattttctcatcatcttttcataagtgttgttattcagaagttgcaaataagtaaccataaggtgggcaataacttaaatcattacctccattcttgctggaaaactccatatgtgtctttaaggaggaaatgggaggaacaacaatggttttggacnttttcctcaat

SEQ ID NO: 85312 - DNA, 415 bp, Homo Sapiens
  misc_feature (63)..(63): n is a, c, g, or t
  misc_feature (98)..(98): n is a, c, g, or t
  misc_feature (104)..(104): n is a, c, g, or t
  misc_feature (137)..(137): n is a, c, g, or t
ataacatttcacacgggaaaaagctttgcccatgatttaccccaagctcgaaattaacccctnactaaaggggaacaaaaagctggaagctcccaccnggtggnggccggctcctagaacctaggggatccccgggnctgcaggaatcgggcacgagggaaagatctggtttcactttttgaaaactgaaaaatttctgtccttgcctttgcatgtcctagttgggtgttatactgaaagtgaagatcataaattcaccaaaacatgtatgcctttgtgtatgagcattaaaaaagttcttcaagttttccctagcctaagcatttaaacatgtcagcaaaaatacaaataaaaaggaaataggctaactggggtgttggtgggtcccacctgttaattcccaggcactttgggg

SEQ ID NO: 85313 - DNA, 256 bp, Homo Sapiens
attataatagaaaacccaattcaaacttgcctacagagtaaaaagaaatgacttttgtcacagctgaaaagtctagcagtagaatgaactttaggtattgtttgatcagggtaccatgctttcagacctggtcttgctgatgtgttggctttatcttcagctggtttcttccctcacaatagcagataatcacagcagtttcaggccttatatccacacatccagaaagaaagaatttctcatatcctccaactat

SEQ ID NO: 85314 - DNA, 388 bp, Homo Sapiens
  misc_feature (332)..(332): n is a, c, g, or t
  misc_feature (348)..(348): n is a, c, g, or t
tgcaaagacaaagccaaaaaattgatgaagtggaaatgcagcaaagcaacatgcatgaacaaagatgctgtcattcaaaaactacaggaaaatgttggcgctttttactctctatagcaatttgttgtaaatagactgatcccatcagagtgaacttcaaatgcctactaatgtcagtaacatcttctgattatctggtgtcttttattcaaggattcagaaggaaattgcaaatacattattttaaggtacttatgcaaggaaaacagctgaggagatgattttatcattcatatttcactaccagcaaaatctattttaaatgtaaccantaaaaaatagctaacnattatttcattcttactctatgcaggcactgttacaagca

SEQ ID NO: 85315 - DNA, 358 bp, Homo Sapiens
  misc_feature (274)..(274): n is a, c, g, or t
  misc_feature (287)..(287): n is a, c, g, or t
  misc_feature (298)..(298): n is a, c, g, or t
  misc_feature (303)..(303): n is a, c, g, or t
  misc_feature (312)..(312): n is a, c, g, or t
  misc_feature (340)..(340): n is a, c, g, or t
tagtacctgtcatagatgcttgtaacagtgcctgcatagagtaagaatgaaataatgttagctattttttattgttacatttaaaatagattttgctggtagtgaaatatgaatgataaaatcatctcctcagctggttttccttgcataagtaccttaaaataatgtatttgcaatttccttctggaatccttgaaataaaaggacaccaggataattcaggaaggatgtttactggacattaggtagggcatttggaagttccacttctggngggggtccagtcntattttaccanccaanttgctattngaggagttaaaaggcggcccacattttncccgttaggttttttgga

SEQ ID NO: 85316 - DNA, 269 bp, Homo Sapiens
  misc_feature (29)..(29): n is a, c, g, or t
  misc_feature (54)..(54): n is a, c, g, or t
  misc_feature (65)..(65): n is a, c, g, or t
  misc_feature (110)..(110): n is a, c, g, or t
ccatatcatttgtgaacatataggatttnacttcttactttccaacttagatgncttttcttttnctagctcaggctagaactcctagtactgtgttgaataggaatggngaaatgagcattgtcttgatcttagaggaaaagctttcaccactaagtatggtgtctaccgtgggcttttcatgtctggcttttattatgttcaggggagtttcctcttatccctcatttgttgagtgtttttaatcacaagaggctgctgggattttg

SEQ ID NO: 85317 - DNA, 313 bp, Homo Sapiens
  misc_feature (115)..(115): n is a, c, g, or t
  misc_feature (160)..(160): n is a, c, g, or t
ctcatgaggagaatgtattttaaacttgggaagagtcataattctgggatgtttcacatgttgtcagctttaaccttctacagacacaggccctctcctctgtgaggagggaccnctggcatgtgtgggtgtgtggtgggtcccctctcccctaattaancagaaatgtgttgggcatgagcccaggtttatgatttggattgtgtcctgcacataacacctgtgagaatacaactgggactaggacaatgcgggaagcatattcttcatgaggcggtaaccaaaaggcttggctataccaaaggattctggt

SEQ ID NO: 85318 - DNA, 269 bp, Homo Sapiens
  misc_feature (25)..(25): n is a, c, g, or t
taaccaaacaggcctgtttgtggancccaaatccacttgcctccccgggcatgccaggaacctaaaataggaacaagggaggcagcctcagatggccaaggggctcaaggccagctcaaagagtgtagactgtaccctggtggtgtacagggagctgttcattagacctctggagaacaaaggcaaactatgtgtcagattagtcatgccagagtgagggttttagcagtatgaccttgtaaggaggtaagccaaaaaactagcacaac

SEQ ID NO: 85319 - DNA, 289 bp, Homo Sapiens
  misc_feature (17)..(17): n is a, c, g, or t
  misc_feature (119)..(129): n is a, c, g, or t
cttcctcattcattagncaagattacagactaggatatagcaacctattattcaagaacagcttttaaaggtagctgcttcagactggcacttcgggaaaactttgaaagtagacttcnnnnnnnnnnnaatgcttattttaactatagattggtgataacgattcaaccccagagatccagctaactgttggcacagaaatccttaacgctactctcaagcaaataagatcttgtaaggggaaactcctgcaaaatataccttgtgaacaagctgctcgcacctcctc

SEQ ID NO: 85320 - DNA, 353 bp, Homo Sapiens
  misc_feature (118)..(118): n is a, c, g, or t
  misc_feature (308)..(309): n is a, c, g, or t
agaatcgctaataaactagccagcccaggagccaaaaatcccaaatcccactgtgggcccttagactgcacgattggtccgtagaacgtgaggctttcctccgggaagcctttgcggnttttagacaggggtgatggaagcatcagcaagaacgacttcgtgatggtgttggaggaaaggcaggattatgcaagctcagaacagctggctgccattcgctcaccttcatgagaaaacccggggaggaggggtcaatattaattgaattcttttaaaggaaccagatattttaaacaagtctttttgtnnttagggttcgtatgggaccttaaggaaaaagggaaaaaggggat

SEQ ID NO: 85321 - DNA, 1059 bp, Homo Sapiens
  misc_feature (58)..(58): n is a, c, g, or t
cagtgagagccaggtttctgaggaacaagaagagatgggagggcaaagcagcgcggcncaggccacggccagtgtgaatgcagaggagatcaaggtagcccgtattcatgagtgtcagtgggtggtggaggatgctccaaacccggatgtcctgctgtcacacaaagatgacgtgaaggagggagaaggtggtcaggagagtttcccagagctgccctcagaggagtgaaagggacaatttggctgaagtctttctctgaaaaaagccaaagggttataggggtacacttagggggttgcatgcaagctgttaccaaaaaatttttaagtattttcttaatttgaataataaaaccagaggaaatgcatacagggcatgagcaactgaggcaaacctttgtggacatgaattgttctacgatgaatttttgctttagtattttaataagaattacaaagacaatggcatacttggggtgagagggagctgaggatgtctgaggagggaatagtattgcagggaagactgagaaaacagtaggatgacagttttgagtatactctgcacttttcaattgtgcaatcttcttgtgcactttaaggctttttaattttgtttgagaatgcaaatgtatactgtaagtctacctttactatctactatgcctacttcaccatctcttaaggactcggcatttgtccacagtcagactgcaagagagggtaggtcatgaacagtcacccatgctggctgtagcccccacagaggcaatcatgcccaatagattcaagagaagctaagcggaaatggagggtggaaggtgtgatctgtgggactgtctgggcctgttactcatcctgctatcaatttcttattaattaatcttgatgattcttattaattaatcacatttgcaggaaattcagatgaggcaagaaaattttattggcctgggtaagactgaaagcattccaaattaggcttagactgtgcaaagggcttagctaagttatcgagcttaaaacccgtcaattaaacaaacattatttgaacagtta

SEQ ID NO: 85322 - DNA, 470 bp, Homo Sapiens
  misc_feature (33)..(33): n is a, c, g, or t
  misc_feature (85)..(85): n is a, c, g, or t
gtccttcaactgcctcctaggtatttgaaaacntgggccagcagccaaaagagttttccattgtttgttccaccccaaatctttnacgaacaacagagaagaatgccattatggataacactaaattcctgaactatgaaatcctaagctgtgctggttctccttttatgaaactgaatttggaacagaaagcagttaccataaaaataaacaaaagtaaaaaactagaacagaaaaggggaaggaaaagagtctaaggaatcccagcaggcaaattccaaaatgggagattttggaaaaaatccgaaattggggtagagggaggaaataaatgtgcacaaagggggaaaagaaaggaacgcaacaaacaaacaaaaaacaaggcacagaattttctgcaatctactgaaactaaatccaagtatccaagtttgacttggtaggaagaaattaaaattaaacaaacaaac

SEQ ID NO: 85323 - DNA, 1058 bp, Homo Sapiens
  misc_feature (14)..(14): n is a, c, g, or t
  misc_feature (24)..(24): n is a, c, g, or t
  misc_feature (158)..(158): n is a, c, g, or t
gtgggtccatccanggcttgccangcgttcctttgtccttttgccaaactgtaagctcctaaactgctgtaacaaacctgccatttgtaactcctaacattgggctgtaacttcctaaccgtcccagcgcatgcctcactgttgaagaatgttttaanaaatgaattggaaatcttcgcacactgcttcacaccctggccacttgcatacaccatgtccatagagagggtggctatgggggtgctcctcatgggacaaactttcccttttgggagtgtggactgagagctgtccattggtagaggcatgtgggttcattattaaggaggtcttggaaggtgcagaggaggagacacatgtcgtggtcagatccaaactgctgtgattgttgcctgtggtttcttctgcagtatgagcacttgtcacttctttccagagctgctgcagttctgttggaatcatgccttgagcaagaggttgaaggggaagggcaggctgcccgggctgaattgtcagaaggccttggcgctgcaaagacaggaggtgctgctgctgtaactgctgcatctgtaaaagctgctgctgaaaagccaactgctgggtagccacctgctgttgctctttaggctgttttccagcatgttgttgttgtaaaagttgaagctgcaactgttcctgttgttttttataaaactcttgaagctgctgttgaagcatgagggcctgctgctgctggaggagaacctggagctgctgagggctcagcacttgttgctggaggatctgctgcatttgctggggagtgataacttgaggtgtcatcatagccactgacacgggaacctgaagagctggttgtttgtcattcctcttgggagattttaatccactaacttgctgctgctgttgctgctgaagaaggagctgtcttgccacctgaagtgccttgctcagtgtccaaatcctgcattttattagcatccctgcagctgctctgcgttgcagtatcaaaaggcacacagcctgggcgccatgaaagtgggcggtcaggaaaacca

SEQ ID NO: 85324 - DNA, 374 bp, Homo Sapiens
  misc_feature (86)..(86): n is a, c, g, or t
  misc_feature (280)..(280): n is a, c, g, or t
  misc_feature (324)..(324): n is a, c, g, or t
  misc_feature (347)..(347): n is a, c, g, or t
  misc_feature (363)..(363): n is a, c, g, or t
acaaaattaaaatgaaataacttgtacaactggtgcgtaccatggctccagcagattgcccaaagcactggctattaattcctggngttcagatggtcagttgagtctatcctagttttttgcttcacttgttcaatcatggaactttctagaacgctgccactcttcaaaggcttctcaatttcaaatttgaaaacttaattctctccctcttagtttcaaagttgttacagtgttatctatgtggaagtatgtgggaaagttgggggggctgggggantttcctccggggcaggatttaaggaaacagcttttccggggttngggccgctgtgggcttcagggcncgttaatccccagcantttgggggagg

SEQ ID NO: 85325 - DNA, 384 bp, Homo Sapiens
gttcttaaaaaccataaatgtcagttgatgaacagccattaaactgatgaaaggatgctaaagcctcattagcaatccagaggcatgtaaattaaaatggataagctttgaaaattgattgaattggcaaaaattaacaaggacagtcctgtgtgggccgagatacaaggagacaggcaggctcatgtgccaatgggcggcctgaaaaactggcgctgccttgtggcgggcaatgtggtagtcaccaggggcaatttaaagtgtacatgccctccaacgcagcaatgccactttcagttatgtattcacagaaatactcccacctggcataacagtgagtgcacaggatgttcgctgtagtgttaccttcaatgtaaaaaagtt

SEQ ID NO: 85326 - DNA, 534 bp, Homo Sapiens
agtacgtcaaatgagaggtggtggcagacagtgcggggaagcaggattagacttaacactatgcagacacctgtgaactaggtaagttgaatacacagcctgaaacttagggcaggtgtctgggttagggatgtacctttggaagtgctcaggattagaaagcatttgaaatcttgggaatggaagacatcacccgggagagacccttattttttagagttcggtaaatgagaaaaatgagtagtgtgacgacatagaaataggttacaggtttcatcccatcctgtgagaaaccatgtgagtataggactagagtacaatgctgtttcagatttggggaaagcaacaggttaatgtgggaaaatcatgttgaggaagaaagtaatacattttattttcaacgttgtattggagactcttagaaatgattgagaaatgtggtgctcaatcctgtgatccaggctggaggattccctgaggccaggagtttgagaccaccctgggcaacatagcatgatcctgtctttacaaaac

SEQ ID NO: 85327 - DNA, 739 bp, Homo Sapiens
  misc_feature (460)..(470): n is a, c, g, or t
ttcatattgtgcatgcagatcgaaaacaataaaataaacctggctcaagcacaaaccaatttgtgtgttctgattcaataatggtttctgggtggccaattcagaagaagagtgtacatgctcaacaaatcctaggccctgcattcctgtcatcctcatccgggggaaacaccatcatcccagtagctgccctattcaactgcaacagtctccaggaccatcagtatactgcatttcatgtgcaccaaatattttgaaagacatttataaataattggcttatgactcatatttctctatgaataccttcatacagcaggtataactcttttctttatgggcttaaatattttgtcactgatcctgcaaatggacatcattttagcacactagcggtttatattttaaggaccttcattctctgttctgcacctcttctggaaattgagtaaattttgcnnnnnnnnnnnactcagttgcaacttacgcttggcatcttcagaatgcttttctagcattaagagatgtaaatgataaaggaattattgtatgaaatattacaaagcgtagactatgcattgttattcattataatattttttgctatcataatcgcctcataaagacaggtttcaaccattaaaatatgttcttccttaaattccgtgtgctttttctagttcctgtggtgtcataaaagtgtttatcctaaaacaagaaggaagcagaagaaaaagag

SEQ ID NO: 85328 - DNA, 441 bp, Homo Sapiens
  misc_feature (53)..(53): n is a, c, g, or t
acaagcaatagtgaccatgagcacttgactcgctgggttatcaggctttggcnccaaatgtttggcttcaaatatgaaaaaattaccatgaaagatgaaactatgcaatggcatggctgttggtcattcacatctctctctgccaagaatggagatgacgctgttgaaggaagaaatgtgttttctcctttttctcaagtgatatttgccttaggtcagattctactagtttaaagcaaaacgatctcctggtctgattcctttgggtctctaataatggaaactgcaaggatcagcataaagtgttcctttgttctgacgttggtataacattgcttcttgaaaaatgaaagtatttggacatacagacagaagcaatattattcaggtcttccttgttgcaagtgagggaaatccaattaaaactggtttaaacctaaa

SEQ ID NO: 85329 - DNA, 449 bp, Homo Sapiens
gaatctggagtttgctgttgaatggggaaagcaggatgacgttgcatgtatccaggctttggtgctgctgtcctaagaagggtcaggcctggtcagcatatggtgctctcctttggtgctatttggctccagtgtctttggagtctgaggaggtttggcctttaaaaatcaaactgccaccggaactgctttaaaaatgtttggttcacagccttcactggattacctattggagcaaacaaagtgtaaccatgtaaaacctgtgagcttgtattgatatctcatggctagagttccaaggtaaaagctattggatcttcgtttgtgtgtgtgtatacatgtctagatgtgtttatttgtatgtacacttattgttatatgttgtgtcaaccaaatcagcttataaataaaaaagcactcataaattaaataaataagtccaaacaaaa

SEQ ID NO: 85330 - DNA, 892 bp, Homo Sapiens
  misc_feature (79)..(113): n is a, c, g, or t
agaatgtatagatcactatagggcgctactcgtcatagcgaacgacgagcgcacgagtcagtgagcgaggaagcggcgnnnnnnnnnnnnnnnnnnnnnnnnnnnnnnnnnnncagtcgacggtaccggacatatgcccgggaattcggccattacggccgggggctgtgacccggcgggggtccatccaccccggtgagcaggcccaaggcagcgggggcccacacccctcacacgcaaaactggcttcttctggtcactggtgtctgaaaccaaatccagagcagcctgtggcctgtaaagcatatatttctaatgactgcagactggtgggatcataggagccttctgaatgaccaggactgctttctttggagctgatgaaaatgtactcttttagcgtgttagaaatcacttgttttattttgtttctttggccaagctgggtctagtgtttcttttgctgggaatagactttcaaaagttgtacttctatcaagaaacaaaactgcccttgcagaaatttcaggtcttttgttaagcctgtattggtcttaaggtgcagtattttttaaattattatttatagaaagaatctataaattcttggggaagtgtgttataagctttaataattacattgagctgcacctcagtggtgtgtcattaacatgcagtggggttaatatctgaggcctcagatgactttgtgccttttggaataaagggtaaaataaactctcccagagtaagagctgtatcgtgaattgtcatactaattattgagggggacttatgtgcttttattgaatggagtgctttacaatttttatttttaaatggggttgggatccttggaatatttcaataaaattgataaaatataaagttc

SEQ ID NO: 85331 - DNA, 1414 bp, Homo Sapiens
  misc_feature (1021)..(1021): n is a, c, g, or t
ccgaaggacccagaaaagctgcaggccatgcacctggagcgatgccttaggatattaccccatcatcagaatactggagggttttttgtggcagtattggtgaaaaaatcttcaatgccgtggaataaacgtcagccaaagcttcagggtaaatctgcagagaccagagaaagcacacagctgagccctgcagatctcacagaagggaaacccacagatccctctaagctggaaagtccgtcattcacaggaactggtgacacagaaatagctcatgcaactgaggatttagagaataatggcagtaagaaagatggcgtgtgtggtcctcctccatcaaagaaaatgaagttatttggatttaaagaagatccatttgtatttattcctgaagatgacccattatttccacctattgagaaattttatgctttggatccttcattcccaaggatgaatttgttaactcggactaacagaagggaagaaaaggcagctctacatggtttctaaggagttgcggaatgtgctgctgaataacagtggagaagatgaaggttattaaaacggcgatcaaagtctggtgtagaaataacagcggtgaagagtttgactgtgctttccggctggcacaggagggaatatatacattgtatccatttattaactcaagaattattactgtatcaatggaagatgttaagatactgttgacccaggaaaatcccttttttagaaaactcagcagtgagacctacagtcaagcaaaggacctggcaaagggaagcatcgtgctgaagtatgaaccagattctgcgaatccagacgctctgcagtgtcccatcgtcttatgcggatggcggggaaaggcctccattcgaactttttgtgccccaagaatgaacggcttcattatctcaggatgatggggctggaggtattgggagaaaagaagaaggaaggggttatcctcacaaatgagagtgcagccagcaccgcgacagccagacaatgcacgtgnactgagggacagagagcaggagagcccaacagcccagatgcagaagaggccaacagtccagacgtgacagcaggctgtgacccggcgggggtccatccaccccggtgagcaggcccaaggcagcgggggcccacacccctcacacgcaaaactggcttcttctggtcactggtgtctgaaaccaaatccagagcagcctgtggcctgtaaagcatatatttctaatgactgcagactggtgggatcataggagccttctgaatgaccaggactgctttctttggagctgatgaaaatgtactcttttagcgtgttagaaatcacttgttttattttgtttctttggccaagctgggtctagtgtttcttttgctgggaatagactttcaaagt

SEQ ID NO: 85332 - DNA, 1033 bp, Homo Sapiens
  misc_feature (917)..(951): n is a, c, g, or t
cttctgcagagagaaatgtgaatgcccacccgccatgccatgcatagttcgacgctttcaaggacgtgtggtccagagttgaacccgaacatttgaacccaagggctgatagccgagcgagtcaagtgcctcatgtacacctatgcattgtgtctccatgggacaggcttgacttggaaattgctaagacatatttttaaaatgtttctcaccacagaatatactatgtgaggtaatggatatcttagcttgatttaaccattcccacgatgtatacatatatcgaaacacccatgttatagaccataaacatatgcaatttttatttgtcaacttaaatccaaataaactaggaagtgtaatggcttcagaaatgtgtaattcacccaagctacaacatgaaacatcttgggtatccgtcacattgtttttggttataattgacaaatccccactaatgaaaagctatatgttgaagaaatatctcaaaatgaggaaatgtaccaccctacatagaaaataagaaaatcaattgtctcatgtagcaagcagtccagaggttagttcactgtctccatgacataacttagtacctgggctctgtttaactctaagcagcatcatggaaagcttattggcttggttcgcttgtctccttaaggttctaagatggtaccaggagttccaacacaacaacagccagattaagaaggaaccccttgagaatggctgatttcaaagatggggcaggaaaaatacaagatgggtatgtagcacgttattgtgccagatgtaaaatgtgtttaaagaatgatgggccatgtcaaaaggacgtagcaaccagtttgaaggagctttctttggcccccggccgtaatggccgaattcccgggcatatgtccggtaccgtcgactgnnnnnnnnnnnnnnnnnnnnnnnnnnnnnnnnnnncgccgcttcctcgctcactactcgctgcgctcgtcgttcggctgcgacggagctgagcgccctatagtgagttatacatttg

SEQ ID NO: 85333 - DNA, 476 bp, Homo Sapiens
gagatacatagtagattctggttattagtccttttacagatatatagattgtcaagattttctcctctgtgggttgtctgtttactctgctgactgttccttgtgccatgcaaaagctctttagtttaattaagccccaactatttatctttgtttttattgcatttgcttttgggttcttggccacgaaatccttgcctaagccaatgtctagaaggaatttttccaattgttatcatctagaattttaatagtttcaggtcttagatttaagtccttaatccatcttgagttgatttttgtataagatgagagatgaggatccaatttcattctcctacatctggctagccaattatcccagcaccatttgttggaaaagggtgtctattccccgcttacgtttttgtttcctttgttgaagatcagttggctgtaagtatttgagtttacttctgggttctctattctgttcc

SEQ ID NO: 85334 - DNA, 761 bp, Homo Sapiens
  misc_feature (422)..(422): n is a, c, g, or t
ggaagggaagggaattttccaggatataaactttgttggggcacagagaacaataccacaacgcatgagtttttggcatgctgagcactttgaagtaagaaaaattggaaggccttaatagctgccttaactttctaaccttctcttgtttctcttcccacaaccccagtgcagagggaggctgtttctgaaattttcttatctgactaaggaaacttatttccaaaagaaatgcaattgtcttaagaccccctcctcaggaatctcatcaaataaccaggaaaggttaaccactggagaagaaactaaaagtcatcaccatgcccaaacaggatttttatctattcttctgagggcacctccaaaagtctacctgggagcctttatcgtgcatgataagataatctttgctgacagtgaangaacctgccccccaacttcctgtcacctccctcagagctcagatgaacttttgccttaggccattgtcctttgggctcatccattttcctctgaaaatcattcaccatccctcacaatctcctatgttccccccatttctttctaccctatcaagagggtattgaagcctcaagcatctgggcctttctttgaatcctcacattttcaggactgtcatgtttacatatacgtaacatcacactttttcaagcctttttctcctattaatctgtctactgtcagtcaattttcaggcaaaacatcagagaagacaggacaagaaagccttccttctggtc

SEQ ID NO: 85335 - DNA, 372 bp, Homo Sapiens
agcctcgacctcccaggctcacaggttcgtaccatcttagcctcaggagcagctacgattacaggcccatcctagcatgcccagcttcattggctacttttgaaggatattagcgaaacaattcattatgtgaaacctagtaaataatggagaagaattaagcatttatcctcccttttctgtaagagatacctcaagataaccaaatagtggaggcatgaaaaattatctttataaaaatattctatttaataaaagaagttatagaattcaaatatccaatatattcaatggcttgctgaaatgactgtaggcactgacaatcaagggctgcgaacaaagactactaatcatttctgcctacttacctaa

SEQ ID NO: 85336 - DNA, 600 bp, Homo Sapiens
  misc_feature (342)..(356): n is a, c, g, or t
cataccacgaggtgcacatgcacaaacacacacatcctaatgattccaacctcgaatactccctcaggcccatggggatgcccaagtaccctaagcaaatcactgtgacactgagggggtcattaactggggctccgagcagctgaaacccaccctggtggtctctagattgttgttctgagaaatcataaacaccaaatcctccaatccctttgaatttgagtttgtcattttaacctttaacagccttttcaggtaaaaataacaaagaccaatttattgactttgtagctacaatgagcttgaaaaagcgcttacttaaaagaaagactggaaggaagnnnnnnnnnnnnnnntggagtacatactcctcagacgatgcacactttaattagctaaaataaaaataaaaatgtacagaggaagggagaggaaaaaccaacttctctgatcctttcatggcactgtagctcaaagactggaatctctgcttgttaaccattgttaactagtatttttagtcctggttgcttttagcctctgtatagttccttttttaaacacattttctatacgttaataaaagatcctgaaagaaaa

SEQ ID NO: 85337 - DNA, 398 bp, Homo Sapiens
  misc_feature (54)..(54): n is a, c, g, or t
  misc_feature (110)..(110): n is a, c, g, or t
tttcatgagtgcagggagaagggctggatgacttgggatggggagagagaggtngtgactgtggagatgaagaggaagggacagggctgggaaatagtttggatggggtngggataaaagaggtgtcaggaatgactcccgtgttcctgacttgatcctcttgcataatacggtgtgatttccctgtggtgaagcaggctgggaggggaagcccagggaccccacacaacattgaggtcccatctttgtcttgatgataaccccctaaccctcccaaggcatttgatttgaaatgtaatttggggatcactttcttgggcctcctccagtgcaatgagatttgaagatgatttctaaactgtggcattcttgttactaaaaaccctcctccaaggaag

SEQ ID NO: 85338 - DNA, 1129 bp, Homo Sapiens
ttagttgatattggactttattgatttccaagatcacgatgagttcacattgtaaggaaaaaacatctcaaaatatagaaaccacattttatatccttatagcaatgtagatgcaagagcaaatgaagaaattcatatattttttgttaaaaaatcatcagaaatgttttacatgtagaagatacatgtgataaagaagtttgttaatgaacataatagtaggaaaattttatagataaaatgtctctgaagaacacctttttgattttctcatggtataatacaattgattgtactgtgagtagcatttgtctataaattcaagttatttaagagtactctatagaacattcatgctagaaacacaattcatataacaacaatttttaaagaactaatttgtaaattatgacacaaaatttttattaacaaggaaatatcccattaattgactactacagtaaaaactttataatgctggtatcatgaagaaagaccttccttttccttatatattaatggaactacataggcttgctgtacattttgttattcatgttataagaattctagattccattgcttttgaaatatgtttctttttaggaactaaaagtcaacttatagtttgatttctgttttatttgtactgtgtttctgattttgtgggtttctaaataaaaagatcaaacccaccactttcaatatactgttttctatttaaacttttgagttgtagtcagaaactgttgttggactgcatagttttcaaaagtttttggtacatttctgactttagaaatctggggtaggaatccctttccatatgcatatagactattttctgagcttcttcaaaacatgtttcagtgggttcctgaatgttcctgatgatagtctctcttgtcgaactgtcaatgttaatctctctaggggactgtggctggatgtaaatcttataaagcttctttgccctagaaattctgctccaccgtgaggcaattttcttataggtttcacatgccatccagaattgaatattctcgtcactgtgctccatttttaaatatgctgcatagactactggaccatattttgtagccattaaattttcaaaagactgggcccc

SEQ ID NO: 85339 - DNA, 800 bp, Homo Sapiens
  misc_feature (704)..(704): n is a, c, g, or t
gggagaacattcatactgaggccagagtgccatcgaaggtaattatagagacagtaaaatccttttactctgggaaaaataaaatgctgggtgtctcacaaaatttcagaacctgatttcaaacggatcataacaaagaggagatcaaatttagcatggtggactgctcgacaggatatatttgtcaatggaatgtttccacatattataccaccaacatgagaaaaaaatgatcattgtttatttgaagcttgaaaaatgagcaggcggaattgttggatttgtaagatgtgcagagatgaatctaagaggcccccttcaaaccttactttggaggaagtattacagtgggcccagtcttttgaaaatttaatggctacaaaatatggtccagtagtctatgcagcatatttaaaaatggagcacagtgacgagaatattcaattctggatggcatgtgaaacctataagaaaattgcctcacggtggagcagaatttctagggcaaagaagctttataagatttacatccagccacagtcccctagagagattaacattgacagttcgacaagagagactatcatcaagaacattcaggaacccactgaaacatgttttggaagaagctcaaaaaatagtctatatgcatatgggaaagggattcctacccccagatttccaaagtcagaaatggtaccaanaaactttttgaaaactatgcaggcccaacaacaggtttctgaattacacactcaaaaggtttaaatagaaaaacagtaatattggaaaaggggggc

SEQ ID NO: 85340 - DNA, 638 bp, Homo Sapiens
  misc_feature (128)..(128): n is a, c, g, or t
aatagtttggcttcatacctttaattcctctttcagcatgactacttcttctctaagatcatcccgttcactccttacggaatcaaagaactctttctgcctctctaatgcctgagtgtgcagcagancaagagaaagaagaagatttgcacagatgagccaagttacttcggaaatcaggaaccagaaggaggctctaacgccagctgtgaacacgcagacaaagctagaaagtgatgcaaatatagtaacctctggggccccgtgctgtgtccgtgtgcttcaagatgcgcatgtctttcatggagtatgaacagtaacatttcttggattatatatactaagcgaaaagcttaatacttggattttgttagtatctttaggcagagtctctttaatgtctagagtccactagtgttttagatggtagaagcctccttctggttcctgcttccgaagtaacttgctcatctgtgcaaatcttcttctttctcttggctctgctgcacactcaggcattagagaggcagaaagagttctttgattccgtaaggagtgaacgggatgatcttagagaagaagtagtcatgctgaaagaggaattaaaggtatgaagccaaactacagttttatttaaa

SEQ ID NO: 85341 - DNA, 761 bp, Homo Sapiens
actctgggtatccttgctggtgaaatcaagttctggattttctggagcaaggtcacatagagtagaatgtggtagttccacgtgaacgtctccttcctccacgtatctgccgcctgtcacttcgccaccgtgctagaatactgttgtgttgtaagatgactaatttttaaagaacctgcactgaaagttcttagatacgcaatgaaagggaggaacttgtcctttaccagtttttactttgtaggatgggaaagtataaaaaggcacagaaggttgtcatgggctgttccttgggggtttttatcctgctcaccgtggagataagcctgcggcttgtctaaccagcgcagcgcaaaggtctcaatgccttttggtaacatccgtcattgcagaagaaagtttacacgacgtcaaaaagtgacgttcatgctaagtgtttttccagaaatattggtttcatgtttcttattggctctgcctcctgtgcttatatcatccaaaaactttttaaaaaggtccagaattctattttaacctgatgttgagcacctttaaaacgttcgtatgtgtgttgcactaattctaaactttggaggcattttgctgtgtgaggccgatcgccactgtaaaggtcctagagttgcctgtttgtctctggagatggaattaaaccaaataaagagcttccactggaggcttgtattgaccttgtaactatatgttaatctcgtgttaaaataaaatataacttgtgaaaaaaa

SEQ ID NO: 85342 - DNA, 1848 bp, Homo Sapiens
  misc_feature (1386)..(1412): n is a, c, g, or t
ttgtgaacatatagaacagttggtacaacaagcaggctgtaccggtccggaatcccgggatatcgtcgaacccacgcgtgcggatgagccaatttcaagccatccttttcatattgaagatgaagttgatgatattttgcttatggatgaaactcacagtcacatttataactgggaaaggtatcatgattgtcagttttcagagcatgattggcctgtacataacaactttgatattgatgaagttcagcttgatccaagagctctgtccgatgtcactgatgaagaagaagtacaagttgatccccgaaaatatttggatggagatcgggaaaagtatctggaggatcctgcttttgataccaattactctactgagccttgttggcaatactcagatcatcatgaaaacaaatattgtgatctggagtgtagccatacttgtaactacaaaacgaggtcatcatcatatttagataacttagtttggagagagagtgaagttaaccattactatgaacccaagcttattatagatctttccaattggaaagaacaaagcaaagaaaaatctgataagaaaggcaaatcaaaatgtgaaaggaatggattggttaaagcccagatagcgctagaggaagcatcacagcaactggctggaaaagaaagggaaaagaatcagggatttgattttgattcctttattgcaggaactattcagcttagttcccagcatgagcctactgatgttgttgataaattaaatgacttgaatagctcagtgtcccaactagaattgaaaagtttgatatcaaagtcagtaagccaagaaaaacaggaaaaaggaatggcaaatctggctcaattagaagccttgtaccagtcttcttgggacagccagtttgtgagtggtggggaggactgttttttcataaatcagttttgtgaggtaaggaaggatgaacaagttgagaaggaaaacacttacactagttacttggacaagttctttagcaggaaagaagatactgaaatgctagaaactgagccagtagaggatgggaagcttggggagagaggacatgaggaaggatttctgaacaacagtggggagttcctctttaacaagcagctcgagtccataggcatcccacagtttcacagtccagttgggtcaccacttaagtcaatacaggccacattaacaccttctgctatgaaatcttcccctcaaattcctcatcaaacatacagcagcattctgaaacatctgaactaaaacactcagcagacatttatctttgtattcttcatgaaatgtgttttgtctttttttattactagtgtttaagtcattttttacttgaatcagatggtgtcatttannnnnnnnnnnnnnnnnnnnnnnnnnntaaaatccagactttctttttctacatgtgagatagttttcattttaactggcatgtcatttgcacacaaaaataaagactagagcaaaataatgcaacgcaggaggagaaaagaaatgcactaagacaagaacattctctcatagaacattgatctgttttacagggaaacaaaccttgccttgaaaatttacacagtggagactgtacataatttgcatgaaaaataggctattttttttccctaagacattttttcttccatgaaatattttccaagttttttcatacctgtacacattttccttaaaccccatggataccagcaagcaacctgaaaaatgaattgcccgaatttgggaacccatggtgtttatctaccctccaagggaaaccaggagtattgggggcaaaaccattttcccacccttaagtg

SEQ ID NO: 85343 - DNA, 483 bp, Homo Sapiens
  misc_feature (145)..(165): n is a, c, g, or t
tactttacttggatattcatgtaatatataaaggtttggtgaaatgaactttagttaggaaaaagctggcatcagctttcatctgtgtaagttgacaccaatgtgtcataatattctttattttgggaaattagtgtattttatnnnnnnnnnnnnnnnnnnnnngactactacaggttaagataatttttttacctgtcttttctccatattttaagctatgtgatttgaagtacctctgttcatagtttcctggtataaagttggttaaaatttcatctgttaatagatcattaggtaatataatgtatgggttttctattggttttttgcagacagtagagggagattttgtaacaagggcttgttacacagtgatatggtaatgataaaattgcaatttatcactccttttcatgttaataatttgaggactggataaaaggtttcaagattaaaatttgatgttcaaaccttaaaaaa

SEQ ID NO: 85344 - DNA, 378 bp, Homo Sapiens
  misc_feature (59)..(59): n is a, c, g, or t
  misc_feature (82)..(82): n is a, c, g, or t
  misc_feature (105)..(105): n is a, c, g, or t
  misc_feature (132)..(159): n is a, c, g, or t
ttcctaaacccttccccccccacaatttatcctaagagaaaggcccacggattttagtnccattggtacaaccttaattagnaacaagtacattttgaaaaaccnaccactgataaccaacttaattagttnnnnnnnnnnnnnnnnnnnnnnnnnnnnctgaactgaacacagcacatgctgacatttcaaaaatgggctgcaatttttattctacttaaatttcctgtgtattgcttggatttcaaaaaaacatgttaacccacgtgttgattataaatataaaatctcgcccctccatgcaacaccacactaagatccactaccccccaactcaatgtataaaatgcttttttggcaattaattatgagtgactc

SEQ ID NO: 85345 - DNA, 311 bp, Homo Sapiens
  misc_feature (132)..(132): n is a, c, g, or t
  misc_feature (161)..(161): n is a, c, g, or t
ctcgatgctcgcggggacagtactttggagagcttgccctggtaactaacaaacctcgagcagcttctgcccacgacattgggactgtcaaaatgtttagcaatggatgtgcaagcatttgaaaggcttctngggaccttgcatggaaattatgaaaaggnaacatcgctacctatgaagaacagttagttgccctgtttggaacgaacatggatattgttgaacccactgcatgaagcaaaagtatggagcaagacctgtagtgacaaaattacacagttagtggttagtccactgagaatgttgtttgt

SEQ ID NO: 85346 - DNA, 839 bp, Homo Sapiens
gggctcttggagctgagctataagacaacaggactgaacagggagccaactgtttctttgaacagtaaatcaggaacaccaatggaccaaaatgaacacagtcactggggaccacatgcaaagggccaatgtgccagcagatctgagctgagaatcatcctggtgggcaaaacaggaactggcaaaagtgctgcagggaacagcatcctcaggaagcaagcatttgaatcgaagctgggttcccagaccttgactaagacttgcagcaaaagtcagggaagctggggaaatagagagattgtcattattgacacaccagatatgttttcttggaaggaccactgtgaagctctgtacaaagaggtgcagaggtgctacttgctgtctgcaccaggaccccatgtgctgctcctggtgactcagctgggccgctatacctcacaggaccagcaggctgcacagagggtgaaggagatctttggagaggatgccatgggacacacaattgtcctctttacccacaaggaagacctcaatggtggctccctgatggattacatgcacgactcagataacaaagccctaagcaagctggtggcagcatgtggtgggcgaatctgtgcctttaataaccgtgctgaagggagcaatcaggatgaccaagtgaaggaactaatggactgtattgaggatctgttgatggagaaaaaatggtgatcactataccaatgggttgtacagcctaatacagaggtctaaatgtggacctgtgggatcagatgaaaagagtacaggaattcaaacagagccttataaagtacatggaaaactcaaagaag

SEQ ID NO: 85347 - DNA, 142 bp, Homo Sapiens
aaagaaggccagaacacatctcttatcaagaaatcaatgaatagtttatctcatttttaaagcaactttatccttctttaattccttcctttcttctagtgcaaaactacttaataaggttggtgtttaggttagtgttcac

SEQ ID NO: 85348 - DNA, 489 bp, Homo Sapiens
gagcctcaaagtatgtgaatcaaaaacaacagaacaaaagcaggaaactgacaatccaaaattatagctggtgaattaatactgctctctcagtaactgacggaacaaccagataaaaatataggaaaaatacggatctaaatgacaaaatcctgacccaaatggtacttggcagtgccaagatagactgtatgtcgatggattgagaaaaggttcaagcctgaaatagtatacaaaggatgttgtctgaacacttgaaattaaattagaaaccaacaacaaattgatatccagaaaagcctcaaatgtctgaaaaccaagtaataaactttgaaataccctgtgagtcaaaaaagtattcacaaggggaactggaatgtatttggaataaacttgttattaaaaatctccatttctggtagactaaaggtgacaattctttcctgctcctctcttctgtgaggaaccattccccttaaaaccttggac

SEQ ID NO: 85349 - DNA, 1256 bp, Homo Sapiens
ccccgcttccttggccacgggcccccagtgtggccccgaaaaccgtccccacaccgcttttcaagggggcccgaaacaagcattagttcaggatccctatctctgacccaacaccatgcccacctgtcctctggatctcaggcctgtggttccccaactcggtctaatagccagccgtatacagcgcaacacttccctcaccacccgacctgccttccagctcctgattgctgagccttgctcagggtgtgacagtgagcgattccatgcctgtgcgggggttgtagctcttctgcttacagaaccctggatccagcacataaatgatgccctcaatggtgagtgatgtctcagcaatgttcgttgccacaaccacctttcgtgccccaggtggtgtgggctggaagatacgggcctgcatgtcagagggcagattggcataaatgggcagcaccaggagctcccggattttggagcccaggcggcggcagcgatcctggagcatctcacaggcagcctcaatctcctcctgtcctgtcaggaacaccaggatatccccagggggctgggtcacatggatctgcacacagatactacacaagcttccaagtagtcagcctctggagccttggtgtagaagatgtccacaggaaacctgcgtccggggattcgaaacacaggggcgtcatcaaagaaggtggaaaaacgggcagtgtccattgtggctgaagccaccaggaccttgagctcaggtcggaagcgagcaacatccttgatcaatccaaagagaatgtctgtgtgtagggtcctttcgtgtgcctcatccaccatcaccacgctgtaactcgccaggtcaggctcagagaggaactcccggagaagcatcccatctgtcatgtagcggaggacagttcgctctgatgtgcagtcctcaaagcggatgctgtagccaacctcattcccaagcttcacacccatctcccgggccactcgggcggccacactcatggcagccactctccggggttgggtgcaggcaatcttcatacccttgtttgtataaccctcctcaaagagatactgcgggatcggggtggtcttccctgagcctgtctcgccttcaatgatgaggacttggtgatttgcaatagcagccaggagctcctctcgaaatgggaacaccgggaggctgcggcggacggcctggatggactctttctgctgggcctgagttgaagtgggtggagctgacggct

SEQ ID NO: 85350 - DNA, 1250 bp, Homo Sapiens
  misc_feature (1240)..(1240): n is a, c, g, or t
gcgcccagccgcccgacttcgccgccgcctggagccggctggcgcgacctcagccgcccgccgcccgccggggagtcctgtgtatggaaactcacatgagtcagctcagtctagaagggtagtaatttctcataatatggataaagctctgaaagaagtgttcgactacagttatagagattacattctgtcctggtatggaaacctcagcagagatgagggacaactttaccatctgctcttggaagacttttgggaaattgccagacagctgcaccacagactgagtcacgtggatgtggttaaagttgtctgcaatgatgttgtgaggactttactcactcatttctgtgacctgaaagctgccaatgccagacatgaagaacagccaagaccttttgtgttgcacgcatgcttgaggaactcagatgatgaagtaagatttctacaaacgtgttctcgggtgctggtgttttgtctcctcccctcaaaggatgtgcagtctctcagcttacgtataatgcttgcagaaattctcacaacaaaagtcttgaagccggtagtggagttactgagtaatccagattacattaaccaaatgctgcttgcccagctggcgtacagagagcaaatgaatgagcatcacaagagagcctacacctatgccccctcttacgaggacttcatcaagctcattaacagcaactctgatgtggagttcttgaagcaactaaggtatcaaattgtagtggaaataatccaggcgactacaattagcagctttccccaactgaagaggcacaaaggtaaagaaactgcggcaatgaaagctgatctcctgagggccaggaacatgaagaggtacatcaaccaactgactgtggcaaagaagcagtgtgagaagagaatccgaatcctgggaggccctgcctattgaccagcaagaggatggggcccctggatgagggggaagggcctcaaagccagaagctctcggttcctacttcagctactcatctgtgatgttcccctgcctccctattccagtgatcagccttgactttcttagtttctggctagtctctgtttagagcctctgcaggaagggccagccccagcatacgccagggttctacagcatcttacacaagtggtgcaaatgcagctccaaggaactcttgtttttataatcctctaaccacaggaagtctgttgatgttgctattagcaaaataaaatnaaataaaata

SEQ ID NO: 85351 - DNA, 584 bp, Homo Sapiens
  misc_feature (492)..(492): n is a, c, g, or t
cgatgacctattttttcagccgtgggaggaatggagtctttggtacattcctcactgaggttagcagctcagtttgtggttatgaaaccgtctgtggcctcatgacagcgagagatgggaatacactagaaggatctcttttcctgttttcgtgaaacgactcttgccaaacgttcccgaggcgccaaggagtgtagtacaccctggctgccatcactctataaaagtgcttcatgagcccagaccaaaagcccacagtgaaatgaagtacccttttgtaaatagcatttttttgcagaaggtgaaaattccactctctaccaccgggccagccaatagatcactttggtgaatgctagtttcaaatttgattcaaaatatttcttaggtgaaagaactagcagaaagtcaaaaactaagatactgtagactggacaagaaattctacctgggcacctaggtgatcgccttctttctttgattgcctttctnaataaatgcagaatctgacaggtaaataggtttaaaacaaaacaaaaacccacccctttaaggagttggtaaaaagcagttcaactcttagc

SEQ ID NO: 85352 - DNA, 699 bp, Homo Sapiens
  misc_feature (72)..(191): n is a, c, g, or t
  misc_feature (270)..(280): n is a, c, g, or t
  misc_feature (553)..(647): n is a, c, g, or t
tgggctctccagcgatcttcccacatcagcctcccgagtagctgggaccacaaatgtgagccaccatgcctnnnnnnnnnnnnnnnnnnnnnnnnnnnnnnnnnnnnnnnnnnnnnnnnnnnnnnnnnnnnnnnnnnnnnnnnnnnnnnnnnnnnnnnnnnnnnnnnnnnnnnnnnnnnnnnnnnnnnnnntgagccgccatgtctggccagataaattaagtcaaacatttggtttccagaaaataaagacaaatagagaaggttagannnnnnnnnnnccaacaagtggataaaagtctgtgactcgggggaaagtggaaggagaaatgcagccgatatagagtcattatgtttgcaaagcccctggtcatacaggccagggaacataagaccgcaattctaagtttctagataaacagcgatctccaagtcaagactgaggatgaagagggagaatgtcagaactcaagtgaagggcaatcagggcagactgcctggaggagtgatgccagaaggtttgggaagaaggtgtgggacaagaagaaagggtnnnnnnnnnnnnnnnnnnnnnnnnnnnnnnnnnnnnnnnnnnnnnnnnnnnnnnnnnnnnnnnnnnnnnnnnnnnnnnnnnnnnnnnnnnnnnnncagggctcaccatacacaagtaaataaaaaatatgtaatgtttggaattgct

SEQ ID NO: 85353 - DNA, 1083 bp, Homo Sapiens
gctgttattaaatcaggaagaccccctgcatcactgtgagggcccaccatggacttcttgcccattctgaccaggacacaggcttggcaaaaccaagcttccagcctctacaaccgcaggaactgttcagcatctcaaacgggcttttcgttcctgaatctaaatctggaccggacctgggttccgagtccatcgtccagaccacaaagttgctccaactgtcatcttgcaaggcctccgaggctcacaagaaatggcatcacgctcaagttttgctccctggcagatcctccacagatgtctgctgccctcagcaccaacaccgcatccccgaaggccccatgacactggagcccgccgctcgtggatctcaatctgagatcatctccaggttcttcagggccatcttgtactcgccttttgccagggtcagtttggcctgcaggtcatccacagtcttttttcagttgctcgagctgcacatagtactttgccttgagttcaaaataaggcttggactttgtggatggctctcttgagtttctgctccagctgtcgcatgcggcccatggcggcattggacctggctgccgtctccttatgcaccagctcgctcctggtcttggtctgctccgcctccatgaccctctgagtggcgtgattcagcatctcctgccaggcggagtcgaactgccgcttgtcatcctccagcagccgctgctcggccagggagatggtctccttggcggcgcggagcacctctgtggccctctggaagtcctgcgtggctttctgagcttccagctgagcctgcctcgccaccctccgtgcctcccagtagggcttggagtcttccacagctttgccaattttcttcaccagttcatccagtttcaccgttgcttcaaccagaacagagcggaacttctgacgagcatcctcaagttcagtcttcccgtctgttgatatcatccgtggactgatttaacttctccagttctcctggatccggggatccacctcttctcctcgtgccgaattcgccacccagcctcgctacctagaccgtgatagttactgccc

SEQ ID NO: 85354 - DNA, 393 bp, Homo Sapiens
  misc_feature (60)..(60): n is a, c, g, or t
gttattgagagagagaggaaatgggagcaacagcttcaggaagagcaagagcaaaagcgncttcaggctgaggctgaggagcagaagcgtcctgcggaggagcagaagcgccaggcagagatagagcgggaaacatcagtcagaatataccagtacaggaggcctgttgattcctatgatataccaaagacagaagaagcatcttcaggttttcttcctggtgacagaaataaatccagatctactactgaactggatgattactccacaaataaaaatgggaaacattaatattttaggaccaatttggggaacacgacctctttcacagagggagatcccaaggaaaggaacaagttacccttccagggagccagattttgggagagggct

SEQ ID NO: 85355 - DNA, 962 bp, Homo Sapiens
  misc_feature (786)..(793): n is a, c, g, or t
  misc_feature (795)..(858): n is a, c, g, or t
  misc_feature (860)..(865): n is a, c, g, or t
  misc_feature (867)..(882): n is a, c, g, or t
  misc_feature (884)..(885): n is a, c, g, or t
  misc_feature (887)..(891): n is a, c, g, or t
  misc_feature (894)..(895): n is a, c, g, or t
  misc_feature (897)..(902): n is a, c, g, or t
  misc_feature (904)..(913): n is a, c, g, or t
gactctgaagcatctaaattcccacctgcccaatggcagccatgttattttgtatggcttaccagatggaacctttctctgggataatttgcacaacagatatcatcctctcggccagctaaataaagacatgacctatgcgcagttgtactccttcctgaactgcctccaggtcagcccctgccacggctggatgtcttccaacaagacgttgcggactctcacttcagagagagcagagcaactctccaacacactgaaaaaaattgcagccagtgagaaatttacaaacttcaatcttttctacatggattttgccttccatgaaatcatacaggagtggcagaagagaggcggacagcccgggcagctcatcgagcccgtggatggattccaccccaacgaggtggctttgctgttgttggcggatcatttctggaaaaaggtgcagctccagtggccccaaatcctgggaaaggagaatccgttcaacccccagattaaacaggtgtttggagaccaaggcgggcactgagcctctcaggagcatgcacccctggggagcacagggaggcagaggcttgggtaaactcattccacaaaccctatgggggctgccacgtcacaggcccaaaggactcttcttcagcagcatctttgcaaaatgtctttctctcaatgaagagcatatctggacgactgtgcaatgctgtgtgctcccgggatcagtaacccttctgctgttcctgaaataacctttcataaagtgctttgggtgccattccnnnnnnnnannnnnnnnnnnnnnnnnnnnnnnnnnnnnnnnnnnnnnnnnnnnnnnnnnnnnnnnnnnnnnnnannnnnnannnnnnnnnnnnnnnnannannnnnaannannnnnnannnnnnnnnnccctcataaaaaacccccccggggggccccaatttttcgcctacccccc

SEQ ID NO: 85356 - DNA, 607 bp, Homo Sapiens
  misc_feature (76)..(185): n is a, c, g, or t
acgggttcaagcaattctcccgcctcaggtctcaagtagctaggattacagggatgctccatcatgcccggctaannnnnnnnnnnnnnnnnnnnnnnnnnnnnnnnnnnnnnnnnnnnnnnnnnnnnnnnnnnnnnnnnnnnnnnnnnnnnnnnnnnnnnnnnnnnnnnnnnnnnnnnnnnnnngtgtgagccactgtgcccggccatgcttatgttttttaacaatacacttcctgaactatcaaaaagaatataaatcaaaatcactgaagtagtttttaaaaactccaaaagctacaaaacttacttacttcaatatcaattaaaaacccatttgatagttcaataacttgagtcctgctagaatcattctataagccatcagtgacagtgaagtggccaaaatttgagtcacttgataagtacaaagaacacagatttttgtcattcttactgtgaagaaaaacagtgaatgaataacttagtttatatattaacagtacttttatttaaaaaattatctagagaataacttctttttaatcatttgttagtcatgtaactatggataaaacatactaatttagctgattcctctatgctct

SEQ ID NO: 85357 - DNA, 416 bp, Homo Sapiens
  misc_feature (292)..(292): n is a, c, g, or t
  misc_feature (300)..(300): n is a, c, g, or t
  misc_feature (329)..(329): n is a, c, g, or t
  misc_feature (361)..(361): n is a, c, g, or t
  misc_feature (388)..(388): n is a, c, g, or t
tccctttgtagggagttccaaggaaggctttgggttaggggccaaattagcccaggcagcagagtggctacccagggtctcaagaaagggaccacttaccgatcaatccagacatttttcaatattttaaccactagtttgggcatacctgtgtatactggctgcacatcagctttgcacctatctatatggaaacatccattttaaaaggagcattttaaaaggatactgggtgacttcacattgaaaatgtaggatgctggccaagtgcagtggcttcacatcttgtaantcccagcntttggggagccaaggtggggagggtttgntcgaggggggggcccggttacccatttcgccntttagttgagttctatttacatttcantgggccttcttttttacaacgtcgtgaa

SEQ ID NO: 85358 - DNA, 423 bp, Homo Sapiens
gggggtgtgggatcatcaggatgttggcactcttgcctagggagctgtcgtcagaagcctggctcctcacttcctcagtgggcagtgtgcggcttggtagggaagggctggatgaaaacatcaacaggagctggccactctttcgactgtgactctcctcgctctcgcacagatctgccaggcaagagacaaaaagttaccatcaagcgagggatgctgtcctaccttgagttaaaactaaaacccatcaccagcccaagccacatgggaacccaattaaccaaaaatccccagtgtgatctacaagtgggaaacctgtatgcggtacttcacccttaacagcttgagatgttatataagagaggggggaaatgacagacattatgcagccaaagtcctaggatcatagttgtaaagaaagga

SEQ ID NO: 85359 - DNA, 450 bp, Homo Sapiens
  misc_feature (11)..(11): n is a, c, g, or t
  misc_feature (37)..(37): n is a, c, g, or t
  misc_feature (43)..(43): n is a, c, g, or t
  misc_feature (59)..(59): n is a, c, g, or t
  misc_feature (102)..(102): n is a, c, g, or t
  misc_feature (108)..(108): n is a, c, g, or t
  misc_feature (334)..(334): n is a, c, g, or t
  misc_feature (397)..(397): n is a, c, g, or t
  misc_feature (413)..(413): n is a, c, g, or t
  misc_feature (431)..(431): n is a, c, g, or t
aacgaggggcncttccaattgggagcacaagtggatncaacantcctgggaaaaaaganaaaggatccgtgggtgaaaagtcattttcccccacttggcttntggtcngcttccctagggtccccactgtggagaagtggcctcaccctctgatttcgggatgcaaatacatgttaaacaggtacctgtccttcactgtcaaggagtcccaagtctcctttccctaccagaccctgtacagatcaaggagccaaggaatggggacagggagctggccgcacaatgggagacacgggagggactctgctttaccctgttccgtgtcagcagcatnggcatccacagccccttcttgccgtgcccttgttcaacatgggcgccacatttaggaggacanggaaagtttagggacntttattttgggaacaaanggtggggcaacccaggaag

SEQ ID NO: 85360 - DNA, 1090 bp, Homo Sapiens
ttccctatctggcagcctgactcactcattttttctacgttcttgtttagtatgaccatgcttcccacagttaaaacaagctccaggaaatggagtactttctgtatccactctcagtcctgccattgcccgtgctagcaggtggcctgatgcagattacctctgataccaccacaggccttgatataatcaactaaatgtgctttccctctgataggtcacagagcagcctggcaatcaggattagcattgttgaaagctaataattgcaacactatatcctgagcagccaaatctgcagtcatctttttaagagactcctgtaactgagctataaaatccacatatgattcttctggtccctgttttatagcactaaagaaagggtattgttctccacttgaagtgattttttttccccaagctctaatgcacgctcctctaagctgttctatggcatcatcctgcatgaccacttgtgcatctaaaccagcccaaccgccaacccccaaaagttggtctgcagttatattaatttgaggttggtcctgcgtgttgtgagaagcctgaatggaagcttcatctgcccaccaagttttaaattgtaagaactaagcaggagttacacaagctcaagtaagagcgtcccaatcagtaggaatcatctgactggaaacagtaacattctttaacagtccaattactaaaggagaacctggtccatactcatttattgcttgttttaattctctgagtaatttaaaaggaaaaggctcaaatgtagctataatacttccctgttgatctggggggtgtattctaacagggaactgccaagccttctaaatcacactcttgtctagcttgctgaattcctgcctgaatagaactaagagaagtcgctcaaggcgctgctcgaacagtcactggggcaactacttttcgcccagtgtcctccggaaaagaaagatctggggagtcattttcttcaaaataataatgaggggatgcagaagggtagggatgaaactctccttcctttgccgctttagcttcagctggcaaataaacatgctctgtaacctctaaa

SEQ ID NO: 85361 - DNA, 555 bp, Homo Sapiens
aagagtttagtggcccttaaatgtacctgctgctatttcaagtttatcattgagtactacaatatcaggccagcagattctcgctgggttcgagatccacgctatagagaggatccttgcaaacagtgcaagaaaaagtatgtgaaaggggatgtgtccctgtgccgatggcaccccaagccctattgccaggcattgccctatgggccagggtattggatgtgctgccaccggtctcagaaaggattccctggctgtaagctggggcttcatgacaatcactgggttcctgcctgccacagctttaatcgggcaatccataagaaagcaaaagggactgaagctgaagaggaatactaaagtccatgtgagaggcaacaaaaggaccggtttctaaagctgcaaaacacctagatacaccgttcaaatgagcgtagccccctgagtcatcactctagaagaatctgtacatcatcaggactgcattgctcaggcattttctaaactctaaatttacgagctgtacaaaaaaattggtcttgttgtttataaaaa

SEQ ID NO: 85362 - DNA, 540 bp, Homo Sapiens
  misc_feature (331)..(344): n is a, c, g, or t
atagctaaactttctaaactggagaggaggctacagtgccagagagttattgtctcttttgctttaaatggtaatcttaaaagttgcattgtgctcttcctttgttttgggatagatatatatagagagagatactataaggaagtttatttcttaggaagtacactgaataatgtatttcttttacagtgtaatatgggggtggggatatgcgaaagaaatgtgtatttttgctagttgcctaccttctgagataaataagcacaatcttgcaatggatccaataacccagttaggtattatagattagtatttaagtttgctgtagatnnnnnnnnnnnnnnctaagtaaaagttccatgattcacaattttagtattaacccatgttgcaaaagctgttactggccaacagattgtaatgatgtgtaccatataacacaagcattaactaggcattaacgtttgtaaagccaaatataccatgcagaagtcttcatttttatagcagactgcattaaaacaagttaaatcttaaaaa

SEQ ID NO: 85363 - DNA, 354 bp, Homo Sapiens
  misc_feature (282)..(282): n is a, c, g, or t
gcccgatcaaagtaacatggaaaagctaaaggttctctgagctgcagtggctcctcctttccatgagggggcgccatccagagtcagcgcttcctctgaacacatcccacttgaatgggacaggcagccatagtagccatagagcatatgggcccacactgcttgcatttaaattttcactcctgttgtttccatgatgagcattcctcaagttctatgccataaatatataatttgggaaatatggtcaccattaccatatggctcccattatgtcttctnaatttagcaaagaaagataaaatttgttttcccgaaaattttttaggggtttaaaaagcatttcaatttggg

SEQ ID NO: 85364 - DNA, 546 bp, Homo Sapiens
  misc_feature (11)..(11): n is a, c, g, or t
  misc_feature (24)..(24): n is a, c, g, or t
  misc_feature (42)..(42): n is a, c, g, or t
  misc_feature (126)..(126): n is a, c, g, or t
actaatgaaanttgggtaaagaanaattttttgttcccaagnaagaatcctcaaacttccttaaaaactgcttaccctaaagctgaaaatcgtatgcctaccctcctaatcctcctgaactccagncaaacaggtccttggcggtgaagggccaagtgtgaagtctggaaggcaggggtgcacagaaactcagtgctgctgagcgcccaacccaaagtgggagtgaaaggactcaggtatggtgggctataaatgatttgaatttcaacatttccaaaaccaccaagaaagtaatttttacagactttcttggctgccaacaaagtagttaccaatgcaaatacaaaacgttttctaagaccctggatcctggaatgtccttaaacttgctcctacgtttgacagttatgtacagaacaagcaagactgcacacaaatcttacttcacaagttcatgtgttatctgaaatattgcttatgaaaaaatattttcctattttaaaattgaaaaaaagaaacttaagaataaagtactcgtataaacac

SEQ ID NO: 85365 - DNA, 507 bp, Homo Sapiens
  misc_feature (17)..(17): n is a, c, g, or t
  misc_feature (91)..(91): n is a, c, g, or t
  misc_feature (113)..(113): n is a, c, g, or t
  misc_feature (165)..(165): n is a, c, g, or t
  misc_feature (239)..(239): n is a, c, g, or t
  misc_feature (400)..(400): n is a, c, g, or t
  misc_feature (411)..(411): n is a, c, g, or t
attttcattggcctganttgagtcacgtacccatttcttaaccgatcactgtcaagtgggttgactgccttagactaaaaacagctccccnggagttggagctaagttgaacnttccccctgagttgcacgggtatctggtggcaaagattccatgaataaaacncagactcctttttgagtagatgcgaagagtgcattgtttctgggtataccaaaatcagtgtccactacaccatnatatccttgactcagaaggagggagctctggttgcttatggcctttgttgtttatggtcttgaagacttactgcaagtcctacctactcaaatctgcctgcttttaatggccaggctcccaagcacctcacacctgctgtcaaccctgcctggagggacantcagagacaanaagatatgattcctgtcctcctgatgattatcctctaatttagcaaccagagctaacagacatttaaatatttgatatttttaagagaaacatcga

SEQ ID NO: 85366 - DNA, 483 bp, Homo Sapiens
  misc_feature (43)..(90): n is a, c, g, or t
  misc_feature (100)..(118): n is a, c, g, or t
cttccaaggctatgccttggtggtggtggtgagggtgtacaannnnnnnnnnnnnnnnnnnnnnnnnnnnnnnnnnnnnnnnnnnnnnnngttggttggnnnnnnnnnnnnnnnnnnnaagtcctaaacaagtgccacagaggatttctttttggcttgaacttgataaaatttggagcacacaagtttacacacatggtcatgaacacacaccccttctcccatctccccagacccccagcacatatgttccataatgaggtgttcctaagtgagaattcccataatttgaggttttatactggaatggtgataagggcaggaaacctcagcccatgtgcattttttctcgagtggttaacctttcctctctttctccttctttttttgcccccctccaaattcccccttctcttaagaaaaaaacacgtgagccatgttggaagtacagccttgacctcagcctcaccaggtgcggctgct

SEQ ID NO: 85367 - DNA, 423 bp, Homo Sapiens
  misc_feature (47)..(47): n is a, c, g, or t
  misc_feature (66)..(81): n is a, c, g, or t
  misc_feature (108)..(230): n is a, c, g, or t
acttgaggtggggaagtttgaagacccagccccagcccaacttgggnaaacccccacctctactgnnnnnnnnnnnnnnnnttaagctgggcgtccatggtgcatgcnnnnnnnnnnnnnnnnnnnnnnnnnnnnnnnnnnnnnnnnnnnnnnnnnnnnnnnnnnnnnnnnnnnnnnnnnnnnnnnnnnnnnnnnnnnnnnnnnnnnnnnnnnnnnnnnnnnnnnnnnnnctcaaaaaataaataaaataaatatcacttacatgagatatacccaaggggtggtctacagagacttggaagcagtggttattgcaacaggggcacggaagtcatactgctatgccaggatgcccaggagatactcggggtgggtggcatggtgctgctggggactcaccgcacaggacgctctgattgacgc

SEQ ID NO: 85368 - DNA, 535 bp, Homo Sapiens
ccacactggggagaaaccctacaagtgcagcgagtgtggaaggccttcacccagagtaccaatctcataatccaccaaaagacccacaccggggagaagcccatataaatgtaatgaatgtgggaaattccttcaagtgagagctcagcccctcattcggcatcatataatccacaccggagaaaaaccttatgagtgtaatgagtgtggtaaagcgtttaaccagagctcatcccttagtcagcatcagagaatccacacaggcgtgaaaccctacgaatgcagcgagtgtgggaaggccttccggtgcagctctgccttcgttagacatcagagactccacgccggagagtaactaggaacatggtagaagtggagagagtcccggacatgccgactcaggacaggtgggtgaggatctgagaaatgctaaaggcttgaaagcatctgaagacatctaacttagagtctgcagcccagagccacatgcaaaacaccttcaataaacagccactatttcacatgctgtaaaaaa

SEQ ID NO: 85369 - DNA, 614 bp, Homo Sapiens
atactggttcagctgtatggaggggaaaacccggacagcctctctcctgaaaatgtggaaatttttgctcatttactgacatccaaggaggacccaaaggagcagaagcttctgttaaggattctcagaagaatgatcacctccaatgagaagcacttggagagcctcaagaatgcaggcagcctcctgcgggctctggagcggctggcccctgggagtggttcatttgccgacagtgcggtggctcccttggccctggaaatcctccaagccgttgggcactaggcaagaaggtgcttagcacaagcccgccctgtggccccagccctcggatgcataagcaaggtcagctcccagacacctttgccacatcccctcacagctgtctttggacctaataaagtcagcttaacccagaacctggtggcccaagtgctcactaaccccagggcctagaaaactgactcagaatggacttccttggttcctgtggaatgcatctgggaagcccaggtttgttagctgttctcagaaatgttctttccctctctgtgtgggccaggtgggctaaggttagcactgcctgtggtaataaagcagtggatcccaagccc

SEQ ID NO: 85370 - DNA, 270 bp, Homo Sapiens
  misc_feature (13)..(13): n is a, c, g, or t
  misc_feature (40)..(40): n is a, c, g, or t
  misc_feature (44)..(44): n is a, c, g, or t
aaccctagcccgnccccctcggcccacggttcgggtaagncgancgctcggttaagctaggaggagaatcgcgacgagaagggtactcaccatcgggcggggcggtggagctggcgtgcggatttcaggcaaacgtttacctttttgctgtctattgcaaccgcgccgggctgacttaagaagcaattctgtgctctgtccagaacattcaaggagcggttcctcatttttaaaaagccagcgagagagacgacagagacagagagaaag

SEQ ID NO: 85371 - DNA, 281 bp, Homo Sapiens
  misc_feature (152)..(152): n is a, c, g, or t
  misc_feature (175)..(175): n is a, c, g, or t
  misc_feature (189)..(189): n is a, c, g, or t
  misc_feature (215)..(215): n is a, c, g, or t
  misc_feature (218)..(218): n is a, c, g, or t
  misc_feature (266)..(266): n is a, c, g, or t
cataaagatgtggcattcttcaaacacagagacaatttttctcacatttcaaaagggattatagagtaaatgctagcatattgaataataaaacattacttagttccttatctgcacagttcaaaaggaagtttcaaaattatctagttccnataaatagtaagtatctcaaggngacctttctgacgngaaatgaggcctggctgtagtctganccngttatctgacatgtgccaaattctgacttcatttcatggatatgtggnttatagttctggggc

SEQ ID NO: 85372 - DNA, 383 bp, Homo Sapiens
  misc_feature (32)..(32): n is a, c, g, or t
  misc_feature (295)..(295): n is a, c, g, or t
acctgcggacgctgcagataaagttacgacgnagtaaaagtgactcacggcgccctctggcacagcgcctgtccgagcggcttctcccggggagaacctggagccatcctacctcttgggtggcctggtttgatttcccaggacaaggcgatttgcgtgacagcctgctatccactttccctttgactttgcttctggttacacgtgggaatagaaccggctaaagaggactggtgagctagaagctgtgaattggatgcagttgggcacttacagggctgtaccctcagtaaanggcaggctgcagtcgccagcttgctaagtattccaagaggaggaaaatttttaaaaaattataatcacctaaaaggttataagctctg

SEQ ID NO: 85373 - DNA, 1378 bp, Homo Sapiens
ggggtgcagggccccgccgccgccatgtcgggctcgttcgagctctcggtgcaggatctcaacgacctgctctcggacggcagcggctgctacagcctcccgagccagccctgcaacgaggtcaccccgcggatctacgtgggcaacgcgtctgtggctcaggacatccccaagctgcagaaactaggcatcacccatgtgctgaacgcggctgagggcaggtccttcatgcacgtcaacaccaatgccaacttctacaaggactccggcatcacatacctgggcatcaaggccaacgacacacaggagttcaacctcagcgcttactttgaaagggctgccgacttcattgaccaggctttggctcaaaagaatggccgggtgctcgtccactgccgggaaggttatagccgctccccaacgctagttatcgcctacctcatgatgcggcagaagatggacgtcaagtctgccctgagcatcgtgaggcagaaccgtgagatcggccccaacgatggcttcctggcccagctctgccagctcaatgacagactagccaaggaggggaagttgaaaccctagggcacccccaccgcctctgctcgagaggtccgtgggggaggccgtgggcaaaggtgtcccgagctgccatgtttaggaaacacactgtaccctgctcccagcatcacaaggcacttgtctacaagtgtgtcccaacacagtcctgggccactttccccaccctggggagcacataaagaagcttgccaaggggggcgtccttgctccccagttgtcctgtttctgtaacttatgatgtcttttccctgagatgggggctcagagggggaaggcctgtggcctgcatgcttcccgatggcccacggcaggaagggtgtggaaaaggtaagccctaagatgctcacaaaggcccctcatgaactccccttccccaactcccgaatcctctcttgagtgtggacctcaacaccttgagccctagtaaaggaactatgcaaatgcaggccactctccccaccacgtctgtgccccgcactgtccccacagccttccacaccctgtgcataggcaaccctctcacgtcttgaggtccgaagctggggtgggggtgtccgtcagttattagtggatggagattcccacagcaaggctgcatttgaatgatttccttaggatgaatggtccctacacaaagaggccttgtgggcaaacctggagaaccctcctaaatccatagagtttttcaaatgtgaatctttggaagccttgagttcagaatctgctgctctggaatatttcccttcgatcttatctcagtcacttcgttttttgagaagagtgatgccttgggccatgc

SEQ ID NO: 85374 - DNA, 798 bp, Homo Sapiens
  misc_feature (672)..(706): n is a, c, g, or t
  misc_feature (709)..(749): n is a, c, g, or t
gaaaatgccataatgctttaaaaaaagaactaatctgtaattctaaagtaaaaaattttttaaatgacatggaaaaatttacaaaagaggaaatataaagtagaaaaaggtttcaataaaagaaacatgagtgaggtttgtaatagagtaggattctgcatcttctcaatgtgctggccttgctttttggatagtcctgaaacaaatactactttagaccaattatgacagtgggagaaaagtttgctgtaacagccagagtggccaaaaattgacagtacagattacaagaatcaaaattttaaccgacaaatcctagcttgattaggttgccattaacaataaggtataatttcaaaagtatacttcaaaggactaaggagggtgaatgggtttccttttagagttgcgctatactgaaaagcaccaaaaaaaatcagattgactaagtctgtattgagtcctgcatacagaatgtaagttatttacattttctacttggatcttaaagaaatgaggaaatccactgtttttagtaaaaagtcattgatatttgcatagcaccccccagacactgaatattttggccctaccagaatgtgccctacgtattagctcccccccggccgtaatggccgaattcccgggcatatgtccggtaccgtcgactgnnnnnnnnnnnnnnnnnnnnnnnnnnnnnnnnnnncgnnnnnnnnnnnnnnnnnnnnnnnnnnnnnnnnnnnnnnnnngaaaaaaccggagggctaagcgccccgcttattaggtgagtcgatacat

SEQ ID NO: 85375 - DNA, 755 bp, Homo Sapiens
  misc_feature (27)..(27): n is a, c, g, or t
  misc_feature (254)..(288): n is a, c, g, or t
caggtctggtaacgccccgggggttangattgttggtagtgaatgaaacgagttgatttttccaggtccccaggatttactttagtttatgtggtgcctgtcttggactttctgtttagtttggatggaaaatacctgcttgaaattttaaaaatgatttctttagtgcatctatttagctagtttctgataggtggtatgtaatattttccctttttctttccttctgtagacacgaataagtcattctcccnnnnnnnnnnnnnnnnnnnnnnnnnnnnnnnnnnnactctaacctgcttcagagaaagagccctcttccttcttgtcttcaacttagtcttttcaaaataaaagatgactgtgagaaccccaagaacttccacttctgggaggcagccacaggacagggaacatatttatttgggtctcttcagttccccctttgagaacaacattaaatacatgttagctggggctccagggcattctccttccacagtagtgcggccaaattcccagtctggccagtctctttgttgagactgaatagaaggactgcaggtttttttggaggatgagataatttttcctcgccaggcatatatacctatgactatccttatgcatgaatggtcccttatgaagtataataggccaaaaagtggagaagctacagacaaagtcatcaagaagggagaggataaccagaacgggagggggcaagagagcaggggcagcagaagagaaaagag

SEQ ID NO: 85376 - DNA, 822 bp, Homo Sapiens
cagtcgacggtaccggacatatgcccgggaattcggccattacggccggggggtagaagtcgtggtttgtgcgcggccaggcgctggagcctccgctgccgggagcaatcagaccttccagctgcctctcatgtacttgtctgttgggggcttgtgttgatcaggagtgaattcacagtctaccatgaattggaaggttcttgagcacgtgcccctgctgctgtatatcttggcagcaaaaacattaattctctgcctgacatttgctggggtgaaaatgtatcaaagaaaaaggttggaggcaaaacaacaaaaactggaggctgaaaggaagaagcaatcagagaaaaaagataactgaaggtcctaactgggaccacctactccccttggagggtccggatggagtttcccctctgcggctgcctctcactcatcctccaccactttgccgacaaggaaggaaggacaatcgggaggagggagtcttgcttggcgaccatctggacaatatctcgcccatggcaagctggatccctgtggattactttggtgggtggaaacttggcacactatttaatttgggcttttagggggatgactgcacactggttctctttttatctcagacctaaatttcgagcactcaaactttcagcctgctcacccctgcttattgacatccacttttgggctgggttagacctaatcgtcccttgacaaagccctcaaagtagccttcacaagataagagtcgagaccctaaattacagcaaatttattgaacttctagtaaattcaaagcgctttgcaacatcttag

SEQ ID NO: 85377 - DNA, 516 bp, Homo Sapiens
ggggtgtagttttccccggcaggacggtagaagtcgtggtttgtgcgcggccaggcgctggagcctccgctgccgggagcaatcagaccttccagctgcctctcatgtacttgtctgttgggggcttgtgttgatcaggagtgaattcacagtctaccatgaattggaaggttcttgagcacgtgcccctgctgctgtatatcttggcagcaaaaacattaattctctgcctgacatttgctggggtgaaaatgtatcaaagaaaaaggttggaggcaaaacaacaaaaactggaggctgaaaggaagaagcaatcagagaaaaaagataactgaagattctgccatgtaaatgtcagcttgagtggactccagctgagaagaaagagaagaaagacttaattattgaataatttgtcagaggataaactcccaacctagacctttcacttaaaatagtgtgaatttgtatatgtttttaaaagaaccagtactggccgggtatgctggcttttac

SEQ ID NO: 85378 - DNA, 280 bp, Homo Sapiens
agaaaaaacaaggccctaaaactcccggaaactaattttacttgtaaaatcaaagaaaccctgggtctggaaagcattttctcaggtaggaccagatgtaggatgttctgtaatatacatgctgaattttgaattgagtataactaattatctctaatgagtctgggacaacccctggaaggatgagaggagaaagggagctgatgatgaagctaaagagtttaccatggaaggactagggcagcctacttaaaatgaattccttcaccccttccaagct

SEQ ID NO: 85379 - DNA, 520 bp, Homo Sapiens
gaggcctgggtggcgaattcggcacgaggacctatttaaaaaccccaccactgtggagaattacaagggttttgtcctgaattgtagtgttggcaagcccaagccactcgtgctaactgctttttgtctcggttgctattccaagaacagaaggaggaagttggccaattacagcgtgtgtgcatggatgtgtgtggggggcgtgcctctcagaaacgcggccagaagacaagcagggaagtgaaaggtcccaggcacacaccctgcccattgcaggtggctcttacagctctctggtgccagcacgggatccctgaagtgactcagccaggcagacatgagacatggcggagtgtccaaatggatcctttattggtggtagagcaaaaaaacccaaacacgataaacctttcaaaagactttctaaggatgatattggaatgcaccagccctcacatgtgtatgcacatttgccagaatataagagttttgttttaaatacagtcttgttaggatttta

SEQ ID NO: 85380 - DNA, 346 bp, Homo Sapiens
  misc_feature (26)..(26): n is a, c, g, or t
  misc_feature (56)..(56): n is a, c, g, or t
  misc_feature (260)..(260): n is a, c, g, or t
  misc_feature (312)..(312): n is a, c, g, or t
  misc_feature (326)..(326): n is a, c, g, or t
  misc_feature (336)..(336): n is a, c, g, or t
ccccgggcctcaaagtgaaaactccngcctcacccttcccatgtagcctgaagatnacaggtgtgagctaccacacccaactctttcagcactttttaaatgttatttcattgtcttcccatcttccatcatctcagctgaggagtgaatttaagtcttttgttgcttttacaactactatgctttttttaaaatctaactgcctgaaagattttcacttgtctttggttttaacagtttggctataatgtgcttagggntgtatttttaaaattcatcttactttggggtttgtctcgtgcccgaatcccngcagcccggggggntcccctaggntctaggagcg

SEQ ID NO: 85381 - DNA, 492 bp, Homo Sapiens
tctttggtggtcaacccggatgggtgacaggctggatggccttgtgaacttgagctcagtgtatgctaggcaacaattctcccgctccagaccctcaccgaccacctgtcctgggaccaggctgggaggggagtgtggcagggaggaggaagaggaaggtgagaatgagtagaacagttttgtattctactccctacaagccattttgaacttctgccctcaccggactctgggctgtgactggggcaccaaactcagcacatgagtctcccctagctctcgtggggagagggatgctatttattcagtttggggcaggagggagaggagggaaagtatttctgaccctgatgccaacagccgggtggctgtccaagcaggattgcaggggacacagggaagcactgcccagcccctgcctggctgccctttcccccctgctgctgccaccgcttcctgcctgtcatttgaataaacagtgtttctattgaa

SEQ ID NO: 85382 - DNA, 438 bp, Homo Sapiens
gaagggctacttctgggggacctggaattgctgtgtgacctttgggaaacacttaccttctttgggttgagctcagcccgtagttcacaaggggcattgctggtatttatagactgtgtttgacagtcccgagtgaaaggcaacttcacttctcaccccagaatagcaagcgttgtttctcatatctaggttgctgggacagcttcccaggaacctaatattcagcagcttcgtgacgttggatggagggtttttctttttaaatgagttgattggcttttgccactttacacattgttttccaggtctaggtttatttttcccttataggtagaatataaaagagtatggggtctgccctggctcacaccgttctgtttttgcagttagcttaaaggcatggaggacattcctgggactagcatctgctagccaaga

SEQ ID NO: 85383 - DNA, 510 bp, Homo Sapiens
  misc_feature (41)..(41): n is a, c, g, or t
gtgtcatcccccttcgtgaggtttgcactgtgacggaaggncttcccacagtcgctgcattcgtagggcttctctccggtatgaattctctgatgctgaacaagagctgagcagtcactgaaggctttctctaaaattggtggcatctgtagggcttctctccggtgtgggttcgcctggtgtttggtgaggttggcattcctggctgaaaggctcttcccacattcactgcacttgtaaggcttctctccagtgtgaatcctctggtgctgaatgagagatgagctcctggctgaaggccttcccacattcactgcactcatagggcttctctccagtgtggctcttctgatgctgagaaagggaagaacagtaactgaaggctttgccacattcattacatgcataatggtttggctctgtgaggtctcaggatttccgagttcttgaagctctcggtgtgtgtctcacatttgcgaggtctcgcttccaaggggactctctgtagcg

SEQ ID NO: 85384 - DNA, 405 bp, Homo Sapiens
tctgaaatatatgccgaaaatgggcgtcttgacctcagggagagcacctgtccaggtctgcctaaaggaaatggctccagtgggtctaaacaaccacatcctatccatggataggtctagtcataacactttagagagaatgtcagagcaggagggaggcaagccgcctcttctcggccatcgactgcagatgatgaaagagcgggattcaacttggttttcttttcctgtggccccagtgaaacctccggccctccctggcacgtctgtgtcttcatttctaaaaggggggtgaggctttcatatggacctcaccccatactacctcacagatgtgtggtgaggattaataaaattatgtctatggtattcccagtttctggagaaaaatacttatagacagtt

SEQ ID NO: 85385 - DNA, 784 bp, Homo Sapiens
  misc_feature (16)..(16): n is a, c, g, or t
  misc_feature (21)..(21): n is a, c, g, or t
  misc_feature (70)..(70): n is a, c, g, or t
  misc_feature (81)..(81): n is a, c, g, or t
  misc_feature (97)..(97): n is a, c, g, or t
  misc_feature (107)..(107): n is a, c, g, or t
  misc_feature (119)..(119): n is a, c, g, or t
  misc_feature (155)..(155): n is a, c, g, or t
ttttcccccctcccanaacancctgaaaaccaattaataagaacaggccaccttgggatgaaaacaatcnaaaaaatcctncaggatccttccattnaggaaagcantggaaatgaagncaggcctaatccaggtcctgtccagaggtctgttgnagcagccagcaggtcttctgcagcctgagggtcctctcctgagccagacttctgggcctgcaaagccagccgtacaataccggaggtataggttcagcatgctgtgcaaaatatcaagcagggaaaagagcagtggagctgccatctcattgttgtttttattgtccacatccaagcacagtgtggcagtttcagtgagcaggttacagatgtgactgacaagtccttgttcataaagtagttccatattcgaatctttgcaggcaactagattgctgagtaatgcaatcacactttgcatggtattacccagaatgctctcctgatgttccagagttacttcaaaaatgagtgggatcagtttgctttcttccacaagtcttgtgaaagttgggttgtgttcagtcatcgcgactagcagtttcagagcatatgctggtactgggtcaggttctaaaagaatgtgctcatactgggaaagtaagacatctcgaatgagagccagaagattgctgtcagaatcaacactggccttctcctggccatccccaaactcctggttcacgagtagcagatgtggtttctgagagcaaccgcaagctaaagagtctccactaaacttgaaagaa

SEQ ID NO: 85386 - DNA, 1244 bp, Homo Sapiens
  misc_feature (71)..(105): n is a, c, g, or t
  misc_feature (544)..(561): n is a, c, g, or t
  misc_feature (563)..(563): n is a, c, g, or t
  misc_feature (1149)..(1201): n is a, c, g, or t
gtcactacttattgggcgtagcctgtgcagcgaacgacgagcgcagcgagtagtgagcgaggaagcggcgnnnnnnnnnnnnnnnnnnnnnnnnnnnnnnnnnnncagtcgacggtaccggacatatgcccgggaattcggccattacggccgggggggatgggaggtggtgtgtgtttttctcctcttggttttcatttgctcaagcacacaaaagggactttgtttactctatcatgaacaaaggaactgtccacatactgtaaaccatgagcagtgtgttgtgtttttttaaacagtatattggtggtctctttgtctgcttttatttccagttcgatcttctgggtttagttttgtctttaaaaagaattcaaaaaaagactgacaatgacagttttgagttggatagtgaaaaagtggagcctccataatcagtgtggttgccttcagacctgagtacttagctgagggtgggtgagagccctttgttccaaaagtccattagttttgctgttgtttaggagtaggtggttgttgttgnnnnnnnnnnnnnnnnnngnggctttggtaagggaatccatgttcacatcctgtgaactctgtctcctgaaaccctgaagtatttcctagaacctgaaatattgttttcttccttgaattttctctagaaatgcagaaattaggaaggtgatgggtctgtatccccctgcccccttctttcccatgcttgactcccgagagtactggcagtgcagcacccatcattgacgtaagcggctgtcttgtccagtgtttgtaggcatcactgcctcagctgttaaggagacctgtgtcaaaacttacatccacattcctacacccccacaacccatcacttctggtgttaaccctaaaatacccacatgtattgaggctgggtcttctgcatttaagtatttctccccaggttttttttccccactgtgtgtggggggagggtccataaacccgagtgtgcctttgctttccacccttgctagacactggtagatgcaacaaactcagatttatatttgttgtaaagttgtaaaaatattgtgatgtcaccaattttccttccatctccacatcccctaacatctgattcacgacttaatgtatgttgtnnnnnnnnnnnnnnnnnnnnnnnnnnnnnnnnnnnnnnnnnnnnnnnnnnnnnctctttattacttaaaagtaataaaacctgactgttctatatt

SEQ ID NO: 85387 - DNA, 854 bp, Homo Sapiens
  misc_feature (173)..(173): n is a, c, g, or t
aaaaaggccctatggggacctgattccagggatggaggggattcaattagttctcagcaatttcccagacatgccataaaacatgacatttttagaccataaccaaaggcctgcatgttggcagcataggggacagtcttgcttttcttcattttttgaagcagagatattcnatatttcatagtttctgaacttcgtcaggagttctgagggagcatccttgacccagcggaaacgaaggtgccaaccattcacatctgcaaaacctgaagaatctgaattttgcggggagactgacttctctaggggcttgggttctttctgctccgttttctctgcggttgaagccagctcctctttctttctttctctttgctcattacattcctcattttccatcttggtggtatgagtcttgtcagattcttccagcatcaggtcttttttacctctgacaacccagtgcattgacgtcttcactgagtcattcaaagcttcccactgctggaatggcatcgacatctggctcccttcgccagtggtcatagcgggctcgactctcttcattggtcagaatctcctttgccttctgcagtttctgaaaagtctccacagctttggggttttcaggatgcttgtctgggtgacattccagagctctgactttaaattctgccaggatttgttcaaccgaagatagttcatcacatcccagtaatgtgtagtaatcttcagtatcttctgacctgtaattcagtattgcatccatttagatgacttaatcagtccttcttccctcggaaacaagaggcacagtgagcttcgaattaacaggaagaaactctttaaatctg

SEQ ID NO: 85388 - DNA, 1193 bp, Homo Sapiens
gggactgtgcctcttgtttccgagggaagaaggactgattaagtcatctaaatggatgcaatactgaattacaggtcagaagatactgaagattactacacattactgggatgtgatgaactatcttcggttgaacaaatcctggcagaatttaaagtcagagctctggaatgtcacccagacaagcatcctgaaaaccccaaagctgacccaggagttaaatcagaatgtctcgcaagacttccagcatcatttgctcctataagcttacaaaatgagatctctcttcccagaactgtggagacttttcagaaactgcagaaggcaaaggagattctgaccaatgaagagagtcgagcccgctatgaccactggcgaaggagccagatgtcgatgccattccagcagtgggaagctttgaatgactcagtgaagacgtcaatgcactgggttgtcagaggtaaaaaagacctgatgctggaagaatctgacaagactcataccaccaagatggaaaatgaggaatgtaatgagcaaagagaaagaaagaaagaggagctggcttcaaccgcagagaaaacggagcagaaagaacccaagcccctagagaagtcagtctccccgcaaaattcagattcttcaggttttgcagatgtgaatggttggcaccttcgtttccgctggtccaaggatgctccctcagaactcctgaggaagttcagaaactatgaaatatgaaatatctctgcttcaaaaaatgaggaagagcaagactgtcccctatgctgccaacatgcagtctttgtttatgtcttaaaaatgtcatgtttatgtcatgtctgtgaattgctgagtactaattgattcctccatccttgaatcagttctcataatgctttttaaataagaaaaattcagaagatgaatttcttccaatatttgaataaattaaagctcttagatacagagtagattgtattatatgctttttcctattaatactacttatagaaatccattaaaaagcaatctctgtacagtgtatttaaatatttcattgacatactgtgatctctattagtgatggatgtacaaaaaatgttttcttacccttgacttacaatgaaatgtgaaattacttgtctgaaccccgtggggagaaataaataattttcccaaagttcataaatgaa

SEQ ID NO: 85389 - DNA, 539 bp, Homo Sapiens
  misc_feature (23)..(23): n is a, c, g, or t
  misc_feature (29)..(29): n is a, c, g, or t
gatttcagtcagtttgaaccggnttcggnaaagccccagattggcacattttactgtgcagattctgagaaacagcaactcgaggagaagtacaggcaggaggatcaaggggaaagagaactgaggacactttaattacaacagagcaatgtctgatcacaggggcgccatccaggtttaaccctgcaagctgtttccacatcagaactcccttcaaacacaaagattgctgtgaaaacgaaaatgtgtagacgcactctcaaaaactgcacggacatacaaaatcaatcttttcctttgatcttgtggctaaaccagcatttctgtgtttgagagatttcctgttaggtgcttcgtctgaaagtgaactctcataattcaaattgtataaaataaagctacatttctaagagcttggtgtagggcaattggaataatgtcctgttagataaacagacatttagcaatcctgacattaaaaggaaatgtatttctatacaagatgattagctgtaatacaagatatttatttaaaaaaa

SEQ ID NO: 85390 - DNA, 350 bp, Homo Sapiens
  misc_feature (46)..(46): n is a, c, g, or t
  misc_feature (50)..(50): n is a, c, g, or t
ggtccagagcgagccagcagtccccaagccggagatccacactccnctcnaggacactaaaatgtgaagaacagctcatggtcccccagtgatgaagttgctggacacatctctttgcaggtagcagcaacagttgtagcagcagcagacgaagccattgcagaggcagaatatgctgagtgtctggagtcagcctgaagacacaggctggattatttcctggcctccacaccaaacgttcccttgcagatggagactgaatctgagggcagcagacttttatcagcttgagtttatgtcatttgatggacttggttccaccaacacgagcttacttacagcactgtact

SEQ ID NO: 85391 - DNA, 802 bp, Homo Sapiens
  misc_feature (110)..(118): n is a, c, g, or t
  misc_feature (710)..(710): n is a, c, g, or t
  misc_feature (728)..(728): n is a, c, g, or t
  misc_feature (748)..(748): n is a, c, g, or t
  misc_feature (763)..(763): n is a, c, g, or t
tagatttctgcttccatttcgcctaaaattacaggctttgtatatgaagtcaattttacttctcaaaaaatgttagtctaataaaagacttgaattctatttcccagctnnnnnnnnnttagtggattaaaaatacaggtaccttgactttaagtagacagttaatcaacatatgattagtaatacaactaatactcaagaaaaaaagtataatacagcaaactcagttttacaattatgtattttttcctaacccaattcctcgataaggatgtaagaaactcatcaaaacatgttgctttagtatataaaccagctgatgcaaattactggggtaatataggaaattttatagcattagtaaatgaattaaaaaactaaatgattcatgtaaaatgtttatatatggtatatacagcttggatcacatgagtctaagaataaaactgtcgatttgtaacatctgtatggacatagtaagatacagtacgagattcatttttaaaaacaaggaaaaatagcactaatttaaacactgaaaacagctcttacaaaatccttaaaaacgtacatcagagaaagatgctgaaaacaaaacaaaataggcttctctgtcatcacagaatatccaaaggacacctcacagcatggagcatgacgaggtttatttcccttcacttatgggtttacatagggatatgcattggganatttattccatgttaggngttaaggcattaggcaaccngggtctccttctgtntctgttgcctttaccctgttgttgggaccctttttattg

SEQ ID NO: 85392 - DNA, 372 bp, Homo Sapiens
  misc_feature (267)..(275): n is a, c, g, or t
aagtataaaaacaactgttatacatgagactatggttggacttcctcttctttacacttaagcctagaatttctctttaggtatatcagcgcttaaatccaagactattttttattgctgaagattcttgcaaaccatgaagagatgttctcacagaacagaaccccacagctggataaggcccgtatatatatatttgtaagccttgcaatgtgacaggtagcatcactatatatgcaatagttgttatgtagactgtcaaagaannnnnnnnnccctggatacatttgaagctttgagtgttcaaggttttccttaatgatttcaccgcagccaaattcttgaatcagtttgaactaacctggtatgtta

SEQ ID NO: 85393 - DNA, 456 bp, Homo Sapiens
  misc_feature (21)..(21): n is a, c, g, or t
  misc_feature (64)..(64): n is a, c, g, or t
  misc_feature (93)..(93): n is a, c, g, or t
  misc_feature (103)..(103): n is a, c, g, or t
aaactgccgggaattcggccncgagagtttgatggtaggaatttcagggtcctggggaggcccncccagtcccccctgcccacattaggttantcctgtgacnccccattttccctgtctgcatgatcctctttagaccccaaggactctgcctgcctccgaagtctttccttagagttttacactcccatggaaaggctgagtgctggcacattgaagtgttaaaagacttttttgaagactatgatgttgaaaatggtgatgagactggaaaatggtgatgagacaggaaaatgtgagcaaagttctaggctgattggtagagaaggcctgtctgagggggtgtgtcttctgcttgcaccatagaaggtgagatcaaacgtcctactcaaaactggtttcaatgtggatgaagccacacaggcattgagagggttgaaaaggtttatttactca

SEQ ID NO: 85394 - DNA, 307 bp, Homo Sapiens
  misc_feature (26)..(26): n is a, c, g, or t
  misc_feature (29)..(29): n is a, c, g, or t
caccggcgcccaggagccgccggggnganggggtcctcggggctgagggcaggcgggtaaaggggatgattggaaagaaggggtcggaaactccccgagggccgggagactgtaagcccagaagactctggaaccagcagctagggaatcataagggaatgagggcaggggcatatgaaatgtggacccggagaatggggaaaaacaagggtgaagtggcagacccgggcttgtaaggggacccaggacggctagggcacggactgggaatgtgcacgtctgcagggcgctgggaggtcccaggatc

SEQ ID NO: 85395 - DNA, 509 bp, Homo Sapiens
  misc_feature (482)..(482): n is a, c, g, or t
cacttggattataatccatcctccaacacacacacaaataagcagctaatggcaatgctagtggtcttcccaattcacaagacctgtgcttcaaattgttttcctgataatgtggagaaatctgctctttatgtattctcaagaaacaggatgtgaaaagctggtatgggtatacaagataaaaatgcctacccagagtgggcagaagctctaaatattactggtttgctaaaagtttcagatgcttttttagttcctacatttgttagttctacctttaacctctctaccactcaacgaaccatcaagaaacaaaatctactccctatggtaacagtaaaggtcaccccagactaaccttcaaaaggggttttactttaaagaaacagcttcacagccactgctgtcatagagaatattctcaggttccgtgtgactggaagcttgaattttttcagtgctggcttccttctccagtgggncaagtaggtcagagccagcccggaaat

SEQ ID NO: 85396 - DNA, 495 bp, Homo Sapiens
  misc_feature (262)..(262): n is a, c, g, or t
ggggatctttaaaaaatatccatctgatcagagccctaccctgctcagagccctccggtggctccttctcagtcaggggaaaggacaaggtctcccgaggccccacatgacctggaaatgcccctccaacccctagctctctactttcgcccatgcttactctgctctggccacatacaccctggctacccatgaacgttacaagtcagggccctgctctactatcctcctctgcactacctcaggccacgggcctctctcntacggaggtaagggctcagatgccgctggtctgtgagctgtcttgctttccttcatgacagggaatcaccactgggacacctccatgtcgccatgtgctttgctacctccatagagaatgaatatggagccatcccactttgttcactgctagcacgcccgagttaagcacacttgacacacggtagggcagctcaacttaactgcaaacataacatgagcaacatgcgcata

SEQ ID NO: 85397 - DNA, 240 bp, Homo Sapiens
tggattgaagaggagcattgaactgacgagacccagtgaaaattctgttccaataatgtggatgtatgatcatgatgatttaataaacgtgaagcaaagaggtcaaagccaagaaatcactggagttaaaaccaccagggatgctaccaaattggatgtagggtgaggaaaaatggagtttcgctcttgttgccaggccgagattgcgccactgagtccgcagtccgcctgggcgacaga

SEQ ID NO: 85398 - DNA, 567 bp, Homo Sapiens
  misc_feature (168)..(184): n is a, c, g, or t
  misc_feature (376)..(406): n is a, c, g, or t
aaaaaagtaaaaaatagaaattatctcactatttaaatcccatttttttcacttcatatgaaagaacatattgatagtatattctatattatttcatagatctgtctgaaagagattgggaacaaaaatatctaattgagatattctttaattttttacatagcagcnnnnnnnnnnnnnnnnngtagtatcagcgaaatcagtcatgtttataccttgaatataaatatcaggaatcatgcaattatttctactatgtatttagtagtatcttatatttgtataacattattacattttgcaaattagtatcacaactgctaagtagatgtttctgagtattagaaaaatcagtgttattacctgcaggatattnnnnnnnnnnnnnnnnnnnnnnnnnnnnnnntcagtgtttagaaatgttgatagttattgaatctttgaattgaattttaaaaatccattctagtaatcagagtatactttttttatagaacaaggtggcaggtggggagccctttacccttctggtgaagttaaaccatagaagtttacaatttgcctttc

SEQ ID NO: 85399 - DNA, 951 bp, Homo Sapiens
  misc_feature (87)..(121): n is a, c, g, or t
  misc_feature (577)..(637): n is a, c, g, or t
aaagaaactgatagatcactatagggcgctactctgttagcagcgaacgaacgagcgcagcgaagttagtgagcgaggaagcggcgnnnnnnnnnnnnnnnnnnnnnnnnnnnnnnnnnnncagtcgacggtaccggacatatgcccgggaattcggccattacggccgggatttggaagaaattctaagagtgaattccagcctgtttcctgatttcctgttgtccttatttactcctagtacatggtacgtgactggaatccagtagaaaagccccagaatgtgtattttagtccctacagccaacagctttgagaatgtacagaaaaggaggctaaatccttgcccctgctgtggcttcaattcataagcttttgtctcttctctgttccatttcaaaagctaaagctaagtgtcacaggacaagattgtagtggcttcagagaatggtaggcttgacgaaaaagactattgatgattcaaggggataaattatggtagaaatttaaacagtatttggggacataaaatactgtttttgagttgagtaaccccaaacaagaagaaaaacatgtnnnnnnnnnnnnnnnnnnnnnnnnnnnnnnnnnnnnnnnnnnnnnnnnnnnnnnnnnnnnnctgagagggaaatggaagcgaaaatagaaactattatttcttttttcaagacaaccaggtcgatcatgaacaagtgtaagaggtcaccatcaggtagctaagcacttcttttaaacctatgaataaaggaaaaaacacaagatgttaatagtaagtgtgtatggttgctagttttgaacttcagtgcttaacaatgtcaaagtcaagtgttcctgtgttgctgtgaaataagtaccaatacatgcagaagtagtactattgttgccacatgcaagaaagacagccaacttaagtaattctttagtggggtctaa

SEQ ID NO: 85400 - DNA, 1055 bp, Homo Sapiens
  misc_feature (395)..(395): n is a, c, g, or t
ggggtgttcttgtgatgcatccacgcaatgggttcacagaagactccaagcctggaatatggagagaaatatcggtgtgtggaaatgtatttagcctacgtgaaaccagatcggctcagcagagaggaaaaatggtggaaattgaaaccaatcagttacaagatggctcgttaattgacctctgtggtgcaacattgttatggcgtactgcagaaggcctttcccacactcctaccgtgaagcatttagaagctttaagacaggaaatcaatgcagcacgacctcagtgccctgtagggttcaacacactagcatttcctagtatgaagaggaaagacgttgtagatgaaaaacaaccatgggtatatctaaactgcggccatgtacatggctantcataactggggaaacaaagaagaacgtgatggaaaagatcgtgaatgtcctatgtgtaggtctgttggtccctatgttcctctgtggcttggatgtgaagctggattttatgtggacgccggccctccaacccatgcgtttagcccgtgtgggcatgtgtgttcagaaaagacaactgcctattggtcccagatcccacttcctcatggtactcatacttttcatgcagcctgtcccttttgtgcacatcagttggctggtgaacaaggctacatcagacttattttttcaagggacctctagactaacagaccattgtcttgcaggactacattataaatttataagctaagtgagttgggtcttcgaacctgttgtccacgtcacagtttttctgctctggtcatttgcattaagatgaagaattttttaaaacatttataataaatagtagcaatttctgagcaaaaatctgggaaactcaagcaaaggaatttctgaaagtatcagtcttctgaattctgagttttgaaaatatattttgaggagaaaaagacatagtctaatttgatgccttccttttagtgtttttgaatcacctatcctcagtgctgaaattgttttgtataactgagggtactgttggttcaaactatgtt

SEQ ID NO: 85401 - DNA, 1427 bp, Homo Sapiens
aatctcctgtcaccacagaccagcctatttcccctgagcctattactcaacccagttgcatcaagaggcagagagccgctgggaaccctggctccctcgcagctcccattgaccataagccttgctctgcacccttggaacctaaatcccaggcctcaaggaaccaaagatggggagcagtgagagcagctgaatcccttacagccattcctgagcctgcctctccccagcttcttgagacaccaattcatgcctcccagatccaaaaggtggaaccagcaggtagatctaggttcaccccggagctccagcctaaggcctctcaaagccgcaagaggtctttagctaccatggattcaccaccacatcaaaaacagccccaaagaggggaagtctcccagaagacagtgattatcaaggaagaggaagaagatactgcagagaagccagggaaggaagaggtgaggagagggttgggaccacaaagctgggaaaaatgacttcagggctctgaaactcccaccaagatttttctcaatctcaggatgtcgtgactccaaaaccaggcaagagaaagagagaccaggcagaggaggagcccaacagaataccaagccgcagcctccgacggaccaaacttaaccaagaatcaacagcccccaaagtgctcttcacaggagtggtggatgctcggggagagcgggctgtgctggcactggggggaagtctggctggttcagcggcagaggcttcccacctggtcactgatcgcatccgccggacagtcaagttcctgtgtgccctgggggcggggaatcccccattctgtccctggactggctgcatcagtcccgcaaggctggtttcttcttacccccggatgaatatgtggtgaccgaccctgagcaagagaagaactttggctttagccttcaagacgcactgagcagggctcgggagcgaaggctgctagagggctatgagatctatgtgacccctggagtccagccaccaccacctcagatgggagagattattagctgctgtggaggcacatacctacccagcatgcctcggtcctataagcctcagagagttgtgatcacatgccctcaggacttccctcattgctccattccactacgggttgggctgcccctcctctcgcctgagttcctgctgactggagtgctgaagcaggaagccaagccagaggcctttgtcctctcccctttggagatgtcatccacctgagaactccactacccttttccctcccagaccacgaattagaagatatgtggaagaaagaactcagggcgttagaaaggattggggtatattgatacaacttgtcctggaacatgggtgggaccagaaatctttatgaataaatgaaaagataagggatttggaagccacaggtt

SEQ ID NO: 85402 - DNA, 853 bp, Homo Sapiens
cagtcgacggtaccggacatatgcccgggaattcggccattacggccgggggaggtgttggggcaaaggcagggacccagtgaagacaaggagcgaggctctatactgaggccctggtagaagtggagcagatgggccacctgaagagctactaggaagttgacaccaataagatgtcgttagtctgtgtatggggagtgagggaaaggaagaacttgccagtttccaggttttaatccttccaaaggatttctgcagaaagacactggaagagctgtattcctacttatccttaaaggaaagaaactgcccttgaattccaaaggacatgattactgagctggaattccaaaataatgtgtcccagtgagactcctgggggtagttttgtccggtaactgtgtgtgttacgatgaaactgcagacttccagccactctatcttaccatgtctgttaacagttaatttgctctgatgaatttgccccatcttgggagaagggggctctgctggactgttttttatcttggagtaacatgtcctttgatcaggaaggttctaggacttattatttgttaaaaacaaaccattggaaggctgggcattggtggctcattgcctgtaatcccccaacacttttggggcacgcccaaggcagggcgtatccggtttgaagcccccaggcagttccgggagccagcctggggccgacattgtcgcagaagctctcttcttactggggaattgccagggtttaggccacagacgttggtggagttgcgccttgggtttccccggccgctttaggagggctgggtgggagaaacccctgggggccccggaggttggggca

SEQ ID NO: 85403 - DNA, 618 bp, Homo Sapiens
tgattcaggaaattggatacaactgtgtagcagacatctggtccctgggaataactgccatagaaatggctgaaggaaagcccccttatgctgatatccatccaatgagggcaatcttcatgattcctacaaatcctcctcccacattccgaaaaccagagctatggtcagataactttacagattttgtgaaacagtgtcttgtaaagagccctgagcagagggccacagccactcagctcctgcagcacccatttgtcaggagtgccaaaggagtgtcaatactgcgagacttaattaatgaagccatggatgtgaaactgaaacgccaggaatcccagcagcgggaagtggaccaggacgatgaagaaaactcagaagaggatgaaatggattctggcacgatggttcgagcagtgggtgatgagatgggcactgtccgagtagccagcaccatgactgatggagccaatactatgattgagcacgatgacacgttgccatcacaactgggcaccatggtgatcaatgcagaggatgaggaagaggaaggaactatgaaaagaagggatgagaccatgcagcctgcgaaaccatcctttcttgaatattttgaac

SEQ ID NO: 85404 - DNA, 1312 bp, Homo Sapiens
  misc_feature (86)..(120): n is a, c, g, or t
aaactggatagatcactatagggcgctagccgttcgtgatagccgaacgacgagcgcagcgaagtagtgagcgaggaagcggccgnnnnnnnnnnnnnnnnnnnnnnnnnnnnnnnnnnncagtcgacggtaccggacatatgcccgggaattcggccattacggccgggggtcgcccaacggcggcctcaggagtgatcgggcagcagtcggccggccagcggacggcagagcgggcggacgggtaggcccggcctgctcttcgcgaggaggaagaaggtggccactctcccggtccccagaacctccccagcccccgcagtccgcccagaccgtaaagggggacgctgaggagccgcggacgctctccccggtgccgccgccgctgccgccgccatggctgccatgatggatcggaagtgagcattagggttaacggctgccggcgccggctcttcaagtcccggctccccggccgcctccacccggggaagcgcagcgcggcgcagctgactgctgcctctcacggccctcgcgaccacaagccctcaggtccggcgcgttccctgcaagactgagcggcggggagtggctcccggccgccggacccggctgcgagaaagatggcggacctggccgagtgcaacatcaaagtgatgtgtcgcttcagacctctcaacgagtctgaagtgaaccgcggcgacaagtacatcgccaagtttcagggagaagacacggtcgtgatcgcgtccaagccttatgcatttgatcgggtgttccagtcaagcacatctcaagagcaagtgtataatgactgtgcaaagaagattgttaaagatgtacttgaaggatataatggaacaatatttgcatatggacaaacatcctctgggaagacacacacaatggagggtaaaccttcatgatccaggaaggcatgggaaattatttccaagaatagtgccaagatatttttaattatatttactccatggatgaaaatttggaatttcatattaaggtttcatattttgaaatatatttggataagataagggacctgttagatgtttcaaagaccaacctttcagttcatgcaagacaaaaaccgagttccctatgtaaaggggtgcacagagcgtctgacatgtagtccagatgaagttatggataccatagatgaaggacaatcaaacagacatgtagcagttacaaatctgaatgacacatagcctctagggagtcacagtatatttctgattaatgtcaaacaagagaacacacaaacggcaacaaaagctgagtggaaaac

SEQ ID NO: 85405 - DNA, 453 bp, Homo Sapiens
  misc_feature (122)..(122): n is a, c, g, or t
actcagtaaccaggggatcacagaatgcttcaaactgtgagtcaaattaaaatctactatttttctccaacaaaaagtgaaacggctgaagtttgctgttgataaaacatttgaatggtagnaaggaaatttgaacccctgagaatgtatgacctaatcatgtcctaagtttgaacatcttagtattaacaaaaaaatactcttcttaaggttacaaatatattgaggcatttttctcccactgggaatcataactgtgaaaacaatctgattttggtgccaggaatcaagagaatcccgtaacactgggatcaatgtattagacacaatgcaaagccctaagctcctggcatcaggtagtttataaatattaagagatttgtgattaaacttgatcacaaatcaccctcagaataaaattcacatccagccttgttaactgcacacttttac

SEQ ID NO: 85406 - DNA, 351 bp, Homo Sapiens
  misc_feature (43)..(43): n is a, c, g, or t
  misc_feature (284)..(284): n is a, c, g, or t
cttcccttaaccctgggatctaatgtgtagagatgctatttangccatctagccatcctctgatacaccctacagagacccagtctctacctaccttcaacacacctagccagagacagcgaaatcagttttctatctgcctaataggcaaatacaagcatactttgcctttgacatctcgctgcctcctcttcctgcttttgtctaggccaatccttatctaggaaaaccagcccaggatattcctatctgggttcagccttggttttttgattccttacagncccctccatttctgaatccacctcgctcttccctttgcgcgcccccaccaatctgctcattacctcc

SEQ ID NO: 85407 - DNA, 785 bp, Homo Sapiens
gggaacatagctctaggagtcacagtatattccttattaatgtcaaacaagagaacacacaaacggaacaaaagctgagtggaaaactttatctggttgatttagctggtagtgaaaaggttagtaaaactggagctgaaggtgctgtgctggatgaagctaaaaacatcaacaagtcactttctgctcttggaaatgttatttctgctttggctgagggtagtacatatgttccatatcgagatagtaaaatgacaagaatccttcaagattcattaggtggcaactgtagaaccactattgtaatttgctgctctccatcatcatacgatgagtctgaaacaaaatctacactcttatttggccaaagggccaaaacaattaagaacacagtttgtggcaaatgtggagttaactgcagaacagtacccaccagaaaaccaggctaccccccgaaaaaaatgtcgggcccccctcggcccctcaacacccctttccaaaacattcggtttgggcgcgcgggcccccagtagggaaaggggaacagggccctaccctgttctccctagggaaaccccggggccggggttaaggggtcggggttttgcgaaaaaaccaaaaacccccaccggggggaacccgaagatgtttgggccaaattcccccccggtaattttttgggcgccctgtaccggggcccctttttaaaatggaaggtccccgaggcacgattcatgaccgccggagtggcaggccccccgccctgttgtcccagcccccccaga

SEQ ID NO: 85408 - DNA, 630 bp, Homo Sapiens
  misc_feature (511)..(562): n is a, c, g, or t
gtaccgaggtttaaaaggatggacaatatctgccaaatggataagggtgtcttccctacgtcagtctactagctcaaatgctaatctcttcggaaacaccctcacagacacagtcagaaataatatcttaccaggatctgggtatcctgtggcccagtcatgcttacaacataaaatgaaccatcacagtcctcaaccaacactatctcgtatatccttaaaacagagaaaccaaggttcagaaaagttacctactgtcacaaaagtaagtaaacagctaaaccaaaaatcaaactcgtgtctatctaaatcaagagatcaaacacaaatgccaactaagattctgtggaggagataatagtacaaagttaggcccttgctccaagaaagttcctgcagacggagatcagataaatacacatcaaacaatacaaaccctgtattattctatattgactacaacttataaacaaagaagcctagaggaaagaaagattcagaattaaacagnnnnnnnnnnnnnnnnnnnnnnnnnnnnnnnnnnnnnnnnnnnnnnnnnnnngtaaccacaaagtcaaagcagtgtgtaacaaactcctacctatagagctcataatccttgagacctgt

SEQ ID NO: 85409 - DNA, 667 bp, Homo Sapiens
gatcagatgaaagagtaaaggaattcaaacagagccttataaagtacatggaaactcaaagaagttacacagccttggctgaagcaaactgcctaaaaggagccttaatcaaaacacaactgtgtgttttattttgtattcagttgtttctcagattgataattctgtggctttgcatactgcacagcatgtgcaatttgttttgttgcttactctttagtatgtgcaatttattctgcagtttgctgtttattatacccaaaaagttaatgatatttttgagaacagttattagactagaacgcaagactcctaggttatagttacagatcccagttattatttactcactatcatttagtgggtgaatcacagtaatttccctgtaaaatgtggtacctgaagtcatatttgagattctatgaaatgtttaaatcttaacatcactccaattattaatgaaccaaatcatacgataagttactgtttgcattgaaatataatatcaaagccttttgaaatctgtaaacataaaattcctctcattttcaaatatctaaagccagttttatgttcctaaaatctcattttcttctttctagtactactatttctactgaatataatgaaaatggcaataaaataatattacataaactgtaaaaaa

SEQ ID NO: 85410 - DNA, 385 bp, Homo Sapiens
tttccttgtatgaaaagatttaatgaattatgagccattgatcattacaaactttaagccttaatatttcttctttcctatgtaaaaccaggtaattaaaacagcctgtctcagtatgacagaagaccatagtagggataatagtaacgtctgcttccacatctgcatgcttcgttaaccaaccaaagaaagtgctccaggtttcccaagtcaacaaagtatactcagttacactttccctgatcatactatggaattgaaacaggaacactcctttgacttttaataggcactttttcatccacggggcacaagcacttttccccattatttttctcctttaccctcaatatccttgtgaggtagtgaagggagggagcaagga

SEQ ID NO: 85411 - DNA, 441 bp, Homo Sapiens
cagaatatggcagctggaaatgagctgctgtggtaatcagaagctacaatatgtgacacgactgtgaggctgacctgtaactgggcctcaaggggaccattcatgcaacctggaagggcatcaagactcttggtcagggccctgaaggacggtgagaaaatgtcattggaaactggagaaaaggtcctgagagttacttgctgagggactgtgggaaaactatggccacaacatggaaactgaaagggcactgcaccatctcagggatctgcctaaggagacatctgggaagaacatggaaagtgctaccagcctcccctaactgtcactgaataaatatgacaggagagggacatgatctaaagaagaaggttcagttttcaaacagaatttagagaaaatataaagaaataatttcttgtctcaaaaggccaaagtaaa

SEQ ID NO: 85412 - DNA, 892 bp, Homo Sapiens
  misc_feature (50)..(50): n is a, c, g, or t
  misc_feature (54)..(54): n is a, c, g, or t
  misc_feature (189)..(189): n is a, c, g, or t
gatcagcagccaatatgggtttgtttggtttttttaattcttaaaaacancctntagaggaatagaaacaaatttttatgagcataaccctatataaagacaaaatgaatttctgaccttaccatatataccataaggccctgccattgctttaatgtagactcatagttgaaattagtgcagaaaganctcagatgtactagattttcattgttcattgatatgctcagtatgctgccacataagatgaatttaattatattcaaccaaagcaatatactcttacatgatttctaggccccatgacccagtgtctagagacattaattctaaccagttgtttgcttttaaatgagtgatttcattttgggaaacaggtttcaaatgaatatatatacatgggtaaaattactctgtgctagtgtagtcttactagagaatgtttatggtcccacttgtatatgaaaatgtggttagaatgttaattggataatgtatatataagaagttaaagtatgtaaagtataacttcagccacatttttagaacactgtttaacatttttgcaaaaccttcttgtaggaaaagagagctctctacatgaagatgacttgttttatatttcagattttattttaaaagccatgtctgttaaacaagaaaaaacacaaaagaactccagattcctggttcatcattctgtattcttactcactttttcaagttatctattttgttgcataaactaattgttaactattcatggaacagcaaacgcctgtttaataaagaactttgaccaaggctataaatgccacgtacattattttcagtattgttggttatatttaaattttccttacaataaagcacacttttataataaaataca

SEQ ID NO: 85413 - DNA, 402 bp, Homo Sapiens
  misc_feature (52)..(249): n is a, c, g, or t
  misc_feature (354)..(354): n is a, c, g, or t
gtgtagtggcacgatcttggctcagtgcaacttctgcctctcgggttcaagnnnnnnnnnnnnnnnnnnnnnnnnnnnnnnnnnnnnnnnnnnnnnnnnnnnnnnnnnnnnnnnnnnnnnnnnnnnnnnnnnnnnnnnnnnnnnnnnnnnnnnnnnnnnnnnnnnnnnnnnnnnnnnnnnnnnnnnnnnnnnnnnnnnnnnnnnnnnnnnnnnnnnnnnnnnnnnnnnnnnnnnnnnnnnnnnnnnnnnacccgcgcctgggccagtatttttagaataatattgttcagaaaaacttttagtgatgggaaaacaagtataccctaaaattcaagggaaaaactgaatatttgngggtggggcttatgggaaaaccccattttcccatttttctatcttatt

SEQ ID NO: 85414 - DNA, 536 bp, Homo Sapiens
  misc_feature (48)..(48): n is a, c, g, or t
tcatttacaaagcagacatcccttcacccagactgtggttttgcatgntcaggttctcagtctatgagctttggtgcaggatcattttggctactggaaaaaccatagcttattttaaatttctggttgccaaagccaccacacgtgtggtctgtggatgaccattgtctgcagaatgacgaggaaggaacagaatgtggtttggggctcagggtggccttcccactgggagggaaggcgggagggagcccttgccctgggttttgacacagcctgtgctcacagcctctcctctcatctgcatttctcagaaatgccctccctgcccagtggtgactttccctcgtcactcctatggagttctacctggagcccagccatgtgtggaactgtgaagtttactcctctgtaaagatggtttaaagaaagtcagcttctgaaatgtaacaatgctaacccttgctggaaccctgtaagaaatagccctgctgatagttttctaggtttatcatgtttgatttttacacctgaaaaat

SEQ ID NO: 85415 - DNA, 674 bp, Homo Sapiens
caggaaatgtctgctctagcgggggcgagggacactggaacagagaccaggagacctgggtgacaggcccccagcccagcaccaggtcctcacagggccctcaggcttgggtgaatctgcccgagtggcagatgatggcatgtccactccccacacctgctagcccctgcccaagtggtttttcctcaagcccattgggtggaaatgctggagatgctgctgaagtttctctaagaagggaacggaggcacctgccatagtgatggactgaggtatggtagtgagtactgagtgctgagtgctgatactgagcacagagtgctgagtattgagcaccgagtactgagcatgggccagctgggttttgggcccatttcaccttccccctggcctctggggtgcccctaactgggatccctgccatgcacatgacagattccccctgcggcctgactgtggctccaggtttccagagagggtccccaacctggcaggacccctgttcaggtcctaagtcatttgtcggccatgttctgtccccagaaccgcggcaaggggggtgccgtgagcaagctgatggagagcatggcagccgaggaggactttgaacccaaccaagactcgagcttctctgaggacgagcacctgccgcgtggcggggctgtggagcggcc

SEQ ID NO: 85416 - DNA, 569 bp, Homo Sapiens
  misc_feature (43)..(52): n is a, c, g, or t
  misc_feature (255)..(268): n is a, c, g, or t
ttactggtttctcaattattgtcccagtcaggcaagggttacnnnnnnnnnngagagacagggtctcactacattgccagactggagtacagcggcagtttaccatcactgcacttacaaacctccaactcctggtgctcaagccatcttcctgactcagcctctcaaatacctcaaaggactaccggagctccccatgcatcgcgcttttttctactttttcgtaagctattggtttcaccagaggtgtggtgnnnnnnnnnnnnnncatcacttaagctttaggcccctgccaagcccttgtacctgattttataatttcctacctgtgtaattagagaaagctataaatgtgtaggcttcaaacccacaaaacctgtgtttgcctctgctcctaataaggctgtcctcaaggtaagcctttttatctcgttccaaatctctcatgtcccacgtcattaatcatacaattccctgtcagttctaattacctttgtataacacctcaagtatgttctgtgcctagaactctcaggaagtaagaaggcaaataattctgtgtctggaat

SEQ ID NO: 85417 - DNA, 559 bp, Homo Sapiens
  misc_feature (49)..(49): n is a, c, g, or t
cagtccgaaagaacaaaaatactttcagttattcgagaaccaatagcanatagagttttctcaagcagtcgtcagcgttgtttctcctcaaaggtttgtgttcgttctcgttgttgggatgcctgtatggttgtggatggaggaacttcttttgagtttaatgatggtgcaattgcttcgatgatgatcaataaagaagatgagcttcgaactgtgcttcttgaacagtgaaggatttcctcatgacaaattttgattactggcgagaatatttttacttcagaaacagactaccagtcgtaaagtgacattttttggttattgttgagactgcttgcccgtgggctcagaagtgagatttgcattattcttctgttggattctgatagaaaaaaagacattcactgtataagaaaatggatggactgaaccaattagaattgataccagtgaaatttttatattgcttacaattggtaaccaagagtgctgatacctttttaaatttagaggggcaggcttaaataaaggactaaatatttaggatttgaaacttaaa

SEQ ID NO: 85418 - DNA, 186 bp, Homo Sapiens
  misc_feature (22)..(22): n is a, c, g, or t
gtagttgccaaggagccacagncaggtcaatttccagagctcacaagcaggaaacaatcaagctcctacccaagtcagactagaggaacctcactgaacacccaaggcatttagtaacatccccagaaagatcatgctatattaatagggctaagatagctctagaggctgggcatggtggctcat

SEQ ID NO: 85419 - DNA, 255 bp, Homo Sapiens
aatgatgtaatacacaatcccaaatatgcaacttacaaaatacctcactgtagaccccaagacacaaattgtttcaaactgaaaagacggaaagagataatcccatgcaaatagtaaccaaaagagagctggggtggctatactaataccagacaaaatagattttaagccaaaaaatgttacagaaagacatcgtatgttggtaagagagtcaaatcacaagaagatgtaacaattataaatacgtatgaactg

SEQ ID NO: 85420 - DNA, 677 bp, Homo Sapiens
  misc_feature (564)..(564): n is a, c, g, or t
  misc_feature (637)..(637): n is a, c, g, or t
tctatcagcaagcatcattgtggtttcattcgctcaaattatccctaaagaatcggatactcaatcactttggtcccatgccggagaaagacgccgatcctcagatgaacccgaatggcccagcctggtgctggtggatgttagcagttcttcccttggaaagccgagctcagctccccttcctagcaatgaggtccttaaaggacagactgaatggtattcgacgagtcctggccttcatatcccgaaaccaaaactagtgagtggattgccgaagaggagctccaaccttcccccactgccgtcggggggagtcttcttgtaaatatatctaattgcaataatatcttaacagaagggggtgtcaaacagaggcatcagcctgctgttgatcacagagagaaattgagtagaaagaccaaaagaatgtgacctatttgaaactttctgtcttaagatgcttcttgacatgctgcataactacataaacagcagaggtgtttaagagcccagaaaaacataatttgattttaacattaaaatttccaaaagtttaaagtggtnttgctttaatattctttctttcataggatcaatgactgtgtgggttgaaatgtgaaaacaaaggtactaatantgttgctgtataatttcactgacttgaggtctcattccca

SEQ ID NO: 85421 - DNA, 289 bp, Homo Sapiens
  misc_feature (13)..(13): n is a, c, g, or t
  misc_feature (21)..(21): n is a, c, g, or t
  misc_feature (82)..(82): n is a, c, g, or t
cctaccccaagcnaaaagaanagtatgaaatgatttaagggatccacagtttttttgaaacatttgcctttatatgaccctnaaacccaattttcctgtgaacaatgaaaggaggaaaacatctgcctcaaaaaatgctaggcccaggtgaataatatccttcccccctcttccttttcctcttctttaaatagaggcccatccttgtttacaggatgagggcaagaggtaaaatcctttccaaaaaggatgtagtgtatgacattgtttattaagttattctgtaaaa

SEQ ID NO: 85422 - DNA, 944 bp, Homo Sapiens
gggtatctttgagctggcatctgctgcaggtgtgggctgtgacattgacccagccttggtggctgccattgctaatctgaaagctgatacttcatctcctgaggaggaatataaggtggcctgcctgctcttgatctttctggcagtttccctcccactccttgccactgacccttcttccttttatagcattgagaaggatggttacaacaacaatattcattgcttgaccaaagccatcatccaggtgtctgctgccctcttcacgctctacaacaagaacattgaaactcacctcaaggaatttctggtggtggcctctgtcagcctcttgcagctgggccaggagactgacaagcttaaaaccagaaatcgagaatccatttctctgctcatgcgcttggtggtggaggagtcatccttcctgaccctggacatgctggagtcctgtttcccttatgtcctgcttcgaaatgcctatcgggaggtgtctcgggccttccacctaaactgaatgcctgccagtacccactgaagagccctttggaccttcctaaacccttgccatagtggaagctgtggtcactttcgcagggggtgggaatggggtggggtcactaaggagagagggtcaggagccagagttgatgagcagatctgtggaagaacaatccagggctgagaaatcgtagagcagtgaggcaggctgggagcatggaggacagcttatggaaaaagttagggcgtggggccacatgtgtgaattttacaatgaaaaaaggagtaacgtacaagtatattttctatcttctggtgacttgagcttgagctctgacaggcatgggcctctccgaccttcatcactattcttaggataatgctggcggggcagagatgatcaatcatcatattaaatcataatgagcttataatcctccccctgg

SEQ ID NO: 85423 - DNA, 472 bp, Homo Sapiens
ttaaccatcacagtgcttcatatattgaatgagatcatgtccaagtcagtgtactttaggggtgttttgagcagggcagaaagaagctaatgctaccaccaaagagagctctgctttgttactggactgccatccactagaatttatgattaaacccattcctacctgctgtttactaggggagaggctgttgtttatttttggcagagcaaacgaacacagtgaggactactgggagactcacttgaagacaggcggattgcatctaagaggtggtgttgcccacactgcaaattgtgcttgtgtctgtctaaacagcaatgaaaactggccaggttcatagtaccctttcaaagtggagttctctaaggaaacattagcttcagttgataactctcaaagaaactaggacagttcccaggctgctctgtatttgtgtagataaacaacaggcattaatagagccatactg

SEQ ID NO: 85424 - DNA, 766 bp, Homo Sapiens
  misc_feature (366)..(366): n is a, c, g, or t
  misc_feature (606)..(617): n is a, c, g, or t
ataattgagtagtacaagcgaggaaaaaatacggaggataaccactatttttgtgcaaatagtatgaaagtgaagtaaaagcaatagaagaaatttctataggatctgggtttagagtgtgtatcattaataaatatacctttgctcttttcagggaaaataacaaccacccttacctgatagttgggaaaagaagattgggttattttgccatatcatttagctggaagtgacatttaaaagcaccctgcatcactagtaatagtgtattttgctattctgcccttgtaatcggtgtccctgtaaaacaatccccacagattactttcaggaaataagatgtatttctctaccgtaaggggccanggtttaattttctcctttttttgagatttctagaaaaaatgctgcttgcacatgttggttcctgaaaccttagctagaagaatttcaggtcataccaacatgtggataggctatagctgttcagaggtctcctgggggagcttaaaacgggggaaacactggttttcacagacgctccacatggctgtctttaaaagactcaaaacttttttttgtcctctttgttatgcttggaagctnnnnnnnnnnnnaacagtgtgtcgagtctttgcaaagaaacctttagatgtggttcatagatatatgaatacgtatctgtgtaaaacagtgagtgtgcagtgtgtaaatactttaaattattatgctagaaaaataaagttacataccttgctgtggaaaa

SEQ ID NO: 85425 - DNA, 561 bp, Homo Sapiens
gtcctgggtttcatgtttcctgctgctcttctcactgtgtacacaccatgcccacatacaacatacctatcagaaatggttttcattaagggagtagaatagtcacttaactggggctcttaacattgctaataacctgtggctcaatttcctcaactgtataatgaggttactactagtatctacctcaaagcgttgtcatgtggattgagatgatatgtatgaatcacataaaagagtgcctggcacatagtaggtgccattaataatattactattgttaacaccttaagggtctaacttgtaatgaagacagaaatatgtatgaggatgatcactgaaatatttatgacagtgcataatttgcaaaataaaaaatgtacactagcataatatttgtggcatatccgtgtaatggaagattatgcaggcattaaaatatgtacacaaaaagtttggtaaaggaaaaatgctgtcatgtgttacaaaagcatgataaataattgttaatatggaataagctcaaatatgtcaaaataaatgtaaaaaatgagtgttaaa

SEQ ID NO: 85426 - DNA, 500 bp, Homo Sapiens
gtgaaatttaccttgaaattagttggtgtgataaatcaagtacagtaaaataaaaagagatgcagttaacctagctgaatgtatggcagcctttctttatcaaacctaacccataagcctgctgcatttaaggtcttaatgcaatttgagaatatttctagtagtagaatagtacaaaagctaagatttgttttattccttttctttgtgttatagataactttgaatttaattttatctggagaggaaaaggtgaaaatcaaatttcccaccaaaaggaactagtattcctttgagaagggccagctaagcttgggggcagcaaatgtacaggattggtcttagacatattttactggagagcagggcagcagtggtgtcccagaacagccttttatcagagataaaaacttcattacttcataatgatactcccaaaaagcttattggtcatttttggagtttaatcaggtatgaactcagtcttccaaaagttggtt

SEQ ID NO: 85427 - DNA, 534 bp, Homo Sapiens; identical to SEQ ID NO: 32891

SEQ ID NO: 85428 - DNA, 622 bp, Homo Sapiens
  misc_feature (501)..(521): n is a, c, g, or t
tactgtatttcattatctgtactgaaagcaaatgctttgtgactattaaatgttgcacatcattcattcactgtatagtaatcattgactaaagccatttgtctgtgttttcttcttgtggttgtatatatcaggtaaaatattttccaaagagccatgtgtcatgtaatactgaaccactttgatattgagacattaatttgtacccttgttattatctactagtaataatgtaatactgtagaaatattgctctaattcttttcaaaattgttgcatcccccttagaatgtttctatttccataaggatttaggtatgctattatcccttcttataccctaagatgaagctgtttttgtgctctttgttcatcattggccctcattccaagcactttacgctgtctgtaatgggatctatttttgcactggaatatctgagaattgcaaaactagacaaaagtttcacaacagatttctaagttaaatcattttcattnnnnnnnnnnnnnnnnnnnnnttttgtatgtcaataactttatatgaagtattaaaatgcatatttctatgttgtaatataatgagtcacaaaataaagctgtgacagttctgttggtctcc

SEQ ID NO: 85429 - DNA, 489 bp, Homo Sapiens
tcttatgagaaatatatgtaggttatattaattcttgtccatttttgctaagcctgtgaaatactttggctctgatacaacttaacttgaataatatcttatcctgagtcttcctccaaggcagtacatattcctgccaggactgtagtaatcctttgggaactacatgtgagtaagcacttgtatgtaagccattatactgctgtaactaatgcatacaaacaattcttctctttacatttatagtctaaaaggggatatgcagtgggaaggaaaattcctgagagattccagcatagctttgtcaattccgactgagccatactgttttccacaagggctcaacacatagtcagtattccgtgctttcagtgtgtgttcagattctcctcttactggttttcttagactgtattgttctataagcaaatgcccatgtgtgatttttaagatgtgctggggaaaaataaatcaataccacaaccaaaa

SEQ ID NO: 85430 - DNA, 504 bp, Homo Sapiens
gcatagatgagcctcagcttccagggcactgtgggcctgttgatctactagggccctgatgtccacctggccttcctgttcttcactcccttcagccacacgcttcatggccttgagttcaccttggctgtcctaacagggccaatcaccagtgaccagctagactgtgattttgatagcgtcattcagaagaaggcgtccaaggagctgaaggtggtgaaatttgtcctgcaggtccctcgggagatcctggagctggagcatgagtgtctgacaatcagaagcatcatgtccaatgtccagatggccagaatgaatgtgatagttcagaccaatgccttccactgctcctttatgactgcacttctagccagtagctctgcacaagttagctctgtagaagtaagaacttgggcttaaatcatgggctatctctccacagccaagtggagctctgagaatacaacaagtgctcaataaatgcttgctgattgactgatggat

SEQ ID NO: 85431 - DNA, 377 bp, Homo Sapiens
tttgcctatgtcattcatttattcaacacgcattgctgaaaatctaagacattccaggcactgtgaatgccaaaatgagtggaatcccaaacacagggaactcacaatggacattttaagaagcccagaaaatcccctggattcaggctatctgcctcccccactagcttgaggctggggcccgggtccctcccttttgtggaagtactaccttcctcaggcctccacttcagagagcaaacacccaggacagggagcccatcaagctccatcctcagcttccatgcattcctcagtttacctgattgacacacttgagagggaaagtccaggcaaaactcaagagggatatgatgaggggaaaacagctttctttt

SEQ ID NO: 85432 - DNA, 497 bp, Homo Sapiens
  misc_feature (424)..(432): n is a, c, g, or t
ctctctgcaccagtgattactagtgttagctgttaacacattatctgtatttagtagtgattatttatttacaagttggtggtaattcagcagtcaggactctaagcttttatagttgaattgaggaaatctcgcttttattcatttagctggcaactgcctttattgcagacctctggtgcttggctttcaaggaagcctatgagatgccaaaatcacacctttagagagcaccttgctctaataggtgatgcatgagcaaacagtgagatttgaaggggttttaacataatttagaatgtgaaaaaaatatcaattcatatctttcaagtactaacccctcaaaaaagcccacacatacaaaatatgtgatgtgataccactttgtcttttaggtctttaagtaactgaagttaagcacagnnnnnnnnntcacttcatggaaatttcagtaagaaacccaaacttctaaaaattgcttgcagatgagctaaaaa

SEQ ID NO: 85433 - DNA, 428 bp, Homo Sapiens
gagggcagccagcatggcacctggatctgatcaagatgaagttttcatccccatctgcctgttaatgtcttctttaccagttgccaccccctaataaggggtatgccgtagactggaagtcactagggacctgcccagcatcctgttctaggcattgactaatccactctcctacatcctgcctcccatccacatggtccaatcagaggctgccatgcttgcacaatgtgacactgtctctatggacacattaattggtcctgatgtagaacttgacccaagatcagggtcaagttgagagaagacttattttctttccaggtgtttcaataacatgtaaaacttggaattcgatagcagccatcttctgccatgagaattgggaagagagaaagcctatagtgataataaagtcaaattatcctaaa

SEQ ID NO: 85434 - DNA, 998 bp, Homo Sapiens
  misc_feature (543)..(576): n is a, c, g, or t
  misc_feature (718)..(727): n is a, c, g, or t
  misc_feature (749)..(777): n is a, c, g, or t
ctagcaataatgacgatgaggacctgacaccagagcagaaggcagagcgtgagaaggagcggaggatggccaacaatgcccgagagcgtctgcgggtccgtgacatcaacgaggctttcaaagagctcggccgcatggtgcagctccacctcaagagtgacaagccccagaccaagctcctgatcctccaccaggcggtggccgtcatcctcagtctggagcagcaagtccgagaaaggaatctgaatccgaaagctgcgtgtctgaaaagaagggaggaagagaaggtgtcctcagagcctccccctctctccttggccggcccacaccctggaatgggagacgcatcgaatcacatgggacagatgtaaaagggtccaagttgccacattgcttcattaaaacaagagaccacttccttaacagctgtattatcttaaacccacataaacacttctccttaacccccatttttgtaatataagacaagtctgagtagttatgaatcgcagacgcaagaggtttcagcattcccaattatcnnnnnnnnnnnnnnnnnnnnnnnnnnnnnnnnnngtgcaacttgagggacgactttctttaacatatcattcagaatgtgcaaagcagtatgtacaggctgagacacagcccagagactgaacggcaatctttccacactgtggaacaatgcatttgtgcctaaacttcttttggnnnnnnnnnntataattaatttgtaagtctgnnnnnnnnnnnnnnnnnnnnnnnnnnnnngtaaacttgcaataatgaaaaagtgtacttctgaagaaaactacatgaacgtttttgttggtattcaagtcagctagtgtttataattactggatattgaattaggggaagctcggctgccctagtaacaaaaccagcaaacgtcctgatgacaacgaagtgatgacattagccattccttagggtaggaggaacagatggatcttatagacctatgacaa

SEQ ID NO: 85435 - DNA, 848 bp, Homo Sapiens
  misc_feature (108)..(142): n is a, c, g, or t
  misc_feature (314)..(343): n is a, c, g, or t
  misc_feature (565)..(597): n is a, c, g, or t
  misc_feature (712)..(724): n is a, c, g, or t
atcttaacccacataacacttctcgttaaccgccatttttgtaatataagacaagtctgagtagttatgaatcgcagacgcaagaggtttcagcattcccaattatcnnnnnnnnnnnnnnnnnnnnnnnnnnnnnnnnnnntgcaacttgagggacgactttctttaacatatcattcagaatgtgcaaagcagtatgtacaggctgagacacagcccagagactgaacggcaatctttccacactgtggaacaatgcatttgtgcctaaacttcttttggaaaaaaaacatataattaatttgtaagtccgnnnnnnnnnnnnnnnnnnnnnnnnnnnnnntgtaaacttgcaataatgaaaaagtgtacttctgaagaaaactacatgaacgtttttgttggtattcaagtcagctagtgtttataattactggatattgaattaggggaagctcggctgccctagtaacaaaaccagcaaacgtcctgatgacaacgaagtgatgacattagccattccttagggtaggaggaacagatggatcttatagacctatgacannnnnnnnnnnnnnnnnnnnnnnnnnnnnnnnntaaaaatttagtgactatggtaagcttttgttcatttgtttcagacttttttctcctgtaaaaaaatagtactgattaacttttttaaaagaaagattttactgtaaatatggannnnnnnnnnnnnggtcttatttctgtccctttccctggtttgttatcgtaacctgtagtgccaactctgcttccagaggggtagtgcaggatgaaatgctgaccctgatgttgcttctcattcataaataagtaga

SEQ ID NO: 85436 - DNA, 309 bp, Homo Sapiens
aacaggccttatgacccatggatgtaccgaatttccgagcctccggtaccccgcagtttaaaagggctaccccgtccaccgtcaagaagtgacaagccccaggaccaagctccgtgatcctgccgccaagtcggtggccgtcatcctcagtcatggagcagcaagtccgagaaaggaatctgaatccgaaagctgcgtgtctgaaaagaagggaggaagagaaggtgtcctcggagcctccccctctctccttggccgcccacatcctggaatgggagacgcatcgaatcacatgggtagccctaatac

SEQ ID NO: 85437 - DNA, 516 bp, Homo Sapiens
gacaaaattttaataaaggtcttagcttaagcagtaatcctacttcattgagccttcatggggtgcggtacacaccgttaattcagcaaccctcagtacatactaagtatgctcagtgctgtgaaagtggattacaccaaattaagtcattcttatcacacccaatctaaagtcaagaagccagggataaaagcacctcaggcacataacattaatctagtaatgtaattctctgcacatccagctggtgaaactgcgtgctgtaagctgggaccagctttgtccataactgctgagagaacttgctgaagctctaggaataattttgcctgcccggttgctcaccagttgtagttgccagctcccaacacccttcctggtgccaataaactttctcaaagagcaatactgacatttcttttgataaaacctccagccttctctgtgttgttccgacataccgaggaccaactggtctacatggatgccctgaacatgcaattctttcttccaaaa

SEQ ID NO: 85438 - DNA, 415 bp, Homo Sapiens
cagggaccaggcccggtgccttgatattggtagatttatttgccatcagactaatgagctggggacattgactgtttcctggcaactgagtcctctgattgtgtaaacaatttgcctgcaaacaaaacctgagtgcttgaaagggtaagtgatcctgatctgccatagaaaccttcatgcttagggagtttccctagctaattcctcagctaagattctccccaggagtttcactcacctgtttccagtgcctcctttgggctgtcagcatctgtgattccacattccccagagggagattcctccccaaagctggttgtatttactgccagtcctgggctgtagccagggcagtctttgaacacattatcaagaatactttttaaaataaaagtctgtttcgacttcaaaaaaa

SEQ ID NO: 85439 - DNA, 470 bp, Homo Sapiens
  misc_feature (143)..(255): n is a, c, g, or t
ctgagacaggttctctctctgtcatccaggctgaagtgcagtggtgcccactgcagcctcaacatcctggactcaatcaatcctcccatctcagctgtccctgtagctgggactacaggtgggtaccacacagcccagctaannnnnnnnnnnnnnnnnnnnnnnnnnnnnnnnnnnnnnnnnnnnnnnnnnnnnnnnnnnnnnnnnnnnnnnnnnnnnnnnnnnnnnnnnnnnnnnnnnnnnnnnnnnnnnnnngtgtgagccactgtgtccagccccattagtttttatctcacaaaaaagtaaaaatgtagatattaaaaataataggccaaagcatcaccttatttataacccatcttgtttgaaaagtaatttaaggcagttcataaagtacagtctgacatttcaaatatgtaacttaaatgaaacaagttaaaattaagggtgcagcaccttgggggttgagg

SEQ ID NO: 85440 - DNA, 677 bp, Homo Sapiens
  misc_feature (444)..(464): n is a, c, g, or t
gaagccaatgtccctgaaacgcccctctctttcgggtctggtttctcactctgaaagtgcgggtttgcactagatgagtcgccttcagggtgtctcgtgattccctccatgaatactttacggtgcgggcgcgacagggagtgagtgatgctcaggggctgtcaaagtgactgcgttcatcagttttacactggggctgctacataatattttcatttgaacgaagaacttcaaaaagcacaggactagatgatctctgttccttttggctctaatatgctacaactgtaggccaattatcactttaccaattaagagttaggccagataagtgaaatttaacttaagggcacacagctaataagtaataggcctaaactggatttccttattccaaatcctgtcttttccccactattccattagaccccacaaatgttagtnnnnnnnnnnnnnnnnnnnnnttttaatcactgtaaccgggtgcatttttttaaggcaaaatttctcccttatctactgtgatgacttcagaagatacaatggtcccaggggccaagtagaaagcatttttaaagattaatctgaattaagctttatcagtgtactctttatctgtgttactagtgcctggtatgtagtaggtgctcaataaatgcatattgaataactataaa

SEQ ID NO: 85441 - DNA, 411 bp, Homo Sapiens
tttttttcactttataaatgttatcttttatggttactattatttaataaaggacactaaaacattggcaaaatgccccagcaaaacaaaagtcaaccaaaaaactaacaaccctgcattctaggtaattaagggggctcgattttcttaattaattactatggaccaaaacattgtaagtactttgcatatattacctcactgaatcctcacaataagccttatcttcaccatttatctatcatttcagagaaaaaacttcaacctacctcatttttaatctaaatatttcttccattcagtatgttttccaatcaatcacttgcttcattcccaacacttttctttttcaaaaccgtcctaaaaatcaatacccattttagataaataaaaacacaaagatgaataaaa

SEQ ID NO: 85442 - DNA, 471 bp, Homo Sapiens
  misc_feature (43)..(57): n is a, c, g, or t
gggtagctctctacatcttgaattggaagctggaataaagagnnnnnnnnnnnnnnnaccctcatcgaatgctgcttactttgtcaaaagactggctatgaccaaggtgaggatatttctggaaaactgggcaaaaagggaaagcccacagtattcttccttggcagtcaaccacaggtttactttacaatgatgtattaaaaacttgcagcttgaaaaatggaatgcaaataaaaggttctctttgggtttgtcttaatggagttaaactggagcagcctataaaacatttttagggtgatgtcctctgggtccttctgttctgcacacccactcagtcttctctcccagccccttgactgcacacacccctctttgcctgaagatctcctgacttgtcgccagccatagaggctcgaaagctctggttgtgaagcataacgcaatgcatagacctgtcagccataaaaa

SEQ ID NO: 85443 - DNA, 1583 bp, Homo Sapiens
  misc_feature (70)..(70): n is a, c, g, or t
  misc_feature (79)..(79): n is a, c, g, or t
cgaacggcagtactataacggtgttaaggtagcgaggcctgggtggcgaattcgacacgagggtccaggntgagaaatnggttccgaactcaaaggaacccagtgccgggccacagccgggtcacgtggccggcggccccccatgacgtgctggctgcggggcgtcacggcgacgttcgggcgacctgccgagtggccaggctacctcagtcacctgtgtggtcgcagtgctgccatggacctgggacccatgcgcaagagttaccgcggggaccgagaggcatttgaggagactcatctgacctcccttgacccagtgaaacagtttgctgcctggtttgaggaggctgttcagtgtcctgacataggggaagccaatgccatgtgtctggctacctgcaccagagatggaaaaccctctgctcgcatgttgctgctgaagggcttcgggaaagatggcttccgcttcttcactaacttcgagagtcgaaaaggaaaagagctggactctaatccctttgcttcccttgtcttctactgggagccacttaaccgtcaggtgcgtgtggaaggccctgtgaagaaactgcctgaggaggaggctgagtgctacttccactcccgccccaagagcagccagatcggggctgtggtcagccaccagagttctgtgatccctgatcgggagtatctgagaaagaaaaatgaggaactggaacagctctaccaggatcaagaggtgcccaagccaaaatcctggggtggctatgtcctgtaccctcaggtgatggagttctggcaaggtcaaaccaaccgcctgcatgaccggatagtctttcggcggggcctacccacaggagattcccctttggggcccatgacccaccgcggggaggaagactggctctatgagagacttgcaccttaactctgggacctgctggcccagagtggagctagggctaggtgtcaagagagggtgtgggattgggacccaggcccttctttctaaactcaacccatttccctccctaccccttatcttcaggactcttcagagctaatcctctaagttctctgtactcagttggttctcagttagctggtcaagtggagtgtaatggtggcgtagagaatcacaaatggaaaataattccataattatttttttgaccttgcctatgattgattaggatagctccctctaggggtagcagccggtgtgactccctttctggtgacagacagggccccagcagccctgtctgttaccatgtgagtcatactggccaaagcttagtcctagcatatgcacctgagccaacctggccaatcagattgttttgtcaataatttgaaatttgaactggagagatccagaaccttgggagtcattaaagccaagtcattcatagcagccaggaaacaataggaaccaaaagcctctgcctgctgctattgcaattcccaggatctctccttccctggatccctccctcccaggtctgggctgtgcagttcctccccctgccttaaaacaccccactatctctgtacctcgtgccgaattcgccacccaggcc

SEQ ID NO: 85444 - DNA, 463 bp, Homo Sapiens
  misc_feature (85)..(85): n is a, c, g, or t
  misc_feature (155)..(155): n is a, c, g, or t
tattagttcgttttcatgcggctgataaagacatacccaagactggataatttatagagaaaaagaggtttaatggacctgcagntaaatgtggctagggaggcctcacaatcatggcagaagttgaaaggcatatcttacgtggcagccggcangagagaatgagaaaaaatactgggccaagcaaaaagggaaaaccccttataaaaccatcagatctcgtaaagacttattcactaccacaagaacagtatgggggaaactgcccccatgattcaattatctcccactgggtccctcccataacatgtgggaattatgggagctacaattcaagatgagatttgggtggggacacagccaaaccatatcagcatattcctacagtgtaaaagtactcagaagtaagaaagaaacaacctctgatatataataatgtgaatggttctcaaaaattttatgt

SEQ ID NO: 85445 - DNA, 491 bp, Homo Sapiens
taggagtctagagatccggcgacatttaattcccatataatgtacaaaggtctgtataagtctgttctcatgctgctaataaagacatagacatgactgggtaatttataaaggaaagaggcttaatggactcacagatccacatgactagggaggcctcacgatcatggtagaaggcaaagtagaagcaattttactgtgttacatggcagtaagcaagagggcgtgtgcaggggaactccacctttataaatctgatctcacatcagatcttgtgagacttattcactatcacaagaacagcacaggaaagacctgcccccatgattcaattacctcccactgggtccctcccatgacacgtggaattatgggagctacaattcaagatgagatttgggtggggacacagccaaacggtatcaggttccaattgctctgtatcctcaccaacacttatttatcttcctcattatcgccatcctactagt

SEQ ID NO: 85446 - DNA, 569 bp, Homo Sapiens
gagacaagagtttctgtagtctgggtggaacgctatgatgatatagaaaactttcccctctcagagctgatgacagagatcagtactggtgtggaaactactgcaaatagtagcacttcactgagatctacaactcttgaaaaagaagttcctgtcatcttcatccaccctttaaacactggattattccggataaaaattcaaggagccactggaaaatttaatatggtcatccctcttgtggatgggatgattgtcagcaggcgagctcttggctttctggtgaggcagactgtaattaacatttgtagaagaaagagactggaaagtgactcctacagtcccccccatgtccgccggaaacagaaaatcaccgacattgtcaacaagtaccggaacaagcagctggagccagagttttatacttcacttttccaggaggttggactcaagaactgcagttcttagaccactgaatttctaagactgttgaactccagtttgggaactataacacagcagaacagtttgataggtgatcactgtaaaaataaaaacaaatcactccc

SEQ ID NO: 85447 - DNA, 909 bp, Homo Sapiens
cagtcgacggtaccggacatatgcccgggaattcggccattacggccggggtggctgtgctgcctcctctgcttttaatcttctgtggatatttctccgatttcccccaaaagcccacagatcctgggggaagccaccccattcggccaccgatcatggaagaaagtattactttttatttaccaaacattttaaagatgttggaagatccatatgctgcctggaggctgttgtttctagggacacaagtatccagcctatattgttacaattttttttcaagaactgccgtcttctttgcctgcactaatggaacatcatcttcagcgggctatttcagcacagcaggtgtatggcgagaagagggataatatggttataccggtcccagaggcagaaagtaatattgcttactatgagtctatatatcctggggaatttaagatgccaaagcagctcattcacatacagccttttagtttggatgctgaacagcctgattatgatttggattctgaagatgaagtatttgtgaataaactgaaaaagaaaatggacatctgcccattgcaatttgaggagatgattgaccgcctagaaaaaggcagtggtcagcagccagtcagtctgcaggaagccaaactactgctaaaagaagatgatgaactaattagagaagtttatgaatattggattaaaaagagaaaaaactgtcgagggccatctcttattccatcagtaaaacaagagaagcgagatggttccagcacaaatgatccttatgtggcttttagaaggcgtactgaacaaatgcagactcgaaaaaatcgcaaaaatgatgaagcctcttacgaaaaaatgcttaagctgcgacgagatctaagtcgagctgttactattctagagatg

SEQ ID NO: 85448 - DNA, 443 bp, Homo Sapiens
  misc_feature (388)..(388): n is a, c, g, or t
tatttgataggcatgctttcaatctcgtaactccctatgaggttatgttttacagatgaaaaagggaaaaggaagatactcatcagtggctagcttccttccatcaccgaaccctcaagtccctgttccctttttgtctttgtagaagctggtggcagggatatactttctgagctctggtttaaaactctgagttttgggccacagatcccctctagctgactcttcttttttgacatgaatgagataaaaagttgttcctgggagatagtttcagcatggctacagtagtcagagaaacgtgcatcttttccagtgaaggaacaaagctgatttctttgcactggggcatagtgggggtgtgggaagggggggctgagtgatgggnataggggtcactactgagtcatatggcaggaaaaagatgaaaagattagttaccc

SEQ ID NO: 85449 - DNA, 459 bp, Homo Sapiens
agccccgggaggtggctcactctgtacaggtcttcggaggccgtgtttgtatctaactgtgactgggctgaagcatgatgtttgcctaatggttcgtagcatggtttttatttcttacgcattcttggcacacagtgtagctatcctcctgacgagcaacccgtctgcgtacctaagtgtggctccccgtgggtcagcgtcctggtagcatggatccagtctgaaaggtgaggacaacgtggaaactcatgagctgagcctgcccgctgggacacgtctccttcccgcgtcaccttctggtttagggagccgtcaggtccctaaacgttccctacaactttttctgaaattgtgcagaaaaacagatctcattaaaagaaaaaaagaaacaacttgtaggaagacagagaggtgctatgggtacaatttttaataaaaacattattttgttccttaaaa

SEQ ID NO: 85450 - DNA, 966 bp, Homo Sapiens
atgtgtatactctacgctactgccagccccgggaggtggtggtgcccttgactgtggagctcatgggcaccgtggccaaacagctggtgcccagctgcgtgactgtgcagcgctgtggtggctgctgccctgacgatggcctggagtgtgtgcccactgggcagcaccaagtccggatgcagatcctcatgatccggtacccgagcagtcagctgggggagatgtccctggaagaacacagccagtgtgaatgcagacctaaaaaaaaggacagtgctgtgaagccagacagggctgccactccccaccaccgtccccagccccgttctgttccgggctgggactctgcccccggagcaccctccccagctgacatcacccatcccactccagccccaggcccctctgcccacgctgcacccagcaccaccagcgccctgacccccggacctgccgctgccgctgccgacgccgcagcttcctccgttgccaagggcggggcttagagctcaacccagacacctgcaggtgccggaagctgcgaaggtgacacatggcttttcagactcagcagggtgacttgcctcagaggctatatcccagtgggggaacaaagaggagcctggtaaaaaacagccaagcccccaagacctcagcccaggcagaagctgctctaggacctgggcctctcagagggctcttctgccatcccttgtctccctgaggccatcatcaaacaggacagagttggaagaggagactgggaggcagcaagaggggtcacataccagctcaggggagaatggagtactgtctcagtttctaaccactctgtgcaagtaagcatcttacaactggctcttcctcccctcactaagaagacccaaacctctgcataatgggatttgggctttggtacaagaactgtgacccccaaccctgataaaagagatggaaggaaaaaaa

SEQ ID NO: 85451 - DNA, 753 bp, Homo Sapiens
  misc_feature (466)..(497): n is a, c, g, or t
cagtcgacggtaccggacatatgcccgggaattcggccattacggccggggacacatggcttttcagactcagcagggtgacttgcctcagaggctatatcccagtgggggaacaaagaggagcctggtaaaaaacagccaagcccccaagacctcagcccaggcagaagctgctctaggacctgggcctctcagagggttcttctgccatcccttgtctccctgaggccatcatcaaacaggacagagttggaagaggagactgggaggcagcaagaggggtcacataccagctcaggggagaatggagtactgtctcagtttctaaccactctgtgcaagtaagcatcttacaactggctcttcctcccctcactaagaagacccaaacctctgcataatgggattggggcttgggtacaagaactgtgacccccaaccctgataaaagagatggaagaccacnnnnnnnnnnnnnnnnnnnnnnnnnnnnnnnntgtgttggcgccgcccgcagcccctaggaaaaggccgttttcagagacccatccgcttggggcgcgcaggcggccccagtcgtgacgtcgaccggcgtccatgcgcggttcaccagagagaaatccggggccagaacagcggcggggattcccccaaataaaaaggcgcgcgggaaacgacgtgttcggaaaaactccagagagagctcggagccacgagcgatccaccggggagccaagggagccgaataatgcg

SEQ ID NO: 85452 - DNA, 486 bp, Homo Sapiens
tttcaagtatctgaaataaaacactgtgctgctgagttcatctcaaacattcttgaaagcagggcaccagtataagttaactgtattcctgtgggttaggccgtgaatgaatcatttcttttatacaatattcttttacaactaatagagataggaggccccaaggcaagaagtttggcaggtttacagaaaatttggtaatttatttgttatataccttaatttttaaaaacccatttttattgtggtgtttggttcacatatcaactgtttaagccataattttagccaatgaatttaaatattcagtataactatttgaggtttactagatgcatttattaataaattatttgctgaaaccaaaacaagtcattgggggtgtgggaataaaatcaacctttgcttgtaattaaagttgctgctatttctgtaatgtgtatttttctccccttggtaaagggcaataaaaccattacaaaaaaa

SEQ ID NO: 85453 - DNA, 876 bp, Homo Sapiens
ggggggaagggccccggaggcgggcacttggggggaaagttgagacgtgattaccgggttgggcgggccccatctgggaggggtttgtgggtgaactcggggtccaccgcccgctgaggagatggatgaggatgggcttcctctcatggggtcaggcatagacctgaccaaggtgccagctattcaacagaaaagaacggtggcttttctaaaccaatttgtggtgcacactgtacagttcctcaaccgcttttctacagtttgtgaggagaaactggcagacctttcacttcgtatccaacaaattgaaacaactctcaatattttagatgcaaagttgtcatctatcccaggcctagatgatgtcacagttgaagtatctcctttaaatgtcaccagtgtcacaaatggagcacatcctgaagccacttcagagcaaccacagcagaacagtacacaagactctggactacaggaaagtgaagtatcagcagaaaatatcttaactgtagccaaggatccaagatatgccagatatctcaaaatggttcaagtgggtgtaccagtgatggcaataagaaacaaaatgatatcagaaggactagacccagatcttcttgagaggccagatgctccagtgcctgatggcgaaagtgagaaaactgtagaagaaagttcagatagcgaatcttcttttagtgattaagcttaattttgataagaattacatatgcatgcataggggtacatttacattctgtaagagattgagcctgaactctcttagtcataaaaacatcaaatggccacatgtccactaccaagcttcttctatgttaaaaaaataataataaagcagttttaacctgccaaaaa

SEQ ID NO: 85454 - DNA, 409 bp, Homo Sapiens
gtttcaggatacaaaattaatttgcataaatcagcagctcttctatacaccaacagtgaccaagctgagaatcaaatcaagaacttaactccttttgcaatagctgcaaaaaaccccaaaatactttgtacctaaccaaggaggtgaaagacctctacaaggaaaactacaaaacactgctgaaacaaatcatagacaacacaaacaaatggaaacacatcccatgctcatggatgggtaaaatcaatattgtgaaaatgaccatactgccaaaagcaatctacaaattcagtgcagttcccatcaaaataccaccatcattcttcacagaactagaaaaaccaatcctaaaatccatatgaaacctaaaagagcccgcatagccaaagcaagactaagcaaaaataaa

SEQ ID NO: 85455 - DNA, 541 bp, Homo Sapiens
  misc_feature (251)..(251): n is a, c, g, or t
aaaacatttgaggcccactgaaggcttcccccacacacaggtgtctctgcagctggcctccggagccttcctgctcaacgaagccttctgtgaggccacgcacatccccatggagaagctcaagtggacgtcccccttcacctgccatcgagtgtccctcaccacccgcccgtctgagtccaagaccccgagtccccagctgtgcaccagctccccgcctaggcacccgtcctgtgacagcttctccctgngagcctctggccaagggcaagctgggcctggagccgagggcagtggtggagcacactgggaagctgggggccacggtggtggggctggcatggctggagcacagttcggcctcctacttcactgagtgggagttggtggctgccaaggccaactcatggctggagcagcaggaagtacccgagggccgcacgcagggcacactcaaggccgctgcccgccagctgtttgtgcttctgcggcactgggatgagaatctcgagttcaatatgctctgctataacccgaaaaa

SEQ ID NO: 85456 - DNA, 674 bp, Homo Sapiens
tcttgtcatgcctcaggggtcttgtcatttgtcagctgttccctgtcggtcatgtcctcctgaggaggtctggctctgtcaaagaatccacacttccataaagctaaggttaaaatggcgagaaccaacaatccaagaagtattgctagtattattacccataatgggattgagaaggaaacattcggagttgcccaaataactgatgtcttaattgctatgcttccttctgggagttttgctggctgatctgtataaggcatcttcttaacttcaaaggacaccagggatgcaagagcatagggatcattttttctctggaggaaggtgtgggcccataatcgtgacctgactttcaggactgcgctttctcctccttcgagtcgtcccactgcacaggagatttgtaaacactcgatatttgtacaattcagtatttttgcagggctctgtctgtggaattcgaccacatgtacatccctctgcctgacaagatgaggaatagtagagtttcgcaaaaaggcgctgagctcaagggtgtcctctggggaggcagcaggctttatatcctgtggattgatattaggatttggttgcactgcagacgtcccagagtttgaatatggaaatatagagaagaaattatccccggcagagaaaggccagcccacttc

SEQ ID NO: 85457 - DNA, 447 bp, Homo Sapiens
tttaagccaaggaaacctcagaagaaatcttcctaggaagctcaaagtaggaagggaggatgggaaagaaaggaacagctctacttcaatacaaggttacagagcccaaccgcaagttaccaaagaacaacagcattccatgagagatatattccttggcaatcaatagacatgccccccaagagagcttccaggaataacctggaatgcctcatgaggaggtaggcagattaccaagggtacaagtggctctggacacacgggtttaagactttgaacctctgtaattgtacttatcatgtctgaggcttatttcagacaaacagaatatgtaatcattttaaggaaagatacaataaacttacatttagaatgtctatcacagagggcagatgcatcatgtcacatagcagaatagttcatttactgctgctgtatacaatgtgt

SEQ ID NO: 85458 - DNA, 437 bp, Homo Sapiens
gctctccgtgacgctggcctcgggctcccgctgtttctccttcctgtctggggccgcccttacggggcagggctcagtcctgacgcttgccacctgctcctacccggccaggatggctgagggcggagtctattttacgcgtcgcccaatgacaggacctggaatgtactggctggggtaggcctcagtgagtcggccggtcagggcccgcagcctcgccccatccactccggtgcctccatttagctggccaatcagcccaggaggggcaggttccccggggccggcgctaggatttgcactaatgttcctctccccgcgggtgggggcggggaaattcatatcccctgttcgtctcatgcgcgtcctccgtccccaatctaaaaagcaattgaaaaggtctatgcaataaaggcagtcgcttcattcctctcaaa

SEQ ID NO: 85459 - DNA, 1478 bp, Homo Sapiens
aagctagtacgaggcgggggtaaatcggcacgagggtagatgtggatatccagagcgagcgcttcagggccttgggcagtgcccgcttcacactgggcacggtgctgggcctcgccacactgcacacctaccgcggacgcctctcctacctccccgccactgtggaacctgcctcgcccacccctgcccatagcctgcctcgtgccaagtcggagctgaccctaaccccagacccagccccgcccatggcccactcacccctgcatcgttctgtgtctgacctgcctcttcccctgccccagcctgccctggcctctcctggctcgccagaacccctgcccatcctgtccctcaacggtgggggcccagagctggctggggactggggtggggctggggatgctccgctgtccccggacccactgctgtcttcacctcctggctctcccaaggcagctctacactcacccgtctccgaaggggcccccgtaattcccccatcctctgggctcccacttcccacccctgatgcccgggtaggggcctccacctgcggcccgccgacacctgctgcctccgctgggcaccccgctgaccccagactgggtgacgctggagggggactttgtgctcatgttggccatctcgcccagccacctaggcgctgacctggtggcagctccgcatgcgcgcttcgacgacggcctggtgcacctgtgctgggtgcgtagcggcatctcgcgggctgcgctgctgcgccttttcttggccatggagcgtggtagccacttcagcctgggctgtccgcagctgggctacgccgcggcccgtgccttccgcctagagccgctcacaccacgcggcgtgctcacagtggacggggagcaggtggagtatgggccgctacaggcacagatgcaccctggcatcggtacactgctcactgggcctcctggctgcccggggcgggagccctgaaactaaacaagcttggtacccgccgggggcggggcctacattccaatggggcggagcctgagctagggggtgtggcctggctgctagagttgtggtggcaggggccctggccccgtctcaggattgcgctcgctttcatgggaccagacgtgatgctggaaggtgggcgtcgtcacggttaaagagaaatgggctcgtcccgagggtagtgcctgatcaatgagggcggggcctggcgtctgatctggggccgcccttacggggcagggctcagtcctgacgcttgccacctgctccctacccgccaggatggctgagggcggagtctattttacgcgtcccccaatgacaggacctggaatgtactggcttggggtaagcctcagtgagtccgcccggccagggccccccagccttcccccatccactccgggggcctcccattaagttggccaaacacgcccatgaaggggcccggttcccccggggccccgccctaa

SEQ ID NO: 85460 - DNA, 1093 bp, Homo Sapiens
gaaatgaggatcacagtaccttgatgtagcttgtctccaaagaacatagacagaagatgctaattatactggaatcgcagatgcttgtgacttcctctttgtgatgtcttatgatgaacaaagtcagatctggtcagaatgtattgcagcagccaatgctccctataatcagacattaactggatataatgactacatcaagatgagcattaatcctaagaaacttgtaatgggtgttccttggtatggttatgattatacctgcctgaatctgtctgaggatcatgtttgtaccattgcaaaagtccctttccggggggctccttgtagtgacgctgcaggacgtcaggtgccctacaaaacgatcatgaagcaaataaatagttctatttctggaaacctatgggataaagatcagcgggctccttattataactataaagatcctgctggccactttcatcaagtatggtatgataaccctcagagtatttctttaaaggcaacatatatacaaaactatcgcttacggggcattggcatgtggaatgcaaactgtcttgactactctggagatgctgtagccaaacagcaaactgaagaaatgtgggaagtcttaaagccaaagctgttacagagatgaacatcttttgtcaaaccattaagagttagaaagatgatctgtatcaacagatctagtttcttgcatttttattatgttgctatatacttttgttatccgtataccaaaagaaaaagaataaataaatgttttgattgtttgaatttgaaaaatacacacgaatgtcctcagtatccaggaacataaaggcaagaagcaagtcaacttacctattaaatattcctctattagatgtttcaacactataatttaatggggaaaaattgcttccagaattttattatgccatatttcccttcattatagtaaaatatatgctcacgaatcaatgctgatttttaaaatatgtataatctgaagtggaaattgtttgcttagagtttttaaaaacctagtctctgaaaagcagtttgtgctatactttcaccccacggtccataattaataact

SEQ ID NO: 85461 - DNA, 1353 bp, Homo Sapiens
ggaccggtccggaattcccgggatccggccgcagcttcgacgctggcgcctcgtctctagcccgccgagcggcgtcccgggtctagcgctgctggcgctgctggcgctgctggcgctgcggctcgcggccgggaccgactgcccatgcccggagcctgagctctgccgcccgattcgccaccatccagatttcgaggtcttcgtgtttgatgttggacagaaaacttggaaatcttatgattggtcacagattacaactgtggcaacatttggaaaatatgactcagaacttatgtgcatacgcatcattcaaaaggagccagagtagtacttaaaggagatgtatccttaaaggatatcattgatcctgctttcagagcatcctggatagctcaaaaacttaatttggccaaaacacaatcatatggatggaattcaatatagatatagagcaagaagtaaatggtttatcacctgaatatgatgcattaactgctttagtcaaagaaactacagactctttccatcgtgaaatagagggatcacaggtaacctttgatgtagcttggtctccaaagaacatagacagaagatgctataattatactggaatcgcagatgcttgtgacttcctctttgtgatgtcttatgatgaacaaagtcagatctggtcagaatgtattgcagcagccaatgctccctataatcagacattaactggatataatgactacatcaagatgagcattaatcctaagaaacttgtaatgggtgttccttggtatggttatgattatacctgcctgaatctgtctgaggatcatgtttgtaccattgcaaaagtccctttccggggggctccttgtagtgacgctgcaggacgtcaggtgccctacaaaacgatcatgaagcaaataaatagttctatttctggaaacctatgggataaagatcagcgggctccttattataactataaagtttcccaggcagctgcagacttgaaacagttctgtctgcagaatgctcaacatgaccctctgctgactggagtatcttcaagtacaaatcccttcagaccccagaaagtctgttcctttttgtagtaaaatgaatctttcaaaggtttcccaaaccactccttatgatccagtgaatattcaagagagctacatttgaagcctgtacaaaagcttatccctgtaacacatgtgccataatatacaaacttctactttcgtcagtccttaacatctacctctctgaattttcatgaatttctatttcacaagggtaattgttttatatacactggcagcagcatacaataaaacttagtatgaaactttaaaa

SEQ ID NO: 85462 - DNA, 567 bp, Homo Sapiens
tggtaccgctccggaattcccgggatatcgtcgacccacgcgtccggtctggccccgccgacccacggcccacgacccaccggagcccacgaatcggcccggccgtcgcgtgcaccatgtctggctcctccagcgtcgccgctatgaagaaagtggttcaacagctccggctggaggccggactcaaccgcgtaaaagtttcccaggcagctgcagacttgaaacagttctgtctgcagaatgctcaacatgaccctctgctgactggagtatcttcaagtacaaatcccttcagaccccagaaagtctgttcctttttgtagtaaaatgaatctttcaaaggtttcccaaaccactccttatgatccagtgaatattcaagagagctacatttgaagcctgtacaaaagcttatccctgtaacacatgtgccataatatacaaacttctactttcgtcagtccttaacatctacctctctgaattttcatgaatttctatttcacaagggtaattgttttatatacactggcagcagcatacaataaaacttagtatgaaacttta

SEQ ID NO: 85463 - DNA, 876 bp, Homo Sapiens
gggagagacaaagttcggagccccgcccccgccgcgcgccgctgagttgtctggccccgccgacccacggcccacgacccaccgacccacgaatcggcccggccgtcgcgtgcaccatgtctggctcctccagcgtcgccgctatgaagaaagtggttcaacagctccggctggaggccggactcaaccgcgtaaaagtttcccaggcagctgcagacttgaaacagttctgtctgcagaatgctcaacatgaccctctgctgactggagtatcttcaagtacaaatcccttcagaccccagaaagtctgttcctttttgtagtaaaatgaatctttcaaaggtttcccaaaccactccttatgatccagtgaatattcaagagagctacatttgaagcctgtacaaaagcttatccctgtaacacatgtgccataatatacaaacttctactttcgtcagtccttaacatctacctctctgaattttcatgaatttctatttcacaagggtaattgttttatatacactggcagcagcatacaataaaacttagtatgaaactttaaaaaaacaagacacagaaggaaaacaaaacttgtcgggccgccttcggccccccaaaaagctttcttaaacccattccgtttgggcgccgcggggccccaggagaggaaaagtggaacattgggcccttagcttgttttccctagggagaacccctgggcccatggacctagggggccttgggaatcccccaccccaaatcaacaaaaacggcccccgggggggagacaacccggaacgcggttttcttgaagaacacaaattcccagagatggggggcagacttcctgcgagggggctcccctctaat

SEQ ID NO: 85464 - DNA, 409 bp, Homo Sapiens
  misc_feature (89)..(89): n is a, c, g, or t
  misc_feature (92)..(101): n is a, c, g, or t
atgagccaccatacccggccaggaactcagttcttaataagacttgtgttgtttttgattttttcccaagtctggttgatccttgtgtntgnnnnnnnnnnaaatgtgtattggtctgttcagctattttgcagggagttgcattcttaaaaaacttaaccatatcaaaaattgtgtttaaaggaggattattcagattggcaagcttttactaggaagagtgtaaatgctgacgtatttaggtaactctaaatactgagcaactttattctaaccacaaaatagatagcctttcttttgtcttcactttcactatcattagcacagtgtttaataccgtttcttcatctataacacaagtataatgatatagaaagccactcaaataaagcagacatgttggttgcgc

SEQ ID NO: 85465 - DNA, 1007 bp, Homo Sapiens
  misc_feature (202)..(280): n is a, c, g, or t
tttctgtcctcgccctggggttgagctgcgttcccggcgtttctgggttccctctttgttgcccgtttctgttcccttgtgctcgtgctttcttctggcgcgctccctcgcttgtcttaacctttgtgtggccgggggtccagagtctttgtctgttgtttttcttttgccatttacgtaaacacattttccattttttcannnnnnnnnnnnnnnnnnnnnnnnnnnnnnnnnnnnnnnnnnnnnnnnnnnnnnnnnnnnnnnnnnnnnnnnnnnnnnnagccattaaaagagtttagatttaattagaagtttatttttggcaaagtgatctttagaaagatcactctggcaatggtatggaggacatacaaaaatcaagagaagctatggataaagaagccaggtaagagcattttcaaactagagaagaaaaggaaaataaaggaaaatgggagctagattaagattagttaagagatgtaagtactgtgacatggtaatatggaggtaaggaagatgggtttaggataaatcccacctttccgggctttggcttactgatggatggtaatactacaaggagcatgtcagtgttgtgactattctagaaatgtctgccctaatagagtttgaatagctgagtatagtaccttacgatgttgctatggaatgaactgtgttgcccagaattcctatgttgaagccctaactccagtgtgactgattttggaaacaggtcttttaggaaacagttaacgttaaatgaggatataagggtggggttctgatccactagaattggtggtcttctagaaagaggaagagaggaaaatctgtctcactgtctatgtgcaagcactgaggaaaggccacatgagcacacaagaaggtagccacctgcgagccacagacaaaccctcatcagaagcagaaccctaccagaccttgatcttacccggccgtaatggccgaattcccgggcatatgtccggtaccgtcgactg

SEQ ID NO: 85466 - DNA, 906 bp, Homo Sapiens
  misc_feature (21)..(21): n is a, c, g, or t
  misc_feature (44)..(77): n is a, c, g, or t
ccctcactgaaagggaataangcttgcggccgcatacgcggccnnnnnnnnnnnnnnnnnnnnnnnnnnnnnnnnnnaggctgataaaatctccacctggtcattcacttgtgtgtgacttgatacccgttaacttgccccttagtatcagctgttacttgacacaaatgtgtgtgttattcagaggttttcagtctggacactccataggtgagtgtcgtgtcttcgtgagacagcacagttgtctcatgttgtgcatagttcatgtttcctcaccacccagtcctttctcctgctcatcaaaatcagcatacacatttttgactgtacacactataaatggcatcaaatttggatatttttcttaattatgacatgcaaagtaatgtgagtcctgccagtattctggtggataaggtcttttgagtatttggttgcttgtcacaacattctccaagcagtgatatttctaaagaggagatacatgttgaaaacggttttaatttacacttccatttcctgattacatttggaaatactttgtgtaaaccatcccccttccacctccatttgtctgttgaaagattttaagttggaaacagttcctgtctgaaaactcttctgagaaccacaaaccttgtgtatggattcggcatggagccctcagctggcggctctgggtgctgacggccgctggagaggtgggctcccctcgtgcactttattgcctgggcagttttgcttgatcttttgtgactttgagccttttaagtagtttgaatgataagacttaaaatgtttcataattatgttttatgtaacagactttgacattatttaaacgagcatgtgtaatgtaacttttctctttgaatcatataaaacttgattttacattgaaaaaaa

SEQ ID NO: 85467 - DNA, 144 bp, Homo Sapiens
tgtgccactggctccagcctgggtgacagaactagaccctgtctctaaaaaaagaagaagaggtgtgtatccttctaaatgataaaacagatcactcccctgcttacataaaactttccggtggctggccaggcacgtgtgtca

SEQ ID NO: 85468 - DNA, 551 bp, Homo Sapiens
  misc_feature (67)..(76): n is a, c, g, or t
ccacatattaaaaatggcaggctttttataacaatagttaaagtaataaaaacatacaaaactttgnnnnnnnnnnaatatatatacacagtacaaggctgaagcacctttgacttttctctcaaaatttacgtctgtatgaaaacccaacccactgtagtaacaatctggtgggtgtgaagctgtgtatacacagagctctgtacatgctccccacggagtaataaaaagctaccttcagtttgtgaattggttttatctttaggtaagaaagagcttttccagggaaaagcctttgggttgctttgtgtgctcctaggacttgttgctttgaagaaaattttgcaggaaagtaaaatgaaacaaataagccctttttactgacaatgcacccaaccttttcagctgaagcaagtttcactcctggggaggaatgagactggccccatcgctgcggcaaaagcaaactgggcttgaggcatagtaacatggcaacacaagaaagaacagaaccggtttgatccactcatatgcacagggggctgttaatg

SEQ ID NO: 85469 - DNA, 532 bp, Homo Sapiens
catgttctatattctttattctcagtaacttttaaaagggaagttatttatattttgtgtataatgtgctttatttgcaaatcacccactcctttacaaccatactttatatatgtacatacattcatactgtagaaaccagctcatgtgtacctcatatcccatccttaagagaagaaatgttataaagtagaactaaatataaattttcagaattaatgcattcaaagtaatatatcaaatccaggactttgttaacttcaggtaaaaacttcattagggtaatatcatctcaattttttcaaatgaaaggattctctaattagaaatttatatgtcagagctgttataaatttatcaactgtcaaatatgttctggacagctaaatcatttgagatttttggttttttgatttctattccctaacttgtgaagacaatgaaaaatcaggcagaaatatttagtatctagtcagtatctgtagctacactgtataactgttcttcaataaaatggttcatattttataaa

SEQ ID NO: 85470 - DNA, 413 bp, Homo Sapiens
ttagctcatcagctattgttagtgttagtgtattttatgtgtggctgaagacaattttcttcttccagtgtggcccagggaaaccaaaagattggacacacctgctctagccaacgttcattccagccctcctgtgtcaatctgctcttcaactcagcctttcaacacactcaggtcctgcttacctgggcagtttgtggcaggagctgtggaggctagggcatacccccttccaccctctccaaagcattacttttactattaatataataactttggaggtggcaaagagaaatttatgttagagcaaaattacaaaaactctcatagatctgatactgatgacttgtacacttcagatcattatcagtgatgtagaatacaacgtattctcagctagcacgttctgctac

SEQ ID NO: 85471 - DNA, 316 bp, Homo Sapiens
agaaaatttgctagcagcagtcttctttcacagtgccttgggaaaagacatttcaagaggaaacttgataattttaaactcttttccccctttaccgtcatctatcctctatctgtatcaagctcactgcggatcctgctgtaaaactggtgggtagctgggctgtccattaccaccacagctacatcttctgtttctttgaatagaaagcaccacagtgttttgcacttgcctccagtaaagtgccctgggaagggagctgggcagtgtttgtggacgagagactgtaacgatggctaataaaagctgcgggttt

SEQ ID NO: 85472 - DNA, 348 bp, Homo Sapiens
gctgagccaaagcctaccatgtacctaacctttattttctttcccgaacataccaggctgtctcctcataacttccaagcatgcacttaaaactccacatgaatacaaggttcatgggacttggtattcatagaaagggaggcagaaagctggtctgttcctgataggcttgtaatttaatatcattctgttcatgtgctttggatggaagcacatctggcatatgatgctaatcagtggttcccatacccctggcttcctaattttaatgtttgctcacagcatagtagattgacatcaaatagtggccgatgatgatgaaaataaaggtcaaataagttgagccaa

SEQ ID NO: 85473 - DNA, 375 bp, Homo Sapiens
  misc_feature (55)..(119): n is a, c, g, or t
acagagtgcagtggattacaggcatgagcaccaagttctgatcaacggtactaannnnnnnnnnnnnnnnnnnnnnnnnnnnnnnnnnnnnnnnnnnnnnnnnnnnnnnnnnnnnnnnntatcactccttaagagcaacaggcagccagggaccccagctcaacacccaccgacacatgatgtctactgcgttctgaacatgcataagcatataatttgaactgcattgttagccttcaggaaaggggcaccaggagctgtgctggccaggtacctagatcatttactgttcaaaaccaacccatgagctgagctactgagctcagcctccctctctcaaggctgggaaaggaaagttcatcttcactcagatgc

SEQ ID NO: 85474 - DNA, 840 bp, Homo Sapiens
  misc_feature (216)..(236): n is a, c, g, or t
  misc_feature (752)..(752): n is a, c, g, or t
  misc_feature (785)..(785): n is a, c, g, or t
  misc_feature (794)..(794): n is a, c, g, or t
  misc_feature (820)..(820): n is a, c, g, or t
agcagtagaaataaacctaattactcataaaccatattttgaaatgagaataaatcaacagcttcattttggagccttttagagtgctagaatatctggccaaggtagactgtgaaaggtaggctcttctttaaacacggttatggttcagcagttatttgcaggtccttgggaaggcactgtgctgaaggagagcaaagagtttctttttgggcnnnnnnnnnnnnnnnnnnnnngagggggaaatatttcttgtgacagtcaagggtcttttctgattttttgttgctcatacaagcagtcccatacgagtgactttggccgataaaaacgtgtgcaacacaaatacaatcggcttcggacaagagtgcaggtccatgggcagttctccctcgggaccaccaaaatccaagtatagatttcggatgccatcatcagcagacatcttcagcctttcaaaggggtagcggtacaatatgctgctggagcctccattttcccttgagatggtgaacccattttcatagtgaatagtaagcctcacctcttggccatttaacatgcagcctagagagaattccttgatcagctcagcagcagcatggcaaccctgaacaagtatcctggtccaggatgacagatcccgatgtgtctccaccctgaagagatgcatctctaatgccctgtcgatgagcctgtcctggtagcaaatgtaagggcagatcccagggggagggggatcgacatccggnagcccagaatggaaccaacctgggtgggcacanttggggtanctggtgggcatgggtggaacccccangcattctctttggtccacgg

SEQ ID NO: 85475 - DNA, 179 bp, Homo Sapiens
gtgtgagccaccacacccatcctcgcccagttattaaataccttccctcttcaagtcctaaccttgcaggctaattcctccctggaagaagaggattccaatgctcctgagcataaaaaattcaggtccttgaatgacgtggacccattctccagctctctggtggtagaggcctgagg

SEQ ID NO: 85476 - DNA, 836 bp, Homo Sapiens
gggggaggcggacgtgagaagggtcgggccaagatggcggtgcaggtggtgcaggcggtgcaggcggttcatctcgagtctgacgctttcctcgtttgtctcaaccacgctctgagcacagagaaggaggaagtaatggggctgtgcataggggagttgaacgatgatacaaggagtgactccaaatttgcatatactggaactgaaatgcgcacagttgctgaaaaggttgatgccgtcagaattgttcacattcattctgtcatcatcttacgacgttctgataagaggaaggaccgagtagaaatttctccagagcagctgtctgcagcttcaacagaggcagagaggttggctgaactgacaggccgccccatgagagttgtgggctggtatcattcccatcctcatataactgtttggccttcacatgttgatgttcgcacacaagccatgtaccagatgatggatcaaggctttgtaggacttattttttcctgtttcatagaagataagaacacaaagactgggcgggtactctacacttgcttccaatccatacaggccccaaacagttcccagcatgacaaaattgaaaatccccttcccatattgcaccttcttgttccttatcgccaaaccgtgcccttggatccagccattagagcctggccaagaatccttgtggccagaaggaacacggacgctttatatggaggactttcactcccttaccccttttgggactctttttatcccccaaccccataaggggcccctttggttttcccagaaaactttggcccagatcacaatttccccaacgacagtcggtc

SEQ ID NO: 85477 - DNA, 1751 bp, Homo Sapiens
  misc_feature (1337)..(1367): n is a, c, g, or t
aaatgaaaactccccccgttgacaaaacaggctggtaacggtccggaattcccgggatatcgtcgacccacgcgtccgcccacgcgtccgggatgtcggaggtgcggctgccaccgctacgcgccctggacgactttgttctggggtcggcgcgtctggcggctccggatccatgcgacccgcagcgatggtgccaccgcgtcatcaacaacctcctctactaccaaaccaactaccttctctgcttcggcatcggcctcgctctcgccgggtacgtgcggccacttcatacgctcctgagcgcgctggtagtggcggtggccctcggcgtgctggtgtgggcagctgagacccgcgcagctgtgcgccgctgccgccgcagccaccctgcagcctgcctggccgcagtgcttgccgtcggcctcctggtgctctgggtcgcgggcggcgcttgcaccttcctgttcagcatcgccgggccggtgcttctgatcctggtgcacgcctcgttgcgcctgcgcaaccttaagaacaagattgagaacaagatcgagagcattggtctcaagcggacgccaatgggcctgctactagaggcactgggacaagagcaggaggctggatcctaggcccctgggatctgtacccaggacctggagaataccaccccacccccagcccataattgggacccagagccctttcccagcacttaaaacaggagcctagagccccctgcccaaacaaaacaggacatctgtgaccgccctacccccacgccagccccaaactaagatatccctcacacccagcccccattacctagggacaagagtcttccccagccttgaacctaggaccaagagccacctacatccagccccaaaactggggcttcaggccagagcatccatggccaatttcaaattgtgaacccagagacactcccatccacccttctccatgctcatccccaaactggggcctggagcaaggcactctcaaatcttgaaccctggaccaaagcttttccagaccccaccctaccttccaacccaggtcaagacattgccaaatcttgaactcagaacccaagtgttccatgcccctgtgtggatggagtcgggtatcctgactgttggacccctggtccaggtgatcccgaccctcaccagtcccatttgcctccctccagctctgcttaggcattttgcccctcaccccaatgttccacaccatcgacaaccaaggggtgaggtggggacaggcctcagcagggaatggggcgtatatgttagtgttgctgcaacaataaagcctgttgcatctctcatgcnnnnnnnnnnnnnnnnnnnnnnnnnnnnnnncaacgaaccaaccacaccagaaacaaacacaacacccagaacaaacagaagagaaaaagcaccacacacaagccccgcccaccaagcaccgccgggcacacccgcacggacgcggcaagcacgaagcgaaaaggcacggacacacgaagcacagaggcggcagacagagaggcgagaaaccgacagggcgacgcgccgcagcgagacaaccgcagagaaggcggcaccagcagacgaaagagagcgacaagcacgagcaacaaaacagcaagaagcacgcccgcagcgaacaaaccagaggagagcccaggacgaagagcaacacaaaagcagaaacacgcgcgcaaaacacacgcgagaccgccgcaaagccacggaaaacca

SEQ ID NO: 85478 - DNA, 504 bp, Homo Sapiens
gaatcaaagaatattgtgacacatgaaaattatatgatattcaaatttcagtgtccataaataaagttttgaaaacatgaatacaaacaaaaaacacctatttatgtttgacctgtggctgtctttgcactaccccagcagagttgagtagttgtagcagacaccacatgcccttgagcctaagatctagcactttacaaagtaagtttttctgttacttagagctgaaaataaaagcaatgtagagttacgcttttataagtatttcatgtttcagaaatgatgcatacagcaatttgtaggtgggtggttttttgcagtatatttattttgtgcattatatttatatgttaagagcctgagcttagaagtatttttttcaaagaaatgtgttttttacttgctaaattgtcataacatcaaaacaagaaatttcttgatggaatgtagcagtaaacatatgaaataaacattgtctaaattaagtcgaattgttcattgaaa

SEQ ID NO: 85479 - DNA, 1577 bp, Homo Sapiens
  misc_feature (1463)..(1497): n is a, c, g, or t
cattcatttattcagcatgtaaataaaattgatcctgttgagttatcataattgcagttcaactatctgccatgattattcttttcacgtatcattcattctgtacatttgtgtacattgagaagtatagcaatctatgtaaatgtaatcctcagtgaggttcctcagtgctaggtcccataggattgtcgttgcccttggtaatgaggtttctctgttcagcggcttcaatttttttctctttgtacatctagtggtgaatgatttacctcaagtgtgaatcttctagaaggcttgtaagtccagttttaacttttagagtcaagtggtagttacatgtagtttaacttttgggaaacgtcttaacattgttctgaataaacttgctaatgaggtcagggtcatggtacagactgatgcagtcaacatgatttcattgcagagtttattagtatcagcaagtttttgctttgctaaataaaagtactcaatgaacacaattctacataaattttgtacataccatctaatttataaaaatcaataaaaaaggtgttggtaaaactttttcatgccagatgctgtttacaacaatgaacatgccaataaaacattcgttcattctgttgtgttattttagtcattaaacttctgtggatgaagaatctgggttaagaatagatttgtcatctttaaatatgacattttgtaatgtgtattggatatctcatttctatgataaaggtatatttacagtaaagttctcataagagaaatgagaagctgtgttaatatctaactttggggaaccctgtcagtatttcagatccgatttttaccctttttttcttataagaaagataaaattagaaaatactgttagcaaatgtggctctgccatttgaatataatcaccgagaattccatgtcttaaaagtctcctggaatccaccaatgaagaaagaaagaatcttttctaaggtatttttctggctaatttttatttgaagaaagctatagcatttagcgaaatttgactgaagtaatgttctgagtttgcattagtgggattggtgatgttcgcagaagaaaattggaaacacttgtgatgaattgtctttcagatcacttagattttctgatgtaagaggacagctgtttggttctgatacaggcctgcttacttgggatgtagggttagtaaatggggtttctgctttaaaggactgacttgctatcgcacaaaagaggcagacttgtaaacacaatgggctttggagtttggtctgattgggtttggtttagtattcctatgagcgtaaatggtaaaattcttctgatacccactctttagactgtgccttctgctctgttctttgttttatgtttaactgctgtttctaattgcaggtcccggccgtaatggccgaattcccgggcatatgtccggtaccgtcgactgnnnnnnnnnnnnnnnnnnnnnnnnnnnnnnnnnnncggccgcttcctcgctcagctactcgctgcgctcggtcgttcgctacgaccgacctagcgccctatagtgagtctataca

SEQ ID NO: 85480 - DNA, 1509 bp, Homo Sapiens
  misc_feature (59)..(79): n is a, c, g, or t
gtgccaagctaaaattaacctcactaaagggaataagcttgcggccgcatacgcggccnnnnnnnnnnnnnnnnnnnnngaagaaagctatagcatttagcgaaatttgactgaagtaatgttctgagtttgcattagtgggattggtgatgttctcagaagaaaattggaaacacttgtgatgaattgtctttcagatcacttagattttctgatgtaagaggacagctatttggttctgatacaggcctgcttacttgggatgtagggttagtaaatggggtttctgctttaaaggactgacttgctatcgcacaaaagaggcagacttgtaaacacaatgggctttggagtttggtctgattgggtttggtttagtattcctatgagcgtaaatggtaaaattcttctgatacccactctttagactgtgccttctgctctgttctttgttttatgtttaactgctgtttctaattgcaggtgtattacagatacaaataagagtacagaaaatatatttcattatagaaaagaaaaaattaaaagcttcttgcttttcagtgcctgatagagtgaaaacacaaagttgcactttaataatttcaataaaagctaatctgtgtcagcctccctctgcttcagagagtcaggtgagcatccataacctaacaggcagagccctagcgatgtggatcaagtttcctgaccccgggggcggtggagcctcatgatctcttaacttttgaggctgaggcaggtcacatgcaacaaattgtgaccctgctcccaaaaagtcaggcaaaggttttgaagagcttttaccgtggggcagatgaacttgtgtcaaccatgcacaccctgtgagaaccaagtacctgtgtttctaaggcgggcactcaaggtgaggggtgcattctggccaaagaaacaaaagctgtggtttcaggaccatgccgtgtgtagctgatctgtacgggacgtgtatgtaaggaagagcaatcatgatagataagaacagtgtgtgaagcagccctcacactagagtgtttggtcatctcttataatgtaagggaaggtactttaaaattctgggaagatgcgatgaactcatgtcccagtcagaaaataatccaatgaaataagcattggttgccaggccacagttaggaattgtattgtgatacatctagaggccaagagagcaggagagagctaccaacttacactgtggtttaagctaaatgaccgcacagcatcatagcattgcagtgttgttactaaatctggaagtgacctgtgaatgtatggaatacaataaagtcttttattctggttcatttgctagtacttcctttttgattggatactgtagttcttcctctggattttattttgttcagcgtcaaggccctaattttgcaaatgtagtttaaaccccattacgtggactagaggatactttgaattagcaagttttttgtttgctgaataaaactattccttctt

SEQ ID NO: 85481 - DNA, 707 bp, Homo Sapiens
ctgtagcaaataatttttaagcattctcaagatgtatgatgttgggtttaacatcatatgttcacagtgttttaaataagaaataatctgtctttaatatacaggatggttctttgtttgcctgaaaagtataagaatacaatttacttttcccaaactctttttccttatttttttctttcaaataactttaattatttaatcccatactgattaaaatatgtctgtctaaagggatctactactatttgcttttaaaaaagtgttccctatttatttaggaaaaagtgaagcaagcaactgaatttatatgtaaaaataacatttagacctgtggatcaaagattattttcaaaaatgagatatcaatttggtatcagtaaaaagtgtcttttctcttagtatataaataaataaaatgcaaattaagagtgtaagcagttgtgaatcattacaagcagtctgggataactaactcctagggataaccatttctatcctgttccaaagtcttattttatagtttgaaaagcactttgcacacagttcttgtatataaaagtaaagatgtaattataggatatagtgttcctgctttgtttaataagaacctcatttaaacttgacagctatggtatttttttaatgataacttcttttctgtttattgtaaaactaagttaaaaataaaaggttaatgagaaatg

SEQ ID NO: 85482 - DNA, 1045 bp, Homo Sapiens
ctagtacgagctgggtgttgaatcggcacgaggcttttcctggacggggtcctgcggtgggtgtgtttcggcctggcctgggcaggcgcttgtgctgccaggcgccgggcccggggaggccggggtctcgggtggccgccggcccaggcgctggacggcagcaggatggggaaggcgaaggtccccgcctccaagcgcgccccgagcagccccgtggctaagccgggtcctgtcaagacgctcactcggaagaaaaacaagaagaaaaaaaggttttggaaaagcaaggcgcgggaagtaagcaagaagccagcaagcggccccggtgctgtggtgcgacctccaaaggcaccagaagacttttctcaaaactggaaggcgctgcaagagtggctgctgaaacaaaaatctcaggccccagaaaagcctcttgtcatctctcagatgggttccaaaaagaagcccaaaattatccagcaaaacaaaaaagagacctcgcctcaagtgaagggagaggagatgccggcaggaaaagaccaggaggccagcaggggctctgttccttcaggttccaagatggacaggagggcgccagtacctcgcaccaaggccagtggaacagagcacaataagaaaggaaccaaggaaaggacaaatggtgatattgttccagaacgaggggacatcgagcataagaagcggaaagctaaggaggcagccccagccccacccaccgaggaagacatctggtttgacgacgtggacccagcggatatcgaagctgccataggtccagaggcggccaagatagcgaggaaacagttgggtcagagcgagggcagcgtcagcctcagcctcgtgaaagagcaggccttcggcggcctgacaagagccttagccttggactgtgagatggtgggcgtgggccctaagggggaggagagcatggccgcccgtgtgtccatcgtgaaccagtatgggaagtgcgtttatgacaagtacgtcaaaccaaccgagtccgtgacggactataggacagcggtca

SEQ ID NO: 85483 - DNA, 976 bp, Homo Sapiens
aaggctagtacgaggctggggttaaatcggcacgaggagcgagggcagcggtcagcctcagcctcgtgaaagagcaggccttcggcggcctgacaagagccttagccttggactgtgagatggtgggcgtgggccctaagggggaggagagcatggccgcccgtgtgtccatcgtgaaccagtatgggaagtgcgtttatgacaagtacgtcaaaccaaccgagcccgtgacggactataggacagcggtcagtgggattcggcctgagaacctcaagcagggagaagagcttgaagttgttcagaaggaagtggcagagatgctgaagggcagaattctagtggggcacgctctgcataatgacctaaaggtactatttcttgatcatccaaaaaagaagattcgggacacacagaaatataaacctttcaagagtcaagtaaagagtggaaggccgtctctgagactactttcagagaagatccttgggctccaggtccagcaggcggagcactgttcaattcaggatgcccaggcagcaatgaggctgtacgtcatggtgaagaaggagtgggagagcatggcccgagacaggcgccccctgctgactgctccagaccactgcagtgacgacgcctagcagtcctgccctgctgctgctgccgccccgctacagaggcaatgtgaccagtcacagggacagatcacatctccccagagtggcaactctggtgaaaccttttcagaatcatggccagagggggcgtggcgtggtgctacttgagaaaggcctcctttcctcttgaacttgtggtctgaaacctggtctttactgtccccgttgtgtttgggcgccggatggtcggtgggggaccccggccggccctgggcaccctggcccgttttccggcttgtgaccctgggccggtgggttgggccgtgggccccgccaagggcgggcggcccccggtcccg

SEQ ID NO: 85484 - DNA, 1150 bp, Homo Sapiens
  misc_feature (1097)..(1097): n is a, c, g, or t
gggtacaaaccactgccacagatcagcaaagtagcaaatcacatggacggtttccaaaggcattttgattcccaagtaattatttatggaaaacaagttataatcaatctgattaaccagaagggctcggagaagccacttgagcagacatttgcaacaatggtgtcttccttgggaagtggaatgatgagatacattgcctttgacttccataaggaatgtaaaaatatgagatgggatcgactaagtattttattggatcaggtagcagaaatgcaagatgaattaagttattttctagtggactctgctggccaggtggtggcaaaccaggaaggcgtgttccgaagcaattgcatggattgtctagatagaaccaatgtgatccagagtttgttagctcgtcgttcacttcaggcccaacttcagagactaggagttttgcatgtgggacaaaagcttgaagaacaagatgaatttgagaagatttacaaaaatgcctgggctgacaacgcaaatgcttgtgccaagcaatatgcgggaactggtgcccttgaagactgactttaccagaactggaaagagaactcatttgggacttataatggatggctggaactcaatgatacgatattataagaacaacttttccgatggatttagacaagattccatagacttatttcttggaaactattcagtggatgaattagaatctcatagtcctttaagtgttccaagggactggaaattcctggctttgcctagttatcatggttgttgccttttcaatgtgcattatctgtttgcttatggctggtgacacttggacagaaacactggcctatgtgctcttctggggagttgcaagcattggaacattttttatcattctttacaatggcaaagattttgtcgatgctcccagactggtccagaaagaaagatagactgaatttgtatttgtggaaagcggcttggcttggaagattccattgtgcagaactggagtctttactgacccgctttccacatcaagccaaaggccttttttaatgccctttatcccaaaagcaccatcttgtgctcccatgccnggatgtatgacacgaaatggatcctgatggttacctgccctttggatggccct

SEQ ID NO: 85485 - DNA, 341 bp, Homo Sapiens
tcctccccagacaggctgctcttcctcattaactcaccccacagccacgcaaccaggacgtggtgaaaccctgaagatggaagagcagggctaagccattttcagcagcctaaatgtgtgccccattatccaagtttcatgtaccctcccaagagctgctctcggggaaggaaatgaaattaactccctctggagtcagtaaccatcttttccacggctcagtctacacagccaggatttactgagccacctactgcgtgccagcgccgggtgaggccagaggcatgtttaccccactcctgcacattccgtctccttgttcctccaccccttcttccaac

SEQ ID NO: 85486 - DNA, 690 bp, Homo Sapiens
atactttgtcaaaacattttctaccatatttccagatgacatctgcgcttgaagagtcaaaggaatctgtgtctaatatcctgtttttaactgctgtaggggcaggatggaaaggatgatggggctgccacaccactgattggccttttctttcacgtgattcatccttcctcattgtggcaaggagtttctttctctttttcttcctcctttgggatcattgtgtatgaaaagaaaaactttaaatgacaaacccagactccaggtgccttgcaaaggttgaaggccagccaggattgctgctgctgctgctactcctgccaacacccctttcattggcatgacggaatgaaaggatgcatgtctccacttcctgaccctccgcccacttccttctccctccaccacccccagtcgtcagctccttccctcatttatttttgttaagttgtgtgaattatttttaacccatttatcctgtttgtgcatagggtttttaagaagaaacagcacagtgcaacgagcaaatctttttggggtgtgtgggaagcaagggagggaggacatggagaaaagttctttaaacaaatagcaaactattgaacatgtgtaaaatcctgtatcatttatgaaatatgtataaaaagcaatgtaccttctggaacaataaatacttattcaatttttaaa

SEQ ID NO: 85487 - DNA, 1006 bp, Homo Sapiens
  misc_feature (574)..(704): n is a, c, g, or t
caatatacccctgtgttaaaaagcaggctggtacggtccggaattccgggatatcgtcgacccacgcgttccggaatcacctgaagcccagagtgttacatatttaagctataatgaggtgaactacttctgagtatgtgtttcaatcaagttcctgccatatcccacttagtaaaacagtccaccactcctttgaagcatagcaaccaagttccttgggctctatcaccagcaccgttacacatggcaggtactcaggtaaatacgtgtcttcaactgactcacaagctctcaggtgcttactgggtgggacttgactgttgttgctaattaaatccccattccaccagtgattatgtgactcagcagtccttccctattagtgatcataaaatttcagggaaatcgaagtttctcatcaggaaatgtttggaattactagtataaagttaggaaagtggggaaattaggttactgccgagacctttaagccttctaaacagctttatatttcattgtgcatactttaatcagactcccttcactcgctttaagtttttaaaagtattccccnnnnnnnnnnnnnnnnnnnnnnnnnnnnnnnnnnnnnnnnnnnnnnnnnnnnnnnnnnnnnnnnnnnnnnnnnnnnnnnnnnnnnnnnnnnnnnnnnnnnnnnnnnnnnnnnnnnnnnnnnnnnnnnnnnnccaaaaacgtaatgaggccagcaggggtacacacctgtagtcccagccaccaggatgctaagggggaggggactgcgtccaggatgttgaggtgcagcgaagcgggaatgcaaggacacccagcgggcaggggaaaccggtccagaaagaaaagtctcagaaccgagacatgaacccggcgagtaccaggaagcggaagccgagcacggcgcaaaaagcggaacgcgggcgatgacgcacgcaaaagagggccacgcaaaaatgcgggggaaaagcacgcactgaaaaactccaaggcgcaa

SEQ ID NO: 85488 - DNA, 525 bp, Homo Sapiens
gaaatcgcaggactacaagtccctcaatgccacttgcgccggaggcacttccttttccggttgtgctaggcgcctgctcctgccgacgtgttcttccggtggcggagcggcggattagccttcgcggggcaaaatggagctcgaggccatgagcagatataccagcccagtgaacccagctgtcttcccccatctgaccgtggtgcttttggccattggcatgttcttcaccgcctggttcttcgtttacgaggtcacctctaccaagtacactcgtgatatctataaagagctcctcatctccttagtggcctcactcttcatgggctttggagtcctcttcctgctgctctgggttggcatctacgtgtgagcacccaagggtaacaaccagatggcttcactgaaacctgcttttgtaaattacttttttttactgttgctggaagtgtcccacctgctgctcataataaatgcagatgtatagccgccccacaaaatggccccccacaaccctcccctgtt

SEQ ID NO: 85489 - DNA, 557 bp, Homo Sapiens
ttggcctactgggagaccgtgccggagttcgggagcggcaacagagtgggcatagacactccgagcagcctcgccgtcgtctctgcgttcctgttgactgcctggctgccccctcccctactcctcggttcctggtgaagaggctgctcgctgctgtttggggagggggtgtgtggagccgggtcctgtgtccgcagtggctgctgtcggggggtcgcctgttcgcggaggtgcggagagactccttgggggtcgagcacataacggggttcgggtgtctcgtgtgtgaacatcacagggtttgtggatgcacttagatgtttgcaatgagcactgtggctggcatgccccagtgttttggataccaatgcataggactccatagtaatcgaatttaccagaggcgaacgtcatgagcatagtgatcccattgggggttgatacagcagagacgtcatacttggaaatggctgcaggttcagaaccagaatccgtagaagctagccctgtggtagttgagaaatccaacagttatcccctcctccatcagtccttat

SEQ ID NO: 85490 - DNA, 1187 bp, Homo Sapiens
gtgacactgagcgggcgcaggtggccggagtcggagaccgtgccggagttcgggagcggcaacagagtgggcatagacactccgagcagcctcgccgtcgtctctgcgttcctgttgactgcctggctgccccctcccctactcctcggttcctggtgaagaggctgcgcgctgctgtttggggagggggtgtgtggagccgggtcctgtgtccgcagtggctgctgtcggggggtcgcctgttcgcggaggtgcggagagactccttgggggtcgagcacataacgggggttcgggtgtctcgtgtgtgaacatcacaggtctattctggataagcaggttttgtgaagacatttattctttcttggacctcagatttaccagacatctcatgggtttgtggatgcacttagatgtttgcaatgagcactgtggctggcatgccccagtgttttggataccaatgcataggactccatagtaatcgaatttaccagaggcgaacgtcatgagcatagtgatcccattgggggttgatacagcagagacgtcatacttgcgaaatggctgcaggttcagaaccagaatccgtagaagctagccctgtggtagttgagaaatccaacagttatccccaccagttatataccagcagctcacatcattcacacagttacattggtttgccctatgcggaccataattatggtgctcgtcctcctccgacacctccggcttcccctcctccatcagtccttattagcaaaaatgaagtaggcatatttaccactcctaattttgatgaaacttccagtgctactacaatcagcacatctgaggatggaagttatggtactgatgtaaccaggtgcatatgtggttttacacatgatgatggatacatgatctgttgtgacaaatgcagcgtttggcaacatattgactgcatggggattgataggcagcatattcctgatacatatctatgtgaacgttgtcagcctaggaatttggataaagagagggcagtgctactacaacgccggaaaagggaaaatatgtcagatggtgataccagtgcaactgagagtggtgatgaggttcctgtggaattatatactgcatttcagcatactccaacatcaattactttaactgcttcaagagtttccaaagttaatgataaa

SEQ ID NO: 85491 - DNA, 621 bp, Homo Sapiens
cggctaggtacgaggcctgggtgtcgaattcggcacgagggccagaaatatcaaggagcccaaagccgccgtggagatgtacatctcagcaggagagcacgtcaaggccatcgagatctgtggtgaccatggctgggttgacatgttgatcgacatcgcccgcaaactggacaaggctgagcgcgagcccctgctgctgtgcgctaactacctcaagaagctggacagccctggctatgctgctgagacctacctgaagatgggtgacctcaagtccctggtgcagctgcacgtggagacccagcgctgggatgaggcctttgctttgggtgagaagcatcctgagtttaaggatgacatctacatgccgtatgctcagtggctagcagagaacgatcgctttgaggaagcccagaaagcgttccacaaggctgggcgacagagagaagacgtccaggtgctggagcagctcacaaacaatgccgtggcggagagcaggtttaatgatgctgcctattattactggatgctgtccatgcagtgcctcgatatagctcaagatcctgcccagaaggacacaatgcttggcaagttctaccacttccagcgtttggcagagct

SEQ ID NO: 85492 - DNA, 610 bp, Homo Sapiens
gagtatgaagtcgacggcgcgccgaaagccgacgagaacgttcgctcgctgcgtccccagccggggccgagccctccgcgacgccacccgggccatgggggccgcacgcagcccgccgtccgctgtcccggggcccctgctggggctgctcctgctgctcctgggcgtgctggccccgggtggcgcctccctgcgactcctggaccaccgggcgctggtctgctcccagccggggctaaactgcacggtcaagaatagtacctgcctggatgacagctggattcaccctcgaaacctgaccccctcctccccaaaggacctgcagatccagctgcactttgcccacacccaacaaggagacctgttccccgtggctcacatcgaatggacactgcagacagacgccagcatcctgtacctcgagggtgcagagttatctgtcctgcagctgaacaccaatgaacgtttgtgcgtcaggtttgagtttctgtccaaactgaggcatcaccacaggcggtggcgttttaccttcacccactttgtggttgaccctgaccaggaatatgaggtgaccgttcaccacctgcccaagcccatccctgatggggac

SEQ ID NO: 85493 - DNA, 601 bp, Homo Sapiens
gaaggtagctgaagctatttataaaacgttgtgtaccttcttccgagctctctcccctttgtgaagcgcgcagcaactatacccttgatggatggagatttatgcaatgtgttttactgggtagagtgacagaccttggctgtccctggaattgagaatctggaccttatttccaggcagagaacactgtcctcagaaatgggacttctgataatgaaacaggttgtccaacattttctaatacgcattctacagaacacaggttccaggaggcatcaggttggtgtgatgcagactaagggttttgtggtcaaatatccttaagaaacaaagttaagtcagtttcctttctgcaaggacttttcagccttcaatgtgtgctgtgcatggtgaatccccaaaaataatccttgagtctgtagcatttcctgaacttacatgaccaggatactctattttgcagatcaccccacagagctagggttccaccgagtatactttgcttaggttgacttagcatatctgaggtcttcaaggataaaaactgccaccccaacacccttccaaagagtctgatcaaaagcaaacgacctgccgtgtc

SEQ ID NO: 85494 - DNA, 705 bp, Homo Sapiens
ggtttctgccatcaaagatggctggtgggagagagagatacacccttattaagtgctttgtgttagtttattcatagctattgttatatatgtcaaggcaagagaggaccagagcaggacagaggcaatgggtattgaagttgaaggggtacatttgataagagagtcggtattgagaagtttaaatttgtgaatttgaaggctgcgtgggtgtggcaggtaagggaaatgaggtatctgggaaggcttgagtgtaggcaaatttattcatcccaagtcaaactcttgatctctctcacgaaaactatgaccccccctggttgcccctgacctctcaatgttggaacaagccacaaccgtggagttatccttgatgactccccattcattatcccttctgtcccaccaccacagctgtcatctgttcaccagaacgttcttttggttacactccatgtgacatcctgaggctgttgcttctctccagcttttctgttaccatcctggtcctggctactgtcacctagtgggccactataatatggcttcctaatggatcttcctgcttcctctgttgcctcattacttttctatatagcagaatgatcttttgaaaatgtgaaccagatcacattattccctagttaaaaccccccaaggcttcccatcacacttggaataaaatccaaaagaatttttctcaaa

SEQ ID NO: 85495 - DNA, 474 bp, Homo Sapiens
gaagctgactcaaaaatcctaacattcagctgattgccggcagtctagagtcaggcatctgctgcttcggtgggggcccaacgcgcatgctgggcgcccagggtgattgagatccaaagagaagggcactgtaagacaggccagatgaactggctcctcgtcatgggaatggtacctcagatctgagcatggcccttgtttttggaacgtagcagagaaaggaaatgatttgaaatcaaccttgcaaagcaagtagcctgttatagcagtagtttgtagtaggtttcagggatgacagagttggatgcactcatatacaacgttttggtaacatatcagctccatgaggccattcttataaatgaataatagacagagagaggcatatagctgatatctgactcctggtatctctcctttttgttgtgttcgttatttactcaagtcacaagtagatgccagcgcaagacgtca

SEQ ID NO: 85496 - DNA, 371 bp, Homo Sapiens
cagaagcctggaggatgagctggggtcccccttaagagagatagcctttgccgagtccctgaggggtttgcagttcctgtcaccgcctcttccctccgtgagcgctggcctgggggaaccaaggccccctgatgttgaggacatgtcatccagtgacagtgactcggactgggatggaggcagccgtctttcaccatttctaccccacgaccacctcggcttggctgtcttctccatgctgtgttgtttctggcacgttggcatcgctgccttctgtctagcccagaacgcctcactgtgaacactgaggccggcagccagcaaatctgtgggcagagagtggagaatcttggtggatgaggctgcggcgg

SEQ ID NO: 85497 - DNA, 502 bp, Homo Sapiens; identical to SEQ ID NO: 32890

SEQ ID NO: 85498 - DNA, 554 bp, Homo Sapiens
aaaagcaaataccgcatccttttcttccgcagaactagagtcagagttcggcagctgcgtacaaaggcctctgcctcggttgagcaaaagttgtaaataactagtatttattaagcacttataagcagtttttctcacttagtcctggctccagttctagagttcctctttattgcttttggtgaaagtttggggttgggggtacacctcagaggttcagtaattcacctggagtcccaccctgaacagagctggacccagagccacacacgcccgggaacacacactgtgctggggaggaagtgggcctaggagggcctgcaggtccaggcagctgtagagctgctagaagctggggtgttgctctccccgctttctcatagacacagaggtactgtctgcctgttgtcacacagttcatatgctcgcttgagatggaatctgaaccttggtcccaggatctgtgctttttcccactttgccacactgtctaaggtggctttgaactggaacccaagtgcaaataaaggttggtattcgctcctgaaaaaaaa

SEQ ID NO: 85499 - DNA, 959 bp, Homo Sapiens
tccagacatccttgtggaaccagcgtgtttttccttggcagctgcggagacccgtgataattcgttaactaattcaacaaacgggacccttctgtgtgccagaaaccgcaagcagttgctaacccagtgggacaggcggattggaagagcgggaaggtcctggcccagagcagtgtgacacttccctctgtgaccatgaaactctgggtgtctgcattgctgatggcctggtttggtgtcctgagctgtgtgcaggccgaattcttcacctctattgggcacatgactgacctgatttatgcagagaaagagctggtgcagtctctgaaagagtacatccttgtggaggaagccaagctttccaagattaagaggtgtcctaagtccccaaccatccttagttggccttccttcccttctgcccctcaaggaacaaggaagccatccagggtgcctataagaggaaacctttgagagggtgatgtggggctggcctggttacttcatgccagtgcttgagaggagctaagtacatgggctaaggagtcactgtttattttctatttaagacctattcccttacattgggggtcccagctgttatctagattaaggggctagaagtatctgtggggagttactgtattcatttttcattgcctcttgatgaaaagggccccagaacctggcaccaggtaattctcactaggaaaattgtcacaggtcaagacctatgtgggttggacgcattagtcttccttttcctctggttcacagttgggccaacaaatggaagccttgactagcaagtcagtgctgatgctgagggctacctgggtcaccctgtgaatgcctacaaactggtgaagcggtaacaccgaatgggctgtgctggaggacttgtcctgccgaactccgctgcaggttatcggcaacctctctgtgcagggagtcttccc

SEQ ID NO: 85500 - DNA, 966 bp, Homo Sapiens
gggagctgaccgggcgacgccgcgggaggttctggaaacgcccggagctgcgagtgtccagacacttccctctgtgaccatgaaactctgggtgtctgcattgctgatggcctggtttggtgtcctgagctgtgtgcaggccgaattcttcacctctattgggcacatgactgacctgatttatgcagagaaagagctggtgcagtctctgaaagagtacatccttgtggaggaagccaagctttccaagattaagagctgggccaacaaaatggaagccttgactagcaagtcagctgctgatgctgagggctacctggctcaccctgtgaatgcctacaaactggtgaagcggctaaacacagactggcctgcgctggaggaccttgtcctgcaggactcagctgcaggttttatcgccaacctctctgtgcagcggcagttcttccccactgatgaggacgagataggagctgccaaagccctgatgagacttcaggacacatacaggctggacccaggcacaatttccagaggggaacttccaggaaccaagtaccaggcaatgctgagtgtggatgactgctttgggatgggccgctcggcctacaatgaaggggactattatcatacggtgttgtggatggagcaggtgctaaagcagcttgatgccggggaggaggccaccacaaccaagtcacaggtgctggactacctcagctatgctgtcttccagttgggtgatctgcaccgtgccctggagctcacccgccgcctgctctcccttgacccaagccacgaacgagctggagggaatctgcggtactttgagcagttattggaggaagagagagaaaaaacgttaacaaatcagacagaagctgagctagcaacccccagaaggcatcttatgaagaggccctgtgggactacctggccctggagaagggatgtttacgaaccctt

SEQ ID NO: 85501 - DNA, 913 bp, Homo Sapiens
  misc_feature (716)..(716): n is a, c, g, or t
aggctggaccggccggattcccgggagatgtcagactccttgtggaacagcgttgtttttccttggcagctgcggagacccgtaataattcgttaactaattcaacaaacgggacccttctgtgtgccagaaaccgcaagcagttgctaacccagtgggacaggcggattggaagagcgggaaggtcctggcccagagcagtgtgacacttccctctgtgaccatgaaactctgggtgtctgcattgctgatggcctggtttggtgtcctgagctgtgtgcaggccgaattcttcacctctattgggcacatgactgacctgatttatgcagagaaagagctggtgcagtctctgaaagagtacatccttgtggaggaagccaagctttccaagattaagagctgggccaacaaaatggaagccttgactagcaagtcagctgctgatgctgagggctacctggctcaccctgtgaatgcctacaaactggtgaagcggctaaacacagactggcctgcgctggaggaccttgtcctgcaggactcagctgcaggttttatcgccaacctctctgtgcagcggcagttcttccccactgatgaggacgagataggagctgccaaagccctgatgagacttcaggacacatacaggctggacccaggcacaatttccagaggggaacttccaggaaccaagtaccaggcaatgctgnagtgtggatgactggctttgggatgggccgctcggcctacaatgaaggggactatttatcatacggtgttgtgggatgggagcaagtgctaaagcagcttgatgcccgggggaggagccaccacaaccaagttcacagggtgctggactacctcagctatgctgtcctttccaggtggggtggatctgcaaccgtgc

SEQ ID NO: 85502 - DNA, 862 bp, Homo Sapiens
aatccaaattaaacagcaaagctctccgccgacggagctcctggctctgagttacaatttcccaccaggaggcctccagggtggttttgaacatcccctgggttttgaggctggctttttgtgacctgttctacacttggtgtttagtggccctgggctgggtccctatggcctgggcaggaccgagcggctcaccctggtgctctcctggtgcgcctggggctcactcacgtgctgcagcaccttgcgcggcaacttctcggagtgggcgatccattctttcattaagtctaggatgagggggatgaggctgaccacgccgccgtagtggttccgggcctcgtcacagctgaggtggttcaccacatcatgagggtattttgctctgaggctgcttaagtcgttgctttggctaacgagggttttgcatttctccaggaggttgttggtgactggggtgccagagtgcacggcctcaaagtgctggcagagcttattcagctctgaacagatgtccaggaacatgagcagaacccgccggtctgtggagctgttgcagtagtgttccatgtagctctgcacctgtccaatgctggagatgggccggatcttgtcgtgggcgttctccctgcagtgctccagagcggcggtgaaggtgagctgctgctgctggaagagcttgtacttctgctcgatgctgcgaagggattctttcacctcattcattgtcttcctctgtggtcatttacaggagaagaggaatccttgcttgtcctagagcgctcttcgctccacggagcacccagagaagttggagtgactccgtgagtgtcggtgccccggagggtggggaggcccgttc

SEQ ID NO: 85503 - DNA, 1225 bp, Homo Sapiens
  misc_feature (191)..(199): n is a, c, g, or t
  misc_feature (1150)..(1150): n is a, c, g, or t
cgcctctcggcccgcggcctggccggcaagcagggctgcagtcacggggcggcgcggagggccccagcccagtcaggtgtgtggccgccgccaccgtaagggctaggccgcgagcttagtcctgggagccgcctccgtcgccgccgtcagagccgccctatcagattatcttaacaagaaaaccaactggnnnnnnnnntgaaattccttatcttcgcatttttcggtggtgttcaccttttatccctgtgctctgggaaagctatatgcaagaatggcatctctaagaggacttttgaagaaataaaagaagaaatagccagctgtggagatgttgctaaagcaatcatcaacctagctgtttatggtaaagcccagaacagatcctatgagcgattggcacttctggttgatactgttggacccagactgagtggctccaagaacctagaaaaagccatccaaattatgtaccaaaacctgcagcaagatgggctggagaaagttcacctggagccagtgagaataccccactgggagaggggagaagaatcagctgtgatgctggagccaagaattcataagatagccatcctgggtcttggcagcagcattgggactcctccagaaggcattacagcagaagttctggtggtgacctctttcgatgaactgcagagaagggcctcagaagcaagagggaagattgtcgtttataaccaaccttacatcaactactcaaggacggtgcaataccgaacgcagggggcggtggaagctgccaaggttggggctttggcatctctcattcgatccgtggcctccttctccatctacagtcctcacacaggtattcaggaataccaggatggcgtgcccaagattccaacagcctgtattacggtggaagatgcagaaatgatgtcaagaatggcttctcatgggatcaaaattgtcattcagctaaagatgggggcaaagacctacccagatactgattccttcaacactgtagcagagatcactgggagcaaatatccagaacaggttgtactggtcagtggacatctggacagctgggatgttgggcagggtgccatggatgatggcggtggagctttatatcatgggaagcactctcacttattanagatcttgggctgcgtcaaagaggactctgcggctggtgctctggactgcagaagaacaaggtggagttggtgcc

SEQ ID NO: 85504 - DNA, 720 bp, Homo Sapiens
  misc_feature (599)..(653): n is a, c, g, or t
ctgcatctaaatttctcaactagttcagcctagctgaattttctagtgtgtaatacactttgcttccttcttattgatgaaaaccagggggatgagtggcttccatggagagatttcctgatttctcagggaggaaaaaagtgatgacatttaccactacttttatgtttttcccctttttccaaattgataaggatttctggttcctagtgatccgggattgggcaacagtgcagaactgccagtcatgccgtagcgtgaagaaagaatgtgagtaactgttgttttgcaaggatttgtagggttatgggcagttgttgtttgaagcattgctatgacctaattcacaaggtatctttcctctcttggtgttctaggtaagccaatgagctttaatctctacttgctataaccgtgtgcttagaaaaagaggtgagagtagtggttttccttcaaactgtccacattcatgaagattatgaattgttaggacagccagggcaagatagaccctgtctctacaaaaatttttttctaaattaaccgggcatggtggtgcctgcctgtagtcccacctgtgtgggagaatcacttgagcnnnnnnnnnnnnnnnnnnnnnnnnnnnnnnnnnnnnnnnnnnnnnnnnnnnnnnntgacagagtgagaccctggctcaataagagggggaaaaaaaattgttaggagctgggtgcggatgca

SEQ ID NO: 85505 - DNA, 1260 bp, Homo Sapiens
  misc_feature (84)..(118): n is a, c, g, or t
acacatgcacagaccatatagggcctcaggctcgtcgcagacgaacgacgagcgcagcgaagtcagtgagcgaggaagcggcgnnnnnnnnnnnnnnnnnnnnnnnnnnnnnnnnnnncagtcgacggtaccggacatatgcccgggaattcggccattacggccggggttctataggagaaaaaattcctggaacaaagctctcgaacttttaaaaaaggcctggaggtgacaccaacttcttctttcctgcatcaccagatgggacttgctacagggcacaaatgatccaaatcaagaaggccacacacaacagacctaaaggaaaggataaactaaaggtgatgagctgatttcatctgctatatttcatttcaaagcagccatggaacgagactctatgtttgcatttgcctacacagacctggccaacatgtacgctgaaggaggccagtatagcaatgctgaggacattttccggaaagctcttcgtctggagaacataaccgatgatcacaacacatcagatccattagcactatggccgcgtttcaggaattgcaccgtaaatcagaaaatactgccatccatcattatttagaagccttaaaggtcaaagaaagatcaccccttcgcaccaaactgacaagtgctcttgaagaaatggtctaccaagagactttgtccacaaggctttagatgtgcagagtttacagtgccatagggtaggtttaccacgctggaaggaggacaaagagggcaaagctgcttgagtactatgcagaagggaaagacagactaggaatccacgaaacaatggcaagaaataacatggacgagactctactggagacaccataccggcactcgtcccaagttgaaataacagtacactccaaggaaacttaagctcatataggtacaacaccccatcacaacgaggggggttacagcacgggaaaggggacaacgagacaacatagacatgtacaaaacccaccatgaccatcaataaacaaacggatacacactaaagagagaacaaagaacgactagggggagcgacaagagattcgtggaaaaaaacagcacaaatgcacgtaagcgacaaagacaaggagcagggaaaacaagcatgacagacgtacgacaagtgaaacagtaacgaataaaaccaagagagacaaatgcccaatatacacacacaaaggacagctacacaaagctggcggcagccaaaacacatggcaacacacatca

SEQ ID NO: 85506 - DNA, 1772 bp, Homo Sapiens
  misc_feature (921)..(934): n is a, c, g, or t
tttctccaatttgcccttataattggtagacttgaacaggttggtagacttgaacaggtttttaaaacagacaagtattttgtcagctaaacgttcctgatgattcctgactttgcaatactaagtaatttttggaaggttagtggcagtatacatcataggaaataaaaacccacaaatgaaaaggtctatggagtcatgtttaatgtagggaaataacattttgtcaatactaggcaccataaaatgtaaacacaattactgtcataaacctagatataccttcaaggattgaagattgaaagtggctttgttttagttagttaccctgtttgcatatagtgcagaaaaaggtcttcatgttagcactatgtacattaagaagagatccaaattacaagagaggcagataaaatttgaattctttaagcattcattaaacgaagttttggagtaacatccacgtttatcttcctttcactaatcacgttccctgttaagcacatcataacaacagcacagtgaagtgaatgatgaaataagagcattttgatacactagaaaacagtgctcagtgagacatttacattctatttatatgattaaacatttgatcatacagtaccttcctacaggattactggctaattttggggtggggtttatactattagaggtattactaacatgataactacttcccttatatgcaaacattagagctataattttattgagaggaaaactgattttgcaagttgagcagcttctcaaataatgcagtacatgaaatcatgggaaatatgagcaaagctgcccttgacataaaatgatttatcaacctgcttttcaccacatcaaattgaatcagtacagaccaacacggtcaatcagatcattcttaatatgaacaaatgggtnnnnnnnnnnnnnntatgcatatgaataaacaggggaactagatgcgtttcagcaaggaatgtcaggtggtagttctgaatgaaacttgtattcaagttttcatttccacagttgtgtgctgagagtctgacctgataagcttccagaccatcctgctgttgtgctggagggctggccaaaacctgcagtaggggttgcactactgatactcatgccagccatctgctgattcatctgtgagaggctccactggggctgctgagcttgcggcaggccaaacttactctggggtgcacccatttgtcccaccattcctccttgggggccaacaacgttctgaggaagtggcatcacaccagtttgtgcatttcccataaacccattgggcatgggcatgcccaccatcatgcttggactctgtcccatcacatttcctataaggccaggagctgcaggcacaggcacgcccatcgatggaaagccctgaaatgcagctggtgcttgtgaggtaaatggtatatttgtgggtcccataaatacaccaggagtactttgctgttgaatggttcctgtgccatacagagataagatggagtctttggaaagttgtttctttgccacttcttctcattttgcagtttgctcagtgaataaatctagatccccagatgttactgtagacagggttgcagctgctggtgcagagggtgtcccctgagctgggggcatgacagttgcaggtaagggattagaaatcatcggtccaaagatgtccagatcatcgttcaggggtggcaccgttgtgttcccgttggtcactggagcctaaaaaaagtaccagccctaaaaaa

SEQ ID NO: 85507 - DNA, 268 bp, Homo Sapiens
ggcatagggaagacttcttaaaaacaagtgaaattgttaaaaccccccctaagcattacagatggcttatagctgtccacggggttggtagaggtgggaaagggaagggttctaggccagaatgttcctatttagaagacactcaaattacagtctgtgttatgtatgtataccatttattcaatgctactgtgtatataatggaaaacttaagtccagtttgaaacatctagtctttctaggtgtttaaaagtgtacaacggcctgt

SEQ ID NO: 85508 - DNA, 1035 bp, Homo Sapiens
ggtaccggtccggaattctcgggatatcgtcgacccacgcgtccgcggcgcccgcccctcctgctgctcagccaggctccgcgagccgcagggcggggaagcgggacgtaccaagcggcaggcggcggaggggtgcgggccggaactccgcccttcgtgctggtcggtctccacgccccactcggactagtgtcaccgcctccccgccgcagacactatccgacaaaggagggggaatcaaaggctgggcgaagaggcagggcaggcgccggtgacgctgctgggcaagcgggctctgcagtagcatttgtggcgaccgtggcagtggctgtgactggaagcttctggaaatggcggcgatgaggacccccacatagggtattcacctgttatttttacacggggtgggtggacgagcgtgatccaactcaggcaaaatgacgctgcgaccgcagcccgaggactaggcgaagttcccccgctaagccggcggcggccgtctggccccgcaccaggccggagaagctgcacctacgcccagagcccgcggccccccgcctcaggtggggccctgggccccgccccgaaagcgcggtagcgtgcacctgccctggcaccaggggggtctagagcgcgtcccctcccagccacgccttccagtggcctttttaaagaggaattcagtgcaccctcccacacgtagtgttggggatttgagagggagctgctcaggtactaggaagggtgccggaggaaaattgaccgtcgcagcgtggcagcagcgtgtactcactcccttctgggcgcgttatttacgtagaggttaatctgcaacaacagcgtctgtttatgacttagtgcatgcagttacaagtttatgttacactgtcctttaacgtcttgatgaactgagggttcaggtgtgatcacagcagatgaagtgacattcagacctgacagggacggcgaggtcccatcaaattactatgtaaagcataaacctgcattaaagatcaggagtttttcctttaaaaa

SEQ ID NO: 85509 - DNA, 639 bp, Homo Sapiens
  misc_feature (17)..(17): n is a, c, g, or t
ttcggcacgaggaaatntgtaaaatgcaaaactgaatgaaactgttactaccataaatcaggatatgtttcatgaatatgagtctacctcacctatattgcactctggcagaagtatttcccacatttaattattgcctccccaaactcttcccacccctgctgccccttcctccatcccccatactaaatcctagcctcgtagaagtctggtctaatgtgtcagcagtagatataatattttcatggtaatctactagctctgatccataagaaaaaaaagatcattaaatcaggagattccctgtccttgatttttggagacacaatggtatagggttgtttatgaaatatattgaaaagtaagtgtttgttacgctttaaagcagtaaaattattttcctttatataaccggctaatgaaagaggttggattgaattttgatgtacttatttttttatagatatttatattcaaacaatttattccttatatttaccatgttaaatatctgtttgggcaggccatattggtctatgtatttttaaaatatgtatttctaaatgaaattgagaacatgctttgttttgcctgtcaaggtaatgactttagaaaataaatatttttttccttactgta

SEQ ID NO: 85510 - DNA, 398 bp, Homo Sapiens
  misc_feature (56)..(56): n is a, c, g, or t
agtgagttggtgctaggaggggctcctgtgtgtgcatgggcgggaggggtgcaggntatctgagcaccccggtctccacttgagaagagcagggcaggagctccctgacccacccagactacacacgctgtgtccacgtgtctcacattatctgtggcagaggatccggcttctttctcaatttccagttcttcacaaagcaatgcctttgtaaaatgcaataagaaatactagaaaaatgatatgaacagaaagacacgccgattttttgttattagatgtaacagaccatggccccatgaaatgatcccggaccagatccgtccacacccgccactcagcagctctggccgagctcacagtacaaccacaataaactcttgttgaatgaactctaa

SEQ ID NO: 85511 - DNA, 721 bp, Homo Sapiens
cctgcgaggcaaggaccttggctcgggggacaagccacctttactggttttgtggtggcagtgacctgagggatgctctccgacttgggaagtggctggaagggtccccccaagtggggggagtaagggctgtctgaagggcacagcaacgggctccaagagcaagtaagccgttttgaccctgccagggcccttgtggaaagcggggacctcggtcacctgcacactgaaccatcccagcctcccaccccagaggttgatggcgctgagagaacccgctgcgcaggcacccgtcaagctttccctgaacctgctggcctcgtctgaccctcccgaggcggcctcgtggctcctgtgtgaggtgtctggcttctcgccccccaacatcctcctgatgtggctggaggaccagcgtgaggtgaacacttctgggtttgcccccgcacgcccccctccacagcccgggagcaccacgttctgggcctggagtgtgctgcgtgtcccagccccgcccagccctcagccagccacctacacgtgtgtggtcagccacgaggactcccggactctgctcaacgccagccggagcctagaagtcagctatgtaacagaccatggccccatgaaatgatcccggaccagatccgtccacacccgccactcagcagctctggccgagctcacagtacaaccacaataaactcttgttgaatgaactcta

SEQ ID NO: 85512 - DNA, 156 bp, Homo Sapiens
tctaagcaaactatctttgagtcaaaaaaagttggataactcatctatatttgaaataatgctgtctgaatggccaacatcccaagaatgtattaaaaacagcaaccctgcctaccgttttgatgacctttttccatattaaacaagttgagaaca

SEQ ID NO: 85513 - DNA, 326 bp, Homo Sapiens
  misc_feature (92)..(110): n is a, c, g, or t
atttgaacctgaatgcagagaataaatactttattaactgattacagttgaaagtcacaaacaaaaaagggggtatattaaggcaaagcacnnnnnnnnnnnnnnnnnnngtatagacaaatccaaagattggtacttctttacattttaataacctctgcatttttcttttacacatttaggcagtgtgctttcttttctcctcagttaaagcaacaccttggccaatatttctaaatcatattttgatgacaacttacaggatcagtgattgagacaatgactagtgtatcaaacgctatctgatagttttcttaacatattcc

SEQ ID NO: 85514 - DNA, 1372 bp, Homo Sapiens
  misc_feature (79)..(113): n is a, c, g, or t
ctgatcgactcactatagggcctcagcttgttgagacgaacgacgagcgcagcgagtctgtgagcgaggaagcggccgnnnnnnnnnnnnnnnnnnnnnnnnnnnnnnnnnnncagtcgacggtaccggacatatgcccgggaattcggccattacggccgggatagtagatttgcattcaagaattgaggaatcaatggatcgtgtctattccctcgatgatatcagaagatatcttctctttgcaagacagtttaaacccaagatttccaaagagtcagaggacttcattgtggagcaatataaacatctccgccagagagatggttctggagtgaccaagtcttcatggaggattacagtgcgacagcttgagagcatgattcgtctctctgaagctatggctcggatgcactgctgtgatgaggtccaacctaaacatgtgaaggaagctttccggttactgaataaatcaatcatccgtgtggaaacacctgatgtcaatctagatcaagaggaagagatccagatggaggtagatgagggtgctggtggcatcaatggtcatgctgacagccctgctcctgtgaacgggatcaatggctacaatgaagacataaatcaagagtctgctcccaaagcctccttaaggctgggcttctctgagtactgccgaatctctaaccttattgtgcttcacctcagaaaggtggaagaagaagaggacgagtcagcattaaagaggagcgagcttgttaactggtacttgaaggaaatcgaatcagagatagactctgaagaagaacttataaataaaaaaagaatcatagagaaagttattcatcgactcacacactatgatcatgttctaattgagctcaccccaggctggattgaaaggctccacagagggaagtgagagctatgaagaagatccctacttggtagttaaccctaactacttgctcgaagattgagatagtgaaagtaactgaccagagctgaggaactgtggcacagcacctcgtggcctggagcctggctggagctctgctagggacagaagtgtttctggaagtgatgcttccaggatttgttttcagaaacaagaattgagttgatggtcctatgtgtcacattcatcacaggtttcataccaacacaggcttcagcacttcctttggtgtgtttcctgtcccagtgaagttggaaccaaataatgtgtagtctctataaccaatacctttgttttcatgtgtaagaaaaggcccattacttttaaggtatgtgctgtcctattgagcaaataactttttttcaattgccagctactgcttttattcatcaaaataaaataacttgttctgaaaag

SEQ ID NO: 85515 - DNA, 744 bp, Homo Sapiens
aactttttgaatggcttgtcaaatactcttcattgcataatgtgaagttaccagaagcagatgacatccagtacccgtccatgctgctcctcactgctgaccatgatgaccgcgtggtcccgcttcactccctgaagttcattgccacccttcagtacatcgtgggccgcagcaggaagcaaagcaaccccctgcttatccacgtggacaccaaggcgggccacggggcggggaagcccacagccaaagtgatagaggaagtctcaaacatgtttgcgttcatcgcgcggtgcctgaacgtcgactggattccataaacactcttcgtgcttcctcctgtacagcgacagaaaacctcaagggctttcacacgttgacaccaagaaaccactgggcataatgcttccccacgggaacattattcctgcactcacaggctacacttgaacagaactgccgtgggaattttatcttttttaggcttctcctttttagcaaggccttggtgtttctttttccaccctgtctaggcacatgtggttttttggtgtttttcttaagggcatgttgggataaatagctaaatggcaacaaacacattgtgaatattagattgctgaattaaggatcatagtcgggcatacttatctatatccataacctctatatctttaaataaatgtgagaactgttctcatggagaagacttctttgcaacaataataaatgttatttaagaatgaa

SEQ ID NO: 85516 - DNA, 476 bp, Homo Sapiens
tttggcatagtactgattattaaagagaagatactagaaagaatccatttcttggcttaagattcttaactactattatttttctttcctaatcaccttttgggaccaagccacttcaacatctcattttcttatccccactagtgaacatcccctacaaccttcctgtgaaactaaggaaaaaaacaaagtgttaaggtattaagcctcaataagtaacttggacaattcctctcaaatcattagtggacaataataaaagcaaaaatggatgatgcttttccagaaaaattaactgaaaggcctcaaaattcttctaaacaaaattaaaaaaatattgtaacaaaatgcaacacagcttaattggttttacaccattgcatattacaagtcagtattaacatctttcttaaagtgccttcatacccatgcacaaaactactggctaccaccttcaggtaatgctaaggtgggag

SEQ ID NO: 85517 - DNA, 511 bp, Homo Sapiens
cagtcgacggtaccggacatatgcccgggaattcggccattacggccgggcaaagagctgggtgctcataaggaaaatcgttagccaaaattatgtgtgttatgttttaagtaagagtacagtgatttgacatttatagaatatagaaacttattttgtattcgtatgggtaaccttagtttgatcagaattagatgagttactgtgctcagaagtcttaaaaaccaaacactgtgcccagccaagttatatctctaaagcaatgtgcaaaaataaactgaacttgggttgattaggtatattcaacatttgtcgggagagtagatgtttcattttatttcagtccctgtgtaatttgtcttctctaatgttaaatactatgtagaatgtgtctgtgtaattttatagatacttttattatggatggacattctaatttgtactgactttgggtctgtgaactacttcaatgtttggaggttaccaaaatcttacctttcccttttctatt

SEQ ID NO: 85518 - DNA, 1015 bp, Homo Sapiens
  misc_feature (133)..(133): n is a, c, g, or t
  misc_feature (141)..(141): n is a, c, g, or t
  misc_feature (165)..(165): n is a, c, g, or t
  misc_feature (196)..(196): n is a, c, g, or t
  misc_feature (228)..(228): n is a, c, g, or t
  misc_feature (246)..(246): n is a, c, g, or t
  misc_feature (287)..(287): n is a, c, g, or t
  misc_feature (308)..(308): n is a, c, g, or t
cctatatgagacacactagctattcctatctcccacctcgcgtcattgttttcgatattattctgacattatgtcagagaaaagaagaaacatcttatttccatggatgactgctaaaacatatgaatattcntgacagantgaaactagatctcctcagatgtngtaataactctgtatccaactggtgtatctnagtgtgaacaaaaaacagtgaacacaagtgcntacttgtggatactatcntaccaacgatcacaaaagttctctttttggtgtactgttgntgacagggattgtgtactgtntcgacccaagtactgctgtatcctgtgtagtactagatctgtatctcttgtctgaattaaacatttttagttgctgtgtaaatgttaggaagcaaagtagctttgaattttctctgtaagagaataaaagataaaataatgtattttctttatttcacattttatttggagatatttaaatgaaatagaaagccatataacatagctataattactacctgtttgctatttttgtttaacttattttgtagcttcctcactggtttgtgttgctaagcaaacgtatacaaacagaaaaagagcttcctaaattgcacatttttgcacctcttgtgcattctgcaagaagacaatgaatccatgtatttctatataagtatcttcttcatttttaacctgttttcatttgtaatgatgctacataattttgtggctccctaatgcaataatgtacagaagataaaaaaatttataattgaacaatttgtctttctgttcgctgaatatattgcaggtcatgctcccatgcccccctttctaagccgatatcaacaagactggaatgtttgtgatatcaggggcaagagttatcatagaacaacaaaatagagtggactcttttagagcatctatatctgcaacctgtaaatggtaaaatgtctgtgtatttttttaaatgtaccttttcaataaaagtacaaaaaata

SEQ ID NO: 85519 - DNA, 986 bp, Homo Sapiens
  misc_feature (44)..(130): n is a, c, g, or t
  misc_feature (403)..(452): n is a, c, g, or t
  misc_feature (611)..(623): n is a, c, g, or t
  misc_feature (955)..(955): n is a, c, g, or t
tctaattaaattgcatcatcaaaatcagcaacagatacagcagnnnnnnnnnnnnnnnnnnnnnnnnnnnnnnnnnnnnnnnnnnnnnnnnnnnnnnnnnnnnnnnnnnnnnnnnnnnnnnnnnnnnnnngctttgcaggcccagccaccaattcagcagccaccgatgcagcagccacagcctccgccctcccaggctctgccccagcagctgcagcagatgcatcacacacagcaccaccagccgccaccacagccccagcagcctccagttgctcagaaccaaccatcacaactcccgccacagtcgcagacccagcctttggtgtcacaggcgcaagctctccctggacaaatgttgtatacccaaccaccactgaaatttgtccgagctccgatggtnnnnnnnnnnnnnnnnnnnnnnnnnnnnnnnnnnnnnnnnnnnnnnnnnntacagacagctcaggctgcccagatggtggctcccggagtccaggtcagccagagcagcctccccatggtggctcccggagtccaggtcagccagagcagcctccccatgctgtcctcgccgtcaccgggccaacaggtgcagaccccgcagtcgatgnnnnnnnnnnnnnagccgtccccgcagcccggccagcccagctcacagcccaactccaacgtcagctctggccctgccccatctcccagtagcttcctgcccagcccctcaccgcagccctcccagagcccagtgacggcgcggaccccacagaacttcagtgtcccctcacctggacctttaaacacacctgtgaaccccagctctgtcatgagccagctggctccgccagctgagagcacagtactggacagctgagcagctgtcgagtactcggccctgcgcgcatgatcacagatcgacagacgagaacgaaaagactgatagatgaagctctgactcganacctcgacgtgtccgaactgcaatgaatgcg

SEQ ID NO: 85520 - DNA, 940 bp, Homo Sapiens
  misc_feature (79)..(80): n is a, c, g, or t
  misc_feature (92)..(92): n is a, c, g, or t
  misc_feature (96)..(97): n is a, c, g, or t
  misc_feature (101)..(315): n is a, c, g, or t
ggagagcgggaggtccttcacggcttctgttccaccccagggctgggaggtgcaggttggctcgattcttcgggttcannttgcaacctcancttnntcannnnnnnnnnnnnnnnnnnnnnnnnnnnnnnnnnnnnnnnnnnnnnnnnnnnnnnnnnnnnnnnnnnnnnnnnnnnnnnnnnnnnnnnnnnnnnnnnnnnnnnnnnnnnnnnnnnnnnnnnnnnnnnnnnnnnnnnnnnnnnnnnnnnnnnnnnnnnnnnnnnnnnnnnnnnnnnnnnnnnnnnnnnnnnnnnnnnnnnnnnnnnnnnnnnnnnntcagctctttcagagagcacagtgagtgcttgcacaaaactctgcttttgaagcaatccactgacctggtaaagatcaaagtacaaacttgcatgtttattgattcggcaactctgcttatggagaaatacatgtactagtcaccagtacattttaatattgctctgcacttaaacaaccaccacctgtcactgagctacagaagtgttgattccataaatgttcccagtgataccatgtaaggtgataccagtaaaaaaaatttccaaatggatcttttgttctgttacatggacaaatgtaccatcacttaagaaacagaaatgcagcaatttctctccacacaatagcaaagattttcttacatgactctggaacttctacttagtccatagaaaaacagtcccttttctaagggtgaaaaaatacctcttcaagagacaggcaaaaatttgaaaattacaagaatgtgctctttgtagcctttcatccctcccacaaataggtcaacagtaaaaaaaggatgaagtttaacattctagctagaaacgtacaaatgtcacatgtggacttttgtcatcttttctgattatcgactacttcaatttcacttgagttgtgcttt

SEQ ID NO: 85521 - DNA, 420 bp, Homo Sapiens
aatcataataatggcactttataaaagtcagcatttttctctgattataaaatacatgttgtcaaaaagcttaaaaatgcaaaaagtacaaaacattaaagacaatctcatataacctcttctccctccccacatcccctctctttcaaaagaacttgtgaacattttggtgagaattttcacaagtgaagtacgtccatatcaccaacatggccccaacactccagatgcccctcgggtgtctctcccaggtaccacgctctgacttctgactgagatggttttgattgtgcctgtttaagtcctatgaatagaatcacagagtatatacccttgagtctggcttcttttgctcaatattatgtttgtgagattcatttatgccattgtcccagctttatttatttattttttctcaag

SEQ ID NO: 85522 - DNA, 499 bp, Homo Sapiens
ttttaaagatgctgcaacttaagtccctagaagcatttacctatacctgtctcttaagagcaaagatataaggtcaattctagttgtaactcagaaaaatctgtcacagatcagacagcttgacagtcatgagtgctctctctcctggcatcctactcctccacttttaccccagcatccatgttttggtctcttcgtatgggtcaaacttcaactttataaaaatagtgaataccacttattgagtgcttagagtgtaccaggcatggtgctaaacactctctatccattatctcattaaatcacatgacactatgagaaatgtactattcttatacccacgttgcccagggtcatacatctaaggggtgcaaggaccaggctttgatttcaaattataatctaatgctcactctcccaggccttgaatgtcacagcagctcctcattcctaatacttaacaatagtgaatgtgcaagaaagggaaaaagcagtatca

SEQ ID NO: 85523 - DNA, 923 bp, Homo Sapiens
ccacgttcttcttccaggtgaagcctgatggaacatacgtgaaaccgctgagtaacaagctgacttacgggaccatggtgtttgtcaggtccttccttgtgggagaagctgctcgggctctgtctaaggcgtgcaccattgccatccgatacagcgctgtgaggcaccagtctgaaatgaagccaggtgaaccagaaccacagattttggattttcaaacccagcagtataaactctttccactcctggccactgcctatgccttccagtttgtgggcgcatacatgaaggagacctatcaccggattaacgaaggcattggtcaaggggacctgagtgaactgcctgagcttcatgccctcaccgctggactgaaggctttcacctcctggactgcaaacactggcattgaagcatgtcggatggcttgtggtgggcatggctattctcattgcagtggtcttccaaatatttatgtcaatttcaccccaagctgtacctttgagggagaaaacactgtcatgatgctccagacggctaggttcctgatgaaaagttatgatcaggtgcactcaggaaagttggtgtgtggcatggtgtcctatttgaacgacctgccccagtcagcgcatccagccacagcaggtagcagtctggccaaccatggtggatatcaacagccccgaaagcctaaccgaagcatataaactccgtgcagccagattagtagaaattgctggcaaaaaaccttcaaaaagaagtgattcacagaaaaaaacaagggaggtagcctggggaacctaacttcctgttggaccttgttccgagcaagtgagggacatttgccactatgggggtaatttaagctccttttcacaaaaaactccctccaaattcaagataaaggccattccaagctggcc

SEQ ID NO: 85524 - DNA, 361 bp, Homo Sapiens
  misc_feature (193)..(205): n is a, c, g, or t
cgggtgcttggtaaacgaaaagcaaacttctttattgtacacagtacagaatataacgcagcttggcaggatgcatacggccctgcgcaggggaaagtatttcaaatcagctggcaggttcaagcctttctgcactgtagactttccacactctggaaaagaagcaaacaaacaaaccccaaagaacccccgnnnnnnnnnnnnnccatccgggaggtgcatgagtccaatgggaatgcaaccgtgatgccgctgtcctatgcccagtgacagcacaggtcacgtaagttacagcaggggaggggtagctcaagctacagaggattattgtcatattgctaagacagcataaatccattca

SEQ ID NO: 85525 - DNA, 988 bp, Homo Sapiens
  misc_feature (847)..(847): n is a, c, g, or t
  misc_feature (956)..(956): n is a, c, g, or t
gctggtaccgcgtcggatttccgggatatcgtcgaccacgcgtcggctgaagagaccggttgccgccatgatagaacagcagaagcgtaagggcccagagttgccgctggttccagtcaagcggcagcggcatgagttgctgttgggagcggggtctggcccaggagccgggcagcagcaggcgacgccgggagccttgctgcaagcgggacctccaagatgttcctcccttcaagccccaatcatgctgctctctggacatgaaggggaagtctactgctgcaagttccaccccaacggatccaccttagcatctgcaggatttgaccgactgatattactgtggaatgtctatggtgactgtgataactatgccacactgaagggacacagtggagcagtgatggaattgcattacaacacagatggcagtatgcttttctcagcatccacagataaaaccgtggctgtgtgggatagtgaaacaggtgagagggttaaaaggctaaagggacatacttcctttgtgaattcctgttatccagccaggagaggccctcagcttgtctgcactggcagtgacgatggcacagttaagctttgggacatccggaagaaagcagccatccagacatttcagaacacgtaccaggtgttagctgtgaccttcaatgacacaagtgatcagattatttctggtggaatagacaatgatatcaaggtctgggacctgcgccagaacaagctaacctacaccatgagaggccatgcagattcagtgactggcctgagtttaagttctgaaggctcttatcttttgtccaatgcaatggacaatacagttcgntgtctggggatgtccggccatttgccccccaagagagatgtgtaaagatatttcaaggaaatgtgcacaactttgaaaagaaccttctgagaatgttcttgggtcaccntgatgggaagccaaaatagcaagctggctcaa

SEQ ID NO: 85526 - DNA, 318 bp, Homo Sapiens
tcacccttaaatcaacaaaaagacctcatgctcatgcagtggacatttcttggcctgttttcctgtgggttttcttcagcatgatatgaagcaactgttggcatagccagtgggataaataagaaatggaatcatttggctgcctcgtcacttgtgctaatggtcagttgtacacacatgacatgtggaagtgacctgtagcagcggtcactcattttaacaattgaactctgctgggttgggtatttacctttgtctagaaaagaaatatgaaacattttctctaaataaatttattttctaagttaaaaagaaaaa

SEQ ID NO: 85527 - DNA, 953 bp, Homo Sapiens
  misc_feature (304)..(304): n is a, c, g, or t
gaaaatgcgatgcacatgaatcaacgggctaaggctccaatttcgggaggcggcccaggccaactatacagtttggagcaaagaatcttttaccgtgcaggcaatccagtacaaagcttgggaagaattgatctaaaaccagctggggaaggaagacgagccaaaccaaatggagaatccccaaattccgtgggggtcggattctaccaaccattaaaaatttaagactgagaggtagtgacttgtttaatttaaagccaccaaaaagtgatttgagacacagattctagcctaaatgaaaaantggccaatctgaatagaaggtatgaggaggtatgtgaggaagttttgcatgccaaaaagaaggaaatatctgcaaaagatgagaaggaattactgcatttcagcattgagcaagaaattaaggatcagaaggaacgatgtgataagtccttaacaacaatcacagagttacaaagaagaatacaagaatctgctaaacaaatagaagcaaaagataataagataactgaactgcttaatgatgtggaaagattaaaacaggcactcaatggcctttcccaactcacctacacaagtgggaaccccaccaagaggcagagccagctgattgacactctgcagcaccaagtgaaatctctggagcaacagctggccgatgctgacagacagcaccaagaagtaattgcaatttatcggacacaccttcttagtgctgcacagggtcacatggatgaagatgttcaggaggctctgctccagatcatacaaatgcggcaggggcttgtgtgctagccgttagcactgactgccagtatctgttttatcttgctggtgctgaacattctttgtgcaactccatggtctttctgggccttactgtgctggtataattaaaataaaatatattttgttctagaaacagacaagag

SEQ ID NO: 85528 - DNA, 783 bp, Homo Sapiens
tcgagctcggtcccttcctaccagcaagacgtcgaagaaagccttcaacacagagattaacaaaaccaacagagaaagaagaatttagtggaattggagatactggggaaagcagaagagagattcttcaaaatcttaagaaatttagtatcttcagagacatatgagaagacactatattcttcagcaataatacgatgccataaagagggaacttgtggaaaaagtgaaaaacattttctgaaaaacaggtcttagaaattaaaactgaagaaatagaactaaaatcaccagaaagatttgaaaataaaattaaggaaatttactggaatattgggcagtacgacagaaggatttttaaaaaacttagtccaggaactgtactaccagcttaatagttgtggacagaataaaagcagagggaattgcttaagaaaaaaaatttgcagtactaaaggacattcatctttaggttgagcaggtcctacaagtgatcaggacagtgaatgaaaaagatccatacctaggcatacccctgtgaaattttagaacacgggggtggtgggggtgggtgtaggtcacagaattatgaatcagaatggcctaagactggtcagtaacaacgggggaagttgaagacattggagaaacatcctcagggtgctgagtgaaaatgtgtctgccggagggggaaaaagacattttcagatatacagggtctcaactgatttatctcccacgggccttttctcaggaaactccaccaaaacatgtccataaacc

SEQ ID NO: 85529 - DNA, 824 bp, Homo Sapiens
gccacccaaaaagatcaggcgcacaaatgcatcctcctcaccccagcctccggggcccgccagcaggaactcctgtctccctatcctcttgacgatcggcggcctctcctcactgcagtagggaaacaggtcctgggagacgcctgtgctgtaattgtggatgatgtactgagtggtcagagccagacacaggaagtggccgtccacagccacagcgaggggctgctcggcagtcgacacctccttgacgatctgcacccggtcctcgtacaccagaagacatctgaatggttctgcgtatgacagagatgatgcaaacttctacacagaaggggtccccactcacagggttctcgttcagtgcaaacgtggctgccgccttgatgcgggccgccgaaggcactggctcgaggttcagcatgttgaccaggctgatggagttgtcacacagcaccagcagcctgttgagtgctgaggccgcgcgcagctcgttcacgggcttcttgaagcccaagtgtctctcaagctgtttggtgacagtaaacgtggctggcccagcaggcactggcctctcctccaacagaaagtggtagacgaagcagtcgttggtgcccacgtagaggtccctgccgcagcactccacgcactctatgttgacgcgctccttgtcgcccatcagcagctcccgctccacagcagagacaagcgtaaaggctttgatgctcatcatgtctactggctgatcggcgccggcgcccgccgtcccgcgccgccccgcggcctggggccccgcaacccagcaaggcccgcggctcctgggctgg

SEQ ID NO: 85530 - DNA, 906 bp, Homo Sapiens
ggcagacccggagggaacggaggaagcggtcatgtctcgctacacgaggccccccaacacctccctgttcatcaggaacgtcgcggacgccaccaggcctgaggacttgcgccgtgagtttggtcgatatggccctatagtagacgtttacattccacttgacttctacactcgccgcccaagaggatttgcttatgttcaatttgaagatgttcgagatgctgaagatgctctttataacctcaatagaaagtgggtatgtggccgtcagattgaaatacagtttgcacaaggtgatcgcaaaacaccaggccaaatgaaatcaaaagaacgtcatccttgttctccaagtgatcacaggagatcaataagccccagccaaagaagaactcgaagtagaagttcttcatggggaagaaataggaggcggtcagacagccttaaagagtctcgacacaggcgattttcttatagccagtctaaatctcgttccaaatcattaccaaggcggtctacctcagcaaggcagtcaagaactccaagaaggaattttggctctagaggacggtcaaggtccaagtccttacaaaagaggtccaagtcaataggaaaatcacagtcaagttcacctcaaaagcagactagctcaggaacaaaatcaagatcacatggaagacattctgactcaatagcaagatccccgtgtaaatctcccaaagggtataccaattctgaaactaaagtacaaacagcaaagcattctcattttcggtcacattccagatctcgaagttatcgtcataaaaacagttggtgaacagcaacagaaagagcaccacgccgtctttaatataagttattaaactctcattatgttaaataaaaattctttaaggcatacagaaa

SEQ ID NO: 85531 - DNA, 1041 bp, Homo Sapiens
  misc_feature (535)..(548): n is a, c, g, or t
  misc_feature (930)..(964): n is a, c, g, or t
ttttttcaaatttttaatgtaccaatttattgcatatgtcagtacagaaaaatagaaagtatattttaaaagaaatttattgtaaaaaacaaatgtaaatgtttgcttgccatggttagcacacaatgtactatgacattcaaatttgagttataaaattttatcacttcaaataaaatatggcaaataacaaaaatatgatttacattatgaaatgggattaacttatttaatactgaacatacttgaatatgttaaaaacaacttgaattttccatatacgctgtactgacagaaataatgataaattatgttaaacacacactcacctgttacatatgtatatacggcactttttgtaaaaaaagtgtctcatacatggtcctatttttaaactacattttaagatacaaaatataaatggaggtatatttgcgccatttggcaaaaatgtatagactagtattaagatgactgcatttatcttgccatacaaatgaatatattatttccaatttgctaaaactatgtgtgnnnnnnnnnnnnnngtattaagaataaacagaagtacatttcattttctaccctatcaatttaaaaaataaatgtctgtgctctgtcatttccatctttccctgagtaactatgaaaaatacctgaatttaagtggataacccataagggatacgactaatgtcttcctctcacagtttgttaaaaatacatatcaattatctaacatcaataggaaaatgggaaagaagaatgacgatggcaagagttcagtatctcgaatcactgacgttaatctagaaaagtgacttgctgtgacatcctttttgacaactttaccttacctatctcctatcactcaaggagcccggccgtaatggccgaattcccgggcatatgtccggtaccgtcgactgnnnnnnnnnnnnnnnnnnnnnnnnnnnnnnnnnnncggccgcttcctcgctcactgcttcgctgcgctcgtcgttcggcaacggccgagtagcgccctatatgatctataca

SEQ ID NO: 85532 - DNA, 1077 bp, Homo Sapiens
cagtcgacggtaccggacatatgcccgggaattcggccattacggccgggggaattgtgtagtttgagttgctgcgagaaggagtcaagaacttagacttgaatgggaaggccaactggtgagggaagtggggtattatctactcaaatgttctaagctaatacaaaacaattacctggcaagcatccccctctgcccttcttgagattctgaatgaacttacaatcagatcaatggtgagacccagttatgtaactttcctttgaagttctaaaggataattgaaaataaagtagtatggcatgtttaacagtaaggagtgacactaaaatttgaatataacagtatgttgcaactatttataatagacctatttatgttttgagaactaagtaaaatgctatgaaaaattcacataaagcacgtaagcaccaaatgaaaatcatttcgtgctttcaaattaatgatactaggcttgtaggatgtcttagaatcatgtttaacaagaagttaaaatatttgcattttgaaatttttatgcagtttggctaaggaggaacttggaaaataacattcatcagcttctacactgcactttttgtatgtggactttgtaaagtttaatgtccgtttaacagttgcttgtttatttgtgtaaacctagctagtaaatattgatgatgttcagggccactgacttgcacagcccttggagcactattcacacagaacacaattcagagtttgttaagacattaacacactttgatatctattccaaaaatacttttgttaccacaggttcattgctgtcatttagacaaaattaatgtactgtgatattttcctactcttaagatgatgttgcccagcctagtactgtcagaaattcagttctgatgtctgtgtgtgcaagatattaatgtggtccctgtaagaaataccagagttggtcatgatttactaaggagatgtaatattttctttgacctgttaggaatataacttgtgtcttgatttgttgcacatcatattttttgcaacattaatgaatttaaataaattaattggaacgtt

SEQ ID NO: 85533 - DNA, 854 bp, Homo Sapiens
tgagccggtccgtcacgcccacaggactgtgtggatggcctgtttaaagaagtcaaagagaagtttaaaggctgggtcagctactccacttcggagcaggctgagctgtcctataagaaggtgagcgaaggaccccctctgaggctttggaggtcagtcattgaagtccctgctgtgccagaggaaatcttaaagcgcctacttaaagaacagcacctctgggatgtagacctgttggattcaaaagtgatcgaaattctggacagccaaactgaaatttaccagtatgtccaaaacagtatggcacctcatcctgctcgagactacgttgttttaagaacctggaggactaatttacccaaaggagcctgtgcccttttactaacctctgtggatcacgatcgcgcacctgtggtgggtgtgagggttaatgtgctcttgtccaggtatttgattgaaccctgtgggccaggaaaatccaaactcacctacatgtgcagagttgacttaaggggccacatgccagaatggtacacaaaatcttttggacatttgtgtgcagctgaagttgtaaagatccgggattccttcagtaaccagaacactgaaaccaaagacaccaaatctaggtgatcactgaagcaacgcaaccgcttccaccaccatggtgtttgtttctagaacttttgccagtccttgaagaatgggttctgtgtctaatcctgaaacaaagaaaactacaagctggagtgtaggaattgactatagcaatttgatacatttttaaagctgcttcctgtttgttgagggtctgtattcatagaccttgactggaatatgtaagactgtgcaaa

SEQ ID NO: 85534 - DNA, 484 bp, Homo Sapiens
gaggggatttacattctgtagaggatccctttcccttccccggtgtttttctgatcctgaagagattagctaagagtctagtaccttttattaaaggtctgaataggaaatatttgctatctgttgcctctaagggcagccacctatgagacttcatctacataagaacctaggtctctacaaccccttatcttaacccagactctcctttcaattaatttcagccttttagataataactctttcagccaattgccgatcagaaaatctttgaatccacctgtgacctgtaagcttctccctttccaggccaaatcaatgtatacttcacatgtgtcggttgatgtcttatgtctccctaaaacatataaaaacaagagcctttaacccaactaccttgggcttgtattctcaggacctcctgaggctgtgtcctggctcatcatccttaaccttggaaaaataaatctctaaattgaaaaca

SEQ ID NO: 85535 - DNA, 422 bp, Homo Sapiens
aagaaacatgcaggaatacactctacctcttccttgctgtgtctggatattgtcacatgaggacttgacatgccgattgtggcagtctctgtgaccaagagcagaagacaatagcagcatagaaacctcaaatgaaaaacctaacatttcaagctactaatttagccaaccttggcatcagctatctctggtcttagtatatgaggtgataagcccccactgttcaagttggatggccatcaattgctgcagaatagaagttaatgaggcttcctcctcctggatcccctactagaccctgacatgcccattcagtcacaggcagaaagggaagcagagggtaaggagacctggctgactgtgccagacgcagatcttacctgtcctgcttagaacactcaaagcttaattggttaaacaaa

SEQ ID NO: 85536 - DNA, 1225 bp, Homo Sapiens
tgaaactcctccaaagccaatttcagcccttggtaagcttgcagacagttactgatcttaaatttaattttaaaagacaatgtatcttaattataatttagctttttaaaacaatgagatagctttacatttcccctttgtttgaatgagaaaatggatcttgggttgctatgctagaacacttgtagattgctgggtcctttgtaagggggccatggacacaccacactttctttcaatccttacatttgaagcattgatattcttcaaaaccttcttgttacatgtgcgcaatagaaatttctaatgttcatgacttttatctttcctgtccatcaattcactggttgtaaatgcttcctgagacctgtctaggtctgtatcccagattgttgcttaatgacatctgacagatgcattgttttctgaaatcagcttaagacaccaattgtggcaactggaaactcattacctgctgcattggatcaactatggaagttggagcaggggtgggcggaggtcacctaaccaatcaatggaaggcaactcacacctgctccaagcctcagctttgagaaacaaacacgtttataagaaaaaatatatagctattattacagaagtgaatatgttgtgctctcttactgctcttggtgcattgacagtttctgtatctcaaccctattcatctttatgaaaaagcattctgaagatctatcctcagcactgctgagtgtgcagtcacactttcctaccaacccccttcttaccatctctagctgccatttgtggggggaacaaaacaagggaatcctgattgtgtacagtataaattgtattatattttttgtacttatgttttatgtaaatagtttgtctcattcaattgtatgtgagcattgaaataaatcctaccatttaggggaaaaaaacaggacaccatgtatctagagacaatgaaagacacacaaccttgtttgggccgagatgagggcctcgaaaaagagttcctaagacacctgtgttgggccgcggggcccccaggtatacggtagacacgggcacaaacgggggtccccaagagaaacccggggacaggaacaagagcggaggattcacaccaataaaaaagccccggggggacccagggggtccgaacaaatccacagggggactagaagggcacacgggggacaccaacaggagccaaagagccgaacaaatg

SEQ ID NO: 85537 - DNA, 896 bp, Homo Sapiens
  misc_feature (68)..(110): n is a, c, g, or t
  misc_feature (114)..(114): n is a, c, g, or t
  misc_feature (284)..(307): n is a, c, g, or t
aattcccgggattgtaagcccacctaggtcctgcataagatccccctcacatacttcacaatatatannnnnnnnnnnnnnnnnnnnnnnnnnnnnnnnnnnnnnnnnnnattntggctaaaaaattatactgccaaaattactgattataaatacttgactacactgattgatgggacaaaatgattaaagtattttcagggatcttattccatatgtcaccaccaaagatttctacagtgttataaagtatataaatattccaaatttctgtggttaaatannnnnnnnnnnnnnnnnnnnnnnnagaataacacagtctgtgctttccaaaaatgcttgaacttttatgttgttaagaaatatataatgatatcttacattaagcatgagtctaatttgtattaattgggatggactaaattttcatttgattatcaggaaaattaaggagttatatatttaaaagcaattttctgtgttttcttctttgtaagttgactcatttgtgaagcaattaggcaaattttgagaagatcattgttattgtggtttgcagtatatatttcttagtaaatatcacttaagattaaatttttcagaaagaaaattatagcttttttcccaaaatatttttaagatttaatctttttgtagtatgctacagatttaattatattaactcttttttaagacattgaccatgacttaacattttgcctttctaacaccttttaaatctatgtactttaatagttaagagaaaataagtttgcagatttttaataatctgtttgtaaaaggctatctctaagcctagtatgtgggtaattttacaggtgtgttttttgataactttaatataaaataaactcattttatttgtggcaaaaaaa

SEQ ID NO: 85538 - DNA, 315 bp, Homo Sapiens
aacattgtagactttaacagtttacaaaatgcatgataaacatttaaccaagcatttgcagtccagatggtcttcattcctttctcaccatagctgtgaggtagaaagggctggtaaacgagctgcatctcctcacttgtgattgaatacttgttctagcagaccatctgccactctaggacaattaactgggatattacttagatatagcaatagtagtggtcttgctgttgcttctatgataaatactcactgaattctagatatttgcatcattcatcgttgtttctgaaaaccaagctacctgccagtaaa

SEQ ID NO: 85539 - DNA, 382 bp, Homo Sapiens
cagagcacaagaagtaccagtccaccaactcacattttctatattaataattcttaactaaaagaagttccatattcgacagcattttagttttttaatagtacttattagcatcaaccatcttgataatcaccaagggaaaaattaaaaatacctagactgcaataaacctttaaattggagttttcagtgagaatttagaagcaatcactacctttctcgtttcatttgtgtaaccatgcagcataggcactgtgttacatcatctttacgctttggtatttgaacttattacagaattttttctctaaattggatgtttctttatatgaccttggaaactgaagtgatcttagcattaaacaaaaaaaattattgaaaa

SEQ ID NO: 85540 - DNA, 580 bp, Homo Sapiens
ctgtttttcctcagaccatactttccagtcggatcaattctattgccattcagatgtcccctcatcagcccatgcaggtttcttcgtcgaagacaattttatggttggtcctcagctgcctatgcccttcttccccacaccccgttatcagcggcctgccccagtggtacataggggttttggcaggtatcgtccccgtggcccctatacgccctggggacagcggcctcgaccttcaaagagaagggccccagccaatcctgagccaaggcctcaatagacggacctaggccttatttcctctttatgaacatggattggacagatctgacacttccttcccattgcttggcctgaacagactgaccttgttaacttaagcctggagtccatgcctcgtcttccttttgttcattgctgttaccaagaaagccaaggaagagcagcctgactcattcttcttggctgcagcctcttccccacttcctgggagtgacccagcgttattcctgcctcctcactcctattctctttgcctttgtgtaaaaataaaatggaaataaacaagttgcaaagaagt

SEQ ID NO: 85541 - DNA, 460 bp, Homo Sapiens
acactggaggactgtcggggatttgggggattaagtaaaaggtttataaggagagggtggaaagagtggttgatggctgatattctggtcatttatactagctactcagtctctactttttctagaagtccccagtaaccaaagcccaacacatttggtatcgttgattccttccattgtttgctttgctttgggttgcctaaggctgtggttatctctgagccacctaaattctcaccctcagctgaaatcactactgtctcttcatggctctcagtatatttcaatccttcttcaggaactggagcttttgagaataaggcaactttaggattgaccctaggacagaagtctgctctcaggatccttgtatgctcctgaatatgaattccatagtatgatatttggagctccccagatccttgtaggcatatgtgtgtgtgtgtatatgaagccaaaa

SEQ ID NO: 85542 - DNA, 562 bp, Homo Sapiens
gcaacagaggtgccaggcctcagcctcacccacagcagccccatcgccaaaggatggaagtaatttgaatagctcaggtgtgctgaccccagtgaagacaccagataggacctctgagaggggactggcatggggggatctcagagcttacaggctgagccaagcccacggccatgcacagggacactcacacaggcacacgcacctgctctccacctggactcaggccgggctgggctgtggattcctgatcccctcccctccccatgctctcctccctcagccttgctaccctgtgacttactgggaggagaaagagtcacctgaaggggaacatgaaaagagactaggtgaagagagggcaggggagcccacatctggggctggcccacaatacctgctcccccgaccccctccacccagcagtagacacagtgcacaggggagaagaggggtggcgcagaagggttgggggcctgtatgccttgcttctaccatgagcagagacaattaaaatctttattccagtgaacaaaaaggaaacaagaaagaaacaaaaggg

SEQ ID NO: 85543 - DNA, 530 bp, Homo Sapiens
cagagagctgatacccggactggtaatcccacaactcactattttgggaggaaggggaagacagggaaagagaaggaaaaaggcaaatgggaaacattccccagagctgtgctcctggtctcacctgcaaaaaagaattgcagccacctaagagaaagctgagctgcccctcagtcctcactgtcacctacctctatcacaacaattgtaccaagatgaagacttccccagacttcagaaaataaagtcaaaccctagattttgttttaaaataggaaactcagaatcaacttgcctccatcctctgggaaaactgctcccacacaggccttggagtgtgttgtagcactgtggaggaatgcagaaaggatgaaagagatcttgattctcctagtggttctcttcactaccgtaggcatccctcagccattgactcctccttctttctcttgacattcactttcttggccagtcttacatgcttatgacgtctactttccaataaatttactcatagtccattaacttcc

SEQ ID NO: 85544 - DNA, 632 bp, Homo Sapiens
  misc_feature (46)..(186): n is a, c, g, or t
  misc_feature (263)..(271): n is a, c, g, or t
tgggttcacgccattctcctgccttcagcttcgggagtagctggcnnnnnnnnnnnnnnnnnnnnnnnnnnnnnnnnnnnnnnnnnnnnnnnnnnnnnnnnnnnnnnnnnnnnnnnnnnnnnnnnnnnnnnnnnnnnnnnnnnnnnnnnnnnnnnnnnnnnnnnnnnnnnnnnnnnnnnnnnnnnngagtgagccaccgtgcccggccaacattaaggagttattacagtgctggtgtgatcacggtatcaatagttggttgnnnnnnnnnaaaaagagtcatatttttaaaatatgtactaatttacagatgaaacggtatgacaactaggattgcttccaaataatctggtgggagaggagccaggagtttacaagaatagccatgaggtgatgattgctgctgggtgataatgggtgcacaggggttcaattgccctctactgtactaaactttcccaaagcaaagacactgaaaatctaaaataaaaataagattctgctcctgaccccctccttcaaaaagagagacagatgctacagaagaggtacttggcactctacttcacagctgctggatgatggtagtcacaatcataattagcagcagcagctaacatgtatgagacact

SEQ ID NO: 85545 - DNA, 1593 bp, Homo Sapiens
  misc_feature (319)..(334): n is a, c, g, or t
  misc_feature (459)..(497): n is a, c, g, or t
aaatttatgttgcggaaaggtaaccacaaagttatgatgaactgcaaacatccaaaggatgtgagagtttttctatgtataatgttttatacactttttaactggttgcactacccatgaggaattcgtggaatggctactgctgactaacatgatgcacataaccaaatgggggccaatggcacagtaccttactcatcatttaaaaactatatttacagaagatgtttggttgctgggggggcttttttaggttttggggcatttgttttttgtaaataagatgattatgctttgtggctatccatcaacataagtnnnnnnnnnnnnnnnncacttcaactccctcccccatttagattatttattaacatattttaaaaatcagatgagttctataaataatttagagaagtgagagtatttatttttggcatgtttggcccaccacacagactnnnnnnnnnnnnnnnnnnnnnnnnnnnnnnnnnnnnnnnacagaaaaatctgtagagaagaggcacatctatggctactgttcaaatacataaagataaatttattttcacacagtccacaaggggtatatcttgtagttttcagaaaagcctttggaaatctggatcagaaaatagataccatggtttgtgcaattatgtagtaaaaaaggcaaatcttttcacctctggctattcctgagaccccaggaagtcaggaaaagcctttcagctcacccatggctgctgtgactcctaccagggctttcttggctttggcgaaggtcagtgtacagacattccatggtaccagagtgctcagaaactcaagataggatatgcctcaccctcagctactccttgttttaaagttcagctctttgagtaacttcttcaatttctttcaggacacttgggttgaattcagtaagtttcctctgaagcaccctgaagggtgccatccttacagagctaagtggagacgtttccagatcagcccaagtttactatagagactggcccaggcactgaatgtctaggacatgctgtggatgaagataaagatggtggaataggttttatcacatctccttatttctcgttttccccttaactctctaccatttccgtttatgtggggaaacattttaaggtaataaataggttacttaccatcatatgttcatatagatgaaactaatttttggcttaagtcagaacaactggccaaaattgaagtcatatttgaggggggaaatggcatacgcaatattatattatattggatatttatgttcacacaggaatttggtttactgctttgtaaataaaaggaaaaactccgggtatatgtatagatgttcttcacttatagacatcttctttgctttcctttggccttgggggaggaaggggagaagtgctcttttccacttgtgggagtctcccattggaaacataaatcctatagtcccaggaaggattcagtcccccagtggctttcccatccaaagaagaaagagtttgagtttcttaaactctgctgttctggccacttactcccactagaacaacccagggacaaggtgccaacatg

SEQ ID NO: 85546 - DNA, 1631 bp, Homo Sapiens
  misc_feature (673)..(685): n is a, c, g, or t
  misc_feature (1224)..(1224): n is a, c, g, or t
  misc_feature (1253)..(1326): n is a, c, g, or t
  misc_feature (1448)..(1478): n is a, c, g, or t
caggtaaagggatagttgctttgtcatccgtttttaattattttaactgacccttgacaatcttgtcagcaatataggactgttgaacaatcccggtgtgtcaggacccccaaatgtcacttctgcataaagcatgtatgtcatctattttttcttcaataaagagatttaatagccatttcaagaaatcccataaagaacctctctatgtccctttttttaatttaaaaaaatgactcttgtctaatattcgtctataagggattaattttcagaccctttaataagtgagtgccataagaaagtcaatatatattgtttaaaagatatttcagtctaggaaagattttccttctcttggaatgtgaagatctgtcgattcatctccaatcatatgcattgacatacacagcaaagaagatataggcagtaatatcaacactgctatatcatgtgtaggacatttcttatccattttttctcttttacttgcatagttgctatgtgtttctcattgtaaaaggctgccgctgggtggcagaagccaagagaccttattaactaggctatatttttcttaacttgatctgaaatccacaattagaccacaatgcacctttggttgtatccataaaggatgctagcctgccttgtactaatgttttatatattnnnnnnnnnnnnntctatcaaccatttcatatatatcccactactcaaggtatccatggaacatgaaagaataacatttatgcagaggaaaaacaaaaacatccctgaaaatatacacactcatacacacacacgcacaggggaataaaataagaaaaccattttcctcaccatagacttgatcccatccttacaacccatccttctaacttgatgtgtataaaatatgcaaacatttcacaaatgttctttgtcatttcaaaatactttagtatatcaatatcagtagataccagtgggtgggaaagggtcattacatgaaaatatgaagaaatagccatattagttttttaacctgcaatttgcctcagcaacaaagaaaaagtgaatttttaatgctgaagataaagcaagctaaagtaccagcaaaagccttggctatttatagcagttctgacaatagttttataagaaacttggaagagaaccgaaattcccttgaaaaatcggatgcccagttccatctccttggttccccacctacctgaaatntcctttataaaagtggggtgggcccaagnnnnnnnnnnnnnnnnnnnnnnnnnnnnnnnnnnnnnnnnnnnnnnnnnnnnnnnnnnnnnnnnnnnnnnnnnnctggaagaaacaataaaaaacccccccaaaattttttttgggaaattttgggccggaattcgaaacttttccacccccttttctcctggggtaaaaaaaccccacattttccttttgtgggnnnnnnnnnnnnnnnnnnnnnnnnnnnnnnnttctaaaataaacaccttttaaaatactgtagggcacaaaattttttaaacccccaatttccttaaaattttgggtaagactatttcggccccaaaaaagacgtataaagtccaatggggggttttttcttttctaaattccccaccgccggg

SEQ ID NO: 85547 - DNA, 465 bp, Homo Sapiens
ctgtggattcagttcaagtccaatgaagggaacagcgctagagggttccaggtcccatacgtgacatatgatgaggactaccaggaactcattgaagacatagttcgagatggcaggctctatgcatctgagaaccatcaggaaatacttaaggataagaaacttatcaaggctctgtttgatgtcctggcccatccccagaactatttcaagtacacagcccaggagtcccgagagatgtttccaagatcgttcatccgattgctacgttccaaagtgtccaggtttttgagaccttacaaatgactcagcccacgtgccactcaatacaaatgttctgctatagggttggtgggacagagctgtcttccttctgcatgtcagcacagtcgggtattgctgcctcccgtatcagtgactcattagagttcaatttttatagataatacagatattttggtaaaa

SEQ ID NO: 85548 - DNA, 745 bp, Homo Sapiens
  misc_feature (455)..(468): n is a, c, g, or t
gcttgaaaacctttctatgtccttgtccctcttcatagagtgctttccctccacactttgtgagactaactcctactcatacttcaaaactgactttaagtgtcccttcctcattatggaggtctttgcaaacttccttgtccaaaatgattccctgatctccaccttcatttctttctgtgtaacactctgcagttttgtccagagtagtgagcacaatttgtaatgatgtatttatttaggtgaccgttgactgtcttttctaagtgaacagtgagctttttgttcaccattgtataccctcggtgcctattaagtactgaatttgctgagttcctagtaaggatgaaagtagacaaggcaggaagggaaagaatggctttttacagcagttcaactttgtctataaaaatagcccagaaggccaactgttaaaactgtgatgaaaatgaagnnnnnnnnnnnnnngaggtctgtgcatacacaaatttaatctctgtttgatattttacggccccttctatcctcaccgtttcttgggagctttgctactttttgagagcaaaagccataaaagcaaaattcagtcatagactaaaaaacacttaacaaaattgggattgtataaaacgtaagttttaaatctttcctttttaagtcttaagcattttcctatgtcactaaaaatttttaacagagatccatccctatttttgaaaaatttaattagcaatcctcattatca

SEQ ID NO: 85549 - DNA, 345 bp, Homo Sapiens
  misc_feature (161)..(180): n is a, c, g, or t
actgtgcccagcccatttttcagatattaatagattttaacacattgatcattgtgcctccttttaacatacagagtaagttacaggcagaaaagctacatataaaactcattttaccacagtgagatattatttcacatacattggcatggctacaattnnnnnnnnnnnnnnnnnnnngcgctggcaaggatgtggataaattataactcttgtacattgcaagtgggatatgaaatggtaagtatacagtagaaaacagtttgtgagttcctcaaaaagttaaacatggaattaccataagacccagcaattccaatcctaggcatatatcagaaagaacca

SEQ ID NO: 85550 - DNA, 359 bp, Homo Sapiens
tttggctgaatgaaccaatgagattcatgacagcatcattttgcactatggtcttttaaagaattcgttttctgaaggtagctgaattttgtaaagtttttctttataattaaggcaaaggtgaatttattaaagtcaaagtctcattatcatcaactttaatagagtccaatcttttgaggttgcattataatagttttatagaactaaacactagaaaattacaagagaaatggcaaaacagaaggaagggaaaataagtccataaacaccaaaattgaacatcagttgtctttgggcttaaaaatttagttgtacatacatgtgaggaaaaagactggcataatggaagttcatgc

SEQ ID NO: 85551 - DNA, 610 bp, Homo Sapiens
aataaataatcaacaaccatgctagctgattgctcccgagataagggtcctagaatgaaattgtgaaagtcaatcatctctctcctatggtatgggtagagggcaatggagagacatcgttgctgtgttgaaagtccaggcagagggcttgtgagccagtcagtcccagttgcttgaggagcaggatggaaggtcaatagctattttgcaaaatattccaggagccagaagtatcccaggaaggtttatatttcaaaataacttgagagaagttttaaaattaccttccctcttgattttccattagttctgtggagaaggtaactttatcttcccatttcagaccttgggaaatctgaaggaaattccctgcccctttcaatattatgattaaattttgagtagcttctgtggccgtagatgaaagaggtaggggacctgaagtgggcactgagcacactctcactttctaacactacagagcagtgttcttggctctgtccattccaccctaatattgtggccatgctgtaattggcaatctagtccattgcttttagttgaacgctgggcagctgtatgctagtaaaatggttcttggaataaaaaa

SEQ ID NO: 85552 - DNA, 128 bp, Homo Sapiens
tgtaggctttctccttctctagacgggacttcaagatagaatggaccctctgtcatcatttttgcatctccaacagccacaacagtgctttatatataacaaatgaccaataaatgcctatcaaaaga

SEQ ID NO: 85553 - DNA, 590 bp, Homo Sapiens
agagcaaaagcacttttaaaatgatgttaagtggaagacgaacagacaaatgaggtaacttctataaagatggaggttgcttctggctcatcagccatcgttgatggtaaccagtcctacaattctcattaggcagttctgttaccccactatttccttggggtctgttgtgctaaggacaggattggttgggtaaaggggtgtggcacaaataaccctcaggaatacaggccacagagctaatgaagggccccaaggaaagaaagacctgcccatcagcgatgaattctctcccccagtgccacagacctgagggcacgtgacccaggaatgtgcatccaaagataatactaccttcagagaactctacttataggctgtggtttttcaagaaaaaggaaaagattcataattcattgagctctttccttgtgagaagaaaggccactcttttgtgtgctgaagttggacaacagttcccaaggaagctgaattctagctgaatattgttattgggttttgcactatgccctttatgttgtcattaatcaataaatacgtgtggaacaaatgattaactagaaaaaaaa

SEQ ID NO: 85554 - DNA, 759 bp, Homo Sapiens
cggcacgaggaaccatgagaaagctttaaatggggatgtaaaatatgatctgcggaagggagagagcagcatgctggaggggatgatttggcaagatccgctgaagaacacaagcctcgactgctccccggcgtggaagaaggaaggcgataaatacctgtaacggaggacgaggaaggagcactgagttctatgtggaaagaaagggtcaaaaagaggaaaacgcctattcacatgcatggcgtttaacagatttattaggttgtttgctgtgtgatgtaaatctcctcctctctctccttgaaatttcttgagtgaattctacattgttcattcattcatgtttatgtgccagcaagctttgggagcactgtaaaaataaaaaaggttagaccactgttagacatctgggaaacatctatgttagagaaggactatatattaatttatctcatttatgggaggcaaatactatgattattgaaggtacatctctttctttatggatggagtacatcttatttttctaaaatttgtatttgaacctatttatttctaattgtcaaaaatgtgaagtgagaaacttaaaaactttttagtttctcttgtcccaccattttatgtacttccaggttgtcaaataatttggaattttagacttagataattctctaatgtatattatagatcttctatttcaataattagcttatattttaattaaatagaataactgcattaaaatatacttaactatgt

SEQ ID NO: 85555 - DNA, 552 bp, Homo Sapiens
tcattctttttagatttatttgccaaagttaaggacacgcacccaggagacagacatctttctctgaagatgatttttgagggcttcaaatttaaaggggaaagggcaggatattgagaagtacacaattttcaggtaagggggtgggtgggaaaagatagtcatgcctttgtctggctccatgaatctgcatgtttttacataagatgacataaacggggcagaagaaaaacgtagggaatctgcattctacataacacagacaaaatggggcaggggaacaattagatatgcatttgcgtgtggtgggcctgggtgactgcacctgtaaagataagctatcactttgcattgctcactaggaatttccttgtgagcaaaatatgggggaggcatgtagcttttcctcttgtagccatcttatttaggaaccaaaagggggaggcaggtttgcatgacccagttctcagcttgatttttccctttggcaaaatgagttttgggggtccccaaattttaaatttcccttccaaaacattcctgcctaaccgg

SEQ ID NO: 85556 - DNA, 523 bp, Homo Sapiens
tcttaaacttacttcctgtttataacttactgttgattttgcaaatggtgaatattttctatttagttgagatgtgcacctcctctctagttttataatatccaaaattaagtctcttctggttcaattgaagcctcatatgccaaaaaatagccatgaactgaccatgacaaagaatgagtaaccagaggcatcggcatttcaatgtgttataaatatttgaatgtgtgtgtgtgaagggggtatttttttcttgatgttaccagtgtaaataatccaaatataagtatatatgaataaatgtttagatacacataaattatacctttgaaatatccacaccacagtgtcttagaaccagggtactttgcttatgaagaaaataggagtggcggtctttttaatcaaatagaagcatgctttacaccatatctgcatggatattaaaatataatccttagcctatacctgaggtttttttcctagcataatgcaaaattaaaagatcacatctaatcacctt

SEQ ID NO: 85557 - DNA, 486 bp, Homo Sapiens
caatagcaaattaggaattgacaggaacatagctaatctgttaataatatctgatccagagaatggatcagatattacagtgcatatctgatccattctgtggttttgtagacctgtgaattaagaatggccctttacatgtttaaatgcttttaaaaagtcaaaaggatacgacttgtgaaaaatatggaattggagcaaagctatgctcatttgtttatgtattgtatgggctgcttttgcactacactggcagaattgagttgttgagacagtgactatatgtggcacacttgtgaccaaatgtggcacacttcactttacactgctgtttggtccactgcaaattgcaataatacagttacaactcaacagcattttgagtgccatgaatatagctgtactatgacatttagttctattaactttttaattactagtaagtacatatcatgtcaaataataaaagaagagaaacaaaaaaac

SEQ ID NO: 85558 - DNA, 496 bp, Homo Sapiens
  misc_feature (48)..(48): n is a, c, g, or t
tttaaaggatggcttaaaccacccgagtatgtcaatgggcaatatcangtccacataggagctttcaaatgctctctttctaagcccaggcagctgagtgatttgtgtgatattcgatttttagtttttcagcagcccgttttgatttagtgctttctgcatttttatagacatcagcaatcctgtagcaggtcctgtttggctgatacattttacaagttgataatagtaaagggtgtgtagagatagaacctgatatagatgtgttcttttgaagcatcatcattactgagagataagtctacatagaaacaaaacacaaaacagctagcagctatattttaaatttttgattcaaccaaaaaattagatatattgtactaccttgatgtttatccccttttctacatatttgtgatgttttgaatattgaataggaattcatgaagatatttccaaataaaaacaaaaatgatattggaaatttttataaaaa

SEQ ID NO: 85559 - DNA, 397 bp, Homo Sapiens
aattgtgcaggctttcattaatgcaccagtgaggatgaaagaaaacaattcatttatgtaattgcaactagcctgtcatacccaacttgggaaagcagcaactcccacagcatgaggtccacattatgcaacccaggctggcatttagatgagttcctttttgttgaaaatatatgaacttctaattattttaaatgtataagtaatacatatgtaaatctacattatacgaatgtaaaatctgttttagttaagaagtaaatccacagtagcaatttagttgtccattttagacattgagaaagtgtaggcatcaataataaggaaatacttgaaagataacaaagtcacggaattatatatgattctggtctgtattagctatctgtttctatcc

SEQ ID NO: 85560 - DNA, 579 bp, Homo Sapiens
  misc_feature (24)..(24): n is a, c, g, or t
ctgtacaatgtcagatttgctgtntcatgtgtcttcaactttatgggtttaatttatgtcttcatcaaatggctatggtatggatttaccataattgtatacatgcatacatgcctacctatgtatatataaacaaacatttttgtaaacagctcagtgaggactttggactggcataaatcataggaatatgattatgaggatacatccaattttcagattgggcaatgtatacagtttattatcatttctgattttgggtagagttagtacttaagaacagcattgaagaaaagcagtataacattaaaattaagaagatttaaaatacaagaggattcataacagtcacttttaaaatattgttttggctttctactttggagctgtaattttaaaaaaagaatgaacaggtttttgtatgaatatgttagaatgactaattatagagcatctttcaactggaatacatgtagatactaacacctggttgtatttgatgtaatttcagtgcatacagtgtgtataatctgtattaagtgaaatacttatgaataaagttgtttctgcattacaaaa

SEQ ID NO: 85561 - DNA, 912 bp, Homo Sapiens
  misc_feature (46)..(63): n is a, c, g, or t
gtttttataaaaacattgaagtattagttacttgctataaatagannnnnnnnnnnnnnnnnnagcctgttatatttccttctgtaaaataaaatatgtccagaagaggcatgttgtttctagattaggtagtgtcctcattttatattgtgaccacacagctagagcaccagagcccttttgctatactcacagtcttgttttcccagcctcttttactagtctttcaggaggtttgctctaagaactggtgatgtaaagaatggaagtagctgtatgagcagttcaaaggccaagccgtggaatggtagcaatgggatataatacctttctaagggaaacattggtatcagtatcatttgatctgccatggacatgtgtttaaagtggctttctggcccttctttcaatggcttcttccctaaaacgtggagactctaagttaatgtcgttactatgggccatattactaatgcccactggggtctatgatttctcaaaattttcattcggaatccgaaggatacagtctttaaactttagaattcccaagaaggctttattacacctcagaaattgaaagcaccatgactttgtccattaaaaaattatccatagtttttttagtgcttttaacattccgacatacatcattctgtgattaaatctccagatttctgtaaatgatacctacattctaaagagttaattctaattattccgatatgaccttaaggaaaagtaaaggaataaatttttgtctttgttgaagtatttaatagagtaaggtaaagaagatattaagtccctttcaaaatggaaaattaattctaaactgagaaaaatgttcctactacctattgctgatactgtctttgcataaatgaataaaaataaactttttttcttcag

SEQ ID NO: 85562 - DNA, 595 bp, Homo Sapiens
  misc_feature (230)..(490): n is a, c, g, or t
  misc_feature (499)..(530): n is a, c, g, or t
cacagccatcgtgtgaggtatatatgatcattggccttaatttaccaatgaaaaaatagaggccgcagctctgctttaagccagctagtggcagagctcagataagaacctaggcagcctgctccgtggctcgtgcttttagccactaggctttgctgtgtaaatatgacacaaactgataaacaagagggcaaaaagaaagcgttgcaggctgggcgtggtggctcatnnnnnnnnnnnnnnnnnnnnnnnnnnnnnnnnnnnnnnnnnnnnnnnnnnnnnnnnnnnnnnnnnnnnnnnnnnnnnnnnnnnnnnnnnnnnnnnnnnnnnnnnnnnnnnnnnnnnnnnnnnnnnnnnnnnnnnnnnnnnnnnnnnnnnnnnnnnnnnnnnnnnnnnnnnnnnnnnnnnnnnnnnnnnnnnnnnnnnnnnnnnnnnnnnnnnnnnnnnnnnnnnnnnnnnnnnnnnnnnnnnnnnnnnnnnnnnnnnnnnntctatctcnnnnnnnnnnnnnnnnnnnnnnnnnnnnnnnngcattgccatttctatggattggattaaatgctttgaaaggactcactgaagccattccgttaaa

SEQ ID NO: 85563 - DNA, 612 bp, Homo Sapiens
gcaaagacaagctggaggctcacactactgacttcaaatatttacaggcttggtatcaaacagcatgatattggtataaaaatagacacatagactaatggaaccacatagagaacccagaaataaattcacatatttatagccaactgaattttgacaaaggcaccaagaacatacaatagggaaggacaccttcaataaatggtgctgagaaaattaaatatctatatgcagaggaatgaaacaaggcccctatctcaccatatacaaaaatcaactcacaatggattatagacttaaatataagacatgaaacaataaaactactagaagaaaatataggggaaacactttaggactggtctaggcaaagattttgtggctgagaccttaaatgcatagactactaaaaaatagacaaatgggactgtatataaagtgcttctgcacagcaaaggaaacagtcaacagaatgaagagacaacctgttgaatgggagaaaatattggcaaactcttcatcagataagagactaatatccaggatatgcactaaactcaacaacaacaaaaaataaatcttttaaaaagccaaaaatgagtagacaaatct

SEQ ID NO: 85564 - DNA, 453 bp, Homo Sapiens
gtttgtgaaaacaaaagattggaagctgtttaaatgacaccatatcagggttctggttccctaaattgtggtatattcatacagcctactcctgggtagacaacaatgaataaataaggagaacttggaaaccatttatgtagtgatgtgggataaccttcagtttatgttattaggtaggaaaaataaggttgaggacagtgactgccatttgtatataaaaaggagaaaaatggtaagtacataattgtgaattcataagttatctctggaaagagacatgagaacctggtaaccctgattaccttgggaggggaaggggcagtggtggctggggggatggaattgagagggagacaactgtatcctttcatagcttttgaaaatgtgggtgtactatgtactatgtggatgtactaccttttcaaaaataaaacatttaaaaagctaaaa

SEQ ID NO: 85565 - DNA, 485 bp, Homo Sapiens
  misc_feature (212)..(437): n is a, c, g, or t
aactggtcggagcaaagcccgtgttccctccactgccatccacaggtgcccaaagtctcagtcccgtgaggcttctacactttatttaccacagagaagtagaaccatgacttacaaaaagaaaagctctgaggtatcatcacagttgaaacaaaatgtaagtgatcttttgtcctacttagagaaaacaaaaaagtaggcccggcgcagtnnnnnnnnnnnnnnnnnnnnnnnnnnnnnnnnnnnnnnnnnnnnnnnnnnnnnnnnnnnnnnnnnnnnnnnnnnnnnnnnnnnnnnnnnnnnnnnnnnnnnnnnnnnnnnnnnnnnnnnnnnnnnnnnnnnnnnnnnnnnnnnnnnnnnnnnnnnnnnnnnnnnnnnnnnnnnnnnnnnnnnnnnnnnnnnnnnnnnnnnnnnnnnnnnnnnnnnnnnnnnnnnnntgtgtcactgtacttcagtctgggcaacagagtgagagagcctatctc

SEQ ID NO: 85566 - DNA, 519 bp, Homo Sapiens
  misc_feature (173)..(173): n is a, c, g, or t
atatctcagtggattgaatgcagatggagaggaaactttgatcatttgagagatggagtaccagcaagtcctctcatccttcaagttgtcagaggaaataacatttacctgaatgaaaggtcagttgggatgccaaatactgagaagattagagtccctcactttgccctccnatgtgagctacccaagctccaaatgacaaaagagtttgaagtggagtgctttgggagagagtcttcaaccttctggctcaactgctgctttctgcttatagaaagtattccaggtgctacctttccttcaatgttttgcacggctgtatgttgaaaagcatgaccttatgtgtcagtctgggttccagcaggaaagaatcaggtaatttagaagagtttaatgaagcgactctttaaaaagatatgttcaggactacataaaacaacaagagattgtgagacatcctgaggtttgcaacagtggggagctttaaccctatgtaggcctgaaggggccaagagattt

SEQ ID NO: 85567 - DNA, 305 bp, Homo Sapiens
  misc_feature (243)..(243): n is a, c, g, or t
gtgtgaggcaccgtattgctccagatttggcagattctgactggctaatttttataccttgacaggcactaaccactaagacctgagtcatcatatactttaaaataagtatctacatttaaatttcctttttgaattggttattaggaaaatgtccaactccttaggcaaaacttcctactttctgtctacaaataaagagaaccgcactttgggaggcctaagccaccatgcctggcgacncaaacattttttaaaaaagtgaaaacatgcatgtggtaaagacggggggaaaataaactggt

SEQ ID NO: 85568 - DNA, 553 bp, Homo Sapiens
  misc_feature (54)..(130): n is a, c, g, or t
ctggcatcgtggatgccagcaacgtggatgcctgttggtggtgtgctgatgctnnnnnnnnnnnnnnnnnnnnnnnnnnnnnnnnnnnnnnnnnnnnnnnnnnnnnnnnnnnnnnnnnnnnnnnnnnnnngcatgcttttacatttatttatgataggtgtgccccagagaggagtatcttttaccagttgctctggttgtttctgaattctggaagagtctggacagagaaattcccagcatatcctgcatctcattcttggtgtgaagcaggaacacgcactcattcctatttggctatagtcttcacagctttctactgtttcttttaaaagaaggaaactaaaataatataattcaatgttgtccagtcagctttgattactgtcggtccctgtgtgtgaagtgctgtgctggcttgaacgggacatgcaaaaatcaagaaggcaaggtccagtccttaaagccctagagcaagggttgacaaaccacagtacttgggctaaacccagcccaccacctgtttttgcaaataaagttttattggaacaca

SEQ ID NO: 85569 - DNA, 795 bp, Homo Sapiens
  misc_feature (137)..(303): n is a, c, g, or t
ggcaggcgaggggccgcaagcatcccccacagccaccgagagggcatccctgcagggaaatcatatccgacatgcctgtgcccacaccagacttaagactgcctctaaaatgtccatgaagccattgtccagtagannnnnnnnnnnnnnnnnnnnnnnnnnnnnnnnnnnnnnnnnnnnnnnnnnnnnnnnnnnnnnnnnnnnnnnnnnnnnnnnnnnnnnnnnnnnnnnnnnnnnnnnnnnnnnnnnnnnnnnnnnnnnnnnnnnnnnnnnnnnnnnnnnnnnnnnnnnnnnnnnnnnnnngcacctctgctgacagctataggaccaaggactgtagacccaaatgcagcagccacacgtattttcctgtcatgaagattttctttaataaagctgcaagttttggggaaagtatgtgtgatgactgggaactgattcccgaaggctagctgcaaaccacgactgggaaagaagcaggatgggcccagactttgcggtggctgctgtccaccagaacattcaggttcagaagggtcgtgggggtccccgagcctgctgaaagatgaggcccagtcctggctccactcaacttaccgcacccatgcttcattgctcctcaaagcactcacgactctgatattttgcttctatatttgcttcttatttgtctcccatcactaggatgaaatcttccagagagcaatggttttctctgtcttattcactgttgtaaatagtgcctggcacatagtaggcactgaataaatatttgttgaatcaatgcatgaatga

SEQ ID NO: 85570 - DNA, 565 bp, Homo Sapiens
  misc_feature (379)..(430): n is a, c, g, or t
gtctcatcgacaaaactggcagaaaaaaacgctttcgtatatttttcctgctgggtggtcagaaggaaaggccgtgaagctaaaggtctcccactgagacgctgttctgcaaggagccgacctcacgtgccgccgccgccagagaagagagcacctgttcatctcggctcactgtgaggctgagctcagcgctggcaggcgaggggccgcaagcatcccccacagccaccgagagggcatccctgcagggaaatcatatccgacatgcctgtgcccacagcagacttaagactgcctctaaaatgtccatgaagccattgtccagtagagctgttagttttaacaccagtgagtattacctttggttaaaaggatgcannnnnnnnnnnnnnnnnnnnnnnnnnnnnnnnnnnnnnnnnnnnnnnnnnnngagaatgaagaaagggttccatttaggcatttgcaaatattcgatggcatcatgaaaagacaaaaaaatcctataaaatatatcatattttgctatgattttgtgtgtacatgtaataaaattattaagtataaa

SEQ ID NO: 85571 - DNA, 572 bp, Homo Sapiens
aattttatacacattttatttctactttacaactttttcaaaactcttaaagttttatttttcattgacaagtaataattttatatatttatggattataatgcgatatttcaatgcatgtatacattgtggaatgatcaaatcaggctaccaaagttgttaccacaaatacttattgtttctttgtggtgagaatatttacagtccattctctcagctattttgaaatatgcaatgtagtattattaactatagttaccaagttgtataatagatcatcttaacttattccccttctacctaactgaaacttgtaacctttagctaagaccttttcccttttctctgtctaccctcctcccccagcctcccagcctctggaaaccacattctactctctacttctatgaattaaagtttttcagattccacacatagggtgaggatccaggggggaattggtccggcccaggcttggcctatttcactaagcatgatgttctccaggcccatccacgctgacaaaaatgacattcctgcttttaaagggcaaatattaaaagggaaacatc

SEQ ID NO: 85572 - DNA, 502 bp, Homo Sapiens
gatggaaagggcactggtttgggagttggagaacctgggttaaattcccactctgcctttggtgtccatgtgaaccttgggcagtcattgaacttgtcttggttttgtcatctgcaaaatgagaataatgcctattttacagagtggctgtggggattaaataaaagcatgcgtatagaggcgtccagcttgttcctagaccaggataggagcttggcaagaaatcggtcagacatgagtccctaaaaaattaaaatcaggtccccaaggaagagcatcctccaggctgaaagccggggatacaggagagtggtgtgggaagggggtggtcagggaaggggagttggtgtatcgaggtggatgagctgctgcctgcaggagctcagagaacaagcttccccatgcctcagtttgctctgggttagctcagcagcagcactcaatattccacagaagcaagggggaagccagattaaataaatgtcattttggactcaaagat

SEQ ID NO: 85573 - DNA, 824 bp, Homo Sapiens
ttgtgtgtgtggtattactgaatatataaagtttaaaggtaattttaaaaaggtcccttttaaaatgcacagatttataaagtacacatgggtgagattagtaaacaaattgagccccacctattgctgatgagtgctatgatcaccccttttctatttccactatcattctcagagggcaggacatgaaaagccaacacattcgctcatttactcctgcagtcttttaacactgattgaccagcttctatgtgccaggcactttttgctaggtgctaaacacagaagatgcaggggctaaaagcctgccccgaaaggctcacactccaccaggacatattgacatataactacaatatctgcgcagcaagactgaggtatgtacaaagtgcaacacacgcactttctagcttggactgctgccttggaggtcccggtttcagaaccttcagtattacaacaaagcactgctaccatgaataaacctaccacacgtcaggagttttcccgtgttatttcactttactctcacttaaaccttccggtatttctaagtgtccccatgtagaagaggaaaaagttagttctaagaagtcatttgcttgtccaggatcaccaattaccaactagaagagccaggattccaagccaggtcttctcagttcagcatgccactaccccgcctctgcctctcgaccaaaacctagacgaggtactaagtgaagaccacattagagaagttttggcacatcatctctgcactgggtaactttgccggtgtgcaacaacctctgaatggcacgccagatggtagcagtagttgt

SEQ ID NO: 85574 - DNA, 735 bp, Homo Sapiens
  misc_feature (224)..(250): n is a, c, g, or t
atttatgcagggctttaattgaagtgagagaacaagctatgcagatagttgagggaagacattccaggcagaaggaacagtgaggaccaagcccttgggtcaagattataattagtgaattctaaggacagcaatggtagttgagaggttggaacagaatgaaagttggggagaatgatagaaagtgatgtcagagagttactcagacatgcaatgcaatagcnnnnnnnnnnnnnnnnnnnnnnnnnnngcagttgcaagatttaatagagtgaaaacagagctcccatacaaagggaggggacccaaagggggttgccattgccggctcgaatgcctgggtttatatcccgatcattgtccctccccctgtgctctcaggcgatagatgattggctatttctttacctcctgttttagcctaattagcattttagtgagctctctttactacctgattggtcgggtgtgagctaagttgcaagccccgtgtttaaaggtggatgcggtcaccttcccagctaggcttagggattcttagtcagcctaggaaatccagctagtcctgtctctcagtcccccctctcaacaggaaaacccaagtgctgctggggaggttggctgacgaccgctctaactgcttcctgctgaattggggcatagtaggggttgtgcagttgagatttcctcgagacgggtgccttcgatgtcattaacatcggagcatgtgggcta

SEQ ID NO: 85575 - DNA, 460 bp, Homo Sapiens
  misc_feature (164)..(164): n is a, c, g, or t
attttctggcaatatgtgacacactgtattctggtttctgaagatagggaggaaatgagttacaaaaggtccctttcctactgcttactttctcctgctgagagatcaacaacaacaacaaaaagtaaacatagacatcaacagttcagaaaactttcaatgcntgacatgccccaaagacagtaaaacataggtaatgtaatagagggtgatgagaaattactttaataggggaagtcagggaagacgtttgctaaggagttcacatccaaatgatgagaagccatgcacaagacctggggaataactttttagacggcagtaaagtacatagtccttgaaggaatgaggaactgtaccaaatgaaacagaggcatcacacatactgaggagtaaaacatgactagtaaattttgaaataaaaagttatgcatttttatagcgatgggattggatacgg

SEQ ID NO: 85576 - DNA, 502 bp, Homo Sapiens
  misc_feature (293)..(293): n is a, c, g, or t
ggcacgagctcataaaaaatatggagttcaaattctaattcaaatgccttttcatatgaattggaattttaataaactagtaaatgttttaataaacattttaataaactagtaaatgtaccatgtaggtagtgttgtgaaaattaagtgaaaaaaccaatgaagtttgtaatacagtccataaccatggtatttacagttgctaaatatttattttctcttatatcctctctttaacactatctcagcagactttgtacctgaggctacataatgacaagaaaaataattangttagaaatgacactatgcaatattaaataattatagtcaatttaggcatgaattatatgcaataaagtagaataaaatgcagatataactattgtgtacttctagtgttaacttcctaattcctccctgattaagttatgtcaaaatgcctgagccaggccatagctggaagggaattagccttgttatgttccccggttagggtcca

SEQ ID NO: 85577 - DNA, 373 bp, Homo Sapiens
gtcaaatttctagcagaaaaaagtaagataaacttcaaactaaagaaagcttgttaaaagattttgcatctacatttacaatgttattgtccccttttacaccattatgcctcgtttctaaactataatcacccagtatccctgatatcatcccatatataatctttcatttagaaaatccttgtcatatccagtacattctgtatatgtcctcatgtttttttcttttaaaaaaattatttgtctgtttcccaaatgatcacagatccagtaatgttaaagtacatataaaaaattaaattgatttttgttatctaagtactagtacagattctgcttctcttgcacacacacacaaataaagacaaatttg

SEQ ID NO: 85578 - DNA, 236 bp, Homo Sapiens
ataaaaaaagaatggtaactcattgagaaggttatatacccagtaaagtttagtttgtcttggattctttaaaaaattaggcccagaattttagttatcctaactactatcccaatcaaattggacatacatatgtggattctagataaaagataaaatactttgaataaacattatgactcactgattggactgtttgcttagaatctgttttactgggtttggataagacttca

SEQ ID NO: 85579 - DNA, 372 bp, Homo Sapiens
cggcacgagtgtcaatggacaccaggccgtatggccgatccctctcctcactgtaagctgagccccccgagttctgggctgtcggccagaagctgggcttgggcacaccgtcagactccaccagctctgctggttcttgtagctccgtgagctgcagcctcttggccgggctccgtggtgggtggcagctgtacacctccagggtggagggcacctctgggctccagggtcccagctccaggctggagccaagtgaagggtgcacccacccatttctgtgagagagaaaaagagagagtcatagcacaggatgaagggtaaggtgaagggcttatttttcttttacttttattcttttgagacagtctggct

SEQ ID NO: 85580 - DNA, 432 bp, Homo Sapiens
agccccagctgccaggctgcaggggtgcaagggggctgtgctctcctgcacaggcaatggggagtaaagaggagaattttagacccgctgtttttccaaacagaagtaggctgaggagcctggtgtgctgaagttggaaaaacgagcgtccacacactgcacacagcagctgcgtgctccaccctggcactggcatcgcattcctcacctggagacagggatgaggggaggggaggcaagtgagtctcctcgcaccttctcacactgtcgcgccctgcatctggagaagcatctggagaagcaacaccccagaagtacaactgggacagtagtacttaattttgattttactttaaggtcctcttttcctcctgaggtatttttatgttagctttaagaaacctcaaggaattaagtatgtgacaaattgca

SEQ ID NO: 85581 - DNA, 637 bp, Homo Sapiens
  misc_feature (510)..(510): n is a, c, g, or t
  misc_feature (520)..(520): n is a, c, g, or t
  misc_feature (551)..(551): n is a, c, g, or t
  misc_feature (567)..(567): n is a, c, g, or t
  misc_feature (576)..(576): n is a, c, g, or t
cggcacgagaagacttgcaggaactcaagttgcaacgaccagaatgggcaattcccctctggctagggctggtctaaatgctccctccatgggtgccacctgagttctgcctggtattgctttctgctgcaacaaggcagcactgagtttcaatgcaaagttcttcagtcactgtgttctccctctcctaagctcagattctctctccacaccacatggtcgttgccaaggggatggaggaggggtggtgttggcaattcaagactgtctttcctaccctcttcaagtgcctctttcactgatatgaagttataaccagatattttgattgctccgtctgatttttggttcttatgaaggtgctttattgtgtggatagttgttcaatttggtgttcctgcagggaggatgatcagtgaaggcttctattcagccatcttgctctgcttcctcttctcatttactgaataactttcctacagagtttgacctaaagatgcaattaatgantagttcagantgtgaagctgaacctgaatgctggtgtaccntctaaaaataagctcngggtataantaagactgcagccttggagcattgagtaatatctgtggcttggttgcaaaaggagaactca

SEQ ID NO: 85582 - DNA, 569 bp, Homo Sapiens
ataatgatttgtatattttattttgactttacatgcggtgttaaaaacccaaagtacatattatttacacatccacaatacaagtttacaaggtatctattcatgttaaagtactctataaaacagtatagagacacttcacttgagggttactttttatgccgtaccattaaaaaagatacaatctgcgtttacctttgcacaaatggataaagcatttaaaaattaaattaacaggatagagactagatttaatgttagaaatttcaacataaatactgattgaactcacattacaaactacaaggaagcacaatgttacaaaatgttatctggggtcacatagagttactgttctgttttacacacgctgggattaatattggtaaggtgaattcaaacacgtttgttgttggtggactgagtagtgtttatcattggttggtttaatttattattaatctgtaatattttagttgcaaagctgaagtgtttcaagaacagaaattttagctttagcgcttccagagatcactggaaatcacgttctttagttgaacaatgttctt

SEQ ID NO: 85583 - DNA, 587 bp, Homo Sapiens
  misc_feature (217)..(264): n is a, c, g, or t
  misc_feature (547)..(547): n is a, c, g, or t
  misc_feature (574)..(574): n is a, c, g, or t
cggcacgaggttctgaaagactagtaaataatcaaaatcaactagtacaatgttagcttacagtgtattcatagcacatggagactctttttcaaagctaggaatttaaagttgaaagaaagaaaaataatttctaatgcaccttttctgctcaacacaaacttattgcagcatcattgggaagcatcatagatattcatcagtagagcgtgtattnnnnnnnnnnnnnnnnnnnnnnnnnnnnnnnnnnnnnnnnnnnnnnnntgtggctgttcattatttcaaatggctgtactttatagtactgaaattccatgttagtactatatgagttctaagtggcataggtatatatatatgtttaacgcaaggttttagaaaagttaatataatgtgctactgtttgtgtgataaaggaggaatgtatatgcttgaatacctaagtgctgaatatctctgaaaggacacttgagaaatggataacattggttacctttagggaggttggcaaattttggggtcatgcccatttacagttttaattttnccccgtctttaccacatgcatgtttcncctttttaaaaat

SEQ ID NO: 85584 - DNA, 689 bp, Homo Sapiens
agcatcagcacaccaccaacaggcatccacgttgctggcatccacgatgccagccccatcatcctgctgaatccacttcctcctcaaagaccctgccaagactgtcccatagcgtgcatctctgtgactatctctgggaatagagatggttcaagcctgggccattctgtgattccacgctaggcattttgggacccctttgttctgtctggagggccatgagctagagaagtcatgtggagggccatgagctagaggaaaagtgagtgtttttaatgagagtattgctccctcttggtcttaaagagccaattgtgtctttgagctgaaagccgtgggaaggagcacaggaaagagaatgaatggacttgggttctgaaaaccatctttcctgctgctgggaggggttgatgggccctcttggggttccccacttctattgagccccagatgtcctcccttttatgcctcctgctttcctgccttactgggctttgtgatagcatctgagctctaccacgtatttaccgtgggatcctgaacaaggtgtgttgtctcactgagtctcaaccactcatctgcacattaggaatcaaatctatttcttaggacagttgtgagaatggaagatgatgcatgtgaagttcctgagacacaatttactctcagaaatggcagccagctacccc

SEQ ID NO: 85585 - DNA, 513 bp, Homo Sapiens
  misc_feature (97)..(97): n is a, c, g, or t
tcctccctccaagcacacagatctctctttatgccaagctgctctgtggggagttggaggttggcagttcaagactgtccttgatccctttttaggncctatttccttgatatgatattaaagctaggtactgtgaccactcacctgagttttggttcttatgaaagtactctcttgtgtggatgattgtttaattttgtgctccagctggaggaggggaatgatcactggaaggttctattcagccatcttgctccacctcctataagtttttagcatctttctctttacctgtgcaatcattctctaggtaggacaaggtactcacctggactctagcaatactctacagatttctttgcattggtctccctaagtccttcatggtcagatgtggaaattaaacacatgtagctttaattcattctcatagctacaaagcattctataatatagatgtataataatttaattaattcttaacttattgaaagatgtctagatttttaaaaa

SEQ ID NO: 85586 - DNA, 294 bp, Homo Sapiens
cggcacgaggagaattatacctggaagcaactagaaacaaaaatgaagcaaaagcagctgttgtcttatctcaaatgacctttcagcaccattatttaagtctattttgtcctaaatattaatgttttcactactgggtctctaagactgggtctccaagaaaaatagtttataatttatatttaaaaaaggtagccctttaaacattttcatttgattctgcttctagctgcagcagcaccacaacaaagcagggaataaaataagagtccagattatttgaaaactcagctt

SEQ ID NO: 85587 - DNA, 443 bp, Homo Sapiens
cggcacgaggtcctgtggatggacatggtccacagagttgaagcacagagggtgaagcgggactatctggagacactgccagatcacaaccttgaaaacctggtcaaggagcttcattgaagtttaggctgagagcaatgggagccatggagaggttttcagcccaaatgtgatgggctcagatctggcctttagaaagctggccgcagctacagtgtgaagagtggtcagagggacaggggaggctgcaggaagatcaggcacaggcgcttgcagtgatttaggtgagagatgatagagccacagggaagggccagtggggtggagacaaagccagccagatcttgagagatgcacagcctttgtggttaacttagatttattggtgggagaagcagcattttttgctattcatccagcataaacaggaagatgacttattg

SEQ ID NO: 85588 - DNA, 288 bp, Homo Sapiens
aaagattgccttggctgctctgtagagaataaacttcaggggtcacatgtaaatgcaaggatatcattcagagagcatcaaaacaatccaaccaagagatggtagtaggtaggcctggggtgttattagtgtaagcaatgtaaagtggagaaatgtggggagacaatccatacttattatgcatgttgagcatttgccgagaagagaagaattatggatgattgtttgatttttagcctgaacaattattattgggattggaaaaataggagaagagcagctcgtgcc

SEQ ID NO: 85589 - DNA, 376 bp, Homo Sapiens
agtagagatgcaatccctgcattggatgacggaggttggaactgtttcaatgttaacattccttgtttaaagttaaatccatgctcagttcccattcttaccaggtatgtcataaggaggtagcttaagaacaaagattcccccagaagcacatggtaaggcaaacagggcctccccatcactgctgagccaggctgtagaggcggtggaattaggagatattccaggtactgctggaattaactgatagttgcaaggatctgtgaaatcaacttttccaatgtcagtgaatattgactgcatctgactgtcaactaccaactcctgttgagtaattaaaaagaaaaatctattaaatcaaaataacctcgtgccg

SEQ ID NO: 85590 - DNA, 535 bp, Homo Sapiens
gacccttccagacatagaaaacacaaaccacaactgacacaggaaaccaacacccaaagcatggactaaccccaacgcacaggaaaaggtagcttacctgacacaagaggaataagaatggagcagtacatgggaaaggaggcatgcctctgatatgggactgagcctggcccatagaaacatgacactgaccttggagagacacagcgtccctagcagtgaactatttctacacagtgggaactctgacaagggctgacctgcctctcacacacatagattaatggcactgattgttttagagactatggagcctggcacaggactgactctgggatgctcctagtttgacctcacagtgccccttcccaatcagcactgaaaataccatcaggcctaatctcatacctctgaccaacaggctgttctgcactgaaaaggttcttcatccctttccagttaaggaccgtggccctgccctctccttccttacccaaactgttcaagaaataataaattgtttggcttcctcctg

SEQ ID NO: 85591 - DNA, 446 bp, Homo Sapiens
ggttaatgaagtagggcatcctaaacctgagtgctctgcctccccaggtgatttgatacagtcaggtgtgggaactgctggcctagatgataaccccctttcatagaacagagagaaaaggcagagaaaatgcttacctgttggaaaatcattgtcctgagcctcatttgtaccatctatggaaaaagcaatggaaaatgaagtgtcaatcaaataatgcacccttggctgacacaaattaattgaagctaaacctagaacccttctttctcaccaagatggcaacttctcccaattgttctaaatataaaatcccggttatctgtcactttacccactccccctctccccagtccaatctgttgccaaatcctgtagtttctacctccataacggaactcgcaatcatctccttccatttctctccattccaaatctagaagaaa

SEQ ID NO: 85592 - DNA, 479 bp, Homo Sapiens
agcaacgatattaatgagtatttataataatcattttaagagcaataaaaacagaatcttaatgtgtacttatataacttaaatcctcgattaaaaataaaggaattactacagcttgccccattctttatctacatagtaaaattaaatttctcttgccctattactctactcctcaagtaccacaggctttaagtgtcagtaaaccaacaggtaatgattcagatactctaagttgagacacaggctatgaggtatactcaaaatcactttgaggtgaaacaggtaagaactcagactcagtagactttggcatcatactgactctaagtttcatgtaaactctgccatggtgcaagctgcggtgggacttattttaaaatggctaatgagccttcaaacagcaacagggagttgttaattaatacgtgaatagaaattataaaataaaacctcagcaattttatgaatactagaat

SEQ ID NO: 85593 - DNA, 421 bp, Homo Sapiens
aaaaaaccagcactttctctgactcacagtcattttgtaggtttttactaccagtgttatctttgaatttttcagctgtaaattaaatacaagagtgcctcccccttacttgcttatctgtatgcatcttttagggctgtattccttttccttccttgtagccagggtacttgttcccaacatattgacactgtggtttgatttagatagccgtcattctcctggcagtccttttacaatatgaattaaccgacaagatagaggtatcaaagctacacttcttagtgttactatttttgaaagcagttggtttttcagtacaccacatttgtactacatggccggcttgttactaagttcgggtggcattgctgcttgtttacttttgttgattttataattaataaacctctatgaaatt

SEQ ID NO: 85594 - DNA, 293 bp, Homo Sapiens
taagatgtaagccatcaggaaatttatttggacagaaaaatttccagcagattaggtcacagtgttaaatacagaaaaggctttttattgccaactgatacatctctgaaaagtaatgctaaattatactgaaaacatgtaacaggataatcataaaatatcatagaatacattcaacattgaatacgtcagtgctaccaacacacgaaatcatcacctctatcaccaacccctcactcctgccctgtacacagttctcaggggaaaacctttagagccagtatcaggtggtt

SEQ ID NO: 85595 - DNA, 541 bp, Homo Sapiens
aaaagaatggaagctttccacaggaattattcacgtgtattgctttctaggagtaattgaatagttgacattgcatttatatcaaagtaaaatatgtgatggttattctcatttgtattattcttaagcaataagaaatgtaaagtaatctctattaggtttctttattcggattcagaaatcttcatagttttctgtaatgtccaaatgtgtaccttcttataacagctatgggaactttctctcctctctgtaaaatggagagttatacctaccacgttgagctgttttgagagtcaatggagaaaatagtgagaaaaccactcaaatgtgttttgttacttgatgtgttctttcctctgtatgatccaacttcttacatgttttatcctattttgggtttcaatttggttcatcttcacaaagtagagcttcaagttttatttagaattaaataatattgatactggcttggaaaactgaataacacaagatttagagaaaaaatactctaagtaaaatgtcatgacaaattgaatga

SEQ ID NO: 85596 - DNA, 139 bp, Homo Sapiens
cacacacagaaaaaacattagccaaccatagtggcgcacacctgtagtcccagcttcttagaaggctgaggtaggagcattgcttgagcccgatcacaccactgcactccacctgggtgataaagtgagaccctgtctc

SEQ ID NO: 85597 - DNA, 501 bp, Homo Sapiens
ggattatattggttgcatgtatgtagtggcagggatatcctggattttattacatttttaaatatataatctacttatgttcttgtttgttgatatgaaaaattaacattcttagaatgcggggaagctttagaagacataactctttagccatgtggctaaattttgtgtagttttcatacagctttgaaaggttaaatgagaaagtctctggcagtaacagcatacttttgatgctattgttaattagttttcatcagcactaccaatgaaagctatctgaacacccaggttccatctttaaaatgaagttacaactagacctgatttttaaatttggactttccttaatttggtttaagaatggtattgaaaacgaaaggataatgcattttaactttacctttgcctgcttttaaatacaagacaaatcttgacaatgaactcttagttgatctcaagttgcatcaaactaataaatgtgagtcaatgataaaattg

SEQ ID NO: 85598 - DNA, 301 bp, Homo Sapiens
gtgtgaaccactactctgggcttgccttggtattttaacaatcggaattgtctttggggcaaatgctgatttcatgccagccgtggttctgggtgctttgattaggatattgcatcccatcttcccaacaatcttatttattggtgagaccactaaggcttcgagaggttaagcaacttctacttccaacactggcccgcccaccccttccgccgcgcaccccacacacatgggtagtaagtagtggagatgggatttgaagctggggattctggctcaaaatccaagctctttacctttg

SEQ ID NO: 85599 - DNA, 485 bp, Homo Sapiens
ttaaattgaatttaaaaatgtgagtttactttgggttttcattttgactggctgaatctttaaatgttcggtgtattatttatactttgtagctttgctataacataactgatctataatagagaatttggtatatgttctatctatgactacattcaaagggttacgtaactataatatctttctaatatttctaccatttttcttacacatttacccaagaatttttctcaaacaactacctaagaatattcatcatgaatgcttggtgtatagtttatgatttgtagagttgctctgatatgaccaaccccttataatacagaatttggtgtaaggtaagttccaggattcaattcaagggatgttacaaacataacatcattctagaacttcttaatattgttcttaagcatttccccaaggatattagtataatgaaatgccagtaaatttataacaataaagcatctaaataatgaaac

SEQ ID NO: 85600 - DNA, 434 bp, Homo Sapiens
  misc_feature (124)..(145): n is a, c, g, or t
  misc_feature (147)..(241): n is a, c, g, or t
ggctggaatgtagtggcacaaccacagctcactgcagccccgaactctcaggctcaagcaactctcccacctcagcctcccaagtagctggtaccacaggcacacaccaccacactcagctaannnnnnnnnnnnnnnnnnnnnncnnnnnnnnnnnnnnnnnnnnnnnnnnnnnnnnnnnnnnnnnnnnnnnnnnnnnnnnnnnnnnnnnnnnnnnnnnnnnnnnnnnnnnnnnnnnnnnatgagcactgcgcctggccaatattcacctgttctttgttcttattcttgtgggcctgtctgtttactgcctatacttaattttttaaattgtaagatgtgtcatacagatagaaggcagcatagaaatatggtataatttagatattagtaaaataaatgcccatgtattcatctcctggataaagagtgtt

SEQ ID NO: 85601 - DNA, 448 bp, Homo Sapiens
cctgtaatgtacaagaaaaagagcacacatttatgaaagcaatcagatagtctttttttgcttctatttagtaaaaacaaacgactgatagagcaacgatactctagtctcaaaagtatttcattttgcatgtttcaaagattttattttgtgtctaatggaataatcagtgggctataaaatgcataatacccttgcctatgaaaaaagtctatatgatgaatgtatattaaaaagatgtcattttagtccaataattaatattatgtaattgttttttatcttattatcttacaaaaaagcagtatcaagttattatacctactatgtggccactgtatattctgcttaatcatgacttatgtaaccaaagtgtggccatattaagatcctatgcacactattagagataatatttgaaaatgaataatttattagtatttttcta

SEQ ID NO: 85602 - DNA, 185 bp, Homo Sapiens
agtctctaaacaggatagtagaatattaaatgtacatcagctgtgaagcacatgatcgttgatagattgcaactaagccatataggaagtcttctctttgatttcaaattattttattgtaatatattaaattcgatacttaatagaaagatttttagtgtccgcagtggccaaatactatttca

SEQ ID NO: 85603 - DNA, 400 bp, Homo Sapiens
aaggtctccagtggtgtcggattagaatatgaggaatccgtctgagctcattctccacaggatcccacgagggaaagcctggcttttccctgtgcagacgccaggcctctacaggttccagaaggttcctctgctcctctgagagggcagggcacttgcacagggaacaggcagccgaaggcagccacagccctactggaaccagggtttctctgcctcctgggaagaggtcagtggatgggttggggagggggacaggcggccttcctgtgggagtcaaagagcctggggcctcccctccttggaggcgaccagacaccttccctaactggaggaaattctgaaccccagacctggaaagttcaaagctgaaataaaatcgccccttgttttgcaaaaa

SEQ ID NO: 85604 - DNA, 841 bp, Homo Sapiens
  misc_feature (18)..(18): n is a, c, g, or t
  misc_feature (73)..(73): n is a, c, g, or t
aaggctgaccttggtgtntcaggacccaaggtggacattgatgttccagatgtgaatcttgaagctccagagnggaaactaaaaggccctaagttcaagatgccaagcatgaatatacagacgcacaaaatctctatgcctgatgttggacttaatttgaaagcccctaaactgaaaactgatgtagatgtttcccttcccaaagtggaaggagacttgaagggtcctgaaattgatgtgaaagcccctaagatggatgtgaatgttggtgatattgatattgaaggtccagaagggaagttgaaaggccccaagtttaagatgcctgagatgcacttcaagacccccaagatctccatgcccgatgtgaacttaaacttgaaaggccccaaagtcaaaggggatatggatgtgtctgtgcccaaggtagaaggtgaaatgaaagtgccagatgttgacatcaaagggcccaaagtggacattgatgccccagatgtggaggttcacggcccagactggcacctgaagatgcccaagatgaaaatgcccaagttcagcatgcctggctctcaaaggagagggcccagaagtggatgtgaacttgcccaaggctgacattgatgtctcaggacccaaggtggatgttgaagtcccagatgtgagccttgagggcccggaagggaaactgaagggccccaagtttaagatgcctgagatgcacttcaaggcccccaagatctccatgcctgatgtggacctgaatcttaaggggccaaaattgaagggagatgtggatgtgtccttgcctgaggtagaaggtgaaatgaaagtgccagatgtt

SEQ ID NO: 85605 - DNA, 609 bp, Homo Sapiens
gggcgggatgacaagtcagaataggtccgagctgactgcatctctgcccaaagtggaagtgctgacctcaatggccctgaagttgacatcaagggccccaaagtggacattgatgtcccagatgtggacgttcaaggcccagactggcacttaaaaatgcccaaagtgaaaatgcccaagttcagcatgcctggcttcaaaggagagggcccagatgtggatgtgaacctgcccaaggctgaccttgacgtctcaggacccaaggtggacattgatgtacctgatgtgaatatcgaaggtccagatgcgaaaataaagggccctaaattcaagatgcctgagatgaacatcaaaacccccaagatctccatgcctgactttgattggcatctgaaaggtcccaaggtgaaggctgatgtggattgttcccttccttaagtggacggtgacctcaagggcccagaagttgaccatcaggggcccaaaagtggacctcggatgcccctgatgtagatgttcatggcccagactggcacctgaagatgccaagggtgaaaatgccaaattcagcatgccggattcacggagagggcccgatgtgatgtacct

SEQ ID NO: 85606 - DNA, 191 bp, Homo Sapiens
ctactactactaaattcgcggccgcgtcgacgtgacctggatcccttcttgagctgaggcccgtgtcaccctcaaatgggagctctccagtaatggagactgtatctccctctgcccttgacattgactctccagctgctgggtgcaagccctgttaccaggagggtgggctctcgttgccacatcccggt

SEQ ID NO: 85607 - DNA, 477 bp, Homo Sapiens
taaattcgcggccgcgtcgtacgccggtctgtgtacagcatctcgctgagttccaggctgggtttgatgcctacactttcagccgcttcaaatgccaacaagagattcctctttttctcctgactattcagctcctggtaggggatgtgggcaggcaggtaggtgtggagcagagcacagaaggccaggccatcgctccagctgctgctgaaattggtgatgtcaatgttcgcataaccttgtgtcttcttctggcaccatttcagtagagcattgcgcttggaaccaccgtattcccgggccaaggccgccagagggtcttttctttccacactgagtttgctttgtggtttccatgcccgggtggaagcactcagcagtcttgtgtccacaaagcccagagacgggggtctgctcagtgactctagtgagggactcttgcggaggtgggggtctggcttcagggtctcagtcctt

SEQ ID NO: 85608 - DNA, 102 bp, Homo Sapiens
tttgctctttaagtaaaaaataaggttaaatctttgagaagtccttcttaagcaacaaaacctcagagacacaaaggaaattattaatagatgtaaccactt

SEQ ID NO: 85609 - DNA, 260 bp, Homo Sapiens
agcaaatatttttattaaacacctactatagaccaggtaccgctgagatgtcagatataacaagtgaagaagataaggtacctgcccgagtaaaactttcattcaaggaggggagataggcaataacaagtaaacagaaatgcaaaatatatcctccaaggtgaaacgtgcaactggggtcgataaagcagggtagggggtctgaggagtgttggaggagtttgcgtcgacgcggccgcgaatttagtagtagtaataaa

SEQ ID NO: 85610 - DNA, 1139 bp, Homo Sapiens
  misc_feature (972)..(972): n is a, c, g, or t
agatgatttgaagagaggtgagagtgtgcttcaacaagcagataaattaggttgcagacagtttgttacccctgctgatgttgtcagtggaaaccccaaactcaacttagctttcgtggctaacctgtttaataaatacccagcactaactaagccagagaaccaggatattgactggactctattagaaggagaaactcgtgaagaaagaaccttccgtaactggatgaactctcttggtgtcaatcctcacgtaaaccatctctatgctgacctgcaagatgccctggtaatcttacagttatatgaacgaattaaagttcctgttgactggagtaaggttaataaacctccatacccgaaactgggagccaacatgaaaaagctagaaaactgcaactatgctgttgaattagggaagcatcctgctaaattctccctggttggcattggagggcaagacctgaatgatgggaaccaaaccctgactttagctttagtctggcagctgatgaaaagatatacccctcaatgtcctggaagatcttggagatggtcagaaagccaatgacgaacatcattgtgaactgggtgaacagaaacgttgagtgaagctggaaaatcaacttccattcaaagttttaaggacaagacgatcagctccagtttggcagttgtggatttaattgatgccatccagccaggctgtataaactatgaccttgtgaagagtggcaatctaacagaagatgacacgcacattaatgccaagtatgcagtgtcaatggctaaaaaaatcggaaccagagtgtaatgctcctccctgaagaccttggtggaattaaagccccagatggccctgaactgcggtttgcatggtttgatgggcaagggggaatggaaaaaagtgtaaaaataacccattcctgaaataaaaaccgcccatggctcccccaggggccattgaattcnccaaggtcagcttattttccaaggtcgaaacggcctttatgggttttaaggggaaattcttgtggccatttcaaaaggacctttttccattttggaattaaacacggaacaaactttttttcatgaagaactccccctcaggcggaaaaaggggtttttataaaaaa

SEQ ID NO: 85611 - DNA, 218 bp, Homo Sapiens
attcgcggccgcgtcgaccataagccagggcttaacttgagggtgaagggtgggaggggggtgaggatccaaaaagttacctattaggtattatgcttattaccggggtgacaacataaattgtataccaagcccccatgacacagagtttacccgtataaaacctgcacatgtgcatatgtactccctgaacctaaaataaaagttgggaagaaaga

SEQ ID NO: 85612 - DNA, 272 bp, Homo Sapiens
tactactactaaattcgcggccgcgtcgacgagtaattagctatagattccactggccttaaacatacaattaagtgtatacatgatatagtgcacacacaaaagccacctttaattattgaaataacctgtattcctttttggaaatcatttaagtttggtattgaagtactatattttttgtgcatcaatgtatttttctatttacaagcctatgtaaaagtgaagtgtatcttcagtgaaccatgtgccaattaagctgtaataaaaaa

SEQ ID NO: 85613 - DNA, 243 bp, Homo Sapiens
cttttttaaagtaatttcccccacagtaaaatacactgactcctgagtaaattgattttccagttttatggaattgggagtctgacaagtgaaaccaatttaatgtaaagtatttggctttcaaatggtttctctgtgctattttttggaattctttcagattccagagatatcttacgtctttgattcaatttaaaatttgtacttattttcttttagaaataatgtattgtatctgtgcag

SEQ ID NO: 85614 - DNA, 463 bp, Homo Sapiens
ccgacagcagcagtctcaccatgaagttgctgatggtcctcatgctggcggccctctcccagcactgctacgcaggctctggctgccccttattggagaatgtgatttccaagacaatcaatccacaagtgtctaagactgaatacaaagaacttcttcaagagttcatagacgacaatgccactacaaatgccatagatgaattgaaggaatgttttcttaaccaaacggatgaaactctgagcaatgttgaggtgtttatgcaattaatatatgacagcagtctttgtgatttattttaactttctgcaagacctttggctcacagaactgcagggtatggtgagaaaccaactacggattgctgcaaaccacaccttctctttcttatgtctttttactacaaactacaagacaattgttgaaacctgctatacatgtttattttaataaattgatggca

SEQ ID NO: 85615 - DNA, 598 bp, Homo Sapiens
  misc_feature (48)..(66): n is a, c, g, or t
cgagatcgcgcccttgtgcttggacaacaagagcgaaacttcgtctcnnnnnnnnnnnnnnnnnnntaacctgaataaccatcgtctgtctgctccctaacactcacaggattagaatttctggggatagtacttaagctaccaaagaggatgccatcactcagagatatagaggtgatcagaaaactgcaaaagagaccttcttgtctttttctctaccaactgttatgatttgtcattgccactagcatgtatttggcaaaacttgctatggccttgtttgtcttccttctataaaatgaatttgttctaaaatttggaaatagaaattactgtttttgttctttcagtatattccagtgggttgctgcagagtaatatttttatgttttcaatgcttttagtttacacttaaatgtttgtgttggaaatgtcttttctgctaattcagttattggaaaagggctgtaattgagtagggtagtaaatactaattgcttgtttctttaactgaataacattttcctattgttaacggattgactacaggtgtgctgtttgactttctattacttgtaactgaagttagcctctcttc

SEQ ID NO: 85616 - DNA, 1242 bp, Homo Sapiens
  misc_feature (675)..(675): n is a, c, g, or t
taaaaatctctacagctttgagaatgactttgaaacactctttactgttggagcttaaagaaaataaatctctaatgtcctctgtattaattcacctgcttggaaagttagagattaaaaggtttagtaggatttttatattttctataatttctatttgtattggagtaaactgttcgttgtatggagtggcttagctttcataaaacagaaagattcctatattgagaaaagaggaagaaggaaaaagtgtaatataaatacataaaacttcctctagctttcttgtgttatgtgtaaaggagttagtacgttactttaattgtgtactttgaagaaagcaatctcctatttccattaatggtggactctgtgggtagagacatggatatttttccttttataagaaaggtcttgtctttcctcagaaggcattgtgagcaaaataagggaagaaaaagagaagtagataagaaaaacaaatcacaatattgaagcaggacccgagtactgtagccttcctcatattttggtatctggaaccggaggttgctaattaatgaccccaagagctaagccttgtttgatgaaatgcaagatgtaatacacagattgccttggagtgatgtgtgattattaccatccattcatgtgtaatccccgtatttggaaggnttgtaatttgtttttgacacatttctctctgattttatacactcatgcatacaggtctcacctccctccaaaaccttatttccaaagcagactttgtttgtttggtttgggtaattcattgggccctatttgtcttccttatacataatctattttcttactgctgcctctgtcttccaaaccaagaatataaagaatgaaagcctggggactggaacttaaaacttctgccgagaaaagaaagtcaaaggcctgtgggctcctaaaacatcctgtggaattcgcctcagatgcccctccatttgcacttggtatatggaggatgtttgaaaaccaccagaacctattgtgtactttggaacaatggcattttcctgcttgattgtgaagatggccgctggaaaagaagccaactcccagggggcacgaggggctaagctgtctcctgggaagtttgagggaggccaagtgttttccagttcatttccaacgcgtatttctctcagggccaagggcccagctgtgcctcattaggggtgagagtttggctgtgacacgacttaatag

SEQ ID NO: 85617 - DNA, 442 bp, Homo Sapiens
  misc_feature (23)..(23): n is a, c, g, or t
  misc_feature (260)..(282): n is a, c, g, or t
gatatttaagtgacagttaaggnggtatcaagggtaacttgtgtagaactattcttggatatattgtcatgtttgttgtgaatattttttcttactgcacagtagaaaaataaaaacaactgagtctttattttaatgtaactcagattggggaaaacaaaacagagcttaagggaacaaaatgactgagggagcactctcccacgtccagtgcactgatcattttagtatgttctgtgctttgtacggttatatatttnnnnnnnnnnnnnnnnnnnnnnntacaagggttcatgctcttccctgggtaatagaaacagttactcgctatgcataatctagttgatagttaaatttgctattgcttttcttgtcttgttatataaaatcttttcaatacaagtttagtcttaatggtaataaaacgttatggttatttata

SEQ ID NO: 85618 - DNA, 874 bp, Homo Sapiens
ttccagaatgaaaatactggtatatttgtataatgcaaagagaaatacagatataaatcctcaaaacggaaggtacattaataaaaatgtagcattataagccaaaaatattatatagtacttgcagaatttagtctttcagtttaacattataatgtctaacaaagaaatattatttaaattatagttctcattattaatttaaaacaaccatcagtagaacagcacagcttaacctagcaaacattttaaggaaatgctttgtttcctagaaggaggatatcattatattccattcatttataccataaacaacagaagaacaattttcaaagtggaaattagtttcataagacagaataaaactgggcttctcaaagcacaagccatttccataaaattaattttttattggcaaaaaatacttaaaacaattttgatgtagtactctgcttctcagagccctcccaatcctcgaaccacaatctatacacacgaacacatgcaatactgtatttttctccacatcattactaaccaaaacactttactcttttaaaacttacaacttgacagaaatgtttccattcaagattgctataatacagagagcagttgtcactgacgtggtttttagcagcagaaagtaaaccgggaaccaaatcttacttgttacttactgctttaaaaaaatgactgccttgctactgatctccatctctgctctttaagttcaatatcaacactgagactttcaaagaaccagcgcaggcacaaggaccctgcagccggcaattcagagggcatttcggacaacttccccccccggccgtaatggccgaattcccgggcatatgtccggtaccgtcgactg

SEQ ID NO: 85619 - DNA, 437 bp, Homo Sapiens
  misc_feature (125)..(125): n is a, c, g, or t
gagccaccgcgcccggcccccaaaatactggtttttgattgtacaaaaaccagcacaaaaatttaattatacaaaaatgctgatatttttgatacccactcatctttttaactagaaggattttnttaataatacaataagaaatgaacaaacacatcttgaattaagataaatgaaattaaggtattttccttctggttaagacttagtgcaagctgaaacttggagaatggcactttgttttttaagtgttcaaagcaggattaactgagatagcaataaggacttaggacacattggtaagtgacagctgtattctattcctccttctctcttttgtggtgtaaaggtgtttggtttcaatgccaaaaaggtgctcttaggcaccaaggaaaagcaccttccattggagcagggtaacagttcttaggtacctg

SEQ ID NO: 85620 - DNA, 740 bp, Homo Sapiens
  misc_feature (206)..(217): n is a, c, g, or t
agcaacatgaaatgaactgtagtaggtgtgtagtttggggaagtcaaatggccattttatgtatgtgcatttggtatcatgggccgtggaacagaatatatgttggacctctgaaaagttgtaaggggccaattctaagtattcttcacggcagccagaagttaatggtggtagcagctgaggtatggttgttggacgaggccgannnnnnnnnnnnaacatggaacaatgaaaccaacaacaaacatttttaaaattaaaatggataatttgtaaatagtttttagcttttaaaatttaaagtgtttttgagtgtgaaaagttgagtaaaactatttgcaactggttttcagaaaagagaaaagaaacaacaaaggaattgaaacaggcagggagatcttaatacctaatttcatcatttctgaaaatgtactgttttagaatgtattacaatatcaatgtgaatatcttgaatcctgttacaaatcctgcactgtattaaacatgtaaattaattgtttgtctgattagccaatctcaccacccaaatggggaggtatacatgtttgaagaactgtgtaactcagtaattgatttgttctgatgttgtaactcaatagaagtgttttggaaggaagcatggtgtgtgagacagtgtctgttcttttgtgccagctctgtatgatgtttgtaagaccatgtttgtaagacatgaataaattgctgcttttgcccaaaaa

SEQ ID NO: 85621 - DNA, 457 bp, Homo Sapiens
agcgctttcaaaatttggttcttcaagagttgagcagtcttaagcaggatattcaggccctggaacacccttgagaaggaggttctggaattctggggaaaacagtctgctgatctgcaatctttctgtgatctgcaagtgctgaggttcaattcaactcagacttcataagaaagccaaagcctggttttatgattgcagccctcagcctgggctgcctgaagacgaagagaaagagcaaggttattgttggctcaggccttgttagccagacttcgtgctctgtacgcattcaatttcctcccctccaaacatcatccctgggaactgctgagttcagatagaatatatgttggtagtttgcagttgggttattatccatttgttcataaaaattaaccttttgtattaaaatttggtcagatagtattaatagaaagttcaggatgttaaacaa

SEQ ID NO: 85622 - DNA, 1038 bp, Homo Sapiens
  misc_feature (203)..(203): n is a, c, g, or t
ctacatcaataagtgggtggagaataacacaaacaatctggtgaaagatttggtatccccaagggattttgatgctgccactttatctggccctcattaatgctgtctatttcaaggggaactggaagtcgcagtttaggcctgaaaatactagaacccttttcctttcacctaaagatgatgaaagtgaagtccaaattccnaatgagtgtatcagcaaggagaattttattatggggaatttagtgatggctccaatgaagctggtggtatctaccaagtcctagaaataccatatgaaggagatgaaataagcatgatgctggtgctgtccagacaggaagttcctcttgctactctggagccattagtcaaagcacagctggttgaagaatgggcaaactctgtgaagaagcaaaaagtagaagtatacctgcccaggttcacagtggaacaggaaattgatttaaaagatgttgtgaaggctcttggaataactgaaattttcatcaaagatgcaaatttgacaggcctctctgataataaggagatttttctttccaaagcaattcacaagtccttcctagaggttaatgaagaaggctcagaagctgctgctgtctcaggaatgattgcaattagtaggatggctgtgctgtatcctcaagttattgtcgaccatccatttttctttcttatcagaaacaggagaactggtacaattctattcatgggacgagtcatgcatcctgaaacaatgaacacaagtggacatgatttcgaagaactttaagttactttatttgaataacaaggaaaacagtaactaagcacattatgtttgcaactggtatatatttaggatttgtgttttacagtatatcttaagataatatttaaaatagttccagataaaaacaatatatgtaaattataagtaacttgtcaaggaatgttatcagtattaagctaatggtcctgttatgtcattgtgtttgtgtgctgttgtttaaaataaaagtacctattgaaaaaaaa

SEQ ID NO: 85623 - DNA, 1263 bp, Homo Sapiens
  misc_feature (120)..(120): n is a, c, g, or t
  misc_feature (197)..(197): n is a, c, g, or t
gaccgcgaagggtaccatttcccgggtgttgcttccaggagaaaccctgaacggagagctcgtcctcttaccaggtcaaggtcccggatcctcgggtcccttgacgctctacccatggtngaggaggaggaagaggataagtacatgttggtgagaaagaggaagaccgtggatggctacatgaatgaagatgaccntgcccagaagcccgtcgctccagatcatccgtgacccttccgcatataattcgcccagtggaagaaattacagaggaggagttggagaacgtctgcagcaattctccgagagaagatatataacccgttcacttgggctctacttgtcatcaatgccgtcagaagactattgataccaaaacaaactgcagaaacccagactgctggggcgttcgaggccagttctgtggcccctgccttcgaaaccgttatggtgaagaggtcagggatgctctgctggatccgaactggcattgcccgccttgtcgaggaatctgcaactgcagtttctgccggcagcgagatggacggtgtgcgactggggtccttgtgtatttagccaaatatcatggctttgggaatgtgcatgcctacttgaaaagcctgaaacaggaatttgaaatgcaagcataatatctggaaaatttgctgcctgccttctacttctcaaatctttcttgtaaaagtttccaattttttcactgaaacctgagttaaaaatcttgatgatcagcctgtttcataagaaactccaatcaagttaatcttagcagacatgtgtttctggagcatcacagaaggtatattgctagttacactttgccctcctgcagtttcttctctgctcccaacccccatctcatagcatccccctctatttccaatgctcctctccaaccgcttagtttctgaatttcttttaaattacagttttatgaaagcatattttatttacttggtgttgaaatagccctcataaaaacctaagcaccttggaaacacaataatagtattaactaactagatctattgaatttcagagaagagccttctaacttgtttacacaaaaacgagtatgatttagcattcatactaattgaaatgtttaatagaatccaggcacaaaagtcttaaaaccatgtgggaaaaattaggtaatttattgcgagattgatggcctcccaaatccccagggattttggcctttattgttaaacaaggtggttggccccagggttggaaaac

SEQ ID NO: 85624 - DNA, 632 bp, Homo Sapiens
  misc_feature (244)..(244): n is a, c, g, or t
aaatatgtgggttggaagaaagaacgtgtagtagcagagttttgggatgggaaaatcgtgttggttctgccacatgatccaagctttgctatcaaaaaggtagaagatgtccaagaacttgttgataatgaattgggcttccagcaagttgttcctaaatgtccaaacaaaataaaaacttttctttttatatctgatgaaaagagagtagttgggtgtttaattgcagaaccccatcaaacanggcatttcgtgtcctgtctgaaccaattggtccagaatccccaagctctacggaatgtcctagggcttggcaatgttcagatgtacccagaacctgcagtctgtgggataagtagaatctggggtttcagacctgaagagaagaaagcgcattgcaagacgactggttgataccctcaggaattgcttcatgtttggctgttttctcagcactgatgaaatagcattttctgacccaacaccagatggcaagttatttgcaaccaagtactgcaacacccctaatttcctcgtatataattttaatagttaaagctgatttcagttataaaggagttactatctggataagttcaaagagctccttattataaaatacaaactattta

SEQ ID NO: 85625 - DNA, 584 bp, Homo Sapiens
ttatctcgtccgttaggcccccagtaaacatttcctgaataaatgatatctctcagcatgcagattcatgtgaacaatgctctaatttcttaagaaaatggggattctgtgaattaataggatgttttacagaaatggtatggagaatgggactgaagagacaatgctagtttagaagataactttagtccttccagtgccactaacagtgaatccatgttgctgaaaatgttacccagaagtgtttatcatgtataagttatgtggtttcagtgtgtgatttgcacttgcttttggtagattgcaggacaaacaacgagtaaatgtatcgagtggatggggggagtaggctacaccaaagattaccctgtggagaaatacttccgagatgcaaagattggtacgatatatgaaggagctgccaacatccagttgaacaccattgcaaagcatatcgatgcagaatactgacgtctataggagtgggacccctccctggtgtcactgctgtaaaattttaaacggttgtgtcttgttgggagtaagtgccttgcgtgggaataaacttccacagcattcgaata

SEQ ID NO: 85626 - DNA, 416 bp, Homo Sapiens
  misc_feature (180)..(180): n is a, c, g, or t
ggcacgagggaagccatctctccctggaagctgtcagtaccacccctgccccctcctatgactctccccacccaaagtccttccacctccatgtcactgaggttcctcggagactgtcaatactggattgacctgactggatctgcacaacggatgtgggtgatgtcatgcctctccccntgggtttcttccctggacccagcaagggaggccttcacagcttgcagtggaatatctgaggcaaaaccttgaaacagaatttcatagtatctgtcacattctcatattttctttctttaaaaatttaagttgaataatttcaacttatttcactggataaagtaaataaatattttacatttgctaaaactttatactttgttccaagttttttaagtggaaaaaaatgcatgtaa

SEQ ID NO: 85627 - DNA, 917 bp, Homo Sapiens
  misc_feature (43)..(97): n is a, c, g, or t
  misc_feature (445)..(459): n is a, c, g, or t
caattatagcttacccagtgctaacacaagactgctgataagnnnnnnnnnnnnnnnnnnnnnnnnnnnnnnnnnnnnnnnnnnnnnnnnnnnnnnngcactttcatattcatacatacactgacaacattaacattcatactggaaaacccttgaaaagaaataccagacagccttaggcaacatttctttatatagaaaagcaaatatcagtagtattaccacagaaaggtgatggcaactgtagcaatttgagtcaaaagttcagtcctaattctacaaaccaaaggagaaaatcatcaaagcacctttcaatagtttaagaaaatattttatgtaatacttttgatcagatgctggcttgttttgtataagttgaacaaaatgaaaggcatcagttaccatcactatcacagtttaaaagaacccaaaagttgcaacatcnnnnnnnnnnnnnnnttcaaagatgctgcctttgtataaaagtaaaaagaagaaaatcttatcacaagagctaaagaaaaagtgggtctttggatcaaaccataatatttttaaggcatgttagaaaaactttcacttatctaagttgctagtctgatcagggcataaaataaatagtgacacaaggccaactttcttctgtagccactaaggtttcgtatgccaacaaatgtaatcttcctgttcttaagtgttttattactgtaatatctcaacaaacacattcatttgccagctgagttatatattcataccagatggatatgaatttccagtttcgggatgtccttgatgccttggtcactaaatatgcagggctgcgtggaaacactcatcaggcagccagatcagttcttattcatgtcttgacagtaaaagcccaccctgtcatctgacacaaatgtttttaaccc

SEQ ID NO: 85628 - DNA, 307 bp, Homo Sapiens
atttaacatgtcattgttcatctattaaatcttgatcagggtttcaagaatgactgcagtgggttttggaaacagacttatcattattgatttgaggtttcccagagatatagttcacagttaattgttgcgctctaatacaactgaccatttaaaattgaacaagtttattgttttgtaacaatgtcagttgttaaaccttgacatttcaattaaaacatgaattgtagttataactcaatgcaaattcaacagttgtatttggagttaaattattttaacaaataaatttatttaatgaaaaaaa

SEQ ID NO: 85629 - DNA, 1078 bp, Homo Sapiens
  misc_feature (48)..(60): n is a, c, g, or t
cagtcgacggtaccggacatatgcccgggaattcggccattacggccnnnnnnnnnnnnncgtctcgggcgaggagaggaggtgaccccgcgaaagataataaatcatcattgatcaagatgtcttcagcacctgagcctccaacattcaaaaaggaaccacccaaagagaaagagtttcaaagcccagggctcagaggggtgcgcacaacaaccttatttcgtgctgtgaatccagagctcttcattaaacctaacaaacctgtaatggctttcggattggtaactctttcactttgcgtggcatatattggttatctacatgcaatacaagagaataaaaaggacctctatgaagctattgatagtgaggggcacagttatatgaggcggaaaacatccaaatgggattagtagtgctggttagtgcagatggacctttattaaaggttctgaaatcttcaaatgaaagaccttgtgagtgtacagtatcatgtttcttgttctagaacatgctaatgaagagagaagatagcagttgcaaccagacaactgtcgtaaattttgtcctttcacagctgcagccattatctcattctttttccacagagtgagcgtcataatatttttctttccttacctcttataaaagtgccatgagaatggaagttgtttttgttaattattaaattctgtataataaaagtacccatgctgttaaatttgcatgatgttttaaatattttaagatgaattatgccggtgcagctgtcgtgaaagtttacttgtgttttgctacttgcaaaggaaatgttcatgttctccctggcatagaacctatatttttaaagaaagataaatagaaattttaaggcctgaagtcaatattaaaaatatgagatatgagaaactgagttggctctgacaagtagtttttattgtgtcacaaatggttcatatatttcagtttccattttagctatttttgggacagaattttattttaatggaaaagatccttccactcagctactaaaataaggattaagaatatcccagagtaattggagtttttcttt

SEQ ID NO: 85630 - DNA, 2024 bp, Homo Sapiens
  misc_feature (161)..(249): n is a, c, g, or t
gggagacacaggcccgccgccgcgccggcgcctagcccgccgggtcagcgcggccaggcctcgccgccggccccgctcccagggtgcaccgcggctagcgctggggtgggagcgggcgagatgcgccgggcgggcggtgcccactgacctccctcggcggnnnnnnnnnnnnnnnnnnnnnnnnnnnnnnnnnnnnnnnnnnnnnnnnnnnnnnnnnnnnnnnnnnnnnnnnnnnnnnnnnnnnnnnnnggaggaccgagcctaagagggcagccgcctgaaggaacgcgacggcggcgcccgcagtatttttcagtgctgtacaagcgtcttgaattactctggtagcttttccagaaagacccatgacttcaccacatttctcgagttacgatgaaggtcctctggatgtcagcatggcagccacaaacctggagaaccagctgcacagcgcacagaagaacctcctgttccttcagcgggagcatgccagcacgctcaaggggctgcactccgagatcaggcggctgcagcagcactgcacagatttaacatatgagctgacagtcaaaagttcggaacagacaggagacgggacttctaaaagcagtgaattaaagaaaagatgtgaagagctggaaacccaactgaaagtgaaagagaacgaaaatgctgagttgttgaaagaactggagcagaaaaacgcgatgatcacagtgctggagaacaccatcaaggagccgagagaagaagtacctggaggagcttgaaggccaagagtcacaagcttgaccctgcttgtctagcgagcttggagcagcgggccagcaccatcgcctacctgacctcccagctgcacgccgccaagaagaagctcatgagctccagcgggaccttcagatgccagcccgtcagggagccccgtgctggccagctacaagccagcgccccccaaagacaagctacccgaaacgcctcgccgccgcatgaaaaagagcctctcagcccccttgcacccggaatttgaagaggtctacagattcggggcagagagcaggaaactccttttgcgggaaccagtggatgctatgcccgaccccaccccatttcttgctggctagggagtccgccgaggtccacctcatcaaagagaggcccctcgtcatcccccccatcgcctccgaccgaagcggcgagcagcacaacccggcccgcgaaaagccgcacaaggcccacgtcggggtggcacatcggatccaccacgccaccccgccgcaggcccagcccgaggtgaagaccctggcggtcgaccaggtgaacggaggcaaggtggtgaggaagcactcagggacggacagaactgtgtgaagcccgccgtgccccaccccgcgctgtccatgcactgtgagcaccactgggaaatctcagccacaccttttctgtttaatcccatgcatgccaaacacttttcacacctaccgacccattctccttctgcttctcttgccctcttcttcacaccaaaatatgatcgtgtccctgccgcagaatatgtatttcctaattgctgtggccaaacgcctgtgtgccgaatcgcttgcttctgatcccgctccgtgtaacctaagtgcgctgcaggcaaagcccaggccacggctgcgtcactactgatgttcacgatgccacacagtcacacacctaattcattctcaagtcggagcaacacataccaaccttgaccttatcctcaagctccagggcagcctggccgagcagcccctgctccctcctggagacccttgtcacctcccgagctcctcctggagacccctgtcacctcctgaccaacctttcccagggcggcaccgatcaccgagcagccgtgcgtgtatctcaaggaactaaataagatgacgctactcctcatagcaccacaacctgaatgtgtgttcatatttttttgttagttttatccaaaatgtttaagatcccaacaaactttattttctaaacctgcaaaaaaa

SEQ ID NO: 85631 - DNA, 988 bp, Homo Sapiens
  misc_feature (263)..(263): n is a, c, g, or t
gttataacctgatatttgtcaacacagtataagctttctagttgttttcaaaattactgtaatggtttgtgtctgtatttgtatattatacctacaaacatacatatctttcagctactgaacacatcagaattggttttactttttaggttgttgattttttttaattaactattaactaagaataatacttattttcctaattataagcccaaaaacccctgggtttttttccccatggattaacccacctattttaatanggtatatttaaataattcccatcttctgatatgattttaaactctaaatcatgtgttactgttacaaaactttctctctccatgtaatcacacttagttatgagcaaagcagtgagaaagttgaggtgataaacaactttgcagcattaatgtaacaaaaagtttcagtatttgtcaggaaaacaaaagcttaggctgttaaataaaagctattctattttggtaagttgaaattcaagaatgtatatataatttcttaaatgtaagagtgcattaaatcaaatacaaaaattggtttttcaatgcatcattatttattgccataacaaattgtttggtccaaaatgaaagctatattcagaaggtttgcacctcaaaattgagtaataattaatgaaatgtctgtacaaaataaagtgcaagcagtgtaaaattgaagtctgtctttgtttcaaaatgattaagattaaatgatgaaataatattttatagccactgcattggatacttggattgtttttcaagcatcttcttatgactaaatcttctgtttcattctgttttaaatctaaaaagtaaaatgatggtcacttggaatctgctctatattttaattatagtctcttctgtttataaacaataacttacacatatttttcatagttttaagtaaagattaaataatgccatcttagaaaggatctgtttaacctatattataaaag

SEQ ID NO: 85632 - DNA, 534 bp, Homo Sapiens
tctgtcaagctgttctttatttcagggagagggcaggggaggggctcagtctttcttggcagcagctttcctcatggcggccagtacgttgctcagctcctcccgcttcctcttggcgcggatgtgcgtccccacccttttcttgataaatttgagggcccgtttgtccttggagaccttcagtaactccatggcgcgccgctcgtacggggcaaagccacacacctcccgaatcatgtcccgcacgaacttggtgtgtttggtcagacgcccgcggcgtcggctgtgcctgggcttgctcacgttcttggtcactttgtggcccttgttgaggcccacggccatagggtagcgtagggccatggctgcggacagcgacggggagaaggggcggaggtgagtaccggctcagttcccgaggcccagagccccgcgtcccggctccttcagcctcgctcgccacaaccaaccatcctccaacctgcacagaggacccgggagtccggatggcggcggataccggcagtgcgggcc

SEQ ID NO: 85633 - DNA, 475 bp, Homo Sapiens
ggaagcagtgctataacgcagagtggccattacgccggggagatatcccggagttccgcgcggcgccaggccttccgccacggccgtctctggagagcagcagccatggccctacgctaccctatggccgtgggcctcaacaagggccacaaagtgaccaagaacgtgagcaagcccaggcacagccgacgccgcgggcgtctgaccaaacacaccaagttcgtgcgggacatgattcgggaggtgtgtggctttgccccgtacgagcggcgcgccatggagttactgaaggtctccaaggacaaacgggccctcaaatttatcaagaaaagggtggggacgcacatccgcgccaagaggaagcgggaggagctgagcaacgtactggccgccatgaggaaagctgctgccaagaaagactgagcccctcccctgccctctccctgaaataaagaacagcttgacagaaaagaaa

SEQ ID NO: 85634 - DNA, 1086 bp, Homo Sapiens
  misc_feature (673)..(733): n is a, c, g, or t
  misc_feature (807)..(807): n is a, c, g, or t
  misc_feature (949)..(949): n is a, c, g, or t
ggggcaggtaagtggtttcccgcactgccggtatccgccgccatccggactcccgggtcctctgtgcaggttggaggatggttggttgtggcgagcgaggctgaaggagccgggacgcggggctctgggcctcgggaactgagccggtactcacctccgccccttctccccgtcgctgtccgcagccatggccctacgctaccctatggccgtgggcctcaacaagggccacaaagtgaccaagaacgtgagcaagcccaggcacagccgacgccgcgggcgtctgaccaaacacaccaagttcgtgcgggacatgattcgggaggtgtgtgggtttgccccgtacgagcggcgccgccatggagttaactgaaggcctccaaggacaaacggccccctccaaatttatcaaagaaaaaagggtgggggaatccacttctccgcgcccaagaaaggaaacgcgggagggacaccgataacaacacgcaccctggcgctctccatttaaggggaacaacctttcctatgcccacaaaaaaagaacccttgaagacctcccctttcgccctggggcccgttccttcttctctgtgaaatttcacctgaagacccgcccgcttggtgccccctgaacacgcaacccacttgatcagccctctgcttacccctcgannnnnnnnnnnnnnnnnnnnnnnnnnnnnnnnnnnnnnnnnnnnnnnnnnnnnnnnnnnnnttaaaagacacaagagccccgctctctcacgaataccaccatctctgtttttatggcggcgcgcacacacgcgnccaacatataccagtacgcgacgcgcccatgtggtctacacccgtgtctgcccgggcggatacctctccaatttgtcatcatgcacgtaacgtctatgcaacaccacgctctgtaatgtgtgcccatactcgccataagcgnttcccatttgcaaaacaccctatctgtccctccgcttcatgtacagcagagtctctggcgccgcaacgaaaaggcgagcatgagaacacgctttatagaccgaccccgatgccgcactcttgttactctatctattt

SEQ ID NO: 85635 - DNA, 263 bp, Homo Sapiens
gtgtgagccaccacctgacatccctttccggaaccccaacacgtacgacatccactggctggagaagatcctgaaggcccgaaagcatgtccacatggtcatcattagccagctgcagtgagtgcccagcctctggaacggggaacagagagggcaagaccatggggaagggtgaaaattcaaggtcatggtgggtaagcttgggatccagacccaggtgtactacaatagttcctgcctctttctcctgaaacatacaactt

SEQ ID NO: 85636 - DNA, 1383 bp, Homo Sapiens
  misc_feature (868)..(868): n is a, c, g, or t
ggctggaccggtccggaattcctgcgatgaggaactgcggctgcggttcctacccgggtctggggctgttaccattgagtgaccagaaaggctctcggtgcaaagtgttcctgcagaattgcttccacgtaaagggaccttcgggaaatttcgctggataccggctggcattgacaaacccagcgtccctgagccttgtgaggtttccaggcaggctgattgcgaggcaacatgtctgcttcagtgaaagaaagccttcagcttcatctactggagatggaaatgctgttttctatgtttcctaaccaaggagaagtaaaacttgaagatgtaaatgccctgacgaatataaagaggtatttggaaggcacaagggaggcgctgccaccaaaaatcgaatttgtaattacactccagattgaagagcccaaggtgaaaattgatttgcaagtgaccatgcctcacagctacccctatgtagcattgcagctgtttggacggtcatctgaacttgacagacatcagcagctacttctcaacaaaggtctcacttcttacatagggacttctgatccaggtgagctctgtgtatgtgcagcaatccagtggctacagggacaacagtgcatcttatttcctgaacagaaagcttgtatatgaaccatctacacaagcaaagccagtcaagaacacattcctccgaatgtggatctacagtcaccatatatatcagcaggacctaaggaaaaagattttggatgttgggaaaaggttagatgtgactggattttgcatgacaggaaagcctggtataatctgtgtggagggtttcaagagccactgtgaggagttctggcacacaattagntaccccaattggaagcacatttcctgtaagccatgctgaaagcgtggagacagaaggaaatggtgaggacctgcgccttttccattcttttgaagagttactccttgaggctcatggtgactatggattaaggaatgactatcacatgaatctgggccaattcttagaatttctcaagaagcacaaaagtgagcatgtttttcagatactatttggtattgaaagcaaaagttcagactcataaaaagcgattaagaggcctatgcctgtaatttcactaagtcagtatttctgttaataagaccaaattaaaaaggctagtggctgtgtagcatcctcagtgcaaaacccagctccagaattttcacctggtaacgaatttcaactgacagtgaaatgaataggcctttaaactttataacattgcaattgtgatgttatctctaggtttttgtgtgaagtcattcaaaaactatttcattgtaaattaataaaaacaatccatttaaaaaaaa

SEQ ID NO: 85637 - DNA, 576 bp, Homo Sapiens
gcatgttagcacaaaactaaatgctgaattatttgccatgggaagtgggttactgtgagattaaagaaaaaaatctcgtatttatgcttcaagcagcatagctcatttgcttatctaacaaattcatatttgattataagccattagtgacagttaatgaaagggactcctgtttgaattaagcggttatgagtatccatctcagaagcttacttctcttggatacttgaattaaggagccctattctcattaatgccgacttattcagataaagttcacagtgtttttgtctttttcatcatatttatatcttaagtgaaaggtttcaaccgtaacgacacattggaagcaactgggtccccccgcaccaattcaactggaaaatctgggggtggcacgtagaccttggtattttttataaagatccccaagtgattttaatgtgaggcagaatttaaaaccattggcttagagcagtagtgattaaatatatacctacattgtttagtttctgaccttgatagatatattttgtcatatttaaataaacaaaataatggccaggcacagtgtca

SEQ ID NO: 85638 - DNA, 372 bp, Homo Sapiens
aagatccaaggtgagaaatgggagacaataaggctcataaaagagaaatctgtttggatctgaatcagaaagatcacacagtatagtaatgagaattaaaactgcacagaaacaatcagggtttagaaggctaaagtggacaatttgaactcatttactagtagcttggcaacagttaaaattttcaaaacaagctgatttgagctaagtctcttagcattcaccacattatactgagttatctatttctgtgttttgctatcccaccaaactgtaaattctgctgtgttttattcatcattttactgcctctgcctagcatggtacctggtacatgcttgccactcagtaatcacttgtggaagtcaactg

SEQ ID NO: 85639 - DNA, 656 bp, Homo Sapiens
  misc_feature (489)..(489): n is a, c, g, or t
  misc_feature (551)..(551): n is a, c, g, or t
  misc_feature (599)..(599): n is a, c, g, or t
  misc_feature (612)..(612): n is a, c, g, or t
  misc_feature (619)..(619): n is a, c, g, or t
  misc_feature (643)..(643): n is a, c, g, or t
tttagttcccatcttgatatagtcaagtttattgaaaaagtacaaatagaaatgtttcagaatgtcttaagttttatctacctagcaaataccaatttataattatgtaacagtgcagatctagaatgtgtacaggtactttgggagtaaccagaagagcatttcttgtcttcaaagagattaagcatgacaaatttgaatactgacttagataataggttttaattatatctaaaagtctatgttgatattgatcctctggcagttcctctactagactccagccaggggctcagaactgctgtctcactcttaatacattaccctatccattcatctggcaaattactttccaatagtttggcatgtgtatttatgacaaaggttgattacaaattctacactgagggagggttactaaaacaagacaggaaaaccaacctggaattaaatcatttaattcagaatagaaattacggattttaaatnccggtaggattataactttcattttggaattgggtacatatacttggcagactggctcttangctatgggaagctgcttgggaaataagccggatcttccagttactccngttttaatggccnccgtacnaaatttccttgggggggaaaaagntctaaaaagactg

SEQ ID NO: 85640 - DNA, 439 bp, Homo Sapiens
  misc_feature (295)..(295): n is a, c, g, or t
ttaaaagtgggtctttctcaaagctgggattttagagtcctttttgcagcctttctgacaaggaacatctgtttactaacaagcaacctatctctccaatccagtaatcccatttcctgcaaaaccgcattaagtgcctttccccaccctcccatgttcttaatacctggaaaacttaactcatttctttaccctccaaaatataaaatctctggttcattaactgggtcagtctttttagaacttttttctccccaaagaaatatagtactgaggcattaaaacaggagtaacntggaagatcagctatttcccaagcagcttccatagctaagagcagtctgcaagtatatgtaccaattacaaaatgaaagttataatctaccgggatttaaaatccgtaatttctattctgaattaaatgatttaatacaaaaaa

SEQ ID NO: 85641 - DNA, 631 bp, Homo Sapiens
  misc_feature (13)..(13): n is a, c, g, or t
  misc_feature (26)..(26): n is a, c, g, or t
  misc_feature (63)..(63): n is a, c, g, or t
  misc_feature (70)..(70): n is a, c, g, or t
  misc_feature (396)..(396): n is a, c, g, or t
ttaaagggaatgngagttatccatcnggctatacggaattatggcttacaagataggcacatngacgggnccaggaaaaaatgatcaatgctcattcttggtacacaactgagacagtgaaacacggtacaccatacatgtcatctactgatccaactatgctatctgataagctatacttaccaaagaatggttccaacaaacacctttgtagaacaaatattcacactgtgttatcaaatttgctgctcctccagtggcgggttcaagagcttccattagctttttatttgcctcttcaattatgccggctttgacaatgagttaaatgtttcttaaaacctcttgggaaatttgattcaaaattacaacggtggacatttaagtaaacttttnccatgggctgctacatgatttttaaggagagattccaaaagaaaagcctttccacagattgtgcatttgtaagggctatgaacattatgcttattaaccaaatgatgcaaaacagcaccttttttcatagcacgacagcaacaaattttgcaataatactttccttttccacgcttcatgtattttgcaatctcctcttcagagataaaagcttctttttcttcagtaaactgta

SEQ ID NO: 85642 - DNA, 1834 bp, Homo Sapiens
  misc_feature (56)..(103): n is a, c, g, or t
  misc_feature (496)..(506): n is a, c, g, or t
  misc_feature (909)..(923): n is a, c, g, or t
gcaatcaaatttacatgtatagatcgtcagggaatagcccaaatgttttaaacgcnnnnnnnnnnnnnnnnnnnnnnnnnnnnnnnnnnnnnnnnnnnnnnnnctttgttgctaggattaaggttattctaattgctttactctcaggaaagtgtaataacgcatgggaattctgtacgttatcactgtaatggaatatccaatttacagatagtatgatatacatttcatcatttaagtaagggatcgaaaacatttcaaattgctctatctgggctgatagacatttcgtcatttaagtaagggatcgaagacatttcaaattgctatctccatctgggctgatccaaaattctgagattgttggctacctatattttgttgcagcttttaaatgtactctgaacttccaaaccacattcattccagcctggtagaacaaatattcttggatctttgatcaaagcctggaatgatagctttaataaaagaaggnnnnnnnnnnngcaccctctcttgatctcaactgtaacaaggctgtaattccatcaagcgattctactgacatctagtacagtgttgaagcccaagtggttggctggttccagtattagaactcaagttgaaattatatgattaactgaaatttggggcatgcattatttattatacatggcctacaacggttctgtctgcgctgttacgtattacctacacttctgggtttttttgttcttgttctcagcctctctttaagagttcttgggccttccttttccctctttctattttaacagttttaattttagaaccatttacattccagtaggtaattcactatgcgctttatatgccttagggcatccaaataaaaaacaatagggtaaacatccccaaaacccacctttnnnnnnnnnnnnnnncccatacagatttccatatgtaataaaaccccgtgttcttggatagatattaataaggttgtaattccaactggtgacataactcctgtgagggataagaatgtgtctgcttatagtaataacatcagaacctctttgtgaaattgcggcctttaatgtacattttaatgaaagggtgcattagtattgtacaggggtcttgtaaagtcatcaaaacttgctatgaactctaattgccatttgaagctactgattggcagtggctctactctaaaactgctttttagcaattgtatttttttcctgattatattttttaatgtactttgatgtttatgctgatgagttttttatgtacttttggtgatgtttcagtcttatgtactcttctgacgtcagaaaagtaccactggttgtttgcagtcttattgtgtaatcagcctaccgcaggcttccatgtataataaagtaattaatattgtgcaagtgtaaaacacttctgttataaaagcagtgtttggaaaataagaaatattaaaaatggttacaaagtattagttaatttccttttcccactttcctccctttagctttagcagctaaagggtcaccaacttgtcattgcaagattcttagaaaatgtacttaatcttaaatacgctgagtactaaaaagtgtttatttcttatttcagtaagtgcggtaagttctattgagtacagagtacaagctgtaatcaaaggatggagaggacctttaccactgtatctcttaagctgtatgatttttctccagtttgttttatacaggttttgaatttctttaacttttattgtgtgtactgaatactgcatatgtattattctgattgtttgctctagtttactaccaataaaagtcctgttaatcac

SEQ ID NO: 85643 - DNA, 713 bp, Homo Sapiens
ctgagtactatataatttacaatcttaagaaattatcaagttggaaccaagaaatagcaaggaaatgtacaattttatcttctggcaaagggacatcattcctgtattatagttccatgtgaaatcttcatggaaaatgacaagcagtggatcacatatgtgtttatagcagatacaggagctggctatctagaagttggcagacagaactgcccaaaggcagagaaaagataattggatggttaagaatttcatgacaaggctatgaatttcctggacaccactagaatagaggtggaacatttgaagaaaatgtaagctgttgaagtgtgcttagaaaacttgaatgtttggtcagagttatccatcacatgttcagtaagaagaacaaacagtagtaaacacaattgagtatttctgacaggaaaagtgtccagaagtcacaagttgatacttgatacagcagaaaaacactgcatattataaccatcagcttttctgcactcaacctaaagtcctttggaacccatcgaaaggtcaatgttattaccttgctcatttttggaggacttttacaagtattttgagaagtatctggggatggacattcattcgtagttgtgggttctggattttcaggatcagggtctataaagcagaagaaacctatagtaagtataaaattacacaataaacactgttttaacaccaaa

SEQ ID NO: 85644 - DNA, 1740 bp, Homo Sapiens
  misc_feature (696)..(696): n is a, c, g, or t
ggggagcagcaactggacgatgaagatgatgatgaagaagactgcccaaatcctgaggaatataatcttgatgagccaaatgcagaaagtgattacacatatagcagctcctatgaacaattcaatggtgaattgccaaatggacgacataaaattcccgagtcacagttcccagagttttccacctcgttgttctctggatccttagaacctgtggcctgcggctctgtgctttctgagggatcaccacttactgagcaagaggagagcagtccatcccatgacagaagcagaacggtttcagcctccagtactggggatttgccaaaagcaaaaacccgggcagctgacttgttggtgaatcccctggatccgcggaatgcagataaaattagagtaaaaattgctgacctgggaaatgcttgttgggtgcataaacacttcacggaagacatccagacgcgtcagtaccgctccatagaggtttaaataggagcggggtacagcacccctgcggacatctggagcacggcgtgtatggcatttgagctggcaacgggagattatttgttttgaaccacatttctggggaagactattccagagacgaagatcacatagcattgatcattgaactgctggggaaagtccctcgaaaatacgctatgttggggaaatactccaacggagtttttncaccagaaaaggagaactgcgacacatcaccaagctgaagccctggagcctctttgatgtacttgtggaaaagtatggctggccccatgaagatgctgcacagtttacagatttcctgatcccgatgttagaaatggttccagaaaaacgagcctcagctggcgaatgccttcggcatccttggttgaattcttagcaaattctaccaatattgcattctgagctagcaaatgttcccagtacattggacctaaacggtgactctcattctttaacaggattacaagtgagctggcttcatcctcagacctttattttgctttgaggtactgttgtttgacattttgctttttgtgcactgtgatcctggggaagggtagtcttttgtcttcagctaagtagtttactgaccattttcttctggaaacaataacatgtctctaagcattgtttcttgtgttgtgtgacattcaaatgtcatttttttgaatgaaaaatactttcccctttgtgttttggcaggttttgtaactatttatgaagaaatattttagctgagtactatataatttacaatcttaagaaattatcaagttggaaccaagaaatagcaaggaaatgtacaattttatcttctggcaaagggacatcattcctgtattatagtgtatgtaaatgcaccctgtaaatgttactttccattaaatatgggagggggactcaaatttcagaaaagctaccaagtcttgagtgctttgtagcctatgttgcatgtagcggactttaactgctccaaggagttgtgcaaacttttcattccataacagtcttttcacattggattttaaacaaagtggctctggggtataaagatgtcattctctatatggcaactttaaggaagaaaagatatgtttctcattctaaaatatgcattataatttaccaagccccattttgtgatttttgcataattttttaaaagtaccttttaaagaaggagccatttcccctttaaaaatgtgaagggctccaataacctgg

SEQ ID NO: 85645 - DNA, 1706 bp, Homo Sapiens
  misc_feature (91)..(115): n is a, c, g, or t
  misc_feature (1025)..(1034): n is a, c, g, or t
  misc_feature (1654)..(1664): n is a, c, g, or t
ccagttacggctaggtacgaggcctgggtggtgaattcgcacgaggttatagccaggtcttcagttataaccactccaccctcctcacttnnnnnnnnnnnnnnnnnnnnnnnnngctatgggatttaatgggaaaaatatgtaaaaactgtcactagtcagctggctctttttcctatgaaatctatcagtacctttctccatccgttgttctcaataatgaccacagagcctgagtataccaagaaaaccaatattcgcattacaggttgctcctgtccttccagacacctttcctgcctgtgtgactaacctaattttgctagttccataaatacacgattagtttagtaacagccatcacaatgtaccatgtacattcatggtgagagctaaagatcgacacagacttctaggagctttgttcatactgattacttaatccaattgtatagattgaatatttgagtggaaggaatttacactctgtttaaatgatgggattctatcgagatagcactcatgatcatgacctttttggtagtattcttaaacaaaattctacagagactaaatgttagcgatgatcctccattttcaattttaaccaattctgtcccctttctcaaaaccctgagccctgtgcatgctttctcagtcttgtggtgggactggatacaatgactaacttcccctcctcccctctttaaacaccattttccatggagttcaaaaaaattttcttttcttaacgttacatatcatagtgaatggtttccccagtgtatatgaatgttttaagtgtctccaatagcttatgcagtctaggagctttccaatactcatttaattaagatttaatcatttgctaatggaaatcttaccacctttcattttccctctgttaccaaatttcagctcttaggagctgctctacaattctgaattgcttttcttgcctctctttagtcacctgtcacaggaggttcctgctcagtaatgatatgtgagttaggataataacnnnnnnnnnnggtggcttcagatttagaagaaaagatcctgtttccatttgaaaggaactgtaagcttttatcttttaaccaactgaacaatacaccaaaagcagcctagggatgagcatttctttgaaagcaattaggttattcacctggtattaaaactatttactgttaaaaaatctgtgacttcatgaagttgatttttaaaggcagcatcaaaaactgaaaaggaagggaaaaaataggcagcttctctgcacttgtttggagctccccaaaacaggagccatggagaagtggcatcaagaccgggctgccctttcgagaacaccctgtggcagttcagagacacgcttttcctacactgcatgcagcccctctttccagcactggaaagaagtggtcttgagcccagctgagaagcacttcacactcctctctcttgttctgaatggtgtttgtgtcagtctgcagctgtgtatggtattatgtcttataatcctgcatcacttctatcctatccagtcatatctaatgtagaaaattagtttccagtgaaagtaatatgtagtgcttttatgatatttgtgtgcaatatcccctcttccattgaggatatttgatgtaaaggnnnnnnnnnnnctcagttccacaataaaatacaaaagtggcaaaagttaaaaa

SEQ ID NO: 85646 - DNA, 594 bp, Homo Sapiens
gcggccgcacctatgaccccaacctcaggtggcagcacccctccgggcatcactgcaccagccgtgcctagcatcccatcccccattggggtgaatggcttcaccggcctccccccacaggccaatgggcaacctgctgcggaagctgtgttcgccaatggcatccacccctacccagcacagagccccaccgccgcggaccccctgcagcaggcctacgccggagtgcagcagtatgcaggtccagctgcctaccctgctgcctatggtcagataagccaggcctttcctcagccgcctccaatgatcccccagcagcagagagaaggcttcgtgagcttcgacaacccggccagcgcgcagaccgccatccaggccatgaacggcttccagatcggcatgaagaggctcaaggtgcagctgaagcggcccaaagacgccaatcgcccgtactgagcgccggcgagagcgtcaccccgggggagaccaggactcgcacagggcaggatgctgaacgggctacattaaaaaacaaacctctctctatatatatttataaatgagaactgttggatgacacctttgacatatcag

SEQ ID NO: 85647 - DNA, 1419 bp, Homo Sapiens
  misc_feature (598)..(673): n is a, c, g, or t
  misc_feature (985)..(1048): n is a, c, g, or t
ccaacctcaggtggcagcacccctccgggcatcactgcaccagccgtgcctagcatcccatcccccattggggtgaatggcttcaccggcctccccccacaggccaatgggcaacctgctgcggaagctgtgttcgccaatggcatccacccctacccagcacagagccccaccgccgcggaccccctgcaacaagcctacccccgaagggcaccagtatgcaggtcgcttcgtgagcttcgacaacccggccagcgcgcagaccgccatccaggccatgaacggcttccagatcggcatgaagaggctcaaggtgcagctgaagcggcccaaagacgccaatcgcccgtactgagcgccggcgggagcgtcccccgggggagaccaggactcgcacagggcaggatgctgaacgggctacattaaaaaacaaacctctctctatatatatttataaatgagaactgttggatgacacctttgacatatcagccaatatcaatcaagctgaagactccagacactgtctgtgtgactgtaacatttcttcaaggaaagtatagcgtctatggagttcagagggcacgtgtttgggggnnnnnnnnnnnnnnnnnnnnnnnnnnnnnnnnnnnnnnnnnnnnnnnnnnnnnnnnnnnnnnnnnnnnnnnnnnnnatcacgagcagacggggaggctgaagggctgggagctgggaggagacgctgcttaccgatcccggggcttttccagcccacgggcgacctgacgcaggctggggcaagtggtgcgtggggcctggtccccaaggggcggctgagaggccgacactgagcatctctatctgtcattcctttagctatttagggaccaaaggaccaaactttttattgcagatgtgtagctctatgtcaaatagagggggaatggaggaccccctccttcctgcctcatggctgttcttgaaacagcttagagcgattctatgnnnnnnnnnnnnnnnnnnnnnnnnnnnnnnnnnnnnnnnnnnnnnnnnnnnnnnnnnnnnnnnntaacgcttcaatgcttttaaaacagcaagataatagttctttgatactttgagaggcgctttgatgaccctcatccaagtctatgacactttcctatggttttctgtattctatgtctggatggagctgttaaaagatgaacaaattggtggatatttggggaaagcaacacaaatcttaaaactcacccgtgaagtgtgagaaaacaaggaggggaacaaatgggacttaccaagcaaggtcattgttgtgaaaagtctgtaaatgcttctaactcttccccctcttaaaatcataatagttgtacagaattttaaaaaggaaaagtttaaaatacctatataatagaagaaaaattagaggaaagcaaa

SEQ ID NO: 85648 - DNA, 2151 bp, Homo Sapiens
tatcgctaggtacgaggctgggtgtgtaactcggcacgaggcctcgtgccgccagttccaggactggtgcctcaggacttacggggactcaggcaagaccaagacggtgacccgtaaaaaatacgaacggatcgtccagctcctcaatggctccgagtcgagctccacggacaacgccaaatttaaattctgggtcaaatcgaagggcttccagctgggccagccggacgaggtccgcgggggaggcggcggcgccaagcaagtgctctacgtgcctgtcaagaccacggatggcgtaggggtagatgagaagctatctttacgacgggtagctgtggttgaagatttctttgacattatttattcgatgcatgtggaaacggggccaaatggagaacaaattcggaaacacgctggacaaaagagaacttacaaagcaatttcagagagctatgccttcctaccaagagaagcggtgacacgatttctaatgagctgctcagagtgccagaaaagaatgcatttaaacccagatggaacagatcataaagataatggaaaacctcccactttggtgaccagcatgattgactacaacatgccaattaccatggcctacatgaaacacatgaagctgcagctgctaaactcacagcaagatgaggatgaaagttcaatagaaagtgatgaatttgacatgagtgattcaacacggatgtcagctgtgaactctgatcttagctccaatcttgaagaaagaatgcaaagtccccagaatcttcatggccagcaagatgatgattctgctgcagagagctttaatggcaatgagactctggggcacagttcaattgcttcagggggaacacacagcagggagatgggagactccaacagtgatggcaaaactgggctggagcaagatgaacagccactgaacctgagtgacagtcccctctctgcgcagctaacttcggaatacagaatagatgatcacaacagtaatgggaaaaacaagtataagaatcttctaatttctgacctcaagatggaacgagaggcgagagaaaatggaagcaagtctcctgcacatagttactccagctatgactctggcaaaaatgagagtgtagaccgaggagctgaggacctctcactaaacaggggagatgaggacgaagatgaccacgaggaccatgacgattcggagaaagttaatgagacagacggcgttgaagccgagcggctgaaagcttttaattctcgacctattccttcccaccttacttcagcagttgcagagagtatcttggcttcagcttgtgagagtgagagtagaaatgccgccaagaggatgcgtctggagagacagcaggaatgagtctgctccagctgacaaacagtgtaaaccagaggcgacccaggccacttactcaacatcagctgttccaggctcacaggacgtgctgtacatcaatggaaatgggacctatagttaccatagttacagagggctaggagggggtctgctaaatctgaatgatgcttccagcagtggacccactgatctcagcatgaagagacaattggcgactagctcaggatcctccagcagctcaaactccagaccccagctgagtccaactgaaatcaatgccgtgagacagcttgttgcaggatatcgagaatcagctgcatttttattgcgatctgcagatgaactggaaaatctcattttacaacagaactgagacagacgaccaccatattcactgaggtctaaatttgcagtttccactaatgacattttgatttcccaacagagatacttctggtcttactgcacagtcttttaagagaaatacttccattatgccacattgtccttgatccgtaagtgatgtgttaaggtgcttcaaaggaactctgacctctgaagtacttgagctactttagtatgtccagcctattgctttttgttttagtgtgtcaccataaatatcaggggcataaaaggctatctattcttaattcaaggataaaacagaagaagcttgtggtataaaacaatagttcaagatccagctgaaatattagtggaatttgctactgactcattggactgaaagctgaagtacctggcaaaaaaaa

SEQ ID NO: 85649 - DNA, 598 bp, Homo Sapiens
  misc_feature (61)..(71): n is a, c, g, or t
tttagactgaattgaagggcttttatttcacacaatgaataacatatgaataggattaacnnnnnnnnnnnaatagttaagtgctctatactgtgctaacctgatctggtagcggaaaagactgagctttcttttagaaaaaaatgtttaaaacccaacatctaagaccatggaggagcatgacagtaagcatgctagatgtatctacgcctcaaataacagcaagtccatgttcattttaaatgtacaaaaatgctttatgaataaaaactgttacaaaaagaacatttcaaacaatgtacaattttcttgcctctatattcaataaaatacaaatacattttttgttctaaaatatgtttacatacaatcaaagtagaacatgcaaattacactttaaaaaaggcttttaaaaaccacttatgaatacaaactaaaaattagccagcacgacttgtaagacaatcttgtgccccattttttcttttgaaatatatatgtacatatttaacacatcatgtgcatttattattatttaagaaatagattttttttaaaaaaaggaagaaaaagaaagacaccaatctagggtggaacc

SEQ ID NO: 85650 - DNA, 588 bp, Homo Sapiens
tattgggtttccccttccccccacctttttttgctgtgaaactgaaatagtgaacttttctacgtattgacagcagatttttcgatgaaatcttcagagctttgcctatggggcacagtaggcctagtaacctggcatgtttgatatatgtaggtaaagcataatttaaagtaatcccaggtaaagatggccctaaatactttcatgtctctatattcatttttcacagatccacctgtctcttgaaaatataaaaagacaaaacaggtttgccttggcatcagagagcacaaagattaaaagttactttaaatttgccaatattttgggagaacaataaaactacattttttcctcttccatactggtagatgcgaaatttatctgtgcatgaaagggtcacttctgtaatagtgcaacagatttggtattaaaaattaaatgtggttttaaaagttcctctctcttttgtaatttatgttcccaattgagtgtgaatgtccaagtaatggtgtatgtaatggtacaggcaaatgtgactggatttccctcaaaaaagtaactattaaacagtcttgatctcttaaa

SEQ ID NO: 85651 - DNA, 612 bp, Homo Sapiens
ggaaatgcattctgttcactcactgtctgggccttccccaccctagtcttggcacattccttcaagaatgtagttaccgtctgcttgggaagatgtcagtgcaaatgtgaagataatgggcatcggactaggctttggtttgccacaagtggcagctgcctgtatcaattacatttattaattttgcttttcatttttcccagttctcctcaccccccctttgttgaaatgttggacttgctgtcagaggcaactgtaatattgccttagggacttgtggagaaggggaattgctcagtgtagtgttttaactttcagaaccaagcaatctatttactcttacaaatatttaagaagtgtgttagtccaactttaagaaaaatccaaactcatcagcttttgatagcatcttggtttttgaaacaacttcaatctgtaattggcattcagaatgcccttggcatgccagtctgtgatggcatttaagacctgtaaaacacttgagcccaactcgattaaccaaaaccgataaccaccacctttatcttctaaataaagtccgctttatttttattttctgggcatagctgtttcctagaaaaaaatcgtgtc

SEQ ID NO: 85652 - DNA, 887 bp, Homo Sapiens
  misc_feature (410)..(422): n is a, c, g, or t
  misc_feature (676)..(684): n is a, c, g, or t
gccattgattagaattgtgcacagtgttaaaagtttttacaaaatggagccctctggctttgtgtgggtctccaacgccgtgtttatccccaggccattttggggaggccttgagccacggctcagttcaactttgagcctccacagaaagttttgagacacacacactgggcccaattaatggctgaaaactcttgcttttttagctgggaatcgccccgtgtttggcccggtcatggtggtggtgccccgtattattctccggtatctcccgggaggccttgaggccaccgaagaaattggctgggaaaccccgggaggttaaaggtttccaccgcgcaactgaagaaagtggccctggtggcaaagtccacaacctggggcgctttcacggccaaatcttccggttnnnnnnnnnnnnnaataaaaaaaagtttaaggatgtatcttaacccacatattattttctctacttgaatgcatcctctgtaacttagtatatgtaatactacagatagactttctcaacatttgctgcctatgctaaggatctgcagccaggttctcagaagcagtacctaccaattctcaacagcagatggcaatgttgtacaagttaacgacagaactacttttatgccacaggagaggaagacacaaggagtcaaaagggggnnnnnnnnngtttgggttcatagtagcaggaacattaacagaatagcctgagattttaacagcataactcattccctcttccacctttgtactttatccaggtcaacacatcagggttctctaacgattccatgtattctgtttctttactgtaagatacatgtaattcttgccactgtgattaaacaagccctgtaatagtcagcagggtt

SEQ ID NO: 85653 - DNA, 496 bp, Homo Sapiens
  misc_feature (284)..(284): n is a, c, g, or t
aaaagaaagacaccaattctagggtggaaccgccccttccacgttgacccagttggcagctccttttcaatttccccccctttagtgtttattagaccttgggccaagtgggccaatagatatccagggaagtttcttccttgggttgatatgtgcttctaagactgttccccaaatgactgagtccaacagggaaggaagactcatcagtggggtgaactctccaagaaacaagaggcagagaggaccttgtattgtggaaagaaactttaagaaacaccaangaaaatgctacgatatattacagttcgagtttctaggcactgtgatgacattatctgtaagctctggcatttggaccactgtgatactatagggtagtgttgagaataacgtctatatttatctacttttacataacgagaaggactgaaaatcctgcaacgtaacacttaaatggcttttgaggcattacagattctgccacccctctctc

SEQ ID NO: 85654 - DNA, 1099 bp, Homo Sapiens
  misc_feature (129)..(129): n is a, c, g, or t
  misc_feature (1023)..(1023): n is a, c, g, or t
  misc_feature (1028)..(1028): n is a, c, g, or t
gaactattacctactcttggctcctgttactccgtaggcttcttaatcttccaggcattacagcagcacaggttctactttttacatcatttctatgttcggttgtttttaggcataaacaatgtgtantgcagtgcatttcggcatttgtgccatactgaaagaatcaaaaacaaatcatccaaattaaatttcaaacattatttcagagaacacagggcaagacacatacagtgccttcagatattaagcattccacaacatcgtgcattctgtatcagctggtccagtccattctgggtcctagattactgtcatgtctaaaagtaacttttaaaaagcagagttcatgaaaactgcaatgctgggaaaagaaggaaacatgaaaataaaaataagacagtttattagaaatagcatttcctcataagcataaaaagaaaatcttgttgccaactgaagcacatgatgatttgtggtcctttatggtttctattacatgcagtaagaaagatgtcaacatgctagaaaattaattttaaaactaagttattccaacactaaaagcatacaacagcatgccaacagtaatatattattctccaagactttacctatgtaagtgttcaaaactctgcagcattaaacaacgtgtatgcaaattgttatggatacatttcagaatctaagaaatcaggcaagtgcttaaaaggccaacggtccaagggattacatctgcagtttaaaaagtaaatatatattctatcgtattcataaacaatatctatcaaatgggttacctccaaatatgaaaatctataacaacctatggttgaaggaatgctcagtttcatttgccaataaattggtttctcataacttgcatcaagtttaattttaagtaaagctttttatatgtagatattttgttgaatttgtaaatacacttaaaatgtagatgctatatgcttataggtgttacatacaaataaacatgcaatgtatatgttgtactgtataagnggtangctaattaatgcagtgaatgggattggaaagcatctacttagatatcctattgggttccccccctcccgcc

SEQ ID NO: 85655 - DNA, 730 bp, Homo Sapiens
  misc_feature (53)..(53): n is a, c, g, or t
  misc_feature (58)..(58): n is a, c, g, or t
  misc_feature (97)..(190): n is a, c, g, or t
  misc_feature (202)..(222): n is a, c, g, or t
  misc_feature (467)..(476): n is a, c, g, or t
  misc_feature (625)..(625): n is a, c, g, or t
  misc_feature (682)..(682): n is a, c, g, or t
aaaggagagtttaaaaaaatttttttgggggggcgaaggggccccaaaaaacngcgtntatattatttttctgtgaacaaggcgcggtgagaggtgnnnnnnnnnnnnnnnnnnnnnnnnnnnnnnnnnnnnnnnnnnnnnnnnnnnnnnnnnnnnnnnnnnnnnnnnnnnnnnnnnnnnnnnnnnnnnnaagcagttaaannnnnnnnnnnnnnnnnnnnnaaacaatgggctaaaaataaacagtattaaaaggttaagtttatataatacatatgtacacaattagtggtgttttcttttcagacaaaatactgaaacaaatattagtttaaaaacaaactatacagaagacttcataccgtaacaataaatgtatagtttcttcaaagggagaagagattcacatatctgataacaaaataaactagcaatctagttttctaatctactttatgaggctggannnnnnnnnnagaaaagctaatttaaaatatttagaaatagctagcctatgtacagcaagttttcatgtctttttttaataaatagatttctaggagtcagtatatatttaatactcttcttccttaagaaaatagaagtttagggccagtgttaagcnttatccccttggacaccggtcctaatctccaccaatgggagggaatttagaaagggnccttaacagtttcacaaacataaataaaggccttagtcacactaaatt

SEQ ID NO: 85656 - DNA, 432 bp, Homo Sapiens
gccaattcagacttaagccatcgaggtttttacccatcttcccactttaagctaagttatgatacctattcccattcacaattggtgttctttttaaggtttgcaaatttcagccaattttgtagctaagattgttctgatcagctcaaaaagatttggcttagtgttttcattgcaaattataattgctgtagagccacacacaacttttgaacttttaattataagtgttatggctaaagttatttactgaaaatttcagtaaaatgtgtgaatgtttctttatgtattaacctcatagcagtaaatgacttgctgttgtttaatttttctaaggcatcttaatagacttctgttgaaaacttcagtgttaacatttttatagtttgtactaaatttaaccgtgatataaaaatgaattttatgcataat

SEQ ID NO: 85657 - DNA, 1106 bp, Homo Sapiens
  misc_feature (136)..(165): n is a, c, g, or t
  misc_feature (509)..(541): n is a, c, g, or t
aagattgaccaaatcgagtgatagggatcctggtgggaggagagagggcacatctccagaaaaatgaaaagcaatacaactttaccataaagcctttaaaaccagtaacgtgctgctcaaggaccaagagcaattnnnnnnnnnnnnnnnnnnnnnnnnnnnnnncaaacattgctgcctttgtccccacacagcctctaagcgtgctgacatcagattgttaagggcatttttatactcagaactgtcccatccccaggtccccaaacttatggacactgccttagcctcttggaaatcaggtagaccatattctaagttagactcttcccctccctcccacacttcccacccccaggcaaggctgacttctctgaatcagaaaagctattaaagtttgtgtgttgtgtccattttgcaaacccaactaagccaggaccccaatgcgacaagtagttcatgagtattcctagcaaatttctctctttcttcagttcagtagatttccnnnnnnnnnnnnnnnnnnnnnnnnnnnnnnnnnggctgtgacctcttcaaaccgtggtacccccccttttctccccacgatgatatctatatatgtatctacaatacatatatctacacatacagaaagaagcagttctcacaatgttgctagttttttgcttctctttcccccaccctactccctccaattcccccttaaacttccaaagcttcgtcttgtgtttgctgcagagtgattcgggggctgacctagaccagtttgcatgattcttctcttgtgatttggttgcactttagacatttttgtgccattatatttgcattatgtatttataatttaaatgatatttaggtttttggctgagtactggaataaacagtgagcatatctggtatatgtcattatttattgttaaattacatttttaagctccatgtgcatataaaggttatgaaacatatcatggtaatgacagatgcaagttattttatttgcttatttttataattaaagatgccatagcataatatgaagcctttggtgaattccttctaagataaaaataataataaagtgttacgttttattggttaaa

SEQ ID NO: 85658 - DNA, 1010 bp, Homo Sapiens
  misc_feature (370)..(380): n is a, c, g, or t
  misc_feature (454)..(463): n is a, c, g, or t
cagtcgacggtaccggacatatgcccgggaattcggccattacggccggggagacagggattgtgcttcattccaatctattgcttcaccatggccttatgaggcaggtgagagatgtttgaatttttctcttccttttagtattcttagttgttcagttgccaaggatccctgatcccattttcctctgacgtccacctcctaccccataggagttagaagttagggtttaggcatcattttgagaatgctgacactttttcagggctgtgattgagtgagggcatgggtaaaaatatttctttaaaagaaggatgaacaattatatttatatttcaggttatatccaatactagagttggctttctcnnnnnnnnnnncggtcatagtgggcggatttgttgccatgtgcaccctggggtttcgtaatgaccgtgctaaaaaaacaaagcannnnnnnnnnatgactcgtctctgtcccccttgtcccctgatgctccttgccattaaccgttatttggaattctagttggagctcccttaaaaaaatgggccctagttttcttgtcctggccccttcaccccattcctaccaccccctacctgcccgtcccccttcgccccctcaagaaaccttccaaaaccctttccttctgggggcggcgggcctttccccgcaagccgaacatgggtccaaccctggtttccctaggaaaaccctgggcccttaaccactggcctggggatttttcccccattaacaaacccccccggggtatcacccaaacgttctcgtaataaccccttacccgcggagctccttagcggcctttcccggcggctttttccacctggggagttccacggcccgcctcccagttttccccatattattcctcgcgcccttggcccatttatttatcattatttggcccccccctctctttatagccatttttgtgcggacccgcgcgcaccttattataaccacccccctcctcgatattttt

SEQ ID NO: 85659 - DNA, 825 bp, Homo Sapiens
ggggcagtagcgtcacgcggaggcggagcgaggactcggggacagttaccacctatttgcaattcaaggagaatataagacagagaagaaagctgtgaatgaatttcatttgattagcaatagattggacactctactgatcttgcctctctacaacctctcttccacctgacctctaaatgttgaagtgtttcaggaattgtcttagaccttcttccttatctacacttcctctccaacatgaatcttgatggctctgcacaagatcctgaaaagagggaatattcttctgtgtgtgtgggcagagaagatgacattaaaaaatctgaaagaatgacagctgttgtccatgatagagaagtggtcattttctaccacaagggagaatatcatgctatggatattcgctgttaccactcaggaggacctttacatttgggagatatagaggattttgatggacgaccgtgtatagtttgcccctggcataaatacaaaattactttggcaacaggagaaggtctgtaccagtctataaaccctaaagatccatcagcaaaacccaagtggtgctccaaaggaataaagcaaaggattcacacagtgacagtagacaacggaaatatttatgtgactctttctaatgaaccttttaagtgtgactctgatttttatgccactggagacttcaaagtaattaagagttcttcctggatacacaaatacttagaaatggcacacaatgtcgtgtatgcttggaaaaccatttttagaaataactctgcttcagttttaaagggtgatgaaatttttcaacataggcac

SEQ ID NO: 85660 - DNA, 108 bp, Homo Sapiens
atgatttgtctctgtcacccttgtccttgagtgctcttgctattaacgttatttgtaatttagtttgtagctcattaaaaaaatgtgcctagttttatagttaaaaaa

SEQ ID NO: 85661 - DNA, 577 bp, Homo Sapiens
  misc_feature (69)..(69): n is a, c, g, or t
  misc_feature (352)..(430): n is a, c, g, or t
ccggtggacatgttcactggtggaccagttggcattgacctaaacggacagagaaatgcacatggaggnagaactacgttgaaatcaagatcctatgtctgttgtattttctctttgcctggagtaaatagcattataagtcattccacccttattagataaccaaagcatattggtctcaatagctttctcctgaaaaatgtgattgaatcttacctgtagcagttcactcttaaggttgaaagaactgtcaatatagataaaatccattccttattattattgattggtgtgacatttgaaaatgtgtctaaacaatatttgtaagtaaaagaaccagtcataagcctcnnnnnnnnnnnnnnnnnnnnnnnnnnnnnnnnnnnnnnnnnnnnnnnnnnnnnnnnnnnnnnnnnnnnnnnnnnnnnnntttgtcgggccgccttcggccctcgaaaaagttttttaaaccttctctttgtggggcgcgggccccaatagggaaagggaaccttgggccatacccttgttcccaagagaaatccgggccatggactaggggttggaaatccccccc

SEQ ID NO: 85662 - DNA, 347 bp, Homo Sapiens
  misc_feature (68)..(106): n is a, c, g, or t
ggtcctaaatcttaaatagaaaaaaaactaaagcgatttgcttaagccattgtacattataaagagcnnnnnnnnnnnnnnnnnnnnnnnnnnnnnnnnnnnnnnnaaagctgcattcagagccacaaaggaataggaaagtagggtagtgttggattctggttttatgtaactctaaaataaatgtatctctttaatatctcagttgtagggattttgtcaataccaaagcagactgagttgtggttttgtaaataaagttttttctaaaaatgaccattcttcctttaattttttgttatgcccacatattgtatgtaaaaatataaataaatggtacttaaagt

SEQ ID NO: 85663 - DNA, 184 bp, Homo Sapiens
tcgtccgcctactactactatacggctgcgagaagacgacagaagggaataggaaagtagggtagtgttggattctggttttatgtaactctaaaataaatgtatctctttaatatctcagttgtagggattttgtcaataccaaagcagactgagttgtggttttgtaaataaagttttttcc

SEQ ID NO: 85664 - DNA, 759 bp, Homo Sapiens
atacatagaaaaagctaagggtcatatggagagtgacttgggagaatggtcttaagggcacagggggcatggttgagaagaccttgctaatgcaaggtgacatttcagcagagacgcaaaggtatgaggaacaagctgtaggattatctggaagaagagaattttaaacagtacaaacaaaattctcaggagagactgtagctggcttgtgtaagaaacaacagggggccagtgcggctccagttgagtgaacagttgagagcatcttagaaactgaagtccaagaggtagtgagggaccagatcgtgcggggcttacaggtcctcataagacttgagtaagataggaagtcattggtgggttttgagcagcagaatgacatgaaagtgtgtatcttggcagcccagttggtaaacagttgttgtgtgatgaataagatattaatcaacacaggaatttggattttctgaggagatatttcatcctggcttccaaactgttctgtttaacaataagaatactatcttttttccagtgaccaccataattctctcacatcacagaacattgtcctccttcctgtgaaaaagccccaccccctttcttgctatttggctttctgtttctaagacactatgaagacaatctagtctaagttaatactttttctcaccttagatgtaatctactagattacaacttagttttattctagggtatttttaattgactcttggatggttcaccatttctcgagta

SEQ ID NO: 85665 - DNA, 136 bp, Homo Sapiens
acgcgcccggccaatacttattaattctatgctgaattaaataaatggtgtgaaagagattcactgtgcaccggttaccattttagcccatgcagcttgggcttcaatgtcttgtactactttgcattaatctggt

SEQ ID NO: 85666 - DNA, 508 bp, Homo Sapiens
  misc_feature (332)..(390): n is a, c, g, or t
tacaaccataaccgggcagccactcctgagtgataaccagtataacataaacgtagcagcctcaatttttgcctttatgacgacagcttgttatggttgcagtttgggtctggctttacgaagatggcgaccgtaacactccttagaaactggcagtcgtatgttagtttcacttgtctactttatatgtctgatcaatttggataccattttgtccagatgcaaaaacattccaaaagtaatgtgtttagtagagagagactctaagctcaagttctggtttatttcatggatggaatgttaattttattatgatattaaagaaatggccnnnnnnnnnnnnnnnnnnnnnnnnnnnnnnnnnnnnnnnnnnnnnnnnnnnnnnnnnnntgaaagtttccttttatgtccataaaatacaaatatattgttcataaaaaattagtatcccttttgtttggttgctgagtcacctgaaccttaattttaattggtaattacagcccct

SEQ ID NO: 85667 - DNA, 532 bp, Homo Sapiens
ggtagatttggtggtagttgctttctcgggatataagaagcagaatcaactgctacaagtaaaggggatggggaaggtgttgcacatttaaagagagaaagtgtgaaaaagcctaattgtgggaatgcacaggtttcaccagatcagatgatgtctggttattctgtaaaattatagttcttatccccagaaattactgcctccaccatccctaatatcttctaattggtatcatataatgacccactcttcttatgttatccaaacagttatgtggcatttagtaatggaatgtacatggaatttcccactgacttacctttctgtccttgggaagcttaaactctgaatcttctcatctgtaaaatgtgaattaaagtatctacctaactgagttgtgattgtagtgaaagaaaggcaatatatttaaatcttgaatttagcaagcccacgcttgatttttatgtcctttcctcttgccttgtattgagtttaagatctctactgattaaaactcttttgctatcaaaaa

SEQ ID NO: 85668 - DNA, 597 bp, Homo Sapiens
atggaattttaaacatcagtttactatgctgattaagtcaacatttatattttcatcagaacttaataatcccataaataaatagagctctcaattatttaaaaaaatcaagggataacatatgtatttagacatattagcagcgtaaagatgtatgcttcaacacacttattggggaaacgtctgaaaatattactacactgaattcaagggtatccaaaggaacctgacatagaagttctctagaataacatcatttcagggaatttcaaaaaagaaaaggggtcaaataggaaatagcctcaaattaattgacaaagttcagtgtttgccccaactagattattctctctctccactgcaaaaagaaagtctcaggatgagtgaatcacttagacgaaagttcatctagtggaataaatggagaagccgcttgggcaggtgacacaggagagtcggtggtagtgctgactttcgctggtgagttacaagaagatccggcactgctgctgtttccatcaagggtatccgaagatacacacacaccaggatctgacagctgtgcaacgtcagaagaaagcatgttggtgatgcctg

SEQ ID NO: 85669 - DNA, 514 bp, Homo Sapiens
  misc_feature (58)..(58): n is a, c, g, or t
  misc_feature (82)..(82): n is a, c, g, or t
attaatttctcatattaaatacagacgctccctcaacttatgatgtgggtaggtcccngtaaacccattataatttgaaaantatcatattgaaaatgcatttaatatctcttacctgaaatcataacttagccaagcctaccttaaatgttctcagaacatttagcctgcagttgggcaaaaccatttaacacaaagcctattttataatgaagtgttgaatagctcatgttatttactgaatactgttgtgaaagtgaaaaacaatgattgtatgggtactcaaagtataatttctactgaatgcatatcacttgtgcactgttgtaaagctgaaaaaccgttaagcctctacgatttttaagtaagttggggaccatcagtttaaaataaatgcaatactatttcatgataaacatggtcactgtaagttttactcttttgaatgagggtgcgacagaatgcagttagaatcagttcatatcaccattaaaatcatccattcagaaaccaa

SEQ ID NO: 85670 - DNA, 1926 bp, Homo Sapiens
  misc_feature (1310)..(1319): n is a, c, g, or t
  misc_feature (1694)..(1778): n is a, c, g, or t
  misc_feature (1788)..(1800): n is a, c, g, or t
gcaagtactataacggtctaggtagcgaggctgggtggcgaattcggcacgaggcctgtcccagccgtcctgtcctggctgctcgctctgcttcgctgcgccgccactatgctctccctccgtgtcccgctcgcgcccatcacggacccgcagcagctgcagctctcgccgctgaaggggctcagcttggtcgacaaggagaacacgccgccggccctgagcgggacccgcgtcctggccagcaagaccgcgaggaggatcttccaggagcccacggagccgaaaactaaagcagctgcccccggcgtggaggatgagccgctgctgagagaaaacccccgccgctttgtcatcttccccatcgagtaccatgatatctggcagatgtataagaaggcagaggcttccttttggaccgccgaggaggtggacctctccaaggacattcagcactgggaatccctgaaacccgaggagagatattttatatcccatgttctggctttctttgcagcaagcgatggcatagtaaatgaaaacttggtggagcgatttagccaagaagttcagattacagaagcccgctgtttctatggcttccaaattgccatggaaaacatacattctgaaatgtatagtcttcttattgacacttacataaaagatcccaaagaaagggaatttctcttcaatgccattgaaacgatgccttgtgtcaagaagaaggcagactgggccttgcgctggattggggacaaagaggctacctatggtgaacgtgttgtagcctttgctgcagtggaaggcattttcttttccggttcttttgcgtcgatattctggctcaagaaacgaggactgatgcctggcctcacattttctaatgaacttattagcagagatgagggtttacactgtgattttgcttgcctgatgttcaaacacctggtacacaaaccatcggaggagagagtaagagaaataattatcaatgctgttcggatagaacaggagttcctcactgaggccttgcctgtgaagctcattgggatgaattgcactctaatgaagcaatacattgagtttgtggcagacagacttatgctggaactgggttttagcaaggttttcagagtagagaacccatttgactttatggagaatatttcactggaaggaaagactaacttctttgagaagagagtaggcgagtatcagaggatgggagtgatgtcaagtccaacagagaattcttttaccttggatgctgacttctaaatgaactgaagatgtgcccttacttggctgannnnnnnnnnccatctcataagaaaaatcagctgaagtgttaccaactagccacaccatgaattgtccgtaatgttcattaacagcatctttaaaactgtgtagctacctcacaaccagtcctgtctgtttatagtgctggtagtatcaccttttgccagaaggcctggctggctgtgacttaccatagcagtgacaatggcagtcttggctttaaagtgaggggtgaccctttagtgagcttagcacagcgggattaaacagtcctttaaccagcacagccagttaaaagatgcagcctcactgcttcaacgcagattttaatgtttacttaaatataaacctggcactttacaaacaaataaacattgtttgtactcacaagnnnnnnnnnnnnnnnnnnnnnnnnnnnnnnnnnnnnnnnnnnnnnnnnnnnnnnnnnnnnnnnnnnnnnnnnnnnnnnnnnnnnncctttgtcgnnnnnnnnnnnnntcaaaaacttttctaaaacctttctttgggcggcgcgcccccagaaagcgaagaagaactgggccaaaccttgcttcccaaagaaaacccggcgcctggaacaagggcctgggatccccccccaaa

SEQ ID NO: 85671 - DNA, 421 bp, Homo Sapiens
  misc_feature (141)..(141): n is a, c, g, or t
ctttatcctgtgtttatgtgtatgtgtttttagattaattcaagttgtgtgctatatttcttgtataatttacaaagttacacaaaatataaacgagcagtaaacttgtctgaaagtttttggcaaaggaaggtaacttcnaatgtaatagcttcctttaagagtacaggaaaatgcattctgtaatgaagtggggcccatgtaattgtttatattttcagttttaagcaggtatagtgcaggcttgttaggaatgtgtggaagggaagattggaagtgatttttcctcttttaaaagtaaacaaaattcttcaaatatgccctagttaactatttcagcataccatttttacttggttaacagtgtacattttgataacctatcaggaatgaataaagtatttttatttaaaggtaaaaa

SEQ ID NO: 85672 - DNA, 1182 bp, Homo Sapiens
tagacgggactcctttaaccgctgaagacattgtccataaaatcgctgccaggatttatgaagaaaatgacagagccgtgtttgacaagattgtttctaaactacttaatctcggccttatcacagaaagccaagcacatacactggaagatgaagtagcagaggttttacaaaaattaatctcaaaggaagccaacaattatgaggaggatcccaataagcccacaagctggactgagaatcaggctggaaaaataccagagaaagtgactccaatggcagcaattcaagatggtcttgctaagggagaaaacgatgaaacagtatctaacacattaaccttgacaaatggcttggaaaggagcaactaaaacctacagtgaagacaactttgaggaactccaatatttcccaaatttctatgcgctactgaaaagtattgattcagaaaaagaagcaaaagagaaagaaacactgattactatcatgaaaacactgattgactttgtgaagatgatggtgaaatatggaacaatatctccagaagaaggtgtttcctaccttgaaaacttggatgaaatgattgctcttcagaccaaaaacaagctagaaaaaaatgctactgacaatataagcaagcttttcccagcaccatcagagaagagtcatgaagaaacagacagtaccaaggaagaagcagctaagatggaaaaggaatatggaagcttgaaggattccacaaaagatgataactccaacccaggaggaaagacagatgaacccaaaggaaaaacagaagcctatttggaagccatcagaaaaaatattgaatggttgaagaaacatgacaaaaagggaaataaagaagattatgacctttcaaagatgagagacttcatcaataaacaagctgatgcttatgtggagaaaggcatccttgacaaggaagaagccgaggccatcaagcgcatttatagcagcctgtaaaaatggcaaaagatccaggagtctttcaactgtttcagaaaacataatatagcttaaaacacttctaattctgtgattaaaattttttgacccaagggttattagaaagtgctgaatttacagtagttaaccttttacaagtggttaaaacatagctttcttcccgtaaaaactatctgaaagtaaagtgtatgt

SEQ ID NO: 85673 - DNA, 896 bp, Homo Sapiens
  misc_feature (74)..(108): n is a, c, g, or t
ttatagactcatatagggcctccttcagagccgaacgacgagcgcagcgaagttgtgagcgaggaagcggccgnnnnnnnnnnnnnnnnnnnnnnnnnnnnnnnnnnncagtcgacggtaccggacatatgcccgggaattcggccattacggccggggtataggactgccaaatcatgggtttgcctttgttgttgtatttatcctctgttggtaatactgaatggtagaatgttttgatagggtcacatttgtgcctcactggaattatctttaaattctgtatttttaaagttgtgaataagataggtggattcgtattttttaaagttcagttgactttccccaccaaatggtccatttgaatgcatccctaatatatgatatagtctcaactaataggtgcaatttgggaaaatcaggtttattttttggagtggaactgttataagtgcttatttataaaaggaatgtttctgaatgcaagtgcctaaaaagatctttgttggtatgcatatgtcccctcacacaattttatagtgcatctttcaccatttgtgctttcttaagatacgtatgtaagctcttatttttcaattggcaattcaggttaactttttaaatgtttacataatggccagaaggcttgcaaatcctgtatttaattgcattttaattaattgccagttttttacatgtgatagtccagttgtacaaagagaaatgcacttgaaacctgtttccaaattagatattcagttatattatatttggctttagatgattttaatacatttgatagtttttcagccctcttgggctttatttatataaacttttgttttcaagcagttctgaactttttaggtattttattaatggtccaaaaaatgtct

SEQ ID NO: 85674 - DNA, 449 bp, Homo Sapiens
atatatattatcaagtataacacagtcatacaaaaacatttagtagaaatataattcacacataaaaacagtctacttattttttgtcccttttatatcctattttaggcaaaatgataaaacccagaaaataacaggaatgtactagtcctaaaaactggaccttttataaatgaaacagatccgatcacctataccttctctcaaattccaaataatgaggcttactgacctgtactctcagaatcaacttaaatacattttagcttgatttggatgaaatatgtactttcagttgttgacaatccaggtagaacaagtacataaaatgattcctaagtcaaaacatttcatacaaaaggaatggttttaacccagacaaatcaagaggaaatgcactgaattcaaaaacttctgaaacaggcattttttggaatttgagaacagtg

SEQ ID NO: 85675 - DNA, 878 bp, Homo Sapiens
ttgacttccttgctgctaatgagtctagagttcgcacggaaacacgaagaataggtggtgcagattttctggtttggcggtggatccagccttctgcatcctgtgacaaaatattagttataccttctaaagtatggcaaggtcaagcatttcatttagatagaagaaattcaccaccaaatagtttgacaccgtgtctaaagattcggaatatgtttgatcccgttatggaaataggggatcagtggcatttggcaattcaagaagcaattttagaaaaatgcagtgataatgatggcattgttcacattgcagtagacaaaaattcacgtgagggttgtgtatatgttaaatgtctgtctccagaatatgctggaaaggcttttaaagcattgcatggctcttggtttgatgggaaattggttacagtaaaatatttacgactagatagataccaccatcgctttccccaggctctcacttccaacactccattgaagccatcaaataaacatatgaactccatgtctcatcttcgtcttcggactggcctaaccaattctcaaggaagttcctgaaaagattttcttccatttctaagactgttatttacaataggaaaattcctgcttggctttttgtcttcctttttaaatgctttttgtatgtaatatttttattgatgaatacatctctgaacgttccagaagtcttaaggttcccaaagggatttagcagtcgagggcagcaaatgctgagtagggtacggataatctatttcatttcagcttttttgggagcctcacgttaaaccccattacactttaaaacgtttttggcatggaagggaaacacctggaccttttaatttaaaccca

SEQ ID NO: 85676 - DNA, 1267 bp, Homo Sapiens
  misc_feature (867)..(867): n is a, c, g, or t
  misc_feature (1200)..(1200): n is a, c, g, or t
gtcttccttcagaccagtttgcaaaaggacaggacactgttgccatagaaggttttacagatgaggaggacacagaaagcggaggagaaggccaatacagagagcgtgatgaatttgtggtaaagatagaagacatagagacttttaaggaggctttaaaaacaggaaaagaacctccagctatttggaaagtacaaaaagctttattacagaaatttgttcctgaaattcgagatggtcaaagagaatttgctgctacaaatagttatcttggatattttggagatgcaaagagtaaatacaaaagaatatatgtgaagttcattgaaaatgcaaacaagaaggaatatgtcagagtgtgttctaaaaagccaagaaataaaccttcacaaactatcagaactgttcaagctaagccaagtagtagcagtaaaacttctgatcctctagcatcaaaaactacaactacaaaagccccttccgtgaaacccaaagttaaacagccaaaagtaaaggctgagccaccaccaaagaaacggaaaaaatggaaagaagaattttcatcatcccaatctgactcatctcctgagatccatactagtagtagtgacgatgaggaatttgaacctcccgctccctttgtcactcgctttttgaacacaagagcaatgaaggaaacctttaagagctacatggaattgcttgttagcattgccttggaccctgacacaatgcaagccttagagaagagcaatgatgagctacttttacctcatatgaaacaaaatagatggcatgctaaatgataaccgaaagagacttcttttgaatcttcatttggatcaatcattcaagaatgctttgganaagttttcctgaactaacaataattactccgagattctaaagcaaagagtggaggaactgctatttctaaaatcaaaatgaatggcaaagcctataataagaaaactctaaggacttctaaaacaaccaccaaatctgcacaagagtttgctgtcgatccagagaaaatacagttgtattcttggtatcattcactccatcattataagtaccatgtttatctgatatgtaaggatgagatttcttcggtgcagaaaaaacaatgaagatttaggacaggaggaaattgttcaactttgtatgacacaatgtcacaatgggtggaggacctcnttgaaaaatttggagaacttctaaatcatgtacagcagaaatgttcctgactttccacaaaaatcca

SEQ ID NO: 85677 - DNA, 574 bp, Homo Sapiens
  misc_feature (174)..(198): n is a, c, g, or t
  misc_feature (391)..(391): n is a, c, g, or t
ttaataaacatttccgccgttgcctggagcctgatttctgtcaaggcccaatgacttcttgaactaacttgctgagtgattgcaaacttctttgagagcctcatgagggatggcactcattggaggttgagcatgtacacaaacacaggcccaactggatggataccctagcgnnnnnnnnnnnnnnnnnnnnnnnnnatttgtgcacatgcacacaccctcctcacaatgcccataatgtctatgtaaattggatctttaatatccttcagataaatggcttcagaaagaacatggatacaatactctgtctctgagttaacatgttaggctctgcctcccaaattggctcagagaaattagcaggaaggaaggatcagacgaaataatnaaacctgcttacctgctcattaatttaatctcccccccaccaccctctcttcgtcctgtgggtttcactacccataaaataactagataacttcgaagtcctagatgaaagagaaactaggtctggaagctctaagattaaaggagaatttgtaggattagtctttgatttttttctgtttct

SEQ ID NO: 85678 - DNA, 1516 bp, Homo Sapiens
  misc_feature (310)..(318): n is a, c, g, or t
gatggaaatatcctatgcaattccatgtggggaagcgtttaaagtgtaacgaattgcagtacacgcgtctagaaagttcaagtcccttttcaatcattcccttacccacgagacatcgagcaaactaagaaccttgacaacaagttccctgccgtagacacacatgctataatgaaacagaaaatttatataaataagtccaattaacgttcaccgaaattttagatacagctaagacaaaaagccaaccaagcatgaaaatctgtaacaatattggtcagtctctgtatatctgaaaatgtgtaacgtnnnnnnnnngttattttatcgtatataaaaagtcttttacatctgtgttagctggagtgaaacttgaagactcagactcagtggatacagatgaatgtccacctcgctttcctttggagaggatcttgaggctggaccctctgctcacagaggtgagtgcgtgctgggcagaggttttaaatttggctccaaggaaagcatagaggatggggttcagacaacagtggaagaaagctagggcctcggtgatggaaatccacttgtgcacagtgttctcaaactcacacccttgcttgatgatttccaggaggatgaaggagtcgatgctgatcccaatgtagtaaggcagccaacaggcgaagaaagccaggatgaggatgactgtggtcttgagggccttgcgcttctggtggcccttggagtgtgacagcttggagatgataatgcaatagcaggacaggatgacaataccaggcaggataaggccaaccatgatgtgctgaaactggaacacaaccacccacaagtcattggggtagaagcggtcacagatatatctgtcatctgcctcactgacgttggcaaagatgaagtcgggaatagtcagcaggagggcagggatccagacgccaacatagaccaccttttcagccaacagcttccttggcctctgactgttggtggcgtggacgatggccaggtagcggtccagactgatgaaggccaggatgaggacactgctgtagaggttgactgtgtagatgacatggactgccttgcataggaagttcccaaagtaccagtttgccacggcatcaactgcccagaagggaagcgtgatgacaaagaggaggtcggccactgacaggtgcagcctgtacttgtccgtcatgcttctcagtttcttctggtaacccatgaccaggatgaccaatccattgcccacaatgccagttaagaagatgatggagtagatggtgggcaggaagattttattgaaattagcattttcttcacggaaacagggttccttcatggagtcatagtcccctgagcccatttcctcggtgtagttatctgaagtgtatatactgatcccctccatggtaaccgctggttctccagatgcggtggctactggagcactcaggccctcggcgtcactttgctacctgctgccgcatcccgggaattccggaccggtcca

SEQ ID NO: 85679 - DNA, 395 bp, Homo Sapiens
  misc_feature (222)..(222): n is a, c, g, or t
  misc_feature (288)..(288): n is a, c, g, or t
aatatcgttatacgctgcccgtcaaagcgggtgagcagcgtctgctgggcgagttaaccggcgcactgatgcaacgctggtagcggaaattgccgaacgtcacgccggtccggtggtactcattgcaccagatatgcaaaatgctctgcgtttgcatgatgaaatcagccagtttaccgatcaaatggtgatgaatctggcggactgggaaacatcttcccntacgacagtttttcgcctcatcaggacattatctcctcgcgcctttccaccctttaccagctaccngacagatgcagcgtggcgtacttgattgttccggtgaatacgcttatgcagcgagtttgccacacagttttctccacggtcatgcgctggtgatgaaaaaaggtcag

SEQ ID NO: 85680 - DNA, 1079 bp, Homo Sapiens
tcccaggagaaacgaggtgcccagatgactgggcaccccaccagaccctggccacgaaggaggggccagctgaccagaagggaagcaggcccccaagctggggctcctctggagaagtagaaaggcccatccagatggctaacccatcagctgcagctgtcgacgagggccagcatgacagatggaaaagggaagaccagtgataggaaggacgccatccttcatcatgacctcccaatgtggccagcgaccgagatcgcacagcacgcgctgcacgctgaggcaggaagcttttggagatgagccgtaaccatatgccagaaacctgggggatgtccagataagtgacaagatcaccatctcaaagaacttcaaggagaatgttgattcgccctatccttgaaagctcacttccggagggatgagtttctcggacggatcaatgagatcgtctacttcctccccttctgccactcggagctcatccaactcgtcaacaaggaactaaacttctgggccaagagagccaagcaaaggcacaacatcacgctgctctgggaccgcgaggtggcagatgtgctggtcgacggctacaatgtgcactatggcgcccgctccatcaaacatgaggtagaacgccgtgtggtgaaccagctggcagcagcctatgagcaggacctgctgccagggggctgtactttgcgcatcacggtggaggactcagacaagcagctactcaaaagcccagaactgccctcaccccaggctgagaagcgcctccccaagctgcgtctggagatcatcgacaaggacagcaagactcgcagactggacatccgggcaccactgcaccctgagaaggtgtgcaacaccatctagcagccacctgcctgctcctatgtgccctcaccatccaataaaggccccttggctgtggcatggcaactgaaaacctcgtgccgaattcgccacccaggcctcgctgccttaggaccgttatagttactggcttgtgaatatacaagcctgtttttgccaaattgtggccgcgggaggggggaaggaaaagaaggagggaa

SEQ ID NO: 85681 - DNA, 1091 bp, Homo Sapiens
cttagatgggtggaactccgacgagggccagtgattttcgggtaacgaaagtcatgggatcaagtcggacgaatatagtcgtttctcgtcgaggaggggaggaaaggtgaagcgattgtatgcgttgcgggaagaggtaacattgaaggggttttggaagtttacgtgtcaattctgggatcataacttaaaggccttacactctccgttccagttgccaccagttgatgttggaaagagccatattttcgctcttcggaaggcggtagtgaaataatggggtttggagagcccatgttcgcccatggcgcacaaagaagagaatagggcggttggtaagtaatgttgggctaaggagtgaagggtaccgatgtgaagattttattccatagtaataacaataccaatttggagagcaaagttattttcagcatttttctaaaagtctagtgatatattctgggggtggtaagggtacatgaaaaaagggacttgggatataagttaatgggagatataggtgcactttgcggtatttgggggttaacgttttgaaagtagccaaaatccacactcaataaagcacactgataaaatagatttccaataagactacaggctctgaaaaacaaactggctaagttggttgagaacataggtagaaattatcgctgattagaaatatttacaaaaaatagctttaaattcatacgctgaagaataaaagaaatgtcttccaagtatacctgatgtcaataagatcccaaataaatcaaatgtaaacaccatctggatggatctgtgttacctagtgacatgcagcgctgcttcatggatagtgaaaacttggcatcccacctctagcataaaactttttctgtaactacaggtttggggagaatgaaagtgatttaactatttatgcctatctgattttttaaaaaataacggatttccagcctctaatatcacaatccttacttaaaatctaattgaataatcactatcattctgcaatcttaatttagttaaagactttcaacggacgcgtgggtcgacgatatcccgggaattccggaccggtaccagcc

SEQ ID NO: 85682 - DNA, 397 bp, Homo Sapiens
ccagtttagctcaggtagaataaagtgcaagaaaacattgaaccttttctgtgggtcaggaagccattgtactaaagatcatgaaccctttcatcttcccctcacaaaataataaacaagggactgcaactttgagggaaatctagaaaggtaggagactggactttggagatgtcagattaggactggtgaaaagcagatattctaggctcctaaaataacgtgggaacaagcccagaacaaccttggacatggtgtgtttgtgcatgggatgcttttcttttgagacggaaggttgatgtgttgaagtcatggaaagtgttcaaaatattgtgagaattaccgaaatgtgacacagaaacatgaagtgagcacatgctgttggaaaaaaatggtc

SEQ ID NO: 85683 - DNA, 382 bp, Homo Sapiens
  misc_feature (106)..(106): n is a, c, g, or t
  misc_feature (160)..(160): n is a, c, g, or t
ttcagtgacctaaggacagccagagcactaagcgtgctgggaaccatctgtgctgaaatgtagatttcccaggaaactcaggcttgggacaggcgcctacctgctncctcgggcaccaggtgattaggagaggtcgaatctcatttccacgtgagtgagngataaagactgggctgccaaggaggactcctcataaacattgacaaattgctctgccccgcctgtgatcccagacgactcctgcagtctgggatcctgagtgtcctgtgggttcatctcggatgggcgctgcataaacagcctgcagggaacgtctgggagaaccagcttcacaacagatataataaggaagaagtttgaaatattgcaagaattgcgaaag

SEQ ID NO: 85684 - DNA, 793 bp, Homo Sapiens
ttatctctaaaaattttagtagtaatatttaccaaacttaaaaacatttctataaatataaagcttttctttatatttaagacaaaatataaaggctagaatttgttccttctctgtaacactaaatattttagtgtgaaattgaatttttttattactatagtcttttcaatctataatttgtgtttttaatttcttgatatgtcacttctgttcctccctgcttgcattttttaaaaactagacattgtggcttgagaatttatcaatcatctttccgaaatgaccacattgtgcttttagtttgtatgtttaagtggtcaagcaaggctctaggaggtagtcactgagctggaccttaaacacatctgcaggagctcacaaaatgggagcaaaagaggcattccagaaagaagagtagttaagcagatgtgggggcagggcaagaggagacagcaccttgttgccagagattctacacaaaggtgtgatggacactgatgctctattaagaagcttttgtggtgtgtgtggtagagaataattaaggcttctgataagacaggaaagggatatttcatcatgactgttaagaaaaggtaactgggttgtttaatgttttaattgataattgtcactgatcgtatttctacttgttaaataattaaaaatcatcttaaaattcatactttgactttaatttagacacaaggagatgtaatcgctgtgtaacatcagagaaagctatatggattatcgtcagaagtaaatgtttctaacattgacaaagaaa

SEQ ID NO: 85685 - DNA, 610 bp, Homo Sapiens
taaagattaaaaatattttatttaaacttttcttcataaacacttttaacatttttttcaatttaaaaacagaatggatagcataaacatgtttgaatagattatatccacggcttgggaaaaattacctgacaaaaatgtaaaggctttcaaaacaggtataaaaggcaaaccttaaattattctaagatttttatatcggccctaggattatttgactactggcccaaaatgtacctaaaggtcaaaatatttttctatagacaaagtatgcccaagaggtatagggcatatacaagttaggtagaaaataacctctcccaatcacctcactggaccattccttcagaaagcaaacacctaatccttactatatactgactaataacattttaaatgcagttgttcccaaaatgtaaaaagaaaaccaaagaatttaagggagaacaaagctgatggcattctcctcaatgttacttgtgtaatattgaagttatacggtgtactgaaaggatatgatttccatgaatttatctattccagtctatgcctactgaatatttgactgtataaactctggataaactaatttttaggacttccattttta

SEQ ID NO: 85686 - DNA, 1041 bp, Homo Sapiens
  misc_feature (60)..(60): n is a, c, g, or t
ctttccaggtttgttttagtatgtatgtacctggaaatttttattactttttataccatntcaagatatgtatcttatataaacctcaagttggattttatattttaataaggaagttaagaccttcatttaagaggcagaagattaagataagaaatataagatagaaaagctttgttcctaacatatcttttgcctgtctgggcaagtatttgactcaactaaattttaatgaacgaatgaatgacagagaggaggaaaaaagatgaggattgcatacatgttctaaaccctttgtcagattgcagtttcctagagagtattgaggtgctaggtagaaagttaggaaaggtcctgaggactggtattgacaattggagtcctaatagtactctattcgtattaggaaagagagactagataccaaacatcacgagatcatagagatggaaaactgtatagtaaccaaaaaccaaaacagtgatatttccagaactttttagtattgttgtaaaacttcatgaaacaaaagaccatttaaatagtgaattattaaaaatctttatgatgggaaagtagatctaaattttctctaaaattttcccccaaagataatatcctcttagggaacataagaaaaatgtataataaaaatgtggtgcttaattaaccatgactatgtatatattgccaattttagtaatcaatattctttgtgcatgtgatttttttgcatgattaatgttgaattgaaagctctcaggataattaaatcctaaatattgtccgcatgttggacctacgttaaaagatgaataggtctagagccgtgatttcaagctattttcctgaaatgcttcagggattccataaacatttaaacaatgttctaaggtacatatacttagaacattgagatatatactacaagtgctaagaatatagtaccttgtatttttgttgatttttatcatgttttaaataggaatttataaaatatttatgatagtaataaagtagtattttatgtgttttgcaaaa

SEQ ID NO: 85687 - DNA, 582 bp, Homo Sapiens
  misc_feature (562)..(562): n is a, c, g, or t
agaattcagatttcgtcatggctattgtaaaggaaaccctaggaaaatggtgaaaacttgggcagaaaaagaaatgaggaacttaatcaggctaaacacagcagagataccatgtccagaaccaataatgctaagaagtcatgttcttgtcatgagtttcatcggtaaagatgacatgcctgcaccactcttgaaaaatgtccagttatcagaatccaaggctcgggagttgtacctgcaggtcattcagtacatgagaagaatgtatcaggatgccagacttgtccatgcagatctcagtgaatttaacatgctgtaccacggtggaggcgtgtatatcattgacgtgtctcagtccgtggagcacgaccacccacatgccttggagttcttgagaaaggattgcgccaacgtcaatggtgagtagaaacggcaattttcgaaacagctcattggtctgttttggttttgtactcagttaagctgttggcgtaaaattttctcactaaattgtttggtgcagtgatgcttaaaccatttgctgggagatggtatgtaattntatctccttgtttctctata

SEQ ID NO: 85688 - DNA, 611 bp, Homo Sapiens
tggcaggaaagatttcagcatctgaatgagtcccagcacaactatttaagaatcactcgtattcttaaaaaccttggtgagcttggatatgaaagttttaaatcgcctcttgtaaaatttattcttcatgaagctcttgtggagaatactattcccaatattaagcagagtgctctagactattttgtttatacaattagagaccagaagagaaaggagaaagctcctgcggttcgcccagaaacactacacgccttcagagaactttatctggggaccgcctcgaaaagaacagtcggagggaagcaaagcccagaaaatgtcttcccctctcgcctccagtcataacagtcaaacttctatgcacaaaaaagccaaggactccaaaaattcctcctcagctgttcatttaaatagccaaaccgctgaagaccaaaaagtggcacccaaagagcctgtggaagagacagacaggcccagcccagagcccagccatgaagctgcccagcccagaaatacagagaaggacagtaatgctgagacatgaattctcacctgagaaaaccgttactactcccacagaaaaaaaaggagagtgtatctcctgagaa

SEQ ID NO: 85689 - DNA, 1045 bp, Homo Sapiens
aagaatgatagtccccgaagtaggacagaatcccttgaaccagctcctggaactgtacatattggatcatcttgtggtagagagaagtgacgatggctctttttcatatcagagattctcacatgcttaacactggaaatgatttggaaagaaaatgtcaaaagcgattcagtgctgctgaccagtggaaaggatgatctgaagaaacaacgcagtgtcacgcaagccactcagacaagcccaggggttccttggccttctcagtcagctaactttcctgagttctcctttgacttcactagggaacagctcatggaagagaatgaatctcttaaacaggaactggctaaagctaaaatggctcttgcagaggctcacttggaaaaagatgctcttcttcatcatataaagaagatgacagttgaatagcaggagtggcagtcaaaactgaaattatagctctggagtaggaaggttatatttataatgtggatgttaccagttaggggaagacttttattttcatgaaaagacaataaaacaaaatggaatgtgatgaagtggtgactatttcaaagccagtttagaaagtattagtacgggcattacaatcttttggttgttttgtgttttggggcttaaccctcttttaagctgttgtgatctagggaagtcaacacatagtgtaaaataattacatgcctaatgaaaagaagatgtcatttcctaattttgatatctcattttcggcattttttaaaatgtaaaaggaaaacctcttgtgttcacacagattgctgaattgatttctccatatttgttaataatttactattatttacaaagattcaaatgcttttatgactaatgtaaaatgaaaagaggcttacattttaaatgttattaaaattatgtacttaaatctataattatttaattattgtaaaaagtccaagcagatcaataaactatataattaatgggtttggaaaatcatcaccctactgaacttacaaaatatcttgaaaatgtgaaaaatatcatt

SEQ ID NO: 85690 - DNA, 494 bp, Homo Sapiens
  misc_feature (31)..(31): n is a, c, g, or t
  misc_feature (58)..(58): n is a, c, g, or t
  misc_feature (62)..(62): n is a, c, g, or t
  misc_feature (86)..(86): n is a, c, g, or t
aaacctgtggccaatcctatgcatgtctggnaggaccacaagccctggtgtggagcantganaggtttgactttccaccagaattncttgctcagcttaatcccataatattcctttcccttagatttgttttctgtcacggtaaccttttctctctgcatataaaatttcatgactaaaataactttaaagtacagagattgtattttgttgaaggaatgcattgggggggctttgggcagacttagcaaaatgtttgtatagcaaaaatgttttcttgctaaaaactgatttgcaaacttgaacgtctagatgtgtgtaggaagattttaaaatttacggcaaattgtctctaaagagaccaattttgcttcctttgtcttggttccaataaggatttagtaccaaaaagttcagaaggctggcttcccagaagaattgtacatactcctctgaacccccaaaagcaagggaaaaatacactctaagcttat

SEQ ID NO: 85691 - DNA, 438 bp, Homo Sapiens
  misc_feature (19)..(19): n is a, c, g, or t
  misc_feature (21)..(21): n is a, c, g, or t
ctaaaccaaggaacatttntntggggctttcaaggaggaaacaccaattggaagcctccgctcaactgtaagatttataactacctgaacaggattggatgcttcttccttcatcctcgctgtagtaaaagaaaagatgctgctgattttgccatatgtatgcatgcgtggccgtctagatgaacaactacccaagcaaattcctttcaccatcctctcaggagatcaaggttttctggagctagagaatcaatttaagaagactcagaggccagctcatatactaaaccctcaccacttagagggagatatgatgtgtgccttgttaaatagcatatctgataccaccaaaggtacgcagctgcagtcacagtgcaaaccacccaagaggaggagacttcactgctgagagaaaccaataaaccgtgtccgctagtg

SEQ ID NO: 85692 - DNA, 716 bp, Homo Sapiens
  misc_feature (475)..(487): n is a, c, g, or t
  misc_feature (527)..(548): n is a, c, g, or t
caatattacccacctacaacaactgtgggctaatcatgctgtcaaaactcacatgttgtatagtatcttacaaggactggacactgttccagtaccctgtggaataggaccaaagatggatggaatgacagaatggggaaatgttaagccctctgtcataaagcagaccagtgcctttgtagaaggagtgaagatgcgcacatataagcccctcatggaccgtcctaaatgccaaggactggaatcccggatccagcattttgtacgtaggggacgaattgagcacccacatttattccatgaggaagaaacaaaagccaaaagggactgtaatgacacactagaggaagacaatactaatttggagacaccaacgaagagggtctgtgttgacacagaaattaaaagcatcatttaaccatagacaatttgccaggatctaggaaccacctaatggtaggtggacagaaaaggnnnnnnnnnnnnntttacttgcaagtactaggaattcagatgatcagctcttnnnnnnnnnnnnnnnnnnnnnngactaaagccctattaaggaagttattgctttaataagaaatttcaaatattctcttatcccggtccaaaaggattaagcgattaaagaacgtaaaatggagatgtatttacatacacctggaaacctgtgccttgtattcaaattcattaaagcctaatcctgcaag

SEQ ID NO: 85693 - DNA, 580 bp, Homo Sapiens
tatgttcagctcttctcagcatatgtccaagacatgcacaaactcctttgcttgtgctcatgagagacatgccttgggaaaacaactgtgagaagttatgttataaatgttctacgtgccatcgtgtggtaaacactttatgattcagggggggacttcagtgaagtcatactccctgtcacaaactccagctgaactaacttggaggaggatcttccctgacagctctggaaggaaattgacagaactttcataaagccaaagactggcagaaataaagtaaataatgatgaaactgagcaatagagcacccagaaggagtgtcccctgccaaaaagaatgtggcatttcaccctccaagaaacaaatggacaccttatcccacagaagaatggggctcacaggtcaccgtcactcacttctttatcctttcgccaaaggaagccacttcatctaggatgttctggacactgacacatacctcctggatggcatagattttatttataaatccctttttttcactgtcctaaaatgcaataaaaaagaaattctgtatgagtaaaggtaagacaaactt

SEQ ID NO: 85694 - DNA, 2500 bp, Homo Sapiens
gggtccggcgagcgggcaagcgggaaccaggtggccacccggtgtcggtttcattttcctttggaatttctgctttacagacagaacaatggcagcccgagtacttataattggcagtggaggaagggaacatacgctggcctggaaacttgcacagtctcatcatgtcaaacaagtgttggttgccccaggaaacgcaggcactgcctgctctgaaaagatttcaaataccgccatctcaatcagtgaccacactgcccttgctcaattctgcaaagagaagaaaattgaatttgtagttgttggaccagaagcacctctggctgctgggattgttgggaacctgaggtctgcaggagtgcaatgctttggcccaacagcagaagcggctcagttagagtccagcaaaaggtttgccaaagagtttatggacagacatggaatcccaaccgcacaatggaaggctttcaccaaacctgaagaagcctgcagcttcattttgagtgcagacttccctgctttggttgtgaaggccagtggtcttgcagctggaaaaggggtgattgttgcaaagagcaaagaagaggcctgcaaagctgtacaagagatcatgcaggagaaagcctttggggcagctggagaaacaattgtcattgaagaacttcttgacggagaagaggtgtcgtgtctgtgtttcactgatggcaagactgtggcccccatgcccccagcacaggaccataagcgattactggagggagatggtggccctaacacagggggaatgggagcctattgtccagcccctcaggtttctaatgatctattactaaaaattaaagatactgttcttcagaggacagtggatggcatgcagcaagagggtactccatatacaggtattctctatgctggaataatgctgaccaagaatggcccaaaagttctagagtttaattgccgttttggtgatccagagtgccaagtaatcctcccacttcttaaaagtgatctttatgaagtgattcagtccaccttagatggactgctctgcacatctctgcctgtttggctagaaaaccacaccgccctaactgttgtcatggcaagtaaaggttatcctggagactacaccaagggtgtagagataacagggtttcctgaggctcaagctctaggactggaggtgttccatgcaggcactgccctcaaaaatggcaaagtagtaactcatgggggtagagttcttgcagtcacagccatccgggaaaatctcatatcagccccttgaggaagccaaagaaaggactaactgctataaagtttgagggagcaatttataggaaagacgtcggctttcgtgccatagctttcctccagcagcccaggagtttgacttacaaggaatctggagtagatatcgcagctggaaatatgctggtcaagaaaattcagcctttagcaaaagccacttccagatcaggctgtaaagttgatcttggaggtttagctggtcttttagatttaaaagcagctggtttcaaagatccccttctggcctctggaacagatggcgttggaactaaactaaagatagcccagctatgcaataaacatgataccattggtcaagatttggtagcaatgtgtgttaatgatattctggcacaaggagcagagcccctcttcttccttgattacttttcctgtggaaaacttgacctcagtgtaactgaagctgttgttgctggaattgctaaagcttgtggaaaagctggatgtgctctccttggaggtgaaacagcagaaatgcctgacatgtatccccctggagagtatgacctagctgggtttgccgttggtgccatggagcgagatcagaaactccctcacctggaaagaatcactgagggtgatgttgttgttggaatagcttcatctggtcttcacagcaatggatttacccttgtgaggaaaatcgtggcaaaatcttccctccagtactcctctccagcacctgatgggtgtggtgaccagactttaggggacttacttctcacgcctaccagaatctacagccattcactgttacctgtcctacgttcaggacatgtcaaagcctttgcccatattactggtggaggattactagagaacatccccagagtcctccctgagaaacttggggtagatttagatgcccagacctggaggatccccagggtcttctcatggttgcagcaggaaggacacctccctgaggaagagatggccagaacatttaactgtggggttggcgctgtccttgtggtatcaaaggagcagacagagcagattctgagggatatccagcagcacaaggaagaagcctgggtgattggcagtgtggttgcacgagctgaaggttccccacgtgtgaaagtcaagaatctgattgaaagcatgcaaataaatgggtcagtgttgaagaatggctccctgacaaatcatttctcttttg

SEQ ID NO: 85695 - DNA, 247 bp, Homo Sapiens
ctgtgggttaattgctgattagtaacataattcatagcaacaaacaaacagaaaacaaaacaaaatagaaagtatcatctaagagttctcttagaaaaccaaactactacaagacttcagcagagtcttcgggaagtacctgaggggctggacaataggctcccattccccctgtgttagggccaccatctccctccagtaatcgcttatggtcctgtgctgggggcatgggggccacagtcttgcc

SEQ ID NO: 85696 - DNA, 209 bp, Homo Sapiens
ggagggggtgggagataactttaatacagtaagcaaattaaatcaaaggacaaaaatataacagtagacacaagacaattttgaatcattaacaaaatgtgaggtagactagtgaaattcaccaaattttggttaagaacattttacagtaataacacgggtgccccattttctaaaaatcacaaaaagcaattgcataaattacagcc

SEQ ID NO: 85697 - DNA, 437 bp, Homo Sapiens
tttcaattttaaatgctaatttttattgacggctaactgtgcaaaagacaccaattcaatacagggcagtaaaacacttacatacatccagtattaaacaatagcatatgggataaatctaaagcagagaaccatgtgccttcaaaactgatatcacagaatgcaactggcttcagataattctcaagaaacgtgaagagctctttaatttaatattaagggagttatccagaagcaaaggctcttggttttactttcctgaggtacataatgagaagctgggggagatggagcaatacagccaattggcccaggatttatagcaccatgaatttgagaagaaccaccatatgctgtaccaactggatgccaggggggaacacaggaataatctggcacaaccggaaggcaggagtcaaaacctggcaaaggtggct

SEQ ID NO: 85698 - DNA, 302 bp, Homo Sapiens
  misc_feature (46)..(57): n is a, c, g, or t
  misc_feature (67)..(67): n is a, c, g, or t
  misc_feature (70)..(70): n is a, c, g, or t
cccggcttctgtctggacattgcatcgccctagttttctttctttnnnnnnnnnnnnttccaacagnaancaccaggccggagcccctgggagcccttgcaccgctccccaccccactcagcggccccatcggaactgagaattgcaaaacccccgactttagctatagttaagttgccttcccccggtgtccccacgtttggtgtctggctatggcgcccccatctgactgtccagctctctctcccccacccctcccggtgttgttattaaacgtctgtggagcttctgctgcaaggaac

SEQ ID NO: 85699 - DNA, 157 bp, Homo Sapiens
gtgtgagccagcacctacccacagatggctatcttattgtatactcacatggtggagagcagagaaagaggatgttttcatgtgtcttcctctaaggggactaataccactcattagggttatgacctaattacttcccaaagtttccatctccaaa

SEQ ID NO: 85700 - DNA, 973 bp, Homo Sapiens
  misc_feature (113)..(113): n is a, c, g, or t
  misc_feature (833)..(870): n is a, c, g, or t
tggaaccagggccaacagctactcttgaactatggtatttgaagagcgagttcattgcctgttttaccttaaatgacaggaaaggaagatgaacaaaccttgctttgccttgnttcaaactagttcttgatttaagacaccagaaagggagagagggagtctgcttagagtttgaggttgcctctcacaagatgacagttaaaagttgccaccttacttaaaaggcattaaggaggcatttactcacaaaggagagagagtaaatctttttcttaagaggaaaaaaatactggataatacatagaacaatctgcacatccagtcttggcactttttccaatttgactgatctctaaactggtgacccttgcatatatcttagtctcttttctacaatcttcttcagaaagctacagcagctaacaatcatgtataaagatgcatttcctagatcatcttcagaagaaaatctcttcagcactttccctagaatctgtctcctgaccaccccgccccagacctgctttctcttttgagaattcataaccaggtatgtttagataccagttcaaaagaccactctatgggttgatgaggaaaaggctgcctgaggacaatttaagaccataatgagtttccaatttttaaagaaaatttggctagctggcttttaattcttaattaaaatccattaaatttaattaaaattattccaatcaaaatatatcactttccaagattccacattcatattacttacttatactatggagactttctctacctgagcatgtattcaggggctataggtacatttaactctaactaactgnnnnnnnnnnnnnnnnnnnnnnnnnnnnnnnnnnnnnncctcctaaatcatttgggggtatccccatcattggtgcgtgtgtctgcgtgtgtcaaactttaatgattatttattcagaccctggaaaaccacactataaaa

SEQ ID NO: 85701 - DNA, 676 bp, Homo Sapiens
  misc_feature (13)..(13): n is a, c, g, or t
  misc_feature (30)..(30): n is a, c, g, or t
  misc_feature (39)..(39): n is a, c, g, or t
  misc_feature (48)..(48): n is a, c, g, or t
  misc_feature (86)..(86): n is a, c, g, or t
  misc_feature (91)..(91): n is a, c, g, or t
tatctcctctctngtccttactttccctcnggtaaatangtataaccngtgtagggctcctaggatagagtagctggtaggacttngaggngaaccaaggggcactgataactcacataaatggaaaattggctctggaataactgacaacatattcaaggtattttagtgcagtgtcactctcattaagaagaagagaatcagtaaatctatgtgactctaaacattctaatgaaaaaaggaatattctgccaattatctcacatttctaaatatctggatattggccattgtaaagacaaaacatacagatgatggacttgtctttccacctctcatttgcatggtttggagcattgtacctccagccatagactctaaggcaatttatatttgcttcctcttccctcttgagagaaaacgaaaatcttatttttccaagcaattaaaactcttctgcttcagctaggatgaaagaattaggagttctgtctccttgtatctaattgcatgtttcatctttcttgttttaatgattgacagaaaactaataaactgagacatctttgaatccaggttgaatgtactctcttggtggccccattgctaatttgtttgactattttgcaggatttcttactctgtaatggaaaggtttattaaatatgaggggtgc

SEQ ID NO: 85702 - DNA, 304 bp, Homo Sapiens
tgagccaccacgcccagacagagggtttaattttccttctaataactttgtgccattgtccacattgttgttacccccaaataagtattcccaaccaagtaaacagttccctttcttttcctcttatcaacatctagccaccacacgcttcagaattaagccttggagcatttggagatttgaaggctatggtcttcttactaaatccgcaggcaggtgtagctttttaaaagttattattctaagaaactggttattaagtaggagctagagaaaagtcttaagggctactgaagattgacag

SEQ ID NO: 85703 - DNA, 275 bp, Homo Sapiens
cagtgacagagtgagactctgtctcaaatcagtcagtcaatcaatcaatcaatccggaaagctgaagacaagggaaggagacaaaaacaaggacacccaaggaaagtttagcctctgatacctacatttgcagctgcaacagacaataaacacagcctaacttctaaccagatgaacataaaacctcagcttgaaggcctgtgtacctgttcaccctaaaggactatttacctagtacatcatgcctggcttttcaacaaaaaacattacaaggc

SEQ ID NO: 85704 - DNA, 278 bp, Homo Sapiens
acattttttcagatgactagcaattttgatagtttataagataatgcaaagaactttctctgacaaactaactgcagtaacagaaacctttcttttcagttactctttttcaagaatgaaagattattatacaaaaaattgtatactacttgatggaaccaactttgtacatcttggccatgtcactggtcattgtgtgaaataaagataatctggataatgactattagtccaatgctaagaaacatgatctttgctcattaaagagctaaaatgtt

SEQ ID NO: 85705 - DNA, 335 bp, Homo Sapiens
atttaaagggatagttgattcctggggtgttttgaaattaagttggaattaagttgcttaagcatatttatgttgtgagaaaccttaatatgaggtttatcatgccctttttcaagcagatttatgagcagatttctgtcacataagtcgtcttctgcttgagtatcctaatatttcaatgcatcaggggagcgctccactggataagcattttatttcccgcatggcatagtgtttttgcactaaaggctcaaagtgtgagaacctgttctggatttgtttgaaattatttcaccaataaagatcataaataaatgtttctttcaagaaaataa

SEQ ID NO: 85706 - DNA, 1084 bp, Homo Sapiens
  misc_feature (72)..(72): n is a, c, g, or t
  misc_feature (75)..(109): n is a, c, g, or t
gatcgaggcctatagggcgctactcgccgagcgaacgacgagcgcagcgaagtcagtgagcgaggaagcggncgnnnnnnnnnnnnnnnnnnnnnnnnnnnnnnnnnnncagtcgacggtaccggacatatgcccgggaattcggccattacggccgggtgctgtcagaatattctttttatattctgtggaaaaataaaggaaattcagattgtttaaatgcctaaaagttttgagataagttttgtttcaattagaaaaggaaataggttttaggtggcatagtggcttaactggactgaattcaaatattctttcaacttcatctcaatagtgatttttgtatcagaatcttgtccaagttgtttcattgatttagtaagtgttctgcttccaacatctttctttttaagaaattcctagtgtcttttttggcctttgaggttttggtaattgtagacctgtttcataagctttgtaattcagaaatccttgtatttagtaagtgcttgttttacataactgataattttaaaatgttttctttgtgtgctgttagtattgattcaaatgtcagcagctttaagcctaatatttatgactttcacatttggaatttaaagacaaaaatacatcaaggagttatgctgacataattctaaggagttttgttgtattttagaataaaattataaagtaaaatgattctctgtactgctttttcccccagtttttagagaccctaacctttgaaatgaaattccagtgatttcttttttccctagaaagattacctcagttagggaagtatttcccagctgactagtgtttgtgagccacagacactgtcttcagaattgcttctctcatgtcttagtagagaaatatttatttattatgatacattcaaatgattgtcaagttaaattaaatggttgtgtctgtgctattgagaatgcaaatgtgattatcttttgaaggctgtattactgcatagcttcacccaccctcgggtcatttcgtccctgtgattggggacagaaggtgtagctactgaagtaaatgacctattctctctcttcca

SEQ ID NO: 85707 - DNA, 1184 bp, Homo Sapiens
cacagagaaactcacattgttaattaaagtatataatgtaaatatggtattgaaagtataaaaattaaaggcttctgaaaaactcaagaagggtcaaaaggctatacaagcaagtagtatacagattgtttccttaaaagataaattttaatatacagaataaaatccaagatgattttattatttttcactttcccaaaacttgtgagcatgaatgcttctaaatctgaccaatgaagtttacattttggtccaatacattatgagactaacttgtatgatcaagtccagcttgattatcataaatcatagaagttaacaatttactctgagaatctgttgctaatatagatgatggatttccaattttttcttagctaagaatttactcaactttagctcagaaccagattcaaaatatcttctttaattagctggtcatcattttaggcttaatctaggcaaattatttaatactcaattgaagatcatataaaacctccaaaataaataaaaagtacacaaaattattagcttttgtgtacaatacagaaaatacaggtcagttctggaccaaaataattgcattaaaatacaaaaggtgatagggaagaattaaaagatttgcagtgactgcttttggtggtcagctacaacaagccaacaaccctcagctattttggaaagtgaaggtgagtcttaatttgcagataatgaatgtcttcggtagtttaaaaaaatataaacttctaaaaaagctcggtgaatcatatacaaaagcagctatttgagaccaaggttgaacaccagaaattgtgttagcaccaccagcaagcacagggtcctctgactcttccgccctcctatcttgtgcagaatgcagagcttgaatgttgtacacatcatttacagttacaaaaatcggccttgagtacagggttcctgtagggtagtcttaagtcctaagaggcaccaagcggttacaaaggctaggtgacaatccaaatcacaaggtccgacgatataataaatcccgtgttgccttatcaactttttgctggtagtcctccaatttgtcaagtattttctgggacagctataagagaaaagaaggaaaacattacataacagctccccggccgtaatggccgaattcccgggcatatgtccggtaccgtcgactg

SEQ ID NO: 85708 - DNA, 318 bp, Homo Sapiens
  misc_feature (41)..(41): n is a, c, g, or t
  misc_feature (86)..(109): n is a, c, g, or t
ttgaaccccagaagccggagtttccattaagctgaaggtcntcccactgcactccagcctggacaacagagcaaaactctgtctcnnnnnnnnnnnnnnnnnnnnnnnntagctgggcgtggtggtgcatgcctgtagttccagctacttgggaggctgaggtgggaggatttgcttgagcctgggaagtagaggctgcagtgaactataactgtgctagtggccggagtgcaatggctcatgcctgcaatcctagcacctttcggaggtcaaggtgggtagatacattgaggccaggaggttcgagactagcctgga

SEQ ID NO: 85709 - DNA, 1130 bp, Homo Sapiens
  misc_feature (1072)..(1072): n is a, c, g, or t
  misc_feature (1101)..(1101): n is a, c, g, or t
ggggcagtggcgggcacgcgcagccgagaagatgtctccgacgccgccgctcttcagtttgcccgaagcgcggacgcggtttacgaagtctaccagagaggccttgaacaacaaaaacatcaagccattgttaagtaccttcagccaggtacctggcagtgaaaatgaaaaaaaatgtacccttgaccaagctttcagaggtattctagaagaagaaattataaatcattcatcatgtgaaaacgttttagctattatttctcttgctattgggggagtaactgaaggtatttgtaccgcatctacaccttttgtattgttgggagatgttttggattgtcttcctttggatcagtgtgacacaatattcacttttgtggaaaaaaatgttgctacttggaaatcaaatacattctattctgctgggaaaaattacttactacgtatgtgcaatgatctcctaagaagattgtctaaatcccagaatacagtcttctgtggacggattcagctctttttggccaggcttttccctctgtctgagaaatcaggtcttaacttgcagagtcagtttaatctggaaaatgtcactgttttcaatacaaatgagcaggaaagcaccctgggtcagaagcacactgaagatagagaagaaggaatggatgtagaagaaggcgaaatgggagatgaggaagctccaacaacgtgctctattccaattgattacaacctgtatcgaaaattctggtcacttcaggattacttcaggaaccctgtgcaatgctatgagaagatttcatggaaaacttttctcaagtattctgaagaagttttagctgtttttaagagttataaattagatgatactcaggcctcaagaaaaaagatgggaagaattgaaaacaggaggagagacatgtatatttttgcaaaatttttaacaagtgaaaagctgatggatttaacactgagtgacagtaactttccgtcgacacatcctgttgcagtatctccattttattccaatatctcaaggggcaggtcaattcaaaagttcaactatgtttttacnggatgagccatcactttggattgaagatnctccaaatcagtttatccacctactatct

SEQ ID NO: 85710 - DNA, 664 bp, Homo Sapiens
  misc_feature (613)..(613): n is a, c, g, or t
tgattcatacatccctatggctggtgacctctttaaaaaggaaaggaaaaagcctaatcaaacaaaaagatgctgctagtaattcttaccctattgtgaatcctatataagcaaatttgtatctttgttttttcctacattagcagatctatttgatgtatatctctgagtgcagaaaatattttatggaaaaatcaatatatggaatttcaaattcagaattgctgatacacactatttggtttcacaattttatcctaggaaatagtattagagatttcaatttctggcttaaatggtagaattaattactcttaactcttaattttacttctgagttgaggtcaaggaacaggcagacacctgcagttaacgtctatacctctccatggccaagagttttaattttctcgtcttcaattttgtagatgttcatcattactaaatggattgattagtattttatctcctctccttgtccttactttccctctggtaaatatgttataaacagtgtaaggctcctaagatagagtagctggtaggacttagaagagaaaccaagggcactgataactccacataaatgggaaaattggctctggaatactgnccacatattccagtattttagtgcagtgtcctctcattaagaagaagagat

SEQ ID NO: 85711 - DNA, 1220 bp, Homo Sapiens
  misc_feature (893)..(893): n is a, c, g, or t
  misc_feature (914)..(914): n is a, c, g, or t
  misc_feature (918)..(918): n is a, c, g, or t
  misc_feature (1101)..(1101): n is a, c, g, or t
  misc_feature (1197)..(1197): n is a, c, g, or t
  misc_feature (1209)..(1209): n is a, c, g, or t
tacggctaggtacgaggcctgggtgtgtgaattcggcacgagggcagacttcacggagctcccggtgctcgctcctctgcgcggtccgcgggcggctgcttctctcctcctgcgcttctgctccgcggtcgctggcccaggcgtgtgtgcgtgagaccccgaaggagcctgtaccacgatgaactagggttatgtctgggcggtcgtggaggaacaagctaatgcatcagcccgctgcccgtgcgatctgtgagcgaggaccaggagtgtttgacagaagggtccccagcatccgatccggcgacttccaagctccgttccagacgtccgcagctatgcaccatccgtctcaggaatcgccaactttgcccgagtcttcagctaccgattctgactactacagccctacggggggagccccgcacggctactgctctcctacctcggcttcctatggcaaagctctcaacccctaccagtatcagtatcacggcgtgaacggctccgccgggagctacccagccaaagcttatgccgactatagctacgctagctcctaccaccagtacggcggcgcctacaaccgcgtcccaagcgccaccaaccagccagagaaagaagtgaccgagcccgaggtgagaatggtgaatggcaaaccaaagaaagttcgtaaacccaggactatttattccagctttcagctggccgcattacagagaaggtttcagaagactcagtacctcgccttgccggaacgcgccgagctggccgcctcgctgggattgacacaaacacaggtgaaaatctggtttcagaaacaaaaaatccaagatcaagaagatcatgaaaaaccggggagatgcccccggagcacaagtcccaagctccaagcnacccaattggcgtgtaactcngccngcagtctccagcggtgtgggagccccagggtcgtcccgctcgctcagccaccaccctcatgcccaccctccgacctccaaccagtccccagcgtccagttacctggagaactctgcatcctggtacacaagtgcagccagctcaatcaattcccacctgccgccgccgggctccttacagcanccgctggcgctgggcctccgggacactctattagatgggctgctctctcttactctcttttttgggactactgtgttttgctgttctagaaaatcntaaagaaagganttatatggggg

SEQ ID NO: 85712 - DNA, 1100 bp, Homo Sapiens
  misc_feature (978)..(978): n is a, c, g, or t
  misc_feature (998)..(998): n is a, c, g, or t
  misc_feature (1038)..(1038): n is a, c, g, or t
  misc_feature (1073)..(1073): n is a, c, g, or t
  misc_feature (1089)..(1089): n is a, c, g, or t
ggggtgtccgggtcagctgctgccgccgacgccgtaccgctgcggccgggggattgggccggggtctccaccgccgaccgaggggagcgggctccgctcggccctgctttttgcgacctggccgtcagccccacgtcgccggcctggaggggcgaagaggacgagggggccaaggcttcctccggggacattggctccctggattatcaagagtttgtagttgacattgaatccaggctgaggatggaaggtgtggaacttaaagaagaatggcaagatgaagattttccgatacctttaccagaagatgatagtattgaagcagatatactagctataactggaccagaggaccagcctggctcactagaagttaatggaaataaagtgagaaagaaactaatggctccagacattagcctgacactggatcctagtgatggctctgtattgtcagatgatttggatgaaagtggggagattgacttagatggcttagacacaccgtcagagaatagtaatgagtttgagtgggaagatgatcttccaaaacccaagactactgaagtaattaggaaaggctcaattactgaatacacagcagcagaggaaaaagaagatggacgacgctggcgtatgttcaggattggagaacaggaccacagggttgatatgaaggcaattgaaccctataaaaaaggtatcagccatgggggatattatggggatggattaaatgccattggtgtgtttgctgtctgtttcatgcctgaaagtagtcagcctaactatagatacctgagggacaatctttttaaatatggtattgggcactttggagctactagtaccagaaaactacatgataggttattttaaatggtgcaacaactccgaagaaaaatggcccagtctgggatggctcaggaaatgttatcagcaaaattgatagaaaggttaccggaaaaatctaaaatncccaatccattggacatccntccttgggttatccaggacccttcctggctggtaccaggnccatttatttagccccggaattccagcccaaaaanttaggttccggggttnaaatttggcag

SEQ ID NO: 85713 - DNA, 1026 bp, Homo Sapiens
  misc_feature (64)..(64): n is a, c, g, or t
  misc_feature (954)..(954): n is a, c, g, or t
atcaatacttcttgtgatattgagctcctggcagcttgcagagaagaatttcataggagactanaagtgtatcatgcttggaaatctaagaacaagaagagaaatactgaaacagagcaacgtgctccaaagtctgttactgattatgctcagcaaaacccagcagctcagattcctgccaggcagcgggagattgaaatgaaccgacagcaacgcttcttccgcatcccattcatccgccctgccgaccagtacaaagacccctcagagtaagaaaaaaggctggtggtatgcccattttgatggaccatggattgcccggcaaatggaactccatcctgacaagccacccatcctacttgtggctggtaaggacgacatggagatgtgtgagctgaatcttgaggagactggcctgactcggaagcgtggtgctgagatcttgccaagacagtttgaagaaatctgggaacgctgtggaggcatccagtaccttcagaatgcgattgagagcagacaggctcggcccacctatgcaacagccatgctgcagagtctgttaaagtagatgttgcacaccagccttacagctgggagcctttgccatggtacttaggtagggtgtgtgcccccagatttaaccattccataatcatgttagagttacttctataaagtgaacagattttattaatcacggcttttggtgaatttgtttaaggttaattatggtagcaaattttggacctaaacattatttttctgtatcccgctgtaattcccaaaactctcattattctctaactattacacatgggcatattctgatgtttctcatcctttgccagaagactaccttacatccatcgtaattgttctctaggaaaagagaacttttttcaaaattcaaaatacttcttaaggatggcacagtaccatataactggagtaatnaaacatgagcttacatttcttacataactaaaacacttaaaatgatcaaggcactaatggttttggtctgaa

SEQ ID NO: 85714 - DNA, 417 bp, Homo Sapiens
agtccaaaggtattaggaagtcacccaaagaagacatagtaaatggcagaggtagaaatataatacagtatctgattccagagtccaagttccaaaccactgctcttactgcttctgtgagaaacaattccttctccagatcatcataaaaatcaaaaccatgtcccataaaactgctcatgtatgactattagtctggacgtacatccaattctataccatttatatcttagaaatccattgagatttatttattgcctcaattttatactttgagttcatgattcttggagctatagtgcaggtggtacatcaggccccaaaagccatgttcctggatcatttctgtctgtagagtcatcagggactctggcaaactgggtcaccatcatgcggaagtctcatgcaactttcccc

SEQ ID NO: 85715 - DNA, 646 bp, Homo Sapiens
  misc_feature (424)..(425): n is a, c, g, or t
  misc_feature (496)..(512): n is a, c, g, or t
ggtccaatgaagtaagcagaaggactctgggttagaagcatctgcacaaaaactggtgagacctactctccactgctctgcagctggatggctgatggcaggctgagcagtggggaagcaggttttaacaacagggagtccttccaggtcactgtatattgagaagaaacataaaactattgtctgttacattccgaggtcagccttcttcttaacgttttataatatgcaaatgccagcttctggaaagcaagtatcatcatgtaccaaatgctttatacaccatcacattcatgaattttttagcatggtcagaacttgtgtaaatatgtctcttagatgattttggggagatgtgatttatttttcatattttcaaaatgcatttcatttcaaataaagttatctattgagacaaccgagnnacaacaacccaataaaaaacaccaaccaatcaaccccacagacgcagaaaagagagaaaaacatgtggggnnnnnnnnnnnnnnnnngaaaaaacttttctaaaacattttgtttgggggcgcggggcccccgtagaggaaaggggaaccctgggcccaaaaaggtcggtttccccaaaggaaaaaccccggggacaagtgaacaaagggggtgtggaatt

SEQ ID NO: 85716 - DNA, 1069 bp, Homo Sapiens; identical to SEQ ID NO: 1559

SEQ ID NO: 85717 - DNA, 721 bp, Homo Sapiens
tgaggcctttgaaatactggataaactactagatggcgacttaacaagtgatccttcttacttccagaatgttacaggatgtagtaattactataactttttgcggtgcacggaacctgaggatcagctttactatggtgaaatttttgtcactcccagaggtgagacaagccatccacgtggggaatcagacttttaatgatggaactatagttgaaaagtacttgcgagaagatacagtacagtcagttaagccatggttaactgaaatcatgaataattataaggttctgatctacaatggccaactggacatcatcgtggcagctgccctgacagagcgctccttgatgggcatggactggaaaggatcccaggaatacaagaaggcagaaaaaaaagtttggaagatctttaaatctgacagtgaagtggctggttacatccggcaagcgggtgacttccatcaggtaattattcgaggtggaggacatattttaccctatgaccagcctctgagagcttttgacatgattaatcgattcatttatggaaaaggatgggatccttatgttggataaactaccttcccaaaagagaacatcagaggttttcattgctgaaaagaaaatcgtaaaaacagaaaatgtcataggaataaaaaaattatcttttcatatctgcaagatttttttcatcaataaaaattatccttgaaaaa

SEQ ID NO: 85718 - DNA, 717 bp, Homo Sapiens
  misc_feature (47)..(55): n is a, c, g, or t
tacacacacttttgcttttttaatatgaggtacacagtccaacaagnnnnnnnnngtaactgatatagtaaaggcactcagaaaaacaacagaaacaatatgaaaggtgttacaagagacagaaagagatgaaggatgatgattagtactcaccttcttcaaagctgcagtacggactttcctctttagggagagaagattagaaataaacaggttaaaattacattaagaaagggctactacatatatataatggggtaattatttatatagatctttaagaaaaggcaaattgagttctttaaacacattacttgtgagaatgggacagatctgcattatctaacaggatggttatcaaaattaaatttaataaaatcaaaaatttagttttttcagttgcaaaggccaaatttcaagtgctcaatggccacttttagccactggccatgggactgggacatcatagaacactgtcattatcacagaaaatggtatagggtagcactaggctaggctgtctcaagatgtctaaattggaaagataaattgattttccctagaatttttggttcattcattcatttctttctttaacgttttgtctcttttattttacagacccttttattcttcagtcttatctatccacttaaactttttcatatttggttgaaaatgcatgcaatttcaaaagagaaacagaatgtatctcct

SEQ ID NO: 85719 - DNA, 1117 bp, Homo Sapiens
cagtaagtgcaattgtattttaatttcttggtctccaaaaactcagctgtgactgctttccattaacagttccagctctatgtgtttcctctaacgctaaaggcacagcccccgggaatctactgcttcctaagagtctccatggagtctattttacaacctcctttccctccatgcttccgcggaggagtctatactatctctatatacacattttaaacattattcttcatttgaaattccttcaataaaaacacagtcaccattcttcatcttcttgggaaatggcctgctctcgagcctctggagaagcccctctaacagctcagcccaaaaaagtgcaacaaatttacatgacacggggaaaagcaacatctattgttcttagagtctgactcccttggcccagcggaaaaagtctccccacaggtgtgcagtgcagctccgcggtgctgggaaacaggcctctttcaagacagcgcaggggaaatcttcccgggtcatctgggttgggggcaacatcttgcatcaccacttctgctctgggtccatagttctctgccctcctgatccttccccggcctccccgggtgcctccctctggctccacgcccaggacgaggaaggttaccaaaattaatctccagctgggatgtgatgtcattggcgggtttccggaaaacatgggaatcgtcctcatagtcatcttttaccatatcatctctgtattttgacttgtgaatcaccacggctttggaaggaacagtggattctggtttccggatgttaaactcaggctttggtctggtctgttcttgaagatttttccactcatctaaagtcatctcttgaacttgggtttcttcttctacctccaactcaggaactttggctggagactcctcttccggggtgccctgggactcctccaccactgtgggttcctccatcggtgcagttggctccacatcactggtatctttacccgatccccaggttcgaactccacatccacccatgttgtcttcagttctgactgctattttgtcattcccaccatatctttcaaattctcgctttcctctctggtcaaaagcgtcaaaaactctgttcccag

SEQ ID NO: 85720 - DNA, 419 bp, Homo Sapiens
ctaggtttaaagtagaagagatttcaataggcagcctttattaactactatacaaatcattctctttttgttattgggagtcaacaaaataagatagattttctttccgttttttaaaaaagtaggttctccaaattaaaagcataccatataataaaaacatgtcacagaacacaaaattatgcaaacaaaaattaattaagatgtttttcaagttcccaagtggattcatttgctgactaggcacgttggtgagttgacggttcttaagcagtgcataaatagaaggaaagttcctttgtttgcttcaggtgttcaaccagttcctgtgacattccaagatggctgacatttctttgaacagtatacaggactggtggagattggctatttcacaacatcagacagtacaatcagta

SEQ ID NO: 85721 - DNA, 826 bp, Homo Sapiens
gatcaggcaagcacagctccaggagttaacatatttgaatggtggttcagaaaatgcagatgttccagtggttcgagggaaacccaccttgcgtacaagaggtgtaccagccccagcaataaccaggggaaggggaggagttacagcccggccagttggagttgtagtaccacgagggacgccaactcccagaggagtcatgtccacccgagggccagtgagtcggggaagaggacttctcactcccagagcaagaggagtccccacaactgggtacagacctccaccgccacccccgacacaagagacttatggagaatattggtgctgattactatgattacggacatggactcagtgaggagacttatgattcctacgggcaagaagagtggactaactcaagacacaaggcaccttcagcgaggacagcaaagggcgtctacagagaccagccatatggcagatactgattgtactgtctgatgttgtgaaatagccaatctccaccagtcctgtatactgttcaaagtaatttttttctatgaacaatccctttttaaataaatcaaaatgcttaaaatctgaatggatggaacttaaaactactttgttgaaacatcaacctgggcagaacaacccacaacaaaagaccttgtaaacattgggttattctcccaagtctggtatactgaacacaatagggtcattccaaagggacaccgaaataaccttgtgatacactacggtgttagcacaagataggtctactacatatgttaatctatctattaccataagcctcacttaatttacaaggttcatt

SEQ ID NO: 85722 - DNA, 1009 bp, Homo Sapiens
  misc_feature (55)..(74): n is a, c, g, or t
  misc_feature (242)..(259): n is a, c, g, or t
  misc_feature (558)..(580): n is a, c, g, or t
gagatctgataacttgaattcagaatattaagaaaatgaagtaactgattttctnnnnnnnnnnnnnnnnnnnntttctacattataactcacagcattgttccattgcaggttttgcaatgtttgggggtaaagacagtagaaatattattcagtaaacaataatgtgtgaacttttaagatggataatagggcatggactgagtgctgctatcttgaaatgtgcacaggtacacttaccnnnnnnnnnnnnnnnnnnaagtttttcccattcaggaaaacaacattgtgatctgtactacaggaacaaaatgtcatgcgtccatacatgtgggtataaagtacataaaatatatctaactattcataatgtggggtgggtaatactgtctgtgaaataatgtaagaagcctttcacttaaaaaaaatgcattactttcacttaacactagacaccaggtcgaaaattttcaaggttatagtacttatttcaacaattcttagagatgctagctagtgttgaagctaaaaatagctttatttatgctgaattgtgannnnnnnnnnnnnnnnnnnnnnnagttctaatcattgatgatagcttggaaataaataattatgccatggcatttgaccagttcattattcctataagaattaaattgagtttagagagaatggtggtgttgagctgattattaacagttactgaaatcaaatatttatttgttacattattccatttgtattttaggtttccttttacattctttttatatgcattctgacattacatattttttaagactatggaaataatttaaagatttaagctctggtggatgattatctgctaagtaagtctgaaaatgtaatattttgataatactgtaatatacctgtcacacaaatgcttttctaatgttttaaccttgagtattgcagttgctgctttgtacagaggttactgcaataaaggaagtggattcattaaacctatttaatgtcc

SEQ ID NO: 85723 - DNA, 387 bp, Homo Sapiens
aatagtaacacatttaaatgccagaatcgatcagctgcttcactataattaaatagttaatgtgtatggctcttgtgagaaaactgtcatgtcactgtgtttagaagccattcttattgaattcaaataaggatagacatacacatatcatttaaaataatattcttggcacataaagaaattatacattagttatttaaagtctataaacacaggaatgcaatcctcacaaagggaagactcgataaggaagagtaataactgaattgatatgaccatataaggagaaaggcagtgaacagatggcttaaccacttttggaatccgggaatgaaaaatttatgaggataatccctagttgagtaattccctgggttggatttgagg

SEQ ID NO: 85724 - DNA, 1929 bp, Homo Sapiens
  misc_feature (734)..(734): n is a, c, g, or t
agcaggctggtacggtccggaatcccgggatatcgtcgacccacgcgtccgacatggtcagcagccatgtggagcgagtgtttcagatctatgagcaacacgcagacacagttggcattgatgctgtcctgcagccttcagcagtgagcccctctgtggctgacatgttggaatggttgcaggatattgagagacattatcgaaagtcaaaggtacctgaagagaaagtatcttctttcgtctattcagtggggagacttggcaaacatacaagctttgcccaaggcctgggaccgaatttcaaaagacgaacaccaagatcttgtacaagatatcctattgaatgtttccttcttcctggaagagtaaggaagctatgcgtatctggagaccacgggcaccacagttgaagactgacattctgaaccctgatgtttctaaagaaacgtcagtatttcagtctgacatatttgaaacatcagtgccttgaaccttaggactgggtcttggggaggattagcgcctagatgtctgattttggagctgcagcatgccaggccgtggctgagagtatgtgagccatgccttgccccttttctgaggctcagggaagtggatggagctagagagacaacaggaaagacggtgctgaagaacatagtgtctttcctctattgtggacctaaagaggtggggaagcaaggacaagaggcaaagagccacactgcccttgnatcatccaaagcattgtctggttgacaccaggtcctggttttgtgtcttttgtcaatacctgaatccttgacaaaagaaaaagtgggtttgatgatttaaaaaaataagggtgattttgacacgaaaatatatttttaaaaattttggaccaatggcaatagttatcctcaagccaatttccagaacctgccaacagggggaggtggtgcagcatgaatcattcttgaaagctttgtctttgaagtgttcccctattgctgttaccatctcagaggaagtaactgggcatggtgagactcctaaaatgacaggagtttttttggccaaagctggcatctgacttgccacattcctctgagtctggagtagccgcaggggtgggagaatgccagcccagagtcagtccatcggggttacatttccaaggtctgctgccttcatctatgtaatggccgtgttactttcagatctttcagcttcccagagtgttgtgggaatcttggtcattgaatgtaaagggacttagtaaagggtatagatatttttcaaaaatgaaaataactttttttcttataagtgataagcttttataaagatcataggaaaactagaaaaaatgtaaaatgtagaagaattgtaaaacaaacttcattagagatattttgatagataccttttcagtgtctatttacaaattgtttcttttaatatagatagggtctcactatattgcccagctcactcctgagctcaagggatcctcccaccatagcctcccaaaatattggaaatacaggcatgagccactgctcctgaccaattcacaaatttttttaaagaacaaacgtgctatcatcgatacatactgttaggttgtctttttttaaaaaacctaatgtaatttgttcatctttttatatctgtaaatatagctcaacacagttatattctttttgtgaatgtattatatctacaatttaccttttttcttagattttacatgcattttcccaaatctttgtgtttgcctatctgtaaaggtaatacattctgattacaaaaaatgaaaatgttacatagaaatgtaccgttatccatctaccagataactattattaataatgtgtatttatttttccaggaattaaaaaacatctatcatataagtattgcaaataaaacttaaaaagcaaa

SEQ ID NO: 85725 - DNA, 621 bp, Homo Sapiens
  misc_feature (75)..(109): n is a, c, g, or t
atgtatgatctatagggcgcccgtcttgtagccgaacgacgagcgcagcgaagtcagtgagcgaggaagcggcgnnnnnnnnnnnnnnnnnnnnnnnnnnnnnnnnnnncagtcgacggtaccggacatatgcccgggaattcggccattacggccggggacagttcctctggacttctctggaccacagtcctctgccagacccctgccagaccccagtccaccatgatccatctgggtcacatcctcttcctgcttttgctcccagtggctgcagctcagacgactccaggagagagatcatcactccctgccttttaccctggcacttcaggctcttgttccggatgtgggtccctctctctgccgctcctggcaggcctcgtggctgctgatgcggtggcatcgctgctcatcgtgggggcggtgttcctgtgcgcacgcccacgccgcagccccgcccaagaagatggcaaagtctacatcaacatgccaggcaggggctgaccctcctgcagcttggacctttgacttctgaccctctcatcctggatggtgtgtggtggcacaggaacccccgccccaacttttggattgtaataaaacaattgaaacaccaaa

SEQ ID NO: 85726 - DNA, 703 bp, Homo Sapiens
gtgacacacgcaagcacgcctccacttaactcgcgccgccgcggcagctcgagtccaccagcagcgccgtccgcttgaccgagatggcgcgggcctgtcagttatcgggtgtgaccgccgccgcccagagttggctctgtcggaagtttgtcctccgtccattgcgaccatgccgcagatacgctacttcaggcagctctgggttgactactggcaaaattgctggaactggccttttgtttgttggcggaggtaagggtggcacgatcctatatgccaaatgcggattcccatttccgggaaagtgtagagaaaaccataccttactcagacaaactcttcgagatggttcttggtcctgcagcctataatgttccattgccaaagaaatcgattcagtcgggtccactaaaaatctctagtgtatcagaagtaatgaaagaatctaaacagtctgcctcacaactccaaaaacaaaagggagatactccagcttcagcaacagcaggtgataccctgtcggtcccagcccctgcagttcagcctgaggaatctttaaaaactgatcaccctgaaattggtgaaggaaaacccacacctgcactttcagaagaagcatcctcatcttctataagggagcgaccacctgaagaagttgcagctcgtcttgcacaacaggaaaaacaagaacaagttaaaattg

SEQ ID NO: 85727 - DNA, 1726 bp, Homo Sapiens
tcccgggatccccacagttcctctggacttctctggacacagtcctctgccagacccctgccagaccccagtccaccatgatccatctgggtcacatcctcttcctgcttttgctcccagtggctgcagctcagacgactccaggagagagatcatcactccctgccttttaccctggcacttcaggctcttgttccggatgtgggtccctctctctgccgctcctggcaggcctcgtggctgctgatgcggtggcatcgctgctcatacgtggggagagaaaaccataccttactcaaacaaactcttcaagatggttcttggtcctgcagcttataatgttccattgccaaagaaatcgattcagtcgggtccactaaaaatctctagtgtatcagaagtaatgaaagaatctaaacagtctgcctcacaactccaaaaacaaaagggagatactccagcttcagcaacagcacctacagaagcggctcaaattatttctgcagcaggtgataccctgtcggtcccagcccctgcagttcagcctgaggaatctttaaaaactgatcaccctgaaattggtgaaggaaaacccacacctgcactttcagaagaagcatcctcatcttctataagggagcgaccacctgaagaagttgcagctcgccttgcacaacaggaaaaacaagaacaagttaaaattgagtctctagccaagagcttagaagatgctctgaggcaaactgcaagtgtcactctgcaggctattgcagctcagaatgctgcggtccaggctgtcaatgcacactccaacatattgaaagccgccatggacaattctgagattgcaggcgagaagaaatctgctcagtggcgcacagtggagggtgcattgaaggaacgcagaaaggcagtagatgaagctgccgatgcccttctcaaagccaaagaagagttagagaagatgaaaagtgtgattgaaaatgcaaagaaaaaagaggttgctggggccaagcctcatataactgctgcagagggtaaacttcacaacatgatagttgatctggataatgtggtcaaaaaggtccaagcagctcagtctgaggctaaggttgtatctcagtatcatgagctggtggtccaagctcgggatgactttaaacgagagctggacagtattactccagaagtccttcctgggtggaaaggaatgagtgtttcagacttagctgacaagctctctactgatgatctgaactccctcattgctcatgcacatcgtcgtattgatcagctgaacagagagctggcagaacagaaggccaccgaaaagcagcacatcacgttagccttggagaaacaaaagctggaagaaaagcgggcatttgactctgcagtagcaaaagcattagaacatcacagaagtgaaatacaggctgaacaggacagaaagatagaagaagtcagagatgccatggaaaatgaaatgagaacccagcttcgccgacaggcagctgcccacactgatcacttgcgagatgtcccttagggtacaagaaccaggaatttgagtctgaatttgagcagaacctgtctgagaaactctctgaacaaagaatacaatttcgtcggctcagtcaagagcaagttgacaactttactctggatataatactgcctatgccagactcagaagaatcgaacaagctgttcaaagccatgcagt

SEQ ID NO: 85728 - DNA, 613 bp, Homo Sapiens
agagttgcaaggtaaatattttattaaaatacatattacaagaaagctaagatttacaatgaacagagttatgaagcttctcaactgtctttaaacgtttaacaacacaaagggactagctgtcctcaataaagtaacacagtaacaaaacatgtaacaaattattttaagcacagtttaaaacaccctatagctaaaacactcatactatgtaaatccacataaactctgaaagaagaggtatttttccaccaccactccaaggaacacgtaaattggcatagctatatggtagtctcatatttgaagataaacaaatagtaatgcattatttagtacataattattacacacaaaaggtaaggcacagctcaagcttatctaaaaaaaaatatttaaaaatgacaattcataattgcaaacaaaacactgaaagaaaaaattcggaagaatttaataaaattttgaatatttacaaattgcaaatgtgagtacttgttataaaactacttacacccatgtagaatgtgcattttgcagcattaacaatttgtgcatggtggttctattgcataatatatactgaaaaaccatcatctgtaaatcattacaa

SEQ ID NO: 85729 - DNA, 473 bp, Homo Sapiens
caaagaacggcggaacagactggagcagaaggaccacccagcagagccaagccaaatcactgaccctcagaggcctgatgtgaatgcttatggcttcagtccattggattctgcagtaatctgccgatctacagtattaccacagtaaataaccgatagacctgaaaacgaatgcatgccttgtgccaaaattgcaggaaacctcaccaggagaaacaattttatatgagggaatgtactctctcctttgcattttccctcaaatctatatttttagcccctcacttgtctctacagagcctcagttgcttaatctaattgctgactgaacatctccaggaaactgtgtgtacgtgtttgtattcatagtatatttatttattatctgtttacttccatgggatatagtctccataagagagtagtcatcattgtatttgttgatgcttaataaataatcattgaatgggcaa

SEQ ID NO: 85730 - DNA, 455 bp, Homo Sapiens
ccacgtcataccggtacccttttctttaccccttaaagaatacccaggaaagaaagataactaaaggaagtaaaggaccagatcttttaccaccttcctgcgtgggtgatccatcctcttcctctataacatcatttccctaggacagaaggaaggccctgtgagtctatgaagcggcaaaatgagtaaactgattggctgaagacagaactaatcatcctactggtatctaactccagggcctacgttaatagcatatatttccatctgtgtttaatatgcctcagaggctgagtagaggcagatcttgcttggagaggcaccatctgcctacagggattagatccgagccacattacccatatatgctcagaatggtctgtcaggaacacccttgttaatagtttagctgatactgtttctctaaggtggaagtaaaaattactaaatgaaaa

SEQ ID NO: 85731 - DNA, 541 bp, Homo Sapiens
ttacaacagcctttaaaatacttgcctaagctgagctcctgaagaaacttggacctgtctccttgaccacgcctttacacccgcacctgacatccatggctctgaggcccagaaagagctgaggaggtcatagagatcatcaatgctctgcttgctttgatgtaccattaagaagacgatctttcctctaacagccccatacaactgagcagcgccaccacgtcataccgaaggaaggccctgtgagtctatgaagcggcaaaatgagtaaactgattggctgaagacagaactaatcatcctactggtatctaactccagggcctacgttaatagcatatatttccatctgtgtttaatatgcctcagaggctgagtagaggcagatcttgcttggagaggcaccatctgcctacagggattagatccgagccacattacccatatatgctcagaatggtctgtcaggaacacccttgttaatagtttagctgatactgtttctataaggcgcaacgtaaaaattactaaatgaaaaaaa

SEQ ID NO: 85732 - DNA, 1169 bp, Homo Sapiens
  misc_feature (81)..(112): n is a, c, g, or t
  misc_feature (187)..(199): n is a, c, g, or t
  misc_feature (503)..(513): n is a, c, g, or t
tttaaagcaaaaaagaaaaagcaagcccccaaatggatttttgatgttgaaactctgtcatatgctgctggtaacagtaannnnnnnnnnnnnnnnnnnnnnnnnnnnnnnntaaaaaaggaaaaataatctatgtatagaacagtcagtagtcagagacatttagaaaaaagtaaaaacaagtccnnnnnnnnnnnnnaaaaatggatttactaaaacaacttcatcacccagaggtactacaaccccacatcctctgatgaagccatggtgttattcaacagcatctgctgtgggccgtagttagaaatcaccagtgttggaaacagcagacattggggtcagggctgcaaggcaaaaagctgttatttgctggtcttgctcatggccatgcctgaagcctggtgtctggaatacttgtgaatgaagttttccccgaaaagcatgcatcactgtggctcagtaagatagtacgactggtcatcatcgtcatcttcttctcnnnnnnnnnnnggcagaagcctggatccatgtacctgctcttccctaaaatgtagacccaagacagcaagacttttcaaagccaaaaaacggctccttgccttgtagtaggttcttctcctcagaatccaatctagtcagatttctgatctagatgatatcctcatcttacaaagataaggtgacctgccccagcttgtgagaggttctcctatttgggatgttcttctagcacaaacaagcacaaatcgctgaggtcaatagactgtgataccattccttgacgtctaacagaaataactttggccctgttactcctagttgtatctttagggcattaagtaccaggtaacagtggaaggaaagtggtactccaatccctctccaactatcccaatgaaggagatccaagcaattagcaccttcagttggtgctgctcctaagttgtaagcctctaactactatcagctggacaaaagccacatcctatatgcccggtaagcacaccaatgtattaatactaaccagccaccctagagctcaattaagcatctggccttaatgcagtaaaccacactcaaaggagacatgaaatattggctgttgtaccaaagaagacaccctctgcatagatatgttgatagagaatgtaacccacagagtccat

SEQ ID NO: 85733 - DNA, 755 bp, Homo Sapiens
  misc_feature (293)..(303): n is a, c, g, or t
  misc_feature (381)..(412): n is a, c, g, or t
  misc_feature (487)..(499): n is a, c, g, or t
ttagtccccttctaataagagtttacatacagcttacctaataccttaagaagaacagagaacacaacaggagggaagaggacacagcaccatagtttcaaacattcacacacaaaagaaaaaagagccagcacagactagagtgagaccaagtttcccaacagacagggacaagtcccaacacacaaaggacatataattatctatatgaacaaaagcaaaatggaagatctggtcaggctgggatggaggagggagtgctaactccttgtactacaaagaaggaatgggannnnnnnnnnnaaagcaaaaaagaaaaagcaagcccccaaatggatttttgatgttgaaactctgtcatatgctgctggtaacagtaannnnnnnnnnnnnnnnnnnnnnnnnnnnnnnntaaaaaaggaaaaataatctatgtatagaacagtcagtagtcagagacatttagaaaaaagtaaaaacaagtccnnnnnnnnnnnnnaaaaatggatttactaaaacaacttcatcacccagaggtactacaaccccacatcctctgatgaagccatggtgttattcaacagcatctgctgtgggccgtagttagaaatcaccagtgttggaaacagcagacattggggtcagggctgcaaggcaaaaagctgttatttgctggtcttgctcatggccatgcctgaagcctggtgtctggaatacttgtgaatgaagttttccccgaaaagcatgcatcactg

SEQ ID NO: 85734 - DNA, 732 bp, Homo Sapiens
  misc_feature (140)..(140): n is a, c, g, or t
  misc_feature (609)..(609): n is a, c, g, or t
  misc_feature (661)..(661): n is a, c, g, or t
ttgctgtgaaaatttcacatttactacatgtatgtgaatacagctgcttcattccttttctctaaaactgccaggacacagaagggcaccgattgtaccctgggacttggaagccacaggaaggagaagcagcccagagnccacagcccggatgtcggctggagagggcacctgggcctggctctggtctttctgaagctgcgtgctggagccttcggttacccactgaagtccaggaggttagaccccatccacaatggcaagaaccttccaatccaggtgccgaggacacccccatgcttgactcctgggtgcatttgtcagagggtgggggcaccggcaatccctgggcttggctggtccctgaggcccatcctggtgcacagctgctgtggttttacaagtggagcggccctctgtgttccccaggagcagcctcccttctccatttaaaggaagttaaaggtgttgaaggaagaggccgcctgccctgcttcctcagctgacatgtctctctgtgacccgggtgtggagaccaggcctgggaggtgaagtgccctcacctggggtccagctgtgctgctcacggtgcacgatccccaaatggcnactcagtgctggaacaggccctggagagggaggtgcccagccgagtgtgganccgctctgggccaggcgcccacccatcacactgacggctgcccctagtggtttctccaagaggggagatgt

SEQ ID NO: 85735 - DNA, 412 bp, Homo Sapiens
  misc_feature (212)..(212): n is a, c, g, or t
gtgtgagccaccatgcctagccatgactggcttcttctgtacattaatcttgctgccctatgggatatttcagctgtagcatacacaacccactagcaacttcctcatgtctctcaattaaaaactcttgcaagacaatgcatcattttgaccaagtcccagaagttattggttttcttagccagttagataggcccaacttggttaggtangttaactccgttagctgtgaccaatatgagctatgtctgttggacatcatgggtttgcagagatttttctgagggaggagggcagaggatgggcagagcagacctacattattacagaaagatggaactaggattccaacccaggtcttctgacccccagtcaaatacttcttccacttgaagaagcaacctattaaaat

SEQ ID NO: 85736 - DNA, 728 bp, Homo Sapiens
  misc_feature (667)..(667): n is a, c, g, or t
cctctggttccgccgcctctacattatcttctcccggtacatgagaatcaactcactgagcttcctctgaagccttgaagggttttcaggtccaaggaacaaaggggaaaatagacaaaggagtgcagaggacctggcctggcactggcttatttacctgagctcaaggagatccccgctggagcagcctctgcaaaagggagcccatgtaggccaggggctgtccaaactccagcttcttcccctgggaaaaaacccaaagaaccaaaaacaaaccaccccaaggataataatagctacactgctagcttctcaagttcttgtgaaaaacaatttacataatgacacagtagatgtggaacacctagcccagtgcctgggcaggtccctattatcataaatgaacataaaagtgctctaaaaacactccacagatgtgacttttacattgtttccaaagcaggttcaccaaaaacacatacacaaaatgcaacagtgtgtgttgaattggttcaatcataattcctttgatttttcttgtatcagaatgtgggtctaggaaaaacttgctctatttaacaggacagctctgattgaagcatccaagtacaggtcactggggtgggcactgttttatacagagacgattacaagaactctgcctcanagagcttacaatcaaatatgtcagctctcagtctttttggagaagtaggaagtaggaagat

SEQ ID NO: 85737 - DNA, 262 bp, Homo Sapiens
gcggccgcctactactatacggctgcgagaagacgacagaagggagcccatgtaggccaggggctgtccaaactccagcttcttcccctgggaaaaaacccaaagaaccaaaaacaaaccaccccaaggataataatagctacactgctagcttctcaagttcttgtgaaaaacaatttacataatgacacagtagatgtggaacacctagcccagtgcctgggcaggtccctattatcataaatgaacataaaagtgctct

SEQ ID NO: 85738 - DNA, 786 bp, Homo Sapiens
  misc_feature (199)..(255): n is a, c, g, or t
ggcataagcgtgcgagcctggttaaatcggcacgaggatatttaaaatttctgtgggccaaatgaaacaagtatgcaggcaggtctggtccgagggggctggcttggccatgcctttctgtgcctttaatgaggactaagaagcaagattgggccacactgtctggactcaaagcccagctccaccactgagcacccgnnnnnnnnnnnnnnnnnnnnnnnnnnnnnnnnnnnnnnnnnnnnnnnnnnnnnnnnngaaatgaagtttgaggtgagaagcattcaccatggtgcccatcgtgttactccattgtcagaggaggaaacggggtcaggcaggaaagcaacttaaaggagggcctgcaagcagccagggtcagagacagggcttggttctgcttcctggtgaagcatggcttcggggtgctgcctctccctccctgtttgaatctgcagattgtgttaggcccccagctgagggcctggagtggtgggattggtcccagtgcctggcgcacattggcctgcagagtagattaactgaatgaccaaagagcaacagaagtctagtgattcttgtctttgaggttctgactggtgttttacaactgagtccaaggcttttccctcctttgtccctctgacacccctccccctaattctcatctgtcagatccagtgtattcctaagctgggacaaagcctctgttttcccagtaggagcagggctgagtgtggaaattacagtgactgcttcttctcagttctctggttgaaagcaagctgg

SEQ ID NO: 85739 - DNA, 960 bp, Homo Sapiens
acaaatgtacacctgtacaaccaaggaaagcatcactactaaattagcaaggcttttataataaacattgaaacaagatttcctttcaaagtgtaaacttacatctattactacacacacaatgcatatatttatagaaagcaaaaagagctatctgaatatgtaatcatgcttaaatgctgagctatcaaattcacttttcagtggccccttttcatctctatctggttccctactttctgccctctatgaaaaagcaaaataaaagctcaacacttccgtcaaacatgtctgtaattctataagcaaaacaaaatacaaatttccactctttctcattgcaaaccaaactgaaaagttaataagtgacttaacttttcatttagtgcacttaattggaagtgtcaccatgattttgtatttaactcttacaacaattacatatgtaagtatatacaatatttctgtacattgccagagacattttagggcagtaattgtattaaaaccacatctactgtaaataatgttaggttcttttcatctcaaaccactttattcttgtctacttactcgttatttgcatgatagtttgtgaattatcaaaatacaacttaactctttttaaaatattaataatatttatgcagttgattgttaatctgttataaaaggtttcacgcaaaggaaaaaaataaggactataattctatatacatctctataaacctgttgtgctatggggttgtagacctaccagactgtgagccagtttattaaaagaatactgtactttttcctttaaaaactatttttgtgactttacaaggtaaaaatttacaaaatatgtgacagctttttatttttgatacagttacatcatatacaggcattctgtgctttgccagcaatccaatctgataggtctccactcagggctgaatataatttataattcat

SEQ ID NO: 85740 - DNA, 1042 bp, Homo Sapiens
ggtgcgaggccgggggttgaatcggcacgagggtgggtcggggatcggtcgcctgagaggtatcacctcttctgggctcaagatggacaacaagaagcgcctggcctacgccatcatccagttcctgcatgaccagctccggcacgggggcctctcgtccgatgctcaggagagcttggaagtcgccatccagtgcctggagactgcgtttggggtgacggtagaagacagtgaccttgcgctccctcagactctgccggagatatttgaagcggctgccacgggcaaggagatgccgcaggacctgaggagccccgcgcgaaccccgccttccgaggaggactcagcagaggcagagcgcctcaaaaccgaaggaaacgagcagatgaaagtggaaaactttgaagctgccgtgcatttctacggaaaagccatcgagctcaacccagccaacgccgtctatttctgcaacagagccgcagcctacagcaaactcggcaactacgcaggcgcggtgcaggactgtgagcgggccatctgcattgacccggcctacagcaaggcctacggcaggatgggcctggcgctctccagcctcaacaagcacgtggaggccgtggcttactacaagaaggctctggagctggaccccgacaacgagacatacaagtccaacctcaagatagcggagctgaagctgcgggagggcccccgccccacgggaggcgtgggcagcttccacatcgccggcctgctgaacaaccctggcttcatgagcatggcttcgaacctaatgaaccatccccagattcagcagctcatgtccggcatgattttcgggtggcaaccaccccttggggaactcccgggcaccagcccctcgcagaaacacctggccaggctcatccagggggggccaccagtttgcccccgcgaatgcaccaccaaaacccaaaatttgatagagccacttcaggagccaaatccgggaatcggaacccccaacgcccagcaacgaccaaccaccaggaatggaccctgc

SEQ ID NO: 85741 - DNA, 1429 bp, Homo Sapiens
  misc_feature (1388)..(1388): n is a, c, g, or t
taaggctaggtggaggctgggtgttgaatcggcacgagggtcgcctgagaggtatcacctcttctgggctcaagatggacaacaagaagcgcctggcctacgccatcatccagttcctgcatgaccagctccggcacgggggcctctcgtccgatgctcaggagagcttggaagtcgccatccagtgcctggagactgcgtttggggtgacggtagaagacagtgaccttgcgctccctcagactctgccggagatatttgaagcggctgccacgggcaaggagatgccgcaggacctgaggagcccagcgcgaaccccgccttccgaggaggactcagcagaggcagagcgcctcaaaaccgaaggaaacgagcagatgaaagtggaaaactttgaagctgccgtgcatttctacggaaaagccatcgagctcaacccagccaacgccgtctatttctgcaacagagccgcagcctacagcaaactcggcaactacgcaggcgcggtgcaggactgtgagcgggccatctgcattgacccggcctacagcaaggcctacggcaggatgggcctggcgctctccagcctcaacaagcacgtggaggccgtggcttactacaagaaggctctggagctggaccccgacaacgagacatacaagtccaacctcaagatagcggagctgaagctgcgggaggcccccagccccacgggaggcgtgggcagcttcgacatcgccggcctgctgaacaaccctggcttcatgagcatggcttcgaacctaatgaacaatccccagattcagcagctcatgtccggcatgatttcgggtggcaacaaccccttgggaactcccggcaccagcccctcgcagaacgacctggccagcctcatccaggcgggccagcagtttgcccagcagatgcagcagcagaacccagagttgatagagcagctcaggagccagatccggagtcggacgcccagcgccagcaacgacgaccagcaggagtgacgctgcctgctcccggtgtgaccgcgtccttccctggccgacccgaaggaagccttctggttgtctgccacttcctcctgttggactgcctgagagaggggaagagagagacctcggacctgcatgtcaagatggattttccccttttatctctgccctcctccactccctttttgtaactcccttacagcccccagacccttcttgaaacgagagccagcaagctgagcacagaccagcagcgacctcccttcaagcccccagaaagctcggtcacttgagtgttttctagaatcctggggtgctcccggggccgctctcagagaagtggcaggtttcacgttcagccggtgtggcggatcgtgtggcttncaaaggctttaacagccccggcccccattccgtgggtcttg

SEQ ID NO: 85742 - DNA, 686 bp, Homo Sapiens
  misc_feature (225)..(257): n is a, c, g, or t
ggcacgaggggcacgcagtgagggggcggcagctccatggccgcagtggcctgccctgctctgagcacttccgtggactgaaggaaccgtaggagcctgctctcagaaggacaatgattcagcatgtgattgcagcaggggtctctgccccctcgctcccaattcctagtcgtgacttcatttctaaaacagagcctgaccaaccttccatgtatctccatcctnnnnnnnnnnnnnnnnnnnnnnnnnnnnnnnnnccccgagacccacgcacatgttggggcttctgggccaagagtactttttatataactaatttctaaatccaaaagctcaaggaatagacagtgttctgtgacatggattggtttgaaggagttacccaccatcccagcacgataatgtcatctcccaagttggatggcagcacgatctggccctagggagcttcctgttcccagaagtcattgtcctgggctatccagatgtccctagtaaatcttgcttccttctgcaatgttagtaatgccttaagctgacagttgctattttgcagaacagttttcctctttgcttagctagtaacttgcctctgagcctgggctgatctgagaaacaggtgtgacaagagcatgaaccagaggtgcacctggggcagttccctaataaaactggtttgtacagtc

SEQ ID NO: 85743 - DNA, 352 bp, Homo Sapiens
aggagttggtcactaaggaatgacacacatcaacaggaaggtaagacagcattgctgggccaaaagtcataagagagtatgaaataagagactggaagcaaaggaaagaaaatattacataaggaagggcctactgcagagcaggtgtggaataaagatttagaatggggtatcctgtctaggtctaaatggtcggctgcatgggaaatacacagaaagggttaaggagcaaggaattcagtaggaggcagcagcagactagctcttaaagcttttgagggaatggctaattaaaggacttgcttgataggaaagttataaactgatgaatgctgataaaaagctatagatg

SEQ ID NO: 85744 - DNA, 493 bp, Homo Sapiens
  misc_feature (419)..(419): n is a, c, g, or t
tcagttccatgtatacaattaccagatgccaccgcagtgcccatgttggggagcaaaggagaaatctgtggaccgaagcatacaaatggtggtatcttgtctgtttaatccagagaagagactgataaattccgttgttactcaagatgactgcttcaagggtaaaagagtgcatcgctttagaagaagtttggcagtatttaaatctgttggatcctctcagctatctagtttcatgggaagttgctggttttgaatattaagctaaaagttttccactattacagaaattctgaattttggtaaatcacactgaaactttctgtataacttgtattattagactctctagttttatcttaacactgaaactgttcttcattagatgtttatttagaacctgggttcctgtgtttaantatatagtttaaaagtaacaaataaatccgagactggaaagaatggtaagatttatccgcaaggatttttaaaa

SEQ ID NO: 85745 - DNA, 223 bp, Homo Sapiens
gcctactactactatacggctgcgagaagacgacagaagggaataaggctctgtgcatacgaatggggctttgaaaggcgttgccgcggcttccaaagcgatgcgctgtgcctcgcctcgcctcgccccgcccagagcgagactccgtctgaaaataagtacacaaataaatcataagataattcatgaagaaagaatgaatgaacgaagggacgaacgaaag

SEQ ID NO: 85746 - DNA, 627 bp, Homo Sapiens
aagtatcctcatcactcccagtctccgtgccatcttagctggatacaccatgccaccagcgagaccagaatgcaggacgtcgccattaaggtatccctacaaagtctccactctgataaaactgtgggaaaaaaagttagatatctaaaataagcctagaatctcacacacagctgtgacttctaagtgaaactcttttctccctcatgtccttaaatagtcacagaatcacacacagcctgacttttaaagacaagcttggctacaggaaatgaaccaaccccaaagactcttctaacctgtctcctgactgggctccttcagaaagtgttctcctgttccatctgtagggctgcttactactggaacctaaaacaaaacctgttgtttgtaccatcactttttctggtgtttcctgtgcttttgtgattccaagtctgttcataagttctgaagataaattatgtgaaatcatattttggcatatgggggtggaggatgaattctttacagactttttaagatgatccatttgtaccacagaaaacattttggaagttgttatatatgagtatataaatttttcttttcatattttacattaaaataaagctttattcagtcaaa

SEQ ID NO: 85747 - DNA, 425 bp, Homo Sapiens
tttgaagccaaattggagagagatgtatttataccagtggggctaaggaggaagcagtccagtgggggactttgagtgctgtgcagtgttctcttaagagtcgtagtacagtcctggggtcaagtctctttccctaatctttgctggggaagccttgagccttgatttatccttcccttggctttgggctttgaggaagttggggatggaggggatgatgcttctttaggtttctctattccaagcccctctgaatttctagttgcaacctgccttcacacagagttgatgggaaagattagttgtagatggcggtatgggattgagcctacagcaagaggaagaagggaactccagtatagagtacacaaaggaaaagggcaggaaagataccaaaggcttatgaaaacaaaggaagggaagaa

SEQ ID NO: 85748 - DNA, 107 bp, Homo Sapiens
cgagctcgtaggtatcaaatcatgtatatgatgaaagtcatgaccctattgaagatatattctttctgaacagtatttaaggtttccaataaaatgtacacccctca

SEQ ID NO: 85749 - DNA, 1144 bp, Homo Sapiens
  misc_feature (741)..(741): n is a, c, g, or t
  misc_feature (1082)..(1082): n is a, c, g, or t
agttggagctgaacacacgacttgctttggcatcaaatggagatgtgtatgcctgggggagcaattcagaagggcagctcggcttaggccataccaaccatgttcgagaaccaaccctggtaacaggtcatgcaagggaaaaatgttcggcagatctcggctggccgctgccacagtgctgcatggacagcaccacctgtcccaccaagagcaccaggtgtgtcagtacctctgcagctgggcctgcctgacacagtgcccccccagtatggggcgctgagagaagtcagcattcacacggtgcgggccaggctccggctgctctaccacttctctgacctcatgtactcatcctggagactgctgaaccttagccccaacaaccagaacagcacatcccattataatgctggaacttgggacattgtacagggacaacttcggcctttgttagccccaagagtctacactctgccaatggtgcgctccataggaaaaaccatggttcaaggcaaaaactatggacctcagataactgtaaagaggatatcaaccagaggacggaagtgtaagcctatttttgtccaaatagcgagacaagtagttaagctgaatgcttcagacctccgcctgccttcccgagcgtggaaggttaagctggttggagaaggggctgatgatgctggaggagtgtttgatgacaccatcacagagatgtgccaggaacttgaaactggtatngttgaccttcttataccctctcccaatgccaccgcagaagtgggttacaatagggacaggttcctttttaacccttctgcctgcctcgatgaacacttaatgcagtttaagtttttaggaattttaatgggggctgccattcgcacaaagaagcctctggacctccacttggcccctctggtgtggaagcagctgtgctgtggtcccactcaccctagaggacctggaggaggtggatctgctctacgtgcagaactctcaacagccattcttcacattgaagacagtgggattaccgaaggagagtttccatgagatgattcctcttgattcttttgttngccagagtgctgatggcaaaaatggttcctattaatccctggtggaaatagtatcccactca

SEQ ID NO: 85750 - DNA, 1871 bp, Homo Sapiens
  misc_feature (1517)..(1543): n is a, c, g, or t
  misc_feature (1647)..(1663): n is a, c, g, or t
  misc_feature (1703)..(1721): n is a, c, g, or t
caaactacggctaggtacgaggctgggtgttgaattcggcacgaggacctgtggccccgcagtttagtagtccccgccttgtttctccccagaggcctctcaatcctccctccatgatcttcgcatagagcacagtaccccttcacacggaggacgcgatggctcccaagaaacgcccagaaacccagaagacctccgagattgtattacgccccaggaacaagaggagcaggagtcccctggagctggagcccgaggccaagaagctctgtgcgaagggctccggtcctagcagaagatgtgactcagactgcctctgggtggggctggctggcccacagatcctgccaccatgccgcagcatcgtcaggaccctccaccagcataagctgggcagagcttcctggccatctgtccagcaggggctccagcagtcctttttgcacactctggattcttaccggatattacaaaaggctgccccctttgacaggagggctacatccttggcgtggcacccaactcaccccagcaccgtggctgtgggttccaaagggggagatatcatgctctggaattttggcatcaaggacaaacccaccttcatcaaagggattggagctggagggagcatcactgggctgaagtttaaccctctcaataccaaccagttttacgcctcctcaatggagggaacaactaggctgcaagactttaaaggcaacattctacgagtttttgccagctcagacaccatcaacatctggttttgtagcctggatgtgtctgctagtagccgaatggtggtcacaggagacaacgtggggaacgtgatcctgctgaacatggacggcaaagagctttggaatctcagaatgcacaaaaagaaagtgacgcatgtggccctgaacccatgctgtgattggttcctggccacagcctccgtagatcaaacagtgaaaatttgggacctgcgccaggttagagggaaagccagcttcctctactcgctgccgcacaggcatcctgtcaacgcagcttgtttcagtcccgatggagcccggctcctgaccacggaccagaagagcgagatccgagtttactctgcttcccagtgggactgccccctgggcctgatcccgcaccctcaccgtcacttccagcacctcacacccatcaaggtgagtggcggtgggaaggagctcgcagaaggaggctgtgatcatgaggccggagcaggtctgcccacagtggggaagggctgatgtggtaagcctgccaccccagatcgctcctggcccgagcacagagcatctcttacccattggctctctctcttccttttatcccacttctgccatcccatatggttgagttttctgtctcgctgataagatatttttctgagttttttcagcccagctctgatctcactgtgagaattttctaagatcctgaccctctgttctgtcttctcagcttcagttacctgtgtacagttgacccacaaaccttcnnnnnnnnnnnnnnnnnnnnnnnnnnnaaggcagggtctcgttctgtcaccccagtgggagtacagtgggggcaagcatggttcattacagccttgatctcccaagctcaagcgatccctctgccctcacnnnnnnnnnnnnnnnnngaaagacagggtaatccttgtgttacccaagcgtgatccnnnnnnnnnnnnnnnnnnnctttgaaaggtctttgctctgtccccccaagcctggaaagcaatggcacaaaacatagtttcctggagcccctcaacttcctggggttaaaggaatcctttcgcctttaaacctcccgaaggaaattggcgcatacggggttgtcccccc

SEQ ID NO: 85751 - DNA, 387 bp, Homo Sapiens
  misc_feature (20)..(20): n is a, c, g, or t
  misc_feature (101)..(101): n is a, c, g, or t
accaagacaggtgagggagnccccagggcacacagccccaggatcttgcccccatttccaaaccctggcaagcgctgccagacattctatcggtcttcccnactgctcacctgtactcagagccaagtactgatctaggggagcaggtgccacctccatctcccagctgtccccccacccctggggctccccagctctaccaccccggaagctgagccctggagacaccctgatgggcgggcgccacctccttcccagaaagagcagagcagctggcagactagagctcagctgctcctgaccactgacaaccgggagatgtctcggcagacaccacttatcccagaaaatgaccagaggctccaaatgggaaccaagtgcataaat

SEQ ID NO: 85752 - DNA, 375 bp, Homo Sapiens
  misc_feature (17)..(17): n is a, c, g, or t
tactggttaagaatagngcttagtgatgtgaacagtgtggtcttttctttgtcattctgagttactagattaagctccagtgaaacaatgtagttcatttctgatacagtcccaacacaaatggctgtcctatttagatggcattggtcaagactgatatcaagataggtaactataagactaaccttagttaaccaacccatttttcaatcacgtaaggtataataaaatacactctgattattctgtgaactttgattattgtcattaactctgttatcaaatgatcatttgattccattatgtcacctggaattatgtaatttatatataatgtatacagtggtataaaaagaaaatatgtattttggaaca

SEQ ID NO: 85753 - DNA, 1268 bp, Homo Sapiens
  misc_feature (1157)..(1191): n is a, c, g, or t
aataatatgaatttaaaatagccacaaacagggtgagtgcatgtaagcggctgaactgccagtacaggggaaggtaaatgggcctaaactatgatacctagcaagggttggatctgtgcaggcttctatgtacagagacaagcagggttaggcacttaaagctttttgatgaaaatcctgggaaagagctgagcctacatttattattattactatcaaaacaacaacatacttttcatgaagaaacatgcaatcagaaacattacagagactgaagagagcttaagagttttctgaaaatgaaatgacatgtttttcccagagtatcatctcaattataaaatttgatggttttatattatcatatttcttcacgtggtaaatacctcattaaaaaattattaaaaaattattgacaatacaaagccctagttagtatacagatattactatactggtacccatcttgtaaggaaaatatcaccaatctagatatcttaaatatcttctatcatccaatatcttaaaccaattttctcaaaattgttttattcaaaggtacttttgtcgtcttgcccctattcttccatcatcaatagtccttttaaaaattataatattctacatataccaaatagaatctaatgtcataaaaatctcaaaaatgtaatgttagtagtgttgattatctaaagaactcagcttcatggaatacctttcaatatttattgcccagatgtattaaagagaattcttaaatgtaatgcatcaatggtcctaatacatctgtaaacagaataccactaaaaaaattttactggcatgaaatactatacttatggttgtgtgaaacttttaaatcttaaagcctcttaacataatcatgtgtatctatgtacaaaacatacataaatttcactttatttaaaacatatgaaagaggtaatttcaaaccacactaaacataataaatatagaactcgctttgttaaaaatctacagtatacattcaagtaaaggctaaacttccaatgccaactatatttgagacaaaattaaacatttacaataatcagtttcctaaaagtgctatttttaatacctatcccggccgtaatggccgaattcccgggcatatgtccggtaccgtcgactgnnnnnnnnnnnnnnnnnnnnnnnnnnnnnnnnnnncgccgcttcctcgctcacttgactcgctgcgctcgtcgttcgctgcggagaggtagcgccctatagtgatctatcag

SEQ ID NO: 85754 - DNA, 1107 bp, Homo Sapiens
agaaaagaatgggaccaacatacagaattcaacagcgattgatgaatttgactgaagagaagtccaagaagcttaagaactgtattctctacttaatagaactaagggtttatccaaagtgtaccattcttcgagcgcccagattttcaactctttactggaaataaaattcaggatgaggaaaacaaaatttacttctggaaatacttcatgaaatcaagtcatttcctttgcattttgatgagaattcattttttgctggggataaaaaagaagcacacaaactaaaggaggactttcgactgcattttagaaatatttcaagaattatggattgtgttggttgttttaaatgtcgtctgtggggaaagcttcagactcagggtttgggcactgctctgaagatcttattttctgagaaattgatagcaaatatgccagaaagtggacctagttatgaattccatctaaccagacaagaaatagtatcattattcaacgcatttggaagaatttctacaagtgtgaaagaattagaaaacttcaggaacttgttacagaatattcattaaagaaaacaagctgatatgtgcctgtttctggacaatggaggcgaaagagtggaatttcattcaaaggcataatagcaatgacagtcttaagccaaacattttatataaagttgcttttgtaaaggagaattatattgttttaagtaaacacatttttaaaaattgtgttaagtctatgtataatactactgtgagtaaaagtaatactttaataatgtggtacaaattttaaagtttaatattgaataaaaggattatcaaattcatatatgataaaagtgaatgttctaagtctctcaaactagcgttttatgtaataatatgtaatataaataaaactatggtaaatgtgacaagcatttaataggaaaatgctaaggaggcctcataaatgacccataattaccaacgtagaatttttcagtacatttagggttgctggatttagcaaataaaaataaagattgcccagttagatttgaatttcagataaacaattagttttttaatattttacatggaatatttggaaaac

SEQ ID NO: 85755 - DNA, 436 bp, Homo Sapiens
ttcggcacgaggtcagagttggaagagatcttagagctcattttgttttatctcctcattgtatggataaagtgtagtgcaaaagagtgagttctaggccagaggtaggccaataatttaattttcccaactcacgggccaaggttctttccactgcaccataatactgatccccaattttaaggttccttgtctgtccttctaaaccatcaattcactcaacaactgcttaagtgtatatagtatgtgcacatctgtgccatttgttgggtatgcaaagtctaaaagacagggtgcctgccctgagatgctcatgacctaattcaaatgcatccttcctgtccctctccccacttctcctggatcttctcatctgtatccttttccacgtttgtaaatataaattcaatagaaataaacagttttatatatggca

SEQ ID NO: 85756 - DNA, 456 bp, Homo Sapiens
ggcaggggacaaggagcatggtggtcttggctatttgcttaccttcccgtttctcctctgcccctggaagggaatgtgggggcccacttttttgtacatgtaccacctccctttcctcttactgtacataaacctcagactctccccctctcaacaaaagcttgatgcaccaggcctgactttgtcccctctttctgaagcttaaggggctagggtggccatttaatctgacctgggctatggggatagaaaagaaatctttggggcactgcatctgttttggaggagatgagatcagaactctggggaaaggagaaccggctaggtgggctctagccacacaaagggaagcaggcctgccatgagacactagtgccctctgctgggcatgtgtccagtccccagcctgccccagtagcacatggaaaagagtcactggccatgttataaatattg

SEQ ID NO: 85757 - DNA, 170 bp, Homo Sapiens
caaggattgtgttcttaaaaacaaatctttgccaaactgataggtgaaacatttagatatgataataggtattcctgttattagtaaaggtgagaatattttaccatgtatattgaccaatgatttcttctgtgaagtgtcttgcatctcatttgctaattttgaaaaat

SEQ ID NO: 85758 - DNA, 668 bp, Homo Sapiens
  misc_feature (653)..(653): n is a, c, g, or t
tcaaataattattggtcatcggtcaagcagagtcttctgaggtctctatcttaaaacagctgcagggataagggacatcactacctactgtctttggattacatgtgattctgaaaactattcaatcctgaaatgtaatcaaatggccaaatacaaccccaatttaccactgatttttacgtaaagttgagtctttgatcacaatgctgttccttaagaaatgatcaataactgctgagagatggttgagaaatgccttttccccacattttggtttgtttgttgtttgctgactttacttggcaagagttattgggcctcaaatcagatatttacaactgtaagacaactgggagcagggagagggagagggcaagggggtgggaagaaggactacaaagaagaatatattcttttcagaggttaaaacgagttaagaaatgtgatgtacaataccatgcatttactctccaaagctagtcactagcaagctaacacctctaacactacaaccaccaattacagctgttttgctacaggtactcaattctaactacagctatagggcagaaagggtgggctgtttccattttaaactttctccctttgaaaatggccataaaaacattttctgtacaagtttaatggcacanaaaggtgatcaaaaa

SEQ ID NO: 85759 - DNA, 552 bp, Homo Sapiens
caatgctgtactactgtctcaagatttaaattttaatgcagagtactttattggtgtgaggcacacaggtaagaagaaatgtcaacattaaatgtatgacttacttggtacaaaaattttttaaaaagggaactaccttgacattgtgtattaaatgtttacctaagactataatctcaagtatgatgtttgtttaacatatacctctcaaaatttatcaccactcaatgacactgcatcaaaattgactataaaactaattcaagaaatatttatatatattttttaatatacaaaaaatatttagcctgatggaatggctttccttttcaaacattattttctaagtttctatacaaatgaaatctttacctctgcatattaatgagccttgccataattactgtagagtggcttttcaaagatattttgttgcactaaaactgtggtagtaaactcagtgaacatgatgtgtggaagagcataattagctggtcaatatttttgtccaaaatacctgcaagagtaataaaatacatacctttcaaacat

SEQ ID NO: 85760 - DNA, 834 bp, Homo Sapiens
agaagtgctgaggttgatgttacgactgcaagaattcttgggacacaggtttgttttctgctgacttgctcggaaacccattggaggtatctgaaatgtgatgactccaaaggggttcatttcactatagggagaaattgattcgtctgacttcctatttatcaccactcaatattgggtgagttggtctgaacaaggtggggataaagtagagtggaaataatgtagagtcgtcagctgaaaggccaggttgtagtcccagctcttatctgccatcttggacaaagcttttcccatctccagtctcagtttcccatccataaaatgggggaagtggtaggtcttgctgattgcatccacattcattcctccatttcctttcccagcaaccccccatttctgtttgggaattcatatgatctgccagagcctctccaggggtggaatacatgtcctggactaagccaatgacaccttccatctttccagctatggtgactgggttaggtatgatcttgtgagttaagacaatgaagccagagggaatttcaagacttatgggaatgctgggtagaagctgttttaattcccctgttgaatgtgaaaaaggtagtagtattcctgggtctttatgatgaccaccttgggccttgggatcatgaccaggaatcacgtgaagctgacaccactgaagggagagttgagaggcagaaagagatcaagtccttggtgaaattgtttaagtacaggatcaagccttgcttgagattggccttacctctggactttttttgttatatgagctaataaattctgtttattgtttaaaaaaaa

SEQ ID NO: 85761 - DNA, 415 bp, Homo Sapiens
  misc_feature (114)..(125): n is a, c, g, or t
cctatgtaaactgtccctcatccttcaccatcccaccatagaaagttaactttctcccaagtagccaattttcacttggtgagagttgagctaagatttgaaagatggtgattnnnnnnnnnnnntcaaactgttaaataggaatttggagagacaggcttttgtcattttccaatgcacttgggaggcacaagatttcgattgtaaaagggaaaaccaccggaaagcatagtgataaagttctattttcagaacaaagaggtgagtttatcctcatgctgcaatttctactctgaaataatttctatgcctcagtgaacattgagaggatattatcagtagataagggcatcaacatttggttgtgaacacacacttttgcttaatttgtctatttaaattagaaagggagggg

SEQ ID NO: 85762 - DNA, 683 bp, Homo Sapiens
tttcacctcaagaatgccatcatgtttgggaagaagcggcacacggatgtgcagttctacacagaagtgggagagataaccacggacttggggaaacatcagcatatgcatgaccgagatgacctctatgctgagcagatggaacgagaaatgaggcacaaactgaaaacagcctttaaaaatttcattgagaaagtagaggctctaactaaggaggaactggaatttgaagtgccttttagggacttgggatttaacggagctccctataggagtacctgcctccttcagcccactagtagtgcgctggtaaatgctacggaatggccaccttttgtggtgacattggatgaggtagagctgatccactttgagcgggtccagtttcacctgaagaactttgatatggtaatcgtctacaaggactacagcaagaaagtgaccatgatcaacgccattcctgtagcctctcttgaccccatcaaggaatggttgaattcctgcgacctgaaatacacagaaggagtacagtccctcaactggactaaaatcatgaagaccattgttgatgaccctgagggcttcttcgaacaaggtggctggtctttcctggagcctgagggtgaggggagtgatgctgaagaaggggattcagagtctgaaattgaagatgagacttttaa

SEQ ID NO: 85763 - DNA, 1383 bp, Homo Sapiens
cattttaaaaatatttattgagcacctgttataaggggctgaaaaccataaaagacactaggggtacagaaaggaataattaagacgccgccctttcatctctagtgcaccccccaaagccttccaaaggccatgcctgttgaaattcatccaccaaagccagtatttcttctgacattttggtttcatctgaattctccatctcatcagaaccattgctctcctcaaccaccgtactttcaagtctaagggcatctgagtccctccctgaattctcaacagagaatacagggtcctcctctgttcctctctcagagggctcttcttcagcagcatccagtgactgtgagttgtcaaaatatttctgtttgtcatggctgttgtccagggttttctcatgacaattaccactgcaaacagaagaagtgatgttgtacagaaaaggataaaactgcatacagcggatcaacttcaggctgttttcacactcaggacatttggtggttaatttcaaggcctgtctaaaggcctcaagtgccccactgatattcttcagagcaaggtaagcatttcccaggctcaaaaaggtcagaggctcagagctattgatggccaaagcttgaagtagcagcttagtggcatcaagatgaaggccgtaatgaatcaaaaggttggccaagttgacaagaggaacatcttggtattgaagtggagctaaattcaaagccctctgaagacaggcaatagcaaaagtgctatttcctactgctctccagtatagtccagcttcattgagtatgagccagataggagcatttggcttattaatagcatgaaataagaaagacccaatttcttcttctgggatagtatagttattaatacgggaaagcaaaatttttcgtgcatggtcatctggcattttggctttcagatccatgcgaacctctaattctttgactaagtaggacagagtgtggctttttctgaagtcagttatggaacagtcaggggtttgggcctcttcttctgtagaataatcatcactgctgagttcgtggatcctgagtcctttgttttccggaggcagaaaatacgttggcaattccccaccaacagggactctagggtagctttctgtacaatctgctcttttaggccatagaatatgctgtttgtccctatatgcatcagagtccctgccccaaatccagagaatagaatgggctacgggagaagacttgaccgaatcattgatatcactctgatttgattgaacatcaaagttcacagacatcatactggaggttgatgaatcctcaccaaactgaacatagtccacattttcaaagatatctccaccgatgatagcgtacagggtgg

SEQ ID NO: 85764 - DNA, 761 bp, Homo Sapiens
  misc_feature (182)..(215): n is a, c, g, or t
  misc_feature (631)..(693): n is a, c, g, or t
ggcagaattagttactctttcctctgtgcaattgttctatatcttcgctctagctcttttcctgttgtattgtaatgatttgtttatgtttaccttccttactagactgtgagctcaagagcaggccgtcttaattattcctttctgtacccctagtgtcttttatggttctcagccccttnnnnnnnnnnnnnnnnnnnnnnnnnnnnnnnnnnattattaaatgtaaaagaaaattaagattttttgtgaaaattatggcttatttaagttattaatttaaacagagttaatttgaaactcttccaaaactgttcctttctgttttgttaaaatctcaatctaaacccctgcctgtacctcaaacagttttctactgttcgtaaattcctataatataaaaagcgctatacagaactaaagttctccttcctgcctattccattataactcattcagaaaacccttcccagacaagacagttctgctcttttcttggggatttgatgtaagtaaagggcccacacccaaaaggtggtacttacgaaggatattaataaacagagctttaaatttttttgtagctttaaatagcttgttgattgggaacatacacgttagagtcaaacannnnnnnnnnnnnnnnnnnnnnnnnnnnnnnnnnnnnnnnnnnnnnnnnnnnnnnnnnnnnnngagtctcctgtttttctcatcttgagaaaatgaggggtttaaaaacctactttcacggcccaaaatgc

SEQ ID NO: 85765 - DNA, 566 bp, Homo Sapiens
ccaggaaagtgccatagacataatgtaactggatttcagcaaggcatttaacagagcctcttatgatatccttgtgaaccagatggagagatgtgggcttgaagccttcccattgcctacaggataaaattcaaacttcctagtgtggtgtacaagaccctttacagcccgcctctgtgtacccttcaacaccattctctgaaccaaccatgctcatgtttttacctcagtgcctttgcacatgctattccctctgcctggaatgccctgtgccccctctgccctctgccgtgctaaaatatcactcatccttaaacttcaaaatcaagtgccatctcttccttgttaccttcaggcagaattagttactctttcctctgtgcaattgttctatatcttcgctctagctcttttcctgttgtattgtaatgatttgtttatgtttaccttccttactagactgtgagctcaagagcaggccgtcttaattattcctttctgtacccctagtgtcttttatggttctcagccccttataacaggtgctcaataaaatttttcaaatg

SEQ ID NO: 85766 - DNA, 640 bp, Homo Sapiens
caagagcctcactcctgtctttagtgattgcactgaagcaggcctcatttttttgcagtcatgctaaccacaagttagtcaacattcactaattgacattcattagaataggtctccaaggtgaggcataacgttggggtgtaatctggatttcgcagtcatctttttggggaaactgaaagtaccatctcatttgcatgaagtgactccacactggccctgtatatggactctggtaaaatgtgagtgtggtacagaggaaataggtaagacccccttatctagccctctcggcagcagcgggggggtgttacaaaggactagctgttcaaatatcttttgtattgtattgattcccctattgaatataaatatttaaagtataataactatactgtaggtgggcttatgagtgttctaaatatctaatagctaaattgaaataagtagaaatataaacaatttagcagctttctgtaatacatttacactcaaattataagcagctaattctaaaaaagatgtcactgtaaactattgagaactatagtattttatatataattatatgttcatgtatttgaacccaaaataattttaactgaaatgctttgaataaagtatactgtaaatatcaaaa

SEQ ID NO: 85767 - DNA, 596 bp, Homo Sapiens
  misc_feature (23)..(23): n is a, c, g, or t
gttcctggatggctgggacccanccaggacctcctggtgggagatgtcatccgccaagccctgcccaacaggaacactaaggtcaaatacttcatcccaccctcaatgtacagggccacccactacccaccctatgctggtgggggaggatatgtcatgtccagagccacagtgcggcgcctccaggctatcatggaagatgctgaactcttccccattgatgatgtctttgtgggtatgtgcctgaggaggctggggctgagccctatgcaccatgctggcttcaagacatttggaatccggcggcccctggaccccttagacccctgcctgtatagggggctcctgctggttcaccgcctcagccccctcgagatgtggaccatgtgggcactggtgacagatgaggggctcaagtgtgcagctggccccataccccagcgctgaagggtgggttgggcaacagcctgagagtggactcagtgttgattctctatcgtgatgcgaaattgatgcctgctgctctacagaaaatgccaacttggttttttaactcctctcaccctgttagctctgattaaaaacactgcaaccca

SEQ ID NO: 85768 - DNA, 922 bp, Homo Sapiens
  misc_feature (672)..(730): n is a, c, g, or t
  misc_feature (796)..(855): n is a, c, g, or t
ttgaagtaaagataaaagtgttcagactgttcaagtttaactccagagactttgaagtctgctacccagaggagcctctcagggactggccggagatctccctgctgaccgagaacgaccgccactaccacattccagtcttttaagtccgctgggggccgaacagcagtgctcaccagtgacggtggtcacagttgcaataaagtctctctctgaaaccaaagctagcatttcagcatggaaggaattaggaccttttcttcaggattacaggtacactggatgcagccatgcattggatggtttttctttatttttcagtgatttcctctgaagcagctgcactgatacatttgggagttggtggcttgactttgtccataaggggcgtggccacttcacatgatggcgggcctttaagagcacaaagaagtttaatatggacaacaacaggaaaaagcaagaagaaaacaagtagggaaaaacagctaacctggagagaaagaatttctttaacctttatgttcttcattaaaaatcttatcttggactgatttgagggatttttagaaacatggccttattttatataagcattaccttcccaggaatctttgttgtatattaatttttgataaccatttgattaactttaaaattaaatatatgtgnnnnnnnnnnnnnnnnnnnnnnnnnnnnnnnnnnnnnnnnnnnnnnnnnnnnnnnnnnnatatatacacatagacatacagagaaccactactttgtaatagtgtacagtttgttttatatctcnnnnnnnnnnnnnnnnnnnnnnnnnnnnnnnnnnnnnnnnnnnnnnnnnnnnnnnnnnnnaattctgtagattaaagcaaatgacagttattgaactatcacaaaactattaaactgtggtacattt

SEQ ID NO: 85769 - DNA, 1130 bp, Homo Sapiens
  misc_feature (28)..(28): n is a, c, g, or t
  misc_feature (39)..(39): n is a, c, g, or t
aggttagacgtgtacggcagtatggtgnctgctggattngtcactggcacatccacaggggtcatgctacgggagtctccttgtccagagtcaccactgttaaaggtttcgttgtctctttctgggctgctcacctgagaagaatcactccaccctgctctcgaatttgctcgtggaccaccagatgtccctcctcgcttataacactgctggaaattatccctttgggaataaggtgctccagaatactctctagcttggaactccaactggctataatttccagttggaaattgaagggagtcctctataagtatcaaaacctttataaccaccaggggaccgataggaattggttattaatctcccaccacgagtacatcctctaacagatccccggctattgacaaatggctgagtaggtctgggaaacacattcgtctgtgctgggtaaaaggcaaggctaccattgcttacttgaatagttccatcaggatgataatttgctgcagtctcttgagaatggacagtttgttctacatgtatagatggcagttggcactggggtggtgtttgtgtacttgctgtggtaaaactttgattgtagccaggtgaataaggggattcttttatttcttgttcttttcgtggaggcagaggtgcattaacgttaaatactgtctgcatggcttgaaagggtgctgtgttaatggttactgaactactacttgctggaggtgactggaagccctgttcagagccctttgccatgggaggatttggagaagctagtgaagacggttgcttgcctgggggaattgctgcctgtaacggctcttgaagaaaatcactttgactggacagattttgttctttagatgctacggggctacctggagtagctgaaggcggttgtgacgttggaattgcacttgaaggtttgtcaaagtcaagaacagactcttgcataaagttacaagttccttgaatctgagtcatcagatcctgcagtttttctttcctcaatactggatccttcggaagggtagaggaagaacctaagcctgtgcatcagcctgtaggttcttcctctacctttcctcaatactggatccttcggaagggtagag

SEQ ID NO: 85770 - DNA, 710 bp, Homo Sapiens
aatgtaattcctctgtacagtaaattacaaatctttagggatttttttgtaataagagaatttatatttgtaatggtctaagaatttttttgtaatgtggtatatagaattttaatttggagcacttataagctggtaagagagactatagcatctgaattatcttggtttatgtttcagcatttcctcctagaatttttgctctcaaatatgtgatttaatgaactaaaaacaacactcatcagtcttgggaaatttgaactttgatcaactttaacctaaagaaggaagggtagtaagaatttttcaaatacaaatatttgccaattcacagatgataacatttaaggccttcaaaagtaagggtttttccttgtttctccagtcagcttttgtcaactctaatagttttttcataaacattttttatttgtataattgcaacagtttaagaaattatcacaactatttagaaacatttaaaatgttctttttgatataagctatatacttggaaaaatacattggtatctaaaatttgaggtgtgttaagactgctttttgttttaaaaaatggtttacattcaaatttttgaagtgttttatgcttcatatggctaagttgtagtttggcagagttaacagcataagaataaacatgctgtaattttaaaagatgctttgaataaaaatttattttaatttaaaaa

SEQ ID NO: 85771 - DNA, 482 bp, Homo Sapiens
ccataaaaataatttttgcttaaatagtaactcatggttctcttttattaaatggggttgttgtcagtatgttaaacattgaagtaggaggaggatgcatattgtactatgcattcaaatttatcactgttttttctgacagactttccctttgtcctttctagttatgacttgggaatggggtaacttctttatgcatagtattaagggttatagtatgaagaaatcataaaattgcaagttttggtttgcattactctaatgtgggttcatttaatctgagatcttaaatatcttgcagccttaaatcactacaaacatttgcatttttattatgccagttatttccaaaatgtattgttatacatgtcacttatgtttttaagctaatattgactgtaggataatctccttgttcccctcaaaatagtcatgaaagtgtacatgaaaatatttttaaagaataaatttctttaaattac

SEQ ID NO: 85772 - DNA, 781 bp, Homo Sapiens
  misc_feature (43)..(43): n is a, c, g, or t
  misc_feature (52)..(52): n is a, c, g, or t
  misc_feature (430)..(493): n is a, c, g, or t
caaaatctactgtactgtcagcttcactcccacctgagaaaanagaaaaaanaattgatagctcaaatgcatgtaattcataaacactgcaaaggagagccacttggtgtctgcagtcctcatattaacagtctgtcacagaatgcagttaaagtattgattggcatatggtaatagagcaaccatagccttaacttacagacctgtgaaataaagggcattttgacctaatacaattaattttctggataactcttaaagagaagtcattttaactgtttttgctactccatatattgtcattcaaaatatattttaacccaaaataagttaaataatttgtgcatgtttgtgtgtgtatatatgcacacacttttttatattaaaattttgaggctatacagccactgtgccctgtggaataaagccnnnnnnnnnnnnnnnnnnnnnnnnnnnnnnnnnnnnnnnnnnnnnnnnnnnnnnnnnnnnnnnntatgtgtgtgtgagtatatgtgtgcatgtttagcagatatttgtataaaatataaacactctgttgtcatataggctatatgcgaaattgttaattttaaaataacctcaggccacagacttgtagtaatcatttgaaggcctcacctagtgtccccttggtgacgtatgcagcagctcaaattaaacctttgtgcattgggttatgaataatcttttcttccaaagatggcaaaagcctcggtttgatttgatactaaagaataaatttctctgactttcccagtga

SEQ ID NO: 85773 - DNA, 145 bp, Homo Sapiens
gtgtgagccaccacgcccggcctattgctaagtcttttgaataatcatcatcgttttttcctcttagttataatagcttcatttacatattcacctggagatgttttctctttcaattcttatttttgtctttcagatacaaaaa

SEQ ID NO: 85774 - DNA, 1719 bp, Homo Sapiens
  misc_feature (1638)..(1654): n is a, c, g, or t
  misc_feature (1680)..(1680): n is a, c, g, or t
gattatcctataggcagacgtggggagggtggaggggtgacagtggaggaaaatccatggatatccacgcagcagcccctctttaacctcatctacaagcatttgccctgtggattccagcatttgccattcctggaatcaaggaatcctgagtctgggcaatgaaaccaaagccaggagttgacgcatcctgcagttgggccagctgtcgcatctcagcggggcgcacatgttatccacaagcaatggacctttggggaagggggagtttttagtttgttttacaaatttttcctgcaaaagtggaatcactgtattttcattttaatttatatttgaaattttatttagttcttgagtagatctgcttcttcatcttgacatgtaatgaatggtcagttgtacgtaatgtatttatatgttaatttgttatgtatatagatgtgcaagtcttgtcagaattggcctcagtgtagttaaagggcagaaggggaagatactgactagtcatagaaatacctcattcgcctgtgggaagagaagggaagcctcttcagggtggagtgaatgggcaaagcggttgcttctggctcctccttcccctgtggtcttggaagtgtgtggaaggcagggacagagatggaggccgagccaatagactgaagagaccacagcaattggctcctccatctagagattttcttggcagtattccatgggatgttaagcaaaggaaaccaaaggaatcgtttcaaatggactcatggcttagaaatctttattcttagggcagtcagtagtattctaaagctttctgacaagataaaggaagtcaccaaaatttctttttttaaattgtatctaatcctcaacaacaaaccaaaacagaacaattaaacagccaaataaaacctcagggacaacatttttggtgtatttgagccctcccagcaagtttcaccttggagtttgtattttaaatgttgttacaagaattgtccatgtgctttccctaggctgagctggcattggtctgctgacctgttttggtggtttgcctttttttatacacaacatttatttcaaactattgggagggatgagagtggcttaaaaacttccatccctacttttcaagagtgcagttgattctgaatctgaaagcccgcctctgtcctaaaatacaaacaagcacagacattaaacctggatactatatgataaagagggatgtaactattgaattggatacaaggatcagaatggaaagaaactcacgatgaaattgaacctggtttttgtatatttatcaaacttgtgctgagaatagtgtctgattatacgacttttaagcaaagttgggtgtaattaggtgaaaacagcccaggtcctcccgggagcacagaggggctaggggctggtccttctcgtttgctctagtcttgctttgctgtctggtgtagctcctctgctgctcccatctgcactaattgacccaaaacgtgggtatttcctgctacacaaaagccaaaaggtttcatgtagattttagttcactaaagggtgcccacaaaatagagattaattttaacttaaattttaagcttgaagattaggtactatctgtgaagttacacnnnnnnnnnnnnnnnnnacaggtagagatgtgtgtgtgtgtangtattaaagatgtgttgttggtttcaaaaaggaacactg

SEQ ID NO: 85775 - DNA, 402 bp, Homo Sapiens
aaaattaaatttgagggttgaatacagttacttaatgaccatgttatattgcttcctgtgtaacatctgccatttatttcctcagctgtacaaatcctctgttttctctctgttacacactaacatcaatggctttgtacttgtgatgagagataaccttgccctagttgtgggcaacacatgcagaataatcctgttttacagctgcctttcgtgatcttattgcttgcttttttccagattcagggagaatgttgttgtctatttgtctcttacatctccttgatcatgtcttcattttttaatgtgctctgtacctgtcaaaaattttgaatgtacaccacatgctattgtctgaacttgagtataagataaaataaaattttattttaaattttaaaa

SEQ ID NO: 85776 - DNA, 763 bp, Homo Sapiens
ggtaccggtccggaattcctgcgatatcgtcgacccacgcgtccggattgcagccatccacatttcagaaactttggaacaaaaacctcattttgagtcctcaacggtgaagacggaaaccatcagttttggcagtgtttcaccgggaggagtaaagctagaaatttccacgaaggaagtgccagtagttcacaccgaaaccaaaaccatcacatatgaatcatcacaggtcgatccaggcacagatctggagccaggcgtgctgatgagtgcacagacgatcacatctgaaaccaccagtaccaccaccactacgcacatcaccaaaactgtgaaagggggcatttcagagacaagaattgagaagcgaatagtcatcacgggggatgcagacattgaccatgaccaggaataacttagcttgcacatgaatgcagtcatgcaaaccgttaggaaaaccagagcctatatggagttccctcttctaacccaactgacttgtatctgtccgtggaaaatttcagtccagaagaattgaccttgaccattaataaagacactggcagagagatcttcccataataaagcaatctgattcagcatcactaaaccgataatgcatgaagccaaccgataaaaattacaaaagagcagcatttttaattttcacaaaatgtctcagttttcagctatacctgcacgttcataaccaacaatataaaccgtggtctcatgtaacacataaacaattcatgcctttaaa

SEQ ID NO: 85777 - DNA, 1386 bp, Homo Sapiens
ggcacagatctggagccaggcgtgctgatgagtgcacagacgatcacatctgaaaccaccagtaccaccaccactacgcacatcaccaaaactgtgaaagggggcatttcagagacaagaattgagaagcgaatagtcatcacgggggatgcagacattgaccatgaccaggcgctggctcaggcaattaaagaggccaaagagcagcaccctgacatgtcagtgaccaaagtagtggtccataaagagacagagatcacaccagaagatggagaggattgaccagaggaataacttagcttgcacatgaatgcagtcatgcaaaccgttaggaaaaccagagcctatatggagttccctcttctaacccaactgacttgtatctgtccgtggaaaatttcagtccagaagaattgaccttgaccattaataaagacactggcagagagatcttcccataataaagcaatctgattcagcatcactaaaccgataatgcatgaagcaacgataaaattacaaaagagcagcatttttaattttcacaaaatgtctcagttttcagctatacctgcacgttcataaccaacaatataaaccgtggtctcatgtaacacataaacaattcatgcctttcatagtttattattattaaagtctaaacaaaattgcaatttcttaggtaaccttatatttacaataaatgaagattaccctcaaatgctagaagctgtctaggtccgtccggtgtgtcagattttcctcagattagatgtgccaataaccaagtttattcagtaaacaacttgtacttgtttcatctggttttattactctcacccataaacagtaatgactctctgaccctctggaaatatgtaatgcttccaatcttgctttgtgtatctcatttaatttgttataaggtagtactgattttagcatattaatgcgatttcttccttgttgtttgctttggtctgtgttcaatccagagagcttaaattgtcattattttgggaagaaaacctgtatttttgttagtttacaatattatgaaatttcacttcaggagaaactgctgggcttcctgtggctttgttttcttagttactttttccgtgccgtgtattttttaattgatttttcttcttttacttgaaaagaaagtgttttattttcaaatctggtccatatttacattctagttcagagccaagccttaaactgtacagaatttccactgtaattaaaactatttagtgttagttataaatagccttcaaaaagagagattctccattacacgatcacctgcatcacagcccatggtgaatgtatgtttctgcatagcgaaataaaaatggcaaatgcactgaaaaaaaa

SEQ ID NO: 85778 - DNA, 1343 bp, Homo Sapiens
ggagaaggcagcgcgttgtaccgagattcaggtctggctctgcttcccaggctagagtgcatttggcgcgatcacagctcactgcagcctcgatctcctgagctcaagcgaacttcctgcctcagcctcctgagcttcctgagtagctgcgactacagcttaccgatgtccttatgaatgaaattctccatggagctgatggaaccagtatcaagtgtggcattattgggagaaattggttgctcctggcctttgactgagagtgaaagaaaggttctccaggccacagctcatgcccaggctcagcttggttgtcctgttattatccatcctggacggagctccagggcaccatttcagattatccgaatattgcaagaagcaggcgcagacatctccaaaacagtcatgtcacacctggataggactattcttgataagaaagagctcttggagtttgctcagcttggctgctacttggaatatgatctctttggtactgaactacttcattaccaactcggcccagatattgacatgcctgatgataacaaaagaattagaagggtgcgtctcctggtggaagagggctgtgaagatcgaattctggtagcacatgacatacatacgaaacacccggctgattgaaatatggaggtcacggctattctcatatactcaccaatgttgttcctaaaatgttgctgagaggcataactgagaatgtgcttgataagattctaatagagaaccctaagcaatggctaactttcaaataggatggttgcttatgaattcacaccttgagtataaaacttgcagagaacattcagcgatttccagtccactgtgagatattaatcagttacctaggactaatgacagatcatttcccttctgatgagaactaagagggtttgccttctctgagaccagctattacaactgtgcctctagggagttactcagccctaattgagccctattattttaacttaacaaaataaatacagaagtacctatttctaaacaatgatttaaagtctataatcccctaagcggagttggttggtttttctccctaatctatcagctgcactacttgagaaaatttaaagtgtttctagttaaattatttccttcttgagcgatctaatgtttcttgtaatattgatgatcctactaattatcctgctgttctttaattaatgcttaatgaataatatggcactgtaaaatagcttcttcaacaagggaagttaaattttgagacttttttccccaaaggatactgactgtaatacaattaccaattcacaatgataaaaatattttgaaaggtt

SEQ ID NO: 85779 - DNA, 1010 bp, Homo Sapiens
  misc_feature (677)..(677): n is a, c, g, or t
gggaagttcccagggagaaggcagcgcgttttacccgagattcagggtctggctctgcttcccaggctagagtgcatttggcgcgatcacagctcactgcagcctcgacctcctgagctcaagcgaacttcctgcctcagcctcctgagcttcctgagtagctgcgactacagaaaaaagaaatcctctttttagaacatctcttggtggtaccatcagaaatgtcttccttaagtggaaaagtccaaaccgttttgggccttgtagagccaagcaaactgggccgtaccctgacccatgaacacctggccatgacctttgactgctgttactgtccacctcccccgtgccaggaagctatttccaaagaacctatcgtgatgaaaaatttatattggattcagaaaaacgcctattcccataaagaaaaccttcaattaaatcaggagacagaagccataaaggaagaactgttgtattttaaagctaatggtggaggggctttggtggaaaacacaaccactgggattagccgagacacacagacgttgaagaggcttgcagaagagactggcgtccatatcatatctggagccgggttttatgtggatgcaactcactcctcagagaccagggccatgtcagtggagcagcttaccgatgtccttatgaatganattctccatggagctgatgggaaccagtatcaagtgtggcattattggagaaattggttgctcctggcctttgactgagagtgaaagaaaggttctcccaggccacagctcatgcccaggctcaacttggttggcctgttattatccatccctggacggagctccagggcacccatttccgattaatccgattattgcaagaaggagggggcagaacatcttccaaaacagtcattgtcccccctgggatagggactattccttgaataagaaaaaaacctcttgggagatttgcctcacccttgggcctgctacctttgaaataaggatctt

SEQ ID NO: 85780 - DNA, 404 bp, Homo Sapiens
gggtgactctagcaggatctccacctgttcccaaacaccatagtgactctgagaacaagagcagcttcaaccttggaaccatagaaaccaagagtgcttcagtggctcctttcacatgttagacatcagaagctaaaaaagaagaaatgcctgccaacaaaggaggattctcttttggcaacgtggagcctgcctctctggcatctggctcagtgtttgttttgggaaggacagaagagaaacagcaagagcctgtcacttctacttccctagtttttgggaagaaagctgacaatggagagccaaagtgtcaaccagtgttttcccttgggaattcagagcaaaccaaagatgagaattcttcaaagtccacatttagttttagtatgacaaaaccatctgag

SEQ ID NO: 85781 - DNA, 822 bp, Homo Sapiens
gggcgacgccccgcgtgcgccagagtcgccgaggtcgtccccggcaccggaagtgaccctggcgggtttgtcttcaatattctcgtgcgagcagtgagccgcgccggcaggtggtgttgacgattgaactgggcagtactggggccgtgagcggagagcaaagtgggctggactgggtcaggccctccttcctcgctgccgggatctccactccgccaatcccctgtgcctggcgttgggcggtttcccgaggagcttgggccgccgcagcttacagttgaacatgagtcttcttatgattagtgagaatgtaaaattggctcgtgaatatgcattgctgggaaactatgactctgcgatggtctattatcagggagttcttgaccaaatgaacaagtatctgtactcagtcaaagatacatacctccagcagaaatggcaacaggtttggcaggaaataaatgtggaagctaaacatgttaaagatatcatgaaaacactagagagctttaaactagacagcactcccttgaaagcggcacagcatgaccttccagcttctgagggagaagtctggtccatgcctgtacctgttgaacgaagaccctcaccaggacctagaaaacgccaatcttctcagtacagtgaccctaaatcacatggtaatcgtccaagtacaactgtcagagttcaccgttcatctgcacagaatgttcacaatgacagaggggaaagctgttcgtagtcggtgaaccagaacagaacagaattaaagcgacgagagggaccaagaacaaatcacctgcttgcagtaccagaaac

SEQ ID NO: 85782 - DNA, 877 bp, Homo Sapiens
ttggaggcttccctgcggatgctttcactctcagcaactttgccaccagcagccacaacagatcaggacaagagcgaagccacaagggggagctctctcccaaaggccttgtcgccccagacctaactcgctccccctcaacctgcctgaggaagaaactctcaggattgcacggatattttcttctcagtactcccagaaagactgacgcagcctgaggggctggggggaaggagacacctgcccaccctccgtcagctttgtccagcttgcaggaggcaccaggtctggctccttcagggctgtcacagtcctgaaaccaccacttgcctaggccacggatgcctcaagagacccggtcagcccagactggaggagtgccccaaaccagtccagtgtccacttgccagaatttcagctccttttttctgtggtgaggcaaaggctagaaataaaatggaatccgcgcccaagtgggacccaagcaggcatctttcggtggagaaacgccccccagtgtccttgacacagctgactgctggcatgagcccaccctctgcctgaagatgcaggaccatttttgccttaaaagttggggaggagggacatgtagattgtgtgcattgtgcatagtcaaggaaatcctagggccacctccagttcatttgtgtgggaacaaggatattttatagatacaaattatttttatgctgtgttgaattaatcaattaggagaggaaggggaaatcacttccttcaaactttttatctgattgtctaaaattctaaccatgcttttaacttattatttttacccagctctgaaggtcattgttcttgcctgtgtttgaataaaatcatattggtgtttgtaaaa

SEQ ID NO: 85783 - DNA, 971 bp, Homo Sapiens
  misc_feature (65)..(65): n is a, c, g, or t
  misc_feature (129)..(129): n is a, c, g, or t
  misc_feature (216)..(216): n is a, c, g, or t
  misc_feature (272)..(272): n is a, c, g, or t
acaaccacgtgtccaagcagatgggtttttaggctttctttcaaacctgggccttgttgccatgnctgtaaagggagtaattccagaaagagtaacttccttacagaacttcctctttttaagcattgnaaaagggaggaaataaacatctaaagtaatcggactattctttggttgaagttactcctgaatatatcatctggagaagatgggcancaaatgattctgaggcttgatggctgtctagacttactaacagagatgagcaaatncaagcccaagagcagccctttattgcctcttcttatctttcataatgtttgcttcagtcctgcaaataaacccaagatcctggctaatgaaaaagtcattactgtgcttgctgcctgtctggaaagtgagaatcaaaatgctcagaggattggagcagctgccctttgggctctgatttacaattatcagaaggcaaaaacagctttgaaaagcccatcagtaaaaagaagagtggatgaagcatactccttagcaaagaaaactttcccaaactcagaagcaaaccctctaaatgcctattatttgaaatgtcttgaaaacctcgtgcagctccttaattcttcctgagtgccatgggatgctacaccttgaagctgacagtcatcaacaggggagctaaagttgaagccagctgtgtgtagcagctgttacctgaagacgtgctacctctctacaaagtgttgatccccttctttcccatgagagagagaactggtgatactccaacaccgtccagttgtggcagctctccagaagtaatagcagctgacaactttctgtgccttttcctttctgttgaaaaggcatagaaagttctgggaacataaacatttttacccttttctatgccatttattttgtaaaaatcctatttaacagttatttaataaaacaatatttttagaaactaaaaaaaa

SEQ ID NO: 85784 - DNA, 555 bp, Homo Sapiens
  misc_feature (365)..(365): n is a, c, g, or t
gccaagccgaccagacgcagctggggatgagcccaagttcccagctgttggctctttaggccatggctgggagggggtctctggctggctggcaaagcggctccagtgagcagatgaaccagggttctgggcagcctgtctgggaagggagccaggatcaagaagcagttgaggctagaggagcttatcaaaggcaggagctaccagcgagggtgtcagggacccgttgggagcatttgggtgggggccagtggggttgtagagagctggaactcacctgcttttaatacatgtgacttctagtgagacacatgcacccctgacccaaggaacatgcggggaaaagaagagccactggctccttntgcgatgttatttattttctcgctctgcaaatgtttattgaacatttctgagattttaagagattttgttggctgctccttcttgtttattgcatgtggtttttcagctcatcgttttttactaaaccggtcaagttgctggagagtgggaacgacctcatggcgtgtggacagaaggggccacctctac

SEQ ID NO: 85785 - DNA, 393 bp, Homo Sapiens
agacacttgcgcctggccagcattttcttatataatgcaatcagccaaacatcacttctcctaagcccaggtggattccttgcccttagcacagtcttccacagtctgtttcgctcttcaaattttgtttctgcctcccataaaagattgctaaaagcccataaaccccttcacatatttcaaagataacatctcatttcttatacatttaaaatgttacaaaggataagattcccagggacattaagtgttgacattttaaaataaaatagtcaaaaattcctttaaatatagccaaaggaatttaaacaccacagcaatctgcactcaccattaccattcaaacaacagtctctgtcatgtatttcaaattgtttttttccttgaacttat

SEQ ID NO: 85786 - DNA, 429 bp, Homo Sapiens
  misc_feature (20)..(20): n is a, c, g, or t
  misc_feature (41)..(41): n is a, c, g, or t
  misc_feature (65)..(65): n is a, c, g, or t
  misc_feature (260)..(260): n is a, c, g, or t
gattagtccagattcatggngccaaagtagaatggtggttnctagacccctggaagggagggganaaaggggagttattaatggggtgtagagtttctgttaccccaggatgccaaagtggcctgaagatggatggtcgtgatggttgcacagcaatgtgaatttaatgacactgaagtgtacacttaaaagtcattaaaatgctaaattttgtatgtgttttacaattttaaaaatggaaaaaaagtaagaccaaaagncaacacctctccaggaatgtgtgttatataccaaattttgacgtatgtgagattgctgactatattttacttatcaatttgaaattatattgtttttatgttgacactccatataagccattattttgaaaaaaacattttccttattaaaagattggaaaaaaattca

SEQ ID NO: 85787 - DNA, 908 bp, Homo Sapiens
tggccttgtatcccaaggactaaaagattagcacagacacgttttgatgttgaatgaactagtaagtcacagtaggtggtagtcttcattgatttctctgtaagtttttaaagaatgtatgaagatagtcacgaatgtactgagtgttcgcatcccccttcagttcaccttggctgtgtctacaggacaacaaatgtttgacagggaataaagtcgtgtctggtgtcatttgcgctacgtgcccctcccctttcggtgttggctccaaaccttcctttccttttatgtttgtggggagtggggaaccacatcagcagcaatcatcaaccaaccaaccaatgggatctacttagtggtgaatagattggctatttaattggtaaaagttgctggtctgaccacaccacagcatgaccactgggttcatttagagatggcctccgtttccaacgttccccacaaatgtttgcttctttcccagtcaagaggggatctcgagactcccgagtggaggtcgtgagcttgcaccccgcctggctgtgtagatcgactgtatagatacatgaagtgggggtgagggccaaggggctattactgctgttgggaaatacttgcctctcgtagatccagccttaatgtttttctgacatcctagtaatagcagaccctgcacaaagtggatatcagacttaatactgtgaggagacaaaataatgagaatagttttaccaaagataatgaaatctcgcatcatgtctgcattttaccatagattggagtgcatccttaggaaactgaatgtaacaaaaacccaggacatttttggaaattgtatgctctctagcaactttgtgtgaatttttatacaaacactgttttatgagttatataaaatgttataaaaatag

SEQ ID NO: 85788 - DNA, 352 bp, Homo Sapiens
tttggaaaactgatccacttctaagttcagtttgactacgtaacaagctagcatgagtgactccattctggtttggtctgatctgttggggcccagcgcaggagctcagtccaaaccaatggcatccccataagttttacttaacagaactaaaagccaagggatatacaggcttcaggtatatctggaatcaggggctcaaatgatgttatcaggaccactgctctcctgatgtctctgtttttcctgcctctgttctggctttattctgaggcttactttcattttatggggaggaagattgtgaccagtagtggcaggtttatgaccttatagctccaggcagaaaaaa

SEQ ID NO: 85789 - DNA, 202 bp, Homo Sapiens
  misc_feature (129)..(129): n is a, c, g, or t
tggcaacctctgagtctggcattcttgccaatggctggccagcgaggagaatctcccgagccctgacacacaaaggcattttgtggctgcagaggaaatgggttggctctgaacaaagatgcagtttcntagggccgtggccacaaatcgcttccccgagagtgaattttaacactgtaacaataaatactactgcacagca

SEQ ID NO: 85790 - DNA, 708 bp, Homo Sapiens
  misc_feature (611)..(644): n is a, c, g, or t
cttcaatgactccaatatttgcttggtgtcctgggaagacatccagtgtacctacggaaatcctaactaccactggcaggaaactgcatatcttctggtttacatgaagatggagtgctaatggaaatgcccaaaaccttcagagattgacacgctgtcattttccatttccgttcctggatctacggagtcttctaagagattttgcaatgaggagaagcattgttttcaaactatataactgagccttatttataattagggatattatcaaaatatgtaaccatgaggcccctcaggtcctgatcagtcagaatggatgctttcaccagcagacccggccatgtggctgctcggtcctgggtgctcgctgctgtgcaagacattagccctttagttatgagcctgtgggaacttcaggggttcccagtggggagagcagtggcagtgggaggcatctgggggccaaaggtcagtggcagggggtatttcagtattatacaactgctgtgaccagacttgtatactggctgaatatcagtgctgtttgtaatttttcactttgagaaccaacattaattccatatgaatcaagtgttttgtaactgctnnnnnnnnnnnnnnnnnnnnnnnnnnnnnnnnnncttctccataagatagtgtggtaaacacagtcatgaataaagttattttcccacaaataaaaaa

SEQ ID NO: 85791 - DNA, 913 bp, Homo Sapiens
tgaatcgtgaatctaaaagtgcttctagcagaggagagctgcaccagacactggggcgatcacggctctggacaaaccaagaccttggtatgataggaaaactcctctcagatgactgaataattatctctgtcatataaaacttggtggtttctgatgacacggtctctcccaacattaccttgcaacggcttacaaattactttggtatttgcctttggttccaatgttacaatggttgtcagaagaaacacagcacatctgccactggggatagttcaggtctttgctgccacaaactggttcttaaattcaccaagaagaaagagtctccaataaaacagtcattctcttgcggatgaagtgatttattagcaaaggggtcaggatgacaacaccattctccaactagagctccccagttctcactcggcagtgggagcaccctgaggagcttcctgtcttttattatgacttcaccgcaggattggcaataaaacgtgcaacattcttgggtttgcgagctttgattaaacattgaaatcagttttgtgcctaattttgcttgcgtctgcagtcgcaggtgcagtccatctccaacaacaaactgtagcccacggcaagaggaaggtacaagcctgacctctgctggaagctggatttctgtgcagccttcaggggttttcatctggagtgaagatggcattatggaaatattcatgggcatacctccttctttcggttctcccaggatcagaagcgcgctctgcagctgtccccgcacctccagaaacacgcgcgtctccgccgcagaagccgccatggcaggcttccagtcccagaccggaccaagctggaggttccgaggggcccgggtcaacaggaccaggagaggttccacgtgcggaccaac

SEQ ID NO: 85792 - DNA, 1451 bp, Homo Sapiens
  misc_feature (61)..(75): n is a, c, g, or t
  misc_feature (910)..(1024): n is a, c, g, or t
cgtcctcggggagaacaacaaggttaggggcccaagtgtctcactttccctttgggggggnnnnnnnnnnnnnnnaaaacgaaaatgggttttgaaaaagctttttgagaagggcccgaagaggcggcccgaccaaagtgtgtattttagcgcggcacgataaaatgtggggggccataaggtttaaaattgttaatgctccaagaaaaacaaaccctaaagttaaaattgggatagcgaatactgctgggcataaggaaaatattacgcaaattggaattcaaaagggggttattatgtgaacctgggatgtaagagtacatcctaacaacctgttgttgaagccttttaataaagtaacagattttaaatcagatagatataaaaagactgaagaaaaacagtaacttttccttaagttctcttatccataaagaatgacaaactccatatggacagtaaagttagaggtcatccaatttaccaaggcattttgaacacataaaccttaaatacctactttaagcccaaacaaggtaaaaataatcggcatttcattgtgctccgaagtttaattttacatatcatgttaacaaattatagaaaataaaataaaagcattttccatttttttgaaagtacacatcattactttctcccaggtactttccagtaatttaagcttaaatactcggttttagtgaaacattaaacacaaaaaagaattgtacaaaatctttgcactgttattaagaagagatggaaagttctcccaacttcagcaatgttaagagctgtttttaaattgtgaaaatgaatagaaacactagctctttaggagaatttcaaatacatctgaagaaactaattgtctttcggatattgtttattcaaacaaacttttcgctgnnnnnnnnnnnnnnnnnnnnnnnnnnnnnnnnnnnnnnnnnnnnnnnnnnnnnnnnnnnnnnnnnnnnnnnnnnnnnnnnnnnnnnnnnnnnnnnnnnnnnnnnnnnnnnnnnnnctggcctcaaataaacaattcttgggctaattctggaattggtgtcagatgcctgtggggatacttttattcctgatcacatttaacacaaaacttagtgtttatatactgtaaacaacataaattacatattgtaaaatctactaggattcataaattgcctacaattccatttactttttgctttcttttaagttctaaaagttactgataaagaagtgttacttggttttataagggaatacttgatgataaaattcttcctgtctgaaaagatgcactaaatatttctgatcactaaaaagtaaagcttctatcacctcttgaacattgacttcactttccaaagatgtatatatcatctctctcaatgcccaagtcaatagtcgagttaaaccaagtatttggtgactgtctctttaaagaa

SEQ ID NO: 85793 - DNA, 520 bp, Homo Sapiens
caaatttttttctgatttgcgttctggagatcctgcatacagactcagttgtggttcacaaattgcgttccaataaaaatgaagaaagcgcagagttttaaaaaacaaatatttttagcataaactattgaaagggaagcactggggggacctcagcttcatttatcagtctttcatctactccttgcagcaagagctcataccctttccctatgtgttttttgtttattcatttattcatgtatttgttttttctgcagcttttaaaatattaagggttgtttgtaagataaggttgttaccaacttgggtggaggtaggagtacggttgctctttgtaaaatggcaaatgtacatgcaggcaacctttttaaatcaaattataatttatttagaagtacgacatgtcagcattatccgcatttgcaaaatggcctccctctctacttatatacttattcagaaaacacattcagaatgtgccaattggtcttttttgatatttttcgcaagcacagag

SEQ ID NO: 85794 - DNA, 568 bp, Homo Sapiens
  misc_feature (155)..(195): n is a, c, g, or t
agaggaggggcactgggtggggagggaggtggaggagccgtgcaatcccaaccaggatgtctagcacccccatccccttggcccttcctcatgcttatgaagtggacatattcagccttggcgagaagctccgttgcacgggtttccccttgagnnnnnnnnnnnnnnnnnnnnnnnnnnnnnnnnnnnnnnnnnggacatggctcccgtgcactagcttgttacagctgccacatgtccccacatgtgggggcaccttctccagtaggattcggaaaagattgtacatatgggaggagggggcagattcctggccctccctccccagacttgaaggtggggggtaggttggttgttcagagtcttcccaataaagatgagtttttgagcctccggggtttcgtctgttctgggcttgggaaacgccctagtcccttagtagcaaagaaagcctccaggctgggggctcaggcctgtcatcaccagcactttgggagccaccccacagagagagcgcaccccacagagagagcgtcccccacagagagaacgtcgggccagctcatca

SEQ ID NO: 85795 - DNA, 716 bp, Homo Sapiens
  misc_feature (586)..(605): n is a, c, g, or t
  misc_feature (609)..(610): n is a, c, g, or t
  misc_feature (616)..(616): n is a, c, g, or t
  misc_feature (618)..(618): n is a, c, g, or t
  misc_feature (624)..(639): n is a, c, g, or t
atgaagatgggcaagaatatttggagattctggctaagcaggctggtgaagatggagatgatgaagattgggaagaagatgatgctgaagagactgctctggaaggctattccacaatcattgatgatgaagataacccctgttgatgagtatcagatatttaaagctatctttcaaacctattcaaaatcgtaatcctgtgtggtatcaggcactgacctcacggtcttaatgaagaacaaagaaaacagttacaggacatagcaactctggctgatcaaagaagagcagcccatgaatccaaaatgattggagaagcatggaggatacaaattcagtgctcccagttgtgccaagttctttcaattttggaggcccagcaccaggggatgaattgagttatctctttctttcctgctgtgtgcttgtagtgaagagcttgtgttcctcctagtagtggttccagaactggttcatgttatctattctaaactaataatcaatagatggacaaaagaaacaacaaccccaggagatgggacctgatcatgcaacctggcactggaaaagaaatcagcgggatttnnnnnnnnnnnnnnnnnnnnaagnnccttananggaggnnnnnnnnnnnnnnnnggaagaaagaatgatgctgcccctggagcttccaaggggccttggggcaatctgcaaccaggggatgttcctgtagg

SEQ ID NO: 85796 - DNA, 1403 bp, Homo Sapiens
  misc_feature (1256)..(1319): n is a, c, g, or t
tcttcggctaggtacgaggctgggttgaaatcggcacgaggcccaaactgaagatgtgagaacaaatgacccctgagcttctgctactgcaggaaagacaaagagcctctgagtggcccaaggatcgtgtcctgataaaccgtattgacctcgtctgccaggctgtactctcagggaagtggccttctagccgtaggagccaggaaatggtaacaggaggaattttggggccaggcaaccacttgctagacagtccctcattgactcctggagaatatggtgactctccagtccccacaccacgaagtagtagtgcagcttccatggcagaggaggaagcatctgcagtcagcacagcggcagcccagttcaccaaacttcgccgaggcatggatgaaaaggagtttacagttcaaatcaaagatgaggaaggattgaagttaacattccagaagcacaagttgatggcgaatggagtaatgggagatggacatccactgtttcataagaagaaggggaacagaaagaagctagtagagctggaggtggagtgcatggaagagcctaatcaccttgatgtggacctggagacccggatccctgtcatcaataaggtggatggtactttgctggtgggtgaggatgcccctcgccgggctgaactggagatgtggttacagggtcatccagagtttgctgttgatccccgatttctagcgtatatggaggatcgcagaaaacagaagtggcaaagatgtaaaaaaaataataaggcagaattgaactgtttgggaatggaaccagtacagacagctaactctagaaatgggaaaaagggtcatcacactgaaacggtgttcaaccgggttttgccagggcctattgcaccagagagcagcaagaagcgggcccgtaagatgcgaccagacctttctaagatgatggccctcatgcagggtggaagcactgggtctctatctctgcataacacgttccaacacagcaagtagttggcctacagtcctgtgtcatctttgggtcacagcagtgccacttctgcatcttggcttttatgccatttgtgatagggtggtgcaccatcatcccctcatgtagaatccaagcaccaagggttcattcaaccaaacaggaaggagcacgacacaagcatagacgagcaacgacatacagggcagagaggcccgggttaacccctcttcaacagggataacggtgtggaaaaccttggaggtgcnnnnnnnnnnnnnnnnnnnnnnnnnnnnnnnnnnnnnnnnnnnnnnnnnnnnnnnnnnnnnnnngccgagcaggaagacaaaggagaaaaacaggaccggagaggccaaggcagacggggcagaaaacggcaagacgcgcgggggaaa

SEQ ID NO: 85797 - DNA, 1198 bp, Homo Sapiens
tagtagaggccgccggtgtaatcggcacgagggcagccgcctactcgtccatcctgagctcgctgggcgagaacccccagcggcaagggctgctcaagacgccctggagggcggcctcggccatgcagttcttcaccaagggctaccaggagaccatctcagatgtcctaaacgatgctatatttgatgaagatcatgatgagatggtgattgtgaaggacatagacatgttttccatgtgtgagcatcacttggttccatttgttggaaaggtccatattggttatcttcctaacaagcaagtccttggcctcagcaaacttgcgaggattgtagaaatctatagtagaagactacaagttcaggagcgccttacaaaacaaattgctgtagcaatcacggaagccttgcggcctgctggagtcggggtagtggttgaagcaacacacatgtgtatggtaatgcgaggtgtacagaaaatgaacagcaaaactgtgaccagcacaatgttgggtgtgttccgggaggatccaaagactcgggaagagttcctgactctcattaggagctgagcttcattcagtgtgtgtgcgttggttgccgatcgtactgccagtagcattgtctgtctgtccggtcttgttcgtacattccattttcaattgttacagatgtgaactttattccttgtcactaatttatatttaacaattatttctaaggaagtcaaataaatataataaagggttgagccctctaattttcttcttgccacctttttgttggcaatattaaagtgaactgctaattaatggtaagtattgtgcacagaaacagtgggagataacagaggggccctgggaacggggagcaagaaataggggaaacgtacacaataggcccacggaaatggcgccatgaagctagacgctgtggacgagagagcgacacggtgccccgaaaaagcaggtggcgctacgccaaataaagagggagtgcgcgacaggggcaaaaataaagcggagagcccggacaaccaggtcacggaaccagggcagtcgatttatcccgcagcgcagacatattcagacgcaaggacaacgaacgagagagacatatgagacacgaacagaacagcacaagctcgagcaaaccaggaggcgcaggactgcagcaagccacggaagtaacaatgaga

SEQ ID NO: 85798 - DNA, 562 bp, Homo Sapiens
cacagggctgaaatccctaatgttgaagcttcctgaccaggaaaacgagcagagggcccagagagcttagccattacagaatggcttggttcgtcacttggcctggctcagccctgctttgggatgtgttgatagtgcctttcttggactaaaatccttgctctctgcctgtcgtgctccatgtcacttcagaatgccagagccagaaaaggcctcagagctcggaggccttgtgctgtggctttgtctttctgcttgcacctgtcacggctcgcttcagggaacagcgcagacccgcatgctcagctctcagtccggctccctgctacccctgtgaccaggagcaccttcatgtctgctcgccctgtgatttggagagtgtgtttgatgcgcttggcttctgctgatggcctatcctcccagttctggccagaggcagatgcggtgggggcctcttctccactgcccccctgcctgcacctccagcaggtggcccagtcctatatttccattgctttgctctttcttgctttaaaataaacaacaaaggcaacagactcta

SEQ ID NO: 85799 - DNA, 477 bp, Homo Sapiens
ccctgctgatttttcccaagtaaagtgctttagtccacacaaagcctgatctttaatccatgcctagaattggcaaatgatgccaggaaagaaaacagttggtagtctcagctatgtagaaaagacaaagacttttagtacatctagtcttaagcgcttccacagctctttcgtatctgtaatgtattttgcatttgatccattttttcctagttactgcacctgggagcgactgccagtactaccacatcatttcggtagtggaggtccccattgaaggtttttttcatagcacatagcatgatcacgtctaggaagatcgttctggctgtagatagtataattatctactaatacaaagggggaaaggacgtgagatgatgtgaaaggaagttttgcatcatttacttgaaagatactgttcttctgaatttaatcacattggggattggaaaaagtagatgaataaaaattaaa

SEQ ID NO: 85800 - DNA, 2086 bp, Homo Sapiens
  misc_feature (253)..(279): n is a, c, g, or t
  misc_feature (347)..(394): n is a, c, g, or t
  misc_feature (462)..(599): n is a, c, g, or t
  misc_feature (620)..(633): n is a, c, g, or t
  misc_feature (1975)..(2009): n is a, c, g, or t
aaacggtttccccctggggggggattttttccggggctcccttttttaacccgtgccccaaaatagacaattttccaccggccccccgggttttttccttgcccccgggagattataggggctaagaccgccccggggtggggaagggcttccccactttttccccgggatatattttaaaaccctttttcggccggggtttccctatttaggccgaaaaagccccggggggaaattaaaaacattaaggccnnnnnnnnnnnnnnnnnnnnnnnnnnnttccctgaaattccccctgaattggccccccgggttggtgttgaacctttatggtcccccgcgggccnnnnnnnnnnnnnnnnnnnnnnnnnnnnnnnnnnnnnnnnnnnnnnnngggggaatttcaagccttgttctggtcccgtttttgtgcgggccccctaagaacaggtttaaataccnnnnnnnnnnnnnnnnnnnnnnnnnnnnnnnnnnnnnnnnnnnnnnnnnnnnnnnnnnnnnnnnnnnnnnnnnnnnnnnnnnnnnnnnnnnnnnnnnnnnnnnnnnnnnnnnnnnnnnnnnnnnnnnnnnnnnnnnnncactacgtaaagtttattttnnnnnnnnnnnnnnaaaaaaagtataacactggagcctaaaaccattctcttttgtagaatacatattggcgttgaaacagtttaaagaaatgaaatggctatctacaaaaagttagttttgattgctgtcttcccccatactttgtgtcttcacacataaagaaaattttcaaagattttatattcagcaattttttaaaaagtacactgttttccactgctatggtctttataaaggacttgacttaaaatttcaaataaaaaagaattaaggttctaggataactcttgtgtcttttaagagcatctttatacagaacaatttggaccggcatgcaggcaacttcttttgttgttacatacctgtattaggaaaattacacccattttacagaaaaatcccaaaacatatactgcaataagctcaaaacaatgtgaaaaagaccagtgtgaatggcacacaaaaatcgcctctttataaattaactggaattcatgatcatgaagtaggcacagggaaatccagtcctcagggctttgctctctggaagaacacctttaagtaatttttaaaaactttagcatcaggctgctgaagcgcttgacaaaactcctgaattatttctggagctacttgcaaggagggcaggtattcttgttgaagatactgaacacattctgggccccgtttgagatgaattgttttcagtgtcactgcacactcagataaagccaatactgtttgtgcatctgccaggtcaaaggtttgttttaaaggtgctaggaaacatgcggggacaatgtgcttataaacaaaatcagcaaatcccactggtccatctttacctccccagagttctaccaactttgagaggatgataaaacatgttttctgtgcaattggatctggatattcaactgctccttggataacagtgaaccacactctttctacattctctgcaccttgatttgctataacttcgctcatcccactgcctgtgactgtttgcaggaaagcaaagtaactcctccgcaacatctgcttctctaaagcagcagactggtcattttcttctgctggccggagcagcacttcaaaaattgcatgaagcaggggcatgaacatctgttgtaaaaacggggatacctgtatcttgaatttggccgtaatctggttgataagaggaatgaactcctggagatcttttgcttcacatctttgagcatatgttctgaagcagatggaatgaacggaagaacttcttcctccaggcaaataatcattcgatgaaggaaagtaccccggccgtaatggccgaattcccgggcatatgtccggtaccgtcgactgnnnnnnnnnnnnnnnnnnnnnnnnnnnnnnnnnnncggccgcttcctcgctcaatgactcctgcgctcgtcgttcgctatgaacgtggccctatatgagtcagttacatggg

SEQ ID NO: 85801 - DNA, 1459 bp, Homo Sapiens
ctggaccggtccggattcccgggaatcgtcgaccacgcgtccgcggacgcgtggggttgcagctactaattcatgaggatgatgatatttcttctaatattattggattttgttacgattatcttcatattttgaaacagcttacagtgctctcggatcagcaaaaagctaatgtagaggcaatcatgttggccgttatgaaaaaattgacttacgatgaagaatataactttgaaaatgagggtgaagatgaagccatgtttgtagaatatagaaaacaactgaagttactgttggacaggcttgctcaagtttcaccagagttactactggcctctgttcgcagagtttttagttctacactgcagaattggcagactacacggtttatggaagttgaagtagcaataagattgctgtatatgttggcagaagctcttccagtatctcatggtgctcacttctcaggtgatgtttcaaaagctagtgctttgcaggatatgatgcgaactctggtaacatcaggagtcagttcctatcagcatacatctgtgacattggagttcttcgaaactgttgttagatatgaaaagtttttcacagttgaacctcagcacattccatgtgtactaatggctttcttagatcacagaggtctgcggcattccagtgcaaaagttcggagcaggacggcttacctgttttctagatttgtcaaatctctcaataagcaaatgaatcctttcattgaggatattttgaatagaatacaagatttattagagctttctccacctgagaatggccaccagttccttactgaacagcgatgatcaactttttatttatgaagacagctggagtgctgattgttaatagtgaatatccggcagaaaggaaacaagccttaatgaggaatctgttgactccactaatggagaagtttaaaattctgttagaaaagttgatgctggcacaagatgaagaaaggcaagcctctctagcagactgtcttaaccatgctgttggatttgcaagtcgaaccagtaaaagctttcagcaacaaacagactgtgaaacaatgtggctgttccgaaagttatctggactgtttacagacattcttgccagccctcagttgtcccttacaaaaggatattctcagaagtggagtccgtactttcccttcatcgaatgattatttgcctggagagaaaaagttcttcccgttcattccatctggcttcagaacatatgctcaaagattgtgaagcaaaagatctccaggagttcattcctcttatcaaccagattacggccaaattcaagatacaggtatccccgtttttacaacagatgttcatgcccctgcttcatgctatttttgaagtgctgctccggccagcagaagaaaatgaccagtctgctgctttagagaagcagatgtgcggaggagtta

SEQ ID NO: 85802 - DNA, 982 bp, Homo Sapiens
taaaccactaaaggggaagtcaacacaaaatccgtcagataatcttttctcataagttaaactgaagcaaaacatctacaatttcagctaaaactattaaagtcaggtgtgtcctgctggtttcagaatagttgaaaattgcatctgaatccttttagttgtaaatgtaaaccttgtttgttttatcaggatgggaggggtggagagttcctttccagtggagagctgcacatttccccttccaatcagtttcttacaacatgtgccccaaacgtaaggaaaccagcaagtaaagaagcaatttgccagggtaagggaaagaaggttctacaaaaaagtttgactaatagaaaataactctggaatgattgataaaaggagaaggggggaagactgaaagaatcaacagcagaatcatatacttctccacccagcctcaatagatgctcttcagttctgtgtattttgagaaatgggtggagaagtatatgattctgctgttgattctttcagtcttccccccttctccttttatcaatcattccagagttattttctattagtcaaacttttttgtagaaccttctttcccttaccctggcaaattgcttctttacttgctggtttccttacgtttggggcacatgttgtaagaaactgattggaaggggaaatgtgcagctctccactggaaaggaactctccacccctcccatcctgataaaacaaacaaggtttacatttacaactaaaaggattcagatgcaattttcaactattctgaaaccagcaggacacacctgactttaatagttttagctgaaattgtagatgttttgcttcagtttaacttatgagaaaagattatctgacggattttgtgttgacttcccctttagtggtttattttgtctttttctgcccatctgtctactaataaaatgtgaaataaaatacctgtattgctacttccccatgaaaa

SEQ ID NO: 85803 - DNA, 1277 bp, Homo Sapiens
cagagtaagaattgcgacatctggaatcacattctcatgaaggttaagcgtctcgtcaaaggacacggtttggtcacaacagcggttctgtccattgagcaactaggtttatggacataggggagctctgagttagatgccttgactcgtggctgggggtaagcccagggagctgagtgtggtgaatgcatccccgaggaagtatatgtgtccggtggttcatgcccggtgggtgttgaaagtacgtcccctggtattaaggctcaaaggggtgttaaagtttggggataatgggttaccgcgtgaagtctcgctcattactgtatggcaagtataaggttgtaaagttctgggtcttccttctatgataggccgtgaaataggagttgtgtgaatgtctccttgagatcgtgtgagccccggatgtccaagatgacaggcaaggtagtgaccgtagctggtctaatgcagagtaggccatacttggcctgctatgaaggaccataagagggggggtaccaactgtgtgtgttgtttcttgagagaaaagagtattaaatagaaataatatcagggaaaataaaagcctggtcccaaaataaaagggccattaattgaagagaacgattttactttttcttgacaataaacagcattatccctattattaggaataatgtaataccacctcattcttattatgtattataatcattatgtatatatgaacacatatataaaaatacagacactgcatggtgactaagcaattttggaataaatccatagactaagtcacagcatgcataaattgtttatatcttaactgctcatttatacctgaacaaattttcattaagcatactgctaattttcaaatgatgtaataaaaaatctggtggcagtactgtattattttgctgaattacatttgagaaaaaagaagctacctgcttcatctattctaatatagtagatcctgggtcgtcttataagaatacatgtatagaaacttaaaagatcataaatttctcatgaggagatattatttgatctgtgttattggcatgtatttgcaaaacattttaacactgcaaaacattagaaatttgaagactgggcatgggaaaaggtttacactctactacaatgatgctggtgtacttctacacaaggcctcttagtgacgtcaatcaattggaggtaggagtttatcaatgaattgcttgacatccatcattttcaattgagataactcactaccttcggacgcgtgg

SEQ ID NO: 85804 - DNA, 857 bp, Homo Sapiens
ggactcttgagactcaaggtgaagatgaggaagataaagagaatattccttccacagatgtctcatcacccgccatggatgctgctggaatacacctacggcagtttagtaatgaggcttctacccatggtacacatttggttgtgactgccatgtctgttacacaaaatcagtccagtgcttctgagaaagaattagcactgttgcaggatgttgaaagggagaaagacaataacactgtggatatggttgatcctatagagatagcagatgagaccacttggattaaggagccggttgataatggcagcttacccatgactgattttgtaagtggcattgccttcagtattgaaaactctcatatgtgcatgtcacctcttgctgaaagcagagtcattccttgtgaaagcagcaacattcagatggatagtggctataatacgcagaattgtggaagcaatattatggatacagttggggcagaaagttactgcaaagaaagtgatgcacaaacatgtgaagttgagagtaaatctcaagcatttaatatgaagcaagaccacacaacacagaggtgttggatgaaaacagcaagcccttttcaatgcagcagtccatagaatacctctgtcagaatcaaagactaagcttaagagttcctcgcatatatcgttgtgcacaggatcaacatgatggtgacttggggaaaaaattacttcaagtaacatgcttagctttccctccttaatgtgaaaaatcaagggcttactgacataggaacaacagaaatgctcctggaacttcaagttgctgaattataagtttattttttatcaataaatatttttatactt

SEQ ID NO: 85805 - DNA, 309 bp, Homo Sapiens
ccagcagctctgtttctgatagaggtggttggggctctcatccctagatcctaaccctttagtatgctggaattctactcttcacttactgcattgactgttgttgattagttattattgcaaagcactgtcaccggcctcagggagtttatgtgtaatagaattaaaaataatagctgtgtataacacttagctcaagccacgcatgtgtgaggcatttggtatgtatctgaattaattctcactaaaattcagcaaaggacttgatagcctctccccgccttttcaataaaggatgaatgaaggttg

SEQ ID NO: 85806 - DNA, 1945 bp, Homo Sapiens
  misc_feature (150)..(170): n is a, c, g, or t
  misc_feature (459)..(483): n is a, c, g, or t
  misc_feature (1202)..(1219): n is a, c, g, or t
  misc_feature (1453)..(1478): n is a, c, g, or t
  misc_feature (1881)..(1881): n is a, c, g, or t
gggccctgttgtacagagtcctcccgggaccgaggccaacttctctgcttcccgtgcggcctgcgacccatggaaggagagtggtgacatctcggacagcggcagcagcactaccagcggtcactggagtgggagcagtggtgtctccannnnnnnnnnnnnnnnnnnnnaggccagccccaagtatttgggggatgcttttggttctccccaaactgatcatggctttgagaccgatcctgaccctttcctgctggacgaaccagctccacgaaaaagaaagaactctgtgaaggtgatgtacaagtgcctgtggccaaactgtggcaaagttctgcgctccattgtgggcatcaaacgacacgtcaaagccctccatctgggggacacagtggactctgatcagttcaagcgggaggaggatttctactacacagaggtgcagctgaaagaggaatnnnnnnnnnnnnnnnnnnnnnnnnncgcaggcaccccagtccctgggactcccacctccgagccagctcccacccccagcatgactggcctggcctctgtctgctcttccaccacctctgcacaaagcccagtcctccggcccagaacatcctggcccgggagtcctccctgcccctcaggggctctcagcaaagtcagctcctggggccttctggcaacattcagggcagatcatgcataccagggctctgccatcctttccagatcccagtctcaccaaacatctacaccaagtgtcagctgggctggttggccccctccgccgccttgctctctctctccggtccggagccgggtcgctaagcttcagcgagccccagcagccagcacctgcgatgaaatctcatctgatcgtcacttctccaccccgggcccagagtggtgccaggaaagcccgaggggaggctaagaagtgccgcaaggtgtatggcatcgagcaccgggaccagtggtgcacggcgtgccggtggaagaaggcctgccagcgctttctggactgagctgtgctgcaggttctactctgttcctggccctgccggcagccactgacaagaggccagtgtgtcaccagccctcagcagaaaccgaaagagaaagaacggaaacacggagtttgggctctgttggctaaggtgtaacacttaaagcaattttctcccattgtgcgaacattttattttttnnnnnnnnnnnnnnnnnntatttttccccctaaaataggagagagccaaaactgaccaaggctattcagcagtgaaccagtgaccaaagaattaattaccctccgtttcccacatccccactctctaggggattagcttgtgcgtgtcaaaagaaggaacagctcgttctgcttcctgctgagtcggtgaattctttgctttctaaactcttccagaaaggactgtgagcaagatgaatttacttttcttannnnnnnnnnnnnnnnnnnnnnnnnngagtttctggctgatgggtgactcagagtgcaggactgcctggccgtggggcagaggggtttgcccttctcggagggtacctcctgttccctgtctgagcatcctgcatggaagtcaaaggaaatccctttcttggtgacgacttaaatctgggttccctcagacattgggttgcaccccaacaaatattaaatggcttcttcttaaagcccagagaaagaggttttttaaaagactgtcgccaaatagctgagccaaaaggctgatcagaattcactttttggaatgtggcagttaaacactaccttgatcattctctcctctttcctcgaggaactcctggagggtttgagcgtctggaaactctctgctctgacccgaggaagcaccctcctgacgccgnccttccctccggttattgaaaggacgcctcagaaatgcttttgtttccttttacgatggtatcc

SEQ ID NO: 85807 - DNA, 2286 bp, Homo Sapiens
  misc_feature (1779)..(1793): n is a, c, g, or t
ggtccggaattctcgggatatcgtcgacccacgcgtccgcataatcaacccatttcctgcttcaaaaggaatcagagcttttccacttcagtgtattcacatagctgaagggcatacaaaagctgtgctctgtgtggattctactgatgatctcctcttcactggatcaaaagatcgtacttgtaaagtatggaatctggtgactgggcaggaaataatgtcactggggggtcatcccaacaatgtcgtgtctgtaaaatactgtaattataccagtttggtcttcactgtatcaacatcttatattaaggtgtgggatatcagagattcagcaaagtgcattcgaacactaacgtcttcaggtcaagttactcttggagatgcttgttctgcaagtaccagtcgaacagtagctattccttctggagagaaccagatcaatcaaattgccctaaacccaactggcaccttcctctatgctgcttctggaaatgctgtcaggatgtgggatcttaaaaggtttcagtctacaggaaagttaacaggacacctaggccctgttatgtgccttactgtggatcagatttccagtggacaagatctaatcatcactggctccaaggatcattacatcaaaatgtttgatgttacagaaggagctcttgggactgtgagtcccacccacaattttgaaccccctcattatgatggcatagaagcactaaccattcaaggggataacctatttagtgggtctagagataatggaatcaagaaatgggacttaactcaaaaagaccttcttcagcaagttccaaatgcacataaggattgggtctgtgccctgggagtggtgccagaccacccagttttgctcagtggctgcagagggggcattttgaaagtctggaacatggatacttttatgccagtgggagagatgaagggtcatgatagtcctatcaatgccatatgtgttaattccacccacatttttactgcagctgatgatcgaactgtgagaatttggaaggctcgcaatttgcaagatggtcagatctctgacacaggagatctgggggaagatattgccagtaattaaacatgaatgaagataggttgtaaactgaatgctgtgataatactctgtattctttatggaaaatgttgtcctgtacttactaggcaaaacgtatgaatcggattaactggaaaatatatctgaattcaactgctgactataaatggtattctaataaaattgtgtactatcctgtgtgcttagttttaagatcaaccaatagatatatatcctacaattgatatattgctttattcacacttttattgtggctgaatttttgtgcctatctataaaacacactttcaaattatttgaattaccaagacgtctgcttttgtgacagtcagaaaacacacctggaatacgatgcagcccaccattaactcattcatgtagtttattcaagtgatttatgtatttaaactaaatattgaaaatgttagtcaaattggtggtttgcttgtcaggtatttatatcagtctgtagtggattcccaaatttcaaagctcttttaatgtaatggacaaaaataagatatgagaatattattgatgaattttcataaggtggaattgatcttaatctactaacagagaagggtagacagtttgtgttaaatgttggcatttacttgtattgaccaaagttttgcagctctactatattctgtgctcaggactaaaatgctgttaannnnnnnnnnnnnnnccagtgctgtgcatatattctgtgatgggaaacattgttgatgtcctaacagaaatatattttgatctattttcctatggagttgtttctattatgaccatttaattttgtttttatttaatagtagtatttccttcccttttatctaattttttatatgctgctaaatatattttaaatatactatgtttgcgaaccttggtagctatgatgagagctattatcatctgtgggtgggaaaagctatgtaaataggtagattgtatagagagactaatcttgggttgtgcctgtatgaaatttttaaaagttgttgactggatttttgcaaaaggatgaataatattttcgggctgctcaaaatattaatttggaaaattctgcaagttttaatttttaggtagatggtaataacatttgaaaatattgtcttatgtgattttttcccctgaaaatatttgcttgtaaatgaaaacttagctagggcttaaat

SEQ ID NO: 85808 - DNA, 459 bp, Homo Sapiens
gttttgttgtgtggggagccaggactcctatcatcatgctcgaggcctggagatgctggaacgtgtccgaagccagcctctgaccaacgatgacctggtcacctccattagtgtgccaccatacactggagacctgtctttggctcccaggataagtggaaccgtgtgtcttagcgttcctcagccttccccttaccaagtgattggttgttcgggtttccatttgagttcactgtatccgtaattaaggactgatctcccctgggaagtggggatgagaggagaaatcttggcttcacttttggtgagaaagacatgatagacactgaggaaagtttgaacttgtggccgggacctgtccctctcaggtcttctagacatgtctgagggaagtctcttgaatgtaagaaagtgttattggcaaagcaatccaataaaataagctacctatgatgcaaa

SEQ ID NO: 85809 - DNA, 512 bp, Homo Sapiens
  misc_feature (109)..(122): n is a, c, g, or t
  misc_feature (302)..(310): n is a, c, g, or t
ccagctactcggaagctgagtaggagatcgctgaatccggagctgaagtttccgtgagccaaatcgcaccttgcactccagcttggcaacaggggcgaaccccatctcnnnnnnnnnnnnnngagattataaaggggatgatgaacatggagctgcatctttttaaacgttgttttttgatgcttcagactcttaatgcttttatataaagctatcaactgtatgttgatcacagtttataagaaagaacaaatcaagattggcaatccttgccgatcttttagaaataccttttctggagnnnnnnnnntccacatgaagtgcaataagcttataaagctaagtagttattaatatttctattaacatgatacaaaggatgatgattgtaagtgtttactgactggcagcttttatttcagtattagcacagcgtcttgccagtgttggaggccatgtattatttcagttcaactggatgaaatgttaaataaactcagaatgaaaataaa

SEQ ID NO: 85810 - DNA, 469 bp, Homo Sapiens
ggaaatggtgaagcatggtttctatactgtgacaaaaatatttacatctaggggtgttaccactcacatgccaaactattggctgcacacgtgcagccttatttgtaattaacatcaaaagactagatctgaagccttccataaatgagaggccattcatatggcattcctggaacaaaacactgcacaggtaccagcctctccactcctgaccgggttggtgctgaacagtcagggattgttcttgaactagacttctgatgcttcttgcaatcttctttcatctttccctgaaatacacaaaataaacaaatacaataacaaatagtaattaaatgactttcaggataacatctagttgttcagacttcacccttcacaggtgtgtgtgtatgtgtgtttatgtctgtatattgaagcaatttgaatatatttactgtatattgtctgagtaaaagactgaaatgaa

SEQ ID NO: 85811 - DNA, 494 bp, Homo Sapiens
ctataacctgacataccatgcagaacattgtaaaatattctttaacagaactaggtaaataactgtgtatctaatatccgatctcatggccctcttaacatttttttgtttaaatgtgcactcatcccttataagcacattacttttacacttaatggtaggccacaatcttcatcaatctgttcatcataagacagagtaagaatttttaacagaaaattctaaaagagatagaagctaggaaagcttctttatatcttgcattaaatgggtagggaaaaaatatgactctcacccatgtcatgtactggaccatctttctctactttttaaagaaaaactaatacaactagaaaaacatcacaacaagccaaataaaaatggagaaaaggagtcattgtccttatacctaatggaacagtttccagaactactttaactatggaagcatttttgaaaataaagtattaataaaatagaaaaaaattattaaa

SEQ ID NO: 85812 - DNA, 213 bp, Homo Sapiens
tgacgaccgcacccggcctttactgtatattcttaaaatattaataattcaaatgcaaagcactttatacaattggaaatagtacagctagaatctactcccagagcccttactatgaattactcttctttactgacatttatttatgttgctaaatcccagttaggtctcctaaaccctaagatatggagatgggaactcttttatttaccc

SEQ ID NO: 85813 - DNA, 758 bp, Homo Sapiens
ggcacgacgggtatgcaggtgtgtgcctgccccgctgcgatggaggtcctaagagcaagggggggaagaggggctggctctggtagattgcaaatgacctgctttttttctgatcccgagctgcgttcggacccctgtcggatagtaaatcccagtaaggtacctgccgtgggcagatctgagctttcttcttggacaccccatacccacagtcctccaggccacccttaagtacaatgttctcctacctaagaaggcatctggattttctctttccttggaaatagtaaagaactactctttgactgtttttgacctcacagtgaacctcaaatacactggaattcgcaataaatccagtatggtggttatagatgtaaaaatgctatcaggatttactccaaccatgtcatccattgaagagcttgaaaacaagggccaagtgatgaagactgaagtcaagaatgaccatgttcttttctacttggaaaatgtttttggtcgagcagacagtttcactttttctgctgagcagagcaaccttgtgttcaacattcagccagccccaggcatggtctacgattagtacgaaaaaggtggagaagcatttcttttaacaaactgattcttctgtatcaaacctggaaaaaaatcatgaaccatctgacatcgtgaacagtctgcagtgggctatggtttcttgacaagtcttatttccttatcatcccattaaatgttgtcattttgcatctgaaaaa

SEQ ID NO: 85814 - DNA, 567 bp, Homo Sapiens
  misc_feature (242)..(292): n is a, c, g, or t
gcaaaatgacaacatttaatgggatgataaggaaataagacttgacaagaaaccatagcccactgcagactgttcacgatgtcagatggttcatgatttttttccaggtttgatacagaagaatcagtttgttaaaagaaatgcttctccaactgggatttaaaacatcatttaaacaataaacacatttgtatgtatatataaatagatatttagaaataaaaacatgcatatataggcannnnnnnnnnnnnnnnnnnnnnnnnnnnnnnnnnnnnnnnnnnnnnnnnnnttactgacctgtcaacttacaaaacaaaaatgagagatttataaaaggtacatatatagctgtgaattctttaaagctatttttaaagaaattaatataatcttaatgattatcagattactcatgcagtacacagctacacaagtctaatgaagtaccagacacttttctttcttcaactattgtcctatcttattcaggttttcattttcttactagatgtgttttcaatggtttatgacgtaataaaatttctttacctcttctagtaattg

SEQ ID NO: 85815 - DNA, 1486 bp, Homo Sapiens
gccgtgttaatcggacgaggcaggaggctaggtggggtggaagggagtgagctttccggctctcaggagcgaaagcttccaagttgggctctccccttggcccttccaccaggaagacagctgggtcctccaggaccaagaatccccaaaggggctgctcccagaggttgtgttgcagggactggagagaggacttcccagtacagggggtggccctctgatcaggtgggggtaggtggcagcagagcatttggtaggaggtcaggagctcataggagatgggattctgccgatgcctgctgaatgaatgagggagggagacggcaggaccagggactggggaattggtactaaggtgctgggtacctgccgagcaccctgtccatacatgatctcagttcagctctccaccttggaaacacaagaaaggatccctggcgtgaagagggaaacagaggctggaaacagcaggtgtgggaaccgctgagcggaacaccctcccccagcgggaaatccgggacacgcaggagcctcagtgaatccgaccattgtctcagctgcactcagacccctgtcggatagtaaatcccaagtaaggtaccttctgctggaagatctgagctttcttcttggacacctaaaacccacagtcctccagacccctgtcggatagtaaatcccaagtaaggcacctgccgtcggcagatctgagctttcttcttggacacctaaaacccacagtcctccagcagtgaaggatccagtgagattttccaggttaacggtcataaccgcctactggtccaacgttcagaagtaacacaggcacctggacaatacacagtagatgtggaaggacacggttgtacatttatccaggccacccttaagtacaatgttctcctacctaagaaggcatctggattttctctttccttggaaatagtaaagaactactcttcgactgcttttgacctcacagtgaccctcaaatacactggaattcgcaataaatccagtatggtggttatagatgtaaaaatgctatcaggatttactccaaccatgtcatccattgaagagcttgaaaacaagggccaagtgatgaagactgaagtcaagaatgaccatgttcttttctacttggaaaatggttttggtcgagcagacagtttccctttttctgttgagcagagcaaccttgtgttcaacattcagccagccccagccatggtctacgattactatgaaaaagaagaatatgccctagctttttacaacatcgacagtagttcagtttccgagtgagacaaagcaattactagaagagttggagaagcatttcttgtaacaaactgattcttctgtatcaaacctggaaaaaaatcatgaaccatctgacatcgtgaacagtctgcagtgggctatggtttcttgtcaagtcttatttccttatcatcccattaaatgttgtcattttgaaaaa

SEQ ID NO: 85816 - DNA, 400 bp, Homo Sapiens
ctgagctccccggtttgcagaatggaggagggaagttgaaggagccacctcctctgtctacccacccgtccccttcacgcccttgacactaaggagtggggggccctggactgccccttcctcccccatcgcccgcccccagaacccctgatgctggttaggaaccgctcaccccaacatgtgtcttaaggcaggacgacttggaaaaaaaggcggcggacagttggccagagggatggagactggtggggacgcccccgcctccctgtcccccgtttcacacactggacaccatcacctctttggaactgccagaccctgggggtccccagtgagcaaaggtctgtccttgtccctttgtctgtctgtgaataaatgtgagttcgtgaaatccaaaaaa

SEQ ID NO: 85817 - DNA, 264 bp, Homo Sapiens
catgactgacatggtgcatgttcacttgtttttaaagcagattgtacaaacaggagaaacaaacaggggaaactgtatttccagtttctttttgttaacagcctgttgcctcacccatgcaaactcttctagctagtttaaggctacataatcttatggctaatcaaccagcaaccatacctatcactctcaaaaattgataagttaatacttatggacaaaaaccactatggagaacttagcattcaaacagacaagagtcgg

SEQ ID NO: 85818 - DNA, 522 bp, Homo Sapiens
tctttgacttacagtataaccatgtagccaattgtggcccactaaaatctacagaagttaatgtgggtcaccattttggtcagaagcatacattcctgtcagacaactagttgtctgacagaaatgttaggcttcatgtatgtaaccccagtactgttagaaacatgtgtactaggttataagatctttctgtgacaggtaacaaatttggggaagacagcacaatcttcttgaatgtagctcttgggaatgcattattacatccatttctgtaacataataatatgttgcatgcagttatattttctatttagtctgtatattttgttcttcatagtctgttttttctagcatgcttgatttaggagagaataaagggctatataataataaatccagatttccggataagaatattgcctggttaaaattctgcattgcttaaagacacccatgtttaagatttttcatcactaacatatccattaaaagtatcaactggccaggcagggtggctcacac

SEQ ID NO: 85819 - DNA, 525 bp, Homo Sapiens
aatgactgttatctggttgtgttactcagggtgggctggggactcaccagaagaatcccccccagcctgcccaagacaggtttttcccttgtaccatcttcagagaggtcaggggaagagggtccaggtgggttaaggggggtcgctatggataaccactaagaccagactgctgccaggaggagtgggggataatgaggtggccccagggtcctggcacctggctttggttttccgtcttctttcctcaggacgcccctgaggcctgggacctgtgcctggcttcgaggagcatctgtggctgggtgatccagctgctggtgtgatcatgggcttccctcctctcagcagggcaggcgctcctgccccagagactgggcaactggctgtttctatgacgtatttatttttacttgtgtttcatgtcacttttttaaaaaaaagcaaacagaacaattgtaagtcagtataactgcctatcagttttctttatttctctttttgtaaaataaaatttaaactcaa

SEQ ID NO: 85820 - DNA, 547 bp, Homo Sapiens
agaaatcagctcttttgagttacgtggggccagcagaagtctcaatccttataggcttgatggtgagagcagcgggaggtttgaggtgtactcattgcagtccagtttggtctctaaataggatgcttacgagaaatcagtgaaggtaagcagggctgccactgtggccacgtaacccttcaggaaccagtgctgaagaataatgagtgagaacacttaatttgagagttagacaaatacagcccactttggatttcatcctagtgaacagactaaaacttcgcagtaaaatacctatttctacaaagcaaggtttgcctgcctcggttggggaaacctagtggttttgtcacactagtcgatgtatgttgttagtgttgtaagacaccatggcagaatcttcattattctcacctattctgaaccctgcgtcatgtatctgggatgccccctcccaagtccaccaatgtaccacgttgctgacacagccttcatttttaactcaaattgatgctcagtaaaggtcaatgacaatttgttcaaaaaa

SEQ ID NO: 85821 - DNA, 882 bp, Homo Sapiens
  misc_feature (200)..(200): n is a, c, g, or t
  misc_feature (605)..(635): n is a, c, g, or t
caccctaaagaaaaactccatttaatgattgtgccttgtattctattatttttgcatcattagtaaaattaagttgtctattgtaaatgataactatatgacttaggagaatgtattgctatatgtactgctatggaaaaggaaagcagttatttatttgtttatggtacagttagttattttataccttaaaaaccaancatacttaccatttctattgtttaaaaattactgtccattttttaaaaaatttaaagaatgtagtattttctgaggactggtatggtacaaaaatgtaatcaaaattttcagatactacatttttaaaaagtgaggatggggaaaatatgtatcagcatgaccctgatgtagaaaaataaagtctgcaattgaaccttggcaaaatacattacataattatttctgataaggataaatattagctgtcatttaactgtcgtgaagaatgaaaaagtgatacatttgggctttttagatcatttgtaactaaatttgtacagaaattctcctgtgaaattaagtaaaccattttccagatcttgactgcattgctgagattttgcagttgaaaaataatttcaaannnnnnnnnnnnnnnnnnnnnnnnnnnnnnnctaacaaatatatttaactataaaattaaaattcagtagttaaactcttcataatgcagaaatggatggcttgattgtatagaaaaatgagtctttcagttacaccattcttgaaaataatagtgtatgtttgaaatttgtcattaattagttgcttttgaaggcaatctatttgaaatatgtaatttcctgatgttatctgcattgtgttaagaaaaaaataataggctataaaatcaatttttgt

SEQ ID NO: 85822 - DNA, 400 bp, Homo Sapiens
agcacccaaatcagccggaggaaccacctattttctcgtgataaactagagctttttctgaaagcaacacttgtgaaccacaagatggagtcattaaaataaaggcatcatctctttcaacgtataaaatagcaggaacaagatttttcttatttcttccctgatgatccacccacatttatcttcagtcctgctaacagacgaagagggagacctcccaaacgaatacatattagtcaagaggacaatgttgctaataaacagactcttgcaagttataggagcaaagctactaaagaaagagataaacttttgaaacaagaagaaatgaagtcactggcttttgaaaaggctaaattaaaaagagaaaaagcagatgccctagaagcgaagaaaaaag

SEQ ID NO: 85823 - DNA, 449 bp, Homo Sapiens
agcaaagacatggagtcaatccaggtgcatccaaggcagattgaaaatccaaggtagattggaatgttccatacataccatggaatactatgcagccaagaaaagaacaaaatcatgtcctttgcagcaacatggatacagctggaatccactatcctaagcaaactaacacagaaacagaaaccaaatatctcatgttttcacttatgtgggagctacacattgggtgcacattgtcataaacctgggaacaatagacactgggaaataagaacagggagggacagagtgggccagggttggaaaactacttattgggtcctatgcttactacctgtgtgatgggttccactgtactccaaaccttggcatccctcaatattctcttggaagaagcctacacaggtaccaccttaatttagaatacaaactagaaaaaaacaaacaaa

SEQ ID NO: 85824 - DNA, 510 bp, Homo Sapiens
  misc_feature (81)..(90): n is a, c, g, or t
  misc_feature (351)..(407): n is a, c, g, or t
tctaatggctggatcctatttttctacaacctttcagtgacatcgttcaggtttctttcttggccatttaaaaaaacaaannnnnnnnnnctcacttgtaagtcaccgccagtacctaagttaggctaacggagactttgacaggactggatttttcttccaccagaagagaagccttttccgttggtttggggccacctctttgaccatgaccatgtgatgttccgtttacagtgacttgctttgggggaggggaggctctcttaaccgattcccatgttgtacagtagatggttagaccttttgtatattagtgtgttttaagttattgatttgttttatataaaatannnnnnnnnnnnnnnnnnnnnnnnnnnnnnnnnnnnnnnnnnnnnnnnnnnnnnnnncaataaagtctgacactggtgtccaaaagtcaacaataaaatgaatcccattgtgttcttttgaagatgcctatgtaacttttaagctttttaaattattttc

SEQ ID NO: 85825 - DNA, 2990 bp, Homo Sapiens
cggtccggaattcccgggatgggggtgtctttggtgcctgaagtctgcgcggcatggagggtggtgtgagttcctctggtgggagggagaacgcacatctcttctgggcggccacctgaggagtgactccaagaagagttccggcagctttccccaggaaagggtgaggggtgacactcggctctggctctgagatgaggcagacggcacccaggctgtgatctgtcctgggcggggaccaggagggagcggggtcgggatcacctgccagtgtgcagactctgggactgcgtgctgtctccggaccatcagggtagggtggtgggttgagaccaggaagtcagggaagatcggaattcagggcgacggtctaggtgtcgagggctgtggcgcagcctcttcagctgcggcgagaaatggagtgagtcaaggtagcttctgggaagaaatgctgccattagcaggtttcttgcaaagactttcctctctttgttcccagggcagagagtttctgtgagtcccactgagaaaatcccatggggtgggggtatcctggtcggtcggcaatggagggtggctggcttggtggttattgtcttcaaggagctcttcgctgctgcatctgcggtgtccctttgttcttgtcccatttcaccccctctgcagacaccaatgtccgagggccacccaggacaggacgggggtcagccccaagctgagagtctggtcataggagtcatgtccagagggcctagaggaggttttagcggccctccccacccacacccacaggtcgatttggtctctttttagctcaaggaaagacagtagccaagcaacagagcccctctcccgccgctggcaccgtgggagcagttacatcgggtctggtgctccagacctagggcccatgcactttcatcagatcctgcctcctggagtgggggaaacgcagcaccccactggttctgaggcccctaccctcccaggctgtcccacgtgatgctgacatgagcctcagagaccccaatcccatgcctgggggagagacagcggctcaggagtgggggagcacgggccttctacaccacatgggaaggctctggcatgaggttttcctttgggaaggttgtttgggcccctgaagttccatctccgagagtggtgtgcagggcaggccagggcccatgctggctgcagtctttgtggctgcctgcctgggccagcctgtttgggagctgggactgtgggctcgccttttcgtacctgggctcaggtgcggtgtggccaccgccaccctcatcccctgcctgggaggctctcccaggggctgatgggggggttctgtgaggggacaatcagcggctcgcggaaggccacgcctgggcaaggcaggacacagcgcacacagcagctttctttggaaatctcccaggtgaggattcacatcccaaaataaaattcagaagccagggtggcctgtgctccccatgggtgacctctggaggcagtggaccaagatgcagcaaggagaggatgcagaacagcttcttgcagaagcacctgctccggcatccagcgctgcctggaggcaggaaggagaggcagggcaggacacgctggtctgagatgagggggagccccatgggccccaggcaggctagaggaggcacaggccctgccacggccaactcaggtcagccagcctgaggctgtggcctccaaagggtctgggcgcaccccccaggtcgcaggtgtctgaggccagccaacctgcagagcactcgcggcgtgggtgggctgagtggaggtgcctgggagctgcctaaattcagaagcctccactgccatggagactgcctggctgtgtcctctcagccaggtgccgtgttggccttggctaggacccagagccacactgcagcctccgccgactccctccttccgggcctgctctagtgaggagtgcctaagccaggacccagaaactcagagttgatggtgagaggaggccgcctgagtcaggacacctggcttcttgaaaagttcgctctgccagaaaccacctagggaccacgttagctgccttccttgagctccccaggagtcggtttccacatctgtgaggtggagggctggtgtggaggtgctcatggggtgcggtgcttgggagacagccaggcccagggtggctgctgcttcctgctaagtgggggaggtgagacagatctggaaagccgtctccctcagatggtttcatttaatgctttatactgccgagtctgggggcttgttttggtttgggggcagccatcctccaccagaaagggggagctccttccgctgcggctccagatagatggggatgccgggctccaggccgaccagcacttgggatctgatgggacacggccagtgcctaggggtgccaagtccaaggcctcccactgggagtcatcgctgagaagatgccaatgtttcatccaccggctgcacaggcacaaactcccccacccaggacggctgtgatgaggtggccctccctgtcaaccctggtccctggagtccccagcacctggggccctggtggggctgatgtcacaggtgtttactgtgctgctgcactggtcctatgccagcctcacccatgtggggaccacggaaggcacactcccttacccccggtgccgggccgtgcggtcccccagacggacagcagctgtggcgacctgcgtttctccctgggcctgtgcttcctgtagttagtccgtcccctggttcccctgtggctcagaggccgcgtccctggcttgtacatatgtgattgctgtgggcacaccccagaccccatgtcatagctgccgtcccgacgtcacgacgcctgtcccgatgtcttacacccgagtgttagccctaggctcctgtactgtgcgtgcacttgaggctctgtccaattaagaaataaatgtggctcttactcaacaccggcc

SEQ ID NO: 85826 - DNA, 763 bp, Homo Sapiens
tgcggccgccggcggcaaggtcggcagctgcgaggccaagagagaccccaggacacacacagctgcctcccggtgcgagaagaagaccccggcttgagagtgagatggcgtttaatgattgcttcagtttgaactaccctggcaacccctgcccaggggacttgatcgaagtgttccgtcctggctatcagcactgggccctgtacttgggtgatggttacgttatcaacatagcacctgtagatggcattcctgcgtcctttacaagcgccaagtctgtattcagcagtaaggccctggtgaaaatgcagctcttgaaggatgttgtgggaaatgacacatacagaataaacaataaatacgatgaaacgtacccccctctccctgtggaagaaatcataaagcggtcagagtttgtaattggacaggaggtggcctataacttacttgtcaacaactgtgaacattttgtgacattgcttcgctatggagaaggagtttcagagcaggccaaccgagcgataagtaccgttgagtttgtgacagctgctgttggtgtcttctcattcctgggcttgtttccaaaaggacaaagagcaaaatactattaacaatttaccaaagagatattgatattgaaggaatttgggaggaggaaaagaaacctggggtgaatacttattttcagtgcatcattactgttccagattcctatgatggatggcagactctttaataaattgcttactgatattatcttaaa

SEQ ID NO: 85827 - DNA, 942 bp, Homo Sapiens
ggatcctcgtggactggttagttgaagtaggagaagaatataaactacagaatgagaccctgcatttggctgtgaactacattgataggttcctgtcttccatgtcagtgctgagagaaaaacttcagcttgtgggcactgctgctatgctgttagcctcaaagtttgaagaaatataccccccagaagtagcagagtttgtgtacattacagatgatacctacaccaagaaacaagttctgagaatggagcatctagttttgaaagtcccttacttttgacttagctgctccaaccagtaaatcagtttcttacccaatactttctgcatcaccagcctgcaaactgcaaagttgaaagcttagcaatgtttttgggagaattaagtttgatagatgctgacccatacctcaagtatttgccatcagttattgctggagctgcctttcatttagcactctacacagtcacgggacaaagctggcctgaatcattaatacgaaagactggatataccctggaaagtcttaagccttgtctcatggaccttcaccagacctacctcaaagcaccacagcatgcacaacagtcaataagagaaaagtacaaaaattcaaagtatcatggtgtttctctcctcaacccaccagagacactaaatctgtaacaatgaaagactgcctttgttttctaagatgtaaatcactcaaagtatatggtgtacagtttttaacttaggttttaattttacaatcatttctgaatacagaagttgtggccaagtacaaattatggtatctattactttttaaatggttttaatttgtatatcttttgtatatgtatctgtcttagatatttggctaattttaagtggttttgttaaagtattaatgatgccagctgtcaggataataaattgatttggaaaacttaaaaaaa

SEQ ID NO: 85828 - DNA, 181 bp, Homo Sapiens
cctttgacagatggtatcccttcctggatcattcatttcaccttggtttctaactttaggtttactttcacttgttatttgacttagcaggtgcaacaaaaacaagaaacaaatgtgcccaccccactttccgcttaactgaaaagcttaaaataaatttctgaattatgtatcctgaaaa

SEQ ID NO: 85829 - DNA, 532 bp, Homo Sapiens
gattgccaaattaataaaagcctagtcgtatatgaatttatattgtcaggatgttgtctttggaccctaattatgctaatgcagttgtaatactaaatttgaaatcaaaagaaattctaaaatataaaagggaagctaagctaaaacagtcctgcaacagactacaatcaccggtaaaaaacagttttcggctaacatcgagatagagagaatgacttttacacacgttgttctgcaatccagagaaattctaatctttaaaggattttaaatccaagagatataactaggcagtcatgggacccattccactagccaaaattcacctctctaaagcagtcacagcttatacagtgtaatagaattgacagatgtcagaccctggtgagggaatataatcattgccaaaccttcctgaaaggaacttttgctgcaagtgttggggacaagtaattcaagatgtaaaatctgcagatagccccaaagtgtcattgtctcctcaggctccacagcactttctgggaattaaaaa

SEQ ID NO: 85830 - DNA, 666 bp, Homo Sapiens
ggggggcaactccgcccttgaaagactgggaattatgctagaaggtcgtgggcactaaagaaagggagagaaagagaagctatatagagaaaaggaaaccactgaatcaaagagagagctcctttgatttcaaagggatgtcctcagtgtctgacatctttcactacaagtatttctaacagttgcaaggacacatacacaaacaaatgtttgactggatatgacattttaacattactataagcttgttattttttaagtttagcattgttaacatttaaatgactgaaaggatgtatatatatcgaaatgtcaaattaattttataaaagcagttgttagtaatatcacaacagtgtttttaaaggttaggctttaaaataaagcatgttatacagaagcgattaggatttttcgcttgcgagcaagggagtgtatatactaaatgccacactgtatgtttctaacatattattattattataaaaaatgtgtgaatatcagttttagaatagtttctctggtggatgcaatgatgtttctgaaactgctatgtacaacctaccctgtgtataacatttcgtacaatattattgttttacttttcagcaaatatgaaacaaatgtgttttatttcatggggagtaaaatatactgcatacaaaa

SEQ ID NO: 85831 - DNA, 1059 bp, Homo Sapiens
  misc_feature (737)..(786): n is a, c, g, or t
cctgtgggcaggggcaccagaatgtccaaccaaccgaggattcccaagcgttgccaattcttcttcactcatgggaccagcaaaattggggccttgtccaaggagatcctggaggagttgcagctgaacaccaagttctcggaggaggagctgtgctcctggtaccagtccttcctgaaggactgtcccaccggccgcatcacccagcagcagttcaagagcttttacgccaagttcttcccggacaccgaccccagagcctacgcccagcatgtgttccgcagcttcgattccaacctcgacggcaccctggactttcaaggagtacgtcatcgccctgcacatgaccaccgcgggcaagaccaaccagaagcttggagtgggccttctccctctacgacgtggacggtaacgggaccatcagcaagaatgaagtgctggagatcgtcatggctattttcaaaatgatcactcccgaggacgtgaagctccttccagacgatgaaaacacgccggaaaagcgagccgagaagatctggaagtactttggaaagaatgatgatgataaacttacagagaaagaattcattgaggggacactggccaataaggaaattctgcgactgatccagtttgagcctcaaaaagtgaaggaaaagatgaagaacgcctgatgccaactgttcagctgtcctccctccacctaccactcacatgacacccgtgagcgcctgtgnnnnnnnnnnnnnnnnnnnnnnnnnnnnnnnnnnnnnnnnnnnnnnnnnntccaccccagggccaagagaaaggcctgcaaacaagcccacagacagctccctgccaaaatgaagcatctgtagtgacccactggttccttcttcctgggttttcagcataccctcccatcatgcccggtcccacccctccctttgtccaccagcccatggccctgtgctaatcccaggattaggccataggagtcctaagtgtcaccccgctgtaagctcctttgtggagtgctgggtaagcagtttccaataaacgcaagctgagctggag

SEQ ID NO: 85832 - DNA, 770 bp, Homo Sapiens
aacgaggcctcactatattgtccaggctgagtggctcttttattaaccagtcattacactgcagaacagccaacatagagtacttgctctcgccctgtgaattttctttcatgagggagtcaatatgtagtggaaagaagcatgtagcaaaaaagacaaccttgatctttaataaaaaagaagttggtttatttccaaaataaatcccctgacaaaaaacctggtgatgttaagcaattgactgtcttagagtccagcagaagaccttagacaaaaaaagcagaacccactggagtagaaaaggaagcatgtagcatatactcagtagtgaaatttaattttactgactgttaggtatctatgccaatttgttttcatacttcagttggttttggaatctgccttatacctaatatttatttattcacactcataagcatcaaatatttaatgccctcagtgggaaatttgtgtttaaactcaatggaatctaatatttctttatgtcgttagtccctgtaaaatgttaggtcacccaaggaaaggggagaaatagcaatggttgttcctaaggtattgcttgccctccatgtcttcctaaagagcagaacttggagtttctcctttatgtagagaagaagtaacttagggtgtatttgcaatgaaatattcatagatattgaaagcttgtgtttacatgaaatatgtttattatcaagaagtcctttttccaattctgtacattaaatatatgtgttttaaagggaaaa

SEQ ID NO: 85833 - DNA, 395 bp, Homo Sapiens
tgagaacaccataccatgggaactttaattagaacagagacatgtttcgtacaggctgaaaaaccagaaaccccgggaaggttatgcttagctttggagaccagaaatcaagctagccatggctgctgtgtcactgggcagaggacagggtcccaggatgctggaggacacagcagcttctttccatctgatgtgaatgctccaggcagaggctgtctggtcaggctgagctgggctcatggtgggtcctcgggttgggaattttccagaggagattcgcagcctccaatgcagagaaatggccttggggtgcaccacgtccccttggccaatgtggtggattatgctaggtccttggccaatcattgcttgaggaaatagctaagaattgggag

SEQ ID NO: 85834 - DNA, 901 bp, Homo Sapiens
gttatagtaatactagctgtcagcttaaaccctctgtaatagaacatggaaacagacacataaagacattagctgaaaaaatagagtgaaaatcaactattttttactcccgctaatttcaatcaatcgttttcaaaagcgcacgagattcactcattggatttatgcagtgccctgtctgtataaaaactcttaagagttcctttatatcatattcttcagagccaacatttgtcctcaaagcaacgtttcccacctccttttactgagtactgaaaaagttttagcaaagtcacagattaggttgaatttcaaaatatatgtactttaaaaagttctgatttccaaatataataaagttaaaattaagtatatactttaggaagttaccaataacttccatcaaagcagagtaggatatatggtaacattaattttcggtcatttcaaatgaggtatatttcttattagggaaattaaagtccctatatttattatatattttttccttattaacagagtattaatctagtaaaaaataacccagcagtaaataataaagaaattactgaatgagaggataatgaatctgaatcatagcaggaatttgcaatattaattatggttagctatttttctctcattgatttttgtgccacttgaatggaacagaagcaagccttatgttttggaaggtctgcggtaaaatgctgtgactgtttactttcaattgcattgtgtgttgcctgtgactgctttcaaacgctagagggggcctctgatttaaagaaataaaaaggacttttctaaaatggatgtgtagtttattttgccttttgtaaagctcttttggctattgtaacttaacaaataaaatcataattgtgtgcatctctgaaaa

SEQ ID NO: 85835 - DNA, 869 bp, Homo Sapiens
  misc_feature (542)..(550): n is a, c, g, or t
cgcgtgattgtgcgctgtgtgagtgaggtggccgccgcgtgatcgtgcgctgtgtgagtgaggtgcaggccacgtgatcgtgcgctgtgtgtgtgtgaggtgcgcactgcgtgaccgtgcgctgcatgtgagtgaggtgtgcgccgcgtgatttgggaagaggcttctgcaatgggcaggcttctgggtacatcacttaattcgttcaggccggctcctacctgctgtccagcgatgaagtctccacacaggaacaggctcatgctggcgatgactatgatgtggggtatcgctgggtactcagaatccttttgtgcaccaaaagctggaatgcttcccattttttctcagtgccttgcttctccttttaccctttgatctggaaacagtgctgtctgcaaagctgaaggcccattccttttctgcttggggcatccggggtttccccacggcaggggcccatccctgggccaatgtcctgtacaagcaatcctggccttccttccaccctgacctggcgcatctgggcgcagggtccctgnnnnnnnnnattcaataatcctggcttgtaaaactctttggtttttacggaccagtgccccacgtttgggttcttgcttgcgcattttttcactcaaaactcagggggttggcctatataaaggccccctggcgcctcgcctttcttggccccaaccgcccccgtacaaaaagcgccctctttaaagtgccttttccctaccctcttttaaaaggggcgtcggaaaaaccgaagtcaaataatttatctctccccggccccgcgaaaaacacttgccactttcccaatttctaactccccccccggcaactaacaatttcttttatgg

SEQ ID NO: 85836 - DNA, 648 bp, Homo Sapiens
ttttgcaagacagtaaaaagagtgaagagaatgaaatagaacagtttactcaagctatctttatgtccaggaagaaaaaagattacatgctgctcgcagtaagtacgagctttccctgcaactctggctgcaggcgcgcaagccgttcaccactggagttcctaccacagcaggggattgagaaatgtctccaaacactgaaaagctccatgtcaggactggatgtgtggttgataacctttgttcagtaaaacaaatcatagtaggttttgagaaggaaaaaaagaatgctcacaactgaatcggtagagtgaaggtttatcagacaaagggacatgaggcaaacaaattttaattacagaaaccaccactgcaatgtcatgtagaaaggagaaacaagggactagcttcctggatggaccaaaaatacagtttatagactgtttcaatcctaaaactaagacaatttctagatttacctcagacatgagtagacgtctggaaaatggatggaattcaagttacagaataccatattttcatgagtgcttatgtaagaacagcaaatgataacatgtaaccgtaatttacacgaatacttgggattctggagctactttagttacttttgaatgatcaaagccctgc

SEQ ID NO: 85837 - DNA, 858 bp, Homo Sapiens
  misc_feature (667)..(675): n is a, c, g, or t
tttttaatcccattttgtatgcatacctgccagctcgtatcctctggcatggggaaattaagggaacagtgtctgtttgcatgtaagatgagatgagatcaatactactgatccatctgtagcctgggaaggagacaggacattcctgtactaaggtggcacagagctgtcctttgcaacattctcataaaattgggcacagagttcgcattggcgcaatatttatgggagtgggagggatggggaaaataaacttaactctacaaaagcaaactcttaatgcatgcaagaatcattaggctagcaggtaaatgcataagtgaaaaatctggaagtgtaatggtagaacataaaacttgtattgctcatgtttcagtgcaaaaatgtactagccaaaaacgcttaagtgtgtggcccatgaattgaacaatttaaccctgaagtctatatccgtgatattatgtcgatttttaactgaggggaaattaactagtccagcctaaaatgcttcttataatcggcatacggtttcctctactagttgtgccattactagtgataatgtttttttcccccctttaatgaaaacaataaacatctatttgagacaattaaaatccttctgggggcactggaagcacaatacggtgaccaatcttgctatcannnnnnnnnctttactaatttgaaccatgattttgctagaaatagaaggcccagtggtggaatattagagggaaggaaactgacaacgtgtgaaagttagaggcaaatacataggtgtagcttggagtgctggtatctaatataccattgtattcactaactaactcaaaataaacacatttaatcttgaaa

SEQ ID NO: 85838 - DNA, 501 bp, Homo Sapiens
aataatttctctcatactgcttttaactcatttaatttttcaactttttaagaataacaaaagtgatattaattgtaaaaatgctgaagtgacctatgaatttatgaggtgcatatgtatttttaggtttaccaatgagatgggagaaatgctgtcttatattttaacatacattttggccattacacagatgaagcaacttttcatttgttaatacataatgcatactttttcttctgtgcaattcctctttgtattctttgctcattttcccactgggatttgcaagttctttattatgtgataatctctatacattctgaatatcaattttttgttatatataccatgtaaatattttcttctaatttgttatttgtcttttaatggtatttatcaattgtttgctaaaaatgagtttgtttagttagtaaaatttgtctatctttaacttcatgatatttgtatatcatgtcatgaggaaaaggcatgaatatttta

SEQ ID NO: 85839 - DNA, 1073 bp, Homo Sapiens
aatttctcacatttttgaaaaatagatgctatcctctatagtaaaatattgaatcactttatagtagacaatacatacgagatttaacaaatacttggtttgaaaaagtttggctttattcaacaattttagtttgcccactgattttcaaatgtctgtgggattgcttataactaagtagaaagtgaagattgatttttacttaagaatgggatagagatgagttttatggtttttaaaagtattttcagttcattatttaaatgttgggttgttgatatggtcttgtttctgataaggaaataggagcaacttgttttaaaataactacactaaaagactttcttcatctccgtatagagaaatccagatttcaattaattcatttattgggtgctaacaaaattcagggttagagtaaatttaggtctgttggtccatgtggcctggtttcctagcacccattaaacataatgctatcttttaagcctgaacatgtgggttttttaaatcaaattggaaaaaaattagacaactgatgtcatgctgtcttggtatccatactaaaaaagtatcaggaaaatagattatttttgtgctgtgaaacactattcagtggaaagtttagtggcaacttttccatatcattcatgacttaatacctgaaatgcacttttaaatgtttgccttatatccaagtgtttacttgtatccatgacctaaccgtctattgaaaagaatgtttgcagatgcagattgcaatgttgtttgtattcataggcaaaagtcctcttctctagtataattttttaaatctgagagaattgaaggtacagaaaaaaattctggagtgcctgaaccacagtttgagagcacaaaggtcacattctttcagtaaatttgggggaaataaatttcagctacctggttagcttcagtgactacttacacacagggctttggttccattacttgtttccaccacagccacatcctaaatacttggaatatccgaaaacaacttctaaaatcactcaataaaagtattcacttctagccgaaaggacgaaaaa

SEQ ID NO: 85840 - DNA, 378 bp, Homo Sapiens
tgtctatttaagctggtctgaacaaacatgcatatatggctacagattttccaagagttggattaacccccattttcaacccaaatattatgggatatggtcattatttggttcactcaaaatttatattttaacaatgcatcaatgtgacagctactttctattaagagtcattttgttagacatctggagtgaccaactgtcctgatttgccccggattctcccagttttagcaccgatagtcttatgtcccaggaaagccctgtcttggcaaataagggcagtttgttgccctgctgctagctctaggtttggacttcaggtctgtattgctgaagtgtctaaaagtggattttaagaggacttgctacaacaaa

SEQ ID NO: 85841 - DNA, 540 bp, Homo Sapiens
  misc_feature (21)..(21): n is a, c, g, or t
cttaaatgtatcagttcagtncaggttgtcatcccttttgtcccctggtgatcagtttttttcatattttatagccctgaaagcaggctctagatcaattcaaattatttcatttgtctttcattgataacagaaaatgaaatacctgtttgggagaagcagcatggcccattgaaatgaggctcatctgtgcaattatgaattccaaattctgacctcagttctggaattgaagtttcagtatgtttggcctcgggtttcgttatttgcaaaatgagagtttctttgaactgtctcacgtgactattaagcaactatacacaggacatcggttattttagagtgaaagacacagtgctttttccaaattgctctggctaccatatagaaaattgactgaaggagggccaagatggaaacagagagaccagtgaggaggcttctgtggttgtccaggtctgaggtgatggtaacttggactcggatggtggtaatgggaggtagattgatatgataaataaaattgaaagaccaagcaaa

SEQ ID NO: 85842 - DNA, 599 bp, Homo Sapiens
tttgtaaaggaagctacataaagtgacttcatttattgacttgacactgctccttagtacaatccagcaataccaatgacagggaaaaaaaaccacaggtacctttctttcttgaggcctgcaatctctgaatccctccgcccaagctctatttgtactttctccagagcaccttgcatcttactgtgagaagccagcacattctccaacatgattgtgactttgcagttgtcttctttagcttctgccaattgtcgctgaaagtttcccaccttcttgttttccctgtcctccacagcctcgaggtcttctttcaacttctgactctctttcagggccgcattacgacacttcactgttcgggacagctcctctttacttctttcaagaatagatttcacctaagtaggaaaaaagaaacaataaataacattacaaatcagtgattagaataagacatagaaatttagaaaccaaattttaaatgtttaaatatatttattcactactataaatagaacccatctttattagctgcttattcctttaaaggaaactacaacaaaaatatctgtgtgaataaacatagacaaatccaa

SEQ ID NO: 85843 - DNA, 498 bp, Homo Sapiens
atccaatattaaactgcaagtgttagcactgaaatattgtcattgatagggaaaatatctattctttgagtcattgttactgaggcagttgagtgtaaggagctggctgcagtttattctacttaaccctttaaggctgaattgtcaaatgtacattgttccatgtcgttagatggaacatggaagccattgtctaatcaactctatcattagtgacttgatgtctcataccttaattttgtaatgatttttattctctgttacaaagacttgaaatacgtattaaatgcacgttaatgttttgctttgcattttaggttcagattatgacttgattgaaataaatgtgcctatacattcatttgctttgtactataaaaataaaaatgatttcttaagttaatgacatcccagtggggactattagcattaaaattatccatatggatgctgaagatacagaaattaaaattatccttatggatgctggagaaaaaa

SEQ ID NO: 85844 - DNA, 1105 bp, Homo Sapiens
  misc_feature (15)..(15): n is a, c, g, or t
tgaggccggctgtantcggcacgaggcacgtgcctatttctatgtctgacaccagagaagagaaaaggttcttgggtgaaggacaccaccgtgtccaagaaaaccagatggacaaggcaaggaggcatccacaaggtgcgtggaaagagctggacagaaattatctcaactacggtgaggaaggagccccagggaagtggcagcagcagggagacctgcaggacactaaagaaaacagggaggaagctaggtttcaagataaacaatatagctcccatcacacagctgaaaagaggaagagattaggggaactgttcaacccatactacgaccctctccagtggaagagcagccattttgaaagaagagacaacatgaatgacaatattctcaagggtgaagaaggaaaatgagctgacctttgaacgagaagaatttcttcccagaatacaactatgactggtgggagaaaaagcccttctctgaggatgtgaactgggggtatgagaagagaaacctcgccagggtccccaagctggacctgaaaaggcaatatgacagggtggcccaactggaccagctccttcactacaggaagaagtcagctgagtttccagacttctatgattctgaggagccggtgagcacccaccaggaggcagaaaatgaaaaggacagggctgaccagacagtcctgacagaggacgagaaaaaagaactcgaaaacttggctgcaatggatttggaactacagaagatagctgagaaattcagccaaaggggctgactgtcattggagcggtgggcactgttaagaagcagccatcacatgatctgtttttcaccacttcactgaaagacaccatttatatacccaagggcagaaagtagaacttactattcattaaatgtttgacacaattggaattgtctttaatttctgtcagaatgctattgaaaatgtgaattgcatgacttgtagcatattcttttctgcaaaatagacatattaacatgcttatgacaatgactgtgctactgtctttggaaaaatgtttgtctcagttggaaataataaaagattcacctgagaaaaactttttcc

SEQ ID NO: 85845 - DNA, 858 bp, Homo Sapiens
  misc_feature (316)..(316): n is a, c, g, or t
tttacttgcatgttctatgggtagctatcaaagggtgtaacaaattattccagcttttcccaatactaattatattggttttaaaaagtctgcataatcactaggtggcattttcccttcatttgtgaaccaagaggggtaaatgatgctacccatacagtgacttctgagttctttaactttgacagaatctccattgtttcattgaatttctcattgtattatatgtctttccaagtgtgcaaactataatatgtagttaatgaaaaatggaaggctgcagattattttgcatgaataattaattgcccattanggctaaggagactgacatgatttttatcggttctgggtaaatgaaaattttaatggaaaactcattcaccatttactagctttgtgcaatattataaaaggtagaagcaaaacactagcacattgtgctttgcttggcttgtaaggatggctttagtaccattacattaaatggacagtgtgcacagtgtattgtaaatgccaactcttgcaaatttacaatacttaaatatgttcaattaacatcctaaagtattaaaagtacagaggaaaaactaagcaagcatttatagcaataccatgaaatctccagtaatcgttttgactgttgccttttgctctttagtgcagcttttctgcattgtaattgtattgctttgtatttcatgttttttacactcatgacttcagagttaagtacttgtacaccaagtattgcaatcacctttctcttgttgtacatgcaatgtaacaacctacagttttggtgcttttaacaatattcctctttttctttaataaaggatatttatttgaattaaa

SEQ ID NO: 85846 - DNA, 919 bp, Homo Sapiens
ttaggctaagtacgaggcctggtgtcgaattcggcacgaggcgtctggccgccgcgctttcaggaggtgcttttggttctctccggtcttgtccacgctagggggtgcacgtactcccaactgtggtcgcgctctcaccccttctgctgctctcgtggccccctcgcgatggcgggcatcctgtttgaggatattttcgatgtgaaggatattgacccggagggcaagaagtttgaccgagtgtctcgactgcattgtgagagtgaatctttcaagatggatctaatcttagatgtaaacattcaaatttaccctgtagacttgggtgacaagtttcggttggtcatagctagtaccttgtatgaagatggtaccctggatgatggtgaatacaaccccactgatgataggccttccagggctgaccagtttgagtatgtaatgtatggaaaagtgtacaggattgagggagatgaaacttctactgaagcagcaacacgcctctctgcgtacgtgtcctatgggggcctgctcatgaggctgcagggggatgccaacaacctgcatggattcgaggtggactccagagtttatctcctgatgaagaagctagccttctgaacctcgcctgaagccagcctctctgccaagtcactcaggtcatgggcattgttcaagcctgagtggcagccgctcttgctcacctgttgaggaagggctggctcactgtccaccgtggcggcatctttaactggcctccactcaatgggaaactgactcgcctgtgaaagacacagtgggagagctgaaaatgaatcagaagctttatgtatatgatttttaaattaaactttactttttcagactgcccctcccctttttgtaaaaagtccatttactgtaaaatcgttttttccag

SEQ ID NO: 85847 - DNA, 542 bp, Homo Sapiens
tctgttatacatgtgttgttaaagtacatgcattcttagactaactctcagatgctttgctcttttggagctgaagaattgtttgatggtgatgtcatatatctgatagattagtttcagtggttctcatttcacttttatacgtaatttcttaactatattaagatagttgcaggcagtgtacctcaggttgactctgtacatctgaatagtgggtcactagtattttgcttcaagccttctgaaaatataaccatagttacctaagcacacagtgaatagtcacatggtagtacttgtgattagagcatgtaaaacaatgtaattgaaaagtcagcttccatattttgtaggggaaatagaacaccctactttttatctagtgtgaaatatttaatcgaatttttgttgatttatattatgttacctgtgctgaattaggtttggtacttgtgttttgtttgacatattagtaagttgcttttgcttctttctgtcaacttattttttaaataaaattgatctggaaaaattgttaaaaa

SEQ ID NO: 85848 - DNA, 761 bp, Homo Sapiens
gtggtaccggtccggaattttcgggatatcgtcgacccacgcgtccgcccacgcgtccgatttttcatgccactgctttgttttctcctcagaagtcgggtagatagcatttctatcccatccctcacgttattggaagcatgcaacagtatttattgctcagggtcttctgcttaaaactgaggaaggtccacattcctgcaagcattgattgagacatttgcacaatctaaaatgtaagcaaagtagtcattaaaaatacaccctctacttgggctttatactgcatacaaatttactcatgagccttcctttgaggaaggatgtggatctccaaataaagatttagtgtttattttgagctctgcatcttaacaagatgatctgaacacctctcctttgtatcaataaatagccctgttattctgaagtgagaggaccaagtatagtaaaatgctgacatctaaaactaaataaatagaaaacaccaggccagaactatagtcatactcacacaaagggagaaatttaaactcgaaccaagcaaaaggcttcacggaaatagcatggaaaaacaatgcttccagtggccacttcctaaggaggaacaaccccgtctgatctcagaattggcaccacgtgagcttgctaagtgataatatctgtttctactacggatttaggcaacaggacctgtacattgtcacattgcattatttttcttcaagcgttaataaaagttttaaataaatggcaaaaaa

SEQ ID NO: 85849 - DNA, 513 bp, Homo Sapiens
ttttttttgaatgtaactaattagcataattttatttaagagttagactgtgttgtcaatactgacatttttgggaatatatagtatagtttatgagtcaagcttctgaaccaaaagttttactttgagccctattcctaccttacaagctagcaggtgaccttgggcaagccaacctattagaaccctgggttcacgtccatacagtgaagacatcataacctgtcctacctacttcacaagcttcctctaccgatcaactagatcaatatatgtaagattttttttgacaactgtaaagtactataaaatgacacttacagataagtcagtgaagttaaccatcaaaacaatattcatgcctataaccaaaagcttttaaacaaaacagcttaataaaaagtggtcaggtaagcaaataaagattatattacacaaactatgttcctcacctactctcatactgagtctaatctttggaaagataattcattttaaggggaaaaaaatctg

SEQ ID NO: 85850 - DNA, 458 bp, Homo Sapiens
aaaccctcacaatttagttctgggctctgtgcttgggctcttgaaattcggtggcagtggctgaatccccatgcccactgtgacagagcaggagcaccatcctctcggacaaacaccgccactttaagtgccagctccctttccagcctcatgcatttcaagaaaatcacttctcttctaacaacaagcagacagaaagagcagacagtaaaacatagatgagacagctcaggcacagagggaggtggggggaaagtctcttgggtaattgccaaacttcaccctcatacattgggccccagtataacagtgggccttaataagcacattctttcccttcaggtgcactaagatagggaagctaaaagcagacctgggggtatgcctgcagctgcaggaagatgtatggaaacagacacacaactccctcccagataagcacacctaaagagacacag

SEQ ID NO: 85851 - DNA, 1065 bp, Homo Sapiens
aaaaagtacctcaaggcaataaaaaaaatcattttaatttttgatacatattaaaacatcttagtcagttcctcctgacagcattaacacagacaaatacacaagacttcaaacatgctttaaaatgacattcagcaaagtacttaaaatttaataaatagcaaatcacacacagatacatttttcataatcattaaactactaaaacagacagttaaagaataaataaaccgcaactgacagtaaaaaaaatatgttgggttttgcaattcacactacttaaaaaggggggatgatctgaatgatttcttaattttcttttgagagtgtagcatgatcccccccaggaataaaaatatatttgaaaaaatcactcttacaacaatgtattttttaaatacaacaaataaatatgaaaccagcaaagcaatttcaagttgtaataaaaatgtcccccgcccccagccaaaagctatggaaatatatagttgctgtggtagcaaataatagtatttaaagtgatagtgcttgtgcactaagctcatctgagaccttgatataattttagtgcaaatccctagggtccaatgcaagcgcaaccctgtattagggaaagacattaccaggtggaacttatcttgtacaatttttgtacatgttttataaagttcaagatttaatgcatagtagaatatcttcatccacttaattctgttgctaaatagagatgaaaaaagaaatgacttgggattttaccatttggtttgtaccatgttagagtattaaagtcaacattagaaaatctttataaaagagttttgtttttgccagtaatttatcgaactctgcctaaatttcacatgattgtatgttaaacgtaagagaaaaatttttagacagtttgtttcccactgacaagttcatatgataatgaaatccaataatagacaatgtcaaacaatgaaaacgcaggtgagtataaggtttcgacgcgtgggtcgacgatatcccgggaattccgaccgtaccagcctgcttttttgtacacgctggtttatattacca

SEQ ID NO: 85852 - DNA, 1526 bp, Homo Sapiens
taggctaggtacgaggccgggtggttgaatcggcacgaggctgggtgaagagatgacacccccagcccaagcccccacggcctctacctcccccagggagccaacatccgaggagactccgcgcaccaaacgtccccatatggagcctaggactcgacgtgggccatctccaccagcctcccccaccaggaaaccccctcggcttcaggacttccgctgcttagctgtgctgggccggggacactttgggaaggtcctcctggtccagttcaaggggacagggaaatactacgccatcaaagcactgaagaagcaggaggtgctcagccgggacgagatagagagcctgtactgcgagaagcggatcctggaggctgtgggctgcacagggcaccctttcctgctctccctccttgcctgcttccagacctccagccatgcctgctttgtgactgagtttgtgcctggtggtgacctcatgatgcagatccacgaggatgtcttccccgagccccaggcccgcttctacgtggcttgtgttgtcctggggctgcagttcttacacgagaagaagatcatttacagggacctgaagttggataaccttctgctggatgcccagggattcctgaagatcgcagactttggactctgcaaggaagggatcggcttcggggaccggactagcaccttctgtggcaccccggagttcctggctcccgaggtgctgacccaggaggcatacacacgggctgtggactggtgggggctgggtgtgctgctctacgagatgctggtgggtgagtgcccgttcccaggggaacacagaggaagaggtgtttgactgcatcgtcaacatggacgccccctaccccggctttctgtccggtgcaagggcttgaggtcaattcaaaaagctcctccagaagtgcccggagaaagcgcctccgggcaggtgagcaggatgccgaggagatcaaggtccagccattcttcaggaccaccaactggcaagccctgctcgcccgcaccatccagccccccttcgtgcctaccctgtgtggccctgcggacctgcgctactttgagggcgagttcacagggctgccgcctgccctgaccccacctgcaccccacagcctcctcactgcccgccaacaggccgccttccgggacttcgactttgtgtcagagcgattcctggaaccctgagggcatctcctggcacctctgtccccttcccccacagactgttagagcctctgctcgttcacccgtgcgccctgcctggaggtccaggccttgctgggtacttctgagcccttgggattcaaagtggcagccatggggccactgttgtgggctttgctcagtgtcactgggcaaagtgtgtcccttccccctccagctcgccctcttctacctcccagcgagacctggcccagaaagggtgccgcagcaaggagtgatatggtttgtctttttaagactggacttgctttatattaaatttgtaaaagtgaaaa

SEQ ID NO: 85853 - DNA, 1878 bp, Homo Sapiens
  misc_feature (24)..(24): n is a, c, g, or t
  misc_feature (1851)..(1851): n is a, c, g, or t
aagctagtacgaggcctgggtgtngaatccggcacgagggaactaggctggggaagtggctgggatgtcctactcccaaagggctggggcatggctttctggattccatttatttatcgaggtgtgagagtcggagggttgaaagagtctgcagtgcattctcagtataagaggtcgcctaatgtcccaggcgatgttccagactgccctgccgggatgctgtttgcggaagagcaagctaagaatcttcttgaaaagtacaatagagacgccctccgtgcaaaacggcccaactacgttaagcttggcactctggcacctttctgctgtccctgggagcagttaactcaagactgggagtcaagagtccaggcttacgaagaaccttctgtagcttcatctccaaatggtaaggagagtgacctaagaagatctgaggtgccttgtgctcccatgcctaaagaaaactcatcagccatctgatgaagtgggcacatccgatagagcaccccagggaggcagaggaggtaatggatgcagggtgtcaagaatcggcagggcctgagaggatcacagaccaggaggccagtgaaaaccatgttgctgccacagggagtcacctctgcgttctcaggagtagaaaattactgaagcaactgtcagcctggtgtgggcccagttctgaggatagtcggggaggccggcgagctcccggcagaggccagcaaggattgaccagagaggcttgcctgtccatcttgggccacttcccccagggccctggtttgggtcagccgtgtccctgctcagcaagggcagccccgagcctcacaccatgatctgtgtcccagccaaggaggacttcctccagctccatgaggactggcattactgtgggccccaggaatccaaacacagtgacccattcaggagcaagatcctgaaacagaaagagaagaagaaaaggcagaagaagcagaagcccaggacgtgcctcttctgatggccccgcgggggaagagcccgtggctgggcaggaagctctgactctagggctgtggtcaggccctctgccgcgtgtgacgttgcactgctccagaactctcctaggctttgtgactcagggagatttttccatggctgttggctgtggagaagccctggggtttgttagcttgacaggcttgctggatatggtgtccagccagcctgcagcgcagaggggcttagtgctactgacgcctcccgcctctctgcagtatcgatttgcgaggattgctattgaggtgtgaatgcgtgcttgtatcccagcagggcatagataatacgttattattgtctgccaagttctacatgtggagaatctgcttctgctttaaaatatcatgtgaaactccctggaaacaagaataaaaaattatgtattatgcagatgatgaaatgtttacatcattccagtaatgtcattgattttcatctttccctgtccttgctgtaatacttttaaattatttggccaaaagctttgtattatgatctcttggtctgtgtagttgtggctgaaaataatgagaagctctacgagttatcatcccctttttttgttagaaacaaagggcttgtcaggtctatttgaaaaacctcatagtcatgtgataagcaacaatagatgtttaatgatttcactgttatagcagaagaccagagaagacgcttggcctctgtacatgaaatatgggctcctgatggacctcattcaattctgtactgtgatttccatgcccaacaactcaagccttaagagagaaatcatggacaactgatttctggctgttttcaggcaggcaccgntttatggcgtcagtgcctaggctggaa

SEQ ID NO: 85854 - DNA, 1122 bp, Homo Sapiens
ggggctgctgtgttggaactgccagctagactgctcaccaaaatgggaggcagcctctgctgctgtggtgaaggtgaagacacactcagcgattcagctctacagtatgcactctgggatctcccatttgctaaggaaggatcttagctttgagaaaggtgtcaagcctgtggcagcagagcttcctggggagtcctcagagcaagtcattgccattgtcgaagtgtcttctaggctttattttggggccattacctcgagcactgtttcttgtctggtttcctaatgtcagcaactgaagaaaagacctgtatacacaggacacagcatggtctgacgctcacagtgttttcctttctctctgcagagggattcagcactttgggcaagtggttgcacagaggatcccgtggaagaattcatatatgaatcagatgagaatgccccaggaccatcgtaggtcaggccacctgcttttgtcaaagaaaaaagataacccctatttgaattaaaatatgagaatctgaccatatgtatcataggtgacttacacagtgtccttggtaaggagaatttagagtgagagtctgttccccactgaggtttgatttaagatggcagaagaaaatgacatcatcagccactcagcagcttgattctctccttggggcaaaatcacttaattgccaagcaacatggacttacaggaaacatcctccaataaaaacttaggtttttagcatgattcgataccaacaagccctctcccggcacctgcagaaaaagtggggaaaatccccgaagaggcagaaacaaaacctagtgagctgaaggatgaggctgctgaagagcctgagctcacttgttgtggcctttgtacttatgctggaaatccctaaagattcatccggaagggccgccagccagtggatttcccgggcccctcagccctctggagtgtacgagttttggagaaacctcttcctctgtatatgcttttgactttcctggactgatgtaaaaatactcttttctttgacctgtttatttttaagacacgacgtgattgtgtcagcttatattttattgctgaagtaaattttcaaatgttttattagtaaa

SEQ ID NO: 85855 - DNA, 427 bp, Homo Sapiens
aggtgccactgtccggggcggcatcctcacttccagcggcctccaacgcggcccttccctgcccccttccggctgtagaagaatgaggtggtatcaggaaaaaggggcccctccagtctctgaaatgggccccaggccctcaattcaggaagcccattccccaaaatattagccctccctgcccagaggaagcagtgagcaaaacaactgtcacctcttttgggttctatgactggggggcagcggctggtggtcaaagcctcgctgacatgtgggagctgatatttgggggccagtgcagggtgttcatgggggagctgatgaatgtttatgagtcaggggccagggtggggggaggaagggttggatgatctgggcatgggtgggtaacacgcaggaagggctggggtgaaagagacaggaaatg

SEQ ID NO: 85856 - DNA, 1139 bp, Homo Sapiens
tcttttcttcctttctttctttactggccgaaaaggtctaaggagcgagcctgggtggcgttctcagacgagggaggagtgtggcactttggcggggaaggggcggctcagccctcgggccctcgcccgccctctccgggtctggagcgtctcctcgcgccatccctgcaccgccagggggaacgtgcccatcgcagccgaggccagagggacccccgtccagcagagactggaaccctggtctctggccaccgcccccatccctcccccagctcctaacgccttctcttctgtgcccccatctccagaggaggctgcggaggaggaggaggaagaagaggaacgccccaaaccaagccgccccgtggtgcctcctttgatcccgccaaagatcccagaaggggagcgcgttgacttcgatgacatccaccgcaagcgcatggagaaagacctgctggagctgcagacactcatcgatgtacatttcgagcagcggaagaaggaggaagaggagctggttgccttgaaggagcgcattgagcggcgccggtcagagagagccgagcaacagcgcttcagaactgagaaggaacgcgaacgtcaggctaagctggcggaggagaagatgaggaaggaagaggaagaggccaagaagcgggcagaggatgatgccaagaaaaagaaggtgctgtccaacatgggggcccattttggcggctacctggtcaaggcagaacagaagcgtggtaagcggcagacggggcgggagatgaaggtgcgcatcctctccgagcgtaagaagcctctggacattgactacatgggggaggaacagctccgggagaaagcccaggagctgtcggactggatccaccagctggagtctgagaagttcgacctgatggcgaagctgaaacagcagaaatatgagatcaacgtgctgtacaaccgcatcagccacgcccagaagttccggaagggggcagggaagggccgcgttggaggccgctggaagtgaggatgccgccccggacagtggcacctgggaagcctgggagtgtttgtcccatcggtagcttgaaataaacgctcccctcagacacccgctgggttctctgatgttattatggttgagatgc

SEQ ID NO: 85857 - DNA, 1344 bp, Homo Sapiens
  misc_feature (1016)..(1085): n is a, c, g, or t
gggtccggaattcccgggatatcgtcgacccacgcgtccgcctgttcaagtttgagtgacttagagttctataaagaggtgctatgatgccatcaaacataatcatattggacagaaacaatcttcaatagaacttaaatcatgtgccatttaatactgttgctggacagctgataaaactaccttctgacaaagtttgatttaattagactctaataaaaggtcctatgagactttctaaaagactatattgggaagaaagaaacctcagaaaagtctaaattatcaagtagtaccatttaaatactcttactggacagctaataagctaccttcagacaaagattgaatgattaaattgaactccatacagaactgctaaggtgtcttcaaaaaggacttgagaagatgaaagcatctttagaagggccacttaaattcacttgcttgatagaaataaagcctcaagcaagttgttataacttcaggattcgacttcactgactctaagagtatagacatccataatttgaactaatgaatagtccacttctgttcattgcttctctgtcacccccatttgccactaccataatgagtgatagatacatcttcatcacctctggaaatcatctcaggatctaaatggaaactgtataaagcctatcatttttactgatttaaactatgtaaactcattattctttttatgtaatgtgctgttgttattgtttacctgcataaaaatatttatgagggttttcaacagtttacttgagacctcatttttgcccattttttttccttcccgatatcatgatctcctcagctgaaactttcttaccttgggggttgttcaggaactgactctcatggggaaagagggattactatttctgtgttcctatctcttggtaactgcttaaccacagtcagtcttgaactaatggaaggagcactggaccttgggtccttgagacctggggttcatgttcagctctgcccacctgattatnnnnnnnnnnnnnnnnnnnnnnnnnnnnnnnnnnnnnnnnnnnnnnnnnnnnnnnnnnnnnnnnnnnnnntaccctgggcacaaatatcacaatattagtgataattgaatataattataagtaacccaatggcctattaaaagtacaactaggaagggctgaataaccctaatatcactatattcggagcatttttggaccttatcatggaaccactgagaaaaactagggtttttgaaattcttttacctttttaaagcaactttcctccccattttttatgcccaattatagaaaaattttaaaaacaaaaattaactggggccta

SEQ ID NO: 85858 - DNA, 751 bp, Homo Sapiens
  misc_feature (569)..(569): n is a, c, g, or t
  misc_feature (596)..(596): n is a, c, g, or t
  misc_feature (598)..(667): n is a, c, g, or t
ggggcgcgctgaggctccggcggacctctggtggacatggctgcttcccgcttacccccagcgacgctaacgttaaagcagttcgtaagaaggcaacaagttcttctcctctacagaaggattttgcaaacaattcggcaagttccaaatgattctgatcgcaaatacctgaaagattgggcaagagaagaattcagaagaaacaaaagtgccaccgaagaggatacaatccggatgatgattactcaaggcaatatgcagctcaaggagttagaaaaaacacttgctttagcaaaatcttaactatagcattattctgaaggattttcaaagtctccatgtgttttgttgcatttaggattaacaatggacaacacaaagcccagtcttactatttatatgtacagtatttggtgatagagagcaaaggaaaaacacatcagaacagttgccttaacactgaaaaacataccctgcattttgaaaatgtttatggatgtctcagcagttcttaaaagaagaaaaaaaccactaacaaatggccagtagatgctggacacaatcattangggaagtgtaaatcaaaactactatgnannnnnnnnnnnnnnnnnnnnnnnnnnnnnnnnnnnnnnnnnnnnnnnnnnnnnnnnnnnnnnnnnnnnnngaggtccagggagttcaagacccaccctggcccagcatgggggaaaacctcctcctcctactaaaaaatacaaaaatttaccct

SEQ ID NO: 85859 - DNA, 539 bp, Homo Sapiens
gacttaggacttttgagtgatgctagaatgagttaagactttgggaagggatgattatattttgcaatgtgagaaagacattagatttggggggctgggggtagaatgacattgtttagatgtttgtctccttcaaatttcatgtttaaatgtaatccccagtgttgggggtggaggtggggcctgatgggaagtgtttgggtcatggtggatgatccctcatgaatggcttagagccactggtgatgagtgagttctcactcagttcgtgtgagatctggtggcttaaaagagtctgctccccctttgccttccattgtgattgtaaccttcctggggccttcatcaaaggccaggcaaatattggtgccgtgctagtatggcctgcagaaccgtaagccaaaacaaaccttttttctttataaattacccagcctcagttattcctttatagtgatgcaaaacgggctaactatataaatttgtaatttttaagttatagattgtttttattaaacacttatgaatactgttaaaaa

SEQ ID NO: 85860 - DNA, 1098 bp, Homo Sapiens
tttttggtttgtatttatagatattttacaaggttaaataagaacaacaataataataaaaaaattgaacactaaaatgaacaggatttttttctctttttaatattctttccaaacgtgaccagtgttgctgagtgacactcaagtaactggtggtttttcctgtgcagctggctgctcgggactgttcaggtggagttggaagctgatgcagaagcagcattattggtctgtccacggtctccagtattagcatctgacgctgctgtggcatttgtgggggttgaagcagctgcttgaatccgagcatgaggaggaataaggatggtagccagaggtggattacttgacagttcttgagtggtgaagttgaagagtgcaggtgtgtctcgcccatttggtagtttgacatttgggtcccgtaattcatcaaaaaatgaatgtgcacaagcttccatgttaaccgcagctggtgtatacaccaacagacgactacacactggaagcctgtgcagttggtgtatactccagcaaacggctacacagtgcaattgcctccgggggagttcggggtcggaagacccgcactcctgaggtgaaatgtcctgttcctgacgaatccttaatccaaggatgtgccttaatttgagggaatttaaattctggggagtttgggttcatttctctgatttgctcccttggtggagttcccaggaccttgattatttctaccaactgatccacaccactatcccctggaaatattggttggcctaataacagctcagccaacacacagccagcagaccatacatctatactagaggtataatcagtggctccaaaaatcaactctggtgccctatagtaccgagaacagatataccaaaccttgggttctcctcggaccagctgctttgcacttccaaagtcacagagttttaatacagcagtatccggatccaaccaagagggttctgggggtttaataatccccgatgggcagattcccaaagggaatgggatataaggcctaaaactttccggaaacagcctgaaatacattataacacacctttggacataaaaatccccacg

SEQ ID NO: 85861 - DNA, 428 bp, Homo Sapiens
ttatttttgtgtttaattcttcaatgattgtctccttttcctgtatttcttctttatttgagttttctacttttttatcttgttccatttcatatactttaattttctcttgcaagaaactaatttgcattgtgaagtcttctttctttttctgataatcttctaataagtggtcttgttcttcaagctgctgttgatgagtgaggatctgttgtttggcttgtagtaagtctgcagctgtgctactatgagtgctgtttctcagagtttcactagcctgtaattgctgaaattgaatctgtaatttttgactctgttctgtcaactctaaaaattctctcattgtctcatccttttctcttcttgcttgttgtaaattagcagtgagctgggttataatgccatctctttgtttaatggcagcttca

SEQ ID NO: 85862 - DNA, 509 bp, Homo Sapiens
gaaacctataagcctatgtgtttgacagtgaagtatgttttatggacttaaatgccacaaacagttaagtccattggcttggagatgacaagcacgagtttctggtatgtctagtgttctcattcactgattcagtcagtacacagataatcactatagagaacttaagaggctggcttatgttatacctaaatttttactttcttgtatacaacaatgctaaaattgagcagattgataactgccagcaaaccatagatttaagataaatgaatgatttacccaaccctaaaattccatgggtaaaaattttgattcctttattttcaatactgcgttccttataggtcttacatgcatatgcaaggatattttatcttattcattcatttcatactctcaaaacaccaaacttcaaaaagttaattattgtcataatgcattattccatgtgtggtgtcaatacattttagcggacaaagaagaaacatgccagttaaaacattaaa

SEQ ID NO: 85863 - DNA, 941 bp, Homo Sapiens
aggggcatgggggttcccacaagtaccattctccaccagtgcctttttgttgaggttcagacatttcgacgggataaaaatgggcaaatactgattcaagttgaacctctgccggtttcctgatgaagaacccaagctacccgcggcaggcatgtctctaggagggtggatggattcaaactgattgctgaattcgggcggtaacggtggtagctcatcagctgcggggaagtcttctgggggtggaggaaaatcactttcgatgtcgtagcctccagggtaatagtccgtatcgatggcgtttggatctgctgagtacaggggtgtctgctcatcaatcacctcatagttggggaactcttgtatgtccggcagaggaacgcttggcatccaatctgatgtatcccagtgatacccattgtcatcgcacgattcggactggaaggagctcagggactgcacttcagacaggctttcccgggcactgtatggctgggaaggcttttcctctagaggcttcttggaaagacagggatcaagatccaccacttttgtgtcatagtcaaagtcccagctaggcttctggatggagtcgctgtcagaaggggagtttgaagggggtgggggaggcaggtttggcgccacgctgcagaccgccactgcttttcggtgcccgtgcacagactcggggttaaaagtgctgaattcgggatgctctgggatagcagatccttcgaaggaatttcggtccagattgtttcttaagtcacttggaatactcggggtgtaggaaataggccggacaggcacctggggtggtatgtctgagtaaatgttcttatttagcttggaatcaaaatacggtctttgcaagaaagccgtagcgggtcccaggtgcttgtctttaggttcagcctgatgcttctttttccgactaatca

SEQ ID NO: 85864 - DNA, 1691 bp, Homo Sapiens
  misc_feature (1626)..(1627): n is a, c, g, or t
  misc_feature (1629)..(1629): n is a, c, g, or t
  misc_feature (1638)..(1638): n is a, c, g, or t
  misc_feature (1647)..(1651): n is a, c, g, or t
tactatacggtctaggtacgaggctgggtggtaaattcggcacgagggtggaggcggggtcgagatggcggcgcctttgaggattcagagcgactgggcgcaagccctcaggaaggatgaaggggaggcctggctgagactgtcatcccccagagaaagccatctttgtatggcagcctgacttgtcaaggaattggcctagatggcatcccacgaaggttacagcttcaggaaggatttactgtgaactgaacataaacaagaaaaagcattcatatttcatgtccaaaggaaaatgcatcttctaagtttttggggcaccatatactactttttccagcaattcatacaaagagtataacatgcctggacatttccagtcagaggaggtcttggtgtgtcttctagttactgacgggaccatgaaaatctggcaggcttccaatggagaactcaggagagtattggaaggacatgtgtttgatgtgaattgttgcaggtttttcccatcaggccttgtggtcctgagtgggggaatggatgcccagctgtaagatatggtcagctgaagatgctagctgcgtggtgaccttcaaaggtcacaaaggaggtatcctggatacagccatcgttgatcgggggaggaatgtggtgtctgcttctcgagatgggacagcacgactttgggattgtgggcgctcagcctgcttgggagtccttgcagattgtggttcttctatcaatggagtggcggtgggtgctgctgacaactccataaaccttggctcccctgagcagatgcccagtgaacgggaggttggaacagaggccaaaatgctgctcttggcccgggaagataagaaacttcagtgcttgggactacagagcaggcagctggtgttcctctttattggctcagacgctttcaactgctgtacttttctctctggcttcttgctattggctgggactcaagatggaaacatttatcagctggatgtgaggagtccaagggctccggtacaagtcatccacagatcaggagcaccagttctatccctgctaagtgtcagagatggattcattgctagccaaggtgatggaagctgttttattgtccagcaagacttagactatgtcactgagctcactggggctgactgtgaccctgtgtacaaggtagccacatgggagaagcagatctacacatgctgtcgagacggtcttgtacgacgctaccagctttctgacctctgacttcttggaaagagcagtcccggttagtgaaaaggtttgaccctgatcaacaatgagcagaaacatcatcagtccttcccaaggaccatgggcgtttaatgtctggggcaccccttggaaatcacagaaagtcagctgtactggcccgggggaaactctcatcccaagacctactttgaactgagtaagaaggtcattgtgcccactgcatttgttccaacttctccttgtataaactcaccccagcaacacagggcaaggatatagatgcttttagtttgttcttaaaacagttttggtaaatgtttacaaggacctcagtactaaagcctgtttctctggagggaattaagaaatatgttttggganncnccccctgcnaacataaannnnntcccttgttcggccgccttcggcccctcaaaaaacctttc

SEQ ID NO: 85865 - DNA, 673 bp, Homo Sapiens
  misc_feature (102)..(166): n is a, c, g, or t
cggggtcgagatggcggcgcctttgaggattcagagcgactgggcgcaagccctcaggaaggatgaaggggaggcctggctgagctgtcatcccccagcctnnnnnnnnnnnnnnnnnnnnnnnnnnnnnnnnnnnnnnnnnnnnnnnnnnnnnnnnnnnnnnnnntctttgtatggcagcctgacttgtcaaggaattggcctagatggcatcccagaggttacagcttcagaaggatttactgtgaatgaaataaacaagaaaagcattcatatttcatgtccaaaggaaaatgcatcttctaagtttttggcaccatatactactttttccagaattcatacaaagagtataacatgcctggacatttccagcagaggaggtcttggtgtgtcttctagtactgacgggaccatgaaaatctggcaggcttccaatggagaactcaggagagtattggaaggacatgtgtttgatgtgaattgttgcaggtttttcccatcaggccttgtggtcctgagtgggggaatggatgcccagctgaagatatgtcagctgaagatgctagctgcgtggtgaccttcaaaggtcacaaaggaggtatcctggatacagccatcgttgatcgggggaggaatgtggtgtctgcttctcgagatgggacagcacgac

SEQ ID NO: 85866 - DNA, 696 bp, Homo Sapiens
aactgctgtacttttctctctggcttcttgctataggctgggactcaagatggacacatttatcagctggatgtaggagtccaagggctccggtacaagtcatccacgatcaggagcaccagttctatccctgctaagtgtcagagatggattcattgctagccaaggtgatggaagctgttttattgtccagcaagacttagactatgtcactgagctcactggggctgactgtgaccctgtgtacaaggtagccacatgggagaagcagatctacacatgctgtcgagacggtcttgtacgacgctaccagctttctgacctctgacttcttggaaagagcagtcccggttagtgaaaaggtttgaccctgatcaacaatgagcagaaacatcatcagtccttcccaaggaccatggcgtttaatgtcttgggcaccccttggaaatcacagaaagtcagctgtactggccgtgtggaactctcatcccaagacctactttgaactgagtaagaaggtcattgtgcccactgcatttgttccaacttctccttgtataaactcaccccagcaacacagggcaaggatatagatgcttttagtttgttcttaaaccagttttgttaaatgtttacaaggacctcagtactaaagcctgttctctggaggaaataaagaaaatatgtttggaaaaa

SEQ ID NO: 85867 - DNA, 566 bp, Homo Sapiens
gtgtgagccaccgcgcctggcctctctctgacttttgacttctccctctgggagatttttcctttttgatcatcctgttcggacacacctgaaaaagtattagagaatatatcttcattggggacttggtagctttctcaggctacttccctgcttatagcaatttggggtgccaaaagttgttttaggtcccctgtggtcacagtctcttttagaccaggctggtgtctcttttggggatatcattcatgctaaacaatgatcaatttttatttccatttgattttagttactccctgggccagtagccacacctacacctcttttgaggtaactatttaccagacatatctctccttctggatttaattacaggccactttgagcttatcaggtttctgtgagaccatgtcactaatcacttttcctgtagcaattttgctcaactaaaaggatttactagggttagggtagggcgaggtgggggtgtcttaattcctttagagactttaacgtgcccttagttttgtctgtgtcctgaggctaggtcttaatcatctttcctt

SEQ ID NO: 85868 - DNA, 2142 bp, Homo Sapiens
  misc_feature (1576)..(1578): n is a, c, g, or t
  misc_feature (1580)..(1582): n is a, c, g, or t
  misc_feature (1586)..(1627): n is a, c, g, or t
  misc_feature (1633)..(1637): n is a, c, g, or t
  misc_feature (1650)..(1650): n is a, c, g, or t
  misc_feature (1670)..(1670): n is a, c, g, or t
  misc_feature (1691)..(1702): n is a, c, g, or t
  misc_feature (1718)..(1749): n is a, c, g, or t
  misc_feature (1773)..(1825): n is a, c, g, or t
  misc_feature (2056)..(2095): n is a, c, g, or t
ggcacgaggggcacggccttcaagcgcgggacgcgacaaagtcatggaccgcaacccctcgccgccgccgccgggtcgcgacaaggaggaggaggaggaggtggccggtggagactgcatagggagcacggtctacagcaaacactggctcttcggcgtcctcagcggactcatccagattgttagccctgaaaacaccaaatctagctcagatgatgaggagcagctgacggagcttgatgaagaaatggagaatgaaatttgcagagtatgggatatgtcaatggatgaggacgtggctttatttctccaagaatttaatgctcctgatatattcatgggagtactggccaagtccaagtgtcctcgattaagagaaatctgtgtgggaattttaggtaatatggcctgtttccaggagatatgtgtgtccatcagcagtgataaaaatcttgggcaggtgttattgcactgtttgtatgattcagacccacctactctgctggaaacaagcaggttgttgcttacttgcctttcccaggcagaagtggccagtgtttgggttgaaaggatccaggaacatccagctatttatgatagcatttgcttcattatgtcaagttcaacaaatgttgacttgctggtgaaggtgggggaggttgtggacaagctctttgatttggatgagaaactaatgttagaatgggtcagaaatggggctgctcagcctctggaccaaccccaggaagagtctgaagagcagccagtgtttcggcttgtgccctgtatacttgaagctgccaaacaagtacgttctgaaaatccagaatggcttgatgtttacatgcacattttacaactgcttactacagtggatgatggaattcaagcaattgtacattgtcctgacactggaaaagacatttggaatttactttttgacctggtctgccatgaattctgccagtctgatgatccacccatcattcttcaagaacagaaaacagtgctagcctctgttttttcagtgttgtctgccatctatgcctcacagactgagcaagagtatctaaagatagaaaaagtagatcttcctctaattgacagcctcattcgggtcttacaaaatatggaacagtgtcagaaaaaaccagagaactcggcagagtctaacacagaggaaactaaaaggactgatttaacccaagatgatttccacttgaaaatcttaaaggatattttatgtgaatttctttctaatatttttcaggcattaacaaaggagacggtggctcagggagtaaaggaaggccagttgagcaaacagaagtgttcctctgcatttcaaaaccttcttcctttctatagccctgtggtggaagattttattaaaatcctacgtgaagttgataaggcgcttgctgatgacttggaaaaaaacttcccaagtttgaaggttcagacttaaaacctgaattggaattacttctgtacaagaaataaactttatttttctcactgacagttgaaattgacttattggaaatattaactaaagcccatattagaccataannnannnaaannnnnnnnnnnnnnnnnnnnnnnnnnnnnnnnnnnnnnnnnntttttnnnnnccccccacaccancccaaaaaatacccccccanactccctttcgcccattgtgnnnnnnnnnnnnaacctaacaacaggannnnnnnnnnnnnnnnnnnnnnnnnnnnnnnngggccggcgcccacaagcgttgtnnnnnnnnnnnnnnnnnnnnnnnnnnnnnnnnnnnnnnnnnnnnnnnnnnnnntagaagaaattccactcccgccccctaataaagaagctttcccgggccccatacccagggggggtttttcaaaaaaccccccgctggggtgtttttttgtaaagggccgcgccctcggggccctttcccccccaaggcaaccgcagggggaccctccccacaaaaccatattggcgccccccggcgatggcccctttcttacacggccgctcggtttagtaattttatctnnnnnnnnnnnnnnnnnnnnnnnnnnnnnnnnnnnnnnnnaagggggaattattttgaacccccggaccgggaaaacggggtgggtc

SEQ ID NO: 85869 - DNA, 1326 bp, Homo Sapiens
ttcattatctcccaagtagccagtggtgacatcaacacaagtatccaagctctgacacagatcgatgaggtcctgagacaggaagacaaagctgaagccatgtccggccatattgatcagtttctgatagccacttttatgcagctaagactcatctacaacacacacatggcagatgagaaattggagaaggacgagatcatcaagttgtatagctgtatcattggcaacatgatttcgctgtttcagatagagagccttgcccgggaggcctccactggagtactaaaagacctaatgcatggcctcatcaccttaatgctggattctcggattgaagatcttgaggaaggacaacaggtcatccgctctgtgaacctcttggtggtgaaggttctggagaagtcagaccagaccaacatcctgagtgccctacttgttttgctccaagacagcctgctagcaacagccagttctcccaaattctcagagcttgttatgaagtgtctctggagaatggttcgactgttgcctgataccatcaatagcattaacctagacagaattcttctggatatccacattttcatgaaggtcttccccaaagagaaactgaagcatgcaaaagtgaatttcccataaggacctaaagaccctgctacacaccttatgccaaattaaacaggcgccaagatcctgggaacaactaaagatgatcgagaacaaaaacgagtcttgagcttggagggccatctatggccggatgaaagaacccagttctgtggcccaaatggggagcccatttgctcatgggggaaaacacggagaatgggggccccttcggacaatataagtggtagaaagtcgctataaaggccgcaaggaggaacgacatattctaacggagagaatttctagcagaaatggggccttaagaaaaacccatttagagggggattacacgcaggagttatgacacatatcaggacagaacaacccgaatgtagtaaccagtacacacgctgggacaagatcccaagcagtgtccgacacatagctggcaaaggagcctcgtgggtagaaaggaagagaggacgaggagagagaaaaacgacaggacgagcccccacggaaaaaaatgaggacaaccaccccagaccgaggcgcgcacgatcacacgagtagacagagccagcaccgccacgggaagcactgaggtgggagtgaaccgaaaaagcagccatcagaaacgaacataagcgacgcacccgaaccagacacggaggaaacgaggaagcacaagcagcaaagaacgcagaatagaca

SEQ ID NO: 85870 - DNA, 265 bp, Homo Sapiens
tttgcttttattttataagaatataacatgctgaaacaggaaaatggggattgcaaacatcattcatatctaggaaaccagctccatttgtcacaataaataaatatttaaacagtgaggagttcctgacaggctccaagaggttcccagcacattcagaggtagagtctggtagagaaagggagacagtcaggctgaaacccctgctgagattctccagtagaggcaaactgaaattacaataataaataacaacagcaccaac

SEQ ID NO: 85871 - DNA, 391 bp, Homo Sapiens
ccaagtagtctggtatgatctgtggttccttagaatattgaggatctctttaaaaaatgaaatttctgatctcaccccatattactaaagcaaaatttccaggggtagggactgggactccagaaccattaataaaacaaaacaaaacaaagcaaaatattgatgatcaggcagatttgaaaacagtgacattgcttgatctctgaatggatggatgcccttgggtggtcacttttcttcctaggacttgcctttgttatctgtaaattagaatggctatactttcagacttcacaatttaaagccacttttttctattaacagttgaatgaaccagtgggacacattttaacgtcttcttatgttgactaaaattatagttagagctgag

SEQ ID NO: 85872 - DNA, 799 bp, Homo Sapiens
cgcatctcccaggttagctgcgtgtccgggtgctaggctgcagacccgccgccatgacgctgcgcgcggccgtcttcgaccttgacggggtgctggcgctgccagcggtgttcggcgtcctcggccgcacggaggaggccctggcgctgcccagaggacttctgaatgatgctttccagaaagggggaccagagggtgccactacccggcttatgaaaggagagatcacactttcccagtggataccactcatggaagaaaactgcaggaagtgctccgagaccgctaaagtctgcctccccaagaatttctccataaaagaaatctttgacaaggcgatttcagccagaaagatcaaccgccccatgctccaggcagctctcatgctcaggaagaaaggattcactactgccatcctcaccaacacctggctggacgaccgtgctgagagagatggcctggcccagctgatgtgtgagctgaagatgcactttgacttcctgatagagtcgtgtcaggtgggaatggtcaaacctgaacctcagatctacaagtttctgctggacaccctgaaggccagccccagtgaggtcgtttttttggatgacatcggggctaatctgaagccagcccgtgacttgggaatggtcaccatcctggtccaggacactgacacggccctgaaagaactggagaaagtgaccggaatccaggggtaggaggaagaggaagatagaaggaaaaatgaacatcatcccccttgtatttttttcattgtggaaaaatgcatgtaacgtaa

SEQ ID NO: 85873 - DNA, 725 bp, Homo Sapiens
  misc_feature (471)..(472): n is a, c, g, or t
  misc_feature (480)..(480): n is a, c, g, or t
  misc_feature (681)..(681): n is a, c, g, or t
ggggaaaatgaggagccaatggaaacagatcagaatgcaaaggaggaagagaagatgcaagtggaccaggaggaaccacatgttgaagagcaacagcagcagacaccagcagaaaataaggcagagtctgaagaaatggagacctctcaagctggatccaaggataaaaagatggaccaaccaccccaagccaagaaggcaaaagtgaagaccagtactgtggacctgccaatcgagaatcagctattatggcagatagacagagagatgctcaacttgtacattgaaaatgagggtaagatgatcatgcaggataaaactggagaaggagcggaatgatgctaagaacgcagtgggacggaatatgtgtatgaaatgagagacaagcttagtggtgaatatgagaaagtttgtgagtgaagatgatcgtaacagtttttactttgaaactggaagatactgaaaaatggnntgtatgangatggagaagaccagccaaaagcagtttatggtgataaagttggcttgaattaaaaaatctagggccaactattaagataacgttttcagggaatctggaaaaacgaccaaaatttatttggaagaacttagggaaaccggattccaaccgtaattatgaaaaatattccgcttcttttcaaaaaccagggaggaccccgnaaggaaacctttgtgggagcctgctggacctggccaaaagggtt

SEQ ID NO: 85874 - DNA, 576 bp, Homo Sapiens
ttatctactgactgaaatcagtggtgttacattttcttgtccaaagctgaaaatgtgtatacacttaaacgtgcacatttgaattcatttgctgaccggaatggtcaaatctctccacctctagtcagagtataattttggttgtaattaaatttttaaaatctgctgatctctgtagaatcttagaggcttgatgatgatggtgttggtgaaaataagaaagaattgcagtaaagtcttgtctggtgacccagagatcaccatgacttgaggcacaaatcactgtggggaaacaattttttgtgatgaaaaggcagcatttgaatactcctgttagtagcagaaatatattatgaaaattaagattattgtctgattgaaacatgaaacaactcatgtctttattagtaacatcataagatagttacatttatgtgctgttagaatatgttgatttttatcaggctttccttgttttgatttatggctgttcctgatttttcatatgtggaaatatacctacctcttccgttggaaagaacatttaaaattaaataaattttaattaaaaaatca

SEQ ID NO: 85875 - DNA, 893 bp, Homo Sapiens
attagctaggtagcgaggcctgggtggtgaatcggcacgaggcaggtttagaagttcgcaatggcgcgtacgaagcagactgctcgcaagtccaccggcggcaaggctccgcgcaagcagctggccaccaaggcggctcggaagagcgctccggccaccggcggtgtcaagaagccccatcgctatcggcctggtacagtggctctccgcgagattcgccgctaccagaagtccaccgagctgctgatcagaaagctgccttttcagcgtctggtgcgtgagatcgcgcaggacttcaagaccgacttgcgcttccagagctccgcggtgatggcgctgcaagaggcatgcgaggcctacctggtggggctctttgaggacaccaacctgtgcgccatccacgccaagcgggtgactatcatgcccaaggacatccagctcgcacgtcgtatccgcggcgagagggcttgagtctcaaggactcactgattacataccccaaaggctcttttcagagccacccacatgcgcgctgaaaagatctggtttccccccagaatttcttcccgggtacttggtttggccctggaataaataagggccccatttccccgacctttaatacatcctggttcccgaagaaattcacccttattcccttttttgaaaggctaaattttgggggaagtctttaacatcccaaataaatgggccggggaatttttttcccctaaaagccattttgaaggggtaaacccaaaaaagggtccccttccggggaaattggggttctccccaatttttccggaaagaccccgggtttttttaaccccgaaaaggggggcccttcccaaaaatttttccgggggaaaaccctgggaaacctttggggg

SEQ ID NO: 85876 - DNA, 272 bp, Homo Sapiens
ccccctttgtcccagacatctatgaggaaggaaactatgaggaggaaggaagtgaagatgtctgggaagaaggggaagattcggacgactctgacctagaggatgtgcttcaggtcccaaacggttgggccaatccggggaagagggggaaaaccggataagggttttccccttttggggatcacctctctgtatcccccacccactatcccatttgccctcctcctcagctagggccacgcggccccacattgcacgaagggggattgaca

SEQ ID NO: 85877 - DNA, 464 bp, Homo Sapiens
tatcagccacactcaaagcctagactgggttaaactcatgccctgtaagtatgtggtggagagaggtgggaactgtttaaatctttgtcttcctttcaacgagcttctccctccctgggtagttattaaagttctagtggtgaacacagcctccaagacgtggaatcttccggaaccgagagctgggaaaatggttctctccaaccatatgccttcaaaaaggaagctctgtggttacctgcgggtccatcacaagttgggttcaaacttgggttctaaattaacagccctcatgtgggacaggcagtgtggcaattaaatttgtttttttctccaaaggaattttcaagtatcaccaaatccttgatacagtgtgtaaacaagacatcttacgaaacagaaagcaagaccacttcgggaagcagcagcacatgacatatctaaaaggatgaaaatggttttag

SEQ ID NO: 85878 - DNA, 817 bp, Homo Sapiens
cagttctgcctgggcccctggggctctgttcccatattggcaaatgagatccccacggccagggagacttcccagccaggctttttccatagtgcagccaactatccagtaaatagactttgttctccattaaaagcccctgtagcagctgagttgctctacctttatcccacctggctcttacgcagtctgttccaagtgagaagttagcagagtcctgtaaacaaagaacagttcaggggccaacctgcgctcccaggtgccaggatgctctcagggtcttcactgtgctcccaggtgccagggtgctcccatggtcttcactgtgctcccagacacttggcttcattgttctcattttgatcctcatttggcatctctaaacgcaggcggtgcagggaatgcacaaagaagcgaggaagtttgcagaccaagttgagttcctccttcccggaccccagggcaggcaggatcagctgccgggcgtgcaggtgaagggggatgtagcgggccttcgactgttctagccccagcttcttcagggtgcccacagacagcttctggggggccaacctattccagtctgagtacttgtgatcaccaaggattggacaatccaatccaaaagacaagtgaactcgaagctgatgttttattccagtgatgggctggagctccacgagggcggaggagagagtgctgctgagcacctggtactgagttacagcaacttgcgcattccggctgcgccgcactttcaccattttcccatcgtccatgcggtagctcggggacaatgtcatcttgtggtgttgcc

SEQ ID NO: 85879 - DNA, 347 bp, Homo Sapiens
ctgcctgagtcacccgcccggccttaacagccataatttaaactagacagtatgggaacagctggagttagaaatcctagaaatcctgcttctgtaactgaccggtttacctctgacttgacttcaaacaggaagccctgaagattgaccttttcaagtacaacacttaaacaaagaactttccctctggaaggatttgtcggctacccttccaaaaacagacaggtgcggcctgacttcaagtgcaggccccgccctcctccggtgagtggccctagccctggaggcagctccatcagcctcagcatcccctcccggcgcccgcacgctcagaaaaaccacaggag

SEQ ID NO: 85880 - DNA, 749 bp, Homo Sapiens
ctatgcttcgctgctccactgaggaacggatgaagagcaactgctctctcggtgggcgtgggcgtcaagtgtccgctgacagaacaaggcaagcagttggctattcaggtgtccaacatcctaggcatggacttctgtggcattgatctccttatcatggacgatggctcctttgtggtgtgtgaggcaaatgctaatgttggcttcctagcctttgaccaggcatgcaacttagatgtgggtgggatcattgcagactataccatgtccttgctgccaaataggcagactggaaagatggctgtcctcccaggactgtcgagtccaagggagaagaacgagccggatggctgtgcttcagctcagggagttgcagagagcgtctataccatcaacagtgggtctacctctagcgaaagtgagcctgaactgggagagatccgggattcctcagcaagcacaatgggggccccaccctccatgctgcccgaacctggctacaacattaacaacaggattgcttctgagttaaaacttaagtgaattcctgctttttggcagcatttaaaccaaatcctactgcttccctagtagttttgagtgaataaaatctggactaatgtgatttcatttgcacagaaactagaaatcccatctgggcactcagcattttttctaacgatgatttaagcaaatggcctagctttgtggtttttacaaagacaaatataaaaacactcacaagaaaa

SEQ ID NO: 85881 - DNA, 201 bp, Homo Sapiens
tagaaaggaaggagtaaaactctttattcatagaacacatgactgttgatgtaatttacaaaaacaccatgagaactcacagtttagcaaggctgaaggatacaagttcaacatcaattgtatttctatttactagcaacaagtggttagaatttgaaattttaaaataccatttagcatcaaaactatgaaatgctgacc

SEQ ID NO: 85882 - DNA, 938 bp, Homo Sapiens
  misc_feature (45)..(79): n is a, c, g, or t
  misc_feature (485)..(504): n is a, c, g, or t
  misc_feature (533)..(762): n is a, c, g, or t
gcgaacgacgagcgcagcgaagtcagtgagcgaggaagcggccgnnnnnnnnnnnnnnnnnnnnnnnnnnnnnnnnnnncagtcgacggtaccggacatatgcccgggaattcggccattacggccggggtagctaacatgcttctggagagcagaaataagcatgtcttctggctactaagtgataaaaagaacattaacaacctttaattaccttcctagtgggaactttttctactttacctacaagttctatatatgtagaaatgaataaatatatatttaagtacagttttcatgaggaagttttaaaagaccatgttcctaagcttccaagaaggttttggatactagaagtattaatctatggcttttctcccagtaaaaccataggcctgaagttcacattgggtctttaaatcttttagatatatactggtcatttcagaaaattcttcatagtggtattggccttatatttaacnnnnnnnnnnnnnnnnnnnnggagacaaagccacactcggtctcctttnnnnnnnnnnnnnnnnnnnnnnnnnnnnnnnnnnnnnnnnnnnnnnnnnnnnnnnnnnnnnnnnnnnnnnnnnnnnnnnnnnnnnnnnnnnnnnnnnnnnnnnnnnnnnnnnnnnnnnnnnnnnnnnnnnnnnnnnnnnnnnnnnnnnnnnnnnnnnnnnnnnnnnnnnnnnnnnnnnnnnnnnnnnnnnnnnnnnnnnnnnnnnnnnnnnnnnnnnnnnnnnnnnnnnngtgtaagccattgggccgggcctttttaactttaaacatgttttaggaattcacctgaaagatcaaaatatcatgggttgtgaacctcatcaatgtgatacgcagtgagtgactgaagttccaaataagaaagccggaccaagaattccattctaatctaaagtgacagtttgact

SEQ ID NO: 85883 - DNA, 507 bp, Homo Sapiens
ccccaccctgccctgccccagagatctccagttcacagtgttcatcaggcgagatacttttggacccacaaagccagtttttcggggggatgctcagtgtctacctgcagtgccaaagttttgcttgaacagccctcttctgccgcgcctcccagctccaccccctatcaacgtgggtgctggctgcttctgcgtgaggagcttcctctgatcacctgtagcatctttagtgccttcgtccagtcggcctgcaaatcccatttcccagagaggcttgggcagggcccacttgccacttggccctgtgcccagagcgttgggggcagatggcagccaggggaagaagggaggtggggaagggccgccaccgcttgagggtcccctcccttgagaggaggccccatggcagttttcctgagttcttgatccactttggtttaaacaacttttgtgaagctatgtgagatttgactgcatttcaaaagacaaaacacatgtttttttctg

SEQ ID NO: 85884 - DNA, 1221 bp, Homo Sapiens
  misc_feature (385)..(397): n is a, c, g, or t
  misc_feature (589)..(598): n is a, c, g, or t
  misc_feature (752)..(752): n is a, c, g, or t
  misc_feature (888)..(888): n is a, c, g, or t
  misc_feature (1073)..(1073): n is a, c, g, or t
  misc_feature (1081)..(1081): n is a, c, g, or t
cagtcgacggtaccggacatatgcccgggaattcggccattacggccgggggggcggaactggctttgttgaccgggagaaacgagatgggggtgaagctggagatatttcggatgataatctacctcactttccctgtggctatgttctgggtttccaatcaggccgagtggtttgaggacgatgtcatacagcgcaagagggagctgtggccacctgagaagcttcaagagatagaggaattcaaagagaggttacggaagcggcgggaggagaagctccttcgcgacgcccagcagaactcctgaggcctccaagtgggagtcctagcccctcccctgatgaaatatacatatactcagttccttgttattcaaaaagcggnnnnnnnnnnnnncagggaacatgtcggggcgcctccggccctcggagaaggttttcctagacccattccgtttggggggcggcgggcccaggtagggtaaggtgaaacatgggcgccatagcctggtgttcctagggaggatccctggggcccatgacctagcgggctttgggattccctcacccaactaaaaacaaccgcccnnnnnnnnnncaaacgcgggaggcggtctcttgggaacaaaaatccccaggagtgggagggttcctggaaggggtccacttaacttgggggagtcttaattcaaacgaggcgaaggtccgagaccgcgcgaggccctgcgcgattaactctacgacatatcacncggcgcccccggcgcccctggggccacgctttcagtgcgcggagaggaaagggtggtgtggagaaagcttcccatttatagaggcccattctctggcgccgccaaccatggtgagaaacacctcactccgcccaanacgccgggcgcgttgagattggagaaacctcctggagaattcgcgcccccagcgcgggggagatttcacgagcccaaccccctctgggtcccgcgcgcttcggcgtcgggaacataagataatttctttgcgcgccacgttgaggctgggaaagaaaaacggcgcggcgtgccacacaacacaanagtgtggngtctcaccataattcggggggcgccagcgggttgttaaatcactcccacacggacctggggtggcgagacaacctctcgccccccacgaggggaaggtgggcgttgttggaagaatgtcggacaccatgctctatatttc

SEQ ID NO: 85885 - DNA, 896 bp, Homo Sapiens
ggagcacccaagccacggcagggcctctggcagcacggcgtcctcgggagcaggacacctggtcatccccagggctgtatacaatgattccggtggtagactggtagtgagcagcaaatgcctttcgacgataataggtgtcagcttcactgccatgtcatatactggagtgaatatttcaaaacgttgggaataagggcctgcaaaaggcagacgaggaggcacctcggctctcgaggttcctgacaaccgatctggtctgttggtttgaggatgaaggggctccatttctgctgcctccctgctgagaatattctccctcttagcacgcgcaaagattcgactggaacggaggcatgctcctcgtgctgcgctgtctggggtcggaagacaaggggcttctgaaatgggagttcctgagatacaacaaaatgtgtgccttcgaaagaaactgacagctttgtatttggtgaaatggttttaattatactccatgtgtattttgcccactttttttgggaattcaagggaaagtgtttcttgggtttggaatgttcagaggaagcagtattgtacagaacacggtattgttatttttgttaagaatcatgtacagagcttaaatgtaatttatatgtttttaatatgccattttcattgaagtattttggtcttaagatgactttagtaatttaactgtttatgttacccacgttgggatccagttggtcttggtttgcttctctctgtaccacgtgcacatgaggtccattcattttacagcccctgttacacacagacccacaggcagccgtctgtgccccgcacacattgttggtcctatttgtaaatcccacacccggtgtatccaataaagtgaaacaaagcaaaaaaaa

SEQ ID NO: 85886 - DNA, 503 bp, Homo Sapiens
  misc_feature (478)..(478): n is a, c, g, or t
agctgtcccctggtggcctgctgtgtggggtgggtgtggagggtgaggctgtgcagaatggtcctgccagccacagcagggccctggtggggatttgcactgggcactccaatcctggagaggatgccagggacggggatgctgaggaagtcagagagcttggtacggttgaagaaaactgagtcttgggcaatttgtgctaaaactaggtgagttgccaaacccaaggcatcttaccaacagctggtttgggggctggtttccctggtgttgtgtgttacctaccctttggcttggcttgacctctccttgtgagctcacctgagccctcccagggccaggttcctgacagtgttggtttttgcacatccactggaaaggtgtcattaatgacccagtgttagaatgcaagaggttcaggttattctagccctcatggcttgaaggcccagtcctgggcttccaccactcctccagncagagggggctggaccatcccgtgg

SEQ ID NO: 85887 - DNA, 313 bp, Homo Sapiens
atttaaacattggttgctcttgtcctgaagatcactatgggcagaactgtgttcaatggcgttcctgtggctcaggacagtgtgacccagtgactggagtgtgtcagtgtccacctggccgaatgggaaccaggtgtcaggaaggtaacaatgggcagggtcaccttctctgtccaagcactaaattagctatgctgcgaaagcagatttggtgccaacgaagataattatatggacaatatttacaagaatgttttctgttagtgtggctttcaaataacatgaaagtacatgctcccgagccgggcgcggt

SEQ ID NO: 85888 - DNA, 1054 bp, Homo Sapiens
cgggtgaatcggacgaggggtcagcgaggaatgaatgctccaaccagcccaatccaggcagtacgcactcaccaacggggaccccctcaacggccacgtgctacctgtccggctacatctcgctgctgctgcgcgccgagccctaccccacgtcgcgctacggcagccagtgcatgcagcccaacaacattatgggcatcgagaacatctgcgagctggccgcgcgcctgctcttcagcgccgtcgagtgggcccgcaacatccccttcttcccggatctgcagatcaccgaccaggtgtccctgctacgcctcacctggagcgagctgttcgtgctcaacgcggcccagtgctctatgccgctgcacgtggcgccgttgctggccgccgccggcctgcatgcctcgcccatgtctgccgaccgcgtcgtggccttcatggaccacatccgcatcttccaggagcaggtggagaagctcaaggcgctacacgtcgactcagccgagtacagctgcctcaaagccatcgtgctgttcacgtcagacgcctgtggcctgtcggatgcggcccacatcgagagcctgcaggagaagtcgcagtgcgcactggaggagtacgtgaggagccagtaccccaaccagcccagccgttttggcaaactgctgctgcgactgccctcgctgcgcaccgtgtcctcctccgtcatcgagcagctcttcttcgtccgtttggtaggtaaaacccccatcgaaactctcatccgcgatatgttactgtctgggagcagcttcaactggccttacatgtccatccagtgctcctagaccttgggcgcttcccacctgccccgtccccctagagactcagaggacccacctgggccaaggactccaaagccgcggggacaccgggaagtgcagcgggccaggcaggctgggtgggagggaggagggccgagacaggagcagcccacccagcagaaatacaatccgagctacaaagcatgggaaaaagagactcttttaggatcagatctgtgagcacgttggcgagg

SEQ ID NO: 85889 - DNA, 594 bp, Homo Sapiens
taccaagtgaaagatcaaattccactgtcttccaggagcattttttccaacaagaggtctacaattatcatcagttttgttcccatgtaatttgtggcttttcctctggctaaagatttttctcaatacaaccagttttcagtaatttgattaacttatgtgactgtgtgtgtgtgtccatcctgactggggtttgttcagcttcttggatctgaggatttatcattcccattaaacttgaaaattcaaaacttgatgtacttgttcaatttaagacctcatgcatgcatttctcaggctaattctcagttgccatctctttgaatatttttctctccaggattttttctgctttctattcctggatctccaactagactcttattctatgctctcaactattctttcacattttctacctgtctcactgtaacccattttgtgaagttccctaagctctatcttccaaattactctgtcttcaattgcatctagtctcttctttaactcctcaactctgtgttttaagtttttgtttacttcaaccaccatatatctattttgagaggtggggggcatggggagacagaatct

SEQ ID NO: 85890 - DNA, 1184 bp, Homo Sapiens
  misc_feature (473)..(481): n is a, c, g, or t
  misc_feature (731)..(786): n is a, c, g, or t
  misc_feature (1003)..(1012): n is a, c, g, or t
tctgcctatattttctcacatgaactttcgcacgtttcacggtaaacctcagctcaggactgctatttagctcctcttaagaagattaacagagacaacaaaaggcccttttaaacatagtatacacttattttaagtgaacagcagagaattttatttatagctaatttcagctatctgtaaccaagatggatgcaaagaggctagtgcctcagagagaactgtacggggtttgtgactggaaaaagttacgttcccattctaattaatgccctttcttatttaaaaacaaaaccaaatgatatctaagtagttctcagcaataataataatgacgataatacttcttttccacatctcattgtcactgacatttaatggtactgtatattacttaatttattgaagattattatttatgtcttattaggacactatggttataaactgtgtttaagcctacaatcattgannnnnnnnngttatgtcacaatcagtatattttctttggggttacctctctgaatattatgtaaacaatccaaagaaatgattgtattaagatttgtgaataaatttttagaaatctgattggcatattgagatatttaaggttgaatgtttgtccttaggataggcctatgtgctagcccacaaagaatattgtctcattagcctgaatgtgccataagactgaccttttaaaatgttttgagggatctgtggatgcnnnnnnnnnnnnnnnnnnnnnnnnnnnnnnnnnnnnnnnnnnnnnnnnnnnnnnnngggttttaatatttttaaatcaaacgctgattacagataatagtatttatataaataattgaaaaaaattttcttttgggaagagggagaaaatgaaataaatatcattaaagataactcaggagaatcttctttacaattttacgtttagaatgtttaaggttaagaaagaaatagtcaatatgcttgtataaaacactgttcactgttttttttnnnnnnnnnncttgatttgttattaacattgatctgctgacaaaacctgggaatttgggttgtgtatgcgaatgtttcagtgcctcagacaaatgtgtatttaacttatgtaaaagataagtctggaaataaatgtctgtttatttttgtactatttaaaaattgacagatcttttctgaag

SEQ ID NO: 85891 - DNA, 564 bp, Homo Sapiens
  misc_feature (295)..(328): n is a, c, g, or t
  misc_feature (330)..(423): n is a, c, g, or t
  misc_feature (454)..(482): n is a, c, g, or t
caagccaaatacatgacataagatcaataaagaggccaaatttttagctgttttatgtacaaggagagatctgtttcattttgttttgccgtatttctagatataagttttagcatgggccaggaaggactaaaataaaagtttttaaggtactgtactttttgccatacttgactcatatactcaaaatacagagttgtcttggtgtaggaattggaaagcaagagtggaaaggaacgtaataactcgttggagtttaaaaatgagggtcttggcaagtaacactgatgtctgnnnnnnnnnnnnnnnnnnnnnnnnnnnnnnnnnngnnnnnnnnnnnnnnnnnnnnnnnnnnnnnnnnnnnnnnnnnnnnnnnnnnnnnnnnnnnnnnnnnnnnnnnnnnnnnnnnnnnnnnnnnnnnnnctttgggcggcccccccggcccccgaaaaannnnnnnnnnnnnnnnnnnnnnnnnnnnncccaaagggaaagggaaaaggggcaaaaacctgtttccaaaagaaaacccggcacaaaaccaagggggttgggtcccccccc

SEQ ID NO: 85892 - DNA, 436 bp, Homo Sapiens
cagctccatgtggggccccagggctggttcagggcatgtcctcggcaccaagggaattgactgggcacatgaggccaaatggttgtcctggtgttggccttggagacccacaagcaatccaggaacgactgatacctggccaacaacatcctggtcaacagccatcttttcagcagttgccaacctgtcctccactgcagcctcacccgggcttgcaccaccagtcttcacctccacaccctcatcaccagccttgggcacagctccacccatcaccccagaacaccccgcagaaagtgcctgtgcatcagcattccccgtcggagccctttctagagaaaccagtgccggatatgactcaggttagtggaccgaatgctcagctagtgaagagtgatgattacctgccatcaatagaacagcagccacaacaaaa

SEQ ID NO: 85893 - DNA, 976 bp, Homo Sapiens
atagactgctgttgctgtctttccccagctctgaactagttttaaggtagcttaggatgaaaaatggagaatgattgggggttccaaaccactttcttctcccttggcttatatctcttcaccatttggtggtcaactgtgggcctaccctggacctcatctactcagcgagaattggacatgaagctagaggcagctgccttggaagggaagtcaggctcacttggacagcccaggccatggcaggaagaatcccttcctcttggggtccttgatgggcatgtgtgatggggaaggagcagtctcccagccctgggtctgctccccacatctctcctaattccacttcaccttttgccaccccctccccaccagaggcctagcccttttgtcaccgaaggcccccagagtgtttctgtgtgaaaccctctcatttacactgtggcatcaaaatccacaaaagatggattaattgcactctggttaatagcagcagcacaatgattaaaatctatattcctatcttctctagcaccctggtgtggggatggggcggaagggtgtcttgaggggcagggaggaccccataaaacaatccctcctgcattctcaggctaaatagggcccccagtgactacctgttcttggctgtcccctctgaagagctctgccttctcacagccaccaccagttgccccactcccaggaaaacagcacatgttcttcttctcctgccttgagactgcgtgttagtcttccattcataactcatcagcagctcagtccttcttatgtctagtctcagttcattcagccaaagctcatttttgtcctatccaaagtagaaagggttcttttagaaaacttgaagaatgtgcctcctcttagcatctgtttctgactcccagttatttttaaaataaatgatgaataaaatgcctgccctgaagggttctggaggagtcaggtaacactc

SEQ ID NO: 85894 - DNA, 687 bp, Homo Sapiens
taagaataaatcaccttcacaaaactaagacaaactttttcaaagctcagcttgatttgctggaactacacagagacatgtttgatcacacaacagcaactgtacatcctcccaagtctggaatacagaattgatggaggacacttaacttgcttaaaatgtatttgattattctgcatttatgataaaaaatatcatccagggattatattcaagagggtaaatttaggattacatgtttctagaacatataatatgtaacaccatccaaaaacaacaacaacataaagcactggaaccaaagaaccacttaaaatttagaataaattaggaaatttcaatctataagtgtcaaacaacaaatgagttataatatttttctaataagaaaaatatcacctgggaactatgagatactacatccttgatctggctggccaccattttgaagaccaccacagatctcaaggcatgagactactcaccaacaaaatctatccctgctattgcacctagtgtcatctcagatatgtggctgacagcaaatgttctaacttaatctgatagatgctcctttagcatataaaagagcttgctaagtccctattacctgtagcagtctatcaactaaatatttaaagaagtcatttcatagacaaggtttatgaatgacttagaagtaaaatt

SEQ ID NO: 85895 - DNA, 569 bp, Homo Sapiens
tttgagaataaaccactttcacaaaactaagactcaaactttttcaaagctcagcttgatttgctggaactacacagagacatgcttgatcacacaacagcaactgtacatcttcccatgtctggaatacagaactgatggaggacacttacttgcttaaaatatatttgattattctgcatttatgataaaaatatcatccagggatcatattcaagagggtaaatttaggattacatgtttctagaacatataatatgtaatgccatgccaaaccaacaacaaacaacataaagcactgaaactgaagaaccacttaaaatttagaattaggaaatttcaatctataattgtcaaacaataaatgagttataatatttttctaataagaaaaatatcacctaaagtggaaagccagtatttagtccggaactatgagatactacatccttgatctggctggccaccattttaaagaccaccacagatctcaaggcatgagaccactcaccagcaaaatctatccctgctattacacctagtgtcatctcaatatgtggctgacagca

SEQ ID NO: 85896 - DNA, 121 bp, Homo Sapiens
gtactgtccccttattgatgttacccagttttaataaaagaatcttctgaaggatgggtcctcctacctactgtgagagagctcttccctgagctcttcttccttcaataccattaaaaaa

SEQ ID NO: 85897 - DNA, 367 bp, Homo Sapiens
caaagacagaccggaagtttattttgtattttttttaaataaatacactttacattaaagaaaaaggcctttgatttgtaatttccacaatggggagaaagggaagaaaaaaagatttttgaaaaactgaatcacaaagaaaaatagagggagtgaacttatatcctaagttccctcaactccacaaaaccaatatccacaatgaccatgctgcccccaaaccatgaaggtgagtgaatttaggcatttacccagcagacagagtgccttcctccccacctctggcacgaaggaaaacaaattaacctgacagcatatgaggcaacaaaacaggttaaaaaatcatatattatatttataataaaat

SEQ ID NO: 85898 - DNA, 487 bp, Homo Sapiens
  misc_feature (50)..(78): n is a, c, g, or t
  misc_feature (158)..(187): n is a, c, g, or t
gactgcaccactgcactccagcctaggtgacagagtgagactccatcttnnnnnnnnnnnnnnnnnnnnnnnnnnnnngacatcactttggttcagagctctaaaatggagggaggaagccattctaaaaaggactccctacatgacctgcaacttgnnnnnnnnnnnnnnnnnnnnnnnnnnnnnncaatacaggagcttaccttgaacctttgaattgggccaaattgcgatgaccactgcatcctggaaaattttatttcaccagcactacaactcctcaacagcaccaaccaataaactatggatttttgtactaagccagttgcctctttcaaaacaacttgtcaacttgtctaatcaccctcagctttttttaaaaacccctcctctaccctctctcttcagaacacaagtggcttctagctgaatctgtctcccaaattgcaattcctaagacctcaataaaaacaccttgtcttgctgc

SEQ ID NO: 85899 - DNA, 1785 bp, Homo Sapiens
  misc_feature (947)..(947): n is a, c, g, or t
  misc_feature (969)..(969): n is a, c, g, or t
  misc_feature (1309)..(1431): n is a, c, g, or t
gggcggctggctaggctgtcaagtactcccaggaaggcggacctggacccagagatgcccgcagagggcaaggcagagcgcaagccccatgactgtgagtcctctactgttagtgaggaagactacttcagcagccacagggacgagctccagagcagaaaggccattgacgctgccactcaaacagagccaggagaggagatgccagggctgagtgtgagtgaggtgggaacacaaaccagcatcaccacagcatgtgctggtacccagactgcagtcatcaccaggatagcaagctctcaaaccacgatttggtccagatcgaccactactcagactgacatggatgagaacattctctttcctcgaggaactcaatctacagaagggtcaccagtctcaaaaatgtctgtatcgagatcttccagtttgaagtcttcctcctctgtgtcttcccaaggctctgtggcaagctccactggttctcccgcttccatcagaaccactgacttccacaatcctggctatcccaagtacctgggcaccccccacctggaactgtacttgagtgactcacttagaaacttgaacaaagagcggcaattccacttcgctggtatcaggtcccggctcaaccacatgctggctatgctgtcaaggagaacactctttactgaaaaccaccttggccttcattctggcaatttcagcagagttaatttgcttgctgttagagatgtagcactttatccttcctatcagtaactgctccgtgttcagactcctggtttcttccaggcttacagtggacatcatcagcttcctgctttaaaaaatatcttatgtccctaattgcctttcttttacctgactttgtcacctttggtgtctttgaattctttaggctgcatattattttacatggctttggttttgtcatggatatnaccaggtattgggttttatggntttaaacactatgggataaagggggtttggttttgcacaatttttaatagtcatgcactacataatgatgtttttgggtcaatgacagaccacgtatatggttggcagtctcataaaattataatactgaatttttaccaatacccttttctatggttaagatacaaataccattatgttacagttgcctacagtattcagtgcagtaacatgatgtacaggtttgtagcctgttttgcatttttcttaggttgtatgctcttctgttttaaaggtttgaatcaccagcatttttgtgatcaaaatcctatttagaaaaaataaaactactttctgtttnnnnnnnnnnnnnnnnnnnnnnnnnnnnnnnnnnnnnnnnnnnnnnnnnnnnnnnnnnnnnnnnnnnnnnnnnnnnnnnnnnnnnnnnnnnnnnnnnnnnnnnnnnnnnnnnnnnnnnnnnnncctttcattttggcccgcgggcccaaaaaggaaggggaacttggcctaaaattgtttcctaggaaaatcttggttttgccgtccgcgcttgctttctaaaaattattaaaacccccggtgtggagcgcgaggggtctccaaaaaaatccaaaagggaagttcttaagtgtttttcctggaaaaaaaccccccgggaagccacaagggggtgttttttccccaaataaaaaccacccccgggggattaaccggaggtatttgtaaaaaatcttttaaggggttttctggccggacttgttaaagcctctcccaacgcgggggtttgtaaacccgggaacttcaccaacaagactt

SEQ ID NO: 85900 - DNA, 542 bp, Homo Sapiens
cagggcgagtgccagcacatggccccactgggagccggggcctgacttaggtctactggaaaaagtgtcacctttggggacactcaaggacaggctggttggtttcgttgtggattttatatactcatgccctaaccctgtgttcctggtttctataaggccccggggaaggtgcaaggaatttgcaaatagggcctgtatgacttatttcctaggacacgggaagcttttcttacctcctttctaccctcttctccaacctgaactcccaagtttcttctcctgaaggtctttgcactataagcgccaaggagcccgtgtgcgtggcaggggcggctgggagggtatctggagaaccttagtgagggcctctggcctagccagagaggcaataagcttggggacgttccgttctgggttctgacgttgttggttctgacgtcgttgtgctcttttgtaagaggaatttcataccttggagacgctttgtacatatttgtaatgactttattaaaaaactgattgtgcacttctaaaaaaaa

SEQ ID NO: 85901 - DNA, 696 bp, Homo Sapiens
catagtgacatataaaccagttgtacaaaaagcaggctggtacggtccggtatcccgggatatcgtcgacccacgcgtcgcatggctagcagtacatttcagggataaaaagagctacagagacttctgaagtggagagtctgcgacctcctcggttcttcaatgaagatggagttatcagaccgtacaggttgagggatgggactggaaatcaaatgttacaggtcatggaaaatggaagatttgcaaaatacaaatattttacccatgtcatgatcaataagacagatatgctaatgataaccagacgtggtgtattgtttgtaacaaagggaacatttggacaactcacgtgtgagtggcagtatagttttgatgaatttaccaaagagccattcattgttcatgggagaagattgcgcattgaagcaaaggaacgagtgaagtctgtatttcatgccagagagtttggaaaaataattaacttcaagaccccagaggatgccaggtggatcctcacaaagctacaagaagcaagagaaccttctccgagcctctgacagagaacactgcctgaagacacacagcaataagtgattacagctcctagactaccttccaaaacctgtttgggaagcatattacagaaatgatttcaagtaccctgtattctggatgctaaaaaacaaaaacaaa

SEQ ID NO: 85902 - DNA, 1272 bp, Homo Sapiens
aggtagaggccggtgtgaatcggcacgagggcgggaaatggcgccctccgggagtcttgcagttcccctggcagtcctggtgctgttgcttggggtgctccctggacgcacgggcggcggagcaacgttcgcgtcatcacggacgagaactggagagaactgctggaaggagactggatgatagaattttatgccccgtggtgccctgcttgtcaaaatcttcaaccggaatgggaaagtttgctgaatggggagaagatcttgaggttaatattgcgaaagtagatgtcacagagcagccaggactgagtggacggtttatcataactgctcttcctactatttatcattgtaaagatggtgaatttaggcgctatcagggtccaaggactaagaaggacttcataaactttataagtgataaagagtggaagagtattgagcccgtttcatcatggttggtccaggttctgttctgatgagtagtatgtcagcactctttcagctatctatgtggatcaggacgtgccataactactttattgaagaccttggattgccagtgtggggatcatatactgtttttgctttagcaactctgttttccggactgttattaggactctgtatgatatttgtggcagattgcctttgtccttcaaaaaggcgcagaccacagccatacccatacccttcaaaaaaattattatcagaatctgcacaacctttgaaaaaagtggaggaggaacaagaggcggatgaagaagatgtttcagaagaagaagctgaaagtaaagaaggaacaaacaaagactttccacagaatgccataagacaacgctctctgggtccatcattggccacagataaatcctagttaaattttatagttatcttaatattatgattttgataaaaacagaagattgatcattttgtttggtttgaagtgaactgtgacttttttgaatattgcagggttcagtctagattgtcattaaattgaagagtctacattcagaacataaaagcactaggtatacaagtttgaaatatgatttaagcacagtatgatggtttaaatagttctctaatttttgaaaaatcgtgccaagcaataagatttatgtatatttgtttaataataacctatttcaagtctgagttttgaaaatttacatttcccaagtattgcattattgaggtatttaagaagattattttagagaaaaatatttctcatttgatataatttttcctctggttcactgg

SEQ ID NO: 85903 - DNA, 525 bp, Homo Sapiens
aaggctttatgttatatttatttattttccagcttgtacaaactggatgtagaagcataaacatagtacatttctaccatcttcaacaaaaatataaccaatatgtacaattattgtattaaaaatacaaaagggatacagactccaccaatgtctttctaaaagacatacaggtacaagtagtatcaaaagtatgaggaaatcaccagttaattgtacattctgcacttgacatcacagagcgaactgagattagcagtcctatgttctacaattacttaatgcttagataacatttgtgcaacttgtggtagagctagatttctgtctttctatatgcacatgaggtccatagcctatataataaaactggcaaataatgcatattacatgtaaaattacaaatgcataattgacaatgtaataagcaagtagacaaatgccatgatacagaagagaattattaaataaagcactgacattgtttgatacagtgaaaaaacactgcaattccacttttaaaat

SEQ ID NO: 85904 - DNA, 804 bp, Homo Sapiens
ttcactttttactgtgttagagtccatccagactgttctatccaaaaaagtttctttttcccccacaggcaatcaggaaatgattcctttcccgactgcttctgtctagtgcctgggaatcttgagtcaatccctcagtaagtcagtgactagggaaatccctctctgagcctcccagttcatgttgcttagggaacctgatattttcgtgaaacctgcctacacatgggcagcccaacagcagaacaaatggtggtgaccaaagtgaacaaagaagtatagttgtgccagcttcgtagttgcccatgtggacaagtcagcaggatcaggacacgaggaagagtaaatgtgagacagtcaatgtgacttctgcgataaacagatttttaaaccccgaaattttgcaaaattttggtgaaacctgaactttcttcgttgcatatactggcactatctgtaccatcatacaactgtctcacattaaagctatttttcttgggtactgatgagtaaggttggtataagttcctcagatcaacaaaaacccattttcctgtaagtcttacatttagtatttaaggaactaaaacttaaatacattttgtgaaatggttgacacttcactgataatgatttattgcttggattaataaattttccaaaagttgtcttatgtagaatatggtttgcaaccagcagaaccattaatctatactgcaatgatatgcactatgtataattgtttaaaagcctctacttaatgatgtaaaatgctcaatttaattacacatttgggtaaactgt

SEQ ID NO: 85905 - DNA, 502 bp, Homo Sapiens
taatacacctaaaatatttttcggaccaggaagcattcagttggaaaattgcagatgcaaaccagtattattactaacgctctgggtcaaagattaggtttttaatattaacagtagtctggtaaatatttagaagtctggcattgagaaacaaaagcttgtacctgactagtatttttatttaaaaaaattagttctgttagcttatttaaattgtgttttatttatccgtagaatttatatttatttcattcctttcatctcactgaaaactgtctgcaggccctttgatttggattagatgtgtgaagtactgtcttttgccaaaaacctcaaattacctgttcttttcaacgtagtgggtttgtgcttgtttggagatcagttcaaaaactatctgtactatctgtactgcctctgatgttaagattttatgtatagcataaggaagctagctctgactatattttcctaagaataaagacctatttttgtagcatga

SEQ ID NO: 85906 - DNA, 466 bp, Homo Sapiens
atctgcataagattcctgccagttagaataaattcgtacattcattcgttgattccaaagtatttccaaagaactgtttatgtgcaaaatcctgacgcaggtactttcatgcagtctgcttcatttaaatcttcaaaaaccactgttaaagtagataggattggggggaaatgaagagaagttggttgataggtaaaaaaatacaattgatagaaggagtaagttctaatattggatagtatattagagaaattgtagttaacaataatttattgtgtatttcaaaataactagaagagaagaattgcaatgttcccaacataaagaaaagataaatgttttagatgatggatatccccattaccctgatttgatcattgtatatcacacacatgtatcaaagtatcacatgtactccaaatgtttgtacaactatgatatatcaataaaaaaatacaaaataaaa

SEQ ID NO: 85907 - DNA, 979 bp, Homo Sapiens
  misc_feature (628)..(650): n is a, c, g, or t
cagtcgacggtaccggacatatgcccgggaattcggccattacggccggggtataaaattaaaactatccaggatttggtgagtttaaaagaatcagatcgtcacactctactgcacttccttgaagatgaaaaatatgaagaggttatggctgtccttgggagttttccatatgtgaccatggatataaaatcacaggtgttagatgatgaagatagcaacaacatcacagtaggatccttagttacagtgttggttaagttgacaaggcaaacaatggctgaagtatttgaaaaggagcagtccatctgtgctgcagaggaacagccagcagaagatgggcagggtgaaactaacaagaacaggacaaaaggaggatggcaacagaagagtaaaggacccaagaaaactggctaaatcaacacaacacaaacgaaaccttctaacacaacaaagaccgtacacctgtgctattaccacagtcaagcaacagaaacacaaagcaggcaactggcgtcgaacggcgaatgaagctcgcagcaacaggaagatgacgacgaagttacacataaggggcagggatctgaagaagacgaacaccaatagacgattcccaagaaacaaaccnnnnnnnnnnnnnnnnnnnnnnncaccgcgcccgcgcacccctctccgacccacatcaagacacgactcacgaacaaccaatgatgagtcgtgccccgcaccggcagccccaccatcgcagctgcgacccgcgcaaccactaggcaccacaacacgcggacctcaccaacagcgagacaacacccctggcacaaccagagacgaaacacggcgggaagaccacacacccacacaaaataaacaaatacaacaccgtgtcgagcgaaaccaacacagacagttaccgtcaaccaaaaaacacaacatgatcgagactcacgcagacgcaccaacatcagatcgaaaccaaaac

SEQ ID NO: 85908 - DNA, 528 bp, Homo Sapiens
  misc_feature (60)..(60): n is a, c, g, or t
  misc_feature (202)..(214): n is a, c, g, or t
cgtagctcagcaggaacaccgcgacgctccactgctgaaccagtctccgctgcatcgtcntactcgcgctcgggacctgcaacagaagggaatgggacccgagtgtcagtcaggactctccatctccccgcactactccgctccccctttttagcccgctctcaaaaagcctcttcaacatcaagggcatctcccaagttgnnnnnnnnnnnnntttctctggagcctctcagcacttacttatttagcaaccggctactccaactgtgctttctccaaaccacacagccagaaagagcaaaaagggaaaaaagaaacaaatcagaggcgcttcctctgaaataatagcgaaaataaaatggttttatatatgcatcaatgataagtagtgtgtttacacgtctcccatagcaatgtctaattaatctggccagcagttctcctgggttcgtggaacaggctaaccgcctcctaaaagaagaaagtttccccctctgaagtcagcttctttgcgaaccaggccctttc

SEQ ID NO: 85909 - DNA, 468 bp, Homo Sapiens
  misc_feature (47)..(118): n is a, c, g, or t
  misc_feature (145)..(161): n is a, c, g, or t
  misc_feature (188)..(199): n is a, c, g, or t
aggccaggttagtgaggaaggctgtgttctccagattgtggtttccnnnnnnnnnnnnnnnnnnnnnnnnnnnnnnnnnnnnnnnnnnnnnnnnnnnnnnnnnnnnnnnnnnnnnnnnctgggtaacagacaactccatttctcnnnnnnnnnnnnnnnnntgctttgctacataatgaggccaggcnnnnnnnnnnnngtcctgtggaaatcatatagacaaacatttgcaaagctgctactgccattgtaccagtgttaaactgtgttctaccttgcatcttttactgatttttatgacagattttatattgtaaccattcgagaactctgtaagtgctatggcttccttaaactacgatttatcatatgctcccggtgtttactttgagactgaatggcaaccagagaatgtaaacaaccaaggtgcatctggttatgttttaaaataaagattaataaaagtta

SEQ ID NO: 85910 - DNA, 1195 bp, Homo Sapiens
gttgttgttaaaaagggcctactacattggcgctattcttaggacttctgcaacttttaaagtcttacttgtctttcttgttgcttttgtattaggagttccccgtgtgggtctagaactcccctttggtaatgcttctttgtttttttatggcccttctgttctcaggatggagagaacacagaagctactatccatgtcaggatttattctatttatatcttattacaataaaattagtggcactttattcataaatattcatgagcctgttaattgttagttgtcttcctgtagctgaatcaacaagttattttcaactcaattttatgacttgcgaaaaagcttttgccctgttgtgtaccataacatttaaaagaatggaaaatgactgaaatccaatttagattatttttagagtatttttccagcaaattcaatttattctgaaatttaaatccagatcttttctaatatggtattacaatgaaaagaataaagagaagatttgaattttcagtttcattttcaaaaactatttaccaaaacaaatggagaagaaacatccaaaagcacatttcatttctccaaactgtgtgttttaaattatagttataaattgtaaggtaattttaaattgtccctcgtattatttctccacgtctgttttagtttaatgtctcctaagcttttctctcatagcgtagacctagggaagggatgggaagattgcccagtccccgatggctgcgcacacaggaggcggcggagcacaaggcaagtgagtttgcactgtcagccccagaccgtaagcttggctacactgatgtttttctttactaaggatactattcaaaaattaacattttcatctcagtaagtttttagaacatcaaaatgttttctgagctccaagtggctaggttgtaaaagttttataataatttgcaattaaaatacatgatacatattaatccattaaagactagtgggaatgtatcagccagagtagcaagtaatttttgttttataaatcatagtatctgtcatcttgcagtattaccaatgctgttgaaaattgaatttaaagtggtattaaaaaaaactgttaaacaatttttatctgtttgtatatcttactatagattatgtacaagtaacatctaaataaaattacacttttaaccctaaaaaa

SEQ ID NO: 85911 - DNA, 533 bp, Homo Sapiens
attggtaataaggagtagcccctgtgaggtcaggtacacagtaaagagggtaaatagaatccttgggaacttctgtttcagtctgaggaatgcttggatttgtcaaaagaatggagctttgtaggaaacaggcacaaagacgcaaacccagggcttaacctgctagaaaatgcatggaatgtgaacacaagttaattatttcaaaatgtttttcagatgttatttaaatagtaatatatacattgatttttcataatttatcaaagcctgtggtacgcactgaattttctttgtcacatagttttgaatttcacagccttctgcattgcatacacttgaactggacatcaggggaagctgcttgagagttctcaattactttcttaaacagtgttttctgaaggcgtgtgtcatgatacaacctgtgaattctaccttagggactctggttaaactattggtgaggagctcgagtggtttgtatagaccccagatttttgtttactttaatgtattccccaaaacccatcctg

SEQ ID NO: 85912 - DNA, 430 bp, Homo Sapiens
  misc_feature (412)..(421): n is a, c, g, or t
tgaaggcaggtggaagacttgcaaaatggcaaaccgcggcagcaaaaacacaaaacagcagatggagtttctcccatcagcaatgccatgctaaggctgcattgaattgcatgcatctttgggaaccatgcccatgatgttttcagtacaaatctaagtcccaagattaggttggaaagggtatttcttgttggcttagtttgggttggaatttagcatgggtacttaaacccatttggagagctgtgctcctaaacaaattctgtgtcctctcttcccattttgccagcttctgaaaggtttttccacagcccctccctctcacggttcttctgaaggtagcaaaggtgttatataaacattgtcttttacccctctggcctcgctggacagtgacaaaacaagaaaacgnnnnnnnnnnagaaaggtg

SEQ ID NO: 85913 - DNA, 343 bp, Homo Sapiens
ctacccgcccccccgcaaccctccccttcagctttacggcggccagtgctgaatggccctgtggccctccctgggccttttggtcttggccagagaagacagaaggacccggcttgggcttctgcatgtcctacccctgaccccagcctcaaggggcccctcaaaggccctctctgggggctctggggctcagcacagctttcctcatggatctaagcccctgtctttcccacctgactctgagtggatgttttgggggatggcccctgtggggaggagctgccatgccggccgcctgctcacggcagaaggttgctattaaaatgacataggattgcaaaaa

SEQ ID NO: 85914 - DNA, 504 bp, Homo Sapiens
tggtgcctaatcacttaagttattaatttattctgttgtattcttttttttaaattgtaacatatttatccggtgggtgggacaggagtgtgttcaagtgggtcatgtttttgctgtggtgacacatggtacaggcttggagcttgcaggtccctttctactgtggtgttggagcaggacaataaagtccactagaaatgcaccccagaaccagctgccgtgtccatcttgtcttgaggggcttggtggtggaacccgttctcactccagtctgttccaatttttgctttattggaaataattgggtatttttcttggctgtgaataagaacaaatgctctctacctcagcgtctgttgtaaagtggaaatcatactagcatttacccatccagctttcttaggcgtctagagatgggttctgggcgtgtctgtctgctgctttcacaggtcacttagatgtgacatcttgagggtctgtgacattgggcccaaactccacacc

SEQ ID NO: 85915 - DNA, 633 bp, Homo Sapiens
tttgaagtaaatatctgtttaatttacaaacatcagcagtgtaaccgatattaatctggagaaagacaaagcacactgaattatacatgtacatctaattttctttgtaaaaaaagaagttttcaggaagaaacatctgcatctttacagggcaccctgggattttaatgagggaagagcacagttcactataaaccattatcaattctacattgtaatttagcagcaaacatgttaacatgggagcattaagataataaaggagttttattgtttgagggaaagaaaagtcacagttcttgatatgacagtctttttatccccacctcacccccacaaaagggcaaaaaaggtcaaggacatattaatttgcaaaaggtctactttctagtgttgattgctacacaccatttcgtttctgtgaggacatgttgcagaggggccacttctttctgtacaatgaccatctcacatacagatttctgttttcctctctcggactttgcatactctctgcaggtgtcctgaatgaggccagtaggtcattgacatcagtgatcagatgtcaaggtcaacaaacagaccaatacatatgtatcccaagataaaaccctatgttagtactattgccaa

SEQ ID NO: 85916 - DNA, 790 bp, Homo Sapiens
gggagtccatacagtggcaactcattagaaaggagtgagccagcattgaaattctcataagaacagaaaagtggaattgagatggtctgagtactctaaatgaggatgggaaagtgataccaagaagaagcaggggatgaagaagaggagcaacagtgaagtggaagacgtgggaccaacaagtcataacagaaagaaggccaggtgggacactttagagccttggcataccggcctgtctttagcagaggatgaagagctggtgttacatctgctaagaagtcaaagctaaatacttcctgcgcctgccttctccttgaaaccttggttatgactgcgtaggcaagaagttgaaaaacagttgatttgggggcacttaggtaccatatgccccattcccaaagggcacatttctggatagaagcgatcgtatctccaagtccctctcacaggacatgctttgtgccatcactgagcatactcagatcgagggtggatgataccatttcctgaccccgttttccagcatgtgttctgttagatttttatccatgggttcctacgccttgtcattggaaacactgcctttgtcttactggcaagttctggagctcttgtgtcattgttagaaatccctgtcttgcttactgtacagaagtttctgttgctgttaaaattgctcatgatttcgacgtatttaatattttcaaagagactatgatggaccagccctgagaaagaatgagtatttttgaattgagatgatcaataataaacatatttcctataa

SEQ ID NO: 85917 - DNA, 1952 bp, Homo Sapiens
gacatagatacttatttatttgcatatttaaagtttacacacatgctatgactccaatgttttaaaaaaataagcccttaacagctctgagacacatggcctcttctgtatcccaagcaaatccctaaatggaggtagagcacgtgttcctatttttcacactctcatatgggagataagtggttaaggaggactagaaacccaatcaggcctaccggggtgccgaacagacacacagcattcctaaaggaatgccaccagagaaaaaatacaagtctgtacatatatctttattttcatacttaaaaagaatcacatactcattccaacagctttaccaggcttcgccaacccaataagttacacactcactcaggtactaggaaggttattgcacagctccttaactgatcggggtcagggcagagtggtcactttccccacagccaggctctggatttgcctcctgtgaagacaccatgcctagcacaggctgacggggcggctgcagtcgaaccttgcctccagattatgaaccagtataagtagcacaattctcgtggctactttcacttcagagtgtcatgtttattgatgtggagctttctgaatagggaggttaaggcacacctgctgagtaaaacaaatatttcttgtgtagcgttctagattgagggcagcagtcaatggtaaaataaacttcagtagcatgttcctgtcaggttatatggcagccctggctcaaggatttctcccccctgcacgattcctaagactgtttgctagctgattctttgttttggcaatttgatggttttgatgaatttgctgtgatccaggggtgttcaagtacttctctgagcattggcctctggctgggattatgcttcaacagtcttgaaatgaggtccctggctccctctgttacaaagtcagggaatgtgaattcaacccgtgatattcttttgtaggtctcttggtatgtgtttgcctcaaaaggaggcttcccaactaaaaattcatagcaaagaactccaaggctccagagatccaccttctcatcatgcatccgaccttcaatcatttcagggggcaggtagtccagggtgccacagagagtggtcctcctggaagatggagcatgtactgaccacccaaaatctgcaattttaagctctccagctgatccaagaagtaagttctctggcttaatgtctctatgaataactctcttcgaatgacagtaagacagggcatttgccaattctgttatataagtagcagttctctgctcatcaaactttgaaagtttctgaagttctctataaactgttccaagtggtgcatattccagaattaggtagactctggtagcatcatggaaataaccatacagtctaagaatattaggatgccgaaggtgggactgtatttctacttctcttctgagctgatgctccactccggctttctccagctgagctttaaataacactttaagagccagaataaacttgctttgcttttctcttgccaaataaacattaccaaactttcctttacccagagggcgaccaatttcaaagtcttccaaagcccactgcctcttttttgattcttcatttttctgttttgatgccagttcctcctcaggattattttcaggtgccgatggcaggggctgcttgctcttttgggtgttattcagtggcctggagacaggatgaggtacactggttgcctgcaattgcttctgcttctgattctgaaccggcttgtgactggagacaagcttttgtgcttgcaaaggaacgcgctgggaagaatttgaaggacacaagacccgctgagcctggccactatttacagcgacgcgtgggtcgacgatatcccgggaatccggaccgtaccagcctgctttttttaaagactggtttatattcaaccatgcc

SEQ ID NO: 85918 - DNA, 188 bp, Homo Sapiens
atgagccaccgctcccggcctttgcctgatcatagatccagaaaacttgctgtactcttattacttctcatattcttgcctgacaagcataacaatcatgttacctgtaaatagaaactttccttctttctctattagtaatgaggactccaaatgttttaaaacattttactgtgagattatgaaac

SEQ ID NO: 85919 - DNA, 707 bp, Homo Sapiens
  misc_feature (349)..(366): n is a, c, g, or t
ctgaacagtacaacagatcaataaaaaagtttatacactgctttaactaatttttgttatactcatgtggcttagtgtagttagtcactaaaacagagttcaagtgagcttggcaatggtgttgagtaacaagaaagaattttgcattaatgatttctttttattttcctcatttaaacaacaagcattactgccaaacaccaaccgtggtccatatttgtaacaggtttttaacatgacatagttagcaagtttgattgaagagatttttaggtcctgggcctataagattttagtatgatcttttttcatgtttctaatgcttgaggtgttactgcttaacttgggnnnnnnnnnnnnnnnnnncagtgttcctgccatttgtaagttttcctataatattccttttattaactttaaaactggacttatcgggttcaaataggcagtatcccttttaagtgacctttgcaacccaagtgttacttgcttatttgatgctctcttgtattttaaatctcatttaaatctttgtctgtgaccaacaaagcttaagattttgtcttcatttaaaactctaaatctattccattgatcatgttagacgttcaaatggttaatggtatagtctgacctagtgaaacaaaatggaatgtggttactttttttaaagaatagaatgaaataactatttcactctattcttt

SEQ ID NO: 85920 - DNA, 360 bp, Homo Sapiens
aatggaaagtcctgcataacaacactgggccttcttaactaaaatgctcaccacttagcctgtttttttatcccttttttaaaatgacagatgattttgttcaggaattttgctgtttttcttagtgctaataccttgcctcttattcctgctacagcagggtggtaatattggcattctgattaaatactgtgccttaggagactggaagtttaaaaatgtacaagtcctttcagtgatgagggaattgattttttttaaaagtctttttcttagaaagccaaaatgtttgtttttttaagattctgaaatgtgttgtgacaacaatgacctatttatgatcttaaatcttttttaaaa

SEQ ID NO: 85921 - DNA, 505 bp, Homo Sapiens
ccacctatgctgcccccatgtcagccatagcaatctagcagtatggaggcaccaagcagaaccatccccacagcttgtgttcgaccaactcacccactccgcagctttgctaatcctttgctacctccaccaatgagtgcaatagaaccgaaagtcccttacacaccacttttgtctcagccagggcccactcttcctaagacccatgtgaaaacagcctcccttgggttggctggaaaagcaagatcccctttgcttcctgtgtctgtgccaacagcccctgaagtgtctgaggagagccacaaaccaacagaggattcagccaatgtgtatgaacaggatgatctgagtgaacaaatggcaagtttggaaggactcatgaagcagcttaatgccatcacaggctcagccttttaacatgtatttctgaatggatgaggtgaattttccgggaactttgcagcataccaattacccataaacagcacacctgtgtccaagaaaa

SEQ ID NO: 85922 - DNA, 541 bp, Homo Sapiens
acttgaaaacatatctgggatccctttttttggtcctctgctgatattataaaacaagaaatgcttcttggactaccttcactggcatttccatagtcctggaatccagagccaagtggcctatctaaaattcacagcccttttattctcctgtgtgatggttaatacaacacagttgaagcctggaaacactaccattatttttggtgtattgctttttctaattgactgtttttaatgattttgatacattttaatgttgaaattaatattgaatgttagctatgaaattttagtattgaattttataatggaacagaacattggtaggtaacaagatgcaagaggatgtcaatacaagattgtctgcctgtttttctttgtaaattgtaattacagtttttgtaacttgtgattatggttttaactaaatataccaccagaatacaacactacttcgtacacagagtagtgataagctatatcattaagacgtgaaaggaacatcacctaacatactccccaagaaattgagaggtca

SEQ ID NO: 85923 - DNA, 630 bp, Homo Sapiens
  misc_feature (86)..(86): n is a, c, g, or t
  misc_feature (95)..(104): n is a, c, g, or t
  misc_feature (114)..(114): n is a, c, g, or t
  misc_feature (264)..(264): n is a, c, g, or t
  misc_feature (335)..(335): n is a, c, g, or t
gtcccactattaataagccaggccccgaaaatttattaaaaaaatttgggtgcttatgtaaccttaaaagataaagtgcaaaatgnttttttggnnnnnnnnnnagtggaccanaaataagtgtgttcctgcccttcaaattttttgtagaaggagccaatgatggtttagattcaaaatagtgatcccctccctagcataagcatgagagcctgagaccttataatgctcattaaatgtagtaaatttgataaagatgttganaatgaagttggattttgtattcatgtataaaggaaagtctcccaggctgcaaaggaattgtggttctcccntgctgttctgagctttgaatatcgttatttttctattaaatatcaattagtaagtatagctaatgaagacatataatgaaagtaattttatgctgtaagattgaattggtacttttccttattaaggctttagtaatttgtatgtaatgtcaaataaaaggaattcaaatctgagtaaataacagcctcctactataggaattagattcttctataaaagtcaccatattgtatcctatagaaaagttaaggtctgagtgcatgtgtgcattaaaaacatttcactacctattct

SEQ ID NO: 85924 - DNA, 443 bp, Homo Sapiens
aggtataagggacttaatttatttttcttcatattgctgtatttaatatggaacaccgtacctttagcctactgtaccaacggtacaaaagatggtcttggccttgcccagctctttccctgctactttcactgttgagctatatcttaacctctacttccctcagccattgttggactctttcaccattctggatttgtaacagtttacctatgtgtgatcttaatagacattgggaagaaaggaagaatggtctgcttcagcacttctgtaatctttgactttctctctactgatcttgtactaaccttatgcattttctagagccgataaaaatatttaaattaatgaaggagagagcctctgttttaagaaagcatgtgttttctcaccttccacagcccccatttacaataataaagaaatatgaaagctataaaccc

SEQ ID NO: 85925 - DNA, 249 bp, Homo Sapiens
  misc_feature (80)..(90): n is a, c, g, or t
gggggaacggggaagggggagcaacttgctctttcatatgagttggtcatagcatgtaagaaccaatcttgaaatatcgnnnnnnnnnnnaatggcttataatgtatttctagaaatactttgtacttaaaatgataacagtttgtatctttttgtccatataaagatactttataaataaaaaaattagcattgtaaataatgttaatatgtatttatacaaaataaatttactataatataaaaaaa

SEQ ID NO: 85926 - DNA, 484 bp, Homo Sapiens
ttttaactccatgtttaccatcattgccaaaaaggtaccaaaaaaatccataaataaatatggaatacattcataagtacatacattcttttggtataaaacaatattttgacagtttaggcttcattaatagaactattctgattatttggactgcattaattggtcactgactggccatccaattaccattttttctttcagtccaaaatagttagacccttgcatacagaagtggtattttggtttttaatcagatttggtttcatcagaagcagcaagaatggacctgatgtctttaaaagcatagccgacaatggtagcttctcaagttatgaaataaaactgagagataatggagaaaataatttttatgggtttttttggttatggtgctattcctaaggttaactttgaatatgtgacacacacactcctaagtacctttaaggaaaattaataaatcattaatagttaaaatgtt

SEQ ID NO: 85927 - DNA, 631 bp, Homo Sapiens
cttagagcagaacccataaaatactcaagtactgggataggcaagcatgtgtgtttactgtggattggtccctgaaggctcctttgggtgagaacatgtgaaccaggcaccctggtttgtttggagcattgctgcccagaagcttctatgggataggtggtgcttgggattgatgtgttgtggccatgcagccctccctgaggattgacttctgcactaatccagtgaaggaggctgtgtcaaaagaagggctcagaagccctcttttcagaggcaatgattcctgtcagtatgaggtcccttagttactaaaaagggacatgatttaactccagtttgatgaacctcctccgagtttactttattgtcttcaaatcttttgttttcttcctttttgtgagatttgtgggttttgtgccttataaatggaaatgtatgaacacaatatatgctcatgtagaattttctgttctgggttattgggataagaaaaaatatatattgctcttcaactagtgaatgaaagaaacttcagaaagctagaattgcttatcaatcaaaagactttctcaatctattttggccacaaacaaacatattcaactgaagctttccaataatctttatatca

SEQ ID NO: 85928 - DNA, 650 bp, Homo Sapiens
ctcttccgcaggaacacgcagctgctggagctgaccaccaagagggtcgaggagcagagcctgcacgacgtcctgttcgagctgagcaagacggtcctgcgccacagcgggagcctgaccagagacaacctgtccggactttcagcagatatgcaggactacggtttaattatcgacggagctgcactgtctctgataatgaagcctcgagaagacgggagttccggcaactacagggagctcttcctggaaatctgccggagctgcagcgcggtgctctgctgccgcatggcgcccttgcagaaggctcagattgttaaattaatcaaattttcaaaagagcacccaatcacgttagcaattggcgatggtgcaaatgatgtcagcatgattctggaagcgcacgtgggcataggtgtcatcggcaaggaaggccgccaggctgccaggaacagcgactatgcaatcccaaagtttaagcatttgaagaagatgctgattgttcaaggggcatttccatcacatcaggatcctcggagctcgtgcagcacttcttctataagaacgtcggctacatctaccctcagtttttataccagttcttctgtgggtttcacaacagaatttgtaggacaccgcgtatctgaccc

SEQ ID NO: 85929 - DNA, 199 bp, Homo Sapiens
tcaaaactcttctacctaaaatcaccttcagagccatgctagaaaattagtatcattcctttacaatcggaatccaacttggccactaaaatgtttccttagacttggtcctaaatgatttttggattgtttcaaaacctgaaaaacaccttcacaggataaagataaaagaatgggccactggatctgaagatcattt

SEQ ID NO: 85930 - DNA, 466 bp, Homo Sapiens
caagggcatgagttcaaatgcattactatcagtgtcctaggcaatacctaacctactctgaaattgtgattcaaaagcagtatttcaagaggcattctccttttttggtttgctgaccccacttggactggtaggtttggtgaggcccccataaaccagctggagcagacccttttcatctcctgtgcctgtaacacccctcttcccccaccccctccgcaattcaatgagggctttcttgggtcagaggacttcaaggttgtctagagaagtttgccatgtgtgtaaggtgctgtgaactgtgagtgctgaagattcgcagcattcaataccaggcagccaaagagctgctcttgcaattattttggctctcaagctctgttcttcatcgcattctcatttctgtgtacatttgcaagatgtgtgtaatgtcattttccaaaaataaaatttgatttcaataaaa

SEQ ID NO: 85931 - DNA, 473 bp, Homo Sapiens
  misc_feature (120)..(120): n is a, c, g, or t
  misc_feature (457)..(457): n is a, c, g, or t
gctacgggtccctttgccgcctgcgaggataaccgcgacgttctttacctctttcatgctagatccgctgttatgtggtgagtttgaagtaggggagtgcataccggacgcgccacgcgnagagccttatctcggcgatgaggacggcgaccactacagcaagcgccgatgtccatccatagatccagagcactccgagtgttacgagctgcacggagccggcgaaaagcacgcttcgattggctgcagacgcgtttcccatggcgcccaagaatgggtatcacagtaggatagacggtatcgccaccgcagggcgaagcatgaacatcacaaagacaatgtagctttgttcataatcgactccgaacacaagcgcgatcagccattttccgagcaccaggcccgacgcgatcccaaaacaggcaagcacaagggcaatcttgaataccttcctganaagtaatacgtctcgg

SEQ ID NO: 85932 - DNA, 549 bp, Homo Sapiens
atgaatgtgcttattgttgaatgcatgtatttagaagcctttactcagcccctgtgttctgtgctaggagcttgagctctacaggtaaggcagagctaccggtgaatgaaaggaaatcatgtcagtgaaaaatcatggtggaaagcccctggcatcacatgtgcatgctgtaggcaggacctgagctgcctccgctgcaggttcagatgcaccgctgcagctgtccttcagttagttcacagggctgcaagaggaggacacatccctccagaaaacagcctgagccgggaactggctgtgctaaagagcactgctatcaagttgaggagagagggcttccgtgtactcaggatgtagagtcattgctcagaagtgaacaaaaaatcaaaaacaaaagtcttctcaagggactgatcggccaagtatgcttttctttagagcaatgttttgccctagagaattgtaaaatttatgtcatgactcagtacatatgtgttcgtacatatatgattggaataaaatgtttatgaaatatttactcataaaaaa

SEQ ID NO: 85933 - DNA, 153 bp, Homo Sapiens
gtgtgggtcactgcgcccggctgcaaatgctttttaaatgttcttctctcagctcgcctctgatccccaaaatgtcctgaccgtgtcctcagaaggcccaatggccccacagagcctcagggggctggggttatgcaggaaaataagactttc

SEQ ID NO: 85934 - DNA, 183 bp, Homo Sapiens
ctagtatcatagtaaatattgcttagtactcgcccccaccccactgggtagtttatatactaccctataggtcatgccaaaaatgaataaaagtttaaatgccaaaatgtttatgaaactgctgtctaaatactgattgattgcacaatttaaataaaagctttccttagttaaaaaagaaaa

SEQ ID NO: 85935 - DNA, 465 bp, Homo Sapiens
gaattcggcacgagcagagattttccatatgctcgattcccacacagatttgatgttttgggttcagaaatccccactgcaatgttgaacagaggagatattactcagtggtactctgtgttctgcctcccactggccctgcatcaattaccttgttagccaatcaaccacgccagggaatttctaaaggcctttgtaccaagcagcaaaaccaggcaggagggtcaggccacaaggcaactgtcactcttctaggggagctggaactaaggcctaaataagatcagtgtgtctatgtaggttcattgactatcacaaacatatccctctggtgggggatgttgatggggggaggctgtgcttgtatgagggggcaggaggtatatgggaaacctctgtaccttcagctcaattttgctgtatacctaaaactgctctaaaaataaagtctatttaaattgaggg

SEQ ID NO: 85936 - DNA, 519 bp, Homo Sapiens
tgcattaaaaatatggcatgcctaagataaaattgtatattttttccatctcataaatattcattttcttcaaagtcttttttcaatctcataaaaaagggatagtgcatcttttaaaatacattttatttggggaggaacatgtggctgagcagacttttgtataatattacttcaaagatatgtaatcacaaacaaaaaaaactattttttataatgtcatttgagagagtttcatcagtacagttggtggacgttaattgtttgaatttgatagtctttgaatttaatcaagaaactacctggaaccagtgaaaaggaaagctggacttaaataatcttagaattaattgataaatgtctcttttaaaatctactgtatttattataatttacacccttgaaggtgatctcttgttttgtgttgtaaatatattgtttgtatgtttcccttcttgccttctgttataagtctcttcctttctcaaataaagtttttttaaaaagatcccctttcat

SEQ ID NO: 85937 - DNA, 249 bp, Homo Sapiens
ttgttgcagtgagctgtgatcatgccatcacaccgctgccttgtgagagattgagacactctaaataaataataaccaagatgggaaatttccctgccagaccttgtttactagaaatcaggtggccaaaacatgactctcagagtggggcttcatgaccatgtgcatcagaattgcctggagtgtgcactgaaactgtgtattaccaagctcactctagccaactaaataaaaatctctggcagtaaa

SEQ ID NO: 85938 - DNA, 802 bp, Homo Sapiens
  misc_feature (520)..(563): n is a, c, g, or t
gtcggcacgaggagcctggcaagaggagtgtggcccttcctggaatccctctggacacaccctcctagcatcctctaggaaagatgcggcagctcaaagggaagcccaagaaggagacctccaaggacaagaaggagcggaagcaagccatgcaggaggcccggcagcagatcactacagtggtgctgcccacgctggccgtggtcgtgctcttgatcgtggtgtttgtgtacgtggccacgcgccccaccatcaccgagtgagccccgcagccggctgcggaccccatcggcagggagaggaggcgcgggagggggacgcaaacaaaaaatggctttcatattcagagatgttcatgttgctgagctgtaagcaggagcaccctgtcttctctggtctttgacttgattaaagtatctccgctttcttgggagggaataggggatgttttatcagtgaatgtgccatacaccttatggtccacttcatgtgcctttcagacttcaaagcgcgcgcgcannnnnnnnnnnnnnnnnnnnnnnnnnnnnnnnnnnnnnnnnnnncttctttttctctcctaaaaatcgataagtagctccacctgaagagggatggaacctctgggtcaggaaccagctggaatccacactcacctcattcccattgtttggatcatgcttctttccaacacgtgttcacaatctccaaagggactgtattttttctctgtgcttaatgtgatttgaaatatgttgaatcaaagtgaaatatttattttttgaataaaggagataatagcctt

SEQ ID NO: 85939 - DNA, 359 bp, Homo Sapiens
  misc_feature (84)..(117): n is a, c, g, or t
gaataggggatgttttatcagtgaatgtgccatacaccttatggtccacttcatgtgcctttcagacttcaaacgcgcgcgcannnnnnnnnnnnnnnnnnnnnnnnnnnnnnnnnncttctttttctctcctaaaaatcgataagtagctccacctgaagagggatggaacctctgggtcaggaaacagctggaatccacactcacctcattcccattgtttggatcatgcttctttccaacacgtgttcacaatctccaaagggactgtatttcttctctgtgcttaatgtgatttgaaatatgttgaatcaaagtgaaatatttattttttgaataaaggagataatagccttaaa

SEQ ID NO: 85940 - DNA, 416 bp, Homo Sapiens
tgcttactggaaaggtgcaaatatatgggttgagctggaggtaggaatacaggtaattaaggtttctagtttaagggaaaacagatctattgccatttaaataaggtaactgggatttggttaagttcacaaagatagcagaagatttatttacaggcttcacctgtactgtcagggcaagagaaagcctggtaaaccagctacagcagtttaccagtgtgatggctgtgacacagctccactccacgggtggacacagcagagggcaactgggctggcctggttcagtgtgaatcaaaccgcttaacccacacatggtacatgtgattttcttttgtgagccttacaccaagccaaactattgtcaaagcatcatttctatagaaataaagccttatcttgacctgttaaaaaaa

SEQ ID NO: 85941 - DNA, 1124 bp, Homo Sapiens
taggtccaaaagttcatttatttaaaatgggggcaagatagggatataaaagaaaacagagtgtaagaaataaaaataatcaaagtacaaaacatttcaaatctttaacatccataatttagagatagcaaggtctttatttacaccattttatttctagttgaagtcccgtaacagttttgtgaaaacatttaaaaacctggcaaatgaatcataaaacctaatgtgggctcttaaagtcatataatacaaaacataatttatgtttcctcagaataaaattgcacatcttaaaaagatgcagtatatttattatatctgtcttcctgcttcacagtctgatcccccaggaaagcagctggaaaacaagagcatgtgaaggaagcgcagcagctcctcgccagccagacagccagccccgcaccgcaggagtcgacatgcacggcagcctagacgccatcagttaaacttatatgattcatagtccagcgtttgagtgagcactccagtcagaacgaactctgcattgtgaacatctatgcctctggcaaaatattctcggcataaatgaaggtcattttcacaggatattaaaattatttccgacaaactcgagttctgcttgtgctccatgagcttccggaaagatggctgcttggataacacctttcctcctgcacactctacgattgccttcatagtggaaagacttgggcagattccaggtgtgatgtaaaaatattttgccttaaagagtggagaaacgtgtgcccgttttaaggattcttccaagctgaaagagaaaagtacttctgcctcagcatctcggagaatgtagttctgctcatctggaaaacagaacagcacatactctgaaaagtgtggacacgtgaagtgtggcaagtgtgacccacaaaattctcgcccatattcagcgtatggaccagtttgctgactgctgggcaggagcaaccacatcatgacagaaatgcagggatctgttcaccaacggccagaaatacaaaatcaatccctgagtcaaccagcagatagaaaggctgctttttaggtgaaaggagaaaaagaatgtctaaaatttggaaaaacaaaaaatgatgaattaa

SEQ ID NO: 85942 - DNA, 683 bp, Homo Sapiens
  misc_feature (72)..(72): n is a, c, g, or t
ctgggctgagtgagcctgtgtgtcggggctgagggcctcctgtgatgtgggtatgcagcagagcgactggtntgaatgggtaagaaagaggctgtagcattccttcaagggtgtctctgaaactggataatgaatgttggaacccttggtttcatgtttttcttttgccttgtgtttgaaagtcgttttcctcaacaagcctacatataagtttaactgatggcgtctaggctgccgtgcatgtcgactcctgcggtgcggggctggctgtctggctggcgaggagctgctgcgcttccttcacatgctcttgttttccagctgctttcctgggggatcagactgtgaagcaggaagacagatataataaatatactgcatctttttaagatgtgcaattttattctgaggaaacataaattatgttttgtattatatgactttaagagcccacattaggttttatgattcatttgccaggtttttaaatgttttcacaaaactgttacgggacttcaactagaaataaaatggtgtaaataaagcccttgctatctctaaattatggatgttaaagatttgaaatgttttgtactttgattatttttatttcttatactctgttttcttttatattgatatcttgcccacattttaaataaatgtacttttgaacttaaaaa

SEQ ID NO: 85943 - DNA, 543 bp, Homo Sapiens
ccgtgaaatcgctcttcataaagtgggcttaattctctagtttaagttcttttgatggaatgaattaattaatgtgtcaggtggcttatttgtggatgccatgattgatgatgttcattttaagctcttacctatagtacaagtacatgatgctactgaatatttttccacttggaaactgtgagctggttgttgcattaaaacacacatacaaacaaaatcaaaaacactgcggactttcactcaagctggtctttcttccccagtgtaaggcaatcctgcctactaacaacaccaacaacaaaacactccatctgtgaagctgacgcagttaagggggctaggcagggcatttgtgccaactaagaatcaccagatacccaccataagtacctatcgcagttttgaagtcgtttctccccaactcccaactcctgaaggttgctgcctgcatatttactcttcattagtgctattttcctgtatgtcattgtgagcaagccctgattaataaagaattggagttctgtgaactaataaaaa

SEQ ID NO: 85944 - DNA, 1058 bp, Homo Sapiens
  misc_feature (113)..(115): n is a, c, g, or t
  misc_feature (122)..(123): n is a, c, g, or t
  misc_feature (125)..(125): n is a, c, g, or t
  misc_feature (135)..(137): n is a, c, g, or t
gctaggaaaaccaggttatgacccatgttccacttaacataccggggcccgcggccccaaaaggaatgtcttagaaagcttcctcgagggcggagggcggcggacaagttttnnnctttttnncngaaaggggtnnnggtcaacagaactccaaatctttataaatcacagcttgctcacaatgacatacaggaaaatagcactaatgaagagtaaatatgcaggcagcaaccttcaggagttgggagttggggagaaacgacttcaaaactgcgataggtacttatggtgggtatctggtgattcttagttggcacaaatgccctgcctagcccccttaactgcgtcagcttcacagatggagtgttttgttgttggtgttgttagtaggcaggattgccttacactggggaagaaagaccagcttgagtgaaagtccgcagtgtttttgattttgtctgtatgtgtgttttaatgcaacaaccagctcacagtttccaagtggaaaaatattcagtagcatcatgtacttgtactataggtaagagcttaaaatgaacatcatcaatcatggcatccacaaataagccacctgacacattaattaattcattccatcaaaagaacttaaactagagaattaagcccactttatgaagagcgatttcacggctgcttgaaccattcgaatttggatttgtgttcagcactttaaaaggttcaactttttgcttctacccagattggtctcaggtctgtcttctcatccatccctttctaaagccaaagcacatttgtagcacataatccaggagaagcagaagtaaatgctatgactggtggtatttcttagcctggttttgtagtttttaggcagtaagtagattatgagcgaacaaatgtgaaggttcatgtggagtcataatacctgtgatctaggtatggtcttagtcaagctcagagacaacaaagccttctaggtcattaggcaatggtggtttctagcaccatagactgtctactgacctcatttttcttttggaatggagttagacatg

SEQ ID NO: 85945 - DNA, 488 bp, Homo Sapiens
gggaagagtgaatgcagcttctccggatgccttatttccacagacatgctgatatgctggaacaatctggctccaggagtattaatatacttttttgagactgtctacaaaatactattttgtaaaaactatgcctttacatagacattgataggttatatttgttttataacaattgtgtacctaatgtttgtgattaattttgagatttatgtatatttataagcctatcttatgtaaatttttactctaagatgtgtggcacattactaataaagacgtggatttctatttatgtaaagtaattgtagcaatattcctagatgctacctaaatgattgttctgtccatttgccatcacaaatacttttatctttggatgattatgttagtcagaatatattaattagatttaaactttaaaataagaattacaacatagtttgaaattcttcctgttgatgtaattaaagttagtttataattcc

SEQ ID NO: 85946 - DNA, 785 bp, Homo Sapiens
cagtcgacggtaccggacatatgcccgggaattcggccattacggccggggacaagggtgcgaggaaagtcagtgagcaaatcgcggaccaccggggctgccagctcgcctgactcccggcctcttgcgctcctaggggcggagaagggtgcgggctcttcgccctttgtgtcctccttctttcactaacttctggactttccagctcttccgaagttcgttcttgcgcaaagcccaaaggctggaaaaccgtccacgatgaccagcatgactcagtctctgcgggaggtgataaaggccatgaccaaggctcgcaattttgagagagttttgggaaagattactcttgtctctgctgctcctgggaaagtgatttgtgaaatgaaagtagaagaagagcataccaatgcaataggcactctccacggcggtttgacagccacgttagtagataacatatcaacaatggctctgctatgcacggaaaggggagcacccggagtcagtgtcgatatgaacataacgtacatgtcacctgcaaaattaggagaagatatagtgattacagcacatgttctgaagcaaggaaaaacacttgcatttacctctgtggatctgaccaacaaggccacaggaaaattaatagcacaaggaagacacacaaaacacctgggaaactgagagaacagcagaatgacctaaagaaacccaacaatgaatatcaagtatagatttgactcaaacaattgtaatttttgaaataaactagcaaaaccagaaaaaaa

SEQ ID NO: 85947 - DNA, 857 bp, Homo Sapiens
  misc_feature (732)..(732): n is a, c, g, or t
  misc_feature (736)..(736): n is a, c, g, or t
  misc_feature (739)..(740): n is a, c, g, or t
  misc_feature (743)..(743): n is a, c, g, or t
  misc_feature (756)..(758): n is a, c, g, or t
  misc_feature (761)..(763): n is a, c, g, or t
  misc_feature (842)..(842): n is a, c, g, or t
ggggagcaaatcgcggaccaccggggctgccagctcgcctgactcccggcctcttgcgctcctaggggcggagaagggtgcgggctcttcgccctttgtgtcctccttctttcactaacttctggactttccagctcttccgaagttcgttcttgcgcaaagcccaaaggctggaaaaccgtccacgatgaccagcatgactcagtctctgcgggaggtgataaaggccatgaccaaggctcgcaattttgagagagttttgggaaaggtatgggaaagattactcttgtctctgctgctcctgggaaagtgatttgtgaaatgaaagtagaagaagagcataccaatgcaataggcactctccacggcggtttgacagccacattagtagataacatatcaacaatggctctgctatgcacggaaaggggagcacccggagtcagtgtcgatatgaacataacgtacatgtcacctgcaaaattaggagaagatatagtgattacagcacatgttctgaagcaaggaaaaacacttgcatttacctctgtggatctgaccaacaaggccacaggaaaattaatagcacaagggaagacacacaaaacaccctggggaaactggagagaacagccagaaatgaccctaaaagaaaaccaaacaatggaatatcccaagtattagaatttgactccaaacaatttggtaattttttgaaataaacctagcccncggnggnnggncgcgggaaaaaannnaannnacaatgtgggggccgccttcgggcccctccgaaaagccttttctaagacccatttccgtttggcggcggggggcccccnagaaggttaaggtgt

SEQ ID NO: 85948 - DNA, 852 bp, Homo Sapiens
  misc_feature (599)..(599): n is a, c, g, or t
  misc_feature (712)..(712): n is a, c, g, or t
  misc_feature (832)..(832): n is a, c, g, or t
gggaggtactctgatattccgtactaaacacgtctgcaagtcaagatgtcgcacccgtccccccaagccaagccctccaaccccagtaaccctcgagtcttctttgacgtggacatcggaggggagcgagttggtcgaattgtcttagaattgtttgcagatatcgtacccaaaactgcggaaaattttcgtgcactgtgtacaggagaaaaaggcattggacacacgactgggaaacctctccatttcaaaggatgcccttttcatcgaattattaagaaatttatgattcagggtggagacttctcaaatcagaatgggacaggtggagaaagtatttatggtgaaaaatttgaagatgaaaatttccattacaagcatgatcgggagggtttactgagcatggcaaatgcaggccgcaacacaaacggttctcagttttttatcacaacagttccaactcctcatttggatgggaaacatgtggtgtttggcaaagtaattaaaggaataggagtggcaaggatattggaaaatgtggaagtgaaaggtgaaaaaactgctaaattgtgcgttattgcagaatgtgggagattganaggaagagatgacggggggaatatttcccaaaagatggggctctggcgaccagtcatcccagatttcccctggagggatgcggatatagaatttaaaaagatgtaggattaanatttttatttaattaacaggaagacctttaaaaaacctttggaaattacctttttttcaaaatcccagaaaactgggaagatgggctatttaaaaaaatattgccagaaagttttttaangataacctgggaccagtttc

SEQ ID NO: 85949 - DNA, 897 bp, Homo Sapiens
  misc_feature (289)..(304): n is a, c, g, or t
  misc_feature (714)..(725): n is a, c, g, or t
  misc_feature (819)..(819): n is a, c, g, or t
gggtaatagtttctaactgtcggacccgtctgtaaaccaaggactatgaatactaaatgttaagttctaggcaattatacggggactcagaaggacctggccgctgccttcattgagtttaaagggacaggattgcccttccgtcaagaaagtatgtaagtgttggactgcacaaattaatgtttttcccacaaccgagactttggagattaagaacttatttgaggatttaagaattagggaaataatttggtggaaaccgggaatgagttctattcttaaacagccnnnnnnnnnnnnnnnnaatgttggatatacggcgaggtagagttggccatatttcagagacttagattgacgtatatgtttctgcattatttttacaacaagtttgtgtatcagagcgggagtgcgggggagggaaagaaaacaaacagtttcagaattgaataggcaagtgactgttttaaagattaagtaataaagatgtcttatctagaaaaacacaccaacaacaccattccgctaccccctccaaacccacctaccccctcgggactagccccgctcaatgtcatcccgtcccccgcccgcatattagttgcacaccaacctcactccctgtgggggggccgcgcttcgcggccaccccccaggaaaaccttttttccaacaccaccctttttccctttggtggggccgccgcggcggtgnnnnnnnnnnnntaggggataagacggggacaacccgctgggggccaccactgacagtctggtgccttccccccaacaagcagggaatacaaccctcggggggggntcgccgttggggacaccctttaaggaggggcctctctcggggagaaatatctctctctcccccgcgccgcttgttatt

SEQ ID NO: 85950 - DNA, 948 bp, Homo Sapiens
cggatgtaatgtagtactagtgaaagagcacttctacagaacatattcatgtacaaagccaatcatttatttagcactaaaatcaaattataaaaacaacaattccatcttaaaacaggcattttaaaagcatttctgtggttctaagtttgcatcaagacagcctaagtttgcatctgcacaatctggatacccaaatccctctataatttccaaagacaaagacaatttttgctagttgtgaggtgtcagggggaagcagtgatgccctgcaaacagtctaatgggcccagggaaccctgtttctttctcaacctgaggttgcatccttgatctccaggaaaagagattagtgcttgcttaaccaggttcctagtaaatggtcagggatcttctatgcaataatgttgcaaaagttactgaagaggaagaaaaaaagcgacaacggaggcttcttgcgcatttacacttgcaatgtgacgattttgaaaacaagggccctgtacatagtcagcacccaagtcctgacttccagcatgtaatgcaggctggttgaacagcccttaataactacattgcgaatgccaagacgactaccctgagcacctattcatagacaggaagtagaacataagtgtgcgggtgcacagtaaggcgtctccgaggcaactaaccaagacacggttagaacgcataggccctatctggggttgactttcgctcgaggcttataggcaggcattcctaggttacagcatagcgccccgagacggattattagaacgtaatgagagcgccggagcaatcgtcaagtgacttatgaactaaaaaggcccaataggcgcaacattcgatcatggacacttgtcgcggtgttgtaacagcgagtttgaccactgggggccggacgtgggtatataggaaacagcgtgggggataactacccag

SEQ ID NO: 85951 - DNA, 405 bp, Homo Sapiens
acattttgttttaatcaggttccaaactggttgtgactggttgatatgtctaagtctcttttcatccatagaaggcttccatttcaatttatttgtggagattagatagtttactctgtggaatttcccatgggctaaattttgtgaactgtattccctggtgaagtttaactggttcctcagccctgtgttttctgtgaattggttgtaggatctaagagaatgctgtccaacataaatataaagcaaaccacatatattagtttcccgtggctgctgtaccacctacttggcttaaaataacagaaattcattctgtcatggttctggaggacagaagtacaaaatcaaggtgttggcagggcacaatccctctgaagacaagagaggagaatggtttcttgt

SEQ ID NO: 85952 - DNA, 491 bp, Homo Sapiens
aattacataacaagatatattgatgagtagccatgaaaaaaatacagcttcacaaaatagcatcttagaagaaggggaaactaaaatttctcagtcagaactatttgataataaaagtctcactactgaatgccaccttcttgattcaccaggtctaaactgcagtaatccatttactcagctggagaggagacatcaagaacatgccagacacatttcttttggtggtaacctgattactttttcacctctacaaccaggagaattttgaatttaaaaataaatccaaacattttccttcatattatcaatgcttatatattccttagactattgaaattttggagaaaatgtatttgtgttcacttctatagcatataatgttttaatattctgtgttcatcaaagtgtattttagatatactctttctcaagggaagtggggatattttgtacattttcaacacagaataaaaaatgtactgtgaaaa

SEQ ID NO: 85953 - DNA, 540 bp, Homo Sapiens
ctggtacccagcaagacgtctgttccagggcagtgtagcatctttcaagctccgttactatggcgatggccatgatgttacaatcccacttgcctgaataatcaagtgggaaggggaagcagagggaaatggggccatgtgaatgcagctgctctgttctccctaccctgaggaaaaaccaaagggaagcaacaggaacttctgcaactggtttttatcggaaagatcatcctgcctgcagatgctgttgaaggggcacaagaaattggagctggagaagattgatgaaagtgcaggtgtgtaaggaaatagaacagtctgctgggagtcagacctggaattctgattccaaactctttattactttgggaagtcactcagcctccccgtagccatctccagggtgacggaacccagtgtattacctgctggaaccaaggaaactaacaatgtaggttactagtgaataccccaatggtttctccaattatgcccatgccaccaaaacaataaaacaaaattctctaacactgcaaaaaa

SEQ ID NO: 85954 - DNA, 847 bp, Homo Sapiens
  misc_feature (696)..(696): n is a, c, g, or t
  misc_feature (784)..(784): n is a, c, g, or t
ttttaaatcagaaaattatttattaattcatttaaaataataacaacaaacccgtaatatatcaacataatcaatattttatgaaagatatattttccaaaacaaaaaagttagtgagaagagtggcattgttttacacttttagatgtcctgaatgtctggcttagtaggacacagctagatcctcatgtctgtttctgcatttaagctgtggtgatgcacatggcatatgccttctggaaaactccactgtacactcctaagagaatgacaatgaaagatgcaaacaatgtcttggtgttattatgaaaatagttttgatctgtgggccccctgaaagagttttgaggacctcagagtagacactgtttaaataataaaatatacctatttttggctttgaatgtcagaaagctcagagctacatttagcaaccacttcaggcctggtattatagtcctttgcagctttgctcaactgcagtctgtttgcgacttgccctttacttctttttttggtgtttacagctcttggccatactttttctgtgtttttattagaccttgcttcaaatcctttggaaagcaggttgggtgtttgacaatataggtaattgtgcacatatgcttatacacatatatttcaacacaagtttaaaattatactttgatttcatgttcaatatccacctagcanacacacctcaacaggatgaaaatatatatgatagtcacacaaaaaattaagacactcctcagattgtctgaatgcactttttacacanagcccagaggataggggttacattgcaagaaatctactatataaaaagattggctgggcgcgg

SEQ ID NO: 85955 - DNA, 401 bp, Homo Sapiens
ccccgtctcaaaaattgattgatcaattcagcatctgagggctgcaagtacagaaggaatctattctcagcagggcatagggcacgcactggcttaacagtttagtatataaggctcaaatagtctatacctgaactgctataagcaaggtcgatagggaagtggatagattgcttcagcaaagtgaactgtgagatctccaggacagagggagaaagatctgatccaaatgagaacagattggttattgcaggtatcacagcctaaagaaattatctttttgcaaaagaaatattaaatgatttagcagtctccacgtgtgttaatgtttcaaacgtgtatcataatgtgtataattgtgtaacaaaattgtctacaataaatcttttggtatttgtaaa

SEQ ID NO: 85956 - DNA, 789 bp, Homo Sapiens
  misc_feature (122)..(122): n is a, c, g, or t
  misc_feature (145)..(145): n is a, c, g, or t
cggaagctgcagaggaggagggtggttaaccagtggttcggcccgcagaggagcaccactgagggattccctggaagactggggacagcaggtggtgcctgccagggggtggggtggggccntgcaccctgcccgactagctgcntgcgtgctgttcactctcccacctcccagcagatgactttctagagcctgaggagtacatggagccccgagggagcagaccccagggaagccgctgaccttgacgcagtgccgatgtccctgagctacgaggagctggttcgaaggaatgtggagctcttcatcgccacctcccagaagtttgtccaggagacagagctgagccagcgcatcagggactgggaggacacagtgcagcctctgctccaggagcaggagcagcatgtgccctttgacatccacacctatggggaccagctggtctcacggttcccccagctcaatgagtggtgtccctttgcggagctggtggctggccagccggccttcgaggtgtgtcgttccatgctggcctccctgcagctggccaatgactacacagtggagataacccagcagcccgggctggagatggccgtggacaccatgtccctgagactgctcacgcaccagcgagcgcacaagcgcttccagacctacgctgccccctccatggcccagccctgagtggggagcaccgaggcaggggtgggggaatgtgtactgaggagccgtgcgtctgctcctggctggcccggcctaataaagcagtgttgccatctcaaa

SEQ ID NO: 85957 - DNA, 769 bp, Homo Sapiens
  misc_feature (734)..(734): n is a, c, g, or t
aattcccgggatatcgtcgacccacgcgtccgcccacgcgtccgcggaagggtcaaaagagtccgcggtttcgccgcgtgagttgctttttgcggctggggaggtctacgcttctagagcttgagccagcggggcgaccctgcagtggcaggactcggcaccgcgccctccaccgccggttggtggcctgcgtgacagtttcctcccgtcgacatcgaaaggaagccggacgtgggcgggcagagagcttcatcgcagtaggaatggcagccccatctatgaaggaaagacaggtctgctggggggcccgggatgagtactggaagtgtttagatgagaacttagaggatgcttctcaatgcaagaagttaagaagctctttcgaatcaagttgtccccaacagtggataaaatattttgataaaagaagagactacttaaaattcaaagaaaaatttgaagcaggacaatttgagccttcagaaacaactgcaaaatcctaggctgttcataaagattgaaagtattctttctggacattgaaaaagctccactgactatggaacagtaatagtttgaatcatagtgaacatcaatacttgttccctatatacgacacttgataattaagatgatcaagaaccagaagatctgtgaagaaatgaaataaaatggtatttagtaagaaatctctattttaagaaaaaaagtaaaacctgttataaacacatganaacttgctacaactagaacaaagaaggccttgtcg

SEQ ID NO: 85958 - DNA, 1361 bp, Homo Sapiens
tctgatcttatgctggattgtctaaacacttcacatttccagtttattgtagtgagataactggcaatttgttgaagaacaagcttcatgtgcaagaacaatatattcacccattgccactggacactgaatgtattgtgaatggtgtcaaagttgttttgcttgatgccaatcactgtccaggtgctgtcatgatcctcttttatcttcctaatggtactgtcatattacacacgggagacttcagagcagatcccagcatggaacgttctcttcttgcggaccagaaagtccatatgctgtacttagataccacatattgtagcccagaatacacctttccatctcagcaagaggttatccggtttgccatcaacactgcctttgaggctgtaactctaaacccacatgctcttgttgtctgtggcacttactctattggaaaagagaaagtcttcctagccattgctgatgttttaggttcaaaagtgggcatgtcccaggaaaaatataaaactctacagtgcctcaatataccagaaattaattcactcatcactaccgacatgtgcagttcattggttcaccttctcccaatgatgcaaattaattttaagggcttaacagagtcatttgaaagaagtgtggtgggaaaaacaatcaggattttggccatttcgacctcaaaggatggacacactctaaacaaggttcactagaaatagcagatgttattccccagaccaaaggaaacatttcaaatatatggaaattccttacagtgaacacagcagctacctagaaatgaagcgctttgtccagtggctgaagccccagaaaatcatacctactgtaaatgtgggcacctggaaatctaggagcacaatggagaaatattttagagagtggaaattggaagctggatattgatgatacctccgaggattcagtagtagttaagttccttggatgtagcttgttagtagttaaatctatagaaatgtgaaatacactttgtgtggaaaaacctcatgaagattgttcagatactttattttctcatttatgtttgaacaacatgttcgtggtgctgaatgcctctcagcatcatcaaggataactgaaactgggtctccctgggacccttaatttcttgtcccctgccctccatgggcagttatattctgcatcaagccttagaagaggaagcaaaggcagattcagggaccaaaaggattaatgataattaataaagtagtttgaagcattatatatataagtaattatgtgtctttaaaattatgagatgaaacttttatatgacgtgtatacttaaataaaattaatataaaatttaaaaa

SEQ ID NO: 85959 - DNA, 628 bp, Homo Sapiens
  misc_feature (546)..(546): n is a, c, g, or t
  misc_feature (589)..(589): n is a, c, g, or t
ttttttaagatatttccaattaaagctttatctttcagagcatgttctatttctttctcttcaatcttgaaaaacacctttgtcaaacgggtttccttgtttctctttaatcctaaaatgcccctggcttccaagagccctgaaagtgacaaacactctgactggtccacagccgccacctgctgtttgcgacagactttactgtaggcttcatataacttccccagagtgacctctttgattttcaactgcctgatcaagagcatcaaagagcaaaccaagatcttctgctgaagagggaaggaatcttgtgctccttcttggctcaaggtcatcctgttaccatcaacttctgagatgacttgggatatgtgaataagaccaaccctcttgggaatcagaggctcaaaaggtgatttacattcagacagtggtttgagaatagtctggcttttgacatctgactctacaatttcaatagctctcctgcaaaaatccagggccttgcgaacatctcctggatctcacagatagaattctacctangcttcaagctagagaaaaatgtaagccacagctgttgaacttnccaccttataccagaaatcagatagtcactattttgcag

SEQ ID NO: 85960 - DNA, 1266 bp, Homo Sapiens
ccggtcgacacttcctggcctctggcttgtccttcctcctctgcctctgttgggcccttccccccggtgccttttcctcgaatcctttctctccattggtcgctgtcctcgtctttgggctgtgttttttcttgccttggctcaccgatgcccgttccctgtgtcctctgtgggacttcatgtgggaattgttgtctttgtgcatgttcgttccctcttatctcccgtctatggcgccttgtgtgtgcttttttgctgccgctctgtgtggtctcggcagatttaggcttcagctgggtatacgcagggtacctgtggcgttgttcctcgcgcgtgtgccatccccgttcccttgtggggccctcccatattcaatcatcccttttgatgcaattccccgtgttctgggaactttccatgtagtgggcaactaatgggtcggcgaacgatggagtgaaggtttcgaaggaaccatgctctccccgtcgttggtatgatgcctctctatggccctccttgggaaggtcagcaacagagggagggatgtggattactgtcgccggctgatttgtatgcactgtggtttggtgtacgcccgggtgcctcggtttgccaaacttttgcggcttctgcctgttgtcgaccttcttgggtgcaacgtcaactcgtcccttcttctggggcaatcgtcctgcctagcaaatggaccaagattatctttcagaggtcacctgaaagacatgtgattacattgcacctgcttttagtaatggtaggattgttcttcccagggacctcccgtatcaccctacctctgcttctttagaggtccctggagccaccaggtcaggctgaggggcagggagccggctgtgcccagtatgcctcctggaccctccagttctgccacaggtctgccgatgccctgtccactgcctacacatgacagacaagtaaccccctcatgggggatggggacctacctggctcctcagccagcacccagcttaacccctgccatcccatgctgggccctccaggccaagagtctcagctggccgagagtccaggccttgcctcccccgaccgccatggagggggcagcccggcacagctgctgggagcccttgtgtgtctggtcacactttttaggcgtcacgccaaaagccagcctcctggccccaatacccattttggaagcccctgtggccgtgtggatgtcggtaacagttgtataaaataaattctatttatcgctattgtaaa

SEQ ID NO: 85961 - DNA, 263 bp, Homo Sapiens
ctcttttctcctttttcttctttttaatagtctagttttagtcagtcagtgaggaagaattgggccatgctaacgttatcacaagagaacaatggcagaaatggtattagttatataatatttaaggacaaactatatgttttgctgttttaacgtagtgactcactgaactaaatacataattgaccaacattaagtgtatttccaatacagaagggttgaaaatattacattataaactcttttgaaaaatgtatctaaaa

SEQ ID NO: 85962 - DNA, 710 bp, Homo Sapiens
  misc_feature (25)..(25): n is a, c, g, or t
ttgtgactctgcagcctgggagganggtaagtccttcaacctttctgagcctcctttttctcccttaaggcaggcaaggctacctcaccttcaccctgaaggtatcatactgctgccccttctcactccaggcacagtgtcatctggtgtccctcaccctgtttcccaccacctaggcctggccttgagaggttctgtggaaggaattttggggagaggacaccacttactgttgatggacttgaggtcccggtggatgatgggcacaggggcatcattgtgtaggtagttcatgccccgggccacctgcacagcccagttgaccagcacgtgaggtggcacccggcgacctgccagcaccctgctcagtgcaccaccccgggcatactccatcactaggcagaggtgtggggggttgaggcaggcgcccctaagggcaattatgttggggtgctgcagggctccaaagagccgggcttcctggcacacctgctccgctgtcactgccgggtccttctcagggtccagccgggcggccttgactgccacctcctcgccacgccacagggcccgatagaccttgccaaagccccccacaccgatgatctcctctagctgcagctcgtggaaggggatctcctggggcagctggaggcccgcgggtgcagcgggggcgccgggggccacgtagtagctggggaagacgccca

SEQ ID NO: 85963 - DNA, 557 bp, Homo Sapiens
  misc_feature (112)..(141): n is a, c, g, or t
gccaccaggcaccaggtgtgatctaccacacctgtctaaaaagtatgtatttttaaatttttttgtagagacaggatctcactatgttctccagctggtctcaagctcctgnnnnnnnnnnnnnnnnnnnnnnnnnnnnnnagtgtgagccactgtgcctagtcactttaattgagatattggcaagtcaactgccatgcagagcccagggcactggttatattcagtaggaaactgaactcagcactcagaattttaaattaaatcaatgatcttcaagtatttgccactttcgagtacagctaattggataatctcaaaccctttagtgaaaatatcttaaatgcattgagaatattttctaattacctgtgtatgctacagtacagacattaattctataaacatgttcataggtcttccccctcgccccgcccgtcttctaagggcattttctgtttctttttagtgagttcatgaatgtttaacggttctggcgcaaagctttcttgcattctgagcataaaaataataaaacccacttatatttgcttgaa

SEQ ID NO: 85964 - DNA, 507 bp, Homo Sapiens
ggtgttcaataattttttactgaatgatggacaataataactctctaatacaaaataagcccttcctgaatgagaattataacactaccaatgttttcagtggtatctgagctgtatgcagaacgaaaaaaatatacagacatacttgacattttacaaggatgtcaaagaaatcttcatcagcctctttgttgtcattagtcatcaggtggctaagtaccgactggctgttttgtgttagacgaagccctggcaaattactgaaactagccctctggtcatccagacggcgactctgtgagctggcaagaagatctaaaaactcatccgtgttgggggataccacaggaacagatgatgtttttagcatcattttagggggagtggaagttgttgttgaagctgtatggcagttcttttcttgtaagcaacatctctgatcatccatcctattgctttgaaatcggcttaataagtcaaagaacccttcatctccaatagtatctg

SEQ ID NO: 85965 - DNA, 440 bp, Homo Sapiens
tagaaatgcttgtttggtttctgatagttgtaacctaaagaatctttagtaagccattggtctgctgtggggagcgtcgagatgaaactggaacgttgtttgaacctagatcataaagtgactccaacatcttcataccagggaagcagtgataaattctaacagataatgcaactcagtctacttggatgttcacacctgagactggagaaagacctgctgccttctgcagagccaaacattcctcacatgctcctccacaatgctagttaatgcagcaagaatagtcttatatagactataaactcctggtacactgtgtctacattgctcactgcagtatccacaacatctaagaccatggtcttagatgtctggtacaggactggtgctcagtatgcattgaatgaataaatgaatgaatatagcaaagcaaaaaa

SEQ ID NO: 85966 - DNA, 498 bp, Homo Sapiens
ctgactttgaggtttaggtgaaatcgcctgctccagcattggagctgtttcattgtagtcttcctttttttcagcaccatcaaccccaacagctttggatgccaacaaaccagtaatcttgttaagtcgagctctctttgcctgaaacgagttgccttgattatttttcctcttgtttgataatgtgctctctggctgtggaaagaccatctttggaacgttctctacatgaagtcctactttcaacagaacacatatatgagagtttatcaaatgtttcactagatgtaggcagatcttccttcttctctacgtctggtgtggctatacaagttgaagtttcctccttctttgaaggtactttaaaccactttctctcatctttatccttatctttattgctgttagcgctggttcgaggtttactccctgttttgttcttggctgcagctgcagcagctgctttgactaaagctatccaatcctcacttcccatag

SEQ ID NO: 85967 - DNA, 269 bp, Homo Sapiens
cctctgaaaatttggaaaatattctagtttaacatgattatgtaggccgtcaccgtttttaaaaattgcattaagcccataaactcattctaaattggcagatctttaaaaaggatgtttatgtttacagattctaatgcttttgagaaaacagacacccatttccatttcctttgcttctcaacacatcatgctggtgacagatgtttctgaactgtttcaatgtccctgtctaaatagaaaatgcacacttaatgatacccatgtgt

SEQ ID NO: 85968 - DNA, 803 bp, Homo Sapiens
gcttattgttgtctagacaagagaccagcttggactagtaaaattagtgaaataagatcgtttatagttggatgacagagccaactagacgtggtaatagtggaggtgtccataactgctaggtgtccagcttgcacactgatgagcataatgaccctagattcagctggggagcagcatttaaacagctgaatttttaaattacctttgagaaatccaaatggtctttttgcagtagcacattactcagtagtctaaactacagaaataaaccttaaggccatgggtataaatgagatctgctggtggtagaggaagagggcctagggtctgaagtttgagaaactccactaattaatggcaaggtaaagcatgataagccagaaaggatggtcagtggtaggagcaaaataggattatattaaagaagcaaaagaatgtccttaaaattctccctgggattaagtaacacagtgattgatattagtggagtagagggaaagatccatgttagagatagcttaagatagggattagatgaattgagggcaatgactaaagatactgcttgcaagaaaactggctgagaatgagaggaaaatcttagttgcttggcgggagggggtttgtggttgtgaaagatagttttgtttaatcttagtcttaaatttaaaaccaagtagcaaggatctagctgagagaataattgaatacattaatataggaggacagacaaagatcctgaaaaggctgggagaagagcatccaaagcacaggtggagagacaaaaaggttagggctgc

SEQ ID NO: 85969 - DNA, 1670 bp, Homo Sapiens
gagagagtatgaagtcgacggcgcgccgaattcggcacgagggggaagatggacgcagctactctgacctacgacactctccggtttgctgagtttgaagattttcctgagacctcagagcccgtttggatactgggtagaaaatacagcattttcacagaaaaggacgagatcttgtctgatgtggcatctagactttggtttacatacaggaaaaactttccagccattggggggacaggccccacctcggacacaggctggggctgcatgctgcggtgtggacagatgatctttgcccaagccctggtgtgccggcacctaggccgagattggaggtggacacaaaggaagaggcagccagacagctacttcagcgtcctcaacgcattcatcgacaggaaggacagttactactccattcaccagatagcgcaaatgggagttggcgaaggcaagtccataggccagtggtacgggcccaacactgtcgcccaggtcctgaagaagcttgctgtcttcgatacgtggagctccttggcggtccacattgcaatggacaacactgttgtgatggaggaaatcagaaggttgtgcaggaccagcgttccctgtgcaggcgccactgcgtttcctgcagattccgaccggcactgcaacggattccctgccggagctgaggtcaccaacaggccgtcgccatggagacccctggtacttctcattcccctgcgcctggggctcacggacatcaacgaggcctacgtggagacgctgaagcactgcttcatgatgccccagtccctgggcgtcatcggagggaagcccaacagcgcccactacttcatcggctacgttggtgaggagctcatctacctggacccccacaccacgcagccagccgtggagcccactgatggctgcttcatccccggacgagagcttccactgccagcacccgccgtgccgcatgagcatcgcggagcttgacccgtccatcgctgtggggtttttctgtaagactgaagatgacttcaatgattggtgccagcaagtcaaaaagctgtctctgcttggaggtgccctgcccatgtttgagctggtggagcagcagccttcacatctggcctgccccgacgtcctgaacctgtccctaggtgagagctgccaagtccaggtggggtccctcggaggtacgatctgtgcccttgcttccccagtcctgggcccccttggttttgaccattaaggtgtgtgtgagcctgagccgtgagcacttggcagtggttcgcctgtgagaccaggtatggagtggagcgtcccctcctccaagcttgcgcccagcagcccaggacccacctcgtcttccccaccagcgctgcctgcccgggcgctgtggagctgggcgtgctaccatggagtcctcaggggtctggagcagacagaacatgcaggctctgtggtgacgcagtcctgggtgggggactggttcacttgggcacactggccatgggtggcgtagacccctcggaccatggccagcgtgccgcaggagccggcctgggctcgtgcagtgaagtgagtggccgtgagcgcgtctccctcatctctgtctccctgtgggaaactctacaaacaaggcatggccatgggaaccactcctgatgaca

SEQ ID NO: 85970 - DNA, 864 bp, Homo Sapiens
agagagtatgaagtcgacggcgcgccgaattcggcacgagggcagctactctgacctacgacactctccggtttgctgagtttgaagattttcctgagacctcagagcccgtttggatactgggtagaaaatacagcattttcacagaaaaggacgagatcttgtctgatgtggcatctagactttggtttacatacaggaaaaactttccagccattggggggacaggccccacctcggacacaggctggggctgcatgctgcggtgtggacagatgatctttgcccaagccctggtgtgccggcacctaggccgagattggaggtggacacaaaggaagaggcagccagacagctacttcaccgtcctcaacgcattcatcgaaaggaaggaaagttactactccattcaccagatagcgcaaatgggagttggcgaaggcaagtccataggccagtggtacgggcccaacactgtcgcccaggtcctgaagaagcttgctttcttcgatacgtggagctccttggcggtccacattgcaatggacaacactgttgtgatggaagaaatcagaagggtgtgcaagaacagcgttccctgtgcaagcgccactgcgtttcctgcagattccgaccggcactgcaacggaatccctgccggaactgaagtcaccaacaggcgtcgcctggagacccctgtacttctcatccctgcgccgggctcaggacatcacaagctactggaacctgaacatgctctgatccccatcctggccactgagggaccaaaccccctatttcggctcttggaggcttttctgacccacaccaccccggaccaggggtttccgaaagttcgccccc

SEQ ID NO: 85971 - DNA, 1079 bp, Homo Sapiens
aaggggggagagagtatgaagtcgacggcgcgccgaattcggcacgagggcagctactctgacctacgacactctccggtttgctgagtttgaagattttcctgagacctcagagcccgtttggatactgggtagaaaatacagcattttcacagaaaaggacgagatcttgtctgatgtggcatctagactttggtttacatacaggaaaaactttccagccattggggggacaggccccacctcggacacaggctggggctgcatgctgcggtgtggacagatgatctttgcccaagccctggtgtgccggcacctaggccgagattggaggtggacacaaaggaagaggcagccagacagctacttcagcgtcctcaacgcattcatcgacaggaaggacagttactactccattcaccagatagcgcaaatgggagttggcgaaggcaagtccataggccagtggtacgggcccaacactgtcgcccaggtcctgaagaagcttgctgtcttcgatacgtggagctccttggcggtccacattgcaatggacaacactgttgtgatggaggaaatcagaaggttgtgcaggaccagcgttccctgtgcaggcgccactgcgtttcctgcagattccgaccggcactgcaacggattccctgccggagctgaggtcaccaacaggccgtcgccatggagacccctggtacttctcattcccctgcgcctgggggctcacggacatcaacgaagcctacgtggagacgctgaaacactggcttcatggatgccccaagtcccctggggcgtcatccggagggaaagcccaaacaggcgcccacttactttcatcgggctaccttgggtggaaggacctcaatctaccctggaaccccccacaaccacgccaagccaggccgggggaaggcccaacttgatgggctggctttcatccccgggacgaagagagtttcacactggccagaaaccccgcccggggccgcaatgaaccattccggggaaactttgaacccgtcccacttccctggtggggggtttttttcggtaagaaaagg

SEQ ID NO: 85972 - DNA, 974 bp, Homo Sapiens
  misc_feature (299)..(299): n is a, c, g, or t
ggggccgggttgcgcccaaggggggaagccccccgggggaatttttctcaattcccccctggcgcccgtgggggttcccgcggacactccaagaggagggccttaccgtgggagaccgctgaaagcacttggtttccatgaaggcccccagttccctggggcgtcattcgaggggaaggcccaacagccgccccctacttcatcgggtacggtgggtgaggagctcatttacccgggacccccacaccacgcagccagccgtggagcccactgatggctgcttcatcccggacgagagnttccactgccagcaccccgccgtgccgcatgagcatcgcggagcttgacccgtccatcgctgtggggtttttctgtaagactgaagatgacttcaatgattggtgccagcaagtcaaaaagctgtctctgcttggaggtgccctgcccatgtttgagctggtggagcagcagccttcacatctggcctgccccgacgtcctgaacctgtccctagattcttctgatgtagagcgactggaaagattcttcgactcagaagatgaagactttgaaatcctgtccctttgaaaatcctggggtcgggggtggcacctgtgagagcctggggctcctggtgccgctgcgtttcatccatcccgcccgctcgcctgccgagggctgcgccccgtgctgcctccccccagagggccacccgctgtgctcgtggactgaggctgcgctgcccgggaggccttactgcttggtgtcagactgcccagctcagagtgcccgtcagggcctgtgcatccgcacgcggagccgtctgttaggagcttccagagcgttctctcgacactgccagccccgtgttagcacctgggcctcagtcccacttgctcccaggcgccggttctgtggttggtttggaattaaagtcctgtttgaagttgtcaaaaacctcgtgccgaattctt

SEQ ID NO: 85973 - DNA, 1058 bp, Homo Sapiens
atatatggctaggtacgaggcctgggtgttaaatcggcacgaggtgggtctcaaacgtcctgggctaaagcgatcttcccatgttggctgcccaaagtgctgggattacaggcaagagccaccataccagttcctgtctagatattatgatgaagattgaggatggtagtttttgtggagcacaatcctgactgtacctgtgatgttgcattcatcttttggaacataagcagatcaccaggtgaatggctaaagaatctggaataagcttgaaagaaatacaggtcctggcaaggcaatggaaagttggtcctgagaaaagggtgccagcgatgcctggatcgcctgtggaagtgaagatacagtccagatcctcacctcccaccatgccacccctcccaccaataaatcctggaggaccgaggccagtgtccttcactcctactgcattaagcaatggcatcaaccattctcctcctaccctgaatggtgccccatcaccgccacagagattcagcaatggtcctgcctcctccacatcatctgcactcacaaatcagcaattgccagccacttgtggtgctcgacaactcagcaagttgaaacgctttcttaccactctgcaacagtttggcaatgacatctcccctgagattggggagaaggtgccggactcttgttcttgcactggtgaactcaacagtgacaattgaggaattccactgtaagctccaagaagccacaaactttccccttcgtccttttgtgattccatttctcaaggggcaactgaccctgatgcagcggaactgctgcactgggctcggcggccagcagacccatccagtacctggtcagcagacacttctgtcaaaaagcatgatcgcgggatcgcgagtgtcatgggtgcgaaggaaggctccaagggaaaatttctgggagccaggccggcctaaaagtgtcaaagccgagcagcgggccagaagggacctcaccctcgaaagggatcggggaccaagaaggaaccggacaggagggggcgacagggggacagaatc

SEQ ID NO: 85974 - DNA, 338 bp, Homo Sapiens
taaaagtcaattaaaatactgctttaaagcccgtgcaaatcacatatttacaataaataaattctcaattccaagcctgtatgccaactgaattacagcttgagcatggggtgggtggggtctgacatgttgttctgcaacctggaaccccaggaccttcgcttcatctgccttctcaccgaagagtctttagagataactgagaatttctgcctttgatgtcatcagagctctgcccgactgcttccgcttggagccagggaccaggtgtacggcttctggggatcttgctggggtaaatcttctggcatggtttatattcatccggagggggaaag

SEQ ID NO: 85975 - DNA, 579 bp, Homo Sapiens
  misc_feature (127)..(142): n is a, c, g, or t
caagttgacagaacaacacaatgagaaacgaacttctttagaaggttgaatgaaagtaagatctagatgaaaaagtcattggccaaagataattttttaaaaaaaacattctatgttaacccttggnnnnnnnnnnnnnnnncaacccagagaaatacaagaaaacaatgtacacattcatttcactgacagttacaagaaaatagccgtttatagaagttacacaatgctttcaacaaatcccaaacaaattttgggaaacagataaagccattgggtaaaaataaatatacatactagctaatataaaacaatttatggttacgaattgtcatcaattctcttaggacacaaggagaaatatggtgatataaatctgatgagggctacatatattacatggaattaaaaaacaactgattaaaacatcctaacaatgatacaaatatttaaaagaatgtcttaaaagtcagacatttaccactggaaatagcacgactttaatatgtactccagagttgtaatgtgtatacaggtcactttcgctgtgtctcatcaggtatccacctctcctgcacc

SEQ ID NO: 85976 - DNA, 433 bp, Homo Sapiens
gcacgaggaaagaaagtggcaggcaaacacaactcttgactgccctcccaccctcctacctgttcagtactcatctgattcagaagcatcacttcttggataactagcactggaaaaatgaaatcatctgtgtaagtgaagggactcatttttctttgctttcagcccatgtaaataaataatacagtattaacattttcgtgctgcttcccattagcttgtagattgagccatactctggctgcctctttgccttcctaggggcattttctttaacttccagaatagtgattttaaaagtaaaaataaaaataaaccttacttacaagcataacagattgtatttaactttatcacatatgatagagatatatatgctgtaaaatgagggaaaggaactttctaataaaccaatgatttgtggaaacttaaa

SEQ ID NO: 85977 - DNA, 483 bp, Homo Sapiens
  misc_feature (122)..(150): n is a, c, g, or t
aggtctaatttaattgcttttaatatatatgtacatatatgttattttaactgtggagaattatttaagttaaaagactggtttgatttgcctatggtgtgaaatcctttgttatttttctnnnnnnnnnnnnnnnnnnnnnnnnnnnnnctaaggaagaacaagaagctatttacccaaagtgagctttcagttttagttttgcatggctgtttgactgcctttccgccctatgaaaatcaagaaaatcttttttaaaaatggagtcctgctattttccactccttgcagataatacaaattcagtttgtcaggttggatggtgagttgggagctgtgatggatctgttggcgggttttggatgtgtaaagaatgatatatatattaaataggtcaatcagactatgacagctatgtacgaccatttgtatgtgtatctatgtcagaaagaatctttattaaaatattttgatcaaacattt

SEQ ID NO: 85978 - DNA, 1245 bp, Homo Sapiens
  misc_feature (49)..(90): n is a, c, g, or t
  misc_feature (94)..(128): n is a, c, g, or t
gggaaattcatctgagaaacgcttaccgatatgggcgctagctcggcgnnnnnnnnnnnnnnnnnnnnnnnnnnnnnnnnnnnnnnnnnnccgnnnnnnnnnnnnnnnnnnnnnnnnnnnnnnnnnnncagtcgacggtaccggacatatgcccgggaattcggccattacggccggggaggtttttgaagatggcggccctcaaggctctggtgtccggctgtgggcggcttctccgtgggctactagcgggcccggcagcgaccagctggtctcggcttccagctcgcgggttcagggaagtggtggagacccaagaagggaagacaactataattgaaggccgtatcacagcgactcccaaggagagtccaaatcctcctaacccctctggccagtgccccatctgccgttggaacctgaagcacaagtataactatgacgatgttctgctgcttagccagttcatccggcctcatggaggcatgctgccccgaaagatcacaggcctatgccaggaagaacaccgcaagatcgaggagtgtgtgaagatggcccaccgagcaggtctattaccaaatcacaggcctcggcttcctgaaggagttgttccgaagagcaaaccccaactcaaccggtacctgacgcgctgggctcctggctccgtcaagcccatctacaaaaaaggcccccgctggaacagggtgcgcatgcccgtggggtcaccccttctgagggacaatgtctgctactcaagaacaccttggaagctgtatcactgacagagagcagtgcttccagagttcctcctgcacctgtgctggggagtaggaggcccactcacaagcccttggccacaactatactcctgtcccaccccaccacgatggcctggtccctccaacatgcatggacaggggacagtgggactaacttcagtacccttggcctgcacagtagcaatgctgggagctagaggcaggcagggcagttgggtcccttgccagctgctatggggcttaggccatgctcagtgctggggacaggagttttgcccaacgcagtgtcataaactgggttcatgggcttacccattgggtgtgcgctcactgcttgggaagtgcagggggtcctgggcacattgccagctgggtgctgagcattgagtcactgatctcttgtgatggggccaatgagtcaattgaattcatgggccaaacaggtcccatcctcttcatgaaaaaa

SEQ ID NO: 85979 - DNA, 430 bp, Homo Sapiens
gtgtcatcttcctctttcacactcttgatgataatttgaaaatggtgaaatcacctctgaatttgcctatagcatgagcacattcttatgacaacataacaaatagttcataatgtgaatattagaaactgttacagcctgcagttaccataattttccatgtttgtggaattgatattgaaatagcagggctaaggaattactggcaagttttagcctgtgggtaataccttagggttatttaaatatttgtaattttatttaaatgttcatgaatgtttgaaaggaacaaaattatcagggatggctctttgccatgggtcttattttcaccctcttttctgtaagaaaaaagaacaatgtcttaatgtatttttaaagtttttggtatagtttctaattccaattttaataaaagttttatagatat

SEQ ID NO: 85980 - DNA, 430 bp, Homo Sapiens
  misc_feature (407)..(407): n is a, c, g, or t
ttttcggctcagtttttctcaatattcataagtaacattgaaaacaaagagttatgtggtcaaagaaaggacaaactggttaatgataatcgtcccctgtgggccctgggcgttggtgtcacacagaactgagaagcaaagcgggtggtgacagaccctggtaatgtgcagggagcgtctggatcggagtctcgacctggtgggtggtttgtccagggaaggacagttctcttctttaggtacacacggtagggactatgattaaactacttgacagcggcacctctgtgacctcattttcgtgtgacacatgcagatctggaagccgccgtcaccgtgagtctcagttggctctctctcacggtcttgcctctgaaaatgcaactgcattgtgcacagaaataccntttctgggtaaaactgggtcttg

SEQ ID NO: 85981 - DNA, 545 bp, Homo Sapiens
acaatacaaattttattaaaaaaataacatcaaaactgttcagcaaatctgtattcaatgtaaccaaaataaacaaacaagaaattaaaaaaaatatacatctatatatatatgagcaagaaacaagtgcattttttggtcccaatattttttgaatatattatctttatccagaggaattacattaatggctaagaaggtattatgtattagatgtatagaaatgtaactttaaaacttgttttaagttctgtaagaagagttttgccaattctttatgtctttgaaatcagaatccctaagctaatgttaatgataggcccaagacagagcatgtaataatgtctaatggtctggacaagtatgaaattaagaagctaccaataagtagctacacgaaatctgtagacaattctaagaaatgtcttggagtttgtaataagaacaaaacaaacacaaagagaagagttcaaaagtagacataaaatggacatcagcaaatttcatgaatctgggacaaagaagtgatggaaaaataaaataga

SEQ ID NO: 85982 - DNA, 348 bp, Homo Sapiens
caacacagtaggttcaagaacagcaagtttgctatttaaacacatctcataactgtacatgatattaaagcaccaaaggcctagtgacttttacacagttgtgaagatccacagcaatgacatggataatctctagagccttattttccacaccacctttttttgttgctgttggtgttggattatgatgtaaatgacagggtgttcagaaattttattttggattataatctactgataaaatttaattaaatgtcaaaatcacctgtaatcttttaactctcagttgttatggatgggtcatcagacagtaggaaatatttgtaattaaaatacccttttgctttc

SEQ ID NO: 85983 - DNA, 566 bp, Homo Sapiens
  misc_feature (41)..(56): n is a, c, g, or t
tttgagacagagcctgggtgacagtgagactgtggctcagnnnnnnnnnnnnnnnnggaaaatgaaactagaagagatttctaaaagtctgagatatatttgctagatttctaaagaatgtgttctaaaacagcagaagattttcaagaaccggtttccaaagacagtcttctaattcctcattagtaataagtaaaatgtttattgttgtagctctggtatataatccattcctcttaaaatataagacctctggcatgaatatttcatatctataaaatgacagatcccaccaggaaggaagctgttgctttctttgaggtgatttttttcctttgctccctgttgctgaaaccatacagcttcataaataattttgcttgctgaaggaagaaaaagtgtttttcataaacccattatccaggactgtttatagctgttggaaggactaggtcttccctagcccccccagtgtgcaagggcagtgaagacttgattgtacaaaatacgttttgtaaatgttgtgctgttaacactgcaaataaacttggtagcaaacacttaaa

SEQ ID NO: 85984 - DNA, 438 bp, Homo Sapiens
atgcgctacaattctgaagacaccatggctgaaagttctaggggtgttggtggcagctcatattaggtctggcatacataactaccttttgctatagctgaaaactttaaggaaaaagttatatttttaaaaagtctcaagcatggctacctaaaaagtattttgttaatataatctactgtaatttcacttatttaggagttcagatatgaaaacatctttatgagccaataaaaatattacagagaaaaaaatacttctacaaaagttgaggttaagaactatgaggcatttcttttggctgtaaacacacagtttactgtcccttgttgaaacacaaatgtttggatttcctgagcttcacagataacagcaggaggcaagtttgcatagaaaatttgcagtatgtcaacaatttacttaaaaaaagaactttta

SEQ ID NO: 85985 - DNA, 847 bp, Homo Sapiens
  misc_feature (24)..(24): n is a, c, g, or t
aacgctggggcccgccaataaacntatcctgtcactacgcaaattaccaagttacttaccgcacacgttatcagtcgacggtaccggacatatgcccgggaattcggccattacggccggggggcgacggcggcggtggctctagaaggggaggtggaggatctcctttcctcttctcagacccgggagcgtccgggacgcggagcccggagctggggcgacgaggcgattgcgggggcctgggctagaatctccctggaaaaggagacatgaatgtctgcaatgatacttcctgacaagaagttgatacaagaaaaggaaaggagattaacagctagtgagcagaatttcgaacagcaggatttcgtattttttgcttccaactgcacacttccgttgcccacttttaaatcagagatacctacactcaaaacccagacaaggcaaaaggatacttttcttgtatattttttgagatcgaagaaacgacaatgtccaggaaacagaaccagaaggattcatcaggattcatttttgatttgcagtccaataccgtactggcccagggaggagcttttgagaacatgaaagagaagataaatgcggtacgtgcaatagttcctaataagagcaacaatgaaattatcctggttttgcagcactttgataactgtgtggacaaaacagtacaagcattcatggaaggtagtgccagtgaagtactcaaagaatggacagtaacagggcacgaacaacggtcaacccgacttacatttaaaagcatgatgatgtgtatctcattcccacaaattacggctctgcaaaaatattgcacagaacagggtcc

SEQ ID NO: 85986 - DNA, 582 bp, Homo Sapiens
  misc_feature (51)..(51): n is a, c, g, or t
  misc_feature (79)..(79): n is a, c, g, or t
cgggcacgagtggaggacggtgtgtgagaccgcgaagtgggcacgctctgnaatgtgaggtctcgggcagcacgtaggntagaacgagtgtgagcgtctccacgcagtggctggccccgtgaccggggcgtctcttgcatgctgttggtggtccttccacagttcctatctcccacccgcctggttccagccccatcccctctcccactgagtcacaggtttgagattcccagagaggccaaagacagctacaggaagtaccctgggggctcagctgagagagagtcacagaaaggccagagggtctcaggaaggtctggaggtcacagctgggctcacagaagctcttgggccctggcatcctgggtgaccggtgttcttgggtattggggacaggacagagagctcattctataaccacagttgtcttttaaaggccaccctctccagccccttgtcccccctgtgctgtgagcccaagtcccttgtgaccactcagtgtcccgtccccacccctccagccgcagtttttggctacaaactgtcacagtatacattggtaataaaatatttccccaaaaa

SEQ ID NO: 85987 - DNA, 597 bp, Homo Sapiens
gcaaaaccaacatgcacttgtagatgatatttcctacttctctgctatctgtagggatccttgcctgtccattttctagctctggtgcagtcatgctgctgctgctttagtagacactcacgtcatagtcttcagtgaggagatagtcttctgtgatgtgggggctgagcagtgtgtagcccactaggtagaaaaggcccagactcaggcgcttgagagcaggaatgatgctggaaaggaacgagtgaagttcctggtcacagagagcagagactattcccttcaccctctgaccttcagttatggagaggagtgtttaggggtgtggttgtctacctggaatgggatgagaagctctgctgcccaaagtgtttcctgtttcagggaaagatttctatggctggctatgaggaatggggactgcaaacctcttaagagttgtaggaaagtcagggcagcagacagtggaccagtcttgtgtttacccctcagggatgctactgatctcaaggtcttgccaggtctcacaatctccattgggactgaaaacccagtggaggtaagataataaaaataaccactttgaatctgcaaaaa

SEQ ID NO: 85988 - DNA, 2412 bp, Homo Sapiens
  misc_feature (1752)..(1990): n is a, c, g, or t
  misc_feature (2262)..(2262): n is a, c, g, or t
gtaattgggggtgaagcgatagcgttttgcccgcattcggggcgcgcggagctggggggtccctgtggggctcccggagttaagatggcgtcctcagcggagggggacgaggggactgtggtggcgctggcgggggttctgcagtcgggtttccaggagctgagccttaacaagttggcgacgtccctgggcgcgtcagaacaggcgctgcggctgatcatctccatcttcctgggttacccctttgctttgttttatcggcattaccttttctacaaggagacctacctcatccacctcttccatacctttacaggcctctcaattgcttattttaactttggaaaccagctctaccactccctgctgtgtattgtgcttcagttcctcatccttcgactaatgggccgcaccatcactgccgtcctcactaccttttgcttccagatggcctaccttctggctggatactattacactgccaccggcaactacgatatcaagtggacaatgccacattgtgttctgactttgaagctgattggtttggctgttgactactttgacggagggaaagatcagaattccttgtcctctgagcaacagaaatatgccatacgtggtgttccttccctgctggaagttgctggtttctcctacttctatggggccttcttggtagggccccagttctcaatgaatcactacatgaagctggtgcagggagagctgattgacataccaggaaagataccaaacagcatcattcctgctctcaagcgcctgagtctgggccttttctacctagtgggctacacactgctcagcccccacatcacagaagactatctcctcactgaagactatgacaaccaccccttctggttccgctgcatgtacatgctgatctggggcaagtttgtgctgtacaaatatgtcacctgttggctggtcacagaaggagtatgcattttgacgggcctgggcttcaatggctttgaagaaaagggcaaggcaaagtgggatgcctgtgccaacatgaaggtgtggctctttgaaacaaacccccgcttcactggcaccattgcctcattcaacatcaacaccaacgcctgggtggcccgctacatcttcaaacgactcaagttccttggaaataaagaactctctcagggtctctcgttgctattcctggccctctggcacggcctgcactcaggatacctggtctgcttccagatggaattcctcattgttattgtggaaagacaggctgccaggctcattcaagagagccccaccctgagcaagctggccgccattactgtcctccagcccttctactatttggtgcaacagaccatccactggctcttcatgggttactccatgactgccttctgcctcttcacgtgggacaaatggcttaaggtgtataaatccatctatttccttggccacatcttcttcctgagcctactattcatattgccttatattcacaaagcaatggtgccaaggaaagagaagttaaagaagatggaataatccatttccctggtggcctgtgcgggactggtgcagaaactactcgtctcccttttcacagcactcctttgccccagagcagagaatggaaaagccacggaggtggaagatcgatgcttccagctgtgcctctgctgccagccaagtcttcatttggggccaaaggggaaacttttttttggaaaaggcgtcttgctttgtcannnnnnnnnnnnnnnnnnnnnnnnnnnnnnnnnnnnnnnnnnnnnnnnnnnnnnnnnnnnnnnnnnnnnnnnnnnnnnnnnnnnnnnnnnnnnnnnnnnnnnnnnnnnnnnnnnnnnnnnnnnnnnnnnnnnnnnnnnnnnnnnnnnnnnnnnnnnnnnnnnnnnnnnnnnnnnnnnnnnnnnnnnnnnnnnnnnnnnnnnnnnnnnnnnnnnnnnnnnnnnnnnnnnnnnnnnnnnnntgagccaccgtgcccggcccaaaggggaaactcttgtgggaggagcagaggggctcacatctcccctctgattcccccatgcacattgccttatctctccccatctagccaggaatctattgtgtttttcttctgccaatttactatgattgtgtatgtgccgctaccaccaccccccccatgggggggtggagaaggggtgaaaggccctgcctgctccacttttttctaccttggaactgtattagaaaaaatcacttctgtttgttcantttttcacctcgttcccgatttcttgggctcgagggcaaattccctaaaggagtcgtataaattcgtatcatgtctagctgtttcctgtgtgaaattgtatcgctcacattccaacacatacagcggagcaaaatgtaagctggggtgca

SEQ ID NO: 85989 - DNA, 1109 bp, Homo Sapiens
ctggaccggtccggaattcccgggatatcgtcgacccacgcgtccgggcaatggtgccagtgaagcgggggtttgtttcaaagagccacaccttcatgttggcacaggcatcccactttgccttgcccttttcttcaaagccattgaagcccaggcccgtcaaaatgcatactccttcctgagagggaatagctcagttagggctcttgccactccccatactggcccccatggcttgtctaaataggaccttgtttcaacttttctacttactgtgaccagccaacaggtgacatatttgtacagcacaaacttgccccagatcagcatgtacatgcagcggaaccagaaggggtggttcttgagggaagaaagcacagtgcattagggatatcacatgactaggcagtttctctcagcactcttccttttcacacttgtggctggctacttcatacctgcctgagtcctgctgccagatgccctcaatagtctggcctgattgccttcacaataggcagagaggaataagcagagggcctggagaatattcattcgcctttcccttggagagcctcaagggcagcactgtatttaacttctctactgtttgccttcgttggcaaagtgtttggaatgagcatttggaatgttaagtacagaggggcccatattggattttaatttaaggagagaaacctgcccagaattactgaactgttttcaagcctttcagctgggcaggagcaaaagccagcacttccccccttcccttggtttctgaattccctagaagtgcccaaatgtatcagtcaagagaagaaaataggatggagaatcagaagctgctgtgctctgaggggtcacgtggatgtgataaggcaagctaggagcggctcctaaagaggccacgggtggctaaatgtgcacctggcacagccctgtgccccgcaaggttgttcaatggctggcctgatgaacatgtccccaccaacgcctggcaattgccacttcacagatctagaagcaaaaccaacttgcccttggaaaagaaaatttcctaactcctcggctaactggaaagggaatccttgccgggtccatttcct

SEQ ID NO: 85990 - DNA, 452 bp, Homo Sapiens
ccaggcctcagctccgggcgacgtggagtggggcggtcctggcgggccgagatgccgtcctgcgctgcgagggacccatccccgacgtcaccttcgagctgctgcgcgagggcgagacgaaggccgtgaagacggtccgcacccccggggccgcggcgaacctcgagctgatcttcgtggggccccagcacgccggcaactacaggtgccgccaccgctcctgggtgccccacaccttcgaatcggagctcagcgaccctgtggagctcctggtggcagaaagctgatgcaaccgcgggcccagggtgctgttggtgtcctcagaagtgccggggattctggactggctccctcccctcctgttgcagcacaaggccggggtctctggggggctggagaagcctccctcattcctcccaggaattaataaatgtgaagagagctctgtttaa

SEQ ID NO: 85991 - DNA, 485 bp, Homo Sapiens
gttaagacttaccattcagataaaaagattcctttcaaaatattgtttttcgttgacaatgcacctgttcacccaagagctctggtggagatggacaaggaattaaatgttttcatagctgctaatggaactccattctgcagcccatggatcagagagtaatttcaactttcaagtgttagtgtttaagaaatgtatttcataaggctacagctgccattgatatagtgatttctctgatagatctgggcaaagtaaattgaaaacattttggataggaatcaccattctaaatgccattaagaatcttcatgattcatcagaggtggttaaaaccgtaacaataagaggagtttggaagaagttgattccaacacttatggatgactttgatgggttcaggacttcagtagtggaggtaactgcagatgtggttaaactatcaagagaactagaattagaagtagaacctgaaggtggttcat

SEQ ID NO: 85992 - DNA, 500 bp, Homo Sapiens
tcaccaaaccagcaagatggaaaacctccctgggttggcaagtggccctgggaagtacatgccccatctctgtcaggatagcagtggagaggtttcgtgccagtgccagctccacccacccagatggtactcaagactccaagcctgtcaatggggtggaaactttctggcattttctgtcagaagggtgagttagcactgaaccatctcatgtgtcttttcactgagtaacagcccatatccattccatgaaatgagtgactgctttgttgaatcagatagtaacaaacatttatttgtagtctggttgtgtcatatcatggttgaattgcaaacaggttggatagaagagtcagcaaaaatcaacaaaagcattctgtaaaaaacttttctagaattacaataaatggcattgtatattttatttataaattatgtgctgcacatcatttttatcaatgaaatttataataaatttctgtacatatatacaaaaaaaa

SEQ ID NO: 85993 - DNA, 478 bp, Homo Sapiens
ggggaattcaacaactaaaagatgctgctgaaagggagaaactgaagtcccaggaaatatttctaaacttgaaaactgctgtggagaaataccacgacggtattgaaaaggcagcagaggactcctatgctaagatagatgagaagacagctgaactgaagaggaagatgttcaaaatgtcaacctgattaacaaaattacatgtctttttgtaaatggcttgccatcttttaattttctatttagaaagaaaagttgaagcgaatggaagtatcagaagtaccaaataatgttggcttcatcagtttttatacactctcataagtagttaataagatgaatttaatgtaggcttttattaatttataattaaaataacttgtgcagctattcatgtctctactctgccccttgttgtaaatagtttgagtaaaacaaaactagttacctttgaaatatatatatttttttccgaaaa

SEQ ID NO: 85994 - DNA, 1064 bp, Homo Sapiens
acacctggctagcatatgggaaaatgcaactgaaggaattgttgtgaaaaaagggacagcgagtttgaaataaaagttgttagagtggtactgaggagaaaaaagaatccgagaccatgtactgcgcatacacaatcccgggcatgggcggcaactctttgatgtactactataatgggaaagcggtctatgctccatcagcaagcactgccgactacaatagggactcgccaggctatccttcctccaaaccagcaaccagcactttccctagctccttcttcatgcaagatggccatcacagcagtgacccttggagctcctccagtgggatgaatcagcctggctatgcaggaatgttgggcaactcttctcatattccacagtccagcagctactgtagcctgcatccacatgaacgtttgagctatccatcacactcctcagcagacatcaattccagtcttcctccgatgtccactttccatcgtagtggtacaaaccattacagcacctcttcctgtacgcctcctgccaacgggacagacagtataatggcaaatagaggaagcggggcagcggcagctcccagactggagatgctctggggaaagcacttgcttcgatctattctccagatcacactaacaacagcttttcatcaaacccttcaactcctgttggctctccttccatctctctcaagcaggcacagctgttgggtctagaaaatggaggacaggcctcatcgtctcctaattatgaagggacccttacactctttgaaaagcgaattgaagatcgtttagaaagactggatgaatggctatcagggttctccgggaaaccatgcagtggggccattccaaagtaatgcctgggggtcatgggggcattggatgggaatcattgggcttctcataatgggaccaggggtcggcagggcaacaggctaggagaaccgcctttccagcgaagaaactcctctaggggtgaccaccttgtaaatagggtgcccgagaggcgaagtcttctagcagagagtcgcgttcacgatctgacag

SEQ ID NO: 85995 - DNA, 1749 bp, Homo Sapiens
  misc_feature (1475)..(1475): n is a, c, g, or t
  misc_feature (1501)..(1501): n is a, c, g, or t
  misc_feature (1653)..(1672): n is a, c, g, or t
  misc_feature (1707)..(1707): n is a, c, g, or t
cagtcgacggtaccggacatatgcccgggaattcggccattacggccgggggcatactccgagccggtctttgagcgctaacgtctttctgtctccccgcggtggtgatgacggtgaaaactgaggctgctaagggcaccctcacttactccaggatgaggggcatggtggcaattctcatcgctttcatgaagcagaggaggatgggtctgaacgactttattcagaagattgccaataactcctatgcatgcaaacaccctgaagttcagtccatcttgaagatctcccaacctcaggagcctgagcttatgaatgccaacccttctcctccaccaagtccttctcagcaaatcaaccttggcccgtcgtccaatcctcatgctaaaccatctgactttcacttcttgaaagtgatcggaaagggcagttttggaaaggttcttctagcaagacacaaggcagaagaagtgttctatgcagtcaaagttttacagaagaaagcaatcctgaaaaagaaagaggagaagcatattatgtcggagcggaatgttctgttgaagaatgtgaagcaccctttcctggtgggccttcacttctctttccagactgctgacaaattgtactttgtcctagactacattaatggtggagagttgttctaccatctccagagggaacgctgcttcctggaaccacgggctcgtttctatgctgctgaaatagccagtgccttgggctacctgcattcactgaacatcgtttatagagacttaaaaccagagaactattcaggctaccagtcacagggacaaagtgacacgtaccgacttcggactctagcaagagaacattcaaaacaactgtacttacatccaacttctgtagacgaaagccagactaaactagcacgatgagatgccttgacgtaagcagcccttaagagagaaccacccaagcaggatggtgccttcaatccacaatacatgactgcagaaaaagggctacctttgtcctacactacacaaatacagtgagacctaaaataccatctacagaccgaaagcaactacctggaaccacgggatagtctctatgaagctgaaatagccagtaacttgggcaacctacatttcaatgaacatcgtttacagagacttaaaaccagagaatattttgctagattcacagggacacattgtccttactgacttcggactctgcaagggagaacattgaacacaacagcacaaaaatccaccttctgtggcacgccggagtatctcgcacctgaggtgcttcataagcagccttatgacaggactgtggactggtggtgcctgggagctgtcttgtatgagatgctgtatggcctgccgcctttttatagccgaaacacagctgaaatgtacgacaacattctgaaacaagcctctccagctgaaaccaaatattacaaattccgccaagacacnctccctggaaggggcctcctgcaganggacagggacaaaaagcggcttcgggggccaaggggaatggacttttcatgggaagattaaaagaagtccatggtctttcctttcctccctttaatttaaacttgggggaattgaatccccccttttaattaaaggaaaaggaattttcctnnnnnnnnnnnnnnnnnnnnaaaccccccaaaaatttgttgaaaaatgggggggnccccccccaaacgggaaaaccccttataaacgggggggaaca

SEQ ID NO: 85996 - DNA, 943 bp, Homo Sapiens
  misc_feature (145)..(145): n is a, c, g, or t
ccagtccctgtcataaaggctgcttatgaaggcactccaggtgcggagatactccggccgtcccacaagaagggtggatgttgtgcctgttgttgttcaatgttctccctgcaagagtccgaaagtcagtaagggacaatgtgtnccctgtgaatctagcaaaatattctctggttttaagtctctataaacgatgttcagtgaatgcaggtagcccaaggcactggctatttcagcagcatagaaacgagcccgtggttccaggaagcagcgttccctctggagatggtagaacaactctccaccattaatgtagtctaggacaaagtacaatttgtcagcagtctggaaagagaagtgaaggcccaccaggaaagggtgcttcacattcttcaacagaacattccgctccgacataatatgcttctcctctttctttttcaggattgctttcttctgtaaaactttgactgcatagaacacttcttctgccttgtgtcttgctagaagaacctttccaaaactgccctttccgatcactttcaagaagtgaaagtcagatggtttagcatgaggattggacgacgggccaaggttgatttgctgagaaggacttggtggaggagaagggttggcattcataagctcaggctcctgaggttgggagatcttcaagatggactgaacttcagggtgtttgcatgcataggagttattggcaatcttctgaataaagtcgttcagacccatcctcctctgcttcatgaaagccagtccgctcagcaggaaggactcgctccttttctgcgcctcggccctctttttgtggcggggccgcagcagggactcgagccgggctctggccagcgcgccctgcatctcccccatgggcagcgggcggcgggcctcgtgccgaattcgccacccaggcctcgctaccttg

SEQ ID NO: 85997 - DNA, 435 bp, Homo Sapiens
cataacggttaagaaagcacttaaacagaagcagaggctaattcagtgtcacatgaggaagtagctgtcagatgtcacataattactttcgtaatagctcagattagaatggctaccccattctctagacaaaatcaaattgtcctattgtggctcttctaaaaatgaagatgaagagctatttaatgacacaccttggattaaaacgggaatcacatcttaaagctaaaaatgaacctgcaagccttctaaatgagtcactgagcatcactagtgacaagtctcgggtgagcgtaaatgggtcatgacgagatgggacagcaacaaaatcatggcttaggatcgacaagaagttaaaaaacagctgcatctgttacttaagtttgtaagacagtgccctgagacctctagagaaaagatgtttgtttacataag

SEQ ID NO: 85998 - DNA, 1384 bp, Homo Sapiens
gcagatccgcggaagggcagaatgggactccaagcctgcctcctagggctctttgccctcatcctctctggcaaatgcagttacagcccggagcccgaccagcggaggacgctgcccccaggctgggtgtccctgggccgtgcggaccctgaggaagagctgagtctcacctttgccctgagacagcagaatgtggaaagactctcggagctggtgcaggctgtgtcggatcccagctctcctcaatacggaaaatacctgaccctagagaatgtggctgatctggtgaggccatccccactgaccctccacacggtgcaaaaatggctcttggcagccggagcccagaagtgccattctgtgatcacacaggactttctgacttgctggctgagcatccgacaagcagagctgctgctccctggggctgagtttcatcactatgtgggaggacctacggaaacccatgttgtaaggtccccacatccctaccagcttccacaggccttggccccccatgtggactttgtggggggactgcaccgttttcccccaacatcatccctgaggcaacgtcctgagccgcaggtgacagggactgtaggcctgcatctgggggtaaccccctctgtgatccgtaagcgatacaacttgacctcacaagacgtgggctctggcaccagcaataacagccaagcctgtgcccagttcctggagcagtatttccatgactcagacctggctcagttcatgcgcctcttcggtggcaactttgcacatcaggcatcagtagcccgtgtggttggacaacagggccggggccgggccgggattgaggccagtctagatgtgcagtacctgatgagtgctggtgccaacatctccacctgggtctacagtagccctggccggcatgagggacaggagcccttcctgcagtggctcatgctgctcagtaatgagtcagccctgccacatgtgcatactgtgagctatggagatgatgaggactccctcagcagcgcctacatccagcgggtcaacactgagctcatgaaggctgccgctcggggtctcaccctgctcttcgcctcaggtgacagtggggccgggtgttggtctgtctctggaagacaccagttccgccctaccttccctgcctccagcccctatgtcaccacagtgggaggcacatccttccaggaacctttcctcatcacaaatgaaattgttgactatatcagtggtggtggcttcagcaatgtgttcccacggccttcataccaggaggaagctgtaacgaagttcctgagctctagcccccacctgccaccatccagttacttcaatgccagtggccgtgcctacccagatgtggctgcac

SEQ ID NO: 85999 - DNA, 381 bp, Homo Sapiens
gagggatgggcacaaagatagtcactgggggttgtcaggatctctctccagcttatagcattcccttgagggagcagggatcaacacccatctcccacccccttccccactgtccagtcctcttggtagtaccagggctactgtagacccaggtggagatgttggcaccagcactcatcaggtactgcacatctagactggcctcaatcccggcccggccccggccctgttgtccaaccacacgggctactgatgcctgatgtgcaaagttgccaccgaagaggcgcatgaactgagccaggtctgagtcatggaaatactgctccaggaactgggcacaggcttggctgttattgctggtgccagagcccacgtcttgtg

SEQ ID NO: 86000 - DNA, 1111 bp, Homo Sapiens
  misc_feature (54)..(54): n is a, c, g, or t
  misc_feature (845)..(845): n is a, c, g, or t
  misc_feature (857)..(857): n is a, c, g, or t
  misc_feature (887)..(887): n is a, c, g, or t
  misc_feature (904)..(904): n is a, c, g, or t
  misc_feature (943)..(943): n is a, c, g, or t
  misc_feature (959)..(959): n is a, c, g, or t
  misc_feature (1004)..(1004): n is a, c, g, or t
  misc_feature (1028)..(1029): n is a, c, g, or t
  misc_feature (1032)..(1032): n is a, c, g, or t
  misc_feature (1034)..(1034): n is a, c, g, or t
  misc_feature (1063)..(1063): n is a, c, g, or t
  misc_feature (1066)..(1066): n is a, c, g, or t
  misc_feature (1070)..(1070): n is a, c, g, or t
ttcacctgatattgacaaactggacgttgccacaatgacagagtatttaaattntgagaagagtagttcagtctctcgatatggagcctctcaagttgaagatatggggaatataattttagcaatgatttcagagccttataatcacaggttttcagatccagagagagtgaattacaagtttgaaagtggaacttgcagcaagatggaacttattgatgataacaccgtagtcagggcacgaggtttaccatggcagtcttcagatcaagatattgcaagattcttcaaaggactcaatattgccaagggaggtgcagcactttgtctgaatgctcagggtcgaaggaacggagaagctctggttaggtttgtaagtgaggagcaccgagacctagcactacagaggcacaaacatcacatggggacccggtatattgaggtttacaaagcaacaggtgaagatttccttaaaattgctggtggtacttccaatgaggtagcccagtttctctccaaggaaaatcaagtcattgttcgcatgcgggggctccctttcacggccacagctgaagaagtggtggccttctttggacagcattgccctattactgggggaaaggaaggcatcctctttgtcacctacccagatggtaggccaacagggaacgcttttgtcctctttgcctgtgaggaatatgcacagaatgcgttgaggaagcataaagacttgttgggtaaaagatacatcgaactcttcaggagcacagcagctgaagttcagcatgtgctgaatcgattctcctcggcccctctcattccacttccaacccctcccattattncagtactacctnagcaatttgtgccccctacaaatgttaganacttgtatacgccttcnaggtcttccctatgcagccacaattgaggacattctggntttcctgggggagttngccacagaatattccgtacttattgggggttcacatgggttttgnaatcacccaggggcccgcccattnnggnanatgcccttttatcccagatgaaaatctgnggnacangatccattttattgggttgcaccaaaaagtttccattaaac

SEQ ID NO: 86001 - DNA, 822 bp, Homo Sapiens
gggagaggggctaggctctgggattcaagatggaggcgctgagtcgagctgggcaggagatgagcctagcggccctgaagcaacacgacccctatatcaccagcatcgcagacctcacgggccaggtcgctctgtacaccttctgccccaaggccaaccagtgggagaagactgatatagaagggaccttattcgtatatcgaaggtcagcttccccttaccatggttttaccattgtgaatcgactaaatatgcacaatctagttgaaccagtgaataaagatttggaatttcagctccatgaaccatttcttctgtatagaaatgcaagcttgtcgatatatagtatctggttttatgacaagaatgactgtcaccgcatagcaaaactcatggctgatgtggtagaagaggagacacggcgatcccagcaagctgctcgggacaaacagagtcccagccaggccaatggctgcagcgaccacaggcccatcgacatcctggagatgctgagcagagccaaggatgagtatgagaggaatcagatgggtgactcaaatatctccagccctgggttacagccaagcactcagctctccaatctggggaagcaccgagactctaaaaagaaatgccctcccggtcacaggataagtctgctccctctggacacagcatctgacggtagaagagttatttggaacctccttggccaaaggacaacccgcagtttggggggctgggattccaaaaaaatggaacaggttgcccagaagatgccttcccaaaaagagcccacattcttccccaccattttcccct

SEQ ID NO: 86002 - DNA, 1206 bp, Homo Sapiens
  misc_feature (1096)..(1130): n is a, c, g, or t
tgctctgcttcagaaagccactccaacagcatgtggactgtgtctcgaaacacttccgcttgttttaaggcctgctcaagccggctttgtttggaaacagagagtttacagacagtgtcccagcgagtgctcagttcctggagctgtccttttacccaagtggtgtcatctcgactattctcaatcagctctcggcctgaccgcttcaggacctgaacggttcctgttcgctttcccagttccttctggaaaaccttgtgtgcatccatgaggttcatgacgaggtcaaggtccccgtgcacgggctggtcctcagccagctgtggctccaccttgtataaccagtcaaccaatgcctgcaaagcatccatgaactgacccgaaaagagcagggcttcctccaacttgtgctgccgctccaccagacttgccacaaaacagtatcccatttgtcgtctgacttctcctaggaaattgtcaagtttctgactatcttcgggaagcaaagtcttttcttttcagtgctctgccagttctaattgtggtatcatacacaggctgcttgccaccaagagtcttctgaaactccttatgcttagaaagctgaagtttaattttgtctgggtcattggatatctctaggttctgagtccaggtgactctctgcatcttctagccagtcaatcagttttttccaagcttcatggaattgttttgcccgcttcctggcatcatctagtgatcgccctctttcaatagatcgctggacaaccttctcccatcgagactgcacgctcaccacaaattcttgatcagaacaacatcctgcttttggctaaggaactttaattgattcccagtttgatccagctcaatgatctggtctcgatgagcatttacttcattagcaaaaccttgtgctcttctatctgggaaaggacagtatttagaatcaggcttggtggagaagcgatgtttaaactctgctctgctagagtgagccagttgataaattcttgtagggaattctggaattctgttgccacccggccgtaatggccgaattcccgggcatatgtccggtaccgtcgactgnnnnnnnnnnnnnnnnnnnnnnnnnnnnnnnnnnncgccgcttcctcgctcactactcgctgcgctcgtcgttcgctataacgagctacccctatagtgatcggagttcca

SEQ ID NO: 86003 - DNA, 622 bp, Homo Sapiens
ttttttctgcggcgattgaacagccgagctttgcggccgggatcgcggaaagtgatggctgtcgtcccggcgtctctctcaggacaggacgtgggatcatttgcatatcttacaattaaagacagaataccacagatcttaactaaggttattgatacattgcatcgacataaaagtgaattttttgagaaacacggagaggaaggcgtggaagctgaaaagaaagctatctctctcctttctaaattacggaatgaattgcaaacagataaaccatttatccccttggttgagaaatttgttgatactgatatatggaatcagtacctagaatatcaacagagtcttttaaatgaaagtgatggaaaatcaagatggttctactcaccgtggttgttggtagaatgttacatatatcgaagaattcatgaagcaattatccagagtccaccaatcgattactttgatgtatttaaagaatcaaaagagcaaaatttctatgggtcacaggaatccatcattgctttatgtactcacctgcaacaattgataagaactattgaagacctagatgaaaatcagctgaaagatgagttttttaaacttctgcagatttcactgt

SEQ ID NO: 86004 - DNA, 944 bp, Homo Sapiens
gctagtacgaggcctggtgttgaatcggcacgagggatggcggttgtatctgctgttcgctggctgggcctccgcagcaggcttggccagccgctgacgggtcggcgggcgggtttgtgtgaacaggcacgcagctgcagattttattctggtagtgcaaccctctcaaaggttgaaggaactgatgtaacagggattgaagaagtagtaattccaaaaaagaaaacttgggataaagtagccgttcttcaggcacttgcatccacagtaaacagggataccacagctgtgccttatgtgtttcaagatgatccttaccttatgccagcatcatctttggaatctcgttcatttttactggcaaagaaatccggggagaatgtggccaagtttattattaattcataccccaaatattttcagaaggacatagctgaacctcatataccgtgtttaatgcctgagtactttgaacctcagatcaaagacataagtgaagccgccctgaaggaacgaattgagctcagaaaagtcaaagcctctgtggacatgtttgatcagcttttgcaagcaggaaccactgtgtctcttgaaacaacaaatagtctcttggatttattgtgttactatggtgaccaggagccctcaactgattaccattttcaacaaactggacagtcagaagcattggaagaggaaaatgatgagacatctaggaggaaagctggtcatcagtttggagttacatggcgagcaaaaaacaacgctgagagaatcttttctctaatgccagagaaaaatgaacattcctattgcacaatgatccgaggaatggtgaaagcacgaggctactagcaggcattaaattgtcaccgggttaataaacaaacaactccaggagcggtagacaatgtggacaaagtgaacaaatttaaactttatac

SEQ ID NO: 86005 - DNA, 1016 bp, Homo Sapiens
tttctgtatcaatttaatgcaaatccaagccttttaaagtttaacaggcctcacataaagcttcgctcatataaagtgttcaaagtacgctgcacagattttaagatgttaactctctggagaaggaaaagcatagatcaataccttgggaagaaattatgacaactttaagatattttctgaacaatggctctctagtagtctagaaataaaaccagatatttattatgcatgctcactgcaatagcatctgtatttaaggaagtttttggaggacgggggactgtattacctttggagaaaagcatagcaaaactgcaacacaggaatgtccactaggggcgatttctcatcaccccctttgacttggggtggcctcttcaccacctccttcaccaggtgcagcagcgtgtcagtctgcagggtgctgagtgcacacaccaagtcgacaagggttagctgggatgcacttgccgttgggataatcttcatcttactgtgacgctgggctttctttctgctccacactgccgcaacagccgctgtcaactgaaccccaagatgggccgtcaaggggtttaagaagtctaaaattttttgtcttatggttttggtggttttaaagtaaacggaagaggatcccttcgtggcccctaggagatcgacaggtctcttttgagtctcctcctttctgagaacattccagagaagggccatggtgttaacagttcgaggcagctcttccaaaatggcatttctggcattcctcaagttggcaggatcacctgcagccatggtctttttgttttggttggcttgttccaaaagacaaaaatgactaatggtcgttagaccttctagaagggtgagtggataatctggagaaatgttttccctcttggaggttgtgctgacagagagcttcacagattcgctttcatactgcttgaccaagtcatccaagtttttgcaaatctggacaacaaagggtgtcaccgtccagcccagggactttc

SEQ ID NO: 86006 - DNA, 1237 bp, Homo Sapiens
ggtccggaattcccgggatatcgtcgacccacgcgtccgggaagggggcctaggcccgggcctgcggtggtgggggttgctgcgcgccgggggtcgctcctgctgtgtcttccgctccagcttcgcccacttccccttgccagcggggtgggcgcggagaagacctgccggagccatggaggacgaagtggtccgctttgccaagaagatggacaagatggtgcagaagaagaacgcggctggagcattggatttgctaaaggagcttaagaatattcctatgaccctggaattactgcagtccacaagaatcggaatgtcagttaatgctattcgcaagcagagtacagatgaggaagttacatctttggcaaagtctctcatcaaatcctggaaaaaattattagatgggccatcaactgagaaagaccttgacgaaaagaagaaagaacctgcaattacatcgcagaacagccctgaggcaagagaagaaagtacttccagcggcaatgtaagcaacagaaaggatgagacaaatgctcgagatacttatgtttcatcctttcctcgggcaccaagcacttctgattctgtgcggttgaagtgtaaggagatgcttgctgcagctcctcgaacaggggatgactacattgcaattggagctgatgaggaagaattaggatctcaaattgaagaagctatatatcaagaaataaggaatacagacatgaaatacaaaaatagagtacgaagtaggatatcaaatcttaaagatgcaaaaaatccaaatttaaggaaaaatgtcctctgtgggaatattcctcctgacttatttgctagaatgacagcagaggaaatggctagtgatgagctgaaagagatgcggaaaaacttgaccaaagaagccatcagagagcatcagatggccaagagtggtgggacccagactgacttgttcacatgtggcaaatgtaaaaagaagaattgcacttacacacaggtacaaacccgtagtgctgatgaaccaatgacaacatttgttgtctgtaatgaatgtggaaatcgatggaagttctgttgagttggaagaattggcaaaatatctggaccattaagaaaacggattttgtaactagctttaaactaggccaagcaactagttttcctgcaaatcaaatttttaaagcaacttgggttagactttgtttttgacctaacatcccttccttaaatgcct

SEQ ID NO: 86007 - DNA, 756 bp, Homo Sapiens
  misc_feature (56)..(66): n is a, c, g, or t
gaggctcccccatatcgatcgcggagaatgagatcaagggccaagaataaagtctnnnnnnnnnnntgtggtaaatagaggaagcaaccatttgaatccctaatcactacctccattatcaattccatcagtgcctaccccagcaatcccattcaattaaacttgttgagtacaatataaataacttcttatttattcaatgtcttctacctctcaaatgttcaagaaatctgaaaaagaaataaattagaatacatggctacatacatttactacttccatttgattagaaaacaaaaaaaggagtgtaaataggggaacattagacaggggaattgatgcaggaagtaaaactatgacttacaatataaatatatgtctatactgtgaagtacctttcttctcttgcctcagggctgttctgcgatgtaattgcaggttctttcttcttttcgtcaaggtctttctcagttgatggcccatctaataattttttccaggatttgatgagagactttgccaaagatgtaacttcctcatctgtactctgcttgcgaatagcatgaactgacattccgattcttgtggactgcagtaattccagggtcataggcatattcttaagctcctttagcaaatccaatgactccagccgcgttcttcttctgcaccatcttgtccatcttcgttggcaaagcggaccatcttacgtcctaccatggtgtcacggcagagtcttctcacgcgtcgtagttg

SEQ ID NO: 86008 - DNA, 1726 bp, Homo Sapiens
ttggctcagccggaattcctttttcccggtggggaccatggggcaggaagcgttttctggggatttttaagggggggcccccaattttcctcaggaggacaatgttccatgcccttcagggatggcttggttcccccaaaatgggagaaaatggggcccttgaaagaggtagatgtgaaggtggcaggatcccagaggccacaagggaggcaggtattcctgtgcccctggatttaccatcgtctgggggggtaaagagggctggagagctggaaaccactgggagacaagggtacaagggctggactcagagcagtcagagctgctggatttcaggcccccccaagaggaactgctccattcagttgcaaggcagcagcctgggcggcggcgggcagcagcagctagcaagcagtgcttggcagttggattccagcgccttctgccagttttgccatgagctgaaaacgtccacctgctgatcccagatccagctcctggtccccatcaggaaaagtgatgtctgtgccaccatccagtcgctcagtcacatggccaaccctcataggtcgaccagcaagctcaaacccattcaactgttccagggcccgccgggcacactcagaatcagagaacgtgatgaaaccataacctttagagcggcctgtatctgagtccttcatcaggacaatattatcaattttaccaaagggctcaaagatgccccggagcatgtcttcagtgatattgaagtgcagggaacccacatagaggcgcattggtccaccattgcccttttgcaggttgttggccatggctgccagtcggtttttctctgcctgtgaagcctgtacaatgataggcactcccagcaaccgctgcccagtcagcccaatggccagtggcacagactggatttcacagaattccacgtaggcaatgcccttagaacgacgtgagttccgatctgaaatgatacgtacatcgcgaaccttgcctacagcagagaaaaagtcctccagatctcgaggccgaattcgggcagctaactgcatacagaaaactgtgcgggcatcacgctcctcaggactcagattatcaactggctccctgactgggctcttctctctgaaatgaggactcttactgtgtccatatctataaccagtggcaagtggaggactcctgtaatgcacacgatcctcacgacgatggtcccgacttcgcgactcactaccatgtcgacgatcccagctacggctacggtgacgacactgccgacctggacttcggctccgactatttctccgtctataccgatcccgatctcgactacgactgcgctttctatccctgcttttattatggctccgactcctcttcttcttgcttgtctccccgatggtgctgcttccactggtctcattgccactgttgctggtgctgctggtggtattgctaggataatcctttttaacttctttcctttgttgctcatcctcttcttttttatagggagcttccagcatggcctcaatcactatgtcaaagtcatcagatgccatcctgtcagatcagttccgggtccccgcaggggggtcccggttctctccgttcctttgagtatgttgtggggagtggagctcggatagttcctagagtctaggcaagaaaagcagcactgcaggtacagcgcctcctcttcccgcacaatgtcgacagctct

SEQ ID NO: 86009 - DNA, 615 bp, Homo Sapiens
gcagctaactgcatacagaaaactgtgcgggcatcacgctcctcaggactcagattatcaactggctccccagtggcaagtggaggactcctgtaatgcacacgatcctcacgacgatggtcccgacttcgcgactcactaccatgtcgacgatcccagctacggctacggtgacgacactgccgacctggacttcggctccgactatttctccgtctataccgatcccgatctcgactacgattgcttgtctccccgatggtgctgcttccactggtctcattgccactgttgctggtgctgctggtggtattgctaggataatcctttttacttctttcctttgttgctcatcctcttcttttttatagggagcttccagcatggcctcaatcactatgtcaaagtcatcagatgccatcctgtcagagtcagttgccgggtccccgcaggggggtcccggttctctccgttcgctttgagtatgttgtggggagtggagctcggatagttgcctagagtctaggcaagaaaagcagctaatgcaggtacagagcctcctcttcccgcaaaatggcggcagctctgccgcctcgtgtcaattcggcgggcgag

SEQ ID NO: 86010 - DNA, 1083 bp, Homo Sapiens
gcctgggtggcgaattcggcacgaggggcagagctgccgccattttgcgggaagaggaggcgctgtacctgcagtgctgcttttcttgcctagactctaggaactatccgagctccactccccacaacatactcaaaggaacggagagaaccgggacccccctgcggggacccggaactgatctgacaggatggcatctgatgactttgacatagtgattgaggccatgctggaagctccctataaaaaagaagaggatgagcaacaaaggaaagaagttaaaaaggattatcctagcaataccaccagcagcaccagcaacagtggcaatgagaccagtggaagcagcaccatcggggagacaagcaatcgtagtcgagatcgggatcggtatagacggagaaatagtcggagccgaagtccaggtcggcagtgtcgtcaccgtagccgtagctgggatcgtcgacatggtagtgagtcgcgaagtcgggaccatcgtcgtgaggatcgtgtgcattacaggagtcctccacttgccactggttataggtatggacacagtaagagtcctcatttcagagagaagagcccagtcagggagccagttgataatctgagtcctgaggagcgtgatgcccgcacagttttctgtatgcagttagctgcccgaattcggcctcgagatctggaagactttttctctgctgtaggcaaggttcgcgatgtacgtatcatcttcagatcggaactcacgtcgttctaagggcattgcctacgtggaaattctgtgaaatccagtctgtgccactggccattgggctgactgggcagcggttgctggggagtgcctatcattgtacagggcttcacagggaaagaaaaaccggactgggaaccatgggcaacaaccctgcaaaaggggcaatggtggaaccaatgcgccctcctattgggggttccccgggcactttcaataatcacttgaaaaaaattgcctcccgggggcattttttggagcccccctttggggtaaaaatttggtaaataaattgggcccctggaatagaaaggaacctccacaaa

SEQ ID NO: 86011 - DNA, 787 bp, Homo Sapiens
  misc_feature (765)..(765): n is a, c, g, or t
ggggaagagctgcagctcaccaggtctgagctagaggctgcacaccatgccagtgcagtcagattctccaaggaatatgaaatgcagaaaacaaaagaggaagactttttgaagttatttgacaggtggaaagaagaagaaaaggagaaactagttgatgaaatggaaaaagtcaaggagatgtttatgaaggaatttaaagaattaacttcgaagaatgcagcattagaatatcaactgtcagaaatccagaagtccaatatgcagatcaagtccaacataggcacattaaaagatgcacacgagtttaaagaagaccgttctccatatccccaggatttccataatgtcatgcagcttcttgatagtcaggaaagcaaatggacagctcgagttcaagctattcatcaagaacacaagaaagagaagggtcgactcctgtcacatatagagaaacttcgaacctcaatgatagatgatctaaatgcaagcaatgttttctataagaaaaggatagaagagctagggcagagactccaggagcagaatgagctgattataactcagagacagcagattaaagactttacctgtaatccattaaacagtatcagtgaacccaaaggaaatcctttagcctggcaggcttttgaatctcagccagctgctccagctgtgcctatgaatgccccagccctgcacactttggaaactaaatcaagtctgccaatggtgcatgaacaggcattctcgtcgcacatactnggaaccaataggaagaactttc

SEQ ID NO: 86012 - DNA, 1047 bp, Homo Sapiens
  misc_feature (521)..(521): n is a, c, g, or t
agtcagatcgcatctaagatagctgtaaggcttagtatattagaaaatggaaaattccactcctaggatcctagaatgaggaatgttggaaacttagaattctaaaacaaggatgttagaatctcagaatttcagaagatggaatgttagtgttgaaatcagagactgttagacagcatccattcctcacccctctctagcatacagatggccaaggcctcacagcctgaccagacctctggctggccctcctggctcagggcccaggcttcttgcgagccacaatgcagcagaccccattgttggcagcattggtgacagagtagctctggggactgtgtaggagctgttcaatgtcaaagccagcatccaggacagcctgctccacctcccctttctccagggccacgcaggaaaattcacgcttccccaccatgtaggacgggagccgaagcgtgacagtggtcaccaggtggccacccggcttgagcagtgaggcaaggttgcacagggcagccggntaggcatcaaggctacagcaggcacactccatggccagcagggtgagcacacagtcggcgagaggcaacacagccggggccagcgggttgcccaggtggacatcgcacttgagcacccgcttcaccgctgcccgcagcttctcctccttctcctcccatcggccgctgtttccttccagctcacaggcgaatttcaccgctggggtccagtcataggcccccggctccttcttcagccacttttccagctcctcccggttgcggtcggtaaagtcggagagagtgatgtcttggaaggaatcacaggcagcaagaacttggtagatggtaggacctgagccaatgtcaatcagcgtgtccccttggaggcctccagggccgaaggtcttgtggagacattccaagttaaacttcagcatctcggcctcgggtgaggggctgccatcgaagctgtagtaagtagccaagtagtcctgggcaggaagtgcttctggtactcatcacccccagtgaagccacccttcat

SEQ ID NO: 86013 - DNA, 1977 bp, Homo Sapiens
cctactggattggagcagcaagaggctgggaagccatcacttaccttgcactgagaaagaagacaaaggccagtatgcacagctttcctccactgctgctgctgctgttctggggtgtggtgtctcacagcttcccagcgactctagaaacacaagagcaagatgtggacttagtccagaaatacctggaaaaatactacaacctgaagaatgatgggaggcaagttgaaaagcggagaaatagtggcccagtggttgaaaaattgaagcaaatgcaggaattctttgggctgaaagtgactgggaaaccagatgctgaaaccctgaaggtgatgaagcagcccagatgtggagtgcctgatgtggctcagtttgtcctcactgaggggaaccctcgctgggagcaaacacatctgacctacaggattgaaaattacacgccagatttgccaagagcagatgtggaccatgccattgagaaagccttccaactctggagtaatgtcacacctctgacattcaccaaggtctctgagggtcaagcagacatcatgatatcttttgtcaggggagatcatcgggacaactctccttttgatggacctggaggaaatcttgctcatgcttttcaaccaggcccaggtattggaggggatgctcattttgatgaagatgaaaggtggaccaacaatttcagagagtacaacttacatcgtgttgcggctcatgaactcggccattctcttggactctccattctactgatatcggggctttgatgtaccctagctacaccttcagtggtgatgttcagctagctcaggatgacattgatggcatccaagccatatatggacgttcccaaaatcctgtccagcccatcggcccacaaaccccaaaagcgtgtgacagtaagctaacctttgatgctataactacgattcggggagaagtgatgttctttaaagacagattctacatgcgcacaaatcccttctacccggaagttgagctcaatttcatttctgttttctggccacaactgccaaatgggcttgaagctgcttacgaatttgccgacagagatgaagtccggtttttcaaagggaataagtactgggctgttcagggacagaatgtgctacacggataccccaaggacatctacagctcctttggcttccctagaactgtgaagcatatcgatgctgctctttctgaggaaaacactggaaaaacctacttctttgttgctaacaaatactggaggtatgatgaatataaacgatctatggatccaggttatcccaaaatgatagcacatgactttcctggaattggccacaaagttgatgcagttttcatgaaagatggatttttctatttctttcatggaacaagacaatacaaatttgatcctaaaacgaagagaattttgactctccagaaagctaatagctggttcaactgcaggaaaaattgaacattactaatttgaatggaaaacacatggtgtgagtccaaagaaggtgttttcctgaagaactgtctattttctcagtcatttttaacctctagagtcactgatacacagaatataatcttatttatacctcagtttgcatatttttttactatttagaatgtagccctttttgtactgatataatttagttccacaaatggtgggtacaaaaagtcaagtttgtggcttatggattcatataggccagagttgcaaagatcttttccagagtatgcaactctgacgttgatcccagagagcagcttcagtgacaaacatatcctttcaagacagaaagagacaggagacatgagtctttgccggaggaaaagcagctcaagaacacatgtgcagtcactggtgtcaccctggataggcaagggataactcttctaacacaaaataagtgttttatgtttggaataaagtcaaccttgtttctactgttttaa

SEQ ID NO: 86014 - DNA, 1053 bp, Homo Sapiens
cccccaactgagaacccccggcgcgccctttcttattaaattaacagaggggtttgggtgggctaaggggggaatttttgtcttttccggccgtaaatttcccccttttaaaggggttttttcaagggttggggcgttcttcggggattaaccaaaagagggaatcctttggggcttagaaagccaactgggcttattcaaactttcctcccccttcttacttccatttccccaccctaccaatattatgttctggaactagaaaatcaattatttacatgacataacgtggcaagtctatttcttctcccagcccctgtcccctgtggcccatggagagaaaaattcccctgccctcttggagagagtcatctgatcctgccttatgttcttaacctttcagtcccaggagctcccagggcacagtctggagaggccctagaggtgctagactgcagggaagcgcagctccgtctgaagagttgccaatcctgctagcaatgggatgcagcgtgatgctgtcagggttgtcttctcctctggctttgtcacttaagccatgtgtgcccctgacctggctgataagaggcagaacagagcctccagtacagagcacatagaccaaggatgacccagtagtaaggcatgctgtgctctccagtggggtcctgaggcagttcaaaataaggcctcctggaagaacagccccttcttcaaggagctcgcctctcagcacgcatggggtgttctgcggagggaactgcccttggctttctcctgcaggcttcttggctgttatggacccgcatggagtttaattatgcttagcatatatttttggcatactaggatttcttccccctaggatctggccaaaagaggggaaggatcaaaatttggcaggctgggggaacaactcggcccccactgatggagaaaaaaacaaacagatggaagtaaagacgagatagaaacacaacaaggtagaaaaagaccaggataatttggaacccctttagtgggaggtaacaaaaagaagagaaagaaccagta

SEQ ID NO: 86015 - DNA, 883 bp, Homo Sapiens
aatgaaaatatgcttcaacacttaagtagcatacactgccctacaaacctcagagagcacttttccccaagttcttgtttttatttttgaaagtactcacacagcacttactatgctccaaacactcctctaagcactttacacatattagctcattcagtccccagacagacgggatgaagtaggtattgttactgttcccattttacaggtgagagatttgaagcctggggaggctagtaactcaccccaaggtcacacggctcatacatggtgggactgagactcagatgcaggcagtctggcacctcagtctggattctaaccatttcactaagctatttgggtcttgtactactttgacccacccctgaataaacctcaattgctggagtggggtgtagttattaaagggatgctttttaccttttgctgtctgctgtggcagattccccagataaccaaggaaaaggggccacccatacctggaaataggccatagggcccctactactgccaacaagccatggcctaccttgacaattgtttgatcttaaaattgtgtcttgataacaaaagatttggacaggcatatctgtagctttcaagttaattaattgcaatatttttttcttcaggattttagctgctgaacaactttcagtttggagctaaaagagacctgtctcatggtctgcccttccctggggcaatagctagggtctttcctgatttttatggaattttaggggatattttgaacttgggttctcagtagtgaattgagacttggaggtgacttttcatgtttggagtatcatctctgtctgggatctgggctgacaaattaaaacctagagtagtgcttatgctgaaatgatac

SEQ ID NO: 86016 - DNA, 1186 bp, Homo Sapiens
gcgcaaattcacaaacccgcccgctgagttggtcgtttcggaatcccgagacttgaaacccaacgggaagacccttctcaccctcaaaagaagatgacagcccgcagagagttaacttctgtttacatggaactcagacatctgcaaatcatgatttcaaggccagagaatggcaggggaacagaaaccctcaagtaatctcctggagcagtttattttactagccaaaggtaccagtggctcagccctcactgctctcataagccaggtcttagaggctcccggagtgtatgtctttggagaacttctggagctggccaacgtgcaggagcttgcggaaggagctaatgctgcttatttgcagttgttgaacctgtttgcctatgggacatacccagattacatagccaacaaggagagcctgccagaactgagcacagctcagcagaacaagctgaagcatcttaccatcgtgagcttggcatcaagaatgaagtgtatcccctactccgtgttgctgaaagacctggagatgcggaatctccgggaactagaagaccttatcattgaggctgtctacactgacatcatccagggcaagctggaccagcgaaaccagctgctggaagtggatttctgcattggccgtgacatccgaaagaaggatatcaataatattgtcaagaccctgcatgaatggtgtgatggctgtgaagcagttctactgggcatcgagcagcaagttctgagagccaaccagtacaaagagaaccaaaacgaactcagcagcaggtagaagcgaggttacaacatcaagaagacactcaaagcaccgatcctcctcggctcaggagatggagcaagagtgggtagaacgggagtgtcccctccacgctgagacagaggcagccaccaaaaagattccccaggaaaggctgggccccagcgccaataagggccggtggggcaagtggaatcacaggccgggccaagtggggaagggaaccaagggcaataacactccgtttaccaggaaatcaaagacgcagcgcacaaggccacacaccatagagagagcaaaaatagaacgcggacagcgacaccacgcgacataaacgcgaccaacgctcacaaagagacacaacaaccacaagaacaaacgcaaagaagagacaaaaagagagag

SEQ ID NO: 86017 - DNA, 956 bp, Homo Sapiens
cggaccccggccctggtgagttgccaggtgccccagccgggccctagtggcgggctggagacccagaccttttcactttggactttttcttgggtgggctgcctttgttcagcgtgagggggacactcccgttcagccagctggtgctcccatctcttgagccgaggagggatgcggtggctttgagtgtcttcttgatgttggtaacctctgcttctacctgctgctgagttcggttgtggttctctttgtactggttggctctcagaacttgctgctcgatgcccagtagaactgcttcacagccatcacaccattcatgcagggtcttgacaatattattgatatccttctttcggatgtcacggccaatgcagaaatccacttccagcagctggtttcgctggtccagcttgccctggatgatgtcagtgtagacagcctcaatgataaggtcttctagttcccggagattccgcatctccaggtctttcagcaacacggagtaggggatacacttcattcttgatgccaagctcacgatggtaagatgcttcagcttgttctgctgagctgtgctcagttctggcaggctctccttgttggctatgtaatctgggtatgtcccataggcaaacaggttcaacaactgcaaataagcagcattagctccttccgcaagctcctgcacgttggccagctccagaagttctccaaagacatacactccgggagcctctaagacctggcttatgagagcagtgagggctgagccactggtacctttggctagtaaaataaactgctccaggagattacttgagggtttctgttcccctgccattctctggccttgaaatctgtccacgccacctctcggtcctcttagtcgctggctcggcctcccggcgcctgcccgcaggttgtcaagcgtccatgatcaccccggcggccgc

SEQ ID NO: 86018 - DNA, 612 bp, Homo Sapiens
  misc_feature (305)..(327): n is a, c, g, or t
acaaatgcattgtaactacaaattttatttattgttatgaaactgtaaggtctacatataaagggaaaaagttaatgtggaaagctgatctacactcagctgatgccagcatacattaaagcggttcacgtgcagagaacaaagcagtgacaaccattggcccttagcattcccggcatacctattagtgtcttaaaaaggaagggaaaagtcttttgttgccctctcctatcctcttgccatatgaatagcgttttccatgaaataggaaaatattacttggtatagcatttctcttgctctcnnnnnnnnnnnnnnnnnnnnnnnctctttgtgggtgttatatttgatctctaaatctgaacagtttatggtcacagtccagcctcctccgtgcagccctgtgtgctttgcacatttaccttacagtggtaagcagagaccatctgtgaccatagcctagctagcattttaaaaggggaaattttgttctctaggttttcccccaaataaacattgctttatttctaataataaccaagacttttcaagcttctacatctcataggaaagcttgtaatagcaaaattgtaaattacaagggaagaatct

SEQ ID NO: 86019 - DNA, 863 bp, Homo Sapiens
gggtccatatgtcgtctgcttacgcctgtaagtctaaatttgcaaagcacactggctgctcgggatgagctgtacttgttgaccatgtctggttcagatgtaagagatctaatattacgaccctcatagaggccagtatctattaatcagaaaatgagagcaagagaaatgctataccaagtaatattttcctatttcatggaaaacgctattcatatggcaagaggataggagagggcaacaaaagacttttcccttcctttttaagacactaataggtatgccgggaatgctaagggccaatggttgtcactgctttgttctctgcacgtgaaccgctttaatgtatgctggcatcagctgagtgtagatcagctttccacattaactttttccctttatatgtagaccttacagtttcataacaataaataaaatttgtagttacaatgcatttgtcaattcagtttaggcacaaggcaacttccacggtgagtggagagatcgagacagtctctgattgtgcagaagcgacacactgcttgcaacaaaagatttgttgcaaacatctcatgggctgatgttctatctgatgagcttcctatcttcacttctgatggaagtgttgaccagttgctttgatcgtaggattacatttgagtttcattggttcaagtgttttgttttttcttctccctcctgtcaggtttgtgtcttcagataatctgagttgtccaagtccttatgaggagaggtcaccttctatctagcctactgataactctggaactgtggcagggacagccaagggagaggacaataccagttagtacataattgttaaaaataaaacaccttccctc

SEQ ID NO: 86020 - DNA, 984 bp, Homo Sapiens
cagtcgacggtaccggacatatgcccgggaattcggccattacggccgggggcgccattgtgacgtcacggtcagcccacgttctgattgtagatagccggcgccttcctcttcccatcgcgcgggtcctagccaccggtgtctccttctacatccgcctctgcgccggctgccacccgcgctccctccgccgccgccgccttgctgctgctcaaagctgctgccgccccttgggctaaaaggttttcaaatggaacattttgatgcatcacttagtacctatttcaaggcattgctaggccctcgagatactagagtaaaaggatggtttcttctggacaattatatacccacatttatctgctctgtcatatatttactaattgtatggctgggaccaaaatacatgaggaataaacagccattctcttgccgggggattttagtggtgtataaccttggactcacactgctgtctctgtatatgttctgtgagttagtaacaggagtatgggaaggcaaatacaacttcttctgtcagggcacacgcaccgcaggagaatcagatatgaagattatccgtgtcctctggtggtactacttctccaaactcatagaatttatggacactttcttcttcatcctgcgcaagaacaaccaccagatcacggtcctgcacgtctaccaccatgcctcgatgctgaacatctggtggtttgtgatgaactgggtcccctgcggccactcttattttggtgccacacttaatagcttcatccacgtcctcatgtactcttactatggtttgtcgtcagtcccttccatgcgtccatacctctggtggaagaagtacatcactcaggggcagctgcttcagtttgtgctgacaatcatccagaacagctgcggggtcatctggccgtgcacattccctattggttggttgtatttccagattggatacatgatttccctgattgctct

SEQ ID NO: 86021 - DNA, 1160 bp, Homo Sapiens
  misc_feature (867)..(867): n is a, c, g, or t
agaaagctcagcaaattttcttgccatacttcatgacttcactgtggctaagtgtggggaccagacaggactcgtggagacatccaggtgctgaagccttcagctactgtctcagttttttgaagtttagcaatggcgtctttctctgctgagaccaattcaactgacctactctcacagccatggaatgagcccccagtaattctctccatggtcattctcagccttacttttttactgggattgccaggcaatgggctggtgctgtgggtggctggcctgaagatgcagcggacagtgaacacaatttggttcctccacctcaccttggcggacctcctctgctgcctctccttgcccttctcgctggctcacttggctctccagggacagtggccctacggcaggttcctatgcaagctcatcccctccatcattgtcctcaacatgtttgccagtgtcttcctgcttactgccattagcctggatcgctgtcttgtggtattcaagccaatctggtgtcagaatcatcgcaatgtagggatggcctgctctatctgtggatgtatctgggtggtggcttttgtgatgtgcattcctgtgttcgtgtaccgggaaatcttcactacagacaaccataatagatgtggctacaaaatttggtctctccagctcattagattatccagacttttatggagatccactagaaaacaggtctcttgaaaacattgttcagccgcctggagaaatgaatgataggttagatccttcctctttccaaacaaatgatcatccttggacagtccccactgtcttccaacctcaaacatttcaaagaccttctgcagattcacttccctaggnggtgcctgctaggtttaacaagtcaaaatctgtaattctaatgtatttaaacctgctgaatgtggtctcactaaaaacccccagtgggttttcctattgaagatcacgaaaccaccccactgggaaacttctgaagcttttctctccaacccatttaaagctggttccctagggccttctaccaattctttcacacaattctgaactacccaaagggtttccggaaattttacaatttaggcccaattcccaaagaaggtatcaggggccaacccccccctgggaaataacaa

SEQ ID NO: 86022 - DNA, 809 bp, Homo Sapiens
atttgggaagagagatctctgaaaccaccattctctttactcgcctcttgctctctgcccaccccagcccctccaaatctaaatcaagtgccctgaactatatacacctgtactttggctaagccggctagatgtgactccttctacggtcttggtctggaagaaaagacataaagtctcagaagtcatttgcagccttcttttctgaacaacagtgtactgtagtcaatgaatctgtgctttcacagcaagcgggggaaaagggtccccacacttcactccccaacctgaatggggcaagatcaaatgccatcagctcgttgcaccacaacaggccaccagagaaaagggaaagaaaacgatcaggacaaaggcagcagctatcaacaaagtttcccaacaaaggaacctctcctccctaggttcccaaggaaataacactccctcctcactctccctcccctagcacacaaaaaaattaattcacatcacgagaactggtactctggttaagtgtcaggtaagtttaagaaagagaaaatccgtcactttttacactttaactgagacataaaactaacagaacacacaacatcactgtgaaagtaacttcctaaaacagatccagtctacagagtgcaaccaggaaaacttaaaggaatatagtttgttcacaatctgccgtgtacaggatatttatattctttctatgccatataaatagcatttatatagcttacacattcagagacatgcactgggacttttaggtagtacaaatttcttcacaatcacatgtgcaaatttta

SEQ ID NO: 86023 - DNA, 1572 bp, Homo Sapiens
acgaggcgattgggtgggcagcggttcgagtaaagaacgcagccggtgggtggccacagcgcagatctagcaggaagagttggcgtttacagaacacataatggtctagggattgtccccttcgtctatctgggggtgggaggaaatgaccgatttactgcggctgaattccatgccggcgatgatgggtcgcttgaatttgccagcagagtctccgctcgggcacttgcagcaggacatgatccggatgaaggcccgacgcatctccttgttggtcagagtgtaaatgatggggttggtgccggagttgagcacagctaacaccaggaagtactccgctctgaagaggatgtcacaggtcttcaccttgcagcccacatccagcaaggagcaggattgaagaccggtgcccagcaggcgatgaagacgctcaggacgataattacggtcttgagcagcgccagcgacttctcagagctgcggctggccttggaaatgttctttgcggaacgtcaggcggcggctccgagtcctgaccaacgagtagattatgcagtacagaatgacgatggagagcagaagcagagtgaagaccgtggtgcagaagaggatatagtgcttgtggtagagcggcagcacggtggagcagctggacagcgcactgatgcagttccagcccatgataggcaggccacccaggatgagggagatgacccagcaggcgctgattagcaggaagaggcggaagttattgctcccgttgtggagtttcattttcagcattgtgatatagcgctcaatggcgatggcgaggagactgaacacggaggctgacagggccacaaacatactcccggtcccgcagaaaccactgggcgggagtgagcttgtaggtggtggccccagacaagagcaggttagctgtgtaggctactcctgccaacaggtctgagagggccagacttgccaataaaatagtacatgggtcggtggaatttcttggttttccaaatggtcagcaagacaaagatgttctccaggatgataaagcagcagatgagaatgaacaccaccgaggtcagatcttaatgctgttctccttgtccgcgctgatattcagctttcccgtgtagttgtaatgccggacgatgatatcatagttgacgtagtcagagaccgagcttcggtgggccttgaccagcgggacagtctggtgggccccatggtgccaaccctgtgtccacacaggaagccggggtggcgctactccagacgaacgctagagggcgaggcgagagagccttcactggcttcaggggtggttcgatgagtgatccaggctttttgtgtagcttttccttggctggagacgggcctcggaaaccgcagcctcgctcaagcagggcgaacgattgcgttacggagagcccgggatctgtacggctcgcttcgcatcattgtctgctgcccccgactgactgcagtagtgctctcgcaaacttatcgagtcggggtcccctccctacgcacgacggagcactcacaatggccagtcccgctcgccgcggccag

SEQ ID NO: 86024 - DNA, 1846 bp, Homo Sapiens
  misc_feature (1253)..(1253): n is a, c, g, or t
  misc_feature (1458)..(1458): n is a, c, g, or t
  misc_feature (1489)..(1489): n is a, c, g, or t
  misc_feature (1592)..(1593): n is a, c, g, or t
  misc_feature (1682)..(1682): n is a, c, g, or t
  misc_feature (1718)..(1718): n is a, c, g, or t
  misc_feature (1729)..(1729): n is a, c, g, or t
  misc_feature (1788)..(1789): n is a, c, g, or t
  misc_feature (1800)..(1800): n is a, c, g, or t
  misc_feature (1812)..(1812): n is a, c, g, or t
ttttattttctttttgctttgttcactgcttattaaaatggaaatcctgtagaatagtagttctggaatattgccgggtgaaagtccaattgtcatcacaatgttatatattgacaccccagtgtcatcagtcaggcaggagccaaacaatgaatgcccctcttaggtattccgcctgggattttgttttgtctgttccctaagaaaatatattttcattcctgcaaacacagtgctcagccttcagttcccttccacttgagttctctcttctcctgctggaagccgcccctctctgcgatggacgtgaggacgtgtccagctctgctctgcgggaaggagttggaatgctcgacagaagagttttctctcctttcctggacctcctcgcaaatgcccagaccctgcattttaacgctgtgctaagcagcctttggtctgcatgggggatggtgtgctcccagcctgcagtctttggagcaaggctgctgcccgtgccttgggtgctggagttggaggaggctgttctcagccctttcccttttctgaaagctgttcctggccgggcatcccagggaagaaggaggggactgcgtgtatctcctccacctctcccattccatccccagtccagcctgggcaaccccacccctgggagggatgaggcaccctcttgctcagcctgctcagccttctctgagcctttgcagggatctgcagactcctgagggctagaggacagagaaagagaatagaatgaaatgactttgattcctgcgccttttagttttgaactctggaattcctctgccccctccccaacatttttttggaatctcaccctgttgcaaaactagagccatgtcccaagcatctcacaaaggaataactgctctgagcagagatgagtggtggttggcaggggcaggcaactttgggtgctgctgatgcctgcaaaagccatttatggcttgtggtggggggcacatagattccccggggggttagacaggaagtaactgatatcacttcacccaaatatataaccgtggatgggtatcctatttaaatttcagtttttgttaacgagcggggcttactaaaaagctccactttgagctcccccaccccctccaggtcctcagagtttgcagatctgggctttctaaagcaagtgacctgaaggctctgggctcaccatacaacacccacgttgtttatttcaaagaacttttcagcgaagggagaggagntttcagaaaaacctcactctttcccctcccttctcccctctttccttctgccggtccttttggctggggtctgagtctgcggttctcgcctgggcagtcttgacgaggagcaaaccccgccttcagagggcagaccaagcaggtggcatggaattgatcagccgagaaaggtgtgagcccgaggcagttcctgcggtctgctacnaaatggaatgggaaagggaagggaaatttcnccccagcatgggctgtggggatatttggaccgtattctgggcaagactccatgacccctctgattctgcagtggacagctgtttggagagcctcctcattttnnttttgcaaccaggaatgattcctccttaattgcttaagggccgggagcaaagggtcttaactttccggcctttgactttcccagggganaagtcatcaacacttttgcccattaagctcatgggncctggcggccntcggaagacccgtgaagttttaaaaaaatttctcgcctccccacggaccccagaagggnnccgcggttccnaggacccccttnagcaaaaggggagggcaattttcctaaaaatcgg

SEQ ID NO: 86025 - DNA, 1423 bp, Homo Sapiens
  misc_feature (1352)..(1352): n is a, c, g, or t
aataagcataatagcagcataacaagtagccctcttagcggggatgaaaataacatgaccaaagagactttggtgaaagttcaaaaagcgttttctgaatctggaagtaatcttcacgcattgatgaatcagaggcagtcatcagtaactaatgtggggaaagtaaaattaactgaaccatcttatttagaagatagcccagaggaaaatctatttgaaactaatgatttgactatagtagaatcaaaggagaaatatgaacaccacactggtaaaggtgaaaaatgtttttcagagagggacttttcaccccttcaaactcaaacatttaatagagaaacaactataaaatgttattcaactcagaagaagatggaacatgaaaaagacattcattcaaatatgccaaaagattatttaagcaagcaagaattctccagtgatgaagaaataaagaaacagcagtccccaaaggataaactaaataataaattaaaagagaatgagaatatgatggaaggtaacttaccgaagtgtgcagcacatagcaaggacgaggctagatcctctttctcacagcagagtacatgtgttgtaacaaacttgtcaaaacctaggcctatgagaattgctaaacagcagtcattgagaaacatgtgcagaaaacagtttctgaaagttcacaaatgacagaacatagaaaggtttctgatcacatacagtggtttaacaagctttctttaaatgaaccaaatagaataaaagtcaagtcacctcttaagtttcagcgtactcctgttcgtcagtccgtcagaagaattaattctttgatggagtatagcagacaacctacagggcataagttggcgagtcttggtgatacagcttctcctttggtcaaatcagtgagctgtgacggagctctttcctcttgtatagaaagtgcatcaaaagattcctctgtttcatgtatcaaatcaggtcctaaagaacagaagtccatgtcatgtgaagagtcaaatattggtgcaatttcaaagtcaagcatggagttaccctcgaaatctttcttaaagatgaggaagcacccagattcagtgaatgcttctcttaggtctactacagtttataaacagaagatcttatctgatggccaagctaaggctccccttggatgatctgactactcatgatatagtaaaacagttgtaaataacacatgggcatttcttctgggataaatacaaggtcccttaggagacattcgaaagaagaagggcctggtacaaaggttcttcaaaacatcctaatcggaaaactccattactaccaacagtaaaccggaaatttgnaattggaaaaggtaaactggccattaaggaaaaaaagggagaaattggatgacttgccgggatgagtcctg

SEQ ID NO: 86026 - DNA, 694 bp, Homo Sapiens
gacgggttaccagctgtcggcagctaagacccagtgtgaagacattgatgaatccagcaccgtcatctctgtgctcatgggcagtgcaggaacactgagggctcttttcaatgtgtgtgtgaccagggttacagagcatctgggcttggagaccactgtgaagatatcaatgaatgcttggaggacaagagtgtttgccagagaggagactgcattaatactgcagggtcctatgattgtacttgtccggatggatttcagctagatgacaataaaacatgtcaagatattaatgaatgtgaacatccagggctctgtggtccacaaggggagtgcctaaacacagagggttctttccattgtgtctgccagcagggtttctcaatctctgcagatggccgtacgtgtgaagatattgatgaatgtgtaaacaacactgtttgtgacagtcacgggttttgtgacaatacagctggctccttccgctgcctctgttatcagggctttcaagccccacaggatgggcaagggtgtgtggatgtgaatgaatgtgaactgctcagtggggtgtgtggtgaagccttctgtgaaaacgtggaagggtccttcctgtgcgtgtgtgctgatgaaaaccaagagtacagccccatgactgggcagtgccgctcccggacctccacagatttagatgtag

SEQ ID NO: 86027 - DNA, 1987 bp, Homo Sapiens
ggggagctcttgcagcctccccgcccctcccgcaacgctcgaccccaggattcccccggctcgcctgcccgccatggccgacaaggaagcagccttcgacgacgcagtggaagaacgagtgatcaacgaggaatacaaaatatggaaaaagaacaccccttttctttatgatttggtgatgacccatgctctggagtggcccagcctaactgcccagtggcttccagatgtaaccagaccagaagggaaagatttcagcattcatcgacttgtcctggggacacacacatcggatgaacaaaaccatcttgttatagccagtgtgcagctccctaatgatgatgctcagtttgatgcgtcacactacgacagtgagaaaggagaatttggaggttttggttcagttagtggaaaaattgaaatagaaatcaagatcaaccatgaaggagaagtaaacagggcccgttatatgccccagaacccttgtatcatcgcaacaaagactccttccagtgatgttcttgtctttgactatacaaaacatccttctaaaccagatccttctggagagtgcaacccagacttgcgtctccgtggacatcagaaggaaggctatgggctttcttggaacccaaatctcagtgggcacttacttagtgcttcagatgaccataccatctgcctgtgggacatcagtgccgttccaaaggagggaaaagtggtagatgcgaagaccatctttacagggcatacggcagtagtagaagatgtttcctggcatctactccatgagtctctgtttgggtcagttgctgatgatcagaaacttatgatttgggatactcgttcaaacaatacttccaaaccaagccactcagttgatgctcacactgctgaagtgaactgcctttctttcaatccttatagtgagttcattcttgccacaggatcagctgacaagactgttgccttgtgggatctgagaaatctgaaacttaagttgcattcctttgagtcacataaggatgaaatattccaggttcagtggtcacctcacaatgagactattttagcttccagtggtactgatcgcagactgaatgtctgggatttaagtaaaattggagaggaacaatccccagaagatgcagaagacgggccaccagagttgttgtttattcatggtggtcatactgccaagatatctgatttctcctggaatcccaatgaaccttgggtgatttgttctgtatcagaagacaatatcatgcaagtgtggcaaatggcagagaacatttataatgatgaagaccctgaaggaagcgtggatccagaaggacaagggtcctagatatgtctttacttgttgtgattttagactccccttttttcttctcaaccctgagagtgatttaacactggttttgagacagactttattcagctatccctctatataataggtaccaccgataatgctattagcccaaaccgtgggtgttttctaaatattaataggggggcttgattcaacaaagccacagacttaacgttgaaattttcttcaggaattttctagtaacccaggtctaaagtagctacagaaagggggaatattatgtgggattatttttcttcttatgctatatccccaagtttttcagactcatttaagtaaaggctagagtgagtaaggaatagagccaaatgaggtaggtgtctgagccatgaagtataaatactgaaagatgtcacttttattcaggaaatagggggagattcaagtcgtatagattcctactcgaaaatcttgacacctgactttccaggatgcacattttcatacgtagaccagtttcctcttggtttcttcagttaagtcaaaacaacaccgttcctctttccccatatattcatatatttttgctcgttagtgtatttcttgagctgttttcatgttgtttatttcctgtctgtggaaatgggg

SEQ ID NO: 86028 - DNA, 978 bp, Homo Sapiens
cattgggtttaactgatgaaaaaagtaatggaacaattgcccttgtggatgattctgaggatcctggagccaatgtatctaacatacagcttcagcaaaaaatttcaagtctggagattaaactcaaagtatctgaagaagaaaaacagagaattaaacaggatgtggaatcattgatggaaaagcataatgtcttagaaaaaggctttctaaaagaaaaagagcaagaggccatttcttttcaagatagatacaaagaacttcaggaaaaacataaacaagaattggaagacatgaggaaagctggtcacgaagccctcagcattattgtggatgaatataaggcactactgcagtcttcagttaagcaacaagtagaagctattgaaaaacagtacatttctgcaattgagaaacaggcacacaagtgtgaggagttgctaaatgctcagcatcagaggctccttgaaatgctagatacagagaaggaactgttaaaagaaaaaataaaggaagctttgattcagcaatctcaagaacagaaggaaatattggaaaagtgtttgggaggaagaaaggcaaagaaataaagaggcattagtatccgctgcaaagcttgaaaaagaagcaatgaaggatgcagttttaaaagtcgtagaagaagaaagaaaaaatttagaaaaagcgcatgctgaagaaagggaattatggaagacagaacatgcaaaagatcaagaaaaagtatctcaggaaattcaaaaagctatacaagaacaaagaaaaataagtcaggaaactgttaaggcagcaataatagaagagcagaaacgaagtgaaaaggctgtggaagaggcagtgaaaagaacaagagatgaattgatagagtatataaaagaacagaaaagggtaagtatctcctgaaaagttttaatttgtgcttcaataaactgaatcagtgacttccatacaaaaaaaata

SEQ ID NO: 86029 - DNA, 820 bp, Homo Sapiens
ccctcggagactgtcaccacactaccatgtgagagcacagactgcgtcagaaacagaagcaacagaggagacaaagtgtgagttcatatattgtactccatggaaagcctgaaagagagctgtgcttgctgtgaggatatcagaggaactgcccttagcagcccacgagaccgttcctggaagtgaacatcaacgaagacagaaaggccagggaaaggccctctcctgtctctcctcttgcacgtgggcaccccactacttggccttcactacctgttcgtacgggggcggaggcgtgttgcagtaggctggagggggcgggcaggccacactcccctggggtgagttgggtgggacctggaaagccattgccatggaattcccgacagggttcatccccggtcctcctgggtcggtgtaatagggcggccccggctgctgggctcctgggccgggatttgggggctgcctggtgtaggacacattgaaggctggctcctcgatcagcggcggggggtacatgcgcctccggatgaagaagccggctccgcagcagaaaagcacgcccatcatcagaaggaaccagaagtaccacagcctctgtatggagagggcccgcacacagcacctggagccacagcagtcctcgtaggagcggcatatataataggttggatagagtccttcgaaataccagcaatgctttttggcttctgtgcactcctaagagcagcccgagcagcagcgccgccaccttcgcaggctggcgcctcatggctcccctcgtgccgaattcggcgcgccgtcgacttcatactct

SEQ ID NO: 86030 - DNA, 890 bp, Homo Sapiens
  misc_feature (299)..(307): n is a, c, g, or t
tggaggatgagaataatgccacattgagaacaaccagtcagaaacagggaatcccaagttatctttgttaagtttgattaaagcagaatataagtctttagccttcccaagtttcttggcaaatgcatcagcttgaaactcaaatctgcggcttaggactgttaggcaaaaagaaagaacctcattgtaaggtgaaaaaataaactggaagatgatcaatagtccaataagagtgggttggctatcataaaaaccaaatgcagcaaaaagctcctttcgaccaattaatacagcaaatnnnnnnnnncacaggaaagaattcatctggctaataatgatatttttgactgtatgtcccaacttccagtgccccagttcatggcctagtacagcgagtacctcctcatttttacatccttgtttcttatttttaactttagcttttatttcttcactgttcccttcttcctcattgcggggttccatgccagaatcctcctggatgtctttgtttagtacagagtactcttctagtagagtgtcaaacaaaactattcgcttgttcttgaagaagccataaaaataagcattgctgtgggaagagcgtttagatccttccacaacatacaccttcgtcaaaggaaagtcaatactctttgccattacttcaatttcttctttaagctttccctcaggcagaggtgtgaatttgtcaaataaaggggcaatatagtcagcatagattgtgacaagaaccagagacacaactaatgtgaacagccaggcataaataaaaaaatagtcacccccaattttaataatgtaaagtagaagtgaagacacaggcaacaaaatacactgagtcacaacaaatttcttgattgcatctt

SEQ ID NO: 86031 - DNA, 862 bp, Homo Sapiens
  misc_feature (686)..(686): n is a, c, g, or t
tttctggtagaaggcggggttctgctcgtacgctgcggagtctctgcggggtgtagaccggaatcctgctgacgggcagagtggatcagggagggagggtcgagacacggtggctgcaggtctgagacaaggctgctccgaggtagtagctctcttgcctggaggtggccattcattcctggagtgctgctgaggagcgagggcccatctggggtctctggaagtcggtgcccaggcctgaaggatagccccccttgcgcttccctgggctgcggccggccttctcagaacgaagggcgtccttccaccccgcggcgcaggtgaccgctgccatggcttttccccatcggccggacgcccctgagctgcctgacttctccatgctgaagaggctggctcgagaccagctcatctatctgctggagcagcttcctggaaaaaaggatttattcattgaggcagatctcatgagccctttggatcgaattgccaatgtctccatcctgaagcaacacgaagtagacaagctatacaaggtggagaacaagccagccctcagctccaatgaacaattgtgcttcttggtcagaccccgcatcaagaatatgcgatacattgccagtcttgtcaatgctgacaaattggctggccgaactcgcaaatacaaagtgatcttcagccctcanaagttctatgcgtgtgagatggtgcttgaggaagagggaatctatggagatgtgagctgtgatgaatgggccttctctttgctgcctcttgatgtggatctgctgagcatggaactaccagaatttttcagggattactttctggaaggagatcagcgttggatcacactgtagct

SEQ ID NO: 86032 - DNA, 1003 bp, Homo Sapiens
  misc_feature (45)..(79): n is a, c, g, or t
  misc_feature (883)..(892): n is a, c, g, or t
gcgaacgacgagcgcagcgagtccagtgagcgaggaagcggccgnnnnnnnnnnnnnnnnnnnnnnnnnnnnnnnnnnncagtcgacggtaccggacatatgcccgggaattcggccattacggccgggtaccaaatagctcccggaagtagcggaaggcaacaggtgcataggtcttgaaacgaaagtcattgtagtgatgagcaggggtcaggttgctcccttcactgggaaagaagatactctcaaccacgtagaaatcttgcatgaggacatcacgctctggtttggtactcaggctccccacagtgtgggtaatgcctaactggatggcacctttcaaggctgatgaggttgtctttttatatgttgtctctcctgaggaatcaacacttctatggcctattttcttgatgggcatgccagaggcataaggcacctcagatgccatgggtctcttgattccagatgctgaggacaaggtacaggaagggaccgcgggatcaaaggatgaaaaaccgaccgaagacgacggcccggaggaggccgacgccatccttagcagccccctccccctcagcggcctggctatctttcaatccggttcttcctcttctcggaatcgaatcttcccaacgtctctttacagaacccgcgttctgtgggccacctccccgccccctccggggcctccctcagacacgtcgagccggctcctggaccagctcaaggccacaccattcgcctggcatggggaagaactcacgtcccgcaccccctccacaagtttaaccgctttccacaggggatactttcccctttcacagaagagtaagcttaagctggctgctgggaccttgcgcccagaccaagccacatctgnnnnnnnnnncgaggcatgaaaagtcccaaaggagcgaacgccccttctccgtccttcctaaccacggcctgttaatcgcccaacccggccgcttcactccgggcagccaagcaaaaaatc

SEQ ID NO: 86033 - DNA, 974 bp, Homo Sapiens
  misc_feature (518)..(558): n is a, c, g, or t
aaaaaagatagggctaggaagaggcccgggtgttacatcggcacgaggaccgaacgcggatgataaacaaacactaacgatggcggcgccgggaagcgaccggctgctgggcttaaggcgggagtgaccgcattaaccagtgagggaagcactgaagagcgccagtcgacgtgggtgcgacaactcgcggagtcttaggagcaaaacgtctggggcctgagagccaggacccttctgaagccttaggtgtctatcggcgacgtgtacggtcactgcagcatccggagcgcggaaccctcagaccaggaggcgcggctggtcggtcccaggtcccggcctccgtaatgagagcccggaaccactctttgtgaccgcagcttcgcaggtgagggtgactgtagactagtgaaaaaagggacccatggttcacgactgtcttcttactggccagtggaacgacctgtggaaacctgtgatccattctcattaaataaatctctggcatcttggactcaagnnnnnnnnnnnnnnnnnnnnnnnnnnnnnnnnnnnnnnnnnattcctataggcaatggaaactgatctcaattcccaggacagaaaggaactggacaagtttattaaactttatgccctcaagactgtccaagtgattgtccaggctcggcttggtgaaacagatttgcactcgttcatcatcttctccaacgggttcagcatcggttcaacttagcaatcaaagacatcccagaggttacacatgaacgcaaagaaggcactggcaggacagctgcctgcagacgagaggtccatgtgtgtggagatttcacttaagacttctgagggagattccatggagctggaaatatggtgtcttgaaatgaatgaaaagtgtgataaagaaattcaagtttcctacacggtgtacaacagactgtcattgctgctgaagatcccttcttgctataactagg

SEQ ID NO: 86034 - DNA, 475 bp, Homo Sapiens
cgacgtgggtgcgacaactcgcggagtcttaggagcaaaacgtctggggcctgcgagccaggacccttctgaagccttaggtgtctatcggcgacgtgtacggtcactgcagctccggagcgcggaaccctcagccaggaggcgcggctggtcggtcccaggtcccggcctccgtaatgagagcccggaaccactctttgtgccgcagcttcgcaggtgagggtgactgttgactagtgaaaaaagggacccatggttcacgactgtcttcttactggcagtggaacgacctgtggaaacctgtgatccattctcattaaataaatctctgggtaagtggctaagcaccttcttgagctcatcactaattcttcccagttttcacttttccagtgagttcccagttagcctggtcaattcagcgtagcatttcacttttggtatttcttcgttctctggccaccccgcagccaaa

SEQ ID NO: 86035 - DNA, 663 bp, Homo Sapiens
  misc_feature (582)..(582): n is a, c, g, or t
tacataaagataaatatataatgtatttcattgaggaggaagagaagtagcaaggatttcaatgaagacataatgattacaaaccagtgtactatacagatttcagaagcagaaaaaatgctgaacagcctgctcaagttttaaataaactgtcttctcactcaaagtactgatacaacagagaaggtatgtaaacaggaacagtttgcatggggattggaaaaatgtataggaaattaatatttcttaaaagctccctgcgataggaagtcgaaaacccaatcactttgcatctttctgcaaaaaattccccacccaatcaaccatataaatgcattgccacagaagataaataatggatggctaattttcaccttacagtgcagtacacaattagttgagaaaaaaaataaacataagatatatattataaaatgttttgtcaacaaaaacaaactttgagaaacatggcgcactataaaagctaagaaactcattcacgaagcactgcttgtgtacaccacatattccagactttttccaagtaacattctatgttaacagtttagagctactaattcnagagaggtcttatttctcactgcttacattttaaagaaatatgtctaaagcgcattgtaaaccactaatatttacaatagc

SEQ ID NO: 86036 - DNA, 948 bp, Homo Sapiens
cagtcgacggtaccggacatatgcccgggaattcggccattacggccgggggttaaaaattaaatttcaaaagaatacctggagtggaaaagagttctcagcagagacaaagaccccgaacacctccaacatgaagcttcttcatgttttcctgttatttctgtgcttccacttaaggttttgcaaggtcacttatacatctcaagaggatctggtggagaaaaagtgcttagcaaaaaaatatactcacctctcctgcgataaagtcttctgccagccatggcagagatgcattgagggcacctgtgtttgtaaactaccgtatcagtgcccaaagaatggcactgcagtgtgtgcaactaacaggagaagcttcccaacatactgtcaacaaaagagtttggaatgtcttcatccagggacaaagtttttaaataacggaacatgcacagccgaaggaaagtttagtgtttccttgaagcatggaaatacagattcagagggaatagttgaagtaaaacttgtggaccaagataagacaatgttcatatgcaaaagcagctggagcatgagggaagccaacgtggcctgccttgaccttgggtttcaacaaggtgctgatactcaaagaaggtttaagttgtctgatctctctataaattccactggaatgtctacatgtgcatttgccggaggattaaagaccaggtttgggcctgaatgtactttttactaaagagaaggaactatggggttaccaaggaatttccgctgaatgtggggtttggttattcccccggaaaagcagaatttcctcccaatgggatggaactttccttatccacagggtggtggaaaatgggggaaaatatacattttttcctccaaaaaggaaaaaagcccctggggggaagggggtaaattccaaatgggaaatttggtgggggt

SEQ ID NO: 86037 - DNA, 707 bp, Homo Sapiens
  misc_feature (679)..(679): n is a, c, g, or t
tacacgtagtaagttcaaaaccatgttgtaggtcaaatggaaagcactatttagaggatcagcggagcccttaagtaattgttttccaattgttgggctcatcttttcatctaccataagaattacaattcctctatcatccattcctctccttccagcacaaccagacatctaaatgtattcaccaaaaaaaatccatcggaaatccttcccatcaaatttacgggcatttgtaaataaaacagttctagctggcatgttaattcccataacaaaggtctccgtgacaaataagacctttatcaatccttcagaaaagagaatttctatagtttctttcaaaatagaaagtaaaccaccatggtgaataccaattcccctcttcaaaagaggaagctacatgttctacctaaagaagttttttatcttcatcgaataagcaatcaattgcattactaaatacttcttcaaccatcttcttttcttcatctgtgttaaaatctaatttggtcatttaaagtgcataggcttcacaatctttattactaaaactgaaaataatcacaggttggaaatttctttccataatcatcttcacaattttgaaaacatttgatggtccttttgttcctcctttccgccctttctggtctcctttggccaaatcacctgcatctcnaagcacttgcattgcagtatataaatta

SEQ ID NO: 86038 - DNA, 1636 bp, Homo Sapiens
gaccgtgcttctggggtttcataattcgggatctcgttgcgccctttatccattgcaattctggtatgctggttttccttcgaagattagtgttcttcccctctcaatggacttgtgggtagcaatgcaattttctttcacaatcgttcttgtaaggtgaaacaattcactttatgaacaattcaccgcacagtcacctctggcttctggcacataacatcaccatttgggttgggaggaatccagtgcacaaggcacaagaagcttctttcttgggtttggttgtttattcaaaaaaattgttctgcactggtctatttttcctgataaaatcttcaatccttccaatactatcaacccaacaattactgcattagtagtagcaatagcaggaataatgttccctgccattgatttgatatcaaatctactcttcatattcatactgaaaatatgcatcctgaggtttgcagcagaggtgacaaaatccattgcagatgggtcatccttatcccatatgagctcagctccatcccccttttctgctaaatgaactctcaaagtctcgatgctctttgaaaaaagacgtgcatagctctttacatctagaacctgctggtctttcaggcctaactggggttcattctgttgatctgatgcattcgtttcttctccttgactttgtacttcagcccagtccaacggaactggaggtttccttttccgccatagtttgtccattgtcaacagatacctgatgtcatctttaaaaagcttggtaaaaagtttaactggatcatatccagttgatttagcccattccttagtagaaatacgtttaatgtcaccatcttcattagatgctctagctctggcttcggcttccgttggttcccaggcagcttcagggtcagctctgtcaggagatacttcttgatcagcatcttcttccccaaacaactggttgaacaagtactttgcccaaacgatgcaatgtataggttctgaaggtgtgttacgaattgtacagccaggaaaggttctctgggtcggcttaggatgacactcataacactcggtcacaccctttttgatagtagttacttgtccaagatacccagctgttccactttcaataagaggaacatcagctgccaggcacattctattaacatggtttcgggcagctctgttatctaaagcattcataaccagtataaactgtcggaaaaattccacattatagtcagggttcatgatgctgtcatggtaggcaacgatattagctttcgggtaaaactgcagtacactttccttggcaacctgtgcctttgatcttccaacatgtttcttttgaaacaaaaactgtctgttgaggttgcttacatcaatagtatccagatcaatcaggtcgatgtgggagaaaccggtgagcacgagattcttgaggagctcgcagccgatgccgcccgcccccaccaccagcacccggcccccggccaccgcctcagccagctcccggggcagcccccgcgacagtgccatggcgggacaaccacgagccgcggcggaggcggaggcgggagaaccgagccgcggcccggacgcgtgggtcgacgatatcccgggaatccgg

SEQ ID NO: 86039 - DNA, 1385 bp, Homo Sapiens
  misc_feature (244)..(253): n is a, c, g, or t
  misc_feature (391)..(408): n is a, c, g, or t
tggctgataggatgtggccgatgaaaagatataaggcggctcgtgatgcacgtctaaatctgctattaaccgcgccaagggggcggggtgaattatttatgggcggcacccaatatattcttctcaagtgtatccagggttctggtaagcgaaattctcccttgttccatgggaaacattgtttgtggtaagggacaattttgggagagagaggggggcccaccggtggggagggtttgtcttnnnnnnnnnntgtaaaatccccagcgccaacttttggggaagtttccaaagtgttggggaaggatttccctctttgtaaccccaagggaattttggggggccccccacgcgggccacgcgggagggggagaatccccattccgttacnnnnnnnnnnnnnnnnnntttgtcccagggcaatgtggggggcacaccttgtagtgcccagctactcaggaggctgagggtgggaaaaattacttgggccccaggaattcaaggctaggagggagccgtgatcaccagtggcactctagccggggcaacagagaaagaccctgtctcaaaagggagagcaaaaaaaatataagaataggaagcttctgatatttgtctttctggagtactatttgctttgtgattcccacaatgcaatgcttcacctagtacatcatctggttctcccagacccttttaggactgaactgtgctttaaatagttacatgtctgcctgttacacagtggaaactagtttccttcagagggacacgaaaccacagatgaggccacaaagaaagcattctccttccacagcaactggctgagaaaacagaaccaggaaaattctgccttgaggaaacaatgtcagcttcctgaatcatccagggagaaagggggagagaatagattttaaaatgcttaaaaaatggcctttcagagtgctctgttccaattgtttgtgtgtttgcaatcctgtgtcaataatacttggcctctaacagaaacacctggcccccagccatcgtcaacacacattgggccccttctccaaaacacaggaggctgagtcctctcctgccctggtgagaggcgcctgccacagagggatgggagacagggaaggggaagttctttcctgaggctgaagctctcgagcttggaattgcgctgtttgcaacatggccagggaatgacagtgaccctagaaggcttttctccttgtcaccacccggctgcttacagctcccctggcggccggcctgcgtctgcagcacagcggaaaccgaggttgtctgaggctgaatctggagtgttgcccatcctggtggtgacccgggcccggtgattggcagagccatcagctgtgtcgatccaggatgcc

SEQ ID NO: 86040 - DNA, 1089 bp, Homo Sapiens
  misc_feature (734)..(734): n is a, c, g, or t
gcggggccgtgggtgtacgcggcgcaccgcggcagtcctgatggcccggcatgggttaccgctgctgcccctgctgtcgctcctggtcggcgcgtggctcaagctaggaaatggacaggctactagcatggtccaactgcagggtgggagattcctgatgggaacaaattctccagacagcagagatggtgaagggcctgtgcgggaggcgacagtgaaaccctttgccatcgacatatttcctgtcaccaacaaagatttcagggattttgtcagggagaaaaagtatcggacagaagctgagatgtttggatggagctttgtctttgaggactttgtctctgatgagctgagaaacaaagccacccagccaatgaagtctgtactctggtggcttccagtggaaaaggcattttggaggcagcctgcaggtcctggctctggcatccgagagagactggagcacccagtgttacacgtgagctggaatgacgcccgtgcctactgtgcttggcggggaaaacgactgcccacggaggaagagtgggagtttgccgcccgagggggcttgaagggtcaagtttacccatgggggaactggttccagccaaaccgcaccaacctgtggcagggaaagttccccaagggagacaaagctgaggatggcttccatggagtctccccagtgaatgctttccccgcccagaacaactacgggctctatgacctcctgnggaacgtgtgggagtggacagcatcaccgtaccaggctgctgagcaagacatgcgcgtcctccggggggcatcctggatcgacacagctgatggctctgccaatcaccggggcccgggttcaccaccagggatgggcaacactccacgattcagcctcagaacaacctcgggtttcccgctgtggctgcagaacgccggccgggccgcccaggggagctggaaaccagcccgggtggtggaccagggaaaaaaacccttctaggggcccctggcatttccctggcccatgttggcaaacaagggcaatttcaagcttccgaaagcttcagcccctcgggaaaaaaattccccctt

SEQ ID NO: 86041 - DNA, 1102 bp, Homo Sapiens
  misc_feature (946)..(946): n is a, c, g, or t
  misc_feature (1015)..(1015): n is a, c, g, or t
ggaattcccgggatggacaggctactagcatggtccaactgcagggtgggagattcctgatgggaacaaattctccagacagcagagatggtgaagggcctgtgcgggaggcgacagtgaaaccctttgccatcgacatatttcctgtcaccaccaaagatttcagggattttgtcagggagaaaaagtatcggacagaagctgagatgtttggatggagctttgtctttgaggactttgtctctgatgagctgagaaacaaagccacccagccaatgaagcctgcaggtcctggctctggcatccgagagagactggagcacccagtgttacacgtgagctggaatgacgcccgtgcctactgtgcttggcggggaaaacgactgcccacggaggaagagtgggagtttgccgcccgagggggcttgaagggtcaagtttacccatgggggaactggttccagccaaaccgcaccaacctgtggcagggaaagttccccaagggagacaaagctgaggatggcttccatggagtctccccagtgaatgctttccccgcccagaacaactacgggctctatgacctcctggggaacgtgtgggagtggacagcatcaccgtaccaggctgctgagcaggacatgcgcgtcctccggggggcatcctggatcgacacagctgatggctctgccaatcaccgggcccgggtcaccaccaggatgggcaacactccagattcagcctcagacaacctcggtttccgctgtgctgcagacgcaggccggccgccaggggagctgtaagcagccgggtggtgacaaggagaaaagccttctagggtcactgtcattccctgggcatgttgcaaacagcgcaattccaagctcgagagcttcagcctcaggaaagaacttccccttccctgtctcccatccctctgtggcanggcgcctctcaccagggcaggagaggactcagcctcctgttgttttggagaagggggccaaatgtgtgnttgaccatggctgtggggggccaggtggtttctggtaaaagggccagtatttatttgacaccagggattggcaaacacaccaaacag

SEQ ID NO: 86042 - DNA, 1148 bp, Homo Sapiens
  misc_feature (1112)..(1112): n is a, c, g, or t
atggggaatgtgtcaatgacagaggatcatatcattgcatttgtaaaactgggtacactccagatataactgggacttcctgtgtagatctgaacgagtgcaaccaggctcccaaaccctgcaattttatctgcaaaaacacagaagggagttaccagtgttcatgcccgaaaggctacattctgcaagaggatggaaggagctgcaaagatcttgatgagtgtgcaaccaagcaacacaactgccagttcctatgtgttaacaccattggcggcttcacatgcaaatgtcctcccggatttacccaacaccatacgtcctgcattgataacaatgaatgcacctctgacatcaatctgtgcgggtctaagggcatttgccagaacactcctggaagcttcacctgtgaatgccagcggggattctcacttgatcagaccggctccagctgtgaagacgtggacgagtgtgagggtaaccaccgctgccagcatggctgccagaacatcattgggggctacaggtgcagctgcccccagggctacctccagcactaccagtggaaccagtgtgttgatgaaaacgaatgcctcaccgctcacatctgcggaggagcctcctgtcacaacaccctggggagctacaagtgcatgtgtcccgccggcttccagtatgaacagttcagtggaggatgccaagacatcaatgaatgtggctctgcgcaggccccctgcagctatggctgttccaataccgagggcggttacctgtgtggctgtccacctggttacttccgcataggccaagggcactgtgtttctggaatgggcatgggccgaggaaacccagagccacctgtcagtggtgaaatggatgacaattcactctccccagaggcttgttacgagtgtaagatcaatggctaccccaaacggggcaggaaacggagaagcacaaacgaaactgatgcctccaatatcgaggatcagtctgagacagaagccaatgtgagtcttgcaagttgggatgttgagaagacagccatctttgctttcaatatttcccacgtcagtaccaaggttcgaatcctagaactccttccagctcttacnactctgacgaatcacaacacgatacttgggatcgaa

SEQ ID NO: 86043 - DNA, 1209 bp, Homo Sapiens
tctttctcccagtcctcactgatgtccgtgcttgagcctttctttccattgttggagggtgtagacttccccactatccgagttcagctcaaacacccgtaagtctgtgggcgcctcctccctcagagtctctactctggctggaggcctgggctctgggccgccggtgtggccagcaggcgttaggggcatggagtgaatagggggtgagggtccagtctcacccacatccacagccaggccctgttcctccaaggatgcctctagcagcttttgggacaggtccttgggtagcactcgtgcctcaggtgcagtggccgggttggcgatctgtgtcacgagggagatgctctcactgctctctgatggagtcacctctgctgggggctcaactgaagtcaccagattctcttcacaggggctctgggggccaggttctccttcagggaatgtagaaattttggccacaggaaccttggcctcttttggagatatgggtgaaatgcccatgagctcctcttcctcctcctcccagccgggctcttcagagatgctctgttccgcccgctgcttcagggcgtccctccgggcctgctcctgctctaactgatggactttatagaaataccgatgccagaattctgaatgggaaacagctgctggaaccatcttggtgtagagggcccggatggaggggctgcctacaaggagctctgagatctcccccttcttctcctccaagcagaactgggaaagccaggcgtcaaacaattccgggggcccatctggttcattacagtaggttgctgggtccgactgcaggctatagaggcgagccttggtgccatcatagggctcagctgtgccagacggtgtgcccatcagggtgatgacatcgcagtcgatggttttgtctggcgaaggggcaaaggtgtctgagatcacccctaggaagtcagataaccctttcttcatcttctctgttgctcctgaggagccttccgtagccagcttctccttgaccacgctggccgtggctgcgatggtacaggccgtgtcatgctgcaccacctgggtaaactccgtcaggtcccgcttcataaactccaaggcttcagaggacttctctttgactgcttggtagctctgctgcagccagctccgccaccatcccacgtcctccccttccgccatcttgcctgcatgaca

SEQ ID NO: 86044 - DNA, 834 bp, Homo Sapiens
gtcatgcaggcaagatggcggaaggggaggacgtgggatggtggcggagctggctgcagcagagctaccaagcagtcaaagagaagtcctctgaagccttggagtttatgaagcgggacctgacggagtttacccaggtggtgcagcatgacacggcctgtaccatcgcagccacggccagcgtggtcaaggagaagctggctattgcagcctgttcccggggcgcttgcttcctctgcccgttctctatacagacggaaggctcctcaggagcaacagagaagatgaagaaagggttatctgacttcctaggggtgatctcagacacctttgccccttcgccagacaaaaccatcgactgcgatgtcatcaccctgatgggcacaccgtctggcacagctgagccctatgatggcaccaaggctcgcctctatagcctgcagtcggacccagcaacctactgtaatgaaccagatgggcccccggaattgtttgacgcctggctttcccagttctgcttggaggagaagaagggggagatctcagagctccttgtaggcagcccctccatccgggccctctacaccaagatggttccagcagctgtttcccattcagaattctggcatcggtatttctataaagtccatcagttagagcaggagcaggcccggagggacgccctgacagcagcgggcggaacagagcatctctgaagagcccggctgggaggaggacggaagaggagctcatgggcatttcaccatatctccgaaagaggaaaggttcctgtggccaaaatttctactttccctgaaggagaactggcccctg

SEQ ID NO: 86045 - DNA, 852 bp, Homo Sapiens
tggaacattctgacttgataaagctttaataatgtacagtgttttctaaatatttcctgttttttcagcactttaacagatgccattccaggttaaactgggttgtctgtactaaattataaacagagttaacttgaaccttttatatgttatgcattgattctaacaaactgtaatgccctcaacagaactaattttactaatacaatactgtgttctttaaaacacagcatttacactgaatacaatttcatttgtaaaactgtaaataagagcttttgtactagcccagtatttatttacattgctttgtaatataaatctgttttagaactgcagcggtttacaaaattttttcatatgtattgttcatctatacttcatcttacatcgtcatgattgagtgatctttacatttgattccagaggctatgttcagttgttagttgggaaagattgagttatcagatttaatttgccgatgggagcctttatctgtcattagaaatctttctcatttaagaacttatgaatatgctgaagatttaatttgtgatacctttgtatgtatgagacacattccaaagagctctaactatgataggtcctgattactaaagaagcttctttactggcctcaatttctagctttcatgttggaaaattttctgcagtccttctgtgaaaattagagcaaagtgctcctgttttttagagaaactaaatcttgctgttgaacaattattgtgttcttttcatggaacataagtaggatgttacatttccagggtgggaagggtaatcctaaatcatttcccaatctattctaattaccttaaatctaaaggggaa

SEQ ID NO: 86046 - DNA, 655 bp, Homo Sapiens
ccactcccacataaaatgctcatagtttgggagaggaaagagggaagattctctcttcttttaacagagagatgattgctctgtatacccattgcttcctccctgaggctgtcccaaagtgaacactgatggagtggtcaaaatcataaggttgtagcaagccaaagatacgtatgtgacagaagcacataagcaataagcagaaaaccagaagtgcatgctgtgatgcctgtgactccttcatcccgctcagtgccatgtcctcttttgtgatcttccagaaagctccaggattcatttgagttccacatccaagtaacagatgaattatattcatgttgtaatgcattttgtggagtttacaaaaccagtgtctgttaaaactttggaaaatgtcttagaaaacgttggtgcttggtgatgctttatttgtttaattatcaagaacaaattatggcaatgctagtttctgcttaaccaaaatactctgtgtatatattatacatatataaatacatgggattgtgtatgtctatatgtgtttaaagcttactatgtcttcattttggcttcaatgactatcttttatacatggaattccttaagattgagaatatgtcactgagtgaatgatacctgcagacagtcagttgat

SEQ ID NO: 86047 - DNA, 619 bp, Homo Sapiens
atgatatgacagactcgggctcctgtctgtctcgcaaaaagatcaagaagacagagagtggcatgtatgcatgtgacttatgtgacaagacattccagaaaagcagttcccttctgcgacataaatacgaacacacaggaaaaagaccacatcagtgtcagatttgtaagaaagcgtttaaacacaagcaccaccttatcgagcactcaaggcttcactcgggcgagaagccctatcagtgtgataaatgtggcaagcgcttctcacactcgggctcgtactcgcagcacatgaatcacaggtattcctactgcaagcgggaggcggaggagcgggaagcggcggagcgcgaggcgcgcgagaaagggcacttggaacccaccgagctgctgatgaaccgggcttacttgcagagcattacccctcaggggtactctgactcggaggagagggagagtatgccgagggatggcgagagcgagaaggagcacgagaaagaaggcgaggatggctacgggaagctgggcagacaggatggcgacgaggagttcgaggaggaagaggaagaaagtgaaaataaaagtatggatacggatcccgaaacgatacgagatgaaga

SEQ ID NO: 86048 - DNA, 1230 bp, Homo Sapiens
  misc_feature (164)..(195): n is a, c, g, or t
cggaattggacttgggaggcgcggtgaggagtcaggcttaaaacttgttggaggggagtaaccagcctgctcctctcgctctcctcctcgtctgcgccgcgtttcagaggttgcccatcagccttgtgatttatttttatatctgctttttataaagagagaannnnnnnnnnnnnnnnnnnnnnnnnnnnnnnncttcttaagagaaaattcctgttccaagagaaaataaggcaacatcaatgaaggagagaagagccagccagaaattatccagcaaatctatcatggatcctaatcagaacgtgaaatgcaagatagttgtggtgggagacagtcagtgtggaaaaactgcgctgctccatgtcttcgccaaggactgcttccccgagaattacgttcctacagtgtttgagaattacacggccagttttgaaatcgacacacaaagaatagagttgagcctgtgggaccacttcgggttctccttactatgacaatgtccgccccctctcttaccctgattcggatgctgtgctgatttgctttgacatcagtagaccagagaccctggacagtgtcctcaaaaagtggaaaggtgaaatccaggaattttgtccaaataccaaaatgctcttggtcggctgcaagtctgatctgcggacagatgtcagtacattagtagagctctccaatcacaggcagacgccagtgtcctatgaccagggggcaaatatggccaaacagattggagcagctacttatatcgaatgctcagctttacagtcggaaaatagcgtcagagacatttttcacgttgccaccttggcatgtgtaaataagacaaataaaaacgttaagcggaacaaatcacagagagccacaaagcggatttcacacatgcctagcagaccagaactctcggcagttgctacggacttacgaaaggacaaagcgaagagctgcactgtgatgtgaatctttcattatctttaatgaagacaaaggaatctagtgtaaaaaacaacagcaaacaaaaaggtgaagtctaaatgaagtgcacagcctaagtcatgtataccagaggcttaggaggcgtttgagaggatactcatctttttggaatcctgaccttaggttcggcatgtagaccaagtgatgagaagtgaatacatggaagagtttttaagtgtgacttgaaaaatatgccaaacaatgagagatacaaat

SEQ ID NO: 86049 - DNA, 925 bp, Homo Sapiens
cggtcctaggtagcgaggcctgggtggcgaattcggcacgagggcatgctgctccccccagccctgggctttcctgaattgccaagcctggtgcctttccaaaggactagcagggcctgtggtggagccagcagaaccacaggagagtgccctgcctgtctcagtggaagtgtattattgttttaaggatagaaccagaggccttgaagggagccaagacagaactcccagcctgtgtaatctattggaaggcacattttcatttctgatgcagccaccttctggaggcagcttttatcctttctctctattgctatgttgaagtaatagggttttttttaacctctggatgtctcgtctgtggttgagtttatggtaatgggtacatgggtcaggccatgtattaacagatgccagtgcgctctgacaagtattccaaagtgttccgtagctagactggtgcaggctcgttgtaccactgcaaccgactgacgttactgtagttcctagaatgctgtgagggcggggggttcagatcaacataaagcctaacttgctggagttgtagtctcaaggctttctctcttgcttaactaaaacctaaggaccactgtttttggtagcaattatatggttactatccactgcagtcctcagttgttggggtaaatcccacatggcagagtaaggcaccccacagaaattaacttgggagagcctgaaaaattcccagtggcccttggcatagctgtctagaacaccatctctaggaaaaatttaattctgtcccctggccagctattgttcttccacttccgtttttctgctggccccaaggccaaaatgagtgggaatcacccatctgaactgttggtcaataaaatgtaatccggggggggaaacagcagggataaccccatggttc

SEQ ID NO: 86050 - DNA, 939 bp, Homo Sapiens
  misc_feature (34)..(34): n is a, c, g, or t
atttcagttgctgacttgcagagagcaatatggnctggttccccaacatgcctcaccctcatctatatcctttggcagctcacagggtcagcagcctctggacccgtgaaagagctggtcggttccgttggtggggccgtgactttccccctgaagtccaaagtaaagcaagttgactctattgtctggaccttcaacacaacccctcttgtcaccatacagccagaagggggcactatcatagtgacccaaaatcgtaatagggagagagtagacttcccagatggaggctactccctgaagctcagcaaactgaagaagaatgactcagggatctactatgtggggatatacagctcatcactccagcagccctccacccaggagtacgtgctgcatgtctacgagcacctgtcaaagcctaaagtcaccatgggtctgcagagcaataagaatggcacctgtgtgaccaatctgacatgctgcatggaacatggggaagaggatgtgatttatacctggaaggccctggggcaagcagccaatgagtcccataatgggtccatcctccccatctcctggagatggggacgaaagtgatatgaccttcatctgcgttgccaggaaccctgtcagcagaaacttctcaagccccatccttgccaggaagctctgtgaaggtgctgctgatgacccagattcctccatggtcctcctgtgtctcctgttggtgcccctccttgctcagtctctttgtactgggggctatctccttggattctggaagagagagaagactatcaagaggaaccaatccttaacggaacgatccagcaaataccggtttactcccactggtgcaaaatcccggaatagaatggaaaatccccattcaatggtccacgaatgcagaccaccaaggctattggctatgagatg

SEQ ID NO: 86051 - DNA, 1008 bp, Homo Sapiens
  misc_feature (24)..(24): n is a, c, g, or t
  misc_feature (145)..(145): n is a, c, g, or t
ggcgtggaaccccccgcccaccanggcaactcgccctgggctccttgcaccaggtatttgtcctcggccttggcttcagacagccaaatgcccttgtacaacgacccccgcataatgtgcccttgtcttccctgacaagagggantagagaactgaagattgagcaagtaatgcagtgttagatgaaagaccaactaaacctcagagaagtaacatggtatttctccttcaccctataaatggtttcattctgcaatagcaggccctgtgtagggagcctctccataggaaacagaaagttccaactaacctggctgtctgtcgatctctgctttgtagcctgtctgctgtgcacacatgtacacagaggcgtgtggcgacagtcatgcccctggggaaagaacacagggcaagtgcaaagagcagccctggtctagaccacgtcttctggacccatgctgtgtttgcacttaggggctgcaggcctgtagagctctgccggtccctgccactttgcagaaggaggtcactcaggccctgatatagggacgattccaaggtcaggcagtaagtccgagcgggtcaggggcttgggagcaagcagaactgaaggagcaaagcttgccccctccactgcacctcctgggatctcttccccctccaagcaccattgggagcaaggtgcatgttaggaaaagaaggagggccgtgcccaaaggcacaaagcaattacggtagaatcccaggcacttgcgcaggtgagtcggtgagcaactttggggcgaggggggactttctggcacacctcccatcatgctctgaggggcgactagcaggtgggtccctttctttcacctcctccacaacttcaagggagtgggtgaattggtaaatcttggtccccaggaagctctgaggccaggaaacagaaagagaaagaaagagatagaaacacccccataagaggcttgaccatgcaggtctggcagatcttggggaagtgacttt

SEQ ID NO: 86052 - DNA, 884 bp, Homo Sapiens
  misc_feature (47)..(47): n is a, c, g, or t
  misc_feature (118)..(118): n is a, c, g, or t
cttccttgagggaccctccgcaaccgtccttcctttacaaagaggcncgatgaagttggacgacgtatagagctccaggggcagcggggccgagaacttacatttcccagcgactganccgtggtctgcagggcttccccccagggcatcccaccttgctgtcctcgcacataaagaactggcagagtgtgatgtgggggaagatgttgtgtgccttgttcttcccgcagatctgcttcgactgctgccaaaagtcggaaagcttctgtgctaaggggccggtgggacggaggtagaggacgtactcccggggcagggggtcatccaggaaggggtcaccgacatgggagaataaccagtcacatgctgcctgaacacttcttcctcccgtggatgccaaggctttttgtgcgcgggctctggggaaccccatggagaggagcacgtccagcgccgatccatgcttgatggtgccggggcgctgttggcggttcctccggggggtgactttgctgtacagctcctctctcgcagccatgccgagcggactggggtggccgtactgagccatggctcagcggccagccatcgccagggaaggagcccgagccggatggttcgggaaggaggagggagtcgggctgggccaggggagggggctcggggacccagagccaggcaggaggcggcggcagcggaggcggcgctccgagcttccccagtgtcgggactctgacgcttcctggtgaggccacaggagccagaacgccggcaagcggccgctgcgggaccagcctcagccactcgggcccccggctgcccccagctctgcgcctgcagtagccctgtctcctccgcctcgtgccgaattcgccacccaggcc

SEQ ID NO: 86053 - DNA, 750 bp, Homo Sapiens
ggttaagtaattgcattatcagcctcctccaggtctctggggagaggatgccaatgttaagtagcagcagacttccatctccccttgtgtctgagtgaagactgcctgttttccctgccagtgcgaggacagcaaggtggatgccctgggggaagccctgcagaccacggtcagtcgctggaaatgtaagttctcggccccgctgcccctggagctctatacgtcgtccaacttcatcggcctctttgtaaaggaagacagtgcggaggtcctcaagaagtttgctgctgactttgctgcagaggctgcatccaaaaccgaagtgcatgtggaacctcataagaagcagctacatgtgaccctggcttaccacttccaagccagccacctacccaccctagagaaactggcccagaacattgacgtcaagctagggtgtgaatgggcggctaccatattatctcgggatatccgattggctaaccatgagacattacaggtcatctacccctataccccacaaaatgacgtatgagctggaactgatccccggggacttcatcttcatgtctccaatggagcagaaccagaaccagcagagggttggaatctatggcacgtccttaaccaccggcttgctctggactcctgcctgagaattacattaccaaggctgatgaattgcagcaactggatatgcatggtccttaatacaatcttaaatacatcgtcaatccaactctctcacgg

SEQ ID NO: 86054 - DNA, 582 bp, Homo Sapiens
agggttccagaaagcatcaaacaccaccactcggttggcaccaatcagattcacacccaagcatccggcccttgtagagagaaggaacagccaggtggtgaggttgctgggatcattgaactgattaataagccgctccctctcaaaggcaggggtgctaccatctagccggaagtagctgatgtttcgaacccacttctgtgctccttgcccctcggtaccaggtggacagggtacttctcgttttccaaggaattcctcgatgagagccaaggtggaaagactctggctaaacacaaggatcttgtccccaagcttcacactttcctcaatcaggtggaaaagcagtaccatcttgggagagttttctaggactccagtctggtaattagtcagaaggtccttggcccattcatatgtgacaatgttgttgcctcgctcctggaaagggttgaagccaacgccctgtaggaacttgctattggttgcctctcccatcgaggaagccaaggtgctatcctctcccttgccttttgttccctgtggtggacagcgggcactggtccctgcagagccaagttc

SEQ ID NO: 86055 - DNA, 871 bp, Homo Sapiens
cagtactatagcggtttaaggtagcgaggcctgggtggcgaattcggcacgagggcggtcggggttgttcactggctgtccggggctccgcgcgcgttcgccggcccagctctgtcgctgacgggaggatctgaagccggccgcaggtcaaagagtaaaatgaagtacattctggttactggtggtgttatatcaggaattggaaaaggaatcattgccagcagtgtgggcacaatactcaagtcatgtggtttacatgtaacttcaatcaaaattgacccctacattaacattgatgcaggaacattctctccttatgagcatggtgaggtttttgtgctggatgatggtggggaagtagaccttgacctgggtaactatgagcggttccttgacatccgactcaccaaggacaataatctgaccactggaaagatataccagtatgtcattaacaaggaacggaaaggagattacttggggaaaactgtccaagttgtccctcatatcacagatgcaatccaggagtgggtgatgagacaggcgttaatacctgtagatgaagatggcctggaacctcaagtgtgtgttattgagcttggtggaaacgtggggggacatacgacagcatgccctttaattcgaggcccttccgttccgttccaatttcacggtcaaacgacgagaactcctcgtaacctcacacgtcagtctagttccacagacaagttcaacaggggaaccagaaagataaaactacccagaatagtggtcgaaataaaaggactcgggattcccagaactggtgtattacgtgctcactccctgagaatcgtcacggacaacatcaggtcgcatgtgggtgaccatg

SEQ ID NO: 86056 - DNA, 891 bp, Homo Sapiens
  misc_feature (284)..(317): n is a, c, g, or t
acaggcaaccatgttggccttccaatatatatccctgctttttctaatggtaccaatagttactcctcttccaatggtggttccacctctagctcacctccagaatcaagacgaaagcacgactgtgtgatttgctttgagaatgaggttattgctgccctagttccatgtggccacaacctcttctgcatggaatgtgccaacaagatctgtgaaaagagaacgccatcatgtccagtttgccagacagctgttactcaggcaatccaaattcactcttaacnnnnnnnnnnnnnnnnnnnnnnnnnnnnnnnnnnggactcgtaaaggcatgggtataatggtaccccccagtaaacttcctaatgatttcttatgactgttatcaggctttattgggattaggctaaagttgttagtaaacttataaaaggctgctatggtaacactaaacctaagtggtctcttgtctattagtttggtttgaattattagtactatcctgtagacccagagacatagtttatataagaattgctaaagctgaagttcaacttggctgagtgaagataatcataggttgtgtgagccctatgaaaaagtgtatacgtctaagatttcaaaacaatgggtcccaaagcctaaccactttaagagtttatggagggtacttggcattacagacgattcatacacttccagtgctgccttcttttacactgcccagttttgacaaaaccaggtttgtgtttttattttacaacaacatatgccctaattctgccaggattgccaagtaacttttttaatgcattggtgattaacttaattgggtaaatgataagggctggagggcagttttaacctagatcccctgggttataaatttgg

SEQ ID NO: 86057 - DNA, 778 bp, Homo Sapiens
  misc_feature (617)..(652): n is a, c, g, or t
  misc_feature (662)..(662): n is a, c, g, or t
  misc_feature (692)..(692): n is a, c, g, or t
  misc_feature (724)..(724): n is a, c, g, or t
  misc_feature (740)..(740): n is a, c, g, or t
gggattcctactttggaagcaataggctggctgactttagtccaacaagcccatttagcacaggaaacttctggtttggagatacactaccatctgtaggctcagaagacctagcagttgactctcctgcctttgactctttaccaacatctgctcaaactatctggactccatttgaaccagttaacccactctctggctttgggagtgatccttctggtaacatgaagactcagcgcagaggaagtcagccatctactcctcgtctgtctcctacatttcctgagagcatagaacatccacttgctcggagggttaggagcgacccacctagtacaggcaaccatgttggccttccaatatatatccctgctttttctaatggtaccaatagttactcctcttccaatggtggttccacctctagctcacctccagaatcaagacgaaagcacgactgtgtgatttgctttgagaatgaggttattgctgccctagttccatgtggccacaacctcttctgcatggaatgtgccaacaagatctgtgaaaagagaacgccatcatgtccagtttgccagacagctgttactcaggcaatccaaattcactcttannnnnnnnnnnnnnnnnnnnnnnnnnnnnnnnnnnnggactcgtanaggcatgggtataatggtaccccccagtanacttcctaatggattcttatgactggtatcangctttattgggattangctaaagttgttagtaaacttataaaaggctgctatgg

SEQ ID NO: 86058 - DNA, 922 bp, Homo Sapiens
  misc_feature (353)..(353): n is a, c, g, or t
tacacctctattaaattaaaagtctgtttgcctaattttggtccccgccttccaaactcagtatcctaaagaatcagtaaccaatggtagagggcccttcatgattaggaaaagttgcataaacagtctcatccccttcttcaacttcataaaaagtaatagtttcttccaagcccctgggcatctgtccattccctggggtaaatccatactgggactccttattcacacaactcatctggcggtgactacgtctaaatgaacgagatctataagagaagttatcatagctctggcagcaccttttacctgggcctgggtaaaaatcaactttagggcccggcatgttgtgncctgtttataaaccgagatgaattcctgggcatcccatatccccgaccttgtctcggagatggatgctgaggatgaaaatgttcattagacataacattgccagctgtctgtgagtagtgcattggaggatcgtgcccataatgcatactgtgctgcagcctgggtgggaggagggggtctcccttgccgtaagccatagtcatgtaaacttctttccctcgaattttcttgaacatcttcttctgttgctttatgtccatctctgatataactatttccgggacataacccccaggcattttctggtaacctcttcctttccgactgggcatagcattccaggcaggaacagacatcacttgggtaactggttttaagttagccagtggaacaacatgcttttccgccaattcttcaatgaagactgttactgaattgttctcatttcaacttcctggatatgagcattataatatcttccttctgattccaagcaaacctgacacttgtctcccaaatagtactgtctcccagcatactccatgtaatcagatttttgaagttcttt

SEQ ID NO: 86059 - DNA, 1134 bp, Homo Sapiens
gtactttaccacaccgaggtggcctatgaccccgagggcatcctgggcaccatcaactccatcgtgatggcctttttaggagttcaggcaggaaaaatactattgtattacaaggctcggaccaaagacatcctgattcgattcactgcttggtgttgtattcttgggctcatttctgttgctctgacgaaggtttctgaaaatgaaggctttattccagtaaacaaaaatctctggtccctttcgtatgtcactacgctcagttcttttgccttcttcatcctgctggtcctgtacccagttgtggatgtgaaggggctgtggacaggaaccccattcttttatccaggaatgaattccattctggtatacgtcggccacgaggtgtttgagaactacttcccctttcagtggaagctgaaggacaaccagtcccacaaggagcacctgactcagaacatcgtcgacactgccctctgggtgctcattgcctacatcctctatagaaagaagattttttggaaaatctgatggctcccactgagatgtgctgctggaagactctagtaggcctgcaggcaggactgacagcagccttttgttaaagggaagcattcattaggaaattgactggctgcgtgtttacagactctgggggaagacactgatgtcctcaaactggttaactgtgacacgcctcgccagaactctgcctgtctatttgtgacttacagatttgaaatgtaattgtcttttttcctccatcttctgtggaaatggatgtctttggaacttcattccgaggagataagctttaactttccaaaagggaattgccatgggtgtttttcttctgtggtgagtgaaacaatctgaggtctggttcttgctgaccttgttgccctgcaaacttcctttccacgtgtacgcgcacaccaacacgaaatgccatcactcctactgcggctgctatgaagcttactggttgtgatgtgttataatttagtctgtttttttgattgaatgcagtttaatgtttccagaaagccaaagtaattttcttttcagatatgcaaggcttttggtgggtccaaaaaatgtctatcacaagccatttttttccttttcctctct

SEQ ID NO: 86060 - DNA, 729 bp, Homo Sapiens
accgcgcgccgaattcggcacgaggcggcacgaggtgcaaggctttggtgggtccaaaaaatgtctatcacaagccattttttccttttcctctctcgaaaagttaaaatatctatgtgttattcccaaaccctcttacctatgtatctgcctgtctgtccatcatcttccttcctccctatctctgtgtatctggatggcagccgctgcccaggggagtggctgtggggagggcaggtactgtctttgcctgtgggtccagctgagccatccctgctgggtgatgctgggcaagacccttggcccgtctgggccttggcttcctcacttgtgaaatgagcgggaagatgactctcagttccttccacctcttagacatggtgaggtaacagacatcaaaagcttttctgaaatcttcagaagaaatagttccattacagaaaactcttcaaaataaatagtagtgaaaacttttaaaaactctcattggagtaagtctttttcagatgatcctccccaatggaagcagccgttcctacttgtcatcacacagctaaagaacttgtttcctaggtggtgaattccgggacaaaggacaaacagaaaccccccggcatttgtcatgggaggcaatcctcaccttccggggtgttctgtgggaatttcccggtgtgaggaaaactggcccccagggtttggctttacccccccttccccggcaaaaggccc

SEQ ID NO: 86061 - DNA, 1063 bp, Homo Sapiens
  misc_feature (937)..(980): n is a, c, g, or t
tcattacggtcctaagtagcgaggcctgggtggcgaatccgacacgaggggtcggcggcagtcgggccagacccaggactctgcgactttacatctttaaatggatgagatggctaccactcagatttccaaagatgagcttgatgaactcaaagaggcctttgcaaaagttgatctcaacagcaacggattcatttgtgactatgaacttcatgagctcttcaaggaagctaatatgccattaccaggatataaagtgagagaaattattcagaaactcatgctggatggtgacaggaataaagatgggaaaataagttttgacgaatttgtttatatttttcaagaggtaaaaagtagtgatattgccaagaccttccgcaaagcaatcaacaggaaagaaggtatttgtgctctgggtggaacttcagagttgtccagcgaaggaacacagcattcttactcagaggaagaaaaatatgcttttgttaactggataaacaaagctttggaaaatgatcctgattgtagacatgttataccaatgaaccctaacaccgatgacctgttcaaagctgttggtgatggaattgtgctttgtaaaatgattaacctttcagttcctgataccattgatgaaagagcaatcaacaagaagaaacttacacccttcatcattcaggaaaacttgaacttggcactggaactctgcttctgccattggggtgtcatggttgtgaaacattgggtgcagaaaaatttgaaggggctggggaaaaccctcactctgggttttttggggaactggcttttgggccagaatccatttaaagaatccgggtttttggtttccgccttggacaatttgaaaatttaaagcccacgggaaaatgggaaagacccctcttgggggccttggccttttttaacttccccnnnnnnnnnnnnnnnnnnnnnnnnnnnnnnnnnnnnnnnnnnnncctttaaattgaaaaaaatttgggtcccttccccagagaaagaaaaagcctttttccttgggatttttaaagaaatggggggc

SEQ ID NO: 86062 - DNA, 785 bp, Homo Sapiens
  misc_feature (665)..(665): n is a, c, g, or t
  misc_feature (762)..(762): n is a, c, g, or t
gggggggagggagcgctggctttagagccacagctgcaaagattccgaggtgcagaagttgtctgagtgcgttggtcggcggcagtcgggccagacccaggactctgcgactttacatctttaaatggatgagatggctaccactcagatttccaaagatgagcttgatgaactcaaagaggcctttgcaaaagttgatctcaacagcaacggattcatttgtgactatgaacttcatgagctcttcaaggaagctaatatgccattaccaggatataaagtgagagaaattattcagaaactcatgctggatggtgacaggaataaagatgggaaaataagttttgacgaatttgtttatatttttcaagaggtaaaaagtagtgatattgccaagaccttccgcaaagcaatcaacaggaaagaaggtatttgtgctctgggtggaacttcagagttgtccagcgaaggaacacagcattcttactcagaggaagaaaaatatgcttttgttaactggataaacaaagctttggaaaatgatcctgattgtagacatgttataccaatgaaccctaacaccgatgacctgttcaaagctagttggtgatggaattgtgctttgtaaaatgattaacctttcagttccctgataccattgatgnaaagagcaatcaacaagaagaaaccttacaccccttcatcattcaaggaaaaccttgaactttggccactggaacctctgctttctgcccattgggntggccatgttggtgaacctttga

SEQ ID NO: 86063 - DNA, 587 bp, Homo Sapiens
atgcaagtatccacaatggagagaaaccctatgaatgtaaagaatgcagaaaagcattcagcttgcctacttcctttcatagacatgaaaagactcacactggaaggaaacactatgaatgcaagcaatgtggcaaagctttcacttcttccagttcttttcaatatcatgaaagaacacactagggagaaaccctatcaatgtaagcattgtgcaaaagcctttatttcttccacttcttttcaatatcatgaaaggactcacatgggagagaaaccctatgagtgtatgccaagtgggaaagccttcatttcttctagttcccttcaatatcatgaaaggactcacactggagagaagccctatgaatataagcaatgtgggaaagccttcagatcagcctcgcaccttcaaatgcatggaaggactcacactggagaaaaaccctatgaatgtaagcagtatgggaaagcgttcagacctgacaagattctttgaatacagataatgaatgtaaacaattaactgtttataataactgtatactaacaaatgatattctttctaaataagaagctataatatcc

SEQ ID NO: 86064 - DNA, 729 bp, Homo Sapiens
aaagggttaaattcagagcaagggagaggtagacaggacctgtgaaaagcagtggttagtttagggaaaatacctaggagccctgtgatttggagagtgaaaactctttattaccgttgttactttaactctttccaggatggcctgcctccttcgcgcatttcagagaatttctgcaggggttttcttcttagcactttggggcatggttgtaggtgacaagctgctggtggtccctcaggacggaagccactggcttagtatgaaggatatagttgaggttctcagtgaccggggtcatgagattgtagtggtggtgcctgaagttaatttgcttttgaaagaatccaaatactacacaagaaaaatctatccagtgccgtatgaccaagaagagctgaagaaccgttaccaatcatttggaaacaatcactttgctgagcgatcattcctgactgctcctcagacagagtacaggaataacatgattgttattggcctgtacttcatcaactgccagagcctcctgcaggacagggacaccctgaacttctttaaggagagcaagtttgatgctcttttcacagacccagccttaacctgtggggtgatcctggctgagtatttgggcctaccatctgtgtacctcttcaggggttttccgtgttccctggagcatgcattcagcagcagcccagaccctgtgtcctacatacgcccaggtaggca

SEQ ID NO: 86065 - DNA, 1398 bp, Homo Sapiens
gaggccccgtccagaggatgtacaggtcgtggtcatcctcctccagaaaaggtaagcttctcccgctgcgtggcgtaggccacagccagcacattccccagcgacacgttcttaaagccttccgtctgcctcagatcatcgtagttggggatgttgatgccggcagggatgccggagccagcgaaggtgagaacatccagggagttgaagtcaggggtgaggaacttgtccttctcaaaggttgggggccagggcagctccttcagcagctgctctgcgctcgccaccagccgctcaaacttggcactcatggccttgttcaccacagctacgaaaccttcaaattctcctcgggaaccaaaggggtcgcggtagctctcgatgaacccgatgtaactctccacgatggggcctttgtcctggatccagaagcgggagcccctcttgtgggcctcgatggagccctgggtgaagctctctatatactgggccagcatctgcccctggtggctgttggctgcataggccttggctttctccagctgctccaccaccttctggaggatgggcgcgtagtccccccgggtcacctggaaagggcttccccggaattcatagctcttcagcttggaagtcacctcagagtccagggaaggctctgagccaagcacagaagccagccgcacctcgtagtagggcttcccttctccatcgacctctttgaagagccgggtgttgtaggcactgaggttctgtgagtccagaaagtcctgggccaatttggcatcttccatggtacaattcccagagaaataggtggtgattccctccttccccagtccgaggtgtcgaagccttggctccagagagaacataagctccccgcaggtctgccagaggcccctgacttcttctgggtgctgctgagcagcctcactccctaggatcacccgttccagcttttccttgggcaagttgggaacaaacttggtgtcaccaaaggacttgtagttgcccatgttggagtaaacacccgcggcatagaccaggaacgcctgatactcctcctcggtaaggccttcagccagggcatgttggcgcagctggtcggggtcctgggcgcggaagaggcggctgagcagagcatagatgtagggggcctcaggggaggtctgaagcagcacagccaggcctccgtaccaggcggcacgggacaggtggtaggcatagaggcgctctgtgggtgacagcaggcggaaggcctcacggcagtccaggctagacacgccgatgtcattgggcaggatgtactgggtgtccgccatgggccctgctgcagcagctgctccgttcgcaaacctcgtgccgaattcggcgcgccgtcgacttcatactctc

SEQ ID NO: 86066 - DNA, 1024 bp, Homo Sapiens
aagacagcttggacacctttctctgcattgctttttggctttctcttactgtctgatttccatacttagcaggagactttttaaatggtcaatgactggcttccctttggggaaacacatgacgatgatgacaacattaaattcaaatttgtaacttaaaaacgaacagtttgttgacaaagatgtgactaagtaccacacatacgcagatatatgcctttgggtttccatgtgcaatgtgggccagggccagagccagggccagggcaggctgcagcttctctggagatctctgagccagcctcagctttggtgctccttaccctgagcatctggggccagtagctttataaacttcccttaagtgtgaacaacaggcaccttggggccgcgggaacagtccttttatgagcattaccctgctttcaggggcttagctcagacctgcaaaaggaatgtgctacaacttttcactcataaataatggtcctgtacatggcaagtaagagaactcaaagaagaatcaaagccagagaaagaacacacagctctaaaacctttcatccttcctttgacggctggtgtgaggttccagtttggtgacgagagaggcaactatttggttggtgaaaggcttgcagatcgagagaggacgtcagctgtttgtttcacatgagttctgatccttggcagaatctgtggtggggcacagcctgggggcgggcacagctgaacccccatgcaaacacttgtccatggaagagacttttgccacagctggaactgctgggcaggcacaaatgcacctgccagagatgtcctgagaaaaagtgtctgttgcaaaataataattaataatacaaataaatctgaatgcaccaggaggagaggaagcaggaccggttacccaggtttgccctgggattctcttaaggcctcctccagtttctgcctaaacttgtcatacttcttttgcacttgttggattttgtcctgctcctctttttccaggattgttaagaag

SEQ ID NO: 86067 - DNA, 2000 bp, Homo Sapiens
tcaggctgggtgtcaatcggcacgaggcaagatggcggacctgattcgcctccgaagctgtcaggggtgcagcagccgtctgagggggtgggaggtggccgctgctccgaaatctccgctgagctcattcgctccctgacagagctgcaggagctggaggctgtatacgaacggctctgcggcgaggagaaagtggtggagagagagctggatgctcttttggaacagcaaaacaccattgaaagtaagatggtcactctccaccgaatgggtcctaatctgcagctgattgagggagatgcaaagcagctggctggaatgatcacctttacctgcaacctggctgagaatgtgtccagcaaagttcgtcagcttgacctggccaagaaccgcctctatcaggccattcagagagctgatgacatcttggacctgaagttctgcatggatggagttcagactgctttgaggagtgaagattatgagcaggctgcagcacatattcatcgctacttgtgcctggacaagtcggtcattgagctcagccgacagggcaaagaggggagcatgattgatgccaacctgaaattgctgcaggaagctgagcaacgtctcaaagccattgtggcagagaagtttgccattgccaccaaggaaggtgatctgccccaggtggagcgcttcttcaagatcttcccactgctgggtttgcatgaggagggattaagaaagttctcggagtacctttgcaagcaggtggccagtaaagctgaggagaatctgctcatggtgctggggacagacatgagtgatcggagagctgcagtcatctttgcagatacacttactcttctgtttgaagggattgcccgcatttgtggagacccaccagccaatagtggagacctattatgggccagggagactctataccctgatcaaatatctgcaggtggaatgtgacagacaggtggagaaggtggtagacaagttcatcaagcaaagggactaccaccagcagttccggcatgttcagaacaacctgatgagaaattctacaacagaaaaaatcgaaccaagagaactggaccccatcctgactgaggtcaccctgatgaatgcccgcagtgagctatacttacgcttcctcaagaagaggattagctctgattttgaggtgggagactccatggcctcagaggaagtaaagcaagagcaccagaagtgtctggacaaactcctcaataactgccttttgagctgtaccatgcaggagctaattggcttatatgttaccatggaggagtacttcatgagggagactgtcaataaggctgtggctctggacacctatgagaagggccagctgacatccagcatggtggatgatgtcttctacattgttaagaagtgcattgggcgggctctgtccagctccagcattgactgtctctgtgccatgatcaacctcgccaccacagagctggagtctgacttcagggatgttctgtgtaataagctgcggatgggctttcctgccaccaccttccaggacatccagcgcggggtgacaagtgccgtgaacatcatgcacagcagcctccagcaaggcaaatttgacacaaaaggcatcgagagaactgacgaggcgaagatgtccttcccggtgactctgaacaacgtggaagtctgcagtgaaaacatctccactctgaaagaagaccactggagagtgactgcaccaagctcttcagccagggcattggaggggagcaggcccaggccaagtttgacagctggctttctgacttggccgccgtgtccaacaaattccgagacctctggaggaagggctgacggagctcaacagcacaggcatcaagccacaggtgcagccttggatcaacagctttttctccgtctcccaaaacatcgaggaggaagaattcaatgactatgaggccaacgacccttgggtacaacagttctctctccctgca

SEQ ID NO: 86068 - DNA, 823 bp, Homo Sapiens
  misc_feature (740)..(740): n is a, c, g, or t
  misc_feature (746)..(746): n is a, c, g, or t
  misc_feature (752)..(752): n is a, c, g, or t
taaggggggaagagtatgaagtcgaggcgcgccgaattcggcacgagggggaccaagatggcggaccttgattcgcctccgaagctgtcaggggtgcagcagccgtctgagggggtgggaggtggccgctgctccgaaatctccgctgagctcattcgctccctgacagagctgcaggagctggaggctgtatacgaacggctctgcggcgaggagaaagtggtggagagagagctggatgctcttttggaacagcaaaacaccattgaaagtaagatggtcactctccaccgaatgggtcctaatctgcagctgattgagggagatgcaaagcagctggctggaatgatcacctttacctgcaacctggctgagaatgtgtccagcaaagttcgtcagcttgacctggccaagaaccgcctctatcaggccattcagagagctgatgacatcttggacctgaagttctgcatggatggagttcagactgctttgaggagtgaagattatgagcaggctgcagcacatattcatcgctacttgtgcctggacaagtcggtcattgagctcagccgacagggcaaagaggggagcatgattgatgccaacctgaaattgctgcaggaagctgagcaacgtctcaaagccattgtggcagagaagtttgccattgccaccaaggaagtgatctgccccagctggagcgcttcttcagatcttccactgctgggttgcatgangagggnatagangaagtctcggagtactttgcagcaggtggcagtaagctgaggaaatcgctcatgtgctgggacgactgatg

SEQ ID NO: 86069 - DNA, 1557 bp, Homo Sapiens
ggggaggggaagaggatgtgatcatgcgaccgccagcagaagggaaattgtgaaagcgacctgctgtagaaaaggcggcccacagccacctcagcatgcagaggaggcccagctgctgagaggagttgcctgagagtgacctttgcatctgcctgtccagccagcatggaaccaaagcggatcagagagggctaccttgtgaagaaggggagcgtgttcaatacgtggaaacccatgtgggttgtattgttagaagatggaattgaattctataagaagaaaagtgacaacagccccaaaggaatgatcccgctgaaagggagcactctgactagcccttgtcaagactttggcaaaaggatgtttgtgtttaagatcactacgaccaaacagcaggaccacttcttccaggcagccttcctggaggagagagatgcctgggttcgggatatcaagaaggccattaaatgcattgaaggaggccagaaatttgccaggaaatctaccaggaggtccattcgactgccagaaaccattgacttaggtgccttatatttgtccatgaaagacactgaaaaaggaataaaagaactgaatctagagaaggacaagaagatttttaatcactgcttcacaggtaactgcgtcattgattggctggtatccaaccagtctgttaggaatcgccaggaaggcctcatgattgcttcatcgctgctcaatgaggggtatctgcagcctgctggagacatgtccaagagtgcagtggatgggaactgctgaaaaaccctttcctggacaaccctgatgccttctactactttccagacagtgggttcttctgtgaaggagaattccagtgatgatgatgtgattctgaaagaacgaattcagaggggtcattatcaagcagggatgtttactgaagcaggggcatagaaggaaaaactggaaagtgaggaagttcatcttgagagaagaccctgcctacctgcactactatgaccctgctgggccagaagatcccctgggagcaattcacttgagaggctgtgtggtgacttcagtggagagcaactcaaatggcaggaagagtgaggaagagaacctttttgagatcatcacagcagatgaagtgcactatttcttgcaagcagccacccccaaggagcgcacagagtggatcaaagccatccagatggcctcccgaactgggaagtaaagagactcctgcattcctcctcccctcctgagggaagcccatggacaagctcagtccaggacctgtccacttctgtgacaaatcaacgggaaacagcccaggggtgggaagttttcatttgcaggggggtctgaatgtaactcaccatgtggtgtgcaaggttcccctgcattgtattgctcactgcagcccctctgcccctatccatgacccccaagcagatataacaagctgtgcagcctcagtaggctgcttgccctctccaggcctcagggcctcttctggaaaatgaagaaattcaactagtagattcctgaggtccccccagctaaaaa

SEQ ID NO: 86070 - DNA, 1348 bp, Homo Sapiens
gctggagcagcgctggggtttcggcctggaggagttgtacggcctggcactgcgcttcttcaaagaaaaagatggcaaagcatttcatccaacttatgaagaaaaattgaagcttgtggcactgcataagcaagttcttatgggcccatataatccagacacttgtcctgaggttggattctttgatgtgttggggaatgacaggaggagagaatgggcagccctgggaaacatgtctaaagaggatgccatggtggagtttgtcaagctcttaaataggtgttgccatctcttttcaacatatgttgcgtcccacaaaatagagaaggaagagcaagacaaaaaaaggaaggaggaagaggagcgaaggcggcgtgaagaggaagaaagagaacgtctgcaaaaggaggaagagaaacgtaggagagaagaagaggaaaggcttcgacgggaggaagaggaaaggagacggatagaagaagaaaggcttcggttggagcagcaaaagcagcagataatggcagctttaaactcccagactgccgtgcagttccagcagtatgcagcccaacagtatccagggaactacgaacagcagcaaattctcatccgccagttgcaggagcaacactatcagcagtacatgcagcagttgtatcaagtccagcttgcacagcaacaggcagcattacagaaacaacaggaagtagtagtggctgggtcttccttgcctacatcatcaaaagtgaatgcaactgtaccaagtaatatgatgtcagttaatggacaggccaaaacacacactgacagctccgaaaaagaactggaaccagaagctgcagaagaagccctggagaatggaccaaaagaatctcttccagtaatagcagctccatccatgtggacacgacctcagatcaaagacttcaaagagaagattcagcaggatgcagattccgtgattacagtgggccgaggagaagtgggtcactgttcgagtacccacccatgaagaaaggatcatatctctcttgggaatttgccacagacaattatgacattgggtttggggtggatttcgaatggacagactctccaaacactgctgtcagcgtgcatgtcagtgagtccagcgatgacgacgaggaggaagaagaaaacatcggttgtgaagagaaagccaaaaagaatgccaacaagcttttgctggatgagattgtgcctgtgtaccgacgggactgtcatgaggaggtgtatgctggcagccatcaatatccagggagaggagtctatctcctcaagtttgacaactcctactctttgtggcggtcaaaatcagtctactaca

SEQ ID NO: 86071 - DNA, 587 bp, Homo Sapiens
gaatacactttgctggcacctgtgaataatgcattttctgatgatactctcagcatggatcagcgcctccttaaattaattctgcagaatcacatattgaaagtaaaagttggccttaatgagctttacaacgggcaaatactggaaaccatcggaggcaaacagctcagagtcttcgtatatcgtacagctgtctgcattgaaaattcatgcatggagaaagggagtaagcaagggagaaacggtgcgattcacatattccgcgagatcatcaagccagcagagaaatccctccatgaaaagttaaaacaagataagcgctttagcaccttcctcagcctacttgaagctgcagacttgaaagagctcctgacacaacctggagactggacattatttgtgccaaccaatgatggctcttaagggaatgactagtgaagaaaaagaaattctgatacgggacaaaaatgctcttcaaaacatcattctttatcaactgacaccaggaggtttcaatggaaaaggatttgaacctgggggtactaacattttaaagcaccacacaaggaagcaaaattttctgaaag

SEQ ID NO: 86072 - DNA, 903 bp, Homo Sapiens
tgagcaaaatcccacagtggaaactcttaagcctctgcgaagtaaatcattcttgtgaatgtgacacacgatctctccagtttccatatgttgagattctacttattcatcagtttgttgtgcttgtcaagatcagacgcagaagaaacatgtccttcattcaccaggctgagctttcacagtgcagtggttggtacgggactaaatgtgaggctgatgctctacacaaggaaaaacctgacctgcgcacaaaccatcaactcctcagcttttgggaacttgaatgtgaccaagaaaaccaccttcattgtccatggattcaggccaacaggctcccctcctgtttggatggatgacttagtaaagggtttgctctctgttgaagacatgaacgtagttgttgttgattggaatcgaggagctacaactttaatatatacccatgcctctagtaagaccagaaaagtagccatggtcttgaaggaatttattgaccagatgttggcagaaggagcttctcttgatgacatttacatgatcggagtaagtctaggagcccacatatctgggtttgttggagagatgtacgatggatggctggggagaattacaggcctcgaccctgcaggccctttattcaacgggaaacctcaccaagacagattagatcccagtgatgcgcagtttgttgatgtcatccattccgacactgatgcactgggctacaaggagccattaggaaacatagacttctacccaatgggaggattggatcaacctggctgccccaaaacataatggggaggatttcagtattttaatgtggacaccagaggtctgtatacctgtacctgtcttccctgagagagagctgcaccatcactggcgtattcctgtgactcc

SEQ ID NO: 86073 - DNA, 1117 bp, Homo Sapiens
  misc_feature (962)..(1021): n is a, c, g, or t
ggccctgatagctgtaccgcttatgcccggaaccccggattgttattccccatgccagagctaacttgattgttgggtagtctttaaaacccggaaggtggccaccagatggatttgtgcaagaagaacttgggggttttaaggacagcaaatgatcttagggcgtaattggactgttttttcctgagttcttgccacactggccaagaaaatgctgcatcgggcccttattccagagagtgccagacctgggcgccaaaggtcgtggtcaaaaaggaaaggagccctcatggactccagggtcagaagttccctcgggaaaccagcaggaggtgggaaaagagccccattagggcagtagatggagcaacagcactgagtgagatttcagggggccacagcaatggggaggtggctaccagtggaaatggggtcccctgctccaggtgcttaggccaggcatcccgtccccccattgagagtcctggaattccaaagaagtgaagcatctgagggttggggctgggggcagatgtcagggctcagggtcttagcaggaggcgtgttcctggccacttgagccacaggaaggggaccaggcgccgggtgaaggtggcagtgaaggtgtagatgagttcctgtgactctgcgttggtgaaagtcacggtgcccccttcataatccagggcgatgcccactctccggggccgcagtgctgggaaaagctcagcctcggggctggtgttggcccagatgccggaggaggagaggcgcagcgcccacacgccatcctctggccgcagggagaggtctcccttcctcttcacagagtctctagccacccccaccatgcagctttccagaacttcctcctcttcctcctcctcttcttcctcttcatcgcccaacgattcctcatcttcgtccgtttcccagtcgtcatatccatccccatagccggnnnnnnnnnnnnnnnnnnnnnnnnnnnnnnnnnnnnnnnnnnnnnnnnnnnnnnnnnnnncagaccagccctccctctccacttccacttcccagtagaccttgccccaggtgaagcccttctgccacacgctcacagtcaactgctgggtgcgtt

SEQ ID NO: 86074 - DNA, 1525 bp, Homo Sapiens
cagtcgacggtaccggacatatgcccgggaattcggccattacggccgggggatgagtggccgcgcggaaggagctggagacggtcgtagctgcggtcgccccgagaaaggtttacaggtacatacattacacccctatttctacaaagcttggctattagagcattatgaacattaatgacctcaaactcacgttgtccaaagctgggcaagagcacctactacgtttctggaatgagcttgaagaagcccaacaggtagaactttatgcagagctccaggccatgaactttgaggagctgaacttctttttccaaaaggccattgaaggttttaaccagtcttctcaccaaaagaatgtggatgcacgaatggaacctgtgcctcgagaggtattaggcagtgctacaagggatcaagatcagctccaggcctgggaaagtgaaggacttttccagatttctcagaataacagtagcagttcttcttctagctggtgggcaggggacaagactcggcgttgcatatcctaagcgggatgtatgcatgtcggtttgccatcccgtaagacactttttcagattcaagcagagcgtatcctgaagctacagcaggttgctgaaaaaatattatggcaacaaatgcattattccatggtatataatgaccagtggcagaacaatggaatctacaaaggagttcttcaccaagcacaagtactttggtttaaaaaaagagaatgtaatcttttttcagcaaggaatgctccccgccatgagttttgatgggaaaattattttggaagagaagaaaaagtttctatggctccagatgggaatggtggtctttatcgggcacttgcagcccagaatattgtggaggatatggagcaaagaggcatttggagcattcatgtctattgtgttgacaacatattagtaaaagtggagaccacgggtcattggatttctgcattcagaaaggagcagactgtggagcaaaggtggtagagaaaacgaaacctacagaaacagtttggagtggtttgccgagtggatggagtttaccaggtggtagaatatagtgagatttccctgcgcaacagctcaaaaacgaagctcagaacggacgactgatgttcaatgcggggaacattgccaaccatttcttcactgtaccatttctgagagatgttgtcaagtatgggcaagatgggggccttttaaaattatatttattgttaatcagaaactaagacacttgagagggatgcagacaccccaagtccatatcccacagaattcatctttcctgaggatcacttatcaaatggacatttatctcatgttgtgattgtttttagtaagatgtattgtaaggtgggaatcatcggagcccattccccagcgcattaatgggaggccaaagcatttctcccttctcaccctcccacccccaactatgtgctaggttctgttgaagcaaagcataagatatgaaactttctttaccacagctgtgagct

SEQ ID NO: 86075 - DNA, 2037 bp, Homo Sapiens
  misc_feature (1718)..(1718): n is a, c, g, or t
  misc_feature (1772)..(1917): n is a, c, g, or t
  misc_feature (1983)..(1983): n is a, c, g, or t
  misc_feature (2017)..(2018): n is a, c, g, or t
acttttcctttcccctttcgtaaaagcacagacctaacagcaccctgggtggaaacctcttcagcatttgcttggaatcagtaagctaaaaacaaaatcaaccgggaccccagcttttcagaactgcagggaaacagccatcatgagtgaggtcaccaagaattccctggagaaaatccttccacagctgaaatgccatttcacctggaacttattcaaggaagacagtgtctcaagggatctagaagatagagtgtgtaaccagattgaatttttaaacactgagttcaaagctacaatgtacaacttgttggcctacataaaacacctagatggtaacaacgaggcagccctggaatgcttacggcaagctgaagagttaatccagcaagaacatgctgaccaagcagaaatcagaagtctagtcacttggggaaactacgcctgggtctactatcacttgggcagactctcagatgctcagatttatgtagataaggtgaaacaaacctgcaagaaattttcaaatccatacagtattgagtattctgaacttgactgtgaggaagggtggacacaactgaagtgtggaagaaatgaaagggcgaaggtgtgttttgagaaggctctggaagaaaagcccaacaacccagaattctcctctggactggcaattgcgatgtaccatctggataatcacccagaaaaacagttctctactgatgttttgaagcaggccatttgagctgagtcctgataaccaatacgtcaaggttctcttgggcctgaaactgcagaagatgaataaagaagctgaaggagagcagtttgttgaagaagccttggaaaagtctccttgccaaacagatgtcctccgcagtgcagccaaattttacagaagaaaaggtgacctagacaaagctattgaactgtttcaacgggtgttggaatccacaccaaacaatggctacctctatcacccagattgggtgctgctacaaggcaaaagtaagacaaatgcagaatacaggagaatctgaagctagtggaaataaagagatgattgaagcactaaagcaatatgctatggactattcgaataaagctcttgagaagggactgaatcctctgaatgcatactccgatctcgctgagttcctggagacggaatgttatcagacaccattcaataaggaagtccctgatgctgaaaagcaacaatcccatcagcgctactgcaaccttcagaaatataatgggaagtctgaagacactgctgtgcaacatggtttagagggtttgtccataagcaaaaaatcaactgacaaggaagagatcaaagaccaaccacagaatgtatccgaaaatctgcttccacaaaatgcaccaaattattggtatcttcaaggattaattcataagcagaatggagatctgctgcaagcagccaaatgttatgagaaggaactgggccgcctgctaagggatgccccttcaggcataggcagtattttcctgtcagcatctgagcttgaggatggtagtgaggaaatgggccagggcgcagtcagctccagtcccagagagctcctctctaactcagagcaactgaactgagacagaggaggaaaacagagcatcagaagcctgcagtggtggttgtgacgggtaggacgataggaagacagggggccccaacctgggattgctgagcaggnaagctttgcatgttgctctaaagtacatttttaaagagttgtttttttggccgnnnnnnnnnnnnnnnnnnnnnnnnnnnnnnnnnnnnnnnnnnnnnnnnnnnnnnnnnnnnnnnnnnnnnnnnnnnnnnnnnnnnnnnnnnnnnnnnnnnnnnnnnnnnnnnnnnnnnnnnnnnnnnnnnnnnnnnnnnnnnnnnnnccacgcccttgggtgggcctgggcaccctgttaatttcccagcccaaccttggggaaagccttaanagccagggaaaaatgggcgcgtgaacaccctggnnaaagggaaaaaaaggtttt

SEQ ID NO: 86076 - DNA, 584 bp, Homo Sapiens
aagcctcatgaataaggctgttgagtaccacctccaccggatcaaaattaacacctggtgcactttctacagcaccttttttcttctccacaattgagtggaatcttgatgctttcaagcctgtatctagatctccaggtcatcaggccgaggtctgctgctggcacgactgctggctctgcttgaaggtcgctggtccacaatggctagtggctgtaattcatgtccagcagctagttttttagaattctggttatcatcggggaaatcaaaaggctgtgcatgggagttagagatggtgcttcccgcctgccccattcgattttgttctgcactgtaattagcccagttttgctcacttgcttgcttgttgtaattgcggcaagaagaattgtttctgtcgccagtaaccagcttgtacccaggaggagacataggcgagaggggagcggttggtgaggagcagccattgaaataagcatatttttgagacccacagtctttggcagggctcagcgcaccactggtcgcatggtaagggtcgctctttcccttaacccgatccttaacgcccttgaagaaaa

SEQ ID NO: 86077 - DNA, 595 bp, Homo Sapiens
  misc_feature (25)..(25): n is a, c, g, or t
  misc_feature (559)..(559): n is a, c, g, or t
ctgaaattttaaaaccacaccaggngcggaaaaatgacattcagaaccagcaaacactgaatttctcttgttgttttaactctgccacaagaatgcaatttcgttaacggagatgacttaagttggcagcagtaatcttcttttaggagcttgtaccacagtcttgcacataagtgcagatttggctcaagtaaagagaatttcctcaacactaacttcactgggataatcagcagcgtaactaccctaaaagcatatcactagccaaagagggaaatatctgttcttcttactgtgcctatattaagactagtacaaatgtggtgtgtcttccaactttcattgaaaatgccatatctataccatattttattcgagtcactgatgatgtaatgatatattttttcattattatagtagaatatttttatggcaagatatttgtggtcttgatcatacctattaaaataatgccaaacaccaaatatgaattttatgatgtacactttgtgcttggcattaaaagaaaaaaacacacatcctgggagtctgtaagttngtttttttgttactgtagggcttcaaaagttaaggg

SEQ ID NO: 86078 - DNA, 757 bp, Homo Sapiens
ctgatacgaatcgagctcggtaccgattacgctctagacgggtctccaaatttctcataggaatcccggatcaggtccgaaatatcagtcacagggtagggctcctggtcgtcggagaaaaaggcatggtggctgccaactgggggccctgggctgtcctcattcttaatgtgatctagaaacctgctgaggatcatcaaggcctggccatcatccttgctgctgcacaggtcctcagcattggcctcaagcacagccagtcccagctggaagatggctttgatgccatcatagaagaagcagtctaccacattcaccgcactctctagaggcatgatgctgaggaacagggtcaggaaccacgagagagagacggacgccagggctgagaggtcgttcatgtgctctgccagctctgggagatgacccttgatgagctcctcgaagacagactggtcaacttgtgccccgatcactcggtggttgaagtaatcgggcagcatccgctcacacacagcaaccaacagccagaaggcttcctcctccttggtgtacagcagcagcacggaggtcaggatgttcatggactgctcgggggtcaaggagggcagttactgactggcccatgtgatgccacagagatgttacaagcatccaagcccaaaaacccacaaaagtaaagatttcataggtgagagatccagctacaccaaccacactgacactgtacagtggatgaccgtcctctcgagcgatc

SEQ ID NO: 86079 - DNA, 1882 bp, Homo Sapiens
gggggcgacccgacggcgagaccccgccccatccccgactgcctgaaccgcgccaggagacggaccgcaagtccagcgtacccacagacgactcaggcgggagacgagcggtgtcatggccgccgacagtgacgatggcgcagtttcagctcccgcagcttccgacggtggtgtcagcaaaagcacaacatctggggaggagctagtagtccaggttcccgtagtggatgtgcaaagcaacaacttcaaggagatgtggccatccctcctgctagccataaagacagctaatttcgtggctgtggacacggagctgagtgggcttggggacaggaagagtttgctgaaccagtgcattgaggaacgttacaaggccgtgtgtcatgctgccaggacccgttctatcctttccctgggcctcgcctgcttcaagcggcagccagacaagggtgaacattcctatctggctcaagtgttcaatctcactctgctgtgcatggaggagtatgtcatagaaccaaagtctgtgcagttcctgatacagcatggcttcaacttcaaccagcagtatgcccaaggcatcccctaccataagggcaatgacaagggtgatgagagccagagccagtcagtacggaccctattcctggagctaatccgagcccgccggcccctggtgctacacaatggccttatagacttggtgttcctgtaccagaacttctatgcacacctccctgagagtctgggaaccttcaccgctgacctgtgtgagatgttcccagcaggcatttatgacaccaaatatgctgctgagtttcatgcccgtttcgtggcctcctacttagaatatgccttccggaaatgtgaaacggaaaatgggaagcagcgggcagctggcagcccacaccttaccctggagttctgcaactatccttccagcatgagggaccatattgattaccgctgctgcctgcccccagcaacccaccgtcctcatcccaccagcatctgtgacaacttctcggcttatggctggtgccccctgggaccacagtgtcctcagtctcacgatattgaccttatcattgacactgatgaggctgcggcagaggacaagcggcgacggcgacgacgtagggaaaaacggaagagggctttattgaacctaccggggacacagacctctggggaagctaaggatggtcctcccaagaagcaggtctgtggggatagcatcaagcctgaagaaaccgagcaggaggtggctgccgatgaaactaggaacctgcctcactccaagcaaggcaacaaaaatgacttagagatggggattaaggcagcaaggcctgaaatagctgatagagctacctcagaagtgccagggagccaagccagtcctaacccagtgcctggggatggattgcaccgggctggttttgatgcctttatgacaggttatgtgatggcctatgtggaagtgagccaggaccgcagccctgcagctctggaccctggctccctgaatgccacaataaggtatatttgagtggcaaagctgtacccctcacagtggccaagagccagttctctcgttcctccaaagcccacaatcagaagatgaagctcacttggggcagtagctgatgcaacttccaccttgctctcaggtggaacagaggtattttgggtctctctagcctgaaatgtcatcctcaactgctactgagtttaggggagggggaatgtcttgacagacatcactgcattgccctggaccgcctcctttatcccagtgtttgaggtacaagtaagaaggctgaccagcacctgtaacactgactttatttttaagtctgaaaatgtcttgggaaagttttac

SEQ ID NO: 86080 - DNA, 771 bp, Homo Sapiens
gccgggcgcgctagagctcgcgggaggccatcatgaggaagccacgagcagccgtgggaagtggtcacaggaagcaggcagccagccaggaagggaggcagaagcatgctaagaacaacagtcaggccaagccttctgcctgtgatgagacgtagctgaagtcacagccttccgagggagcctgctaagctggtacgaccaagagaaacgggacctaccatggagaagacgggcagaagatgagatggacctggacaggcgggcatatgctgtgtgggtctcagaggtcatgctgcagcagacccaggttgccactgtgatcaactactataccggatggatgcagaagtggcctacactgcaggacctggccagtgcttccctggaggaggtgaatcaactctgggctggcctgggctactattctcgtggccggcggctgcaggagggagctcggaaggtggtagaggagctagggggccacatgccacgtacagcagagaccctgcagcagctcctgcctggcgtggggcgctacacagctggggccattgcctctatcgcctttggccaggcaaccggtgtggtggatggcaacgtagcacgggtgctgtgccgtgtccgagccattggtgctgatcccagcagcacccttgtttcccagcagctctggggtctagcccagcagctggtggacccagcccggccaggagatttcaagcaagcagccatggagctagggggccacagtgtgtaccccagagagcccac

SEQ ID NO: 86081 - DNA, 1075 bp, Homo Sapiens
  misc_feature (677)..(677): n is a, c, g, or t
tcccgggatgaacgcggggcctccgtgttctgctgtcttcatcagcgtgggccgcgggccatcatgaggaagccacgagcagccgtgggaagtggtcacaggaagcaggcagccagccaggaagggaggcagaagcatgctaagaacaacagtcaggccaagccttctgcctgtgatggcctggccaggcagccggaagaggtggtattgcaggcctctgtctcctcataccatctattcagagacgtagctgaagtcacagccttccgagggagcctgctaagctggtacgaccaagagaaacgggacctaccatggagaagacgggcagaagatgagatggacctggacaggcgggcatatgctgtgtgggtctcagaggtcatgctgcagcagacccaggttgccactgtgatcaactactataccggatggatgcagaagtggcctacactgcaggacctggccagtgcttccctggaggaggtgaatcaactctgggctggcctgggctactattctcgtggccggcggctgcaggagggagctcggaaggtggtagaggagctagggggccacatgccacgtacagcagagaccctgcagcagctcctgcctggcgtggggcgctacacagctggggccattgcctctatcgcctttggccaggcaaccgngtggtggtggatggcaacgtagcacgggtgctgtgccgtgtccgagccattggtgctgatcccagcagcacccttgtttcccagcagctctgggggctagcccagcagctggtggacccagcccgggccaggaaattcaaccaagcagccatgggagctaggggccacagtggtgtaccccacaacgcccactgtgcagccagtggcccctgtggaagagccctgtgccgggcacgccccaaaagtgggaccaggaaaagcttcttagcctccggggagcctggtccggcagtcctggaaatgggaaaaaatgtgcctccccacacctggaacaagggccccctgtggcctgccctcccttcgagcccctgggaaccaaaaccctgggaaaggggtca

SEQ ID NO: 86082 - DNA, 1980 bp, Homo Sapiens
tagtctagtacgagggctggtgttgaattcggcacgagggttgaggcggcggcatctttctcgaggagctctcctgggcggctgaagaaggagcttcttctccggagtgcgccggcggtggcgcctgcggacctaactagctccaggttaggccgagctttgcgggaaagcagcggacttgaaaatactggaaatctgtccggatccaaattattttgcaagccagatgagtaaccagagggcatgaaaggttgagaacatttgacttccctgcaaaccttggtatagatcacttccttttctgtaggaaaggaaaggcaccaaagagcacaatgagtacaagaaagcgtcgtggtggagcaataaattctagacaagctcagaagcgaactcgggaagcaacctccacccccgagatctccttggaagcagaacccatagaactcgtggaaactgctggagatgaaattgtggacctcacttgtgaatctttagagcctgtggtggttgatctgactcacaatgactctgttgtgattgttgacgaaagaagaagaccaaggaggaatgctaggaggctgccccaggaccatgctgacagctgtgtggtgagcagtgacgatgaggagttgtccagggacagagacgtatatgtgactacccatactcccagaaacgccagggatgagggcgctacaggcctcaggccctcaggtactgtcagttgtcccatctgcatggacggatactcagagatcgtgcagaatggacgtctcatcgtttccacagaatgcggacatgtcttctgtagccagtgcctccgtgattccctgaagaatgctaatacttgcccaagcttgtaggaacaaagatcaaccacaaacggtaccaccccatttatatatgaagtattcagagccccccaggagagacggatggacagacagacagccaggttctccagtggtatctgcctccattttcctgagatcaaaaagactgtttcgaaaccaacatctgatatgtaaactgctcttttgtttccaaccccttccttttgttatctccagtttgatgctatggcgctggacccagggccctcccaggccatctctgttcctctggggtggtccagttctagagtgggagaaagggagtcaggcgcattgggaatcgtggttccagtctggttgcagaatctgcacatttgccaagaaattttccctgtttggaaagtttgccccagctttcccgggcacaccaccttttgtcccaagtgtctgccggtcgaccaatctgcctgccacacattgaccaagccagacccggttcacccagctcgaggatcccaggttgaagagtggccccttgaggccctggaaagaccaatcactggacttcttcccttgagagtcagaggtcacccgtgattctgcctgcaccttatcattgatctgcagtgatttctgcaaatcaagagaaactctgcagggcactcccctgtttcctaagaacgaaaaagtgcaataaaggccattcgttacctacttttcagcagcccacaagatgtagcactattagtgtccccctcagaggcttaatgttgcctgtggagcagtgcccatcccagcccgtttctgcccaccagttgttctcaggaaccttacccatgctccagcgtcctttcacctggcacaggacatgcaagataaataggggcaggcacgtgttttgggggtccctctctttttctggataaaatccctccccgggtttggccacacggcccctccaagttcctccagtttcccaactggccttaacgtcctgcccccccgctggaagataacttgaaaaaggtgggtggggcccctaacattgggggggcctttaattacggccggctttccgtttccccgggctttttttggccccccggggtcacctgggttggccccccccagggtttcccggaaaaac

SEQ ID NO: 86083 - DNA, 684 bp, Homo Sapiens
  misc_feature (600)..(600): n is a, c, g, or t
gatgacgcaggggtttacagctgtactgctcagaactcacccggttctatttcagctaatgccaccctgactgtcctagagaccccatccttggtggtccccttggaagaccgtgtggtatctgagggagaaacagaggccctccaatgcaaagccacggagaaccctccgccccgcatcacctgattcaagggggaccacccgctgagcctcactgagcggcaccacctgacccctgacaaccagatcctggtggttcacaacgtggtggcagaggatgcgcgccgatatacctgtgagatgtccaacaccctgggcacggagcgagctcacagacagctgagcgtcctgcccgcagcaggctgcaggaaggatgggaccaccgtaggcatcttcaccattgctgtcgtgagcagcatcgtcctgacgtcactggtctgggtgtgcatcatctaccagaccaggaagaagagtgaagagtacagtgtcaccaacacagatgaaaccgtcgtgccaccagatgttacaagctacctctcttctcaggggaccctttctgaccgacaagaaaccgtggtcaggaccgagggtggccctcangccaatgggcacattgagagcaatggtgtgtgtccaagagatgcaagccactttccagagcccgacactcacagcgttgcctgc

SEQ ID NO: 86084 - DNA, 392 bp, Homo Sapiens
gctgcgaggcgcgggagcacctgggggaccgcttgcagcggggacgcgaggacccgggctgggctttcctcacccgggtaccttgttatcccataactttggtatcctgaaatctgaggattccaccaagataatatgataagaactttcagtgatttggggccatatcctacttagactaatgtggaatttccagatttcctgagagcttggtacagcagcacacactgcttgctaatcagcacaggcaataatgccatctctgcctcaagaaggagttattcagggaccctctcccctggatttgaatacagaattaccttatcaaagcacaatgaaaaggaaaagtcagaaagaagaaaaagaagggaaccattacagcaaaatgttgc

SEQ ID NO: 86085 - DNA, 1119 bp, Homo Sapiens
  misc_feature (424)..(433): n is a, c, g, or t
tgcttcattcaccgaactttgtgctcaaaatgcgtatataccattttatgttgtattcctccatttcacttgcaaaacagaagtaaataagagttcgggacccagggtaaaatggtagcttcatccaatatatcattcaaatgcatctgatttctaaaacatattacattttatgctgatcttcagttcataattcttccaggaaaactcagtcttccaactgcaataaaatactgggtagaatcaaatgggaaaggggttgggtggggcaatacccatgagttgatagtgataagctcctaaggatttttaacttgtacttttgtgaacgaagagaatgcataaataatgttggtgaggataaagtacagatatttcatgtagaattaattgctagttatgatgcttgtggatagttaactgnnnnnnnnnnagtcaaaatgatcatgctacgaaaagatgcttctgagagaatgtaatgagtaactgatttttcttcctgagtcgcccttgccaaatatgttactgtattaattaatctaatattgagtgattatttgtaaaattatgaatatgggaaatccatctatctacagcctaagttacacataagtttcagaaagtctgattagactaaagagatatttcttctgggacagccttcttcttggtaattttgaagttgtttttacaagttccttcctcagtttcagttctttccagtgttttgtagctcactgtcactcactgaatagagaaacgtgtgccctatacttcctgtgacaatcattttgctgacagaatgatggatgtttaaaatattgcacaaagtactttaaagaaaggtctgttaggaccagaagcagagacaccacttttcaaaggacttcttggtttcagcataacctaagacagggaattgggagccatcatatgtcacagtgttcagaattcaagcatatttaagggcattttctttgattctcaaagttcagcattcattttgaattgagaagcctatacatttagctgacaaagtgcttatagaatttcttaacaactgaaccattcaaaaggattttttttgtttaaaactggatttcaatgtaagcaaatgaa

SEQ ID NO: 86086 - DNA, 675 bp, Homo Sapiens
caaagaatgtatttctgaaaaataatctccttaaaattggagattttggagtttctcgacttctaatgggatcctgtgacctggccacaactttaactggaactccccattatatgagtcctgaggctctgaaacaccaaggctatgacacaaagtcggacatctggtcactggcatgcattttgtatgagatgtgctgcatgaatcatgcattcgctggctccaatttcttatccattgttttaaaaattgttgaaggtgacacaccttctctccctgagagatatccaaaagaactaaatgccatcatggaaagcatgttgaacaagaatccttcattaagaccatctgctatcgaaattttaaaaatcccttaccttgatgagcagctacagaacctaatgtgtagatattcagaaatgactctggaagacaaaaatttggattgtcagaaggaggctgctcatataattaatgccatgcaaaaaaggatccacctgcagactctgagggcactgtcagaagtacagaaaatgacgccaagagaaaggatgcggctgaggaagctccaggcggctgatgagaaagccaggaagctgaaaaagattgtggaagaaaaatatgaagaaaatagcaaacgaatgcaagaattgagatctcggaactttcagcagc

SEQ ID NO: 86087 - DNA, 597 bp, Homo Sapiens
gggttctcacctttctgagaagggggccttttgagctagaagctttctattctgatccccaaggagttccatatccagaagcaaaaataggccgctttgtagttcagaatgtttctgcacagaaagatggagaaaaatctagagtaaaagtcaaagtgcgagtcaacacccatggcattttcaccatctctacggcatctatggtggagaaagtcccaactgaggagaatgaaatgtcttctgaagctgacatggagtgtctgaatcagagaccaccagaaaacccagacactgataaaaatgtccagcaagacaacagtgaagctggaacacagccccaggtacaaactgatgctcaacaaacctcacagtctcccccttcacctgaacttacctcagaagaaaacaaaatcccagatgctgacaaagcaaatgaaaaaaaagttgaccagcctccagaagctaaaaagcccaaaataaaggtggtgaatgttgagctgcctattgaagccaacttggtctggcagttagggaaagaccttcttaacatgtatattgagacagagggtaagatgataatgcaagataaattggaaa

SEQ ID NO: 86088 - DNA, 1672 bp, Homo Sapiens
  misc_feature (308)..(361): n is a, c, g, or t
aaccccccaattttgtaaaaaggtttcccccggggtcttccagggagaacccccgtttgtgggtttaaacccccaaaagaaattttgccccaggttccccgggggcctttgccaacccttaagtcccactccagattgggtttgggggcccacgtgttgggccccctttgcaaattcaggcagttggtgtaccccttgggcccaggttatgcccttctagttggggggtgggccattgttgtacttcagcatggggtaaaaagaccggggcaaagttgttggcctgagtgcagctgtagtctctttcnnnnnnnnnnnnnnnnnnnnnnnnnnnnnnnnnnnnnnnnnnnnnnnnnnnnnnggtagggctgcccggaccaccctgagagggaaggagcgctgtggccgtgtgctgccggggaccctgctctctgtctcctcctcgccttctgtagttctcactgctctgaactgctttgctcggggagctggcacggatgttgcaggaggctggtcccccgagtctacctcgtcgaagctgggcaggggtgaggctgggttctgggttccctgcaaggccattaaatcttgggacacttgctcccgtaactgtttgagtttcttctcaataacatgcaccttttcttcagcttcaatacagtcttctccatgtcccttaatgagaaggctgtttgaaatctcctgtaacatgtccacttgaggttgacgttctaccagctccttttccagttgcattagttccctccgacactctaggagagcccgggggtctgcctttggatcggtgacatgagccttctgcctccggttcttggcactcgctaaccacagcagcagatttttgactcaactggtggaagtcctggcactgcatgagcgactgtcgtaagccccctctccagctgtccactgcgccctgtgctgcttcccagagcaggctcagctggcggagtctactttggagctctgtggattcggggctctcggtttgcagaaattccttgctgctcacgttgacagagaccactaatgccttgtaagtatcaaaggctttcagtatctcctgcagtctcttcactctcagttctatttcctggatatcagagggaggctttgccatctttaacatttccagctctgcttcagtttttttcagccaagtagtgatggcgctgatatcagagttcagctgttgcaaattttgttttattttgagcttattgtgaagctcctgtgcttgaatcatctcccatctgtcgaaggcacctgactgctgctctgtgataccggccagtcccccgtcttcctgctgtgggttgccattcaggactcgcgggccttatttgccaccatccgtgcctggaggtaatagtagctttccatagggtggtttataaggggtgctggacgcagggggaacaggtggaacattcctgtcaccttccatgtgcttgtagtgatgctcgggacaggaagggctgtatgggaacacgccacgagtgaccatccgaaatggatttacctgacagtgcgctgtagtatgggccctcctcgtcctcttcgtgagaggaggagccccccacgtcgcctgtgtggtcccactccagggggatggagtccacgctgacaggggtctcgcagccagaccgct

SEQ ID NO: 86089 - DNA, 640 bp, Homo Sapiens
  misc_feature (163)..(211): n is a, c, g, or t
gggaccagcctcctgcaacatccgtgccagctccccgagcaaagcagttcagagcagtgagaactacagaaggcgaggaggagacagagagcagggtccccggcagcacacggccacagcgctccttcctctcaagggtggtccgggcagccctacccctgcnnnnnnnnnnnnnnnnnnnnnnnnnnnnnnnnnnnnnnnnnnnnnnnnncgaagaagactacagctgcactcaggccaacaactttgcccggtccttttaccccatgctgaggtacaccaatgggccaccccccacatagagggcatagctggccacagtgctacaccacctgcctgattgccaagggtgcccagcacgtgggccccagaacaatctgagtgacttagtgtttggcaaagtccccgggacctgtggcaaacttcctccttgggcttaaacagcaaggggcctcccctggaagccccagggcaagcttttcaaaaattggggttcccttcccccaggaaacaggggaaaaccctggggtgggaaagggggccccccggggaaattttttgggcaaaaaaactaagttgggaattaaatttttaaaggggattctcctgtggaaaaaaatgggtcacattttctcccctg

SEQ ID NO: 86090 - DNA, 285 bp, Homo Sapiens
cgtactgtcaccttccatttgcttgtagtgatgctcgggacaggaagggctgtcgggaacatgccacgagtggccatccgaaatggatttacctgaaacgaaagacagcaagcgacagtctattctctcctactgaacgggtcacgggtgacatggcatcaggttacagtatgaaaatgagttctgcagctttccttgcaaaagcatgcatgtttgccaaaatggtccagtatgtcccagcaaggagaatgagatgaggtccatgcaaactcaggcaaacactgg

SEQ ID NO: 86091 - DNA, 1394 bp, Homo Sapiens
atgcaaatagttcattccctccaacattcctccgggaatggtcccccctccactccacagaaaaccctcccctccctgctgtgcatgacgcgggctccctctgcacacagtgcacgaagacgctgtcgggagagcccaggattcaacacgggccttgagaaatgtggctcttgtacctcctggtgccggccctgttctgcagggcaggaggctccattcccatccctcagaagttatttggggaggtgacttcccctctgttccccaagccttaccccaacaactttgaaacaaccactgtgatcacagtccccacgggatacagggtgaagctcgtcttccagcagtttgacctggagccttctgaaggctgcttctatgattatgtcaagatctctgctgataagaaaagcctggggaggttctgtgggcaactgggttctccactgggcaaccccccgggaaagaaggaatttatgtcccaagggaacaagatgctgctgaccttccacacagacttctccaacgaggagaatgggaccatcatgttctacaagggcttcctggcctactaccaagctgtggaccttgatgaatgtgcttcccggagcaaattaggggaggaggatccccagccccagtgccagcacctgtgtcacaactacgttggaggctacttctgttcctgccgtccaggctatgagcttcaggaagacaggcattcctgccaggctgagtgcagcagcgagctgtacacggaggcatcaggctacatctccagcctggagtaccctcggtcctacccccctgacctgcgctgcaactacagcatccgggtggagcggggcctcaccctgcacctcaagttcctggagccttttgatattgatgaccaccagcaagtacactgcccctatgaccagctacagatctatgccaacgggaagaacattggcgagttctgtgggaagcaaaggccccccgacctcgacaccagcagcaatgctgtggatctgctgttcttcacagatgagtcgggggacagccggggctggaagctgcgctacaccaccgagatcatcaagtgcccccagcccaagaccctagacgagttcaccatcatccagaacctgcagcctcagtaccagttccgtgactacttcattgctacctgcaagcaaggctaccagctcatagaggggaaccaggtgctgcattccttcacagctgtctgccaggatgatggcacgtggcatcgtgccatgcccagatgcaagatcaaggactgtgggcagccccgaaacctgcctaatggtgacttccgttacaccaccacaatgggagtgaacacctacaaggcccgtatacagtacatctgcggtgggggtacgagc

SEQ ID NO: 86092 - DNA, 591 bp, Homo Sapiens
agttatacatggcggagaaaggtttcactcgcaatagtggtggtgtaagcggaagtcaacattaggcagagataatcggtgtgcatgcccacggtccttgatcttgcatctgggcatggcacgatgcacacgtgccatcatcctggcagacagctgtgaaggaatgcagcacctggttcccctctatgagctggtagccttgcttgcaggtagcaatgaagtagtcacggaactggtactgaggctgcaggttctggatgatggtgaactcgtctagggtctagggctgggggcacttgatgatctcggtggtgtagcgcagcttccagccccggctgtcccccgactcatctgtgaagaacagcagatccacagcattgctgctggtgtcgaggtcggggggcctttgcttaccacagaactcgccaatgttcttcccgttggcatagatctgtagccggtcataggggcagtgtacttgctggtggtcatcaatatcaaaagggctccaggaacttgaggtgcagggtgaggcccgctccaccggaagcgtagttcagcgcagtcaggggtagacgaggtcccagcgga

SEQ ID NO: 86093 - DNA, 572 bp, Homo Sapiens
aagaaaagatttgaaaactggaccgaaattctactgctgtccaattgaaggctgccccagaggccctgagagaccgttttctcagttttctctcgtaaaacagcactttatgaaaatgcatgctgagaagaagcacaaatgtagtaagtgcagcaattcgtacggtacagaatgggacctgaaaagacatgcagaggactgtggcaagaccttccggtgcacatgcggctgtccctacgccagtagaacagcactgcagtctcacatctaccgaactgggcacgagatacctgcagaacacagggacccacctagtaagaaaaggaaaatggaaaactgtgcacaaaaccagaagttatccaacaagaccattgaatcattgaacaaccaaccaatccctagaccagacactcaagaactagaagcttcagaaataaagctagaaccatcttttgaagactcttgtggctctaacactgacaagcagactcttacaacaccaccgagatatcctcagaagttgcttttaccaaagcccaaagtggctttggttaaactacccgtgatgcagt

SEQ ID NO: 86094 - DNA, 1030 bp, Homo Sapiens
ggtgggtcaatggagggacatttcaccactgacataatttcagctattcttttctatctccaatctggtgtggttcttgacacttgggcctacaattttttttctgcaccagcctttgtcagataatcagtgatcctaacacaagtgctccacacgagggaactaccctccatgggaactagcagtttgaagccctggtttcttgcctgagactctttgcaagtcacatggggaagaaggcagctcctcacaggctctggctgtgtgtggtgatgcaaagctggctgtggggcttagggagtggggagccctctccttgctctgtccaggctcactaaggaccctgaactcagttaaaatacttagaaatttccccccactttgtccaaggaagaaaataatgtcaccagaacctgcttctttgaaaatcaaaacggcttctttgaaaatcaaaatgacttcttgtatggtctgaaaaaagaagactttggcattcacttacctgtggggtgattggaaaccctgaaatcctgtagcaaagtctacaactgccccaactgcactgactatcatgggcctgactgccaatttgatctatcctcataaagaagacacaatctcagtcagaatgcaggaccagtatctgcttagtttccagctgtaggtgctcagaaggatcaagaatggacactaaataacacttcatgcccaactgacaccttcattctgggtctcctggaccccaggacctgtaaaggaaggggtgacatgacgccttcattataaagtgggagtgtttgtactctcagtacctagtcacttctaaagcagaagggagcaattggctgggaaacctaagaatggaattcataggttttttcctggtcattgtgtctgctagctcacagggaaacacactgtataggtgaccatgagaatggccttcagactaaccatcagtaggtatttctaattgtaactactgatgggagagttccagttgaacatcgcagaaagaaaccctcacttg

SEQ ID NO: 86095 - DNA, 996 bp, Homo Sapiens
cttgaggtagaaagaatccagagctgctgccatttcaaaaaagctgcactgtggcacgctgaccgagctcggcttcatgcccccggaggtctggttgacacagagttcacagacgttgtgggtcctggagaaggagtgccactggggcagcaccacagtgttgcagcagggggacgctgtgatcgttggcgggtctggcagctgtgccggcacttccagggccagggactccagcactggagcatccacccgccgcaggtgctgaaggagacgctccaccacctggtccccatgacagttgttgtactccaaggccacttcggtgatctcgtctattaaaggatgactttcggccaggggattaaaaggtatgaacagaaacagcgctggtcctttcttcagctcgttattcagcaggagactcttgcctccgtgtggccgcagccaccgaaagagcgtctcctggttttctaaggcccacttacagatgttctcagctgtgtagttcaggacctccctggggaagacaagtgatgtgttgaaatgtctatgtaaatacacacttccagagtgtactaaggataccagtttcgcaagatgtttatttgtgataaccccaaatcgtactgttcctaggtaatctttctttaatgaatgtaatgctgaggtgaagaaggtcaaataaccaggaggctggggtgagccactgaactcaaagtacccgagtactccaggctcgtagtttgagagaaaatctagtaattctgattgagatgggatgtagagaagtggtttcatcacccggcggacaaacttctcaatgtaaacagcactcatggggcctttgtactcgattggtccaaaactccgatgatacagatatattacaggaaaataaaagaagtgtttctgttttctgcatttcccctggttccaccaacagttaattgccacaaacaacacctgatctagtacaatctgcggtgggggtaccga

SEQ ID NO: 86096 - DNA, 786 bp, Homo Sapiens
aggtacggtccggattcccgggatatcgtcgaccacgcgtcgggagaagtttcagtttgaactgactctcgatgaggaagattctgaaggacctgagaaggagggagagggacacagctatttcagcagcacaaagacgcttgtgtgagggatccagaaaacagagattccctgggagagactgacatagacattgcaacagaagacaagtcccccgtggatacataatccccctctccctgtggagatgaacattctatccttgatgagcatgccagctatgtggtagggccagcccaccatgggggccaagacctgcacaggacaagggccacctggcctttcagttacttgagtttggagtcagaaagcaagaccaggaagcaaatagcagctcaggaaatcccacggttgacttgccttgatggcaagcttggtggagagggctgaagctgttgctgggggccgattctgatcaagacacatggcttgaacaatggaagacacaaaactgagagatcattctgcactaagtttcgggaacttatccccgacagtgactgaactcactgactaataacttcatttatgaatcttctcacttgtcccttgtgtctgccaacctgtgtgcctttttggaaaacattttcatgtctttaaaatgcctgttgaatacctggagtttagtatcaattctacacagataagctttcaaagtttgacaaacttttttgatctttctggaaacaggaagaaactagtcttccttcttttttggggcaaatc

SEQ ID NO: 86097 - DNA, 2593 bp, Homo Sapiens
  misc_feature (2240)..(2249): n is a, c, g, or t
ggagacggggtggcggctgcagcccgggtagggccaggagacccggtccacgtttgcaaacgcagccgaacgcccaggccgacccgtgccgcccgagcgccgcgctgcgtccgcgccactcttctcgccgccccgatggcgttccggggctggaggcccccgccgccaccgctgctcctgctgctgctctgggtgaccgggcaggcagcgcccgtggcgggcctgggctccgacgcggagctgcagatcgagcggcgcttcgtgcccgacgagtgcccgcgcaccgtgcgcagcggcgacttcgtgcgctaccactacgtggggacgttccccgacggccagaagttcgactccagctatgacagagactccactttcaatgtgtttgtgggaaaaggacagctgatcacagggatggaccaggctcttgttgggatgtgcgtaaacgagagacgtttcgtgaagattcccccaaagcttgcctacggaaatgaaggagtttctggtgtgatcccccccaattcagtgcttcattttgatgtacttctgatggatatttggaattctgaagaccaggttcagattcacacctatttcaagcccccgagttgccctcggaccatccaggtgtctgattttgtgaggtaccactacaacgggacgttcctggacggaactctgtttgattcgagtcacaatcgcatgaaaacatatgacacgtatgtgggaattggctggctgattcctggaatggataaagggctgctggggatgtgtgtgggtgagaagcgcatcatcaccattcctccttttctggcctatggagaggatggagatgggaaagacattcccggtcaggcatctctggtgtttgatgttgcattattggacctccataaccccaaggacagcatttccattgagaacaaggtagtacctgaaaactgtgagcggataagtcaaagtggggactttctcaggtatcattacaatggcacgcttctggatggcaccctctttgattccagctactctcggaaccgcacgtttgacacgtacattgggcagggctacgtgattcctgggatggatgaaggtctacttggtgtttgcattggagaaaagcgaaggattgtggtcccgcctcacctggggtatggagaggaaggaagagggaatatccccggctcggctgtgctggtgtttgacatccatgtgatcgacttccacaacccttcggactccatcagcatcacctcccactacaaaccccctgactgctcagtgctgagtaagaagggagattacctcaaatatcactacaatgcctcacttctggatgggaccctgctggactccacgtggaatttaggcaaaacttacaatattgttctgggatctgggcaagttgtgttggggatggacatgggtctcagagagatgtgcgttggcgagaaacggacagtgatcattccgcctcacctgggctatggggaagctggcgtggatggagaagtgcccggcagtgccgtattagtgtttgacattgagctgctggagctggtggctggccttcctgaggggtacatgttcatatggaatggtgaggtgtcacccaacctctttgaagaaattgacaaggatggcaacggagaagtcctcctggaagagttctcagagtacattcacgcccaggtggcatctggcaaagggaaactcgctcctggctttgatgctgagctgattgtgaagaatatgttcaccaaccaggaccggaatggagatgggaaggtcacagccgaggaatttaaactcaaagaccaggaagccaaacacgatgaactctaaacctggcatgaaccagatggtgccagggagtacgtgacaccaagccacctgtgtggcaagacgtgcagtgagggtgcaagggtctctcagaagttgcatcattagccagtagtaggtgggtcacatagtacctggtgtacacatcggggtgggttgatatatggggtgagaagtttgggctgatcgccagtgatagtaaacaaaatctgtgcagagggccttagcatgggatgtgtccagtattgaaaaggctgcactgccaaccatgatttgtgagccttctgggaaattttgttattaaaggaatatatagtgtcagacggaagttataatcatcttggaggaaccataagaaaaagtgtccagggtatctatataaagagggttaaaannnnnnnnnnaacttgctggttaaaacattttagaaatattctagagatggggcaggaggagtcaaaggggcttgcttggccccaagcagagttcccagcaagacagccatggctcttcccagcagcctgtgcaaattctgatgatggccccacccccgcacacgcacacgcacatcatgcttttccagctcatcacaccccgccccactatgggcctaccattaatagtggataacttggagggtaaaaagaccctttttggacagaaaactgggcccgggaaaaggcatctccgacccccaattagaggattttggattcctcatttgccacactaagtcatctggcttagc

SEQ ID NO: 86098 - DNA, 738 bp, Homo Sapiens
catcaaaaagggttattcataatatataatttagcctcaatgatcaacattgttaagagtcagtatggagaaagatcattctgacctcttcagaaaccagctggtatatgaacattctgatcaccagattgttttgaagacgtgatcttttcaccatcgtccttaggtcacaaaataaaagttctattttctatgtactgtatatatacatatatttagaaaaatatataaaaataagacaataagaggcaagtggaggtgtggctggcatttagtgggcacactgaatgcttaaagaagttccacatattgattctgaaatcatataatgtcctacttaggtggctacagtgaacactgatgtaacaaaatcattcacatcctggttactgttcctcaaatcctccataccgcggatatgaatggaaacactctggtaaaatactcatcttaaatgcaacactttaaatataatatatcacagatttttacattaaatagaagaaaaacaattatactctcattcaccagtgtcttattgtttgtggcaacttcagaaacggcacattactcctgctttctgtttaaacttctcgacagcagaagttagaacaacaaacaatagacaatccgctgcctgttgtatatactgtgagtgtttggaaaagcaagtagaaaaaagactaagcactcctaatgttcatccaggtgctacggtcaaacgtttgagtcttcatc

SEQ ID NO: 86099 - DNA, 968 bp, Homo Sapiens
  misc_feature (176)..(224): n is a, c, g, or t
ccggaattcccgggatatcgtcgaccacgcgtccggagagatgaggcgagctccggcccgggtgcggccgggcttcaggggcccaggcgccgctgctgccaccgccatctaacgctgcgccctggaggcccggcgcgcggatggtgccggtgcggctcgggtgttgaaacgggtgnnnnnnnnnnnnnnnnnnnnnnnnnnnnnnnnnnnnnnnnnnnnnnnnnggctcaggcagagccatgtctcggggtggctcctacccacacctgttgtgggacgtgaggaaaaggtccctcgggctggaggacccgtcccggctgcggagtcgctacctgggaagaagagaatttatccaaagattaaaacttgaagcaacccttaatgtgcatgatggttgtgttaatacaatctgttggaatgacactggagaatatattttatctggctcagatgacaccaaattagtaattagtaatccttacaacagaaaggttttgacaacaattcgttcagggcaccgagcaaacatatttagtgcaaagttcttaccttggacaaatgataaacagattgtatcctgctctggagatggagtaatattttataccaacgttgagcaagatgccagaaaccaacaggacaatggcccatttacgtgggcattatgggaacttacttatgaaaattatgaactgggaccccaatggaccccttaacatttttcctctcttgggggtggaagaatgggaactggttaagggggggtttgaataacccgcattccaaaactaagcttggtacaacaaaaaagaatgtggaaccgattgaaattttttaaactaaactggttcgaacaggtctgcgcccagataatgatggctgatatttgcccccacccataagccaaaattaaccttttcgttggtagggcgggcgccctggacacgccacacgtaggcgagcattat

SEQ ID NO: 86100 - DNA, 865 bp, Homo Sapiens
aacagtcaatactattactggatatatttttctcacattagagaaatgaatctaatttcaataaaacatattacagaattaggcaccaaaactatgtttgttaaaaagcatagattttattctttattagagcaatcacgtttttaaaattcaaaaaattataactatatttttgatcatttgaataatactggagcttattaaaatccataagagaaacacatgttttttattagcccattaatagcatttttcttccaataacaccaataaaatttaaattatttatttatatcaaaattagaagcccataagagctgctttagatttttttaagggagatgtaagcttcagaatcaccatctgaactaaaaatatctgtccaatgtctattacccagacaaaagaagcatgattaaattttataaaattaaatttatgtaataatttaataatattttgtatctatgtagagactcccagcatttttaactatgcaacagtacaaaaatttgctggcataaacatttgaatttgttcatgacaagttcgtgtaaaagataaatggatagctaataatgaaaaattttaatttttgaaattttaagaacttgaaattcagatgctggtaatgacaccagaataaaaaagagaagctatctatggtatccatttattcaagcttaggcatgttttcaaatgaagactgttttctatttttgccactcaaaaattcttagaaccaggtaatttcacaactcagtgtgataaatccatcccagcctgtgacaggagctgcagcgaaccattcagaaccaacatgaactttcattctgaggtgtccaccctatgttaaatgtacaaa

SEQ ID NO: 86101 - DNA, 1023 bp, Homo Sapiens
agagtatgaagtcgacggcgcgccaattcggcacgaggtccgtctcaatatgtctcaagatggcggccaatgtgggatcgatgtttcaatattggaagcgctttgatttacagcagctgcagagagaactcgatgccaccgcaacggtattggcgaaccggcaggatgaaagtgagcagtccagaaagcggcttatcgaacagagccgggagttcaagaagaacactccagaggatttgcgcaagcaggtagcgccgctgctgaagagtttccaaggagagattgatgcactgagtaaaagaagcaaggaagctgaagcagctttcttgaatgtctacaaaagattgattgacgtcccagatcccgtaccagctttggatctcggacagcaactccagctcaaagtgcagcgcctgcacgatattgaaacagagaaccagaaacttagggaaactctggaagaatacaacaaggaatttgctgaagtgaaaaatcaagaggttacgataaaagcacttaaagagaaaatccgagaatatgaacagacactgaagaaccaagccgaaaccatagctcttgagaaggaacagaagttacagaatgactttgcagaaaaggagagaaagctgcaggagacacagatgtccaccacctcaaagctggaggaagctgagcataaggttcagagcctacaaacagccctggaaaaaactcgaacagaattatttgacctgaaaaccaaatacgatgaagaaactactgcaaaggccgacgagattgaaatgatcatgacggaccttggaaagggcaaaccagagggcagaggtggctcaaagagaggcggagaccttaagggaacagctctcatcgggcaatcactcccctccagctggcctcccagatccagaagggaccaagacgtggagcaggccatagagggggctgacccgcttcaagcctaaaaaattgagtttgcccgccaaggagcggggaaatcgccccacctgggggaaggacctgcca

SEQ ID NO: 86102 - DNA, 803 bp, Homo Sapiens
  misc_feature (355)..(355): n is a, c, g, or t
  misc_feature (379)..(379): n is a, c, g, or t
gtacatggttcagctgctggaacaagcgtccctgcacttctttgtcacagctcgcatcaatgagaccagggatgttctggccaagcaaaagtccaccgtgctaaccatccctgagatcatcatcaaggtccgtggcactcaggtagttggttctgacatgactgtgacagttgagtttaccaatcctttaaaagaaaccctgcgaaatgtctgggtacacctggatggtcctggagtaacaagaccaatgaagaagatgttccgtgaaatccggcccaactccaccgtgcagtgggaagaagtgtgccggccctgggtctctgggcattggaagctgatagccagcatgagcagngactgcctgagacatgtgtatggngagctggacgtgcagattcaaagacgaccttccatgtgaatgcacaggaagctgagatgaaccctggcatttggcctctggtagtctgggctaaggaaattctaacgcaaaaatagctcttgctttgactgaggcgtgaagacccagacaggactgcagagggccccagagtggagatcccacatatttcaaaaacatgcttttccaaacccaggctattcggcaaggaagttagtttttaatctctccaccttccaaagggtgctaagcattagctttaattaagctctcatagctcataagagtaacagtcatcatttatcatcacaaatggctacatctccaaatatcagtgggctctcttaccagggagatttgctcaatacctggcctcatttaaaacaagacttcagattccccactc

SEQ ID NO: 86103 - DNA, 1573 bp, Homo Sapiens
  misc_feature (67)..(118): n is a, c, g, or t
  misc_feature (122)..(156): n is a, c, g, or t
  misc_feature (928)..(957): n is a, c, g, or t
  misc_feature (1187)..(1250): n is a, c, g, or t
  misc_feature (1410)..(1449): n is a, c, g, or t
ttttcccccccgcgttgcccccgcctcttacccgtccgtcaaccacccactcactatagggcgctannnnnnnnnnnnnnnnnnnnnnnnnnnnnnnnnnnnnnnnnnnnnnnnnnnnccgnnnnnnnnnnnnnnnnnnnnnnnnnnnnnnnnnnncagtcgacggtaccggacatatgcccgggaattcggccattacggccggggactgctcatgtgattgtggagtagacagttggaagaagtacccagtccatttggagagttaaaactgtgcctaacagaggtgtcctctgacttttcttctgcaagctccatgttttcacatcttccctttgactgtgtcctgctgctgctgctgctactacttacaaggtcctcagaagtggaatacagagcggaggtcggtcagaatgcctatctgccctgcttctacaccccagccgccccagggaacctcgtgcccgtctgctggggcaaaggagcctgtcctgtgtttgaatgtggcaacgtggtgctcaggactgatgaaagggatgtgaattattggacatccagatactggctaaatggggatttccgcaaaggagatgtgtccctgaccatagagaatgtgactctagcagacagtgggatctactgctgccggatccaaatcccaggcataatgaatgatgaaaaactctaccccgcaagtgggtcatcaaaacccagccaagggtcacccccctgcaccccgacttccggcaagagcagacctctcccctggcagttctttttccacacgaatcgcttttacccatcccaccgcggcacattgggcccccaagcccatgcagcaccatcttgcactatccttggggcgggaggcccctcccccccgtggtatcatttaacaactccgctcaaccccatccacacacattannnnnnnnnnnnnnnnnnnnnnnnnnnnnnatttctgccaacatttcctacccccgggggcggaaaccctttctccctaaaaacacactatttgggggccccctctaacaattgccggaaacccttgttaaacccggggcgggcgtaacccttttccccggcgggggccagattcgaccacccccccctttctccaagagaaaaaatccaaggcggccgccctttttgctaacctacactctctcggtactaaccccacnnnnnnnnnnnnnnnnnnnnnnnnnnnnnnnnnnnnnnnnnnnnnnnnnnnnnnnnnnnnnnnnttgggggggtcttcccccttaaaaacccctcttgtcgccggggccggcgggcccttttccccaaaaatcttcttcgcaccaaaagtgtgcgggcacactatatctcttcccccccgggggccccaactgggatctctaaaaaccaatccccccgcgtacnnnnnnnnnnnnnnnnnnnnnnnnnnnnnnnnnnnnnnnntcgtaggggcgcccaaaaagccctgccttgcgctcccccttttttatggcggtaatatgtcgttcaaaacagtgccgccctcttcactgcctaagtaagggggggaacattttccgatcctcct

SEQ ID NO: 86104 - DNA, 154 bp, Homo Sapiens
tttaaataaactcagaacaaagtaaaaaagatgtgatagacttacttggtgcataccacatgggtgataacatctctatgcatgtaactgcgctcatacatggatgcactggggagattatcaagatagactctttcaaactctaagactgaag

SEQ ID NO: 86105 - DNA, 820 bp, Homo Sapiens
tgaggggcccccagtgccagggattccgaatcattcccacaaattttgtgcaggaagggccactgactggtttggtaaaaatggggtttaggccgtaattttgagtaagaaggtgaatgtatggaagtttgtcaaaaaatatgaagtggggtggttatctcctcgggccatcataaatgaaaatttttcccggtactcttttcggaagcagcaactgaagaaattgcatcccctgggcaatagatccactcacactgtccaggaaaatagccaagtttcagcatgttgatcatgtcaaagttcactacatcaaacaccttcattgctttatcatcacccacagaacagaacaatgctccctcagagctaactgcaatactctcaataactcccaggtgactacgaaaatgtttaacaaattcaattccctcttctatttttttccagaacttgacatgtccatcatgactggcagtaataataaaatctgttttggtgcataccacatgggtgataacatctctatgcatgtaactgcgctcatacatggatgcactggggagattatcaagatagactctttcaaactctaagactttcctcttcttggccagtgttgcctccacaggtaaaggtccaacccagcgctcttcgttctcctcatcgttctcctgggacaccgccactgctactgccagctctctttcgctgagttctgttttttccggttcctccgggtcccggcgccttctacgtctctgctgaaaatcgctaccactttccgccgccatgttgttcgcatcgtcagaaaaggcgcccc

SEQ ID NO: 86106 - DNA, 291 bp, Homo Sapiens
  misc_feature (189)..(200): n is a, c, g, or t
aaaaaattatatacacaaaacaacagaactagagtagctgacttctccccttctttttaaaagtgagacaaaattccttaagaaaatctgcaaggtgctgggtgaaccttctgatgctaaagttgttcttctggaatattaaaatttgggtatcttttggacatcaccaccatgtaaagagtgatgggnnnnnnnnnnnngctttaagaaataagtcgaaacttttctaacacaaacttattagagctataaagtggagagagtataaagctatactaactgcatcactaa

SEQ ID NO: 86107 - DNA, 770 bp, Homo Sapiens
  misc_feature (45)..(79): n is a, c, g, or t
aaacccgggacgagcgcagcggagtcttgagcgaggaagcggcgnnnnnnnnnnnnnnnnnnnnnnnnnnnnnnnnnnncagtcgacggtaccggacatatgcccgggaattcggccattacggccggggcttccgcttgcgctgtgagctgaggcggtgtatgtgcggcaataacatgtcaaccccgctgcccgccatcgtgcccgccgcccggaaggccaccgctgcggtgattttcctgcatggattgggagatactgggcacggatgggcagaagcctttgcaggtatcagaagttcacatatcaaatatatctgcccgcatgcgcctgttaggcctgttacattaaatatgaacgtggctatgccttcatggtttgatattattgggctttcaccagattcacaggaggatgaatctgggattaaacaggcagcagaaaatataaaagctttgattgatcaagaagtgaagaatggcattccttctaacagaattattttgggagggttttctcagggaggagctttatctttatatactgcccttaccacacagcagaaactggcaggtgtcactgcactcagttgctggcttccacttcgggctttcctttccacagggtcctatcacgggggctaataaagatatgtctattctccagtgccacggggattgtgaccctttggttccccctgatgtttggttctcttacggtggaaaaactaaaaacattggtgaatccagccaatgtgacctttaaaacta

SEQ ID NO: 86108 - DNA, 1347 bp, Homo Sapiens
  misc_feature (35)..(35): n is a, c, g, or t
  misc_feature (46)..(46): n is a, c, g, or t
  misc_feature (59)..(59): n is a, c, g, or t
  misc_feature (62)..(62): n is a, c, g, or t
  misc_feature (68)..(68): n is a, c, g, or t
  misc_feature (105)..(106): n is a, c, g, or t
  misc_feature (138)..(138): n is a, c, g, or t
  misc_feature (146)..(146): n is a, c, g, or t
  misc_feature (152)..(152): n is a, c, g, or t
  misc_feature (179)..(179): n is a, c, g, or t
  misc_feature (232)..(232): n is a, c, g, or t
  misc_feature (285)..(285): n is a, c, g, or t
tacattatcaaccttaggtgcatcattctacgttnaaactggtatncaatgtatcagcntanttaccntcgtggtgatcagactcataccataccacatatatanntttaaaagtaatacatcctttctttcattgcntatgctgntgtgtngggtgacattcatgtgaggagatgtcntagagacccattcttgttctgcttcctttgttctgtcatctgatccttaatcncgacagctgcccagaaagttcgtgacaagtttcatggtgactccagcttctcntgcagtttctcagctcattctgttctccttcagaatcactgctgaccaatgacatggctctcatcctggggaaccagtcaaggtttctttccttgatcatttctgccacgtaactctcaggcccagtatattcggtggagtcctttactttcaccaggacgatgaagcacagatagtgccacatgttgtgttcttccttgatgtgctcttcaaaggtgacagtcttgttgtcaaacttgtctctttccaagccacagataaagcacgtggtcttcaagatctcttccttcttctgcttctcactcctcaggtcagcaaaagtgtcaatgataaccccaaaaatcaggttaagaacaatgatgatgaccatgaagaagaacaagaggtcataaataactctagcagcaaacaggggttcctctttggacggcttcctgagtacatctcctactccacccccgctccgcagcccgtgactcagcacggtgacaatgcacatcagcagcgtctcacatgtgtgctctttatcctgttccgtctcttctgcagggaccagctcttctctgggtgcaggagaggagcagttctccccactctccaccctacacacatcggagaacaggaactcgcttgccaaactctcgccggtttctggaacagctgtttcattgggcagcctatctacttccaagataaagtcatccttgaagaaaagatagcccactattgagaacaggtaaacgaggatcagagccagaactgctgtcaggatgatggaccgtccattgcgagtgacacttttaatgacattaagcaaagtctcttctctgtacactaaatcaaaaagcagcagactgtagaagaattcatggacaaagagccccatggcacagatcaccagatacaacaaatgatagaggaactcaacatccagaaccatggctcggtagcctcttgtgaatgtcccacagttgcccacaaagctcattagaaagatgattttattgcatacattgaaagcgcccagaagaaacaaggtgggttgtaacccgacagaaaata

SEQ ID NO: 86109 - DNA, 880 bp, Homo Sapiens
cagtcgacggtaccggacatatgcccgggaattcggccattacggccggggagggttaggcctgatccacctgaacgcacagtgaatatccctcctggctgtgtcacaccacacttggagaagtcgcaattgagacaggggacatggaaaagagatgcagttttcagtttaaaagttgaatgcccaatttaatttctacccaagtagatgaggtctcacttgagctgtgccccaggctccgcagaccaaagggtcgcaagggacccagactgatccagacacctctcttttccaggaacccctgtttgctgctagagttatttatgacctcttgtccttcttcatggtcatcatcattgttcttaacctgatttttggggttatcattgacacttttgctgacctgaggagtgagaagcagaagaaggaagcagatcttgaagaccacgtgctttatctgtggcttggaaagagacaagtttgacaacaagactgtcacctttgaagagcacatcaacggaagaacacaacatgtggcactatctgtgcttcatcgtcctggtgaaagtaaaggactccaaccgaatatactggggcctgagagttacgtggcagaaatgatcaaggaaagaaaccttgactggttccccaggatgagagccatgtcattggtcagcagtgattctgaaggagaacagaatgagctgagaaacctgcaggagaagctggagtccaccatgaaacttgtcacgaacctttctggccagctgtcggaattaaaggatcagatgacagaacaaaggaagcagaaacaaagaatggtcttctaggacatcctcctcacatgaatgtcaaccaaaaacagataagcaatgaagaa

SEQ ID NO: 86110 - DNA, 944 bp, Homo Sapiens
tgcaagagcatcagagctgaccatacatttaaacagaaatgctggtttatttgcaaaatcaccagtatattttctattgtgtctataaaaaatcagtcatttaagtacaagaatcatattttccattcctttttagaaatttattttgttgtccctatggaaatcattcacatctgacaatttatatgttaaagagttttactctctctattttggtccaatttgtatctagtggctgagaaattaaataattctaaagtatgaagttacctatctgaaaatgtacttacagagtatcattttaaaatggatgtctctttaaaaattttgttacttttaccaacaatgtaatataatttatgtatattttattaataatagtgaattccttaaaatttgttctatgtacttatatttaatttgattaaatggccactgcccagatattgagaaatggttcaaatattggagtgtgtttcaatatattatcctggcttatttcaacatgagtaattatgagcaaaattaagttaaaacctgcgtctgatcaattttcctcatgactagaactaaaacagtaaatttggacaatattaagcctcaaataatcatctccaaactccttctaacactttttaaatcagattggaagacatggacaaatcaggttcatgtgttgcatctttatgtcctttgccaatatccaagatcatcacatatggtagatattcacatggagtttcaaattcagaatagattaccattaccttcctgcccttacacatcctactccttatttaaaagttctatttgtgacttttcatttcctgaaagtttaaaaatacaatttgagaatgtttataatacattctctcctgtcttttcacggttacgtctgttattgctgaaatacaccacattttctttgttctggtcaaggttaa

SEQ ID NO: 86111 - DNA, 573 bp, Homo Sapiens
tggaatctggtcagatttcttatgacgaggttggtgagagaattaaggacttcctccagggttcaagctgcatagcaggcatatacaatgagaccacaaaacagaagcttggcatttatgaggccatgaaaattggcttagtccgacctggtactgctctggagttgctggaagcccaagcagctactggctttatagtggatcctgttagcaacttgaggttaccagtggaagaaagcctacaagagaagtctggtgggcatttgagttcaaaaaaaagctcctgtctgcaaaacaagctgccactgggtataatgatcctgaaacaggaaacatcatctctttgttccaagccatgaataaggaactcatcgaaaagggccacggtattcgcttattagaagcacagatcgcaaccggggggatcattgacccaaaggagagccatcgtttaccagttgacatagcatataagaggggctatttcaatgaggaactcagtgagattctctcagatccaagtgatgataccaaaggattttttgaccccaacactgaagaaaatcttaccta

SEQ ID NO: 86112 - DNA, 805 bp, Homo Sapiens
gaatattcaatctcgaatgcggaagcctttgcagaaaaattgtccagagagctgcaggtgctagatggggctaacatccagtcaatcatggcatctgaaaaacaagtcaacatcctgatgaaattgctagatgaggctctaaaggaggtagatcagattgaattgaaactgagcagttatgaggaaatgctccaaagtgtaaaagaacaaatggatcagatctctgaaagcaaccacctaattcatcttagtaacactaataatgtaaaactcctatctgagatagagttccttgtgaaccacatggacttggccaaaggtcatataaaggcccttcaggaaggagatcttgcttcttccagaggcattgaggcctgcaccaatgctgctgatgcccttctgcagtgcatgaatgtagctcttcgaccaggccatgacttgcttctggcagtcaaacagcaacagcagcgattcagtgatttgcgagagctttttgcccggagactggccagtcacctaaacaatgtttttgttcaacagggccacgatcagagttcgactctcccccagcactgtgtctcaaccgggtttacccaatcatcatccatttcacagagatttcctccgatctgccaagctggtggagtggctaaagactacagattttggaaaatatgaaggactaacaaagaattcagatttggagatatcttaaggaaaaaatttacattactggaattctttgccttttgaagttttaggaggattaatattctgaataattaaacataatttatattcccct

SEQ ID NO: 86113 - DNA, 1230 bp, Homo Sapiens
ttactagtacgaggctggtgttgaattcggcacgagggggaagctgcagcgagagcgcgcggatctcagcgcgggagcagtgcttctgcggcaggcccctgagggagggagctgtcagccagggaaaaccgagaacaccatcaccatgacaaccagtcaccagcctcaggacagatacaaagctgtctggcttatcttcttcatgctgggtctgggaacgctgctcccgtggaattttttcatgacggccactcagtatttcacaaaccgcctggacatgtcccagaatgtgtccttggtcactgctgaactgagcaaggacgcccaggcgtcagccgcccctgcagcacccttgcctgagcggaactctctcagtgccatcttcaacaatgtcatgaccctatgtgccatgctgcccctgctgttattcacctacctcaactccttcctgcatcagaggatcccccagtccgtacggatcctgggcagcctggtggccatcctgctggtgtttctgatcactgccatcctggtgaaggtgcagctggatgctctgcccttctttgtcatcaccatgatcaagatcgtgctcattaattcatttggtgccatcctgcagggcagcctgtttggtctggctggccttctgcctgccagctacacggcccccatcatgagtggccagggcctagcaggcttctttgcctccgtggccatgatctgcgctattgccagtggctcggagctatcagaaagtgccttcggctactttatcacagcctgtgctgttatcattttgaccatcatctgttacctgggcctgccccgcctggaattctaccgctaataacagcagctcaaggcttgaaggacccggggaagcaggagaccaagttggaacctcataagcaaaggagaggacacaagaacaggcaaagaggaatctggagtttcagtctccaactctcagcccaccaatgaaagccactctatcaaagccatcctgaaaaatatctcagtcctggctttctctgtctgcttcatcttcactatcacccattgggatgtttccagccgtggactgttgaggtcaagtccagcatcgcaggcagcagcacctgggaacgttacttcattcctgtggtctggtttcttgactttcaatatctttttgactggtttggggccggaagccttcacagcctgtattcatgttgggccctggggaaa

SEQ ID NO: 86114 - DNA, 901 bp, Homo Sapiens
ctccatttcctatgaaaggtaaaatgtgaactccctgtgctgcttgtagacagttcccataactgtccacggccctggagcacgcacccaggggcagagcctgcccttactcacgctctgctctggtgtcttgggagttgtgcagggactctggcacaggcaggggaaggaagaccaggcggtaggggactggtcttgctgttagagtatagaggtttgtaatgcagctttcttcataatgtgtcagtgattgtgtgaccaaggcagcatctagcagaaagccaggcatggagtaggtgatcgatacttgtcaatgactaaataataacaataaaagagcacttgggtgaatctgggcacctgaattctgagttttgagttctggagctagtgttttgacaatgctttgggttttgacatgccttttccacaaatctcttgccttttcagggcaaagtgtatttgatcagaagtggccatttggattagtagccttagcaatgctacagggttataggcctctcctttcacattccagacaatggagagtgtttatggtttcaggaaaagaactttgtggctgaggggtcagttaccagtgaccttcaatcaactccatcacttcttaaatcggtatttgttaaaaaaatcagttatattatttattgagtgccgaccgtagtaaagccctgaaatagataatctctgttcttctaactgatctaggatggggacgcacccaggtctgctgaactttactgttcctctgggaaaggagcagggacctctggaattcccatctgtttcactgtctccattccataaatctcttcctgtgtgagccaccacacccagccagggtctctctacttttaacacatctctgcctcctgggttcaag

SEQ ID NO: 86115 - DNA, 884 bp, Homo Sapiens
cagatgttcagaaagaacggtacactctaagtggagaatctggcacagtcagcttggggacagttagtgataatgccagcaccaaagcaatggcaggatccattctgaattcctacatcccattggacaaagaaggcaacaggatggaggtgcaagtagatattgagtcaaagccatccaaattcaggcacaacagtggaagcagtagtgtggatgatggcagtgccacccgaagtcatgctggcggttcatccagtggcttgcctgaaggtaaatctagtgccaccaagtggtccaaagaagcaacagcagggaaaaaatcaaaaaagtggtaaactgaggaaaaagggtaacatgaagataaatgagacgagagaggacatggatgcacagttgttagaacaacaaagcacgaactcaagtgaatttgaggctccatccctcagtgacagtatgccttctgtagcagattctcactctagtcatttttctgaatttagttgttctgacctagaaagcatgaaaacttcttgtagtcatggttccagtgattatcacacccgctttgctactgttaacattcttcctgaggtagaaaatgaccgtctggaaaattccccacatcagtgtagcatttctgtggttacccaaactgcttcctgttcagaagtttcacaggtgaatcatattgctgaagaacatggtaacaatggaataaaacctaatgttgattgataatattggcgatgcactaaaagaaacaaataacaaccactcacatcagacaatggaattaaaagttgcaattcagactgaaatttaggcccataaatgctgcagaataattaccactgtacaaccgtgtttggagctggttgaactac

SEQ ID NO: 86116 - DNA, 888 bp, Homo Sapiens
tcgacgagctgcagacgacaaatgtcagcgacctgggcttggaacacagtgactccctggagtagtcgggcagcccagatggcactgatcactgagcaggagaggagtgtcgccgggaggccttcagggtgggggggaaggggacatgggcaggaagcaccgagggagttgggccctagcttccccaaatcagtagcttgaagaaaggcaaaggagacacctgttccttcccaaccaccgagcttcaatgaggaccccagccccacttccctggaactgccgaggactctgtttggcggggccagtcgagcagcctgtgtggaaagacaggagtgagatctggactcaccaaatccctgaggacagatggcacccatggcccccacccacggaaggacttgagttgtttacaagccctgcactgaggcaaataggtgctgttcgcagagtaggcctttgcccgggggcagacttagaaggaaggggagagacaaagggggactgagtttcatccccagaagtttctcagctcctttgacagacattcaagggcaggagggagccccaaagcataaccagtggccagaggagtgggagggcctgaggcatcacatcttgcagatcagaatgggatggaatccaccaggctccagctcatccctccaaggccctgtctctgcgcacagcaaccatggacatgggagaaagggatgggagccacagtgcccttcactctctcctggaaaccaactgtaagctggtgggctcaacctgtgggaggttaagaggagtcccttctgggttgactccaagagccaaggagatggcagaccctgggctaggaaccatatggaggtgactttgaggccacagctgtccctaggtgat

SEQ ID NO: 86117 - DNA, 768 bp, Homo Sapiens
actagggccttggcggcgccgaggcggcagcagaagtccggagtcagggcgtgtggctgaggagatgccactaagcacagctggcatcctgagctcctcttctgccgcttccaacaggtcaaggaataaggctcgctatcggaccaaagccgtgagctctgaggtggatgagagcctctttggagatatcaagtccccagcccagggccagagcgacagccccattgtgctgctccgagataagcatacccttcaaaaaactctcactgctttgggcttggatcgcaagccagagaccatccagctcatcacccgggacatggtccgagaactcattgttcccacagaggatccctccggggagtccctaatcatcagccctgaggagtttgagcgaatcaaatgggcatcccatgtcctgaccagagaagaacttgaggccagggaccaggccttcaagaaggagaaggaagccaccatggatgcagtgatgacacgaaagaagatcatgaaacagaaggagatggtgtggaacaacaacaagaagctcagtgacctggaggaggtggccgaggaacgggcccagaacctcctgcagagagccaacaagctgcggactggagcaggaggaggagctcaaggcacatgagcaatgattatcctcgaattgctaagctgcatgccatccgggatgcccaagatcctggtagaagcagcagatccaagaagaacttggacacagaagagaagcggtttggatcaggatga

SEQ ID NO: 86118 - DNA, 787 bp, Homo Sapiens
  misc_feature (14)..(14): n is a, c, g, or t
  misc_feature (162)..(162): n is a, c, g, or t
  misc_feature (447)..(463): n is a, c, g, or t
  misc_feature (643)..(667): n is a, c, g, or t
ttcctccctggcanatatcaaatgccagtttcttccaaggttgtttttcagcccctggtttgacgtaacggttcatcaggaggagttctagggtatccttgctgtctctgttcccagcagcaagatgcaaggggggtcaagaggccttttgtttgggcatgnatatctgcatcatgccgcagtaagaaagaagccactctggtattattccacttacaagcactgtgcaggggcgtccagccatccacagtcactgcatgaacatcggccccctgtgcaatgagctcctgaacaatatctaagtgtccactgtaggctgctcgatgaagaggggtatactcatcttcatccctagtgttcacgtgagtggccttttcagaaagcagtctccgcactgtggtaagccgatttttttcagcagcccaaagaagcaatctgcttgggtcnnnnnnnnnnnnnnnnncttgcaatcgataccactcttcatttttgtcatcttgctcctcatcttcatcagaattgcctacccaaagactttgagtaccagtaggaataaggtgtccatgtgtttccaacaattcaagttggttaaagtgttcagaaaaatccaaggaattctcttggtctggtattccatcatcannnnnnnnnnnnnnnnnnnnnnnnnactactattctaaataaaaagcatttcaaatgccaggatataaatctttctagagatgaattatgactgctttgttcatcaagatctgacagaagggaaaatcgccgccttgcatctccc

SEQ ID NO: 86119 - DNA, 736 bp, Homo Sapiens
cggtacccacagaacatgacccagtccttattaattcaatgggtctgtttacagagtgtggtaatttcgttctttagatttgcagaatttataaagaaagaaaattacagcctgcacacccaagaccaggacaattcctccaatgaaactggctgcatcaaaggtagactttcgcacaggttgtgaggttggagtcacagtgttatttgttgtacctgatgtagtaactgtcttggaagttgtagaaggggagggctgaactgtgggtttagctgtagaattggctgttggcactggagtggccgtggaaacggaacagaagtctgtcgtgttccccacttgacaatcactaactgttgagttatgtgaacaatagctctcatctttacattctatccaaaagcaggtagtattaacaacgctaacattaaaacaggaaacgcagctgtttcgaccttcacaggtttctggtgccggagtggtgaccagcgggagggacgtcaccggcgccgaggttacgttggagatgggcgctaaagtcgtcacgttcgggtgctgggtcgtgttcttgtccgcggacagcacgcagagcacgcccaggcaggtggcggcccaaagcagtgagcgggagagccgcgacatcgtgtcctcagcgctggcgttcgggagaaagctaaggctcgcaacgctcagtcaacccctcaatcccctgcggcgccgcctccgagactacccc

SEQ ID NO: 86120 - DNA, 1110 bp, Homo Sapiens
  misc_feature (187)..(274): n is a, c, g, or t
agcaatggagggcagcctggcccactatggctcactttgctatcctagggccccagggaaaggtatacttctttccacccaggaaagcctggccccaggacagctggctggctgggggaaggaggaagaagaccctcttgctccagaaatggccaacacagcaaatgcccaaacaactctttggttnnnnnnnnnnnnnnnnnnnnnnnnnnnnnnnnnnnnnnnnnnnnnnnnnnnnnnnnnnnnnnnnnnnnnnnnnnnnnnnnnnnnnnnngctcttgacacccaatcttgggcaaaggactcagaggaggtactgctgtggctgctactcttggccaggtggggccccaagacagctcacactcgggaatcctctggcttcttccctggccccgacactagcaattgctgctctacggcagggctggatctgctctctttggtccttgcctctttgtcctgctgcctcaggacagccaaaactaaggcgaagcagatcacagaacctgttttgaagaagaactggaggccgatgaaccggtttcggagcaggtcattattgtagtagcgacagacagctcgacgcccacagctcagggcccagtgcacacaggtggtgtcgatggcgctgccgtggatcacggggctgggcatccaggccaaaatcctcaggaacatgaactggatgcccacagccaaagtcttgtcttctttcttcactcctcttaggatgagcatgaaggagggtgtgtgggtgagacaggccagggccgagcccaggctgaccaggagcaggaagggcaccaccagatggctgcacgttgagtcgcaggatcctgccagcacggggttgccctcaaccacgcagctgcagttggtgtagaaaacctggctgttgtccagagcatcctggaccacccagcttgagcagcctgcgtggcagggtgtgatgtattccacacgagtgctggggtcgcagacagggttaaagccgtccaatgggcaggagcaggcctccatgcagcttggagacagctccagcccagggtgggcactggtctggtgtgtgatgcccgcaatctggtggctggagcagccgataaagaa

SEQ ID NO: 86121 - DNA, 674 bp, Homo Sapiens
  misc_feature (570)..(570): n is a, c, g, or t
  misc_feature (610)..(610): n is a, c, g, or t
  misc_feature (624)..(624): n is a, c, g, or t
taaatgttggaagttggatgtggctgtcttgtagttccttttttcaacagttttttcactgctattgccctgttggttttggtaggagaacagatcccaatggagactatatcaggcgttatttgcctgtcctaagaggcttccctgcaaaatatatctatgatccctggaatgcaccagaaggtatccaaaaggtagccaaatgtttgataggagttaattatcctaaaccaatggtgaaccatgctgaggcaagccgtttgaatatcgaaaggatgaaacagatctatcagcagctttcacgatatagaggactaggtcttctggcatcagtaccttctaatcctaatgggaatggaggcttcatgggatattctgcagaaaatatcccaggttgtagcagcagtggaagttgctctcaagggagtggtattttacactatgctcatggcgacagtcagcaaactcacctgttgaagcaaggaagaagctccatgggcactggtctcagtggtgggaaacgtcctagtcaggaagaggacacacagagtattgggcctaaagtccagngacagagcactaattagaaaacattcaggtggaatactgntgcagctgaaattnggtggggagttcaatactttttcaattaagttatttaaaaatattcttcc

SEQ ID NO: 86122 - DNA, 899 bp, Homo Sapiens
  misc_feature (67)..(101): n is a, c, g, or t
  misc_feature (846)..(846): n is a, c, g, or t
tgatactatatgggcccgcgtatagcgaacgacgagcgcagcgagtcattgagcgaggaagcggcgnnnnnnnnnnnnnnnnnnnnnnnnnnnnnnnnnnncagtcgacggtaccggacatatgcccgggaattcggccattacggccggggagttgttgaagttcgtgactgcttcactctctcattcttagcttgaatttggaaatgacttttgatgacctaaagatccagactgtgaaggaccagcctgatgagaagtcaaatggaaaaaaagctaaaggtcttcagtttctttactctccatggtggtgcctggctgctgcgactctaggggtcctttgcctgggattagtagtgaccattatggtgctgggcatgcaattatcccaggtgtctgacctcctaacacaagagcaagcaaacctaactcaccagaaaaagaaactggagggacagatctcagcccggcaacaagcagaagaagcttcacaggagtcagaaaacgaactcaaggaaatgatagaaacccttgctcggaagctgaatgagaaatccaaagagcaaatggaacttcaccaccagaatctgaatctccaagaaacactgaagagagtagcaaattgttcagctccttgtccgcaagactggatctggcatggagaaaactgttacctattttcctcgggctcatttaactgggaaaagagccaagagaagtgcttgtctttggatgccaagttgctgaaaattaatagcacagcttgatctggaacttcatccagcaagcaattttcctattccagttttccattctggatgggggctgtctcggcgaggaacccangtacccatggctctgggaggacggtctcctttgatgccccactttatttaagc

SEQ ID NO: 86123 - DNA, 1211 bp, Homo Sapiens
  misc_feature (75)..(107): n is a, c, g, or t
agactgagatctataggggctagtcttagaagcgaatgacgagcgcaggagtggtgagcgaggaagcggcgcacnnnnnnnnnnnnnnnnnnnnnnnnnnnnnnnnncagtcgacggtaccggacatatgcccgggaattcggccattacggtcgggtgaatgaaccacccattttcctttcttagccaaatcaccaaaatgtccagttagaacaagaatttagcattctgcaaaagaagttaacagctgagataacgaggaaatattctgaaatggatcccaaatatttcatcttaattttgttttgtggacacctgaacaatacatttttttcaaagacagagacaattacaacagagaagcagtcacagcctaccttattcacatcatcaatgtcacaggtattggctaattctcaaaacacaacagggaatcctttgggtcaaccaacacaattcagcgacactttttctggacaatcaatatcacctgccaaagtcactgctggacaaccaacaccagctgtctatacctcttctgaaaaaccagaagcacatacttctgctggacaaccacttgcctacaacaccaaacaaccaacaccaatagccaacacctcctcccagcaagccgtgttcacctctgccagacaactaccatctgcccgtacttctaccacacaaccaccaaagtcatttgtctatacttttactcaacaatcatcatctgtccagatcccttctagaaaacaaataactgttcataatccatccacacaaccaaaatcaactgtcaaaaattcacctagaggagtacaccaggatttatctttagatactaccagtaaacaaacaaacccacaaaaaaacattataattcaatagctgccatactaattggtgtacttctgacttctatgttggtaagctataatcatcattgtactttgggaaatggcttaaggaaaccagtttcaaatgatcacaattgggcaggtagatctccattggtggatggcagaaaacccctgacatttgtatgggataaccatccgaggaccaatgtaaattatccacaaaaacggtacatcaatcactttcactttaccccgcggaaaacccaggatcaaagcccacttttggagaatgaacttcaaaaattaacgtaggtcggaatcacgggcaccacctgtgagcaccacacaaacaca

SEQ ID NO: 86124 - DNA, 693 bp, Homo Sapiens
ctgtgagcaaagacctgcatcatgaattcaggaccatcgggttccagaaactttaccagttccagtgcagaggacttttgagaagtgaactttaaataaaggaggaaactgccttcttaatattccgaagcctgatgaagcctatagtgctccctcctgtggtaataagttggtggacgctggggaagagtgtgactgtggtactccaaaggaatgtgaattggacccttgctgcgaaggaagtacctgtaagcttaaatcatttgctgagtgtgcatatggtgactgttgtaaagactgtcggttccttccaggaggtactttatgccgaggaaaaaccagtgagtgtgatgttccagagtactgcaatggttcttctcagttctgtcagccagatgtttttattcagaatggatatccttgccagaataacaaagcctattgctacaacggcatgtgccagtattatgatgctcaatgtcaagtcatctttggctcaaaagccaaggctgcccccaaagattgtttcattgaagtgaattctaaaggtgacagatttggcaattgtggtttctctggcaatgaatactagaagtgtgccactgggaatgcttagtgtggaaagcttcagtgtgagaatgtacaagagatacctgtatttggaattgtgcctgctattattcaaacgcctag

SEQ ID NO: 86125 - DNA, 461 bp, Homo Sapiens
gactatgtacacagccaggcagccccgcgtggggagtgcaggtggtttcggttgcggcagtcgcgtcccgggagcgtcgctgcctggtgaacgctagaatgggtactaggaaaaaagttcatgcatttgtccgtgtcaaacccaccgatgactttgctcatgaaatgatcagatacggagatgacaaaagaagcattgatattcacttaaaaaaagacattcggagaggagttgtcaataaccaacagacagactggtcgtttaagttggatggagttcttcacgatgcctcccaggacttggtttatgagacagttgcaaaggatgtggtttctcaggccctcgatggctataatggtaacttaattaattaaatgttgtcttatgtaagaacctgaggagtaagagatgcaaatattttatggtgaataaaataaaagctcacttactatcaaaaaaaa

SEQ ID NO: 86126 - DNA, 415 bp, Homo Sapiens
cgaactagagggggctttgggatcaccagtcggagcccttcgtgttacagctagaatgggtactaggaaaaaagttcatgcatttgtccgtgtcaaacccaccgatgactttgctcatgaaatgatcagatacggagatgacaaaagaagcattgatattcacttaaaaaaagacattcggagaggagttgtcaataaccaacagacagactggtcgtttaagttggatggagttcttcacgatgcctcccaggacttggtttatgagacagttgcaaaggatgtggtttctcaggccctcgatggctataatggtaacttaattaattaaatgttgtcttatgtaagaacctgaggagtaagagatgcaaatattttatggtgaataaaataaaagctcacttactatcaaaaa

SEQ ID NO: 86127 - DNA, 881 bp, Homo Sapiens
  misc_feature (47)..(81): n is a, c, g, or t
tgaaaccagcaaggcggacagagagctatttagcgaggaagcggcgnnnnnnnnnnnnnnnnnnnnnnnnnnnnnnnnnnncagtcgacggtaccggacatatgcccgggaattcggccattacggccggggtgaaattcaggaactctttggtggagcaattaccagtcaacttcagggtattatgataaactctgatcgggggaggaaccaggactacatagatcaaggcagttttcttctttgagaaactatcccagatatcatcatagagtcttctgctcttcctcaactaccaaagcagaaaaacatcagcgaagcagcaggccatgcaccccccaaaaactccatctggggctcttcatagaaaaaggaaaatggcagcctggcccttctccaggctgtggaaagtctctgatccaattctcttccaaatgaccttgatcgctgctctgttgcctgctgttcttggcaattgtggtcctccacccactttatcatttgctgccccgatggatattacgttgactgagacacgcttcaaaactggaactactctgaaatacacctgcctccctggctacgtcagatcccattcaactcagacgcttacctgtaattctgatggcgaatgggtgtataacaccttctgtatctacaaacgatgcagacacccaggagagttacgtaatgggcaagtagagattaagacagatttatcttttggatcacaaatagaattcagctgttcagaaggatttttcttaattggctcaaccactagtcgttgtgaagtccaagatagaggagttggctggagtcatcctctcccacaatgtgaaattgtcaagtgtaagcctcctccagacatcaggaatgga

SEQ ID NO: 86128 - DNA, 1006 bp, Homo Sapiens
aaaacttgggtcgcctctagcttagcgagcgctggagtttgaagagcgggcagtggctgcacacgccaaactttccctatggcttcggtgaccagggccgtgtttggagagctgccctcgggaggagggacagtggagaagttccagctgcagtcagacctcttgagagtggacatcatctcctggggctgcacgatcacagccctagaggtcaaagacaggcaggggagagcctcggacgtggtgcttggcttcgccgagttggaaggatacctccaaaagcagccatactttggagcagttattgggagggtggccaaccgaatctgccaaaggaaccttcaaggtggatgggaaggagtatcacctggccattaacaaggaacccaacagtcttgcatggagggagtaagagggtttgatcaaagtgctctggacccctcgggtgctgtcaaatggcgtccagttctcgcgcatcagtccagatgggtgaagaaggctaccccggagagttaaaagtctgggtgacatacacccctggatggcggagagctcatagtcaactacagagcacaagccagtcaggccacaccagtcaacctgaccaaccattcttacttcaacctggcaggccaggcttccccaaatataaatgaccatgaagtcaccatagaagcggatacttatttgcctgtggatgaaaccctgattcctacaggtggcaccaacagaaggtttctgcaaggctgagagctccttttacccatgaaccaggagcaaagtttgcaggagaagttgccccagtgcaaggcactgcattcgacctgagaaagccagaggagcttggaaaacacctgcaggacttccatctcaatggttttgaccacaatttctgtctgaagggatctaaagaaaagcatttttgtgcaagggtgcatcatgctgcaagcgggcgggtactagaagtatcacacacccagcaccggggtccagctttaacggcagt

SEQ ID NO: 86129 - DNA, 1189 bp, Homo Sapiens
  misc_feature (683)..(683): n is a, c, g, or t
gaagagcgggcagtggctgcacacgccaaactttccctatggcttcggtgaccaggccgtgtttggagagctgccctcgggaggagggacagtggagaagttccagctgcagtcagacctcttgagagtggacatcatctcctggggctgcacgatcacagccctagaggtcaaagacaggcaggggagagcctcggacgtggtgcttggcttcgccgagttggaaggatacctccaaaagcagccatactttggagcagttattgggagggtggccaaccgaatcgccaaaggaaccttcaaggtggatgggaaggagtatcacctggccattaacaaggaacccaacagtctgcatggaggagtcagagggtttgataaagtgctctggacccctcgggtgctgtcaaatggcgtccagttctcgcgcatcagtccagatggtgaagaaggctaccccggagagttaaaagtctgggtgacatacaccctggatggcggagagctcatagtcaactacagagcacaagccagtcaggccacaccagtcaacctgaccaaccattcttacttcaacctggcaggccaggcttccccaaatatatatgaccatgaagtcaccatagaagcggatacttatttgcctgtggatgaaaccctgattcctacaggagaagttgccnccagtgcaaggcactgcattcgacctgagaaagccagtggagcttggaaaacacctgcaggacttccatctcaatggttttgaccacaatttctgtctgaagggatctaaagaaaagcatttttgtgcaagggtgcatcatgctgcaagcgggcgggtactagaagtatacaccacccagcccggggtccagttttacacgggcaacttcctggatggcacattaaagggcaagaatggagctgtctatcccaagcactccggtttctgcctggagactcagaactggcctgatgcagtcaatcagccccgcttccctcctgtgctgctgaggcctggtgaggagtatgaccacaccacctggttcaagttttctgtggcttaaggaagtgtgaagatatgatccagtccagggctagctcagccacctgtctcctgtccagaaaaaaggtgaagattaagaagctttcagaatgattctatggattaaaatcatacaaatggtaa

SEQ ID NO: 86130 - DNA, 1118 bp, Homo Sapiens
  misc_feature (363)..(374): n is a, c, g, or t
  misc_feature (1016)..(1016): n is a, c, g, or t
  misc_feature (1062)..(1062): n is a, c, g, or t
acaatcaattccaaatggtatgagatggattggaagtggccagcagcaagttctggtgacgggacagagtggccttggatgtctttggtattttctgtagtagaaactaaagcaaagaccacaagtttcagagcatggagacattcctgctgaatcgccttctcacctcctcggcaattgctcattctagggttgggcatcatagttggtcagtcttaattcccatgccaaaggacaaacaggtgtgacatttggatagatgaatactgggattggctctggagcatgtgttttgagttgaaccttgcagtcctttctctacgcccgtggattttgtggaaacactttgcaatctctttgtcnnnnnnnnnnnnaccagaactagttacattggaatgcttactgtcctacagagtggcagcaaataaaaccttgcattccatcaagccaaaatagcacactctgttagaggagatacatgtttaagatagaattggagggaaggacaaaaacagaaaaatgtttgggcttttaagccattgggtagtattgttttgatgatcttagaggagggaagaagagagagagacccaatggtagaaccagaatcagggagatgactgaactactgaaaaacaggttcccttgtatttaggatcttaaggtgtataaaaagcaaacatgactttgcacctaagtaaattctgcattctcatagttgtgtcccaattaaccaaaaagttgtctctagagaaaatactattacaatctaagcatgattctctgtggagactaattttttccccttttgccaaaagcagtccttcccaaattaacaaagcaaactgaaataataccttgaataacaggttgcctgtggtctctgtcatcctcgtttctcttctgaaatgaatttccacctctgcctttaaggcatttttgtcactgaagctgctgttcccaagagatcggcaacctttttgtccctttctcataagaaagggacactcctacanggtgagagtgtataccttactctctcagataagtggctggacttantcttgtgatttggggcccatggaaagatgggaaacaaaagattttaagcccttctt

SEQ ID NO: 86131 - DNA, 415 bp, Homo Sapiens
cacagacaaaaaagaaacgaagaagcatgtgaatatgaacagtggtcaaaagcaggctggtacggtcggaatcccgggatatcgtcgacccacgcgtcgcggacgcgtgggcggacgcgtgggtttcaatcttttaaattgcaatatataagactattccaactgggcatttcaatccattttttaggtgctttagagataatgcttgccagtgccaatgagggcattagtactttgtgctcataaattggcctctgtatgcagtactaaaattaatgcagatttctctttagccttccaacatttcttgttgatagtgatgtattttattattttctttttcttaagaaatgccagtgtgtcctagaacctagataacgaagtgcacttacacttataaaataacttgcatcta

SEQ ID NO: 86132 - DNA, 875 bp, Homo Sapiens
gggacttccggggcagtaggaacgccgagtcggctgccgtggctgtgctgagggtggcggccggatagggacccagaactccatttgacagatgaggaaacggcgaggcagacagctgatgttctaatcatgtcagataaagatgatattgagactccactgctaactgaagcagcccccatccttgaagatggaaactgtgagccagccaagaattctgagtctgttgaccaaggtgccaaaccagagagtaaatcagaacctgtagtttccactcggaaaagaccagagaccaaaccttccagtgaccttgagacttcaaaagttctccctattcaggataatgtttccaaagatgtaccccagaccagatggggttattgggggagctggggcaagtccatactctcctcagcctcggctacagtagctacagtaggacaaggcatttcaaatgtcatcgagaaggcagagacttcccttggaatccctagtcccagtgaaatttcaactgaagtcaagtatgtagcaggagagacaaatgccaaagagaatgaaaactcctccccagtggctggggcatttggtgtattctctaccatctctactgctgttcagagcacaggaaagagtgttataagtggggggtttggatgcccttaaaaattcattgggaaaaaagacaatgggatgtgataagcagaagggggatcctggaatttaaaaagaaccagggtcctgatgaaaccgaaatgcctacactattctcaggtttttccaggaggcgaaggagaaaagaagagattccggacctccaatgagaggttaccgtgggaaccggaccaggaaacccctttagggggctactccttgaa

SEQ ID NO: 86133 - DNA, 1043 bp, Homo Sapiens
ggcagggtagactccccagggagtaactccataatactggtgagggaccacagctgggcctagtgtcgctgctgcagccaatccagctgtgtaggggtccgtccctgggggagcagcgctgatgatgtatggattggggacaaacgcagcgggagctaaacctgcgatgtgcggctgatgagcagctgccagtgcatactgctgctgctgagcagctgtcaactgctggacagcaagcgcattaggtctttggaacagctgttgttgagaattgtagtcaaaaagtcccacagttgctgctgctgagtccacaggtacctgcgtgcctgaataatcaaactgaagaggctccatgcccacatgttccatggggtcccaaggggacactatgggatctccatgtgggagaaatcctccacagggcttggcaccattggtgctggtcagctgggctaagccctcagaaccattctggtttggacccagaagatccacttcattagcagagttctggcaattaccaggggtacggctaaaatctttgacgtctgcatcaatcccattctgcactggtaaaccattggtcttgtccatcacatcaccctcctccttcaaatctcctagcttatctccatcaaacgtacccttgttcttcttttcacctttgtcgttttcatcactgtctgcatcccttgggccaaatcctccttttcttagacaggaatcgcccggggatgagctcaacacatactccaccatgctaacgcctagtcccccactctccgatcgtggggacagtacagaattgacctcactgttcacatggaaactctgaccaggtcttctctgcaccatgattggctgggaaactgaatgataaagatgttccccaggcactgtctcgccattgatcacccaggaatattccttttggtccatctttgctggattcatctgtttcccaaaactttttacctggcaagagctgctctcccatcgctcttccctccagagcaagtgcttgaaaatcatgattcagttcc

SEQ ID NO: 86134 - DNA, 1106 bp, Homo Sapiens
  misc_feature (73)..(107): n is a, c, g, or t
tgatatcactatagggggtcgcctcaatagcgaacgacgagcgcagcgagtcattgagcgaggaagcggcggnnnnnnnnnnnnnnnnnnnnnnnnnnnnnnnnnnncagtcgacggtaccggacatatgcccgggaattcggccattacggccgggggcagttcccctgatcagcgtagccagttgttgcctgtctgaacctctgccagtcctggagactggtgccctgagctccaaccagcgggcctcatcctacaccctcaccaccgcaacttctcacccgagcaagaagcagctcccagagagaaagaacgttcccacctgcctagccatgggagaggacgctgcacaggccgaaaagttccagcaccctgggtctgacatgcggcaggaaaagccctcgagccccagcccgatgccttcctccacaccaagccccagcctgaacctagggaacacagaggaggccatccgggacaactcacaggtgaacgcagtcacggtgctcacgctcctggacaagctggtgaacatgctagacgctgtgcaggagaaccagcacaagatggagcagcgacagatcagtttggagggctccgtgaagggcatccagaatgacctcaccaagctctccaagtaccaggcctccaccagcaacacggtgagcaagctgctggagaagtcccgcaaggtcagcgcccacacgcgcgcggtcaaagagcgcatggataggcagtgcgcacaggtgaagccggctggagaaacaaccacgcccaggtcctccgacgcaaccatttcaaagtgctcatcttccaggcaggaacacatgagatcctgacaacgtgttagtgaaacaggccagtctccggtgccggagagggaagaggagcgtccgggatgaaaacaaatccctgggggaaaccctgcgcaccgggaccctcctcaaatgatgaatttggcccgataagaggcctcgaggacactcccccggaaaaggtgtgacaaccagggcgggaaaaaagataccgcaggaaagggagctccccaaggttttgcgacaacggacaaaaacgggggagacaacctttaggcggaagaaaaactc

SEQ ID NO: 86135 - DNA, 490 bp, Homo Sapiens
cgcgtgtgggcgctgaccttgcgggacttctccagcagcttgctcaccgtgttgctggtggaggcctggtacttggagagcttggtgaggtcattctggatgcccttcacggagccctccaaactgatctgtcgctgctccatcttgtgctggttctcctgcacagcgtctagcatgttcaccagcttgtccaggagcgtgagcaccgtgactgcgttcacctgcattgtggctctggagacctggaagcactgctaactgttctctcgattttctgacgctcggccacatcaacctgtcatactagttgtgaggagaagtcaaggacagtgacacagccagccagtctgaggcattttccatcatcctgaaggagttgccctatcctgcttttcactggagggggtatggatgggggctcctgacacactgacctctgtcagttccttcagcacaccaggctaatccccagtcttgcgcctttggacca

SEQ ID NO: 86136 - DNA, 664 bp, Homo Sapiens
  misc_feature (664)..(664): n is a, c, g, or t
tccatatggttcgttaagggggccaggggcccagggacttgccccaattttagaaaatcccctaatgtgcagttgttcccttttgtctgtatgaagggccccttgaatgactaatcccgggctggaagcatttcccctggggggtgtcggagtccatgagccaagcctgagggggacagtgagtctcccaggtctgccacactggtgcaccttgctggcacggtgcctcaggaaggtggcgactcaggtgggccttgagttatattttaactcagctgctcagttcccaggggcacatttctggatcagaacccatgggaaacaggaggtactaagtgcaatgtcttagcattctgcaaaatggagatctgttgtccagcggcttatctcctttttagtaacccttctttctgaacccagggcccttttcagccttccctcatattttcttgagatcaaactttacttctttcttatttactaagaatttgcctgtttgaataagaacaaaacgctaaggtgggtagcctaagctgattttctgctggttacacgtgtctctcacaccacatttcctcaaagctaatctgaattctgtaggctaaaaatattcatgtagcaaatctgagaattgaaaactgcagataaccggccgggtatggtn

SEQ ID NO: 86137 - DNA, 1632 bp, Homo Sapiens
  misc_feature (1539)..(1570): n is a, c, g, or t
aggctggaccggtccggattcccgggatgatggggccaatgggatgatgactgtaatacctgccagtgcctgaatggacggatcgcctgctcaaaggtctggtgtggccctcgaccttgcctgctccacaaagggcacagcgagtgccccagcgggcagagctgcatccccatcctggacgaccagtgcttcgtccacccctgcactggtgtgggcgagtgtcggtcttccagtctccagccggtgaagacaaagtgcacctctgactcctattaccaggataactgtgcgaacatcacatttacctttaacaaggagatgatgtcaccaggtcttactacggagcacatttgcagtgaattgaggaatttgaatattttgaagaatgtttccgctgaatattcaatctacatcgcttgcgagccttccccttcagcgaacaatgaaatacatgtggccatttctgctgaagatatacgggatgatgggaacccgatcaaggaaatcactgacaaaataatcgatcttgttagtaaacgtgatggaaacagctcgctgattgctgccgttgcagaagtaagagttcagaggcggcctctgaagaacagaacagatttccttgttcccttgctgagctctgtcttaactgtggcttggatctgttgcttggtgacggccttctactggtgcctgcggaagcggcggaagccgggcagccacacacactcagcctctgaggacaacaccaccaacaacgtgcgggagcagctgaaccagatcaaaaaccccattgagaaacatggggccaacacggtccccatcaaggattacgagaacaagaactccaaaatgtctaaaataaggacacacaattctgaagtagaagaggacgacatggacaaacaccagcagaaagcccggtttgccaagcagccggcgtatacgctggtagacagagaagagaagccccccaacggcacgccgacaaaacacccaaactggacaaacaaacaggacaacagagacttggaaagtgcccagagcttaaaccgaatggagtacatcgtatagcagaccgcgggcactgccgccgctaggtagagtctgagggcttgtagttctttaaactgtcgtgtcatactcgagtctgaggccgttgctgacttagaatccctgtgttaatttaagttttgacaagctggcttacactggcaatggtagtttctgtggttggctgggaaatcgagtgccgcatctcacagctatgcaaaaagctagtcaacagtaccctggttgtgtgtccccttgcagccgacacggtctcggatcaggctcccaggagcctgcccagccccctggtctttgagctcccacttctgccagatgtcctaatggtgatgcagtcttagatcatagttttatttatatttattgactcttgagttgtttttgtatattggttttatgatgacgtacaagtagttctgtatttgaaagtgcctttgcagctcagaaccacagcaacgatcacaaatgacnnnnnnnnnnnnnnnnnnnnnnnnnnnnnnnnttgttgggggaggggagactttgatgtcagcagttgctggtaaaatgaagaatttaaagaaa

SEQ ID NO: 86138 - DNA, 898 bp, Homo Sapiens
gggcttcaaggccgattgaaatgaggcttgatggctgaagaaggccagatgtggcggaaaagtctctcctgacctgtcccacatgtgagggtcttgtctggcacatggactcgtgcagctgttcacagagtctctgccctccttccttgggaaaagtttccctccattgggctggttctggtgctggtcaaagtctgtactgaaccagaattgctttccacatgccccacacaagtatggtttctgcctggcttttcccccatggtatttagccaggtgtaaggtatcttgtcaatattgggccacatatgtcacatgggtgagactccagctctgccatgagagtcctgacctctgacactcctactacaaaaatgctctgctcagaagatacctcttcatcctccactccatgccaacaaccaggtctaagtcccctctgggcctctctttctgtggctgaagtcatatccacctggtcatacacccagggctcttctcctcgctctagtttcatgactgcacgtgatctggaaaatgcaattcccagtgaggctaaaagtgcaaagttctccagcatcacatcatggtacaaaagtctctgagcatcatcaagaagctcccattcttcccgagagaagtatacaaacacatcctcaaagaccacacagccccgcgcggagtccgttagctccgccataggaccgtgggcgcggacagctgccgggagcggcaggcgtctcgatcggggacgcaggcacttccgtccctgcagagcatcagacgcgtctcgggacactggggacaacatctcctccgcgctttcccaacacctccacctgcggcccacacaagcgttacagaaccccggccagggacagcctgacagaaacaaaat

SEQ ID NO: 86139 - DNA, 837 bp, Homo Sapiens
ctaaatgtgagatcaaggaattaccaccaaaaaaggagagtaatacaggagaaatattccagacagtaatgttggaaagacatgaaagccacgacatacaagatttttgcttcagagaaacccagaaaaatgtacatgactctcagtgtctgtggaaacatgattgaagacattataagcgagtgcgtgtgacctataaggaaagtctcattggtagaagagacatgcatgggagaaaggatgatgcacaaaagcagcctgttaaaaatcagcttggattaaacccgcagtcacatctaccagaactgcagctatttcaagctgaagggaaaatatataaatatgatcacatggaaaaatctgtcaacagtagttccttagtttccccaccccaacgtatttcttctactgtcaaaacccacatttctcatacatatgaatgtaattttgtggattcattattcacacaaaaagagaaagcaaatattgggacagaacactacaaatgtagtgagcgtggcaaggcctttcatcaaggcttacattttactatacatcaaataatccatactaaagagacgcaatttaaatgtgatatatgtggcaagatcttcaataaaaaatcaaaccttgcaagtcatcaaagaattcatactggagagaagccatataaatgtaatgaatgtggcaaggtcttccataatatgtcacaccttgcacagcatcgcaggattcatactggagagaaaccattataatgtaatgaatgtggcaaggtttttaatcaaatttcacatcctagcacaaaatcaaagaatgcatacacggagaagaacc

SEQ ID NO: 86140 - DNA, 654 bp, Homo Sapiens
  misc_feature (288)..(465): n is a, c, g, or t
gcagggcttctgcgcagagggctggcctcagcggcggagctggctgctggcctcagttctgcctctgtccaggtccttgtgacccgcccgctctcctaagggagcgtgtcctggccccctcccgcagcggctcggaaaaaaggcagcaccgcgtcgttgacggcgcgggctctggactcgctgcttggtaaaaaccttcctcttcctccagtgcgggacgcactctctggtatctcttttgacctcccggaggctttcctttgtcggtcgcggcgccactgtactatnnnnnnnnnnnnnnnnnnnnnnnnnnnnnnnnnnnnnnnnnnnnnnnnnnnnnnnnnnnnnnnnnnnnnnnnnnnnnnnnnnnnnnnnnnnnnnnnnnnnnnnnnnnnnnnnnnnnnnnnnnnnnnnnnnnnnnnnnnnnnnnnnnnnnnnnnnnnnnnnnnnnnnnnnnnnnnnnnntctgcgaaaagagaaggcaagaacaaaatctactaccttgtcggcccgcctcggccctcaaaaaactttcaaaaccatttcgtttgggcgcgcggggcccagtaagggaaaggaaattgggtcaatagctggtttccctaagggaaatccctggaccatgacctagcggcttggaattctcccccaaat

SEQ ID NO: 86141 - DNA, 1134 bp, Homo Sapiens
  misc_feature (973)..(996): n is a, c, g, or t
ctggaccggtccggaattcccgggatatcgtcgacccacgcgtccgcccacgcgtccgcgttgacctcgtgtttactacagaattccttcagcgatgtcgagcaaatacagttctgggccaacaaatatattttccaatcatcttcagccagtatgacccaaagattgtttatagtgggaaagttcccagtgacaaccattttgcctttactcagaaaactggcttctggagaaactatgggtttggcatcacgtgtatttataagggagatcttgtccgagtgggtggctttgatgtttccatccaaggctgggggctggaggatgtggaccttttcaacaaggttgtccaggcaggtttgaagacgtttaggagccaggaagtaggagtagtccacgtccaccatcctgtcttttgtgatcccaatcttgaccccaaacagtacaaaatgtgcttggggtccaaagcatcgacctatgggtccacacagcagctggctgagatgtggctggaaaaaaatgatccaagttacagtaaaagcagcaataataatggctcagtgaggacagcctaatgtccagctttgctggaaaagacgtttttaattatctaatttatttttcaaaaattttttgtatgatcagtttttgaagtccgtatacaaggatatattttacaagtggttttcttacataggactcctttaagattgagctttctgaacaagaaggtgatcagtgtttgcctttgaacacatcttcttgctgaacattatgtagcagacctgcttaactttgacttgaaatgtacctgatgaacaaaacttttttaaaaaaatgttttcttttgagaccctttgctccagtcctatggcagaaaacgtgaacattcctgcaaagtattattgtaacaaaacactgtaactctggtaaatgttctgttgtgattgttaacattccacagattctaccnnnnnnnnnnnnnnnnnnnnnnnnacaattgttttaaagccatttcatgttccagttgtaagataaggaaatgtgataatagctgtttcatcattgtcttcaggagagctttccagagttgatcatttcctctcatggtactctgctcagcatggccacgta

SEQ ID NO: 86142 - DNA, 1017 bp, Homo Sapiens
tgtacattcgctggatcctgccgtccagctcagccaggaggaccccggccatcctgatcagtgaggtggtcagatcccttctagtggtctcagacttgttcaccgagcgcaaccagtttgagctgatgtatgtgacgctgacagaactgcgaagggtgcacccttcagaagacgagatcctcgctcagtacctggtgcctgccacctgcaaggcagctgccgtccttgggatggacatggccgtggcggagcctgtcagccgcctgctggagagcacgctcaggagcagccacctgcccagcagggttggagccctgcacggcatcctctatgtgctggagtgcgacctgctggacgacactgccaagcagctcatcccggtcatcagcgactatctcctctccaacctgaaagggatcgcccactgcgtgaacattcacagccagcagcacgtactggtcatgtgtgccactgcgttttacctcattgagaactatcctctggacgtagggccggaattttcagcatcaataatacagatgtgtggggtgatgctggctggaagtgaggagtccaccccctccatcatttaccactgtgccctcagaggcctggagcgcctcctgctctctgagcagctctcccgcctggatgcagaatcgctggtcaagctgagtgtggacagagtgaacgtgcacagcccgcaccgggccatggcggctctgggcctgatgctcacctgcatgtacacaggaaaggagaaagtcagtccgggtagaacttcagaccctaatcctgcagcccccgacagcgagtcagtgattgttgctatggagcgggtatctgttctttttgataggatcaggaaaggctttccttgtgaagccagagtggtggccaggatcctgccccagtttctagacgacttcttcccaccccaggacatcatgaacaaagtcatcggagagcttctgtccaaccagcagccatacccccacgaagggggatgacacgagt

SEQ ID NO: 86143 - DNA, 657 bp, Homo Sapiens
caaacatggacctcctagaaaaattacaggtagctcatactaaaatccaggccttggaatcaaacctggaaaatcttttgacgagagagaccaaaatgaagtctttaatccggaccctggaacaagaaaaaatggcttatcaaaagacagtggagcaactccggaagctgctgcccgcggatgctctagtcaattgtgacctgttgctgagagacctaaactgcaaccctaacaacaaagccaagataggaaataagccataattgaagaggcacggcctcagcagaaagtgctccttagaatactacagagaggaagagcctgcatgtcgctggcccaaggctggaccctgaagctgatggaaccacctaatactggtgctgagctcctagtcacagcaggtggacctcgtgctcatcagagcatgccaatcctaagccattggacatatgtagactggtttttgttgttgctatgtacatataaatatatatataaaatgaacatagttcatgctttcagataaaatgagtagatgtatatttagattaatttttttagtcagaacttcatgaaatccacaccaaaggaaaggtaaactgaaatttcccttggacatatgtgaaatctttttgtctttatagtgaaacaaagcca

SEQ ID NO: 86144 - DNA, 1186 bp, Homo Sapiens
atgcttctgcaagcttccatgaaggttgtgcaaaaaagtttcaatccagagttgggttccagctttctgtagctgtaagcattggtggccacaccacctccttacaaagcaactagaacctgcggcatacattggagagatttttttaattttctggacatgaagtaaatttagagtgctttctaatttcaggtagaagacatgtccaccttctgattatttttggagcatgagaacattttgaatttttttcatctctctctccccacccctaagattgtgcaaaaaaagcgtaccttgcctaattgaaataatttcattggattttgatcagaactgattatttggttttctgtgtgaagttttgaggtttcaaactttccttctggagaatgccttttgaaacaattttctctagctgcctgatgtcaactgcttagtaatcagtggatattgaaatattcaaaatgtacagagagtgggtagtggtgaatgttttcatgatgttgtacgtccagctggtgcagggctccagtaatgaacatggaccagtgaagcgatcatctcagtccacattggaacgatctgaacagcagatcagggctgcttctagtgttggaggaactacttcgaattactcactctgaggactggaagctgtggagatgcaggctgaggctcaaaagttttaccagtatggactctcgctcagcatcccatcggtccactaggtttgcggcaactttctatgacctttgagacctaaaagtcttcgatgcaagaaatggcgcaagaactccaggtggagcccctagaagaaacgttgcgttgtagtggcgccttgaacttgcgggaccacgttccacacattttttagagccccctgttggtaaccgtggtcccacatggtaggttggtgcactgaagaaaagacttctactgcttgtgagaaccccagggctctgtgcgattatgcgcaaagagggctcctggggaaaataacgcggggctgtgggaaaacatgacgacggccaataaaggccgcctctaagtgggcagcacacacgaggtggaagtgattgtgccacgaagaccccgcccacggtaatcacatatctgagaaagatcatcgcacgcggcagaaaataagagcgctcctccgacaaatatgcgttatgatgagcga

SEQ ID NO: 86145 - DNA, 684 bp, Homo Sapiens
ttgttgctgtcatgtcgggtgcgattgcagctctggccgcttcctatggttcgggttcagggtccgaatcggactcggacagtgagagcagtcggtgtccgctgccagccgccgactccctcatgcacttgactaaatcgccttcatcaaagccgtctctagcagtggcagtggactcggctccggaggtggcagttaaggaagatttggagactggagttcaccttgaccctgccgtcaaagaagttcagtataatcctacctatgagaccatgtttgctcctgagtttggaccagaaaatccctttaggacacagcaaatggctgcccctagaaatatgctttctggatatgccgaaccagctcatatcaatgatttcatgtttgagcagcaaaggagaacttttgcaacatatggttatgcattagacccttcattagataatcatcaagtgtctgctaaatatattggttctgtagaagaagctgaaaaaaatcaaggtttaactgtatttgaaactggtcagaagaaaacagaaaagaggaaaaagtttaaagaaaatgatgcatccaatattgatggttttttgggaccatgggcaaaatatgtggatgaaaaagatgtagccaaaccttcagaagaagagcaaaaagaattggatgaaatcacagcaaagaggcaga

SEQ ID NO: 86146 - DNA, 1051 bp, Homo Sapiens
agactttctctcaggatttccgctggcttcaggttccggtcaggcgtcgggacagagcctgatccaggcttcggcggccggtggcagctctcgatcagctctcgcagtcggagaggcggctaaggaaaggtgccacagcagagacgcgaaggagaggccctagaaccttttcaaagaagaatggaagaaaccatgaagcttgctacgatggaagacacagtggagtactgcctgttcctgataccagatgagtcaagggactcagataaacataaagagattcttcagaagtacattgagagaataatcactcggtttgcacctatgctggtcccctacatctggcagaatcagcctttcaatcttaaatataaacctgggaaaggaggtgttcctgctcatatgtttggcgtgacaaagtttggggataacattgaggatgaatggtttattgtttatgtaataaagcagatcacaaaggaatttccagagttagtagcaaggattgaagacaatgatggtgaattcttgttaatagaagctgctgactttctccctaaatggctggatcctgaaaatagcaccaatagggtatttttctgccatggggaattgtgtattatccctgcaccaagaaaatctggagcagaatcttggttacccaccacacccccaacaattccacaagcattgaatataatcacagcacattcagaaaaaatacttgcttcagaatctatacgagctgctgtgaataggcgcatcagagggtacccagaaaaaattcaggcctcacttcatcgagcacactgcttccttccagctggcattgtggcagtgctaaagcaggcccagattggtggtgcagcatcagatttactagaaaccttgactggagctttctgttcagaatctgcctggaacgcatatggctcgccatccaaaggtcttgcgctgggcaccaggtgtcccacggggggaagcgcaccactaccaacgaccatgggactccggtacacacgcttgtaaacattgcaccgggagaaataag

SEQ ID NO: 86147 - DNA, 1047 bp, Homo Sapiens
  misc_feature (651)..(664): n is a, c, g, or t
ctcttgaagagggctggtatatttgtgcctgctggaggtggaattaacagtaagaaggagaaagggattgaatggacttacaggaaggatttcaagtaaattcagggaaacacatttacttgaatagtacaacctagagtattattttacactaagacgacacaaaagatgttaaagttatcaccaagctgccggacagatatatattccaacaccaaggtgcagatcagcatagatctgtgattcagaaatcaggatttgttttggaaagagctcaagggttgagaagaactcaaaagcaagtgaagattactttgggaactacagtttatcagaagatcaacttttgctaattcaaataccaaaggcctgattatcataaattcatataggaatgcataggtcatctgatcaaataatattagccgtcttctgctacatcaatgcagcaaaaactcttaacaactgtggataattggaaatctgagtttcagctttcttagaaataactactcttgacatattccaaaatatttaaaataggacaggaaaatcggtgaggatgttgtgctcagaaatgtcactgtcatgaaaaataggtaaatctgttttttcagctactgggaaactgtacctcctagaaccttaggnnnnnnnnnnnnnnaagaggacaagaaggactaaaaatatcaacttttgcttttggacaaaatgcatctgactgtatttttacttaagggtattgtgggtttcctctggagctgctgggttctagtggggtatgcaaaagggaggtttgggagacaatcatgttcactccagttttatttatagaagactacgggaaccacgaaagacgggaaaataccaaggggaaattctcttctaatcttggggtttgcgctcaacagaccccaggaccattttttcacctgggaaaaacaaggggtccctcctggaccctcctcctttaatgggctgggaatctcctaacaaagtggccactgcacccaattggaagaaaaaatcccctgtgaaagaagtccc

SEQ ID NO: 86148 - DNA, 843 bp, Homo Sapiens
  misc_feature (816)..(816): n is a, c, g, or t
gcaactgaatgggaatcctcaaaacccctactgtgatggcattgagagggtcatcgaggctcattacacgagtctgaaatctgtacaactatatgggcccaccaactttgctcctgtaattaatcatgtagcaagatatgcttcttctgtaaaggatggctcccaatattttgtgcttctgattgttacagatggtgttatctcagatatggcccagactaaggagtccatagttaatgcctcaaaacttccaatgtcaataattatagtaggtgttggaccagcagaatttgatgcaatggtcgaattggatggagatgatgtaagagtctcctctagaggaaaatatgctgaaagagacattgtgcagtttgtgccattcagggattatattgacagaagtggaaaccacatactgagcatggctagattggctaaagatgtcctagctgagatccctgagcagtttctctcctatatgagagcccgaggaatcaagccatcacctgcgcctcccccatacaccccacctacacatgtgttacagactcaaatatgactgtgctctgaaatgctaatgtcaactacaaatcaaaagtgctgagttaatgctttgtgcctggtgctctgtaatgaaccaggcaatgagatagttttctcagtttggtttcagcagttaatgtgctttcttggatccaaatttaaatatcttcctaaaccaaaactgtaaatatggttgttgcatgagcaacagaaaaaattgtttaaatgcttgaagcaaagtatggatgtcttctctaaatctttctttctttnttttttttaacagaaacagctaatttc

SEQ ID NO: 86149 - DNA, 965 bp, Homo Sapiens
cctggttctgttggaaatggatctagtcgatacagtccttctcagaatagtccaattcatcacatcccttcacgaagaagtcctgcaaagacaatcgcaccacagaatgctccaagagatgagtctaggggccgttcctcgttttatcctgatggtggagatcaggaaactgcaaagactgggaagttcttaaaaaggttcacagatgaagagtctagagtattcctgcttgataggggtaataccagggataaagaggcttcaaaagagaaaggatcagagaaagggagggcagagggagaatgggaagatcaggaagctctagattacttcagtgataaagagtctggaaaacaaaagtttaatgattcagaaggggatgacacagaggagacagaggattatagacagttcaggaagtcagtcctcgcagatcagggtaaaagttttgctactgcatctcaccggaatactgaggaggaaggactcaagtacaagtccaaagtttcactgaaaggcaatagagaaagtgatggatttagagaagaaaaaaattataaacttaaagagactggatatgtagtggaaaggcctagcactacaaaagataagcacaaagaagaagacaaaaattctgaaagaataacagtaaagaaagaaactcagtcacctgagcaggtaaagtctgaaaagctcaaagacctctttgattacagtccccctctacacaagaatctggatgcacgagaaaagtctaccttcagagaggaaagcccacttaggatcaaaatgatagcgagtgattctcaccgtcctgaagtcaaactcaaaatggcacctgttcctcttgatgattctaacagacctgcttccttgactaaagacaggctgcttgctagtacacttgtccattctgtcaagaaggagcaagaattccgatccatctttgaccacattaagttgcc

SEQ ID NO: 86150 - DNA, 1577 bp, Homo Sapiens
  misc_feature (1346)..(1346): n is a, c, g, or t
  misc_feature (1374)..(1374): n is a, c, g, or t
aggcctggctgtggtcaaacccacccggcccaactcactcacaccgttccggaaggcaaaagccttgtatgcctgcaaagctgaacatgactcagaactttcgttcacagcaggcacggtcttcgataatgttcacccatctcaggagcctggctggttggaggggactctgaacggaaagactggcctcatccctgagaattacgtggagttcctctaaccgtgggccccagcagaactgctgagctttacatggtatccatgacaactgctgattccagtgtcgaggccatttctctttgccactgagaaatgcagcgtgactgactctgttgctacctgtcaacatgaatgtttctgtgagctctggtgtcactcatctccatgatcatctcagccaacatgcatcagtactgcaagaaaagaagtcaatcagcagaggagagcatttgataactaagaggaagacttgcaaagccgttttctcatgagtaccctgaatagggggcactcattttgtttcaacggtccaaacgcccaaccttcagaaagaggaagtcagatagaaatagtccctgagagcacactgtgtagctaagcctgctggggctgggtgaagaaattggcgctgagatccaggctggatccattgcttttgtttacaataggcactctctctaccccacctctcagtacttgagacttaaagtgctacaggcagctggatctgtttgcatgcaggatgaagagggttaaaacactgtttatataagatccaatctctcaccatctctaaagcagccgttggcctgtcatcagtgagatacaatccagtcttctcatgcacgggaacacacacaccctgcgtttctccctcccaggctaggaacctctctgccaccaaaggctgccatccatcgcctagtaaccacggcaacccaacctactctaaaacccaaacccaaaaaaataaaataacacatccctctttgcatgacacatttttttcttctcccccttttttggtacaccttttatttgcaatggcgttttctaaccaacttcgaaggcccacggaatcacagtggactttaggggtgggtcctaaccttggaaggcaccaaggggaataagttagcttgggggaaatctggttctcccctgtttccgggagattaaagttttcgagccagccctctccgggaaatttatacctttcggcgaaggccaccccccgcctaccccaacccgctcgtttggagaaattcacccgcttacactcaaattcgcttaacaatatgtcaccgagtttcccccccgcatggaaaactctgaaggattttggntctatttttaaagaggggcaaagaatangccggctcttcccaacatgggggcagatggcctcacacttggaaccggggctacttccccatagttcccctcccccaattacacccacacgcccactggatcccacaacctctggggttgtgcgctcttataccgccaactatgtgtggctacaacgccctcccgtgtctctcatttcttggggggtggcggcagaaacacgg

SEQ ID NO: 86151 - DNA, 828 bp, Homo Sapiens
ccgaaacgtgctactcaagtgacccagtcaggttcaggtggcagattttggtgtggctgacctgctgcctcctgatgataagcagctgctatacagtgaggccaagactccaattaagtggatggcccttgagagtatccactttgggaaatacacacaccagagtgatgtctggagctatggtgtgacagtttgggagttgatgaccttcggggcagagccctatgcagggctacgattggctgaagtaccagacctgctagagaagggggagcggttggcacagccccagatctgcacaattgatgtctacatggtgatggtcaagtgttggatgattgatgagaacattcgcccaacctttaaagaactagccaatgagttcaccaggatggcccgagacccaccacggtatctggtcataaagagagagagtgggcctggaatagcccctgggccagagccccatggtctgacaaacaagaagctagaggaagtagagctggagccagaactagacctagacctagacttggaagcagaggaggacaacctggcaaccaccacactgggctccgccctcagcctaccagttggaacacttaatcggccacgtggggagccagagccttttaagtccatcatctggatacatgcccatgaaccagggtaatcttggggagtcttgccaggagtctgcagtttctgggagcagtgaacggtgcccccgtccagtctctctacaaccaatgccacggggatgcctggcatcagagtcatcagaggggcatgtaacaggctctgaggctgagctccaggagaaagtgt

SEQ ID NO: 86152 - DNA, 766 bp, Homo Sapiens
cttttttgttgaaccttggtttgagatacataatgaagagcttgactatgctgtcctgaaactgaaggaaaatggacaacgaagtacctatggaactatataatggaattactcctgtgccacttagtgggttgatacatattattggccatccatatggagaaaaaaagcagattgatgcttgtgctgtgatccctcagggtcagcgagcaaagaaatgtcaggaacgtgttcagtctaaaaaagcagaaagtccagagtatgtccatatgtatactcaaagaagtttccagaaaatagttcacaaccctgatgtgattacctatgacactgaatttttctttggggcttccggctcccctgtgtttgattcaaaaggttcattggtggccatgcatgctgctggctttgcttatacttaccaaaatgagactcgtagtatcattgagtttggctctaccatggaatccatcctccttgatattaagcaaagacataaaccatggtatgaagaagtatttgtaaatcagcaggatgtagaaatgatgagtgatgaggacttgtgagaattcagtctactggatttaagggaatggcttatggagttgttatttcataggcattgaaaatggttttctaaactccaaacatggtcatcttatcaataataataatattgaccatttcctatctgccaggcatttttctaagcacatgaagaaattagtcctaacaacactatgagatggactataacttgcccaaa

SEQ ID NO: 86153 - DNA, 998 bp, Homo Sapiens
  misc_feature (680)..(721): n is a, c, g, or t
  misc_feature (831)..(831): n is a, c, g, or t
aagctagtaaggcggggttaatcggccgaggctggaggatggcggacgccggcattcgccgcgtggttcccagcgacctgtatcccctcgtgctcggcttcctgcgcgataaccaactctcagaggtggccaataagttcgccaaagcgacaggagctacacagcaggatgccaatgcctcttccctcttagacatctatagcttctggctcaacaggtctgccaaggtcccagagcgaaagttacaggcaaatggaccagtggctaagaaagctaagaagaaggcctcatccagtgacagtgaggacagcagcgaggaggaggaggaagttcaagggcctccagcaaagaaggctgctgtacctgccaagcgagtcggtctgcctcctgggaaggctgcagccaaagcatcagagagtagcagcagtgaagagtccagtgatgatgatgatgaggaggaccaaaagaaacagcctgtccagaagggagttaagccccaagccaaggcagccaaagctcctcctaagaaggccaagagctctgattctgattctgactcaagctccgaggatgagccaccaaagaaccagaagccaaagataacacctgtgacagttaaagctcagactaaagcccctcccaaaccagctcgagcagcacctaaaatagccaatggtaannnnnnnnnnnnnnnnnnnnnnnnnnnnnnnnnnnnnnnnnntgatgactcagaggaggagaaggcagcagcacccccaagaagactgtacctaaaaagcaaagttgtggccaaggcccagtgaaagcaggttacaaccctaccggaagagnctagcagtgaggattcccccagtggccgaggaagaagagcaaaaaaacccattgaaaataacagggcctacagttagagcccccgctttgtccccccaaagaatttctggaacccctccagaagtttggggaacacccgtgaaaagaaaccgtgaatttgtctcatt

SEQ ID NO: 86154 - DNA, 600 bp, Homo Sapiens
cgtgggcaagaactaataacctactgccttaaatcggcaaaagggattttcttgtgtgaattccactggcggaatattattgttgaaatacccttttcctgttccccaaaaggcctgcagttgattccattttgccaaaatagcatctctctcatctcccaacagcgttggagcagaaagagcactcgcggtatttatcagctggttggactgggtaggagcttgtgtaggctgactgaagagaccacctaatgtagtttgctgctgctgctgttgtgtattaaatcctccaaatcccagtccagttcccaaaccagtacctaaaccagtactagttcccgttgttgtgccaaaaccagtaccaaatccaaaacctttgttctgagtaccaccaaagagtccagtagtgcctgtgttagttggggcagaaaagctgaacgcagaacctgcagttgtagatgttgtcccaaatcctccaaacccacccgcgggggccgcggtggctgcagcggtaccggaggtgcccgagggagccccaaaattgaaggccatgtcgcgaaagcaggagaccaagtaggttactcctgcgacgcgcagcgc

SEQ ID NO: 86155 - DNA, 888 bp, Homo Sapiens
gcttagctgcaacgttcttgtaagtattatttccacaggttccaacaggatccttcaagtagggtgtctggcagccttcagtaacagagttttcacatcccacaaggttgagaaggatatcatcatctttatcatctacttcacatcccagtagcatccagctttccacattatcaccttctgaaatggtgctctcttcctcttcacttgaactgacctctataatcatgacctctcggattacacctgatctctcttcacatttaggcttctcaatatcactcttgcatttcttatcaaccagctcattagattgaagagaagaagaaagaccatgggcattttcttgtgcttgaactctaacattctttcctttacatctataaatactgtcttcatcagacaaagtgatgacctctgacccatctgacagctggatgacctcactatctgaaaggacaattagcttcttctgatttggtttactactcgaagattccaaattcccagagttcttttcttcatgctcttcctccctgatgacatcatcaagatcttgggcataataaattcggctatagagttgaaattccacctcactatcaacactcagttcactagataactcatcccgataaagatcatcttcatatgcttctatagtctcatagccaccaaacatcataaaaaatcagtaaccttgatgtgctgcagctgcaaacctacttttcttaataaattataatgatgtaatattcatcatttatccattatatttcaaatatattttgccagtttgtcattttaaaaattttatttatgactttttaatgttctgaagttttaaatgtttatgtcatctattaaaaatagtatctattaaaaaaa

SEQ ID NO: 86156 - DNA, 1317 bp, Homo Sapiens
  misc_feature (16)..(16): n is a, c, g, or t
  misc_feature (77)..(77): n is a, c, g, or t
  misc_feature (110)..(110): n is a, c, g, or t
  misc_feature (212)..(212): n is a, c, g, or t
gatgcacaggccagcngcatgagaggccacagggtcgtagagagcagccagcgccacgtcagcaggtcagcgagtgnccacacagaggcaaaggcttcaggccatgtgancagtctcggaaaacaggaaaccagtccaccaaggtgtagagaatccgtgtcataaggttgaggcccatgaacatggccatccagccagctgcccgcaggccncaggtcttcatggagttgctccttagttctctatgaaacacctcctctgctgagaagtccccgtggtgcaggagcagtaaggtatccccagacttggtggagaatgggactagctggtcaccccgctgccgggcaatcacagtgaccacgtgagctgggcccaggtcagggtcatcgccgctcagtccagcataggaaaaggagacacgcaagtctcccacctctggatacttgggatttttcgctgtggtagaaaaagtctccacggcgaatgatgtccacatgagggtcctccagcttggataggctcagggacttgaagttgtcgactttgtcgatgaggcctgacgagaggaaaaacctgccaatttggacaaagggggctgttgccatgaatgactccactgccatggcactggggtttttgtggccaatctctcggtcgaagtttttgctgttgatgatttctgacctccattcagtgttgtaggaatacctcgtctccttcttcacctgcccatcctcggtgtactccctggactcctcagtttctacccattggtacatctccacgtgcctccgcagtttcacagccggaagatggaccccatagtttggatcagacaaaagcttggatgtccgtaaggcgccaatgatgtgcaccagccttccttcattctccggagccacactgtggatgctgtcgggagacaccacaagcgagagcccctcagccaatgaggttgccgtcttcaatgcgcggccctcattggtgaaaattaggtagaaggagagcaggaaggccatgagccccacaaacatcccacccgaggtctcgctcagccgttccaggaagcctggctgggagctggttttaactttgacatgttctctccgggtactggtactggaataattcgcggccatggtgggacccggctcgctgccgccgcctcgcgctgttcagctaggaagtgggctgacgactggagcgtggtgtccagcggcctcttgccagccccagcattcgaaaatccgcgtggactccagggccaagcgggacttactgtagttacctccccctgtgcccagtgtttctgcgcat

SEQ ID NO: 86157 - DNA, 1687 bp, Homo Sapiens
taagttgtcgtcttggttatttgtgtgtcctcgttggtttcttgtgttccctgtctttagtcagtgtacattccgccgctttttcctagtcttgttgtgtctgtgtgctcgatcgtggctttcatcacctcctcatactcccctgggttgactattgctcttcttccctacaatgttagccctgtgttgggtattcggggcctgacgcgggccgcccctcggcccgtacgtaagccccccagcccttgagcctcctggggagcctcctgggtaacggcccttcagggggggtcccccccatgcagggtgagaaatcaggcccccaatgggcccgagaaaaatagggggccaaggggacctgggattggcgtgacagggcacccaccagcaccctgcttcgaggcctgtggtgtgggggacacagagctcgtcctagagcagtggctaacttggggggctttcctgaagctcccgtggggccaggggaaccttagtgtgggaggatataaggagtgtgtggccccccatgcgtttctgaggctgaaggctgttgggctcaggtccaggcagcctgtctgtccttggctgtgggagaaggggaggggtgtgaattccctggggatactggggcagagccctcgaggggtgctgcttgcacctggggccaggatttgggctcaggtggtcagggggaccctcattctatgccccaagcactagcccatcaggccatctgccccaccaagtggcacagaaaaggccgagaaacctccaaaggggttggggcaggcagaggggtccgagggccaggcagatttggctggtggaaaagggggcccagaaaggggccttccccaagggcagggcctgcgttttattttcttctcccctggccacagcactgctggcctggcctcaccaccatctacgcagcaggccaggggtttgggggcaccaataaggtgggtgggaaaaggggtgtcttttgcatgcattctgcttgggggtgaggagagaatctggtgggactgtgaacctgccctcataggccccgagccctgcccagttcaggaacctggccaaactgccccttctcacggcacctactactttcaggaaagttaggaccccaggggtgaggaggggctcagagctgggccctgcttcccgagtgtgccagggcggcgagggtgaggggggcgaggggccagcccctccctgctctgggtggaggccagactccttggcctcagaccaactggccccggaaacagaaatcagatataggttggaatatgattcagcagatacaatccaaacattgctttttcttatcaatactttaaaatatttgttcgtctttgtcttgttttgaacacaggtgagatgctcacggctgttgtcacactccctggtctgggctttgcctcttgaatcctttccccacgggcccctcatcaccaccccctgctccaacacttcttttctaggagatgcactgaaagcaaataaacttgaccgactttcatcttacacggtcgtccccccaagagatcagagggtgccgtcaagggtcccacctgaccctcccgtggcctctgccccctgccccgagatgcctctgtcgtcccaggtgcccccgttggaacccagctgggctgagaacagtgcatttccaaagaaaacc

SEQ ID NO: 86158 - DNA, 575 bp, Homo Sapiens
tctgttctctgaggtctggcttgtccctttataccttcaatccttacttctgccagtctgtatttcctatcaagggtgaaagtgatgatggtggtgcaggagggtgacaataaaatcctagtggaattggagaccattggaagggatggaatataagtcagtgtgaaactgagtgtacactgccatgttacatcagtgtccattggcttgttttgagcctgttctctaagaagataggattggttttagcccaaactctgcttctatggtagggcatgaggacaactattcagcatggttttagcttcttggagatgattccaacttaactattttggctttttaaacataattttctctgaaaattaattgtggctcttatttgcatttacgaatgatcttcccatccctttttcccattcagcaaatattagtttgtcctcctttaattgtttgcccaaatcttccacccatcttttttcttccctcattttctgggattctcaagaaagaaaaagtaacccattatcactctgagtatcgtcgtgccctgagacatgatgggaatctcattc

SEQ ID NO: 86159 - DNA, 954 bp, Homo Sapiens
caaactataaaaatgtactttcactaggtacagctgtgaaggatctaaaacaagaacaaactaaatccgccagttctttgattaccacagaaatgttacaggatatacagaggcacagctcagtaagtaggcttgctgatagtagtgatttacctgtgccccggacacctggctcaggggcaggggaaaaacataaagaagaacctatagatattatcaaggccccctctagtaggcgtttcagtgaagacagtagtacatcaaaagtaatggtccctcctgtcaccccagacttgcctgcctgcagccctgccagtgaaacaggaagtgaaaacagtgtaaatatggctgcccacacattaatgattctctccagggcagccatttctaggactacttcagcaactcctctgaaagataacacacaacagtttagagcatcttcaaggagcaccacaaaaaagcggaaaattgaggaattagatgaacgtgagcgaaactctcgtccttctagtaaaaatcttacaaattcatcaataccaatgaaaaagaagaaaattaagaaaaagaagcttcccagttcatttccagcaggaatggatgtagacaaatttttgttatcattgcattaggatgagtaaacattctggacacataagaacagtaggtgttaaaaactcatatcccttaaactgagtgtagggaatgggatattgacagaatctgaaagcatgacctgcactttcattgtactgaaacttcactttatatctaaatcatgctgtttctgaaacagcttcctagtttgtaaatagacttacttggtatatttttattttgggaaaaacgtttgcagaaatgtaagtaaagccaatctgcaaaactgtatagctttgacaattccatattgtaaatactgtgtaaatcttgttgaaatagaggttaaatcaccct

SEQ ID NO: 86160 - DNA, 893 bp, Homo Sapiens
  misc_feature (787)..(787): n is a, c, g, or t
  misc_feature (830)..(838): n is a, c, g, or t
ggacgcgtgggtcagcacctcgaggatcgacatggacgctctcgaggactacgtttggccgcgggcaacctcggagcttatactcctcccagtgacgggtctggagtgcgtgggggaccggctgttggcgggtgagggtcccgatgtcctggtgtacagcttggactttggtgggcatctgcggatgataaagcgagtgcagaacctgcttggccactatcttatccatggcttccgggtacggccagagcctaatggagaccttgacttggaggccatggtggctgtgtttggaagcaagggactccgagttgtgaaaattagctggggacagggccacttctgggagctttggcgctctggcctgtggaacatgtctgactggatttgggatgcacgctggcttgagggaaatatagccttggccctgggccacaactcagtggtgctatatgaccctgtagtagggtgcatcctgcaagaggtgccctgcacagacaggtgcaccctctcttcagcctgcctgattggagacgcctggaaggagctgaccatagtggcaggtgctgtttccaaccagctcttggtctggtacccagcaactgccttagcagacaacaaacctgtagcacctgaccgacgaatcagtgggcatgtgggcatcatcttcagcatggcatacctgaaaagcaagggaatgctggctacagcttcagaagaccgaagcgttcggtatctgggaaggtcgggcgacctgcgaaatgccctggggggtccggggtgccanaatatttggggcacctggcttttggggcaccgccgcccccgtnnnnnnnnncaaggttcaaggctttcctaaaaaggaatttaccccttaattcaggggggcgggt

SEQ ID NO: 86161 - DNA, 997 bp, Homo Sapiens
ttaggggggagagagtatgaagtcgacggcgcgccgaattcggcacgaggcttggtgtggagccatgaaggtgagatcctccaggcctttcggggacaccagggacgtgggatccgggccatagctgcccatgagaggcaggcctgggtgatcactgggggtgatgactcaggcattcggctgtggcacttggtagggcgtgggtaccggggattgggggtctcggctctctgcttcaagtcccgtagtaggccaggtacactcaaggctgtgactctggctggctcttggcgactgctggcagtgactgatacaggggccctgtatctctatgacgtcgaggtcaagtgctgggagcagctgctagaggataaacatttccagtcctactgcctgctggaggcagctcctggtcccgagggcttcggattgtgtgctatggccaatggggaaggtcgtgtcaaggttgtccccatcaacactccaactgctgctgtggaccagaccctgtttcctgggaaggtgcacagcttgagctgggccctgcgtggttatgaggagctcctgttgctggcatcgggccctggcggggtagtagcttgcctagagatctcagccgcaccctctggcaaggccatctttgtcaaggaacgttgtcggtacctgctgcccccaagcaagcagagatggccacatgcagtgccttcctacccccaggtgacttccctggtgtgttggtgaccgccggggctctgtgctgctattcccctccagaccaggtctgctcaaggaacctggggtgggaggcaagtcgggctggtgctgggcactgtagtgggtaatggtatcgtgggggtgggcatgccttccctgggttggccagggtctccggcctcttggcggagcggtgtgactcacctgccggcagtgtccccaggggtggactaacagtgaaggccccatcggaaatctgcggaaggccggcccagcgggagcc

SEQ ID NO: 86162 - DNA, 1139 bp, Homo Sapiens
aaaggggtttccttgggaacaaaaaaaatgggcctttttcccaaaagggggggcgggctggagattccttttagggcaaaagtaacttccccccgccaaggggccccgatgcccagcaaacaggaaggctcctttataaccaccgccagggccccaggtccaagctgggccccttcccaaggaaaccagggtttggtccccagcagcagttggagtgttgatggggggcacccttgacacgaccttccccattggccatagcacacaatccgaagccctcgggaccaggagctgcctccagcaggcagtaggactggaaatgtttatcctctagcagctgctcccagcacttgacctcgacgtcatagagatacagggcccctgtatcagtcactgccagcagtcgccaagagccagccagagtcacagccttgagtgtacctggcctactacgggacttgaagcagagagccgagacccccaatccccggtacccacgccctaccaagtgccacagccgaatgcctgagtcatcacccccagtgatcacccaggcctgcctctcatgggcagctatggcccggatcccacgtccctggtgtccccgaaaggcctggaggatctcaccttcatggctccacaccaagcagacacaatcctctcctgcactgataaggtaattctctagaagcttgacctgccacacacgggcgctgtgcccaaagcagtgcccaatattctgcacccgacccccaggcacttcgcaggtcgcccaccttccagatacgaacgcttcggtcttctgaagctgttagccagcaatcccttgcttttccagggtatgacatgctgaaggaatgatgcccacatgcccactgattcgtcggtcagggtgctacaggtttgttgtctgctaaggcagttgctggggtaccagaccaagagctggttggaaacagcacctgccactatggtcagctccttccaggcgtctccaatcaggcaggccgccaacagccggtcccccacgcactccagacccgtcactgggaggagtataagctccgaggttgcccgcggccaaacgtagtcctcgagagcgtccatgtcgatcctcgaggtgctgaggcagccacggc

SEQ ID NO: 86163 - DNA, 863 bp, Homo Sapiens
taatatttgtgtagaaggttgtacccagtcattaaaacatattcaacatcagaccatccatatcagagaaaactcatatagctataacaaatatgataaagatcttagtcagtcatcaaatcttagaaagcagataatccataatgaagagaaaccatacaaatgtgaaaaatgtggggatagcttaaaccatagtttgcaccttactcaacatcagatcattcctaccgaagagaaaccctataacatggaaagaatgtggcaaggttctttaaccttaacggtagtttataccttactaaacagcagcaaattgatactggagaaaacctttacaaatgtaaagcatgtagcaaatcttttactcgttcctccaatcttattgtgcatcagagaattcacactggagagaaaccatacaaatgtaaagaatgtggcaaagcctttcgctgtagttcataccttactaaacataagcgaattcatactggagagaaaccttataaatgtaaagaatgtggaaaagcttttaaccgtagttcatgccttactcaacatcagacaactcatacaggagaaaaaccatacaaatgtaaagcatgtagcaaatcttttagtgactcctcaggtcttactgtgcatcggcgaactcatactggagagaaaccctatacatgttaagaatgtggcaaagcctttagttatagttcagatgttattcagcatcggagaattcatactggccagagaccctacaaatgtgaagaatgtggcaaagccttcaactataggtcatacctcactacacatcagagaagtcatactggagagagaccctacaaatgtgaagaatgtggcgaagc

SEQ ID NO: 86164 - DNA, 873 bp, Homo Sapiens
ctttccagtgttggctgacttacagctcttataaactagtggcaatttctgaacccagccggctccatctcagcttctggtttctaagtccatgtgccaaaggctgccaggaaggagacgccttcctgagtcctggatctttcttccttctggaaatctttgactgtgggtagttatttatttctgaataagagcgtccacgcatcatggacctcgcgggactgctgaagtctcagttcctgtgccacctggtcttctgctacgtctttattgcctcagggctaatcatcaacaccattcagctcttcactctcctcctctggcccattaacaagcagctcttccggaagatcaactgcagactgtcctattgcatctcaagccagctggtgatgctgctggagtggtggtcgggcacggaatgcaccatcttcacggacccgcgcgcctacctcaagtatgggaaggaaaatgccatcgtggttctcaaccacaagtttgaaattgactttctgtgtggctggagcctgtccgaacgctttgggctgttagggggctccaaggtcctggccaagaaagagctggcctatgtcccaattatcggctggatgtggtacttcaccgagatggtcttctgttcgcgcaagatgggagcaggatcgcaagacggtagccaccagtatggcagcacctccgggactaccccgagaagtataaggtatgtaggcaccagagcagctgtgtcccaagggctcctccaggactgtgaccgtgggacccccatgtgacttccacaggacacgtgactgtgtggtctgtgcgatccaggctgtgtgtgaccatagggctgtgtataactcacggatgtatgtg

SEQ ID NO: 86165 - DNA, 1460 bp, Homo Sapiens
accaataaccatcgagcccccggccgcacaaacccccccggacgaggcctgggtggcgatttcggcacgaggttgagaactgtttagatgcaaaatccacaagtattcaagtgattgttaaagagggaggcccgaagttgattcagatccaagacaatggcaccgggatcaggaaagaagatctggatattgtatgtgaaaggttcactactagcaaactgcagtcctttgaggatttagccagtatttctacctatggctttcgaggtgaggctttggccagcataagccatgtggctcatgttactattacaacgaaaacagctgatggaaagtgtgcatacagagcaagttactcagatggaaaactgaaagcccctcctaaaccatgtgctggcaatcaagggacccagatcacggtggaggaccttttttacaacatagccacgaggagaaaagctttaaaaaatccaagtgaagaatatgggaaaattttggaagttgttggcaggtattcagtacacaatgcaggcattagtttctcagttaaaaaacaaggagagacagtagctgatgttaggacactacccaatgcctcaaccgtggacaatattcgctccatctttggaaatgctgttagtcgagaactgatagaaattggatgtgaggataaaaccctagccttcaaaatgaatggttacatatccaatgcaaactactcagtgaagaagtgcatcttcttactcttcatcaaccatcgtctggtagaatcaacttccttgagaaaagccatagaaacagtgtatgcagcctatttgcccaaaaacacacacccattcctgtacctcagtttagaaatcagtccccagaatgtggatgttaatgtgcaccccacaaagcatgaagttcacttcctgcacgaggagagcatcctggagcgggtgcagcagcacatcgagagcaagctcctgggctccaattcctccaggatgtacttcacccagactttgctaccaggacttgctggcccctctggggagatggttaaatccacaacaagtctgacctcgtcttctacttctggaagtagtgataaggtctatgcccaccagatggttcgtacagattcccgggaacagaagcttgatgcatttctgcagcctctgagcaaacccctgtccagtcagccccaggccattgtcacagaggataagacagatatctctagtggcagggctaaggcagcaagatgaggagatgcttgaactcccagcccctgctgaagtggctgccaaaaaatcagagctggagggggatacaaccaaaggggacttccagaaatgtccagagaagagaggaccctacttccaacaaccgcaggaaagaagacatcgggaagatctgatgtggaaatcgggggaagatgattcccggaaaggaatggactgagttgtaacccc

SEQ ID NO: 86166 - DNA, 839 bp, Homo Sapiens
cgcaggaaacatggcggcggcgggtgttgtgagcgggaagattatatatgaacaagaaggagtatatattcactcatcttgtggaaagaccaatgaccaagacggcttgatttcaggaatattacgtgttttagaaaaggatgccgaagtaatagtggactggagaccattggatgatgcattagattcctctagtattctctatgctagaaaggactccagttcagttgtagaatggactcaggccccaaaagaaagaggtcatcgaggatcagaacatctgaacagttacgaagcagaatgggacatggttaatacagtttcatttaaaaggaaaccacataccaatggagatgctccaagtcatagaaatgggaaaagcaaatggtcattcctgttcagtttgacagacctgaaatcaatcaagcaaaacaaagagggtatgggctggtcctatttggtattctgtctaaaggatgacgtcgttctccctgctctacactttcatcaaggagatagcaaactactgattgaatctcttgaaaaatatgtggtattgtgtgaatctccacaggataaaagaacacttcttgtgaattgtcagaataagagtctttcaccagtctgttgaaaatcttcttgatgagccagcatatggtttaatacaaaaacattacaaaggacccttatacggcaactatgataggatttccaaagtcacaaactacattttgacagtttgagaggcagcgatcctctacacataacgatcacttcaaaatggccgatttctatagaagaagctattccaggtcttaagataattcaaaaggagaaca

SEQ ID NO: 86167 - DNA, 797 bp, Homo Sapiens
  misc_feature (29)..(29): n is a, c, g, or t
  misc_feature (100)..(114): n is a, c, g, or t
  misc_feature (624)..(649): n is a, c, g, or t
cagcggcttgggaagcgatggccccaganaagggcccctgtagcctggctctcacacagtattttatctttgattctgaataaatattttttagtggggnnnnnnnnnnnnnnnggtggcagttgtttgttttaaactgaccacttggaagaaacaccttggttatctgtggttttcatgccttgtccctgcctctacccccaccccttttgagtcgggtgactcatttttctgtgtagagactcggtggcccaggcaggaggtgaaagcagccatccggaaggccctggggacccttgtgcctgttgctcgccttcaggtcaccagctgagctgcgataggaaaatctgaatggaggcagcaaacagccaaaacaaacattccccacccggccctgtgcatatgaagtcgttcttcccccaactcttgaacgatgatgatattcagacgaagcattgatgttatggaagaaagaaagaaacaaacaaaaaatatatatatatgtccaaaaacagacaaatccaagggtgtgaggtaaacgagtgtctgcatttagattccacaaaaccaaaatccatgttgaacaaagttaagtccgtacacagtgactttttgggtgagccnnnnnnnnnnnnnnnnnnnnnnnnnncctcaagccctgttttcctgtgaagatactttgagtggcagccattctctccacgtgaaccacacgtctggagcacagacaggcctctcacggtcattgatcttacgcatttactgtttaccgaacaaatgtctgactgtgtactcgg

SEQ ID NO: 86168 - DNA, 667 bp, Homo Sapiens
atgctaaagctgtttctgacagatgaagtgctttctttgaaaggtggttatttaggttttagatgtttaatagacacagcacatttgctctattaactcagaggctcactacagaaatatgtaatcagtgctgtgcatctgtctgcagctaatgtacctcctggacaccaggaggggaaaaagcactttttcaattgtgctgagttagacatctgtgagttagactatggtgtcagtgatttttgcagaacacgtgcacaaccctgaggtatgtgtaatctaggcaggtacgtttaaggatattttgatctatttataatgaattcacaatttatgcctataaatttcagatgatttaaaattttaaacctgttacattgaaaaacattgaagttcgtcttgaagaaagcattaaggtatgcatggaggtgatttatttttaaacataacacctaacctaacatgggtaagagagtatggaactagatatgagctgtataagaagcataattgtgaacaagtagattgattgccttcatatacaagtatgttttagtattccttatttccttattatcagatgtattttttcttttaagtttcaatgttgttataattctcaaccagaaatttaatactttctaaaatattttttaaatttagcttg

SEQ ID NO: 86169 - DNA, 944 bp, Homo Sapiens
  misc_feature (893)..(893): n is a, c, g, or t
gggaccggtccggaattcccgggatatcgtcgaccccgcgtccggtctctgtgcgaggcgtgaagcgcggacctttcaacaagggctttattaattctcacgctgcggccctggaaagcgatggaggtggcggctaattgctccctacgggtgaagagacctctgttggatccccgcttcgagggttacaagctctctcttgagccgctgccttgttaccagctggagcttgacgcagctgtggcagaggtaaaacttcgagatgatcaatatacactggaacacatgcatgcttttggaatgtataattacctgcactgtgattcatggtatcaagacagtgtctactatattgatacccttggaagaattatgaatttaacagtaatgctggacactgccttaggaaaaccacgagaggtgtttcgacttcctacagatttgacagcatgtgacaaccgtctttgtgcatctatccatttctcatcttctacctgggttaccttgtcagatggaactggaagattgtatgtcattggaacaggtgaacgtggaaatagcgcttctgaaaaatgggagattatgtttaatgaagaacttggggatccttttattataattcacagtatctcactgctaaatgctgaagaacattctatagctaccctacttcttcgaatagagaaagaggaattggatatgaaaggaagtggtttctatgtttctctggagtgggtcactatcagtaagaaaaatcaagataataaaaaatatgaaactattaagcgtgatattctccgtggaaagtcagtgcccacattatgcctgctattgagcctggatggaaatgggcctaatggattggatccctaccaagtcttttcacattttgnttcaggctgggtcaagaatccttgtaaagaaaaatatggggatggaaaact

SEQ ID NO: 86170 - DNA, 583 bp, Homo Sapiens
ttggtagtgaaaactttctgatcaacggagtgaatctggggatctgtgaggtagatgagtccttttccattaccggttacccaaccttgtaaatcgaccacaacatctctatgattagaaaactcataagaaaaatggccataggccaagccatattctgtggctttgtattctgttttcaccacttttgtgttatttgacaattttacaaattctcccagtatgtaaggctccacactgatacatccctttattgtcttgtcctctaaaatcagtagtattgtggatgggatgtagaatatctgggtgggaatgttttgttcatagagtctcttgttaaattctgtcacatagtgctgtgcggtcatctgccgctccacatcagtgaagtggtgccagagccccttctgctccttatagtctttcccaacatacctccccagaatttcttcttgatgaagatgatgaacccaaaaagcatttctttgtctgccttttttcttcacagtcaagtagtcccccaaatagacaatagtttcctgggccgtccacagtgcagattctcttgaatattataacaaaa

SEQ ID NO: 86171 - DNA, 834 bp, Homo Sapiens
actcggtgccgctgcctaggggctgtagaggtcgcgccgctcctgctggggcctgcccacgccaaggacctgcctctgtcgcctcctcttctattgcccagtttccccagccagaacatcccctgaagatggcagaggagagcagctgtaccagggattgcatgtccttcagcgtgctcaactgggatcaggttagccggctgcatgaggtcctcactgaagttgtacctatccacggacgaggcaactttccaaccttggagataactctgaaggacatcgtccagaccgtccgcagtcggctggaggaggcaggcatcaaagtgcacgacgtccggctgaatggctccgcagctggccacgttttggtcaaagacaatggcttgggctgcaaagacctggacctaatcttccatgtggctcttccaacagaggcagaatttcagctggttagagatgtggttctgtgttcccttctgaacttcctgccagagggtgtgaacaagctcaaaatcagtccagtcactctgaaggaggcatatgtgcagaagctagtgaaggtttgcacggacactgaccgctggagcctgatctccctctccaacaagaacgggaagaacgtggagctgaagtttgtcgactccattcggcgtcagtttgagttcagtgtggactctttccaaatcatcctggattcttttgcttttcttctatgactgttccaataatcccatctctgagcacttccaccccaccgtgatggggagagcatgtacggggacttttgaggaagctttgaccatcctgcagaacagactgatcgccacaagaacc

SEQ ID NO: 86172 - DNA, 1770 bp, Homo Sapiens
  misc_feature (1755)..(1755): n is a, c, g, or t
cgcgggctgtgaaccatgaacacccgcaatagagtggtgaactccgggctcggcgcctcccctgcctcccgcccgacccgggatccccaggacccttctgggcggcaaggggagctgagccccgtggaagaccagagagagggtttggaggcagcccctaagggcccttcgcgggagagcgtcgtgcacgcgggccagaggcggtaggagcaagcctacgtcccagcaagactcgcagataaactagcctcttacaaccagaggagtggagctgagagagtgaggagcacaagtgcatacaccttgatagcaccaaatataaaccggagaaatgagatacaaagaattgcggagcaggagctggccaacctggagaagtggaaggagcagaacagagctaaaccggttcacctggtgcccagacggctaggtggaagccagtcagaaactgaagtcagacagaaacaacaactccagctgatgcaatctaaatacaagcaaaagctaaaaagagaagaatctgtaagaatcaagaaggaagctgaagaagctgaactccaaaaaatgaaggcaattcagagagagaagagcaataaactggaggagaaaaaaagacttcaagaaaaccttagaagagaagcatttagagagcatcagcaatacaaaaaccgctgagttcttgagcaaactgaacacagaatcgccagacagaagtgcctgtcaaagtgctgttgtaggccacaatcctcaacatgggccagaagctgggcttacagagattctctaaaggcagaagaaaacagaaaattgcaaaagatgaaggatgaacaacatcaaaagagtgaattactggaactgaaacggcagcagcaagagcaagaaagagccaaaatccaccagactgaacacaggagggtaaataatgcttttctggaccgactccaaggcaaaagtcaaccaggtggcctcgagcaatctggaggctgttggaatatgaatagcggtaacagctggggtatatgagaaaatattgactcctatctggccttcatcaactgacctcgaaaagcctcatgagatgctttttcttaatgtgattttgttcagcctcactgtttttaccttaatttcaactgcccacacacttgaccgtgcagtcaggagtgactggcttctccttgtcctcatttatgcatgtttggaggagctgattcctgaactcatatttaatctctactgccagggaaatgctacattatttttctaattggaagtataattagagtgatgttggtagggtagaaaaagagggagtcacttgatgctttcaggttaatcagagctatgggtgctacaggcttgtctttctaagtgacatattcttatctaattctcagatcaggttttgaaagctttgggggtctttttagattttaatccctactttctttatggtacaaatatgtacaaaagaaaaaggtcttatattcttttacacaaatttataaataaattttgaactccttctgtataaatgggtcatttttatttttaatgaaaagttattggggttttctctcttgaagggtctcattttaattcccttttccaggccgtatagatcaaatatagtactgtcattactgttggctcttgttttggtcttgacttactaatagtgttaccctgattttcagagggggacagtttatctccagaaaggccaatgtttgtatacacatcagctagacacanatatagacatcatat

SEQ ID NO: 86173 - DNA, 880 bp, Homo Sapiens
ggcgcagagaaccccggctgctcagcgcgctccgcggtcatggagatccccgggagcttgtgcaagaaagtcaagctgagcaataacgcgcagaactggggaatgcagagagcaaccaatgtcacctaccaagcccatcatgtcagcaggaacaagagaggtcaggtggtggggaccagaggtggctttcgtggttgcacagtttggctaacaggcttgtctggagcgggaaagactactgtgagcatggccttggaggagtacctggtttgtcatggtattccatgctacactctggatggtgacaatattcgtcaaggtctcaataaaaatcttggctttagtcctgaagacagagaagagaatgttcgacgcatcgcagaagttgctaaactgtttgcagatgctggcttagtgtgcatcacaagtttcatatcaccttacactcaggatcgcaacaatgcaaggcaaattcatgaaggtgcaagtttaccgttttttgaagtatttgttgatgctcctctgcatgtttgtgaacagagggatgtcaaaggactctacaaaaaagcccgggcaggagaaattaaaggtttcactgggatcgattctgaatatgaaaagccagaggcccctgagttggtgctgaaaacagactcctgtgatgtaaatgactgtgtccagcaagttgtggaacttctacaggaacgggatattgtacctgtggatgcatcttatgaagtaaaagaactatatgtgccagaaaataaacttcatttggcaaaaacagatgcggaaacattaccagcactgaaaattaataaagtggatatgcagtgggtgcaggttttggcagaaggttgggcaaccccattgaatggct

SEQ ID NO: 86174 - DNA, 880 bp, Homo Sapiens
agcagaaagaagagggcaagtcatggttggaaataaccttctagcccctggttctatcccttcttccgcccagccccccaggcctcaagaaagaacctcagactctgattctcctcttcagcctctcatcttgagcacagttcagaacagtggcgactggaatctggtttatattcatatttgcaaagactacagactttttctcccacttcatattttcatgcccccctgttggttttccattcttaactgtctccttatacctaagaagttatgaaaatcatgtgtacttctggaagctttcgaaagaatcttgtccctcatgacagcattttatcatgaaagcagcttctcctttctgggctgggcttgttcaagttcggtgtgggcttccactaaggcacttgtcctggagacgttggctttcccagctgcatctgccccaaaaggttgtaggcacagctgtcgtagcgttgccataaagagtttgccaaatctctgatcctccctttccattgcttctcctagtgatgcacgaagattaggtgcatttattttgtaaacagattggagaatctagcaataagattcaaagctaatctggagcataaaggcacagttcagagacagaataacagggatcacaagcatgaattaaaaggaatttattggcttcaagttcctagatacaaccttcccatgctgcacttctccactgtcggagcacgttccgaaaaacagaatgccttgatccctggtgggtgcgaaggccagtagttagggatggccaggcattggtggggctccaaaaggatgaagggcccaaaaaacaggtgttgctgcatttgggatcagaggtagggaggtacttggggccctg

SEQ ID NO: 86175 - DNA, 677 bp, Homo Sapiens
gaagatggcggcggcgggggaagcagcgtgagcagccggaggatcgcggagtcccaatgaaacgggcagccatggccctccacagcccgcagtatatttttggagattttagccctgatgaattcaatcaattctttgtgactcctcgatcttcagttgagcttcctccatacagtggaacagttctgtgtggcacacaggctgtggataaactacctgatggacaagaatatcagagaattgagtttggtgtcgatgaagtcattgaacccagtgacactttgccgagaacccccagctacagtatttcaagcacactgaaccctcaggcccctgaatttattctcggttgtacagcttccaaaataacccctgatggtatcactaaagaagcaagctatggctccatcgactgccagtacccaggctctgccctcgctttggatggaagttctaatgtggaggcggaagttttggaaaatgatggtgtctcaggtggtcttggacaaagggagcgtaaaaagaagaaaaagcggtcaccttggatattacagctatttgacaagatggtggcgatgatagtatctccacagaagccctggtcaatggccatgccaattcagcagtcccgaacagtgtcagtgcagaggatgcagaatttatgggtgacgtgcacc

SEQ ID NO: 86176 - DNA, 591 bp, Homo Sapiens
atttcctccatgtacgtgtacttgtaccagaactgattaactcgaggcagcgttgttatggcccggtcccagatatttcgagcatggttgacttggcgattcttcatttccatttctgcgtatttcagccagagtgtaatatttcggtagtctacatctaaagcacgctcgtatatggatcgagccctttgaatctcctttaggctttcttcccattgtgcgtattttatccagttactaatcacagtcctgttttttcttatattatcttcaaaagtcttccttttccttagtttataatcatttaattcttcttcatctgtgatcttctgttgaggtggaggtggaagaagctcaagttctctttctttagcctctcttaagagttgttcagcagttatctgtacctcagccggggctttgtttttcaccttggccactttgggaatccgctgcttcccggccgcggtggaggccgccatgtctgcagcagtcgacctctggacacctgtccccggcacggacgctagaaatcggctctgagagctcaccgaaaccacaaagctttcagaaaacaaacaggatctcccc

SEQ ID NO: 86177 - DNA, 755 bp, Homo Sapiens
atgcagatgaattgattttgataccaaatggagtacagattttttttgtaaatcctgcaggggaggttagtgcaccttcgtatcctgggtaccttcgaattgtgaggtttttggataattctctcgatacggttctaaaccgtcctcccgggtttcttcaggtttgtgactggttatatcctctagttcctgatagatcgccggttctgaaatgtactgcgggagcctacatgtttcctgatacaatgctacaagcagcaggatgctttgtgggggtcgtcctgtcctctgagttaccagaggatgatagagagctctttgaggatctgttaaggcaaatgtctgaccttcggctccaggccaactggaacagagcagaagaagaaaatgaattccaaatccctggaagaactagaccctcctctgaccaactaaaagaagcctctggcactgatgtgaaacagttggaccaaggcaataaggatgtacgtcataaaggaaaacgtggaaaaagggctaaagatacttcaagtgaagaagttaacctgagtcacattgtaccatgtgagccagttccagaagaaaagccaaaagaattacctgaatggagtgaaaaagtggctcacaacattttgtcaggtgcttcctgggtgagttggggtttagtcaaaggtgctgagattactggtaaggcaatccagaaaggtgcttctaaactccgagagcggattcaaccagaagaaaaacccgtggaa

SEQ ID NO: 86178 - DNA, 1413 bp, Homo Sapiens
  misc_feature (44)..(78): n is a, c, g, or t
acaacacgacgagcgcagcgagtgtttgagcgaggaagcggcgnnnnnnnnnnnnnnnnnnnnnnnnnnnnnnnnnnncagtcgacggtaccggacatatgcccgggaattcggccattacggccgggcacatggagcttgatgaccttcctgaacttcaggcagttcaaagtgatcctacccaatctggcatgtaccagctgagttcagatgtttcacatcaagaatacccaagatcatcttggaaccaaaatacctcagacataccagaaactacttaccgtgaaaatgaggtggactggctaacagaattggcaaatatcgcgaccagtccacaaagtccactgatgcagtgctcattttacaatagatcatctcctgtacacatcatagccactagcaaaagtttacattcctatgcacgccctccaccagtgtcctcttcttcgaagagtgaaccagccttccctcatcaccattggacaggaggaaacaccagtaagacacgaaagggcaaatagtgagtcagaatctggcattttctgcatgtcctccctgtcagatgcactgatgattcgcggatggtgcaattcctggccttcaactgtctggcactgtcttctgaaaggcacacgactgtgctttcataagggaagcaataaggaatggcaagatgttgaagattttgctagagctgaaggctgtgataatgaggaagatcttcaaatgggcattcacaagggctatggttctgatggtctaaagttgttatcacatgaagaaagtgtatcatttggcgagtctgtactgaagttgacttttgatcctggtacagtagaagatggtttacttaccgtagagtgtaagctggaccaccctttctatgttaaaaataaaggttggtcatcattttatccaagcttgactgtggtacagcatggcattccatgttgtgaagttcatattggcgatgtatgtctacctcctggacaccccgatgccattaattttgatgattcaggtgtttttgatacatttaaaagctatgacttcacacctatggattcttctgcagtttatgtgttaagtagtatggctcgccagcgtcgtgcatctttgtcttgtggaggacctggtggtcaagactttgcaagatctggattcagtaaaaactgtggctcacctggatcatcacagctctcttccaattctttgtatgctaaagctgtcaaaaaccacagctcagggactgtgagtgccacttctcctaataagtgcaaaagaccaatgaatgccttcatgctttttgccaaaaaatacagagttgaatatactcagatgtatccagggaaagataacaggtaaaaatagtcataattctgattacaataaatgagtaacacttcaaaaaaa

SEQ ID NO: 86179 - DNA, 1051 bp, Homo Sapiens
ggggttgtacactaggggagtaagtttgctctcttccccattgcaaggaaactaagagctcctccaataatttctgggtagctatcatttcttgacgaaactgttcccgttcacttaggagatcttgtatagccccgtgtgcatcacggttttgacgctgtaaagctgctcttgagttggttaactcatctgccattaccctgcttgcaaggaatttacttcgccatacatcacactgtattgacatacgttctaactgttcagaaagctgagctgtgtttcgacctagggcttcattttctaaaataagctgattgtgttctcacgggctagacgttcaaagtgatactgaagatcagtccccaacagaagccaaccagtaacttttttaactcacgaggttacctctgtctgtacacggagctggtttgaaagaccttcgtttgtcctgtagtaaccttctgttcagaattcttgagcttttgccaatacattctttacctctgagagttccttattaggttctataactccctctgactgaccaaggaattctcctttatgatgtcccagagacttaacatttgtatttttgttggggatatcatgagttatagcagctttgggaactaatattcttacagctttaacttccattgctttttcagtgagcattttccctagctgaagaactcctgggctctctgatggaactgctttcttccatggactctgaagactatgatgctttctagatcggactccggaggtaacttcaacagatttaggtggttcctcagtttccattccatctcctgctcctcggattggggatgaagtaacggtgactttggtttctaaatttttagtagtcattttttcaccttaaccactgaaaatgcactccaagacttctgctgaacaacctctaagattcttattctccgtatttcagggggcttcacttgataggctcttcggatcggtatcacccggttaacttctcacagacctcttccattcggaagccgacccgcccagtccctccgca

SEQ ID NO: 86180 - DNA, 810 bp, Homo Sapiens
  misc_feature (19)..(19): n is a, c, g, or t
gctgcatcttcctcttccncaatctcatccaatgtcacaaaagatagttctccctcaacaccacgaggagtggaagttttcccctttttcttctttaagttaagttcagagaaaggaacatttttgagagtttctttcctttttccctttagtggattctgcttggcctgagaaggattcacttcttctataacctcatccacagtaacaaattcatccaaattaaatggaaataatggctcctctttagatttggaacttctaccagtagtgcttttaggattcttagtgttttgctcagccaaagtcttattgttgctgtcatcccgtttcatgatggaaggtctagcctctgtttcctgagattgttttgttatatctctgtaatccagtttagaaagcttgccttgcagggctgagatccttccactgcctcctctggtaagactgctctgagtaggtttgaatttactgctgctttctgccaagcctgacctggcacttgtgggtttaagcagaccaaattccttggctgaaagtttcttttcagcatttatttgatctctgggcacagattttggaaaacttttctgattttcagtttttgaaactgtagcttttgccttaggagaagagactataacagccttgatgcttggtttactgctagatacatctgatacagccagaatactagttttactagtttcatcaggcttattagcctgacccactcctttatttgggtatgccttgaataaagtgttgtctgcaggcttttctttcattgctgccatcttttcaaccttt

SEQ ID NO: 86181 - DNA, 2115 bp, Homo Sapiens
ggacggaagaaaaaagagagtgagcgagcgccggaatcagcccggcgtggagtgcggacccgcggtagtgccagggggcgaaggcggcggtggtgaggaagatactttggttagtgaccacatcgcagcatgttgagtcaagtttaccgctgtgggttccagcccttcaaccaacatcttctgccctgggtcaagtgtacaaccgtcttcagatctcattgtatccagccttcagtcatcagacatgttcgttcttggagcaacatcccgtttatcactgtacccctcagtcgtacacatggcaagtccttcgcccaccgcagtgagctgaagcatgccaagagaatcgtggtgaagctcggcagtgccgtggtgacccgaggggatgaatgtggcctggccctggggcgcttggcatctattgttgagcaggtatcagtgctgcagaatcagggcagagagatgatgctggtgaccagtggagccgtagcctttggcaaacaacgcttgcgccatgagatccttctgtctcagagcgtgcggcaggccctccactcggggcagaaccagctgaaagaaatggcaattccagtcttagaggcacgagcctgtgcagctgccggacagagtgggctgatggccttgtatgaggctatgtttacccagtacagcatctgtgctgcccagattttggtgaccaatttggatttccatgatgagcagaagcgccggaacctcaatggaacacttcatgaactccttagaatgaacattgtccccattgtcaacacaaatgatgctgttgtccccccagctgagcccaacagtgacctgcagggggtaaatgttattagtgttaaagataatgatagcctggctgcccgactggctgtggaaatgaaaactgatctcttgattgttctttcagatgtagaaggcctttttgacagccccccaggttcagatgatgcaaagcttattgatatattttatcccggagatcagcagtctgtgacatttggaaccaagtctagagtgggaatgggtggcatggaagccaaggtgaaagcagccctctgggcttgcaaggtggcacttctgttgttattgccaatggaacccacccaaaggtgtctgggcacgtcatcacagacattgtggcaaggggaagaaagttggtaccttcttttcagaagtaaagcctgcgaggccctactgttgagcagcagggagaaatggcgcgatctggaggaaggatgttggccccttggaacctgagcagagagcagaaattatccatcatctggctgatctgttgacggaccagcgtgatgagatcctgttagccaacaaaaaagacttggaggaggcagaggggagacttgcagctcctctgctgaaacgtttaagcctctccacatccaaattgaacagcctggccatcggtctgcgacagatcgcagcctcctcccaggacagcgtgggacgtgttttgcgccgcacccgaatcgccaaaaacttggaactggaacaagtgactgtcccaattggagttctgctggtgatctttgaatctcgtcctgactgtctaccccaggtggcagctttggctatcgcaagtggcaatggcttgttactcaaaggagggaaagaggctgcacacagcaaccggattctccacctcctgacccaggaggctctctcaatccatggagtcaaggaggccgtgcaactggtgaataccagagaagaagttgaagatctttgccgcctagacaaaatgatagatctgatcattccacgtggctcctcccagctggtcagagacatccagaaagctgctaaggggattccagtgatggggcacaacgaaaggatcctgccacatggatgtggattccgaggccagggttgataaggcccccaggtaatccaaaactcctaaggtgaatattccgcctggccgtaattgttttggaaactttggttatccccccgggaatttggctccggaaaccccttaatttgggccaaaatccttgaaatggctgaaaaatgggaaacaggtaaaaaaatccttgggaggccccccaattttgcccccctattctgaaa

SEQ ID NO: 86182 - DNA, 1794 bp, Homo Sapiens
actagaacattttctctttcaaactgcccagacggttggacaggacgtagacacacagaagaaaagaagacaaagaacgggtaggaaaattaaaaaggttaccatggggaagaaagtggccatcattggagctggtgtgagtggcttggcctccatcaggagctgtctggaagaggggctggagcccacctgctttgagaagagcaatgacattgggggcctgtggaaattttcagaccatgcagaggagggcagggctagcatttacaaatcagtcttttccaactcttccaaagagatgatgtgtttcccagacttcccatttcccgatgacttccccaactttatgcacaacagcaagatccaggaatatatcattgcatttgccaaagaaaagaacctcctgaagtacatacaatttaagacatttgtatccagtgtaaataaacatcctgattttgcaactactggccagtgggatgttaccactgaaagggatggtaaaaaagaatcggctgtctttgatgctgtaatggtttgttccggacatcatgtgtatcccaacctaccaaaaaagtcctttccaggactaaaccactttaaaggcaaatgcttccacagcagggactataaagaaccaggtgtattcaatggaaagcgtgtcctggtggttggcctggggaattcgggctgtgatattgccacagaactcagccgcacagcagaacaggtcatgatcagttccagaagtggctcctgggtgatgagccgggtctgggacaatggttatccttgggacatgctgctcgtcactcgatttggaaccttcctcaagaacaatttaccgacagccatctctgactggttgtacgtgaagcagatgaatgcaagattcaagcatgaaaactatggcttgatgcctttaaatggagtcctgaggaaagagcctgtatttaacgatgagctcccagcaagcattctgtgtggcattgtgtccgtaaagcctaacgtgaaggaattcacagagacctcggccatttttgaggatgggaccatatttgagggcattgactgtgtaatctttgcaacagggtatagttttgcctaccccttccttgatgagtctatcatcaaaagcagaaacaatgagatcattttatttaaaggagtatttcctcctctacttgagaagtcaaccatagcagtgattggctttgtccagtcccttggggctgccattcccacagttgacctccagtcccgctgggcagcacaagtaataaagggaacttgtactttgccttctatggaagacatgatgaatgatataaatgaagaaaatggagaaaaagcgcaaaatggtttgccaaaagcgagaacatacagacagattacattggttaaatgggatgaactcctcctccttcaatggggcaaagcccaacatcccatggctgtttctcacagatcccaaattggccatggaagtttattttggcccttgtagtccctaccagtttaggctggtgggcccagggcagtggccaggagccagaaatgccatactgacccagtgggaccggtcgttgaaacccatgcagacacgagtggtcgggagacttcagaagccttgcttctttttccattggctgaagctctttgcaattcctattctgttaatcgctgttttccttgtgttgacctaatcatcattttctctaggatttctgaaagttactgacaatacccagacaggggctttgctatttaaaaattaaaattttcacaccaaaa

SEQ ID NO: 86183 - DNA, 583 bp, Homo Sapiens
agtgtgaaaccctacaatgtgaaaggaaagtgcttgctgtgatgttcctactgtggcccagctgcccagcatggacctggtgactctccacagggcctctaccatcctctctgtggccacttcctgagccagaggccaggtcttcatggggccctgagcttctgctgcctctggtgagagggagagcccttcccatccttacccaccaggaactagagccccaaccacagcagatgcttcctgggcagccactggccaggccgttgtatccatgtcacccttagttgtgggcattcatgaaagcaatgcgcttgcttcagcacattgggatgcacagaaacgtgagggcaggggggcagttgtggtcgcccctccccagttgtgcatgtacccggctacttaggtatgcttaggggagctggtggccaggggtgccccttcaggcctgctctcacagtgaaaccacttcaagacagggcaggaagttaccttcctggtgcacacaccgaagtgctcgagggagaggctgccgccccctctccccttccctggctgtggacactggcagccaatggggaggcgg

SEQ ID NO: 86184 - DNA, 1822 bp, Homo Sapiens
gtagcgaggcctgggtggcgaattcggcacgagggttctgggccagggatcctttggcaaagtcttcctggtgcggaaagtcacccggcctgacagtgggcacctgtatgctatgaaggtgctgaagaaggcaacgctgaaagtacgtgaccgcgtccggaccaagatggagagagacatcctggctgatgtaaatcacccattcgtggtgaagctgcactatgccttccagaccgagggcaagctctatctcattctggacttcctgcgtggtggggacctcttcacccggctctcaaaagaggtgatgttcacggaggaggatgtgaagttttacctggccgagctggctctgggcctggatcacctgcacagcctgggtatcatttacagagacctcaagcctgagaacatccttctggatgaggagggccacatcaaactcactgactttggcctgagcaaagaggccattgaccacgagaagaaggcctattctttctgcgggacagtggagtacatggcccctgaggtcgtcaaccgccagggccactcccatagtgcggactggtggtcctatggggtgttgatgtttgagatgctgacgggctccctgcccttccaggggaaggaccggaaggagaccatgacactgattctgaaggcgaagctaggcatgccccagtttctgagcactgaagcccagagcctcttgcgggccctgttcaagcggaatcctgccaaccggctcggctccggccctgatggggcagaggaaatcaagcggcatgtcttctactccaccattgactggaataagctataccgtcgtgagatcaagccacccttcaagccagcagtggctcagcctgatgacaccttctactttgacaccgagttcacgtcccgcacacccaaggattccccaggcatcccccccagcgctggggcccatcagctgttccggggcttcagcttcgtggccaccggcctgatggaagacgacggcaagcctcgtgccccgcaggcacccctgcactcggtggtacagcaactccatgggaagaacctggttttttagtgaacggctacgtggtaaaggagacaattggtgtgggctcctactctgagtgcaagcgctgtgtccacaaggccaccaacatggagtatgctgtcaaggtcattgataagagcaagcgggatccttcagaagagattgagattcttctgcggtatggccagcaccccaacatcatcactctgaaagatgtgtatgatgatggcaaacacgtgtacctggtgacagagctgatgcggggtggggagctgctggacaagatcctgcggcagaagttcttctcagagcgggaggccagctttgtcctgcacaccattggcaaaactgtggagtatctgcactcacagggggttgtgcacagggacctgaagcccagcaacatcctgtatgtggacgagtccgggaatcccgagtgcctgcgcatctgtgactttggtttgccaaacagctgcgggctgagaatgggctcctcatgacaccttgtacaacagcaaactttgtggcggctgagtggctgagcgccaggcttacgatgaaggctgcgacatctttgggcctgggcttctgtgttccctgcttggcggttctcccttggccaccgtcccggtggcccgagaaatctaccgatgggtggattacccccgtgggatgggccgttcaacgccagccgggtcagtccgggtccccggcccgtagttgcctggtccaaaatccagggccgcctttgccgggcttctctttccc

SEQ ID NO: 86185 - DNA, 815 bp, Homo Sapiens
gtttacacgaccagtgagactgctcgcaactttcatcacttagcatatccttccacaacacagtacagtaagtggactgcagggtggcctggtgctgagggtgatgggtgcagacgtacacctgtccaggtgcaggctcaggggcctcgctggatccttcccaccttccccaactgcctactggcctggctactggataggtcctattctgtacgtaatgggggtttgttgacaggtggctttatagcaagtactccaaaaaaggtaaaaggaatttcacaagtttggcacgcaaaggctgcacagatctaaagaaaggcctttgtaaaggtgaatgcaaactaatgttgaaacatggaaatgtgactttaaaaaagagggaaggtgaggatgagctggacgtggagcaagtggaggcagggagaggccggccagacagcctcccttcctgggtatctcaagatcccaggtgtcggcgtggtccagccactggaaacacgtggccaagagtctgcttgccccttgctgtgtctctacacatctccaggcccttactgatgtgtggaccgcatgtggaggagacatgagtggcgacagcaagcagcaggccgggtggaaagccggaaggggagaaggtcaaccccttttctgccctgtgaattctagcaactgtcggttggaagtcacttcattgtctcacccaggcccgagaccacaatttccctggaaggacacagcccatggcaaagacatgcttcgagaagggatgagttggacaatgccagtaagaagccaggctgtccagaaaagctggt

SEQ ID NO: 86186 - DNA, 945 bp, Homo Sapiens
ctctggtgcagctggggtggaatctggccaggccctgcttaggcccccatcctggggtcaggaaatttggaggataaggcccttcagccccaaggttgtcctcgaccagtcccgtgccatggcagcccacctgcttcccatctgcgccctcttcctgaccttactcgatatggcccaaggctttaggggccccttgctacccaaccggcccttcaccaccgtctggaatgcaaacacccagtggtgcctggagaggcacggtgtggacgtggatgtcagtgtcttcgatgtggtagccaacccagggcagaccttccgcggccctgacatgacaattttctatagctcccagctgggcacctacccctactacacgcccactggggagcctgtgtttggtggtctgccccagaatgccagcctgattgcccacctggcccgcacattccaggacatcctggctgccatacctgctcctgacttctcagggctggcagtcatcgactgggaggcatggcgcccacgctgggccttcaactgggacaccaaggacatttaccggcagcgctcacgggcactggtacaggcacagcaccctgattggccagctcctcaggtggaggcagtagcccaggaccagttccagggagctgcacgggcctggatggcaggcaccctccagctggggcgggcactgcgtcctcgcggcctctggggcttctatggcttccctgactgctacaactatgactttctaagccccaactacaccggcagtgcccatcaggcatccgtgcccaaaatgaccagctagggtgggctgtggggcccgagccgtgccctctatcccagacctaactgcccgcgtgctggagggcccagggaagtcccgatgtttgtgcacacggtgttgccgaggcatccgtggcttggctctggtaccca

SEQ ID NO: 86187 - DNA, 1279 bp, Homo Sapiens
  misc_feature (14)..(14): n is a, c, g, or t
  misc_feature (145)..(182): n is a, c, g, or t
tccattacctaaantgtatagacctggagctgccaagaaaaatctttttaggaagctttgcttttaagccaccaaatgcacccaatactcagatatcaactgagaacgttttgcacctctctagttgattaatttacttcacacnnnnnnnnnnnnnnnnnnnnnnnnnnnnnnnnnnnnnncgaccactgaacatctctatatgcaattccagtatgtcagagtagttatgtaaacctaaatctgtactattttcactgaactgattggaaaaagccattatattaaaaatggcatttaccagtgttaactgaaaaacaggcaacgtgttttactagaaaattaacctaataacccaaaaaactccacttcttcccagagtgttatattgtgctgacatcccatagataatattataaaaagattttatttttgcaataggctgggttcacagtgagtatgttagtaccaagatcatgtgtttaatattattataagaatgtcattagtggaatgtatataaggcatgtaaaaaaatagttttaaagctcttagagggcaatgctccaaactggcagctgctagaaaaggtgctgacaggaatagaaaatattaaagaaatttagtttcagcacatattatagtgcttctacaatcaaaataattcacataaatttcaattgctggaactaatggaccaaatgagaatggacttttgcccctttaactactagaccaatcttgaaaacggaagcaatcacttgcaatcttccacacagtattgttgggagtggactgagcagtcagcaggaagttctggttgaagaaatgttgtttgtttccatcaaacttcacagttccactggtcacaacaagaactgtagtttgggactgagttgcttgctcatgaactggttggcaatctaacatattgacctggaactcactagaaggcaatgtgtcaaaaaaattatttagggcatccagccctgaaacagcatttccattcccatattaaggtggccttgtccagatacagcctggttagtgcccgtcttcttttatccattgtctcatagtaaatattgacaaactcctcagcagctctacatgcctgatctacataagttttaaaatccagagacgtggccatctgggaccttgtagcagtgtgttctggcagtgtcggcgtcactacctcctcacgtgtccggtccgcagggctgcggaatgatcaatacttatgaagagagcgaaacccgccaaacgcacaaaattt

SEQ ID NO: 86188 - DNA, 1591 bp, Homo Sapiens
  misc_feature (643)..(643): n is a, c, g, or t
ggggcagtagaggcgcggggtgcggagctagggcggccgagagccatggcggcgctattggcggcggcggcagtgcgagcccggatcctgcaggtttcttccaaggtgaaatccagtcccacctggtattcagcatcttccttctcttcttcagtgccaactgtaaagctcttcattggtgggaaattcgttgaatccaaaagtgacaaatggatcgatatccacaacccagccaccaatgaggtcattggtcgggtccctcaggccaccaaggcagaaatggatgcagccattgcttcctgcaaacgtgcttttcctgcatgggcagacacttcagtattaagccgccagcaggtcttgctccgctatcaacaacttattaaagaaaacttgaaagaaattgccaagttaatcacattggaacaagggaagaccctagctgatgctgaaggagatgtatttcgaggccttcaggtggttgagcatgcctgtagtgtgacatccctcatgatgggagagaccatgccatccatcaccaaagacatggacctttattcctaccgtctgcctctgggagtgtgtgcaggcattgctccattcaattttcctgccatgatcccccctttggatgtttcccatggcncatggtgtgtggaaataccttcctaatgaaaccatctgagcgagtccctggagcaactatgcttcttgctaagttgctccaggattctggtgcccctgatggaacattaaacatcatccatggacagcatgaagctgtaaattttatttgcgatcatccggacatcaaagcaatcagctttgtgggatccaacaaggcaggagagtatatcttcgagagaggatcaagacatggcaagagggttcaagccaatatgggagccaagaaccatggggtagtcatgccagatgccaataaggaaaataccctgaaccagctggttggggcagcatttggagctgctggtcagcgctgcatggctctttcaacagcagtccttgtgggagaagccaagaagtggctgccagagctggtggagcatgccaaaaacctgagagtcaatgcaggagatcagcctggagctgatcttggacctctgatcactccccaggccaaagagcgagtctgtaatctgattgatagtggaacaaaggagggagcttccatccttcttgatggacgacaaattaaagtgaaaggctatgaacaatggcaactttgttggaccaaccatcatctcgaatgtcaaggcaaaatatgaccttgttacaaagaggagatctgggtccagtactagtggtacttggagacagaaaacatggatgaagccatccagatggtaaataaacaacccatatggaacatcggaactggccatcttcaacaccaattggagccactgctcggcaaatatgccaacttggtggatgatggaccaggtgggagtgaatgttcccagtacaggtgcattggcaaaggtccccattccaccgggtctcgaatcctccttcaggggaaacacaaagtatatggcaaacgggcatccaattcttacactcattaaaagac

SEQ ID NO: 86189 - DNA, 783 bp, Homo Sapiens
  misc_feature (747)..(747): n is a, c, g, or t
agtcaagtgacgcgaaggggccggcctgggcgccgactgcagagccgggaggctggtggtcatgccggggttcctggttcgcatcctccttctgctgctggttctgctgcttctgggccctacgcgcggcttgcgcaatgccacccagaggatgtttgaaattgactatagccgggactccttcctcaaggatggccagccatttcgctacatctcaggaagcattcactactcccgtgtgccccgcttctactggaaggaccggctgctgaagatgaagatggctgggctgaacgccatccagacgtatgtgccctggaactttcatgagccctggccaggacagtaccagttttctgaggaccatgatgtggaatattttcttcggctggctcatgagctgggactgctggttatcctgaggcccgggccctacatctgtgcagagtgggaaatgggaggattacctgcttggctgctagagaaagagtctattcttctccgctcctccgacccagattacctggcagctgtggacaagtggttgggagtccttctgcccaagatgaagcctctcctctatcagaatggagggccagttataacagtgcaggttgaaaatgaatatggcagctactttgcctgtgattttgactacctgcgcttcctgcagaagcgctttcgccaccatctgggggatgatgtggttctgtttaccactgatggagcacataaaacattcctganatgtggggccctgcagggcctctacaccacggtgga

SEQ ID NO: 86190 - DNA, 1466 bp, Homo Sapiens
cagtcgacggtaccggacatatgcccgggaattcggccattacggccgggggttccgctccggccgccctttgcgcttggatccacttccccatctgtaacgaggtgttgagacgagaatgccacccagaggatgtttgaaattgactatagccgggactccttcctcaaggatggccagccatttcgctacatctcaggaagcattcactactcccgtgtgccccgcttctactggaaggaccggctgctgaagatgaagatggctgggctgaacgccatccagacgtatgtgccctggaactttcatgagccctggccaggacagtaccagttttctgaggaccatgatgtggaatattttcttcggctggctcatgagctgggactgctggttatcctgaggcccgggccctacatctgtgcagagtgggaaatgggcaggattacctgcttggctgctagagaaagagtctattcttctccgctcctccgacccagattacctggcagctgtggacaagtggttgggagtccttctgcccaagatgaagcctctcctctatcagaatggagggccagttataacagtgcaggttgaaaatgaatatggcagctactttgcctgtgattttgactacctgcgcttcctgcagaagcgctttcgccaccatctgggggatgatgtggttctgtttaccactgatggagcccataaaacattcctgaaatgtggggccctgcagggcctctacaccacggtggactttggaacaggcagcaacatcacagatgctttcctaagccagaggaagtgtgagcccaaaggacccttgatcaattctgaattctatactggctggctagatcactggggccaacctcactccacaatcaagaccgaagcagtggcttcctccctctatgatatacttgcccgtggggcgagtgtgaacttgtacatgtttataggtgggaccaattttgcctattggaatggggccaactcaccctatgcagcacagcccaccagctacgactatgatgccccactgagtgaggctggggacctcactgagaagtattttgctctgcgaaacatcatccagaagtttgaaaaagtaccagaaggtcctatccctccatctacaccaaagtttgcatatggaaaggtcactttggaaaagttaaagacagtgggagcagctctggacattctgtgtccctctgggcccatcaaaagcctttatcccttgacatttatccaggtgaaacagcattatgggtttgtgctgtaccggacaacacttcctcaagattgcaagcaacccagcaacctctctctttcaccccctcaatgggattccacgatcgaagcatatggttgcctgtggaatggggatcccccccagggaaggtcccttggaaccgaaaaccaatggggaatccacttcttgaaaactaaac

SEQ ID NO: 86191 - DNA, 804 bp, Homo Sapiens
atttcaagaccgtactaggtagatggtcaattagagttcccagggtttgaagcctgtaactgctgccgccgctcaagccctccagagcattgctacggctgctgcccttgtactactacctccaaatacgttcttgctggtagtggcggcagcaggaccaattacctctttttgggtctccctcgagaagctccagatggcgtcttccgtgggcaacgtggccgacagcacagaaccaacgaaacgtatgctttccttccaaggattagctgagttggcacatcgagaatatcaggcaggaaattttgaggcagctgagagacactgcatgcagctctggaaacaagaaccagacaatacttggtgtgcttttataactttcatctagacacttccagtgtcgaaggctggacagatctgctcactttagcactctggcaattaaacagaacccccttctggcagaagcttattcgaatttggggaatgtgtacaaggaaagagggcagttgcaggaggcaattgagcattatcgacatgcattgcgtctcaaacctgatttcatcgatggttatattaacctggcagccgccttggtagcagcgggtgacatggaaggggcagtacaagcttacgtctctgctcttcagtacaatcctgatttgtactgtgttcgcagtgacctggggaacctgctcaaagccctgggtcgcttggaagaagccaagacttgagactgtcctcattcccatatgtaatagacatccaaagaatttcaattgctttgttgaacttttaaaaaaa

SEQ ID NO: 86192 - DNA, 586 bp, Homo Sapiens
atttggctttgctggagtctgtgtatggttttttaaggtcctttttccctttctgtttgtaaggtaagagcttctgttcgtgtgcagggaaagcagctcacagacgccgttaaaaccagcttcatctttccttcaggatcatccttttgtacttgatgctggaagctcttggagaaaaagcttaaacatttcaccagaaatcttaattgagcagcggtcatgttgccacagctttgtgagtacacagctaacagatgcgtcgagacctgaaatgtgctcgttttaatccctcctctcccagattggctccagcagaaaagtccctcgtgcacaggcagctcttgtgccggcactacttgaaaacatggctactttctaagctacaaaccattagaaaataactcaaaaagatggcagaggcaaatccacagaaggggggctgccctccacacacacacgcccgttacccacaccttgagcacacaccatgaagatcaccagcttggatggccgtcacctcagacatcactccagggagcacccgcatgagctgggccccctcacgcctgccttcctgggccagctt

SEQ ID NO: 86193 - DNA, 1001 bp, Homo Sapiens
caaaggaattctcaaatgagtagaggctccctggccaagtctaacaatgcctgcaacgatgaccgcgatcagtgccatactttagcataggtgaaaatatcttgtaccagggttccccatttgacataggcacagttaatgaaggttaagagacagatgccaggcaacacccagcagccgcctggcacaataaggggcgaaccagctcgggaagagaggctggtaccatgtagttggcaaaggtgatggcaatgatggcctggctggtgggctcaatgatgagcagggaggtccagagtctgatgaaagcaaggaatcctccaaaggcctccaggatataggcatagctggccccagatttcttaatggtggtgcccagttccgcataacaaagggccccaaagacggagaagaggcccccgacagcccagatgaccagagagagaccaaaggaggcactgtatatgagcacacccttgggggaaacaaagatgcctgagccgatcatgttccccacaatcaggcacacgccgttaagcagtgagatctccttcttcagcttcacctgctccggccctgggctggccccatcacccaaaggggaggtttccacctcaggctgggaggccacttcatactcagtgctgtcaaccatggtggaggagaggaaacccttcaccagcttcctggcattgcctccttggtcctggatataagcaggttctcacggcagtgtgagcggcagtcagggagagaagtgccttccaggatctgtggtctgatgctcctccttcccagccagcagtaaaagggaaggccagacaaatgcctgtccagtgacctttgggcaggtgcggggaggaggggctaccagctgagtcaggggagaggggaaggtgctagttaggagaaccaagcgtatcgctcatgctgcaacagctgttgactctccccggccgtaatggccgaattcccgggcatatgtccggtaccgtcgactg

SEQ ID NO: 86194 - DNA, 642 bp, Homo Sapiens
  misc_feature (45)..(45): n is a, c, g, or t
tggttctccctgtgctcgctgacgcatcatgccacgccgccgctntatttcctcatcatcaatttcctactcctcttcttcactgctgtcttctcgttccatgcgccaagcatctccttctacttctgagtcactctctcctaccacttcaggttccactatttttcgatgtcgagccaatctctcttccacatcttcactaatacggttctgtaaacgccgtagccgggggtcactggatgaatcctcctcctgttcctcaggctctgcttcttgttctttggctttcttaatgaactgaaattcttcatcctcctcatctgaggactccataggggcatagtctggcctttttccggacacataacgctttaccttcactttttccattgaaatctcacctttctcattgcgaactgggacggccccagccgtagactgaatgggcggttgcttcatgagagcgcttgggaccgacatgttgatggcagcgacggtgattcccgaaacttgactaattccaaacagtgaacaccagcaacgtcaacgaagagaagaaattccttccacctgagtccgcgaacacagctgcgcgactgatagagaaactacttacggctgagctagataaaccggaaaaat

SEQ ID NO: 86195 - DNA, 1821 bp, Homo Sapiens
  misc_feature (1769)..(1781): n is a, c, g, or t
cttattgtagagagtatgaagtcgaggcgcgccgaattcggcacgaggttcacccagatcacccgctttgccagtggctccaagattgtactgactcggctgtgcgtggcactggcctcactggctctcagcatgatgcctgatgcttggccatgtgctgtggcagatatggtacgactcttccaggctgaggactcaccagtggatgggcagggccgctgcctagccctgttagagctgctgacagtgctgcctgaggagttccagaccagtcgcctaccccagtaccgcaaaggcctggtgcggaccagcctggcggtggaatgtggggctgtcttcccgctgctggagcagctgctacagcagcccagctcacccagctgtgtgcgtcagaaggtgctcaagtgtttctccagctgggtgcagctggaggtgccgctgcaggactgtgaggcgctcattcaggctgcctttgctgctctgcaggactcggagctcttcgacagcagtgtggaggccattgtgaatgccatctcacagcctgatgcccagaggtacgtgaacacactcctgaaactcatcccgctggtgctgggtctgcaggaacaactgcggcaggcagtgcagaatggggacatggagacctcccatggcatctgtcgcatcgctgtggccctgggcgagaaccactcccgggccttgctggaccaagtagagcactggcagagtttcctggcactcgtcaacatgattatgttctgcacaggcatccctggccactatcctgtcaatgagaccaccagctccctaaccctcaccttctggtacacactgcaggatgatattctatcctttgaggcagagaagcaggctgtataccagcaggtgtaccggccagtctacttccagctggtggatgtgcttctgcacaaggcccagttcccttctgatgaggaatatggattctggtcctcagacgagaaggagcagttccgaatttacagggtggacatctcagacacgctcatgtatgtctatgagatgttgggggccgagctgctcagcaacctctatgacaagctgggtcgtttgctcaccagctcagaggagccctactcctggcagcacacagaggccctcctctacggcttccaatccatcgcagagaccattgacgtcaactattctgatgtggtgcctgggctcattggcctcatcccacggatcagcatcagcaacgtgcagctggcagacactgtcatgttcaccattggagctctgtctgaatggctggctgaccaccccgtcatggatcaacagtgttctgccccttggtactgcatgccctaagcaatcctgagctgtctgtctcttctgtgtccaccctcaagaagatctgccgagagtgcaagtatgacctgcctccctatgctgccaacattgtggctgtgtcccaggatgtgctgatgaaacagatccacaagacaagccagtgcatgtggctgatgcaggcgctgggcttcctgctgtcagctcttcaagtggaggagatctttaagaacctgcactcgcttatctcaccctatatccagcaactgggagaagctggcagaggagatacccaatccctccaacaagctggccattgttcacatcttggggctttctctccaacctctttcacacactggacatcagtcatcttgaagatgatcatgaaaggcccttgaacttcggaacctgccagggccccaaggaacccaaccccnnnnnnnnnnnnnctgcaccaagtccttccagctttatccgaaagtgcttgaa

SEQ ID NO: 86196 - DNA, 1021 bp, Homo Sapiens
  misc_feature (853)..(853): n is a, c, g, or t
  misc_feature (973)..(973): n is a, c, g, or t
aggtgtccacccagcgggttccagcttgtttgctgcatagattacaacggtgatggcgggcaagcggtccggctggagccgggcggctctcctccagctccttctcggcgtgaacctggtggtgatgccgcccacccgggcccggagtctgcgcttcgttaccttgctgtaccgccatggagaccgttcaccagtgaagacatatcccaaggacccctatcaggaagaagaatggccccaggggtttggtcagttaaccaaggaggggatgctacagcactgggaactgggccaggccctgcggcagcgctatcacggcttcctaaacacctcttatcaccggcaagaggtttatgtgcgaagcacagactttgaccggactctcatgagtgctgaggccaacctggctggactcttccctcccaacgggatgcagcgcttcaacccgaacatctcgtggcagcctattcctgtgcacactgtgcccatcactgaggacaggctgctgaagttcccgttgggcccatgtccccgttatgagcagctgcagaacgagacccggcagacaccagagtatcagaatgagagttctcggaatgcacaatttctggacatggtggccaacgagacagggcttacagacctgacactggagaccgtctggaatgtctatgacacactcttctgtgagcaaacgcacgggctgcgcctgccgccctgggcctcaccccaaaccatgcagcgtctcagccggctaaaggacttcagcttccgcttcctcttcggaatctaccagcaggcgggagaaggccccggcttcagggggggagtcctgctggctcagataaggaangaacctgacccctatggcggacacctcccagcttccccaagctgctggtttactctgcgcacgacactaccctgggttgccctgccaaatggcactggggatgtctaccaatggtggaancaagcccccctacggcctccctggccacataattttgaaactggtacc

SEQ ID NO: 86197 - DNA, 1967 bp, Homo Sapiens
agttggagccagacagcggggtggacaagtggcgtgtgtgctgcgaccccgagggaagatgaacgggacgcggaactggtgtaccctggtggacgtgcacccagaggaccgggcggcgggcagcgtggacattctcaggctgactctccagggtgaaccgacaggagatgaacttgaacacatagcccagaaggcgggcaggaagacctatgccatggtgtccagccactcagctggtcattctctggcttcagaactggtggagtcccatgatggacatgaggagatcattaaggtgtacttgaaggggaggtctggagacaagatgattcacgagaagaatattaaccagctgaagagtgaggtccagtacatccaggaggccaggaactgcctacagaagctccgggaggatataagtagcaagcttgacaggaacctaggagattctctccatcgacaggagatacaggtggtgctagaaaagccaaatggctttagtcagagtcccacagccctgtacagcagcccacctgaggtggacacctgtataaatgaggatgttgagagcttgaggaagacggtgcaggacttgctggccaagcttcaggaggccaagcggcaacaccagtcagactgtgtggcttttgaggtcacactcagccggtaccagagggaagcagaacaaagtaatgtggcccttcagagagaggaggacagagtggagcagaaagaggcagaagtcggagagctgcagaggcgcttgctagggatggagacggagcatcaggccttactggcgaaagtgagggaaggggaggtggccctagaggaacttcggagcaacaatgctgactgccaagcagaacgagaaaaggctgctaccctggaaaaggaagtggccgggttgcgggagaagatccaccacttggatgacatgctcaagaaccagcagcggaaagtccggcaaatgatagagcagctccagaattcaaaagctgtgatccagtcaaaggacgccaccatccaggaggctcaaggagaaaatcgccctatctgggagggcagagaatttagagatgcatgaccggatggaacacctgatagaaaaacaaatcagtcatggcaacttcagcacccaggcccgggccaagacagagaacccgggcagtattaggatatccaagccgcctagcccgaagcccatgcctgtcatccgagtggtggaaacctgagctgcctggagatggttgctgccattgctgctgcctctgcctcggagaagcccactgcccctgttggctgttaacactggcctttgacatcctgacctggcccctgggctgcaccaaggaacttcgggctcccgttgtctcaccattcccaagcccctggccactctaagctgggcagacggagcacgagcacctattcaaggcactgcagccctttggaagacattgtcctgcaagcaggagccagggcaatatctatattcctacagtgactatttttctctgtagagagcctcccttctgttgtagactggactctggctgcgccataagccaggccttcatcagattgggagaggtgacaagatttgcctcagccctaaaagctggagacacagatgtccagagtgattggagaatgtcctgggggaatgaagttccttccacaaacacagctcagttcttagcaacaaactgtttgtttttctacttgctccatctgcagcctacgctgccctggcctcctgcagacagatagtggggttacctggcaaggcctggtgagagccagtgaacctaagctttgactgggtggccttgtctttctggggaggagggatgtacattcagggagtagcccttttgcggaaaaatctctagggctacagacagtcatgtgtgacttctctctgctgtgaaaactcccaaagtctcttttaggattttccctat

SEQ ID NO: 86198 - DNA, 1758 bp, Homo Sapiens
  misc_feature (1225)..(1288): n is a, c, g, or t
agagctgctccggccgcggccctgggagctggaggaaccgcgactcagcaggcatgactggagagggaagtcccaatggtgctagaatggtgctgcagtggcagaagacggctcacaagtgaggtctggaagaacaacagggaagacatccatcatttgctccaaagctgtgcaacgtcaatatccatgaggcgagcacatctatgactacacccgtgcagtcagctgaagccacgctacagcaaggcagaacatcgtgagcagtgcacgcgtgacaaatgacacagcggccttcaagacactcgagatcatggccatatggcccgtggagtcaagtgcaagaaacaatcatcctaacccatgatgcagggaaaccctccatctgtcacaaagcccttgctggctccctgtacacgagctggcaatctcaccatgggcaccgcggagagcccgcttggcccacccaacggtggagttatcccatggcgttgaccatgcaacgccctatcccactgggaaccccaatgtacacgatacgaaagcgctgatcgaagacccataacccgaagtcgccacaatcaaacgaggaaccattggaagggcgcggttgcgcaagacaccacatcgaaaggaaaaccccaacagcagccgaaggaaaatcccggaggcgaggccaaaacagccgtgacaccaacagccacaaaacgagggcaacggaccaagggacaccccgataatgcaagatacgccaccgaacaaacgcgagaacccccaataaacacaggaaaaacaccgacttgggaaaggaaccccagcgacagcgaaaacgccaaaagcaccgacgcagagcaaaccgcaaaaaccgcacgcaataggcgcacactagggcacaggggcccacacgcagccagccgttgggcacgcaaccgccggttcccgccgaaaaatatccacgaaaagacggcaaaaaggtgtgacagacacaggtggggaccgcacgtgagccatattccgaagccggtatccagaattaccaaggagcagcatagaaccccacagcgggaaattggggaagatatacgcccccagatgagatctaccgagtacccggaaagccattgggagacacccaacggacccaaacagcacgagaaaaataggatttggcgggaaacaataaggaccaccacccgggtagctcacgcagaccacagcgattaccacnnnnnnnnnnnnnnnnnnnnnnnnnnnnnnnnnnnnnnnnnnnnnnnnnnnnnnnnnnnnnnnnatccaagacgaagagaaagcaaatgacgcaaagaaagggagcagaaaacacaaaagaagacacaatagacaagaatacggagacaaaaatgaaagcggaaagcacaccaacgagaagaaaaaacccaccaaagaccaacaaagagaagaaagaatacaggacaaccaacagaccaaccacccacgcaaaccacaaagacgacaccaacacatgcaccccacaaaaagaacaaagaaacaacgagaggcaaaagccaaacccgataaaagacaccgatgaaaccagaagcagatagagtaataaaacaagaggaacaccaccaaaaggtcaggagaatagtaccagcgctaaagagacttaggcacgctaatacaaagataaaactcagaatcaaagacaatcagaggaaagagcaccccacacccagaaagtgacaagttagagcaaagaaaaaacgcaataagacgaac

SEQ ID NO: 86199 - DNA, 938 bp, Homo Sapiens
  misc_feature (74)..(108): n is a, c, g, or t
  misc_feature (725)..(725): n is a, c, g, or t
  misc_feature (910)..(910): n is a, c, g, or t
cagttataatcatatagggcgtagctcggcgagcgaacgacgagcgcagcgagtagtgagcgaggaagcggcgnnnnnnnnnnnnnnnnnnnnnnnnnnnnnnnnnnncagtcgacggtaccggacatatgcccgggaattcggccattacggccgggggctacccgggtaacgggtcccggctgtggaagctcccgcggcgccgcgatggacctcgaggagtcggaagagtttaaagaacgctgtactcagtgtgctgctgtctcatggggtcttactgatgaaggcaaatattattgcacttcttgccacaatgttacagagagatatcaggaagttacaaacactgatcttattcctaatacccaaataaaagccctcaaccgggggcttaaaaaagaaaacaatactgaaaaaggctgggatgggtatgtgtgtgaaggtttccagtatattctttatcaacaagcagaagccttaaagaaccttggagtaggcccagagttaaagaacgatgttttacataatttttggaagcgctaccttcagaagagcaagcaggcatattgtaagaacccagtttataccactggaaggaaacctacggtattagaagataatctaagtcattcagactgggctagtgagcctgagctgctaagtgatgtcagctgtcctccttttcttgaaagtggagcggagtctcagtctgacatccacactcngaaacctttccccgtcagcaaagcatcacaatcagaaacgtctgtctgctctggatctctggatggagttgaatactcacaacgaaaggagaaggggaatcgtggaagatgaccatgccacagacacttgcccctccggtatctggccttacctttggcagaagagaagcaataacactttccanaatctttggaaggtttgtttgaaaaagg

SEQ ID NO: 86200 - DNA, 838 bp, Homo Sapiens
  misc_feature (200)..(200): n is a, c, g, or t
gggtcctacagtgtgggtgccagtgggagctcttccaggaaaagacatcgctcccgggaaaggtcacctagccggtcccgggagagcagcaggaggcaccgggatctgcttcataatgaagatcggcatgatgattatttccaagaaaggaaccgggagcatgaggagacaccgggatagagaacgggaccggcaccacntgagaaaggagtctggttggaagcaaatgtttttttaatggacttgcatctcctcaccttgatcaggactaaaggacggaggccgccccacccccttcactttcctccaaacccctaactccctccagacacccaggggaatacccctctgccccacaggaattaaagactgctttgtgcagtcctcccaatcccacacctcctgtttgccaggggaaagaacctaaagacttcgtgtgattgggaggggtggcagacaggaagaaaacatgtccaggcccctggtctccatagagaatggtgctttgtccaagaaaacgtatgagtttctgattctccgggagccgttcaatggtgaggttgatgggaagacttccttcccaaagaaaatagatcctccatgcaggatctaggagagtgactgggtgtgccaaaatatgcccagggtcctgccctcagcactagatttaatggggccaagagggtccaaaccccttgctaacataccacttctttgtttaactcctttacctttccagccctttgaggagggaccatgagaacagaaattaccttatgaaaagctacttctgttcctgctttccctctcacgtattgacggtttatttctttgacct

SEQ ID NO: 86201 - DNA, 1124 bp, Homo Sapiens
  misc_feature (36)..(36): n is a, c, g, or t
cacctccctcctttcccaccctggcgaatgacgatnccccttggtatcggtccggaattcccgggatagatgtccggccggtctaagcgggagtctcgcggttccactcgcgggaagcgagagtctgagtcgcggggcagctccggtcgcgtcaagcgggagcgagatcgggagcgggagcctgaggcggcgagctcccggggcagccctgtgcgcgtgaagcgggagttcgagccggcgagcgcgcgcgaggccccggcttctgttgtcccgtttgtgcgggtgaagcgggagcgcgaggtcgatgaggactcggagcctgagcgggaggtgcgagcaaagaatggccgagtggattctgaggaccggaggagccgccactgcccgtacctggacaccattaacaggagtgtgctggactttgactttgagaaactgtgttctatctccctctcacacatcaatgcttatgcctgtctggtgtgtggcaagtactttcaaggccggggtttgaagtctcacgcctacattcacagtgtccagtttagccaccatgttttcctcaacctccacaccctcaagttttactgccttccagacaactatgagatcatcgattcctcattggaggatatcacgtatgtgttgaagcccactttcacaaagcagcaaattgcaaacttggacaagcaagccaaattgtcccgggcatatgatggtaccacttacctgccgggtattgtgggactgaataacataaaggccaatgattatgccaacgctgtccttcaggctctatctaatgttcctcctctccggaactactttctggaagaagacaattataagaacatcaaacgtcctccaggggatatcatgttcttgttggtccagcgttttggagagctgatgagaaagctctggaaccctcgaaatttcaaggcacatgtgtctccccatgagatgcttcaggcagttgtactttgcagtaagaagacttttcagatcaccaaacaaggagatggcgttgactttctgtcttggtttctgaatgctctgcactcagctctggggggcacaaagaagaaaaagaagactatggtgactgatgttttccaggggtc

SEQ ID NO: 86202 - DNA, 741 bp, Homo Sapiens
  misc_feature (140)..(140): n is a, c, g, or t
tgcatagagaatataacatttcagaaaaacctattagtacttcttggatattataacatataggttttgtttcctttagactgtaaactgtttaatacgtataactggttatttcacatccgaaccacattaaaaaaaanttcggagatatgactgctattacactaaggaaacaagtggaattttctgaccaaaactcattcatgggtcttccgataaacaatctttacatatactgactgaagatatcaaatttctgtgccacaaaatagtagaattatatcagaactacagcaaataaaactttaattataatacatttgcttgaaattaaggtgctattcatcatgcagtttttaccaagtgggcatcatgtcgggaaaccacaccctaccaagatgcttggacacttcccagtgaatctgctccaaactatacttttggtcaggaattagtacttcttccataatggataattgagataggcggccaccacacatcttcacaaactcaacaaaggcactacatgagacttcacattcccctagtccaatagctgacaaatttctgcaacgttctgcaatgagaattaactcttcatcaagtggccgtaatccatttgcacacactactagttcaaccagtctagggcatgtcattcccacacggccaagcacatctttgcttactgatctcccaaagtacagatgggtggcaggtatttcatagcgaaagaagggg

SEQ ID NO: 86203 - DNA, 583 bp, Homo Sapiens
gactattatatttcagaggcagcgttcaggggggcgtaaacataccgagaagcatgcaagcggtggctccaccgtccacatccatccccaagctgctcctgttgtctgcagacacgttttggatacactcattcaattggccaaggtatttcccagccacttcacacagcagcggaccaaagaaacaaactgtgagagtgatcgggaaaggggcaataaggcctgtagcccatgctcctcacagtcctccagcagtggcatttgcacagacttctgggacttattggtaaaactggacaacatgaatgtcagccggaaaggcagaactccgtgaagtcagtgccagtgagcgctggcggtgagggggaaacctctccatacagcctcgaggcctctccactggggcagctcatgaacatgttgtcacacccagtcatccgccggagctctctcttaactgagaaactcctcagactcctttctctcatctcaatggctctcccagaaaacaaggtgtcagaagcacaggctaattctggcagcggtgcttcctccaccaccactgccacctcaaccacatcta

SEQ ID NO: 86204 - DNA, 899 bp, Homo Sapiens
cactttctgccgagtttacagctcagtgcactgattcccaggctcctcaaatgaagagagctcccagatgctgctgtcttgcagtagtggctcaatgtcctcatcactgccccgttctggggtgttggtcaggctgccgctgctgctgttactgtgtttttgaactccactggctttactgtattcaggaatgaataaggcaaccagaaaagacataaggactatacatgccccaaataaaaacggcgggcctgggatgacagctccctgcaggggaacgttgttagaattcaatttcgggcccaactcagtcagttccacatggaacatgtagaatatgaagccatacagtgctggccccaggccattgcatagtcctcttattccagttatgatcccctgggcaactccttgctgatctgactctgcattccgagagacgagggcactgattgccggaaacgtgatgctggacatggcagccacggtccctgctgcccacatcatccaggcctgtgatccaaaaccgtaccaggctaactggagcatctggaagcccaagccaaggaggacagtattcttatttcctaatgatctcatcaagatgctaagaaaggccgtctgagccacaatagacagaattcctaccatagctatgaatgctgcaattttaacagatccaaaacctatgacctgcctgagatagagaaaaaaacttgacacactgtccagcttcaggaaggtatgaaagaaacacggtgatgcagattagtaagacagtagaatcttttccaactttcttcaacgacgcaaaagggtctgcttgtttccaagaaatctgagctccccaggaaaccggtctcattttctcaggcagagatcccggaacagccaataag

SEQ ID NO: 86205 - DNA, 879 bp, Homo Sapiens
  misc_feature (189)..(199): n is a, c, g, or t
aaaaaattatatacacaaaacaacagaactagagtagctgacttctccccttctttttaaaagtgagacaaaattccttaagaaaatctgcaaggtgctgggtgaaccttctgatgctaaagttgttcttctggaatattaaaatttgggtatcttttggacatcaccaccatgtaaagagtgatgggnnnnnnnnnnngctttaagaaataagtcgaaacttttctaacacaaacttattagagctataaagtggagacacgcataaagctatactaactgcatcactaaccagtctcttttttttccccagaaactcatctcaagggaagggagctgaaaaaccaccagcaacgtgatttctgcatttcccagcacatgggtctggggcccgcctctctcgagtcccctagtcgtcctcgccgcctccgtacatgtcagccagcttcttgaagcgattgccccattcgttcaagtagtcatagtcctggtctttgtctgactctgaggagttcagggagctcagactagcagcttcggaaccgcttccttcatagtcaaacacgagcagagaatcataaggcggggctgtggggtcagtatcagccgctttcagattttcatcaataaaatttccaatttcatcgggattggcagggcggggaagataccgggggacactcatgagggttggtgcaacgtcgttacgagtcacttcaggccgagcgtccaggcccctgtgcagctggctcaagtcaaagtcctggtcctcttctccgcctccttcttcatcatagtaataaacgttgtcccgggtgtcatcctctgggggcagtaagggctctttgaccaccgctctcctccgaagaaacagcaaga

SEQ ID NO: 86206 - DNA, 679 bp, Homo Sapiens
gtcattatgtagtggttaaataagcaaatgctgaactcagcacagctctagcaaaatgcaaaggaaataagaaaagcctcacctcagaatgattacaccataaacagaaataaacattttcaaacacaaagtttcacaaaataatatatcatcactttaaaagaaattcagaactctattttgctgttgatcaaacttgtgcatacactcaagttactaagacacaatttgatagttagatacttgtaaaaatgcattcctaaacttaataatcaattaagttcataattaacaaagagcaaacatttcctagtccttaacatttaaaagataacccagtccaggtgctgccacatctcaagttctgaaaagctaaaggcagaaacaattctggttatacaattcctgcatttcaccaccttaaaaaatacttgaagaaactttaggaaactttatattaaggcttgctgtatttctgtatcttaaattgagaacaaatcaaaacctacgatgtaacctcgaattatttaaatagcttttggcatttttcttgaaaagcaaatttgaatctttcactataaaacatttctataccacaattactaattcacattaatgtgtaagtgccccccggccgtaatggccgaattcccgggcatatgtccggcaccgtcgactg

SEQ ID NO: 86207 - DNA, 1059 bp, Homo Sapiens
tccggaattcccgggatggtaacaaccccggaaagtagactcaccgtcttggtctagagactgacccctgcacagacagaccccttcccctctctgcgaaaggaccaagccccagaagtcactccatctcctacggctcgcaatttccagaggccccctggcaccttccagcctgatgtcgtgcgtcaagttatggcccagcggtgcccccgcccccttggtgtccatcgaggaactggagaaccaggagctcgtcggcaaaggcgggttcggcacagtgttccgggcgcaacataggaagtggggctacgatgtggcggtcaagatcgtaaactcgaaggcgatatccagggaggtcaaggccatggcaagtctggataacgaattcgtgctgcgcctagaaggggttatcgagaaggtgaactgggaccaagatcccaagccggctctggtgactaaattcatggagaacggctccttgtcggggctgctgcagtcccagtgccctcggccctggccgctcctttgccgcctgctgaaagaagtggtgcttgggatgttttacctgcacgaccagaacccggtgctcctgcaccgggacctcaagccatccaacgtcctgctggacccagagctgcacgtcaagctggcagattttggcctgtccacatttcagggaggctcacagtcagggacagggtccggggagccagggggcaccctgggctactttggccccagaactgtttgttaacgtaaaaccggaaggccctccacagccagtgacgtctacagcttcgggatccctaatgtgggcagtgcttgctggaagagaaacgttgagttgccaaaccgaaaccatcactcgtgttacgaagcaatgtgcaacaggcagaacccggcctttcaatggtctgagcctgccccaagccgggcctgagattcccgggattaaaggctgcaagaggctaattgcgctcttgggggaccagtgagcccaggaaaagcctccttcaggattgctaccaaaactgatgaagtctccgatgggggaaacca

SEQ ID NO: 86208 - DNA, 1329 bp, Homo Sapiens
  misc_feature (829)..(829): n is a, c, g, or t
  misc_feature (1060)..(1148): n is a, c, g, or t
  misc_feature (1197)..(1239): n is a, c, g, or t
  misc_feature (1265)..(1275): n is a, c, g, or t
tgggacgggcggaattcccgggaggggagcaacccggaaagagactcaccgtcttggtctagagactgacccctgcacagacagaccccttcccctctctgcgaaaggaccaagccccagaagtcactccatctcctacggctcgcaatttccagaggccccctggcaccttccaacctgatgtcgggcgtcaagttatggcccagcggtgcccccgcccccttggtgtccatcgaggaactggagaaccaggagctcgtcggcaaaggcgggttcggcacagtgttccgggcgcaacatacgaagtggggctacgatgtggcggacaagatcggaaactcgaaggcgatatccagggaggtcaaggccatggcaagtctggataacgaattcgtgctgcgcctagaaggggttatcgagaaggagaactgggaccaagatcccaagccggctctggtgactaaattcatggagaacggctccttgtcggggctgctgcaagcccagtgccctcggccctggccgctcctttgccgcctgctgaaacaagtggtgcttgggatgttatacctgcaccgggacctcaagccatccaacgtcctgctggacccagagctgcacgtcaaggtcagctggtctacacccctctcagcctcaagacaaagccccagagctgctccagccaggccccgccggaaactaaacctccagaggccctgcctattgaatagggcgtagtccttctctcctctgggaaccaggggctggccagggggaaaaaagggcccaggccaagggagtttttaagcttccctgggcctacacaagnggggataacaagggcccccttgaagcccaccaaccgagagctccttttattccccacccaaggcgggggcgcgcccacacccagaggcccccccttcccaaaaagaaaaattccatgtggggacttgagaaaccccagagcccccccgggggaaagacactcccgaaaacccctttgggaccctcttaacccccccttaaaccccacaagggggggcaccccgtaaaaaannnnnnnnnnnnnnnnnnnnnnnnnnnnnnnnnnnnnnnnnnnnnnnnnnnnnnnnnnnnnnnnnnnnnnnnnnnnnnnnnnnnnnnnnaaaacaaaaaggttttgggaaaaccccttgacgcacccctttttttgtnnnnnnnnnnnnnnnnnnnnnnnnnnnnnnnnnnnnnnnnnnnagaagggtcttgttcctggggggggnnnnnnnnnnngtggggcgccgtattcgcccgaaaaacgctcctcccacaggcgtgggttgtgtt

SEQ ID NO: 86209 - DNA, 493 bp, Homo Sapiens
ccgactctagttgatcccccctagctatatgtcgtgcgtcaagttatggcccagcggtgcccccgcccccttggtgtccatcgaggaactggagaaccaggagctcgtcggcaaaggcgggttcggcacagtgttccgggcgcaacataggaagtggggctacgatgtggcggtcaagatcgtaaactcgtgagtgaccccggttgaccccagccgcaatctggccaaaaaggtggagccactgtgctctggggcctgaatggcgaagggagggattttcccacgaccccggtgcgactccagctctctcctggagtgtaggaaggcgatatccagggaggtcaaggccatggcaagtctggataacgaattcgtgctgcgcctagaaggggttatcgagaaggtgaactgggaccaagatcccaagccggctctggtgactaaattcatggagaacggctccctgtcggggctgctgcagtcccagtgccct

SEQ ID NO: 86210 - DNA, 1348 bp, Homo Sapiens
  misc_feature (1077)..(1077): n is a, c, g, or t
gcagtactatacggtcctaaggtagcgaggcctgggtggcgaattcggcacgaggagctgcaggaactgctgaccattgctgaacgctgggaggagaaagcccacctctgcctgtaggccaggcagaagcatccaccagccacacttgaggccataatccgtgaagcggaaaacatccctgttcacctgcccaacatccaggctctcaaagaagctctgactaaggcacaagcctggattgctgatgtggatgagatccaaaatggtgaccactacccctgcctagatgacttggagggcctagtagctgtgggccgggacctacctgtggggctggaggagctgagacagctagagctacaggtactgacagcgcactcctggagggagaaggcctccaagaccttcctcaagaaaaattcttgctacacgctgctggaggttctctgcccatgtgcagatgccggctcagacagcaccaagcgcagccggtggatggagaaggagctggggttgtacaaatctgacacagagctgctggggctgtctgcgcaggacctcagggacccaggctctgtgatcgtggccttcaaggagggggaacagaaggagaaggagggtatcctgcagctgcgtcgcaccaattcggccaagcccagtccactggcactcatcgagcacggcctcctctacaactctctatctgtgtgtgtgggcaggtgctggctggggcgggagctctgcagtgtgacctgtgtcaggactggttccatgggcggtgtgtgtcagtgcctcgcctcctcagctctccgaggcccaatcccacctcatccccactgctggcctggtgggaatgggacaccaaattcctgtgtccactgtgtatgcgctcaaggcgcccgcgcctggagaccatcctggcactgctggtagccctgcagagactgccagtgcggctgcccgagggcgaggccctgcagtgcctcacagagagggccatcagctggcaaggccgcgccaggcaggctctggccctctgaagatgtgactgctctttttgggacggctgggctgagnctccgcccaacggctacaggctgaaacctagacctgaggagccctcctaactacccctgcagcccctgcttctgaccccctcagagagggcagtggcaaggatatgcctaaagtgaactactcagcccagctcttgtcctcaaattcttgtctcctagcccctaccccagtttaggctcggccctgccccttgttctccaattttcagttttcttttggacaaccctccctatccaattctgcatcctgtccagattccctaaacttcgcc

SEQ ID NO: 86211 - DNA, 485 bp, Homo Sapiens
cagctagtcttttcatgggaaagaaaaaatgtatttcatatctataaaacctatatagccatttagctgaagcccagcttaccaggttcaagggtacaaacttctcaaatcttcaaaacattttagtcaaagtgtaatatacttaaactgcacctaaaatatctttggcactgcttgttagaaattcctgattcctgttactaatcactaaagaaaccggatgctgccaccgtaggatttaagcagtagtgcttccatgctcttaagactcctgctgcctggaccttcgtcagctttgacacctcttttctgatttaaagacaccaaggaaaactacaactgtctttagctttgaagcagttttcatgtaatcattgccacctcttcgctacatgaactactattgataccagcatacaagtgtatagcactttacacacaagaggtttattgatgtaaaattatcggctagggaagcagcagcg

SEQ ID NO: 86212 - DNA, 875 bp, Homo Sapiens
tgtaatcaaaaacaccactgacaagcaccacttcaaacatgatggcaagaagattaaataccaaagcactcaggacaaaactgataccccttgttcctctgtcaatagccttagataaagctcccgtctgtctgctcaggtgaaaacccagatccaggttgtgaagatggagaaagacatttttggctattcttcggattgaattctgggctaccttgccaaatactgcatttcgaacttcggtaaaaaaagcagctccagctcttgatacaccatagccaatcagaactgctgttgccatggttgcaactgtatttggtgcatcactcaggttcagcatgtttcccgacatctggttgaggctgtctacagcatatttaaacatgaagggaaccacaatattcatggcctttgcaccacccaaaaatcccagcgaaatggcaactctagctcgtagatctggcctgtctttgggccacacataagaaagcattgcttttatgattttccgagtatcaacatcttttaacccttcttttgggtctgtgtggagtcctcctcctgcatgaccatgccaacatgtcctcttttctatcagtggccatacctggagagcctttgcagcatctaagaactgtcctgaattgccttttcccaatctctgccatgtgatactttttaatgactctggaatctgctggtaggctcgagcggttcccaaggcgccgagttgatgtggcctccactgcggacctgagccgctaacagagactaaaggccggatcagaatcgcggagtgccggcgcttttcgaaagcagccgccgcggccgcccagcgccaagaatgcatcgcgatccgcgccatcttgaacgag

SEQ ID NO: 86213 - DNA, 721 bp, Homo Sapiens
atttgttcgattatttgagtcgcctgatagaagaaagggatactttgatgagaacgggtgtgtataatcacgaggatcgaataataagtgaactcgaccgacagatcagagagatgttggcaaaaagcaatgccagtaattaataacatttggaaaagctttatagagactctaagtctaaattttaatttctttgtaaaaccctcaaaagtgaggaaaatggatgttttaaaatggtattttcaattttttataagcaaaattttgtatgttattgtatagtatttatttgatcttatttactttatgctacctctcccacactggttttatttgtaatttgcatttatatactcattttaaatgacttttcagtgtttttcatagtttataatctgatggctaactaactttcaaaacagcttttaactaagtttgttgtaggagaaatgactgcggtaatttccagttctataatgtttcatgttgagccaaaagagtatatcttgcactttaaaaacactgcgtcctattccatttgaatgtaaattcttaaaagttgagaccaattgtaaccagtttaactcattttagatgacctttttttcttataatatttgcaagtgacaagtttgaaaacaaagcaagatcagtgcagagaagccacatgacatgttgggtgacagattggtcatttatttaaataaagttaatacagatt

SEQ ID NO: 86214 - DNA, 1268 bp, Homo Sapiens
  misc_feature (1151)..(1185): n is a, c, g, or t
  misc_feature (1189)..(1228): n is a, c, g, or t
tttaagtgctattgtcttaatatttttataataattaagaaataatttggaaagacattttacttttaaattttttcaacataaggcacatagcaacatttatagtctagaaacaactaaattatgtaataaataattattttttcgatcattatttgccctttacctgaagaaagtaggtaagcagtggagttaaaatatgcctgaattaatgaaaatggttggatttaggaaacacaaataatatttgtgtgcagaaagatattaatttaaaaaagaaaaagaatactttatataaaatatacatcctagagtgttataggtagaagaaaaaatgtggaggcacttagattgaaacagtgaagggaggaaagcactgagattatctgtgtttataaagaagcaccaaaccatttattggtgaacatctgagataaaagcagaggttaacatgataggaaaaactagtttagttctctaactttgtatttggggaactaataagaatccagtagctcaaaactcaaagtattttatttttactgtgacagaaataattcaaatagagaatattttctaatgttaaaagaatcttagtttccctgataaagttttgtatattttgtggtgcccagaataatgtgaaatgtagacggtacctcaccactccgtggcagcaccctttctatcgttgactgtagtatatgtaattttgataccatttgttaaactcccttttctaaaagcaaaaattaaaatttggtttggaataattgtgaatagcatgcatcaatgcctccatgtgaacttgctgacgtccaacagtgacagttttatttttccataatccttcacaaactaatttaatccaaaaaccagggtcaaaattgggcttggaattacaggaatccactggatgtcaaatcaggaaaaggtctggcttctgacggatgatgaagtggctgaagatgtgtggtagtctgagtgttatttatgttatttaattcagctggatatgtttcatttaaaactccattctgaaacttgtttaaaaatgcctgttggcctggcagtactggattgtactgcatctgacccaccccggccgtaatggccgaattcccgggcatatggccggtaccgtcgactgnnnnnnnnnnnnnnnnnnnnnnnnnnnnnnnnnnncggnnnnnnnnnnnnnnnnnnnnnnnnnnnnnnnnnnnnnnnnctcgaacgagttaagcgccctatagtgagtcgatacattc

SEQ ID NO: 86215 - DNA, 1058 bp, Homo Sapiens
gccatcaggcttgggtttagtcctgcagcagctgccatggcagcaagactggcatttgctggcaactgtgcagctccttgaagggcagcagctgctgctgtttgcaaacctgatgctgtcaccatcacctggctggtcccaagaggggaggacaaaggagtggaggtggtctgtgttgtgctggtctcactggcactggatgcctcggaggtggaaggctgaggcagaaaggggagggactcagagagggggacgtgactgctgaggaagctgaaggcgctgtggaaatcacgggttgctgtgttgtgggaggtggtgtctgaagtgcctgtaactgaaagattcgtcacagcagcactggtcagagggaggacagggctgactgtgagggtagttgctgcactgctagtcacaaggcttggtgtggtcgccaccagtgaagttgggctggggaaaattgctttaataggtgagctgctggtcccaccactgcttggtgggttgattcttttttctttctggcggcggttacagaaccaaacacgaatcacctctttttccatattgagctgatcagcaatcatagtgatctcttccgaggtaggcttttgattctccaagaaactcttctctaaggccacacggatgttggtctctatgctggtgcgtttcttcctcctacggctcaagccctcaattcctggagaattcagggcacttgggctggagagggacgaatcagatgagaggttctctgcatcatttagccacttctctaaaagtggcttcaacttgcacatgttcttaaagctgaggttcaaggcttcaaatcgagagatggtagtttggctgaagtcatttccatatagtttccccatagcgagcccaacatcaccctgagtgaatccaagtttgattcgtctttgtttgaaggtcttggcaaactgctcaagctcctcaaggtcactgggctcctccaagctgggagtatcaattcgctttggtgttgactggctctgtggaagtgtctgcctcgtgccgaattcgccacccaggcc

SEQ ID NO: 86216 - DNA, 1440 bp, Homo Sapiens
  misc_feature (1328)..(1362): n is a, c, g, or t
tcctttaatgacaactcccaaggaaactgggtgttgagagggaggagctctagcaataggcacattttggaggggaggggccggaagaaaggaccagcgcccaggctgaggtaaatatggccaactctaagctgcttggagatgctgtttccccaacccctgctgccattccccctccaggggaggagctacaagggaaaggggctgagacctcaaggggatgggcgaggctggctgaggaagaacagagctggcggttttggacacagctggtggtagcatatgggctttcccttctaccagatggagtgggctctggcctagcaggtcacgactcaggcagcctgagacacctcctcgggctctctgggatcagggcactggccaggccagatgccccgaccgtgtcgtccatctccccttctgctccagtggggaacaaaggctgggccaggagcgcaaaggccacaaccttcagctctttccaaaccaccctagccccaagcccaaaccaggggttactcagagcccagagggcacacacaatctccagtttagaaactgggtaccagcataagagtgactcccaacttgtaaaacagagacaactgcagttgacaaaactggatccccccctcagtgccagcagttccacatcgcgggcccctgcctgggagaggcagggtcatggccacaggcaggacaggctcctccttccctgaataagccagcatgacatttgcttcattcatctttggtaaaggacaggactggcagagccaacctgggactctaggggacggcagcctgggcctctgcctgccactgctagcgagtgctggcctttccctcaggcttgtgggagctcatccagcccagagatgccctggtggtctccagacattggaaggaaaaacaaaataacactttgaatgaaaataacactcttcataccctggcgtcagtcttgtgcccccagaccctctgggcttcggtgccaattgcagtgtcaggacacatccccgagggtggggcccacggctgccttgcacactgttcccagcccctacccctccacgctgagctcaggacactggagctcctggatctgacaggctgggggctcccagtcctgaggctgcagccaccccaccccggctctgagccccagtggcggaaggggcacagaccgacgctggctgggctgccactccatggtccacagccttgcctgggagaagcagcaacttcactgagcccagcagcagccccctgcccccggccgtaatggccgaattcccgggcatatgtccggtaccgtcgactgnnnnnnnnnnnnnnnnnnnnnnnnnnnnnnnnnnncgccgcttcctcgctcactaactcgctgcgctcgtcgttcggctctcaacgcgaggccctatagtgatctatacagtt

SEQ ID NO: 86217 - DNA, 1050 bp, Homo Sapiens
cagtcgacggtaccggacatatgcccgggaattcggccattacggccgggggccggagagatggcggagtggacatcgggcagcactgccaggtggacgcattgccggcagcgagattttcttccatttgtgtgtgatgactgttcaggaatattttgccttgaacacagaagcagggagtctcatggttgtcctgaggtgactgtaatcaatgagagactgaagacagatcaacatacatcttacccatgctctttcaaagactgtgctgagagagaacttgtggcagttatatgtccttattgtgagaagaatttttgcctgagacaccgtcatcagtcagatcatgagtgtgaaaaacgtggaaatcccaaagcctcgaatggctgccactcagaaacttgttaaagacattattgattccaagacaggagaaacagcaagtaaacgatggaaaggtgccaaaaatagtgaaacagctgcaaaggttgcatcgatgaaattaaagatgcatgctgatggcgataagtcattaccacagacagaaagaatttactttcaggttttcttacctaaagggagcaaagagaagagcaaaccaatgttctttttgccaccgatggagcattggaaaggccatagacttggccgcttctctagccaggcttaaaaatgacaataacaaatttacagataagaaattaaggctgtgtcacattacttcaggagaagccttacccttggatcatactttggaaacctggattgctaaggaggattgtcctttatataatggtggaaatataatcttggaatatcttaatgatgaagaacaattctgtaaaaatgttgaatcttacttggaatagtcattcaaagattcaagtcagaaatcacagggaaaattctattacatgtttaagtccatttattttactacaaatactatttttgtaatttttaaaagttgcttttaacttatttccccttatgtcacattttaaattatgagttttctattagagttttttggttttaagtttaaaaaaa

SEQ ID NO: 86218 - DNA, 869 bp, Homo Sapiens
ccaggctggtaccgccccggagttatgggatccactagggaggagagcaaagtaatcagaacctcccaaggatggataacaaaatttcgccggaggcccaagtggcggagctggaacttgacgccgtgatcggcttcaatggcagacatcattttgtgggattataagaacagagagctgcttgctcggctgtcccttcacaaaggcaaaattgaagctctggccttttctccaaatgatttgtacttggtatcactaggaggcccagatgacggaagtgtggtggtgtggagcatagccaagagagatgccatctgtggcagccctgcagccggcctcaatgttggcaatgccaccaatgtgatcttctccaggtgccgggatgagatgtttatgactgctggaaatgggacaattcgagtatgggaattggatcttccaaatagaaaaatctggccaactgagtgccaaacaggacagttgaaaagaatagtcatgagtattggcagtggatgatgatgatagctttttctaccttggcaccacgactggagatattctacaaaatgaaccccaggactaaactgctgacagatgttgagcctgcgaaggacaaattcagtacgggagtgtcagctatcaggtgcctgaacgatgggcgcggttgttgcgtgggctctggagccggactgctggtcttctgtaaaagccctggctaccaaacccatcaagaagatccagttacaaggcggcatcacttctatacaaacttccgaggcagcaagtgacaccaggttaactccgtacagaccagaagaatcggccaattaaccgtgtcagcttcacggactctcacccgagacgctcaa

SEQ ID NO: 86219 - DNA, 1240 bp, Homo Sapiens
gttacatgaaggaactggaacagtatcagaaaacagaggcctacaaggtcttcagtaggaaaacccaggaccgtcagaaaggcaaatctcataggcaagatgcagcccggcaggccactcatgatcatgagaaagaaacagaggtaaaggaacggtctgtttttgacatccctatatttacagaggaattcttgaaccatagcaaagctcgggaagcagagctccgccagcttcgcaaatccaacatggagtttgaggagaggaatgcagccctgcaaaagcacgtggagagcatgcgcacagcagtggagaagctggaggtggatgtgatccaggagcggagccgcaacacagtcttacagcagcacctggagaccctgcggcaggtgctgaccagcagctttaccagcatgcccttgcctggaagtggagagacacctacagtggacaccattgactcatatatgaacagactgcacagtattattttagctaatccccaagacaatgaaaacttcatagctacagttcgagaagttgtgaacagactcgatcgttagggaatggtcttagaactccaagatgttccataagtgtttttacttgtgaggaatgagaagccatccatggaaatttgaactgagtgggggcagagaaagagtgcagatccctttgcttgtgaaagaattatcagtgagtgaaaggccatcaccccaggaagccaaatgagggagcagcaacatgtatatgagcttcctatggaattgtccttatgtgaagctttgaaggtgtacagccactctccccgggtcttcaggttcctaccattttccatttctgttaaagtggatctgcatatcttcagcttactaggtgacccggatgctgacatctgctgctgcagaaaagaagaacttttcattgaaatttcgcttagacccttttatcagtgaagctccagattttcttacctagctgtcactttttttaatgccctccggggggttattttttggttttccctgggccccccacccaatttaaaccttctcccattttttctggaccttctggaaactaacctgggtgtggccccaccaaaggggtccctgaaaaggagaaaattttttcttgggccatttgggaaccaggggccccagattcctttctcctcccacatttattttgggccccccgtggctggtggggaaactctccccaaaaaagaacaaaagggggt

SEQ ID NO: 86220 - DNA, 1631 bp, Homo Sapiens
caggtttgcttctctggcggtcttcagaatcaacatccacacttccgtgattatctgcgtgcattttggacaaagcttccaaccaggatacgggaagaagaaatggctggtgatctttcagcaggtttcttcatggaggaacttaatacataccgtcagaagcagggagtagtacttaaatatcaagaactgcctaattcaggacctccacatgataggaggtttacatttcaagttataatagatggaagagaatttccagaaggtgaaggtagatcaaagaaggaagcaaaaaatgccgcagccaaattagctgttgagatacttaataaggaaaagaaggcagttagtcctttattattgacaacaacgaattcttcagaaggattatccatggggaattacataggccttatcaatagaattgcccagaagaaaagactaactgtaaattatgaacagtgtgcatcgggggtgcatgggccagaaggatttcattataaatgcaaaatgggacagaaagaatatagtattggtacaggttctactaaacaggaagcaaaacaattggccgctaaacttgcatatcttcagatattatcagaagaaacctcagtgaaatctgactacctgtcctctggttcttttgctactacgtgtgagtcccaaagcaactctttagtgaccagcacactcgcttctgaatcatcatctgaaggtgacttctcagcagatacatcagagataaattctaacagtgacagtttaaacagttcttcgttgcttatgaatggtctcagaaataatcaaaggaaggcaaaaagatctttggcacccagatttgaccttcctgacatgaaagaaacaaagtatactgtggacaagaggtttggcatggattttaaagaaatagaattaattggctcaggtggatttggccaagttttcaaagcaaaacacagaattgacggaaagacttacgttattaaacgtgttaaatataataacgagaaggcggagcgtgaagtaaaagcattggcaaaacttgatcatgtaaatattgttcactacaatggctgttgggatggatttgattatgatcctgagaccagtgatgattctcttgagagcagtgattatgatcctgagaaaagcaaaaatacgttcaaggtccaaagactaagtgccttttcatccaaatggaattctgtgataaagggaccttggaacaatggattgaaaaaagaagaggcgagaaactagacaaagttttggctttggaactctttgaacaaataacaaaaggggtggattatatacattcaaaaaaattaattcatagagatcttaagccaagtaatatattcttagtagatacaaaacaagtaaagattggagactttggacttgtaacatctctgaaaaatgatggaaagcgaacaaggagtaagggaactttgcgatacatgagcccagaacagatttcttcgcaagactatggaaaggaagtggacctctacgctttggggctaattcttgctgaacttcttcatgtatgtgacactgcttttgaaacatcaaagtttttcacagacctacgggatggcatcatctcagatatatttgataaa

SEQ ID NO: 86221 - DNA, 947 bp, Homo Sapiens
  misc_feature (892)..(892): n is a, c, g, or t
  misc_feature (896)..(896): n is a, c, g, or t
gggagagtatgaagtcgacggcgcgccgaattcggcacgaggggcgggcctgtgggagcggggtcatcttctctctgctgctgtagctgccatgggcaaaagagaccgagcggaccgcgacaagaagaaatccaggaagcggcactatgaggatgaagaggatgatgaagaggacgccccggggaacgaccctcaggaagcggttccctcggcggcggggaagcaggtggatgagtcaggcaccaaagtggatgaatatggagccaaggactacaggctgcaaatgccgctgaaggacgaccacacctccaggcccctctgggtggctcccgatggccatatcttcttggaagccttctctccagtttacaaatatgcccaagacttcttggtggctattgcagagccagtgtgccgaccaacccatgtgcatgagtacaaactaactgcctactccttgtatgcagctgtcagcgttgggctgcaaaccagtgacatcaccgagtacctcaggaagctcagcaagactggagtccctgatggaattatgcagtttattaagttgtgtactgtcagctatggaaaagtcaagctggtcttgaagcacaacagatacttcgttgaaagttgccaccctgatgtaatccagcatcttctccaggaccccgtgatccgagaatgccgcttaagaaactctgaaggggaggccactgagctcatcacagagactttcacaagcaaatctgccatttctaagactgctgaaagcagtggtgggccctccacttcccgagtgacagatccacaggggtaaatctgacatccccatagacctgttgtgacttctatgaggcaaatggaccagggatgaagaagaagaagaagagacccngacngtggtctttttgaggtccagcagggaaatgattggagggaactcccagaaa

SEQ ID NO: 86222 - DNA, 681 bp, Homo Sapiens
ttctggccctgaattcaaaaaaacattagcttcaaaaaccattagcatttctgaagaagtgcgttttttgacccatatggatgaagaagatcaaagtgacaaaaaggagacttcagaacctgaattttcaataacagaaaattattctggtcagaaaacctgtgtgtttcctactgccgattcagctgtcagcctttccagttccagtgatcagaatactacttctcctggtatgaatagcagtgatgaattgtgtgagagtgtttcagtacatccgctccagatgactggattgactgatattgcagacattattgatgaccttataattaaagacggagtttccagtgaagaacttggcttaacagaacaagctatgggcacctccagaattcagcattattctggcagacattcacaaagaactgacaaggaaagaagagagattcaagcctggatgaaaagaaaacgaaaagaaagaatggcaaagtacttaaatgagctggcagaaaagagagggcaagaacatgatcctttctgtcccagaagcaatccactttacatgacttcaagggaaataaggctgagacaaaagatgaagcatgaaaaagacagattgctgctctctgaacactatagtcgtcgaatctcacaagcgtacggtctgatgaatgaactgtt

SEQ ID NO: 86223 - DNA, 1342 bp, Homo Sapiens
  misc_feature (16)..(16): n is a, c, g, or t
  misc_feature (77)..(111): n is a, c, g, or t
aaagactatcacttanttgggcgctcctgacagcgaacgacgagcgcagcggagtcagtgagcgaaggaagcggcgnnnnnnnnnnnnnnnnnnnnnnnnnnnnnnnnnnncagtcgacggtaccggacatatgcccgggaattcggccattacggccggggatcctgaagatggaggcaagcactgggtggtgatcgtggcaggttcaaatggctggtataattataggcaccaggcagacgcgtgccatgcctaccagatcattcaccgcaatgggattcctgacgaacagatcgttgtgatgatgtacgatgacattgcttactctgaagacaatcccactccaggaattgtgatcaacaggcccaatggcacagatgtctatcagggagtcccgaaggactacactggagaggatgttaccccacaaaatttccttgctgtgttgagaggcgatgcagaagcagtgaagggcataggatccggcaaagtcctgaagagtggcccccaggatcacgtgttcatttacttcactgaccatggatctactggaatactggtttttcccaatgaagatcttcatgtaaaggacctgaatgagaccatccattacatgtacaaacacaaaatgtaccgaaagatggtgttctacattgaagcctgtgagtctgggtccatgatgaaccacctgccggataacatcaatgtttatgcaactactgctgccaaccccagagagtcgtcctacgcctgttactatgatgagaagaggtccacgtacctgggggactggtacagcgtcaactggatggaagactcggacgtggaagatctgactaaagagaccctgcacaagcagtaccacctggtaaaatcgcacaccaacaccagccacgtcatgcagtatggaaacaaaacaatctccaccatgaaagtgatgcagtttcagggtatgaaacgcaaagccagttctcccgtccccctacctccagtcacacaccttgacctcacccccagccctgatgtgcctctcaccctcatgaaaaggaaaactgatgaacccccaatgatctggaagagtccaggcagcctcccggaggagatcccagcggcatctggaatgccaggcacccctcattgaaaaagcccgttgcgtaaaaatcgttctccttgcttggaaaccctccgaagcctgaaggtggaaccaccttccttgtccaaaaagacccccccttccccggggcaacagctgtctaacccaagaggcccctggcgtggaactttcggaacccatctggttttcaacttgggaatttcctccacacgtaacaaataatgggg

SEQ ID NO: 86224 - DNA, 957 bp, Homo Sapiens
gggacagcagtgccgacgtcgtgggtgtttggtgtgaggctgcgagccgccgcgagttctcacggtcccgccggcgccaccaccgcggtcactcaccgccgccgccgccaccactgccaccacggtcgcctgccacaggtgtctgcaattgaactccaaggtgcagaatggtttggaaagtagctgtattcctcagtgtggccctgggcattggtgccgttcctatagatgatcctgaagatggaggcaagcactgggtggtgatcgtggcaggttcaaatggctggtataattataggcaccaggcagacgcgtgccatgcctaccagatcattcaccgcaatgggattcctgacgaacagatcgttgtgatgatgtacgatgacattgcttactctgaagacaatcccactccaggaattgtgatcaacaggcccaatggcacagatgtctatcagggagtcccgaaggactacactggagaggatgttaccccacaaaatttccttgctgtgttgagaggcgatgcagaagcagtgaagggcataggatccggcaaagtcctgaagagtggcccccaggatcacgtgttcatttacttcactgaccatggatctactggaatactggtttttcccaatgaagatcttcatgtaaaggacctgaatgagaccatccattacatgtacaaacacaaaatgtaccgaaagaatggtgttctacattgaagcctgtgagtctgggtccatgatgaaccacctggcggataacatcaatgtttatgcaactactgctgccaaacccccagagagtcgtccctacgccctgttactatggatggagaagagggtcacggtaccttggggggacttggtacagcgttcaacctggaatggaaaaacttcggaccgtggaaaatcctggacttaaaagagaaccttggcaccaagccagtaa

SEQ ID NO: 86225 - DNA, 644 bp, Homo Sapiens
ggagaaagctggccaaagagctgattgatgtcaaccactatgccaaggatgaagtggcagctcgtatgaatgaggtgatcagtttgtggaagaaactgctagaggccactgaactgaaaggaataaagcttcgtgaagccaaccagcaacagcaatttaatcgcaatgttgaggatattgaattgtggctatatgaagtagaaggtcacttgtgcttcggatgattactggcaaagatcttaccaatgtgcagaacctccagaagaaacatgccctgctagaggcagatgtggctgctcaccaggaccgaattgatggcatcaccattcaggcccgccagttccaagatgctggccattttgatgcagaaaacatcaagaagaaacaggaagccctcgtggctcgctatgaggcactcaaggagcccatggttgcccggaagcagaagctggccgattctctgcggttgcagcagctcttccgggatgttgaggatgaggagacgtggattcgagagaaagagcccattgccgcatctaccaacagaggtaaggatttaattggggtccagaatctgctaaagaaacatcaagccttacaagcagaaattgctggacatgaaccacgcatccgaagcagtgccg

SEQ ID NO: 86226 - DNA, 570 bp, Homo Sapiens
tcatgtcattgcaagctaaagatatagtacccactagacagataatgtgaaagcatgatctgtagagcaaagttggcaggatccatgtcagtatccatttgtgcattatagtgtagtgctccgggtgttcatgaataacataatgaaaatgaatcttgagttgattgttactcataggtcattgacctcttcctatctgtgaattgtagattgatttaagaaagagtagttgctctttccaaattgttagccttatccatttagttcctgataacaacacaggattcctccttaaataactctgttgataaatcctcataaaaacagttcgtagtaagttcagttgctgtgacgctgtttgctatttgacttttgttttgttgctaacagctggatatataagacattccatgtctgttgtctgcctggtgcaacttgagcctttctactgtagctacaaactatttctcagctgaaaagttctccagcagaatcataattgtttccataaatcaacaggcagaaggattttctctctgtgtgtgagcgcgtgtgtgcttgtgtatgtgt

SEQ ID NO: 86227 - DNA, 550 bp, Homo Sapiens
gtggtacacaagtttctggacttaccagcagtttaagcagccaaaaccgggatttatagtagaaagttttggtggggttgataaggaagaaaaccataaatccataaagggcaagtggatacacatatgtggggatgacactaattggagcaaagaagcatgccagaaggctcaggcaccacaatatcccgaggaatccagcaatctcaaagagatgttgatgagacaaattgcttctcggattaagttcaaagatgagtacatggtttactccagcctgtctccaaccatacgtgttgatgcccagtagaaaaaggaattcaatcagaagaaagccaccccgatagattcttatcaagggccatatacttctatctgtttcaagtttaaatacagctgaaagaatattaagatattggtcagttataaaattcataacttcccttgaattaataatcttttgtcttcattctcaatgatatagccctggcatagaaatttttcataaataaaacctaaacctagattatctatcatctataaatctacc

SEQ ID NO: 86228 - DNA, 552 bp, Homo Sapiens
  misc_feature (80)..(152): n is a, c, g, or t
ctactggactaatacagcagggtaactgggccagatgttctttctacagaagaatattggattgattggagttaatgtannnnnnnnnnnnnnnnnnnnnnnnnnnnnnnnnnnnnnnnnnnnnnnnnnnnnnnnnnnnnnnnnnnnnnnnnttagaaccacacaatgccaagatagaattaatttaaagccttaaacaaaatttatctaaagaaataacttctattactgtcatagaccaaaggaatctgattctccctagggtcaagaaccaggctaaggatactaaccaataggattgcctgaagggttctgcacatttcttatttgaagcatgaaaaaagagggttggaggtggagaattaacctcctgccatgactctggctcatctagtcctgctccttgtgctataaaataaatgcagactaatttcctgcccaaagtggtcttctccagctagcccttatgaatattgaacttaggaattgtgacaaatatgtatctgatatggtcatttgttttaaataacacccaccccttattttccgtaa

SEQ ID NO: 86229 - DNA, 1600 bp, Homo Sapiens
  misc_feature (1475)..(1483): n is a, c, g, or t
cctactgggagaaagagggaatcactattcaggggtactgtatatacaatctgggtcagctgcagctggttactgcatttctccatgtggcagacagagcaaagccacaacgctttctctgctggattaaagacggcccacagaccagaacttccactatactacttaaaattacataggtggcttgtcaaattcaattgattagtattgtaaaaggaaaaagaagttccttcttacagcttggattcaacggtccaaaacaaaaatgcagctgccattaaagtcacagatgaacaaacttctacactgatttttaaaatcaagaataagggcagcaagtttctggattcactgaatcaacagacacaaaaagctggcaatatagcaactatgaagagaaaagctactaataaaattaacccaacgcatagaagacttttttttctcttctaaaaacaactaagtaaagacttaaatttaaacacatcattttacaacctcatttcaaaatgaagacttttacctggaccctaggtgtgctattcttcctactagtggacactggacattgcagaggtggacaattcaaaattaaaaaaataaaccagagaagataccctcgtgccacagatggtaaagaggaagcaaagaaatgtgcatacacattcctggtacctgaacaaagaataacagggccaatccgtgtcaacaccaaggggcaagatgcaagcaccattaaagacatgatcaccaggatggaccttgaaaacctgaaggactgcgctctccaggcagaagcgggagatagactgctctgcaactggaggtggactgtacgatggaaaccattgcgaatgaggtaaagctgccgagaaaggaaagccgtaacatgacactcttgtggttactcaactctatgtggcatttatgcaccggaggattatcccgtaagaggggataaatttagttggaacttttccccaagctgcgaaaaccaaacgttcttcaatggggcccccacaaaaaaatggtctgcaccactgggcaactcagaattcttgggcaccctaccaaggttggccaccacgctttccccttcgaacgtgcagcccttggtccaattaacccacaattcccgggaatcggaatgcacgttttgttttggaaaacacccacgtgtgttttggaggcgcaccctttttccctcgccccagttagaacgtatatgcgggggattccgctccaacctttgttccccagtagggtgttggcctaacacacgcgcgctgtccctcgaagagtgcccatacaagcaattaaattccctgggggcccccggtgtgggggagggcgtaagcgagaacgccccccagaaaggtgcaccccccgagggtccgttcttgccccgcaggatgcttctgatgggccgcccctcaccccgggtaatattgcgggccaaaaattttctgtttctnnnnnnnnnttgaaatagagtatcctcacccaccaaaaacaaacacacccttcgccgcgttttaccagcccccccctttctacgccattttgttataagggcgtgcccccccctttacatattcgc

SEQ ID NO: 86230 - DNA, 582 bp, Homo Sapiens
aatgtttccatctacatccaccaccagttgcagaacatctatctcccgcttctgcctggagagcacatccttcaggttttcaaggtccatcctggtgatcatgtctttaatggtacttgcatcttgccccttggtgttgacacagattggccctgttattctttgttcaggtaccaggaatgtgtatgcacatttctttgcttcctctttaccatctgtggcacgagggtatcttctctggtttatttttttaattttgaattgtccacctctgcaatgtccagtgtccactagtaggaagaatagcacacctagggtccaggtaaaagtcttcattttgaaatgaggttgtaaaatgatgtgtttaaatttaagtctttacttagttgtttttagaagagaaaaaaaagtcttctatgcgttgggttaattttattagtagcttttctcttcatagttgctatattgccagctagtagagagaagaaacgaaagtcaggatttgcctcctttcagatggtaaactcacagaggcatttaactggctgtgtcatgcactgaaacccgcatgaggcaatgaaa

SEQ ID NO: 86231 - DNA, 1043 bp, Homo Sapiens
cagccatgtccaagaaagctgggacccaaagggtagtgttttcggaaggagaccacaaagggtgaatacttcagaactgtcttcagcttcttccagggtttgctcccagacctgtcctcgggatcgctggcacctccgcccccggccaccacgtcatcctcagactcgtcgaaagaagaggcagaggagaagccgccgctgcccccctcaacccgggaggggggtcccactggctgggcctcaggctcaggggtctcaggggtaatgatgaggcggggcacagggcacagggggctacacttcaggtgagagtacaggtgagtcagcaattctccaggctctggttcctctaatgggccatcctcaggctctcccaagaggcagtctgtcccaggtgctgtctgggaaccgtcagtgctaggttgtgtccaggagccatcagtatcctgttgtatttggaaaccaccagtgccaggctgtttcctggctgcttcagtatcctgttttttctgggagccatcagtatatggctctgtccagggaccttcaatatcctgttgtgtcctggagccatcagtatacaattctttccaggagccatcagcacttggctcttttgagggacaggctccttctgggtgagtctggaggctggaactgttctggtgggtccagaggttatcagcccaggacttgaccctctctggctgagtctgtgacccatgcgtttccagctctgtccagggcccatgaacccctggctgtgtccaggggctggcctcctcgggctgaaactggaggtcggacctgtgcggatcagtccaaaggccatctgtcccggtctccgtccaaagacaagtcgtctccagctctgaccagctccattctagatgcgtccggaggctggacctgtctggctccgtcttttgcttgggcctctcggtctctactccaaggccagctgccgcgggctcagtctgtccgtctgtccagcctcgtgccgaattcggcgcgccgtcgacttcataccctctcccccttaa

SEQ ID NO: 86232 - DNA, 964 bp, Homo Sapiens
  misc_feature (852)..(871): n is a, c, g, or t
tcattctgttggaatcctttggccagatgtcacttcagccagggtgtgcatcatcattggttctttttcacaggctgagcctcctgaaaacccatgaacgctggggctggggaagtgaaccctgaggtggggaccctctcttcccatcaaatcatccagctcagtgtggggcgtggcaggggggtaaatgaagccagccaatgtgttaacctgtctctgtcaacctaagaatgttggccttactgacacacctttgctccatgttcaagaccagaagtagctgggatttgtttgcaaattgggtaattagtttaaaaatctgtgattacatttttaaatgaaattttcaaagtggcctagattgaggtgattcagataggtttgcgaatataccattttatattgttgagaaagaacaaaaagggaatttccagatgtcctagaaatcctagcaacagatttctctggttgtcagtttccctggagaaggcgccagataggaatctccaatcagttgtttttctcttcgcttaaggcccttacacaaaagccatgaagagatggtaaccttacccggtattttaaatgttctgtaaattattagccaaatagaactgtaatggggttgtatttatgggcgcctagaaagaaaacacaaggacttggtaggccaggaagaacaagattttaaaatttagaatgaatagcccttctgggttttctttttgacaattcttggacttgaggtaaaacaaggaggattgtggccggatttcagatcccaaagccagcctccatcttaggcctttgcctcattgtgccttctaggttttcttacccaccgtctcctgnnnnnnnnnnnnnnnnnnnnctcctacccctatcttgggacattcagaaactgcctgggtggttgagagagaaaccggagtctgaatgtcagatagcgggtagcgagaagaag

SEQ ID NO: 86233 - DNA, 537 bp, Homo Sapiens
  misc_feature (333)..(352): n is a, c, g, or t
gatgacggcgcttgagggtgaccagacctcctcaatcattccatcagccacccaggactcaacagcagaacctcagaggactcagctgaaagaggttttcactcgagcactaaccacagagaaatgggaagtgccatcctgctgtcatacgcagccgatggctgggtaggactaaatgcccttctgtggtgagatgaaccaagacggcagatgggggaataacatcagtgagagagagattacgaatggatccttgtattgcagatcaaactgggttgtctcttctcaaaccacccaggcagtttctgaatgtcccaagataggggtaggagnnnnnnnnnnnnnnnnnnnncaggagacggtgggtaagaaaacctaaaaggcacaatgaggcaaaggcctaagatggaggctggctttgggatctgaaatccggccacatcctccttgttttacctcaagtccagaattgtcaaaaagaaaacccagaagggctattcattctaaattttaaaatttcttcctggcctaacacgt

SEQ ID NO: 86234 - DNA, 1111 bp, Homo Sapiens
  misc_feature (910)..(910): n is a, c, g, or t
  misc_feature (1029)..(1029): n is a, c, g, or t
ggcccagctcacagtgccatccctttccccagccgaactcctaggccaggccacactgcctgtgggctccccctccagaccactgtctcgaagacagttgtgcccactcaccccagggccagggaaagccctgggaccagcagccaccatggcagtggagcttcactatgaggagggctctccccggaacctgggtactcccacctcctccactccacgccccagcatcacacctaccaagaagattgagcttgaccggaccatcatgcccgatggcaccattgtcaccacagtcaccactgtccagtcccggccccgtatagacggcaaattagactccccctcccgctccccgtccaaggtggaggtgaccgagaagacgacaactgtgctgagtgagagcagtggccccagcaatacctcccatagcagcagccgggacagccacctttccaacggcttggaccctgtagcagagacagcgattcgccagctgacagagcccagtgggcgggtggccaagaagacacccaccaagcgcagcactctcatcatctctggtgtttccaaggtgcccattgctcaggacgagttggcgctatccctgggctatgcggcatccctggaagcctcagtgcaggatgatgcagggaccagcggaggcccctcttcacctccctcagacccaccagccatgtctccaggaccgctagatgccctctctagtcccacaagtgtccaggaagcagacgagacaacccgttcggatatttctgagaagccatctgtggatgatattgagtccgaaaccgggtccactggtgccctggagaaccgcagcctccaagatccacaagtgaagttcctgggcagcgggacttaggttcttcttccgccgaaggcttagganaaaggaactgggcctgaccaattccaccaatgacttctccaaggcaacggccacgccaatggtcccaaagaagggccggaagctttttctcgccgccttatcaaggcgctttcccttcnaatccaaacccaaggcccatgtggtaaccccagccccccaagtttctggaggacccaactctctaaaaagggccccaaagtc

SEQ ID NO: 86235 - DNA, 926 bp, Homo Sapiens
gtggaccggtccggaattctcgggatatcgtcgacccacgcgtccgcggacgcgtgggtcaagactggcgctaaaagttttgagcttctcaaaagtctagagccaccgtccagggagcaggtagctgctgggctccggggacactttgcgttcgggctgggagcgtgctttccacgacggtgacacgcttccctggattggcagccagactgccttccgggtcactgccatggaggagccgcagtcagatcctagcgtcgagccccctctgagtcaggaaacattttcagacctatggaaactacttcctgaaaacaacgttctgtcccccttgccgtcccaagcaatggatgatttgatgctgtccccggacgatattgaacaatggttcactgaagacccaggtccagatgaagctcccagaatgccagaggctgctccccgcgtggcccctgcaccagcagctcctacaccggcggcccctgcaccagccccctcctggcccctgtcatcttctgtcccttcccagaaaacctaccagggcagctacggtttccgtctgggcttcttgcattctgggacagccaagtctgtgacttgcacgtactcccctgccctcaacaagatgttttgccaactggccaagacctgccctgtgcagctgtgggttgattccacacccccgcccggcacccgcgtccgcgccatggccatctacaagcagtcacagcacatgaccgaggttgtgaggcgctgcccccaccatgagcgctgctcagatagcgatggtctggccccctcctcagcatcttatccgagtggaaaggaaatttgcgtgtggagtattcggatgacagaaacacttttcgacatagtgtggtggtgccctatgagccgtctgaggttggctctgacttgtaccagca

SEQ ID NO: 86236 - DNA, 1743 bp, Homo Sapiens
  misc_feature (1633)..(1694): n is a, c, g, or t
gaccgcgcagggagcacacaccgccagtctgtgcgctgagtcggagccagaggccgcggggacaccgggccatgcacgcccccaactgaagctgcatctcaaagccgaagattccagcagcccaggggatttcaaagagctcagactcagaggaacatctgcggagagacccccgaagccctctccagggcagtcctcatccagacgctccgctagtgcagacaggagcgcgcagtggccccggctcgccgcgccatggagcgggatccccagcgcgcaaccaccccccgcctgcctgcccaaagcaccgggactggagcacggagacctaccagggatgtaccctgcccacatgtaccaagtgtacaagtcaagacggggaataaagcggagcgaggacagcaaggagacctacaaattgccgcaccggctcatcgagaaaaagagacgtgaccggattaacgagtgcatcgcccagctgaaggatctcctacccgaacatctcaaacttacaactttgggtcacttggaaaaagcagtggttcttgaacttaccttgaagcatgtgaaagcactaacaaacctaattgatcagcagcagcagaaaatcattgccctgcagagtggtttacaagctggtgagctgtcagggagaaatgtcgaaacaggtcaagagatgttctgctcaggtttccagacatgtgcccgggaggtgcttcagtatctggccaagcacgagaacactcgggacctgaagtcttcgcagcttgtcacccacctccaccgggtggtctcggagctgctgcagggtggtacctccaggaagccatcagacccagctcccaaagtgatggacttcaaggaaaaacccagctctccggccaaaggttcggaaggtcctgggaaaaactgcgtgccagtcatccagcggactttcgctcactcgagtggggagcagagcggcagcgacacggacacagacagtggctatggaggagaatcggagaagggcgacttgcgcagtgagcagccgtgcttcaaaagtgaccacggacgcaggttcacgatgggagaaaggatcggcgcaattaagcaagagtccgaagaaccccccacaaaaaagaaccggatgcagctttcggatgatgaaggccatttcactagcagtgacctgatcagctccccgttcctgggcccacacccacaccagcctcctttctgcctgcccttctacctgatcccaccttcagcgactgcctacctgcccatgctggagaagtgctggtatcccacctcagtgccagtgctatacccaggcctcaacgcctctgccgcagccctctctagcttcatgaacccagacaagatctcggctcccttgctcatgccccagagactcccttctcccttgccagctcatccgtccgtcgactcttctgtcttgctccaagctctgaagccaatcccccctttaaacttagaaaccaaagactaaactctctaggggatcctgctgctttgctttccttcctcgctacttcctaaaaagcaacaaaaaagtttttgtgaatgctgcaagattgttgcattgtgtatactgagataatctgaggcatggagagcagattcaggnnnnnnnnnnnnnnnnnnnnnnnnnnnnnnnnnnnnnnnnnnnnnnnnnnnnnnnnnnnnnntggtataggactttaaagctcctttgcgtagggaagtcaccaacgatgc

SEQ ID NO: 86237 - DNA, 817 bp, Homo Sapiens
ctcagggtaaaaagcgtctccgaaggctgtctcagtcgcggctgggccacccgtgccaggccccactccatccacctcagaaagtactgcttctcactcaaggaggggctgctgatccccgagatgaactcctgcacccccgaggagggatcatggccgttctgctgcattcgaagttctagcagccgccgcctcagctcagccctgtgcttctcaggggggtccacggcccactggagctggcagaactccttctccacttgggctgcctttctccaggggtccccctgcagcctcagctcgtcccttctgtaggcatccgagtctttgattttcctggtaatcctctccatccggtctttcgctttctgacactcctcacagtcctcgtcgaccattaggcccagtctgcgggctgcgtgcgccatgtcctccacagatacccgcctgcagggtgcccgcagcacattcccaacgatggcccggatcctcttcacgaagctgtcgctgtcagtgctgctgacctttaccaggacatgtgagtggtctattttcagcacaggaattaacttattcagaaatctcaggtttgtgttgcgcttcccacggtagggactcaggatgaagtagtattttgtggttgactccttcatggagtacagcaatttgtattccttcttactgatattgtcagtcaatataaacacagcggaggagatttctgtcaagagcttaaactgcagccagtgagacccgatgtcacctctcaggttcagaaaggccacaggttctgggaaaatgtccaagtcctaacaac

SEQ ID NO: 86238 - DNA, 1039 bp, Homo Sapiens
agccttaccagccctcacagtgggctacaccaattaatggagaagggatggaagaatctcagagccccatgaaacaggatctgcttctggttaaccacaaacctagtccacagatcataccatcaatgtctgtgtccatataccccagctcagcagaagttctgaaggcatgcaggaatctaggtaaaaatggcttatctaacagtagcattttgttggataaatgtccacctccaagaccaccatcttcaccataccctcccttgccaaaggacaagttgaatccacctacacctagtatttacttggaaaataaacgtgatgctttctttcctccattacatcaattttgtacaaatccgaacaaccctgttacagtaatacgtggccttgctggagctcttaagttagacctgggacttttctctactaaaactttggtggaagctaacaatgaacatatggtagaagtgaggacacagttgttgcagccagcagatgaaaactgggatcccactggaacaaagaaaatctggcattgtgaaagtaatagatctcatactacaattgctaaatatgcacagtaccaggcctcctcattccaggaatcattgagagaagaaaatgaaaaaagaagtcatcataaagaccactcagatagtgaatctacatcgtcagataattctgggaggaggaggaaaggaccctttaaaaccataaagtttgggaccaatattgacctatctgatgacaaaaagtggaagttgcagctacatgagctgactaaacttcctgcttttgtgcgtgtcgtatcagcaggaaatcttctaagccatgttggtcataccatattgggcatgaacacagttcaactatacatgaaagttccagggagcagaacaccaggtcatcaggaaaataacaacttctgttcagttaacataaatattggcccaggtgactgtgaatggtttgttgttcctgaaggttactggggtgttctgaatgacttctgtgaaaaaaataattttgaatttcc

SEQ ID NO: 86239 - DNA, 721 bp, Homo Sapiens
gatacgagatattcaggaaaaggcttatgtgaatttcaagaattatataccaacacatatccagatgacagcctacaggttatccagactactactcagattgccagctttaagactgatgaatgctaccatcactgaagaattgtttttcaaaggtgtcattggcaatatacgaattgacagtgttatcccacatattttgaaaatggagcctgcagattataactctcaaataattggtcacagcatttgaaaactgtgactgcagtgctgtaaacttaactgttctttgccagaacacaagacaccaaattgaactcactgcttttgaggcatctggaaatttttactttaaaaagtaaccagaatccaaggtatttttattttagcttcccttaagaatttttgaagtgactgggcaggcagcagaaattaaatgaatttttcttcctgattcctttaaatgaatatgaaacactacaaatttattcttggtgaagatgatacctgaagctgtcacctcttgattatctaaactaagcgctcattctattttataaaacaaataaattagtctcttttttctgaattgtgttctagtcatatttaacttcattatgaactagtaaaaatacttaatggtcagaaatccctaaggagttagttccttgcattttactctgcaataataatttttggttaattaccatatcaaaataag

SEQ ID NO: 86240 - DNA, 804 bp, Homo Sapiens
ccaagcttcaaagtaacagcaaaaataaacaggagaataaagcacgtgtttgagcccagtggtttccatcagatgcacaacctgagctgtctggttgggttgctggctctccccccgtggtgggagtggtgtgcaagagaaagcaccacccagcaggagagggacccagcctgccagggaaggttttgaggaactggattctttatcacccatttctccccttgtgggttccacaaaggggttccatgacctccctgttgttgagaacagggctgcattcagagaacagacgatgggcctgggctgtgagagcaatcagaacactgtgaaaataggagggctcgttggatcccaggaatcatacacagactgcgttggggctgtgggaagccaaggacagaaatgtctccttcaccccaaatgataagggcaaggattttcaaggcccagagggagaaatgttgcatttgcatttatttaagtgctgatgttggtcagcagcgcatccagccatgtctttagaatcctctgaatggccagacagatggctgctctccacaccacagactgcccagcttcacacatcacctagagtctcgtggccaaggaagttttgccaaatggacacagcctttgtctcccttaagtgttaaacaccagagttccaactgaaaactggagaccatgagatgactttaaaaagaagttccaaatgccccatcgagccgcacaaaacctccatctttcctttcacttcccctgcccctttagttttctatgaaaaacaatctgaaccatagcatc

SEQ ID NO: 86241 - DNA, 604 bp, Homo Sapiens
  misc_feature (242)..(254): n is a, c, g, or t
ggtatctattgtatgtacaactacgagatttactggagcttttataatttctgcaaggctcttttccagccagcttcattaacttgaagtaaatcaaatcatgcagaattctggctcagccagaaagcaacccagtgagatacaacatgaagaaaaacagacacgggatgataagatttagaatctttggcatttttcgtaaacattttgtttgaagattattaaattacaacccagagacnnnnnnnnnnnnntagtgaactcactattaaatgagatgtttttaaccttaactttttttataatacatacatacataaaaactgcacaaagtatgtgtcaacaaaatacagtctttaaaacttaaatatcatttaaacagacttaattgcatacattttatatacgcacaaagtcaggatttttacatggcagggaaatactgtggaatgatgaggtctgcaggagacagatgctatcaaatgaggactctggggtggtattttctagaaatgggcgttctgaaataaatttttattgtatgtagcttattttacttctaagaggaacaaaagatacatttgggcagccaaagtatttctac

SEQ ID NO: 86242 - DNA, 859 bp, Homo Sapiens
gcaaattcccaggcgcagcgctcagcaaaagactgtgccctcttcgccgaggctggagacttggccacgattactgcattcctgtaatctgcgatctctttcttgaatatactgtaataagaagggagatgctcttaaatggtcaacaggaatattgaagaagccctgaatttccttctggtgtaaatccatagtaataagatgagttagaccagctttgcacatcatggaagccagcaatttagagacaatggagcctctttttctcatcttgcactgcttgctgtaaggaaagtagggtatcacgccaatgatgctcttggcacaagaggtcttacatgcatacaccatgatcaggagctccatgatggtggtgttcacgtccttcgaaacagtttggatgatgaaaacatcttttcccctcacagactcttgaatttgtactcttgtttctctgttaggttcctggtaaacctgcactttgcccatctccacccctagccgctctgcaattttctttgatagctccatacatgatgaattcgagtttgctgaaaacaacaccagaccacctttggttatgttcatcttggtttctaattcaggtggcgtcacacaaaacatcaaaaccttcttggttttccaattttcagagcctggccccgaccccagccccggccccgccgcagcctcagctgcagaaggaagaaagcgccgggtctcctggcggcctctctaggagcaaaatggcgactccatgcacaagattggcgtccgcgcgacgcgtgggtcgacgatatcccggaattccgaccggaccagcctgctttttttaccactggtcatattcactattcgc

SEQ ID NO: 86243 - DNA, 851 bp, Homo Sapiens
cgcccctccccgcccaccggcctcgcagtcaccgcggacgccaatcttgtgcatggagtcgccattttgctcctagagaggccgccaggagacccggcgctttcttccttctgcagctgaggctgcggcggggccggggctggggtcggggccaggaggaattttgttgtcagagaataaaaggaggttgtccataattgactttaagcagcaatcagtaaaacattgagctcttcagctccgcctttcttgctctgaaaattggaaaaccaagaaggttttgatgttttgtgtgacgccacctgaattagaaaccaagatgaacataaccaaaggtggtctggtgttgttttcagcaaactcgaattcatcatgtatggagctatcaaagaaaattgcagagcggctaggggtggagatgggcaaagtgcaggtttaccaggaacctaacagagaaacaagagtacaaattcaagagtctgtgaggggaaaagatgttttcatcatccaaactgtttcgaaggacgtgaacaccaccatcatggagctcctgatcatggtgtatgcatgtaagacctcttgtgccaagagcatcattggcgtgataccctactttccttacagcaagcagtgcaagatgagaaaaagaggctccattgtctctaaattgctggcttccatgatgtgcaaagctggtctaactcatcttattactatggatttacaccagaaggaaattcaggccttcttcaatattcctgttgacaatttaagagcatctcccttcttattacagtatattcaagaggagatccagattaccggaatgcgtaatcgtggccaagtctccg

SEQ ID NO: 86244 - DNA, 1251 bp, Homo Sapiens
atggagttggcgtagccatcgtagttgcagttgtcgttgtgttggcctccgttgccactggctaccacaaagatgctcccaaagccctggcgaccagcaatcaccccatgttgtaaggcagcctttccaagctgatgggggccatccactgtcttcccatcgtcatctggtccccagctgcagctgtagatgtcattgatctgatagtgcttgttgaacgccactgcctccatgctgtctgtgagaggtccatccagtacccggatacctgcgatgcggctcccgtaggccacgcccacggcacagaagctgttgttgggcacagccgcgatctctcctgcacatcgcgtgccatggtggttcccattctccacatcccgggtggggcatggggtcagggtcattagagttgaggtcatagctaccctcagggcttatagttgggtgcaatgtcctggatggtgtgttccactccgtcatccactaccaccaccgtcacccctcgcccagtcacattgcgttcccacacacccgtcacgttgatgtccctgcccgggctccagtcggttattcaggtgccattgctgcgggtacttggggtcgttgaagtggacgctgcgcttggcccgcccttagcagcctctgctctgagtgccagcgcacagcttcatgcccagccaacacagcctccacctgctgccggatggcctccacctccagggccggcctgtgcccagcaggctggacaaagaggtagtgcccctgaagctctccgatgcgtccagcattcaccagccctgctgcctgggccaaggcatccgcctgctgcatccagagtctcttcctccccgtcaccttccaggctttccaggtgcacagcccagctcggcccccctgtgccctggccatcaggcccacctgtccctgccaggcccatgacccagggaaccagtaagaagagcccggctaattccagccagaggcaggtgggcaggcccaggggggcatccaagtgtggcactttctgcctccccttcggcatcagagcagtggactggattctacatgaggttgagctcctggtctggctaaccacgtcacactcatgttgtgcaaatggagaaaaggcatcactttcactgtgagtagtgttgactcagcaaaggctacagaccggccccgccgcagctgccgccgcctccccctcgtgccgaattcggcgcgccgtcgacttcatactctctcgcccct

SEQ ID NO: 86245 - DNA, 1256 bp, Homo Sapiens
  misc_feature (399)..(399): n is a, c, g, or t
tcccacccgcacatgtgacctatagaacccgtgtgttaaacaccagcaggctggtacaggtccggatttcccgcggcatatcgtcgacccacgcgtccgcttgggaccacatgaagaggatcaagttgtatgtggttttaagaaactcacagtgaatggggtttgtgcttccacccctccactgacacccataaaaaactccccttcccttttcccctgtgcccctctttgtgaacggggttctaggcctcttccaccgttgccaatctctgaagccctctctctggatgacacagactgtgaggtggaattcctaactagctcagatacagacttccttttagaagactctacactttctgatttcaaatatgatgttcctggcaggcgaagcttccngtgggtgtggacaaatcaactatgcatattttgataccccagctgtttctgcagcagatctcagctatgtgtctgaccaaaatggaggtgtcccagatccaaatcctcctccacctcagacccaccgaagattaagaaggtctcattcgggaccagctggctcctttaacaagccagccataaggatatccaactgttgtatacacagagcttctcctaactccgatgaagacaaacctgaggttccccccagagttcccatacctcctagaccagtaaagccagattatagaagatggtcagcagaagttacttcgagcacctatagtgatgaagacaggcctcccaaagtaccgccaagagaacctttgtcaccgagtaactcgcgcacaccgagtcccaaaagccttccgtcttacctcaatggggtcatgcccccgacacagagctttgcccctgatcccaagtatgtcagcagcaaagcactgcaaagacagaacagcgaaggatctgccagtaaggttccttgcattctgcccattattgaaaatgggaagaaggttagttcaacacattattacctactacctgaacgaccaccatacctggacaaatatgaaaaattttttaggcaagcagaagaaacaaatgcaggcgcccaaatccagccattacctgctgactgcggtatatcttcagccacagaaaagccagactcaaaaacaaaaatggatctgggtggccacgtgaagcgtaaacatttatcctatgtggtttctccttagaccttggggtcatggttcagcagaggttacataggagcaaatggttctcaattttccagtttgattgaagtg

SEQ ID NO: 86246 - DNA, 585 bp, Homo Sapiens
actgggtggaaaaagtatgtcggcaagtcagctggtttcccagtgcaggacgcgctgacagctcgagtgagcggactgcccaggacttcggaactagacgagttctgtagaaatcctgtcaaagaatatgaagaaaaacagagaaagattctgcaatagagagagagaatttgtatataaatttaaagtaggaagtcagtgcttagaactgagagtgccactcaaatttcctgttcaagagaatgccagtcatttgcatggacgtctgatgctgctgcacagtttaccgtgctttaaagaaaaagacttaaaagaagctctgactcagtttatagaagaagaatccctcagcgattatgatagagatgctgaagcatccctggcagctgtgaaatcaggtgaagtagatttacatcagctggcgagtacatgggccaaagcttatgctgagaccacgttagagcatgcaaggcctgaagaacccagctgggatgaagattttgcagatgtgtaccatgacttaattcattctccttgcctctgaaactctcttaaatttggaacataattactttgttagtatct

SEQ ID NO: 86247 - DNA, 816 bp, Homo Sapiens
acgagcggcgaaagaggggaaaaaaggctcgacgctaccgtgtatgaggaactttgatccttgcgggccaccattccggaagtagaatttagaggaagaaaataccggagttgcagggtataggtaaatttctcaaggttataggttggggttcttagaactttttgtggtgtgtgttggcctagagcgactcagaagcgttagtgacttcacctaaaaaagctaacctctctgctgagcgcgaccggtatgcggcgcaggatgagcctcagggcttctgttaagagtctgtctgagaaagccggtctgcgctgttcctcggtggcgaccttaattatgagatgagctaatgctttactgacttaaccatggcgcagcgggcagtgtggctcataagccacgaaccgggaactccactttgtggcaccgtgagattctccagacggtatccaactgttgaaaaacgagccagagtcttcaatggagcaagttatgtgcctgttcctgaagatggtccctttcttaaagcactgctctttgaacttagattattggatgatgataaagacttcgttgagagtcgtgatagctgttcacgcatcaataaaacatccatttatggactcctgataggaggtgaagaactctggccagttgttgcttttctgaagaatgacatgatatatgcttgtgttccactagtttgaacaaactctgtccccctcctccgccactaaattagtgtcagtggaattttcacaaagctttttgaatttcttttttggggataccgggaattttcctttattcagggcc

SEQ ID NO: 86248 - DNA, 1228 bp, Homo Sapiens
ggatccagaagcagaggaagcagcttgcaagattggtgttagactgggattcagtcagagccaggtggaaccaagctcacaaatcctcaggaaccaactttcaggggcttccatcaaaaatagatactctaaaggaagagatggatgaagctggaaataaagtagaacagtgcaaggatcaacttgcagcagacatgtacaactttatggccaaagaaggggagtatggcaaattctttgttacgttattagaagcccaagcagattaccatagaaaagcattagcagtcttagaaaagaccctccccgaaatgcgagcccatcaagataagtgggcggaaaaaccagcctttgggactcccctagaagaacacctgaagaggagcgggcgcgagattgcgctgcccattgaagcctgtgtcatgctgcttctggagacaggcatgaaggaggagggccttttccgaattggggctggggcctccaagttaaagaagctgaaagctgctttggactgttctacttctcacctggatgagttctattcagacccccatgctgtagcaggtgctttaaaatcctatttacgggaattgcctgaacctttgatgacttttaatctgtatgaagaatggacacaagttgcaagtgtgcaggatcaagacaaaaaacttcaagacttgtggagaacatgtcagaagttgccaccacaaaaattttgttaactttagatatttgatcaagttccttgcaaagcttgctcagaccagcgatgtgaataaaatgactcccagcaacattgcgattgtgttaggccctaacttgttatgggccagaaatgaaggaacacttgctgaaatggcagcagccacatccgtccatgtggttgcagtgattgaacccatcattcagcatgccgactggttcttccctgaagaggtggaatttaatgtatcagaagcatttgtacctctcaccaccccgagttctaatcactcattccacactggaaacgactctgactcggggaccctggagaggaagcggcctgctagcatggcggtgatggaaggagacttggtgaagaaggaaagtcctcccaaaccgaaggaccctgtatctgcagctgtgccagcaccagggagatacaacagttcaatagcatttggcccaaaacagccccaggcagctgctggcttccaccagctctccatgggccaacctcaca

SEQ ID NO: 86249 - DNA, 1008 bp, Homo Sapiens
  misc_feature (74)..(108): n is a, c, g, or t
  misc_feature (945)..(945): n is a, c, g, or t
tgtatagatcatataggggctccggcgtcatagcgaacgacgagcgcaggagtctgtgagcgaggaagcggcgnnnnnnnnnnnnnnnnnnnnnnnnnnnnnnnnnnncagtcgacggtaccggacatatgcccgggaattcggccattacggccggggggaacacctggcgagtcctcggtgtcggtggccggcagtcatctcgcggccgttcagaattataaggctgtctgcagagatttgaaaaatggcaacaaatgaaagtgtcagcatctttagttcagcatccttggctgtggaatatgtagattcacttttacctgagaatcctctgcaagaaccatttaaaaatgcttggaactatatgttgaataattatacaaagttccagattgcaacatggggatcccttatagttcatgaagccctttatttcttattctgtttacctggatttttatttcaatttataccttatatgaaaaaatacaaaattcaaaaggataagccagagacatgggaaaaccaatggaagtgtttcaaagttcttctctttaatcacttctgtatccagctgcctttgatttgtggaacctattattttacagagtatttcaatattccttatgattgggaaagaatgccaagatggtattttcttttggcaagatgctttggttgtgcagtcattgaagatacttggcactattttctgcatagactcttacaccacaaaagaatatacaagtatattcattaaagttcatcatgagtttcaggcctccatttggaatggaagcttgatatgcacatccttttggagactctaattcttgggactggatttttcaatggaatcccggcttttgggcgaacattgtaattcttccttttgggatggggtgaccatttcgttttattaaaaactttttggagggccctagncggggtatggataattcctcctcaacccttttaaatccggaatcccctttcctaggctgggtc

SEQ ID NO: 86250 - DNA, 749 bp, Homo Sapiens
gggggaacacctggcgagtcctcggtgtcggtggccggcagtcatctcgcggccgttcaggataagccagagacatgggaaaaccaatggaagtgtttcaaagttcttctctttaatcacttctgtatccagctgcctttgatttgtggaacctattattttacagagtatttcaatattccttatgattgggaaagaatgccaagatggtattttcttttggcaagatgctttggttgtgcagtcattgaagatacttggcactattttctgcatagactcttacaccacaaaagaatatacaagtatattcataaagttcatcatgagtttcaggctccatttggaatggaagctgaatatgcacatcctttggagactctaattcttggaactggatttttcattggaatcgtgcttttgtgtgatcatgtaattcttctttgggcatgggtgaccattccgttattagaaactattgatgtccatagagggtatgatattccctctcaacccctttaaaatctgatcccttttctatggctggttctcgggcatcatgaattttcacccccatgaaacttcatttggaaaactatggcttccaccattttacatgggtggggatccgaatttttttggaaacagaactcctcaagtataaatggcctattaatggaaaaaacaaggaagaagtttttgaagaaaaaaagacctggaattaaataatcctccacggtaaaaaccct

SEQ ID NO: 86251 - DNA, 775 bp, Homo Sapiens
  misc_feature (59)..(59): n is a, c, g, or t
gaggtggctcctcagccacctcaacagagaccatcttggtggccattcaagatgtctcntggtgtgctacggttgcccatcatatggccttttattgcacagtggttggtgtatttatactatcaaagaaggagaagaaaactgaactgaggaaaatggtgtttcctcaagaagactactggaactggatgacctcagaatgaactggattgtggtgttcacaagaaaatcttagtttgtgatgattacattgctttttgttgtccagtagtttagtttgtgtacatatatacacatatatattttgcactacacaaacgataacattttaaggactaatattgctgatacttgaataatcaatctctactaggttataagtagtatacacagatttaccctgcccttgaacttgaaggacattaaattattaatgatcatttggtaacatgtttacctgattatcttccatagagtaacataagctgcttttcaaaggtaccattgtgataatgagatcaaatttataagttattatttctaattttctaaattaaataaaagaaagaatgcaaaccaggagtgaatttcaaatgagatgtaatcgactttatatcttagtcacggagttgccatggcatgtagtagaaaaccacaggaagaatggtcatattcactttgtgggctgcccataatctttcttgggcattcacaactcttgagtttggtgttcaggcatcattattaaaaagtggagtcctatgtaccagactga

SEQ ID NO: 86252 - DNA, 1305 bp, Homo Sapiens
cttagttgtacaatcaataatcaggcagtagaaactgatgaaggaattgaagaggagataccggattcaccaggaatagaaaagcatgataaagaaaaggaacaaaaggatcccaaaaagcttcgttcctttaaagtatctagcatagattcttcagaacagaaaaaaaccaagaaaaacttaaagaagtttcttacacgacgccccactttgcaagctgttcgtgaaaaaggttatattaaagatcaggtatttggatccaatctcgctaatctgtgtcagagagagaatggcacagtaccaaagtttgtgaagttatgtattgaacatgttgaagaacatggtttggatattgatgggatatacagagtaagtggcaacctcgcagtgatccagaaactaaggtttgcagtcaatcatgatgagaaattggacttgaatgacagtaaatgggaagatattcatgtcattactggagccctcaaaatgttttttcgagaattaccagaacctctttttacatttaatcattttaatgattttgttaatgcaattaagcaagaaccaagacagcgagtcgctgctgttaaggacctaatcagacagttgccaaagccaaaccaagacacaatgcagattcttttccgacatctcagaagagttatagaaaatggagagaaaaatcgaatgacctatcagagtatagcaattgtttttggtcccactctattaaaaccagaaaaagagactggtaatatagcagttcatactgtgtaccagaatcagattgtagaattaattcttctggaactgagttccatcttcggacgttgattcttactgaagacaacctgtggaatagaagctggattccatcagatttcaaatgtttatacacaatgtattttattttttggaccaagcagtgactctttgatttgcactttttttgagggatcagaagggaaggggagagtcgagatgtgtgttaggccctcatatggccgttgatgcaagtggatatactggggtgttattatgacttcattttatcctgaatgttgatttcataactctgatttccgtaaaatcaacttaattctaaccgtcatatacaggtaatcggggacaaaccgggtcttgccccgaaacggtgatagcctcctccacgaacgcacgctgacactcttctgtagtgcacgctgggcatacaagaagatagcttgaaggcacaacacggcatccaacgcgccaggcagactaacacacccaaagctagtacctcacacacaatcacagagcaca

SEQ ID NO: 86253 - DNA, 1791 bp, Homo Sapiens
  misc_feature (13)..(13): n is a, c, g, or t
tcttttcttcctntggtactctaaagggccctcataggtctaagtagcgaggcctgcgtggcgttccagacgagggggcgtcggccctgggcactgacggggttcgggtgaccatggagagtgcgctcaccgcccgtgaccgggtgggggtgcaggatttcgtgctgctggagaacttcaccagcgaggccgccttcatcgagaacctacggcggcgatttcgggagaatctcatctacacctacattggccccgtcctggtctctgtcaatccctaccgggacctgcagatctacagccggcagcatatggagcgttaccgtggcgtcagcttctatgaagtgccccctcacctgtttgccgtggcggacactgtgtaccgagcactgcgcacggagcgtcgggaccaggctgtgatgatctctggggagagcggggcaggcaagaccgaggccaccaagaggctgctgcagttctatgcagagacctgcccagcccccgagcgcggaggtgccgtgcgggaccggctgctacagagcaacccggtgctggaggcctttggaaatgccaagaccctccggaacgataactccagcaggttcgggaagtacatggatgtgcagtttgacttcaagggtgcccccgtgggtggccacatcctcagttacctcctggaaaagtcacgagtggtgcaccagaatcatggggagcggaacttccacatcttctaccagctgctggaggggggcgaggaggagactcttcgcaggctgggcttggaacggaacccccagagctacctgtacctggtgaagggccagtgtgccaaagtctcctccatcaacgacaagagtgactggaaggtcgtcaggaaggctctgacagtcattgatttcaccgaggatgaagtggaggacctgctgagcatcgtggccagcgtccttcatttgggcaacatccactttgctgccaacgaggagagcaatgcccaggtcaccaccgagaaccagctcaagtatctgaccaggctcctcagcgtggaaggctcgacgctgcgagaagccctgacacacaggaagatcatcgccaagggggaggagctcctgagcccgctgaacctggagcaggccgcgtacgcacgagacgccctcgccaaggctgtgtacagccgcacttttacctggctcgtcgggaagatcaacaggtcgctggcctccaaggacgtggagagccccagctggcggagcaccacggttctcgggctcctggatatttatggctttgaagtgtttcagcataacagctttgagcagttctgcatcaattactgcaacgagaagctgcagcagctcttcatcgagctcacgctcaagtcggagcaggaggagtacgaggcagagggcatcgcgtgggagcccgtccagtatttcaacaacaaaatcatctgtgatctggtggaggagaagtttaagggcatcatctcgattttggatgaggagtgtctgcgccccggggaggccacagacctgaccttcctggagaagctggaggatactgtcaagcaccatccacacttcctgacgtgagtggggctgcggggctgctgggggcaagggctcacttgcagcagagcctgcggagtgcaggagtccctccgccatcacaaaacaccagccacaaggaggtgaccagggacggtgctgagttaaggacccctcacatgtgtccagaaactaagaagcttagccaggcatgctgacacgcctggagtcccatctatgcagaaggctg

SEQ ID NO: 86254 - DNA, 1338 bp, Homo Sapiens
  misc_feature (1050)..(1050): n is a, c, g, or t
tgggatggttgtcccatagtgaaccccttctggaggctgtatagtggatcgacgagggaaaacaaattgattgacacccgcggggttggttccggcaagatttcaagggggggagaaaataataagataccccgccagaggagggccctcttattagatgtccgccgggtagatgtcttttcccctgtgggttgggtacaagtattctaagccccccgtgacgggcgatattagggcttaggattatttatggaaagggggtgagtgaaaaataattaggggcgacgaatgttgccctagggggccaaaataaaataagaggcccgagggatgttttgggggccccttgaacggtttgcctacctatcttaagaaaactccgtggccagttccggattttttcatcaaggagaaggtcccttcaaaagggtctggcggccaggaaaacccgggggcccccagaggccggtgactggaaccattgccaggccggccaaagtcaaaattgcccgcccggaccccagcctgagccattagacttgcaaggtatccaaaggtggtccgtaagctggtcctctaaaggacctcaggctgactgtcagaagcccgcacgtccaccccgccccattatacaaaaagtaaagacattgctcatggtcattacaaaatacgggggtggaaagtgaggaataagagatatgctctctgaatacaccagccttacaaatacaaacaacgtctttaacattttgtacaagtagaaggtgcatgaagctggtatccaaccaataattccaaacgctttcttttctcccccattctggtatcaaactggaaaagggttccgttgggttaacagtgtcattttaaaatgcccataaattaaataagttagttcacatttttttccccccagcacttaagttacagttagtctctaatgtgcttttgaagcttgctttagcagttccaggtctcttctgcggacagtggtggctctgggacaaccatattcgtccagctgcaaaggtatgaattgttcaagcaccncaaggccctgtccagcaggactggtaaatagcttagtccatgatggtttaaagtttccactgaatcccaaaaatatggtactccctttgtcataaagatgagctggtttggctaatcccagaggtactagtaagtgtgaaatgtttaactgctttatttctcctcttgtgctcaacagaacaatggacctgtatgtgaaatttagaaagtcagagccaatttcaatccttcagcatgagtatctttctactgagtatctttctgaactgactgctgaatagaaatatt

SEQ ID NO: 86255 - DNA, 1304 bp, Homo Sapiens
ctgagtttaatgaatgtgtagagcgtaacagatgctcaagattatgaccggcgagccgacaaaccttggaccaaactgacccctgctgacaaggctgccataagaaaagaattaaatgaatttaaaagctccgagatggaggttcatgaagagagcaaacattttacacgctaccatcgtccatgatgccaaaggttgagagaggaatcaacatggctgctttgctgcttccttctccaaagtgacatatggagggaactttagcacttcccagcacagccagaattgcatcctctgggatcttctgaggtggacagcactttgaatgtagcatttcactggaacagagtcttatgtgctgcaccgggggcaaaacaacactttgtcagtgcttttgaacctttcaatattgtagcatgcttgaggagtttttcccttactggccaccaaagttctgaaccacttgcaggttccaggttttactggctgcaccacaccccttcccctagatgactgcctgtgcagagacacagtttgcaccattagccttacctgccctgccctgattgtgagacccaaatgtgtaggctctaaattccagccatcaaatccaattcctggtggggaaaaccttctggagacccccaaccttctgataaaagagtctctacctccagggaaaagccttcttacccacactgggcatatcagatgaaaagcattgcactgtaccctctcgtaacacagcaatacagtcctcttggagcactcaagcctgagaggaagctcaggatctgacatgttccttccttttcctcccaagtcatcatgattttttaattttacaataatcctggaagtaatggggaaacttaagttttttcctggaaactcccaacccagaaatcccaaaatttgggttaaaaagaagggccacggccccgggggggcttccacgcccttggaaaatccccaaaccacttttttgggaaagccccaagggtgggggtgagactcacccctgtaagggtcaggggagatttcaaagaaccaccgccctggcgccaaatatggggggaaaaccccccattttcttagctgaaaaaatgccaaaataatttatccccggggggcgcggggggcgccctgcgggctgaagggcgctttgaaaaaactctctttgtgaaacccccaataaagcgtggggggaggttgccaaggttacaacaaaggaatcttgtgcgccctaattgggcacctctacagcgctggggcgaggaaaacgaaggggcgtctccccgctc

SEQ ID NO: 86256 - DNA, 2177 bp, Homo Sapiens
  misc_feature (2068)..(2068): n is a, c, g, or t
  misc_feature (2137)..(2137): n is a, c, g, or t
  misc_feature (2145)..(2145): n is a, c, g, or t
ttaagggggaagagtatgaagtcgaggcgcgccgaattcggcacgagggcggtttaacagaggctgaaagtgatccagtccttggaggacacggccaagaggagtgtggtccgagctatacctgtggacattggtttctccattgaagagctggaggacctttacatggtgtttaaggccaagcacctggctagccagtactgggggtgcagccgcacaatggccggccgtcgggaccccagcctgccctacctggagcagtaccggattgatgccagccagttccgggaactctttgccagcctgacaccctgggcctgtggctcccacacacctctgctggcagggcgcatgttcaggctcctggacgaaaacaaggactcgctgatcaacttcaaggagttcgtgacagggatgagcgggatgtaccacggggacctgacagagaagctcaaggtgctctacaagctacaccttcccccagctctgagcccagaggaagccgagtcagccctggaggcggcccattatttcacagaggacagctcctcagaagaagcactaccacaggaagagcaagaaggaagtggaagtgaggagagaggagaggagaaggggaccagctctccggactatcggcactaccttcgaatgtgggccaaggagaaagaggctcagaaggagacgattaaggatcttcccaagatgaaccaggagcagttcattgagctgtgcaagacgctttacaacatgttcagtgaagaccccatggagcaggacctgtaccacgccatcgccaccgtggccagcctcctgctccgcatcggagaggtggggaagaagttctcagcccgcacaggcaggaagcccagggactgtgccactgaggaggacgagccaccagcacccgaactgcatcaggacgcagccagggagcttcagcccccagctgcaggagacccccaagccaaagcaggcggagacacacacctcggaaaagccccacaggagagccaggtggtggtggaggggggcagcggcgagggacagggctcaccctcccagctgctgtctgacgatgaaaccaaagacgacatgtccatgtcctcctactcggtggtcagcacgggctccctgcaatgtgaagaccttgcagacgacacggtgctggtgggcggggaggcctgcagccccacagcgcgcatcggcggcaccgtcgacaccgactggtgcatctcctttgagcagatcctggcctccatcctgacggagtccgtgctggtgaacttctttgagaagagagtggacattggactcaagatcaaggaccaaaagaaagtggagagacagttcagcaccgccagtgaccatgagcagcctggagtttccggctgatgcctgcagctgtgaggcctggcccaaggtgtcatcagtggggctggcctcatctcctcctgcctttcctcccttatcagtttctctttaaaggtgtgcccctcctgctctcccaggagcagtgagttgtgagtggaaagaaggctggtgcagaccaagctgccttagacagattccctgggcctgcatctcctggcgccggctgcttctgggcccaggaagaggctgtggctcccaccttccttacacctggtgggagcccgcctcgcaccagctgcacctgcctagcattacaggctctcagatctgcccttgcttgcctcatacctctgtgctccacactgcggccaggccagctgagtccctccatccgtggatgctttcctgcagctatgtggtatgggggtcattcctgcctcttggcaccaggttggggggcatgtgcttgttgggcaccaaagtgatggaaccctcaggtgctctccgggagcctgaacctcctgactgaggaacatgggcagaacatgtttattgcacagagtgggcgctgcgcacaggcgtggctgtacacgtgctctcagctcatcatcctttccagtaactttaaaaaaacatccctcaggtcctgatatatttcccttggattcatttcacttggctagaaattacactngtgctcaatggccttaataaatcccctgaaaagaaataaaaacccactggtgtggcaatgccccttggnctgtgggnccccccaacccacttggcttaggcccttcccc

SEQ ID NO: 86257 - DNA, 713 bp, Homo Sapiens
gatgcagtgcccctttggacccccttgtcgcctggcctcccactcccggccacctggcctggccagctctgccagctgttgctctgtcccggtgggagaaagtccagccaggcctccacttcccctggggcatcccaacctcagccctgcacagacccagcgtctgcccttatttgctcccctgcagacaaggacgagtgctccaaggataacggcggctgccagcaggactgcgtcaacacgttcggcagttatgagtgccaatgccgcagtggcttcgtcctccatgacaacaagcacgactgcaaagaagccggctgtgaccacaaggtgacatccaccagtggtaccatcaccagccccaactggcctgacaagtatcccagcaagaaggagtgcacgtgggccatctccagcacccccgggcaccgggtcaagctgaccttcatggagatggacatcgagtcccagcctgagtgtgcctacgaccacctagaggtgttcgacgggcgagacgccaaggcccccgtcctcggccgcttctgtgggagcaagaagcccgagcccgtcctgcccacaggcagccgcatgttcctgcgcttctactcagataactcggtccagcgaaagggcttccaggcctcccacgccacagagtgcgggggccaggtacgggcagacgtgaagaccaaggacctttagtcccacgccca

SEQ ID NO: 86258 - DNA, 946 bp, Homo Sapiens
  misc_feature (806)..(806): n is a, c, g, or t
  misc_feature (845)..(845): n is a, c, g, or t
  misc_feature (856)..(856): n is a, c, g, or t
  misc_feature (858)..(859): n is a, c, g, or t
  misc_feature (900)..(900): n is a, c, g, or t
  misc_feature (914)..(914): n is a, c, g, or t
  misc_feature (923)..(923): n is a, c, g, or t
  misc_feature (931)..(931): n is a, c, g, or t
gtggtaccggtccggaattcccgggatatcgtcgacccacgcgtccgcccacgcgtccgcggagagggtgctggctgccgcgcggccgagtgtgttttatggaccatgtgctgctatgtatgcctgaagaagtacttgaaatgcaaatttggggagactttgccatataaatgcttggctggattaagcgcctaattaggatggtttttcaacaagttggagtaagcatgcaatcggtactttggtctaggaagccatatggttcgtctcgaagtatcgtaaggaaaattggtactaatttgtctctgattcagtgtccaagagttcagtttcagattaacagccatgcaacagaatggagtcccagccacccaggagaggatgcagtggcgtcttttgctgatgttggatgggtagccaaagaagaaggagagtgttcagcaagactaaggacagaggtcagatcaaggccaccccttcaggatgaccttcttttctttgagaaggccccaagcagacagatttccttaccagacttgtctcaagaagagcctcagctgaagaccccagcgctggcaaatgaggaagcactgcagaagatttgcgctctcgaaaatgaacttgctgctctcagagctcagattgccaaaattgtgacccagcaggagcagcaaaatctcactgcaggtgacttagattctaccacatttggtaccaatacaccacacccctcacctcccccaccgcccctgcctccccctgcactggggctccaccaaagtacatctggctgttgatctgattanagaaacgagagagaaaagagccaatgctggaaagacttntgggtagaacnanntccaagaaacctgaaatgccaaaatatgctagaagatcccnttaaagagatgaancaagtgtanaaacttcnggtcagtggaaagag

SEQ ID NO: 86259 - DNA, 1021 bp, Homo Sapiens
  misc_feature (1003)..(1003): n is a, c, g, or t
ttagcagtagcagtggctgctctctggcctctgattcggctacagtggtctaatattgaaaccaatagtccagtggtggcctctgccttctgctcctccagcctttccagtgatttagataaaatccctttctgcctaagattcctagagtgctttctgttttctgggctgaaccttgactagtgtggacactgttgttggacttgaggtcaggagagcctcctggatggacctggtgggccttgctctagagggcagagagaaacaggctgagcacggttgtttggccactggctcagtttaggctgtggggatgcagaatctcagcatgttaggagagaaaacagggacccaataaaaattcaggaaggcaaactgagccacagcatcaagatgtgtaaactaggggaggagtgcagcataaaaggtgaagaaaaggaggcctctcatgaagaggcatccaattaggtgtccaacaagagggtccccatagcatgcatgtcccaactccctctgtctgtgtctgtggcagacaaagtaagccaatatgggcatgctctcctgctagcaaccgagctcagagggctcttcaatagcccacatatacactgtaaacctgcaagcaccttcttttttccgtatccagtgcagacattgctaatcaatcatggcacttgtaccaccactttcctctactgcatccatggcagacatcactaattgattagataattcttctcagctaattggccattctttaaaacccttcagaagataaggctccaggtagccagtaccaaatgactgtggctgacagatgagatgggaactctctgccatccctatataaactatttagatttggcaaggagaggccaatgggaggaagggatggattgcagcaggaggaaagatgtgagctaatttgcatgggcagagaggagtcagggaggagggggcattctcagctggggagaagcagcagtggtcctcgtccgaaatnccacccaggcctcgctcc

SEQ ID NO: 86260 - DNA, 657 bp, Homo Sapiens
  misc_feature (155)..(169): n is a, c, g, or t
  misc_feature (452)..(460): n is a, c, g, or t
atttctaataagtgaggaagtggctgtcctgaattgctgtaacaagcacactatttatatgccctgaccaccataggatgctagtctttgtgaccgattgctaatcttctgcactttaatttattttatataaactttacccatggttcaaagannnnnnnnnnnnnnnctcatataagaaatctaggtgtaaatattgagtacagaaaaaaaatcttcatgatgtgtattgagcggtacgcccagttgccaccatgactgagtcttctcagttgacaatgaagtagccttttaaagctagaaaactgtcaaagggcttctgagtttcatttccagtcacaaaatcagtattgttatttttttccaagagtgtgaaggaaaatggggcattcctttccactctggcatagttcatgagcttaatacatagctttcttttaagaaaggagccnnnnnnnnncaactagcttcctggggtaaacttttctaaaagataaaatggaaaggaactccaaactatgatagaatctgtgtgaatggttaagatgaatgttaaatactatgcttttttgtaagttgatcgtatctgatgtctgtgggactaactgtatcacttaatttttaccttattttggctctaatttgaataagctgagt

SEQ ID NO: 86261 - DNA, 800 bp, Homo Sapiens
gctgggtggcgaattcggcacgaggaatctaggtgtaaatattgagtacagaaaaaaaatcttcatgatgtgtattgagcggtacgcccagttgccaccatgactgagtcttctcagttgacaatgaagtagccttttaaagctagaaaactgtcaaagggcttctgagtttcatttccagtcacaaaaatcagtattgttatttttttccactctggcatagttcatgagcttaatacatagctttcttttaagaaaggagccttttttttcaactagcttcctggggtaaacttttctaaaagataaaatggaaaggaactccaaactatgatagaatctgtgtgaatggttaagatgaatgttaaatactatgcttttttgtaagttgatcgtatctgatgtctgtgggactaactgtatcacttaatttttaccttattttggctctaatttgaataagctgagtaaaaccaccaaagatcagttataggataaaatggcatctctaaccataacacaggagaattggaaggagccctaagttgtcactcagtttaatttcttttaatggttagtttagcctaaagatttatctgcatattctttttcccatgtggctctactcatttgcaactgaatttaatgttataactcatctagtgagaccaacttactaaatttttagtatgcactgaaagtttttatccaacaattatgttcattttaagcaaaattttaagaaagttttgaaattcataaagcatttggttttaaactattttaagaatatagtactc

SEQ ID NO: 86262 - DNA, 1620 bp, Homo Sapiens
  misc_feature (1030)..(1039): n is a, c, g, or t
agcgatgtgaatatagaccagtggtcaaaaagcagggctggtacggtcggatatcccgggatatcgtcgaccacgcgtcggcagacatctcagctaaataccccacaggatacatcatgtactcatatacttgtgtttcctacttctgcttctgtgcaagtagcttcagctacttataccactgaaaatttggatttagctttcaatcccaacaatgatggagcagatggaatgggtatctttgatttgttagacacaggagatgatcttgaccctgatatcattaatatccttcctgcttctccaactggttctcctgtacattctccaggatctcattacccccatggaggtgatgcgggcaagggtcagagtactgatcggctactatcaacagaacctcatgaggaagtacctaatattcttcagcaaccattggcccttggttactttgtatcaactgccaaagcaggtccattacctgactggttctggtcagcatgtcctcaagcacaatatcagtgtcccctttttcttaaggcctctttgcacctccacgtgccttcagtgcaatctgacgagctgcttcacagtaaacactcccacccacttgactcaaatcagacttcagatgtcctcaggtttgttttggaacagtacaatgcactctcctggctaaccctgtgaaccctgcaacccaggacagacgctcatgtctcccaattcattttgtggtgctgaatcagttatataactttattatgaatatgctgtgaatcttcatttgatggaactgtgcaagaaaagaacaaggaaaaatggatgtttcgctgcaggattaagttacaattatcttctcagtgaaggtcatttgtgatggggtctaattcttattacttcaacaaatattgttttgacttgggggggaggggctataaccctgctattgttcattgactctattgaactctttaggatgatgactgatcatacaaaacgtattataacattttcgtagcaaaattaaccnnnnnnnnnnccagtcacagtatttgtgaaaagtaatgagccatagtacccagtcatgttaaatgaatattaaaagcatggagaggaaacatgaggaacaatgaatttcaacatatggcttcagaacatgaagatgttcttgtatggattatagtatctagtattcaaaaatgcctgcatctcttctcttatttattgtaagtttttaaatgtataaattgtcttatatttcttaacctcttttataaaaattttcctagaaggtttatactgccttcttgctttaaagcaattggtctaaaatatatgtaatcgtcttaattaaaaagttgcagtagggttgcttttagagtattatttttttgtaagggggtgggtgggacagtaaatttgtattgtctcgatgtacagtttaacggggatagagggggaataatgtccataccattgtgtgtggaggatttacagctaagctgtagttgcagagtacatgtacagtaatgaagttcactgtgtttataaattgaaaaggtaccaggtcttacagcattttatatatcacatctttacagaataacatgatggcccttt

SEQ ID NO: 86263 - DNA, 621 bp, Homo Sapiens
  misc_feature (34)..(34): n is a, c, g, or t
  misc_feature (466)..(466): n is a, c, g, or t
caccaagaaaggataaccgggggggacagccgangggggaggggaagtactgaagtgagtacattttgtcatgttaaacaggagaaagattgtgacttggctcctgaaattttaatactgcttgttagccatctacaatccctaaagtgctttcagaggctctacacatcttcaatgagtcaaaccccaaagacttataaataggtatataggttgctaatctattcctgatgctttgcctaaaaaattggcattgccatcttccacatctttcttttggaagcatggttttgagtttgttccttgttggtaagcatccagaaaatggcagattccggggatttcactagggaagtttggtggaagttcctcccttgatcgaggggtaaacacgaaaccaggacagtctttgagtaatctgtaagttgttgggctgacattgatttttcgtggtacactgcagganctcaaatttgttagccagagtgacattgtttccaaaaagacagtaacggggcattttaactccaacgacgccagcaaaaactgatccagagtgcagtccaattcgcatcttgataggttctccatggggagacataacttcatcagagagctccc

SEQ ID NO: 86264 - DNA, 551 bp, Homo Sapiens
ctggtgtgttatgttgggcagtctctcttgtccccggcagagctgggcaccgctctgtatccccctggtggtgggggctgtcagggagggcctggggtgggggccaggggccatctgctacgtcagggcccttcttggcctcactcaggttcacttctggggagtcggccccgcagcttctttcactcagttttactccgtgccttctctccgcaggtctccctgcttcaggcttgggaaggttcgggagatgcttccttctgtaacaccagaaccatttggccttaattccaatgtgagagacagaatccctggggtgctggactggccctccagagggtaagccatgtccggagtctcgggcccaaggaacgatttggagggtgcttgttagggcctcccgtgttgggtagaaatttggtggatctgttggctgaaaagacggacttgcttgcctctcctacagcatggagaggctgaccccatggctctgccaccgttggggcagggttagcagatggcagcccttctctgtggctgacaggtcactg

SEQ ID NO: 86265 - DNA, 1335 bp, Homo Sapiens
gggggggagggcatggcgggggccgtgccgggcgccatcatggacgaggactactacgggagcgcggccgagtggggcgacgaggctgacggcggccagcaggaggatgattctggagaaggagaggatgatgcggaggttcagcaagaatgcctgcataaattttccacccgggattatatcatggaaccctccatcttcaacactctgaagaggtattttcaggcaggagggtctccagagaatgttatccagctcttatctgaaaactacaccgctgtggcccagactgtgaacctgctggccgagtggctcattcagacaggtgttgagccagtgcaggttcaggaaactgtggaaaatcacttgaagagtttgctgatcaaacattttgacccccgcaaagcagattctatttttactgaagaaggagagaccccagcgtggctggaacagatgattgcacataccacgtggcgggaccttttttataaactggctgaagcccatccagactgtttgatgctgaacttcaccgttaagcttatttctgacgcagggtaccagggggagatcaccagtgtgtccacagcatgccagcagctagaagtgttctcgagagtgctccggacctctctagctacaattttagatggaggagaagaaaaccttgaaaaaaatctccctgagtttgccaagatggtgtgccacggggagcacacgtacctgtttgcccaggccatgatgtccgtgctggcccaggaggagcaggggggctccgctgtgcgcaggatcgcccaggaagtgcagcgctttgcccaggagaaaggtcatgacgccagtcagatcacactagccttgggcacagctgcctcctaccccaggcctgccaggctctcggggccatgctgtccaaaggagccctgaaccctgctgacatcaccgtcctgttcaagatgttcacaagcatggaccctcctccggttgaacttatccgcgttccagccttcctggacctgttcatgcagtcactctttaaaccaggggctcggatcaaccaggaccacaagcacaaatacatccacatcttggcgtacgcagcaagcgtggttgagacctggaagaagaacaagcgagtgagcatcaataaagatgagctgaagtcaacgtcaaaagctgtcgaaaccgttcacaattgtgttgcaacgagaacaaaggggcctctgaactagtggcagaattgagcacactttatcagtgtattaggtttccagtggtagcaatgggtgtgctgaagcgggtggcttggcctgtttcagaaccagggtaacttcc

SEQ ID NO: 86266 - DNA, 968 bp, Homo Sapiens
tgtagggatatggtttgcggggcagggaactggaacaatgggtacgagtacggactgtcagtttctactcagagaggatttacttggcccaaatgtcgctgttcacgccagccagagatgaacgccaaatatagagcgctccaccgccacagttaagaggacccagtagagagaacctcaatgtttggaacacaaaaggagaaataaaccgaaccgacccaaacaggaaaccccagaaagacaagtaaagggcaaagaaggaaggggaaggggagcaaacacagcacacgttacagtgtccagatacacgggagcccagcatgggcaagggctcggcacacattgagtaacagtcctggtgatatttggtcatatattcattgactactgactctggagcggctgttattgattgaagcagtgacaaatcaaacggaaaggaggccgtggtagcaagggaaggagcaggcttcaagttctgcaagccttttgcactccactgtccagctccccagaaacactgaaccgggtgggccccgctccatccgggcagggctagaggtcaccgggtgaggctaactcgggcgtcgatttcatgtcagtcagaaaacacgcacgtggacgcacgcagacacccacctgttcacggccaaacatcagcggcaacggcctcctcgcctcctctgcccctatcccaggctgggtgggaaagagcatcatgacccactgctaacactgaacacacgccggagctggccccggatgtgggcccagaggctgccccagccctggtcctccgaagggctcacgggtagcccggccactgaaagggcctatggctgtttttcttttggattcaggcctcagaagaagcaatgacagcagggagggaagcttttggccctggtgattataatgctctctgctttggaagaacaagtttctggatttttttggtgtttctaatt

SEQ ID NO: 86267 - DNA, 1275 bp, Homo Sapiens
  misc_feature (1237)..(1237): n is a, c, g, or t
gtccctaggcctccatctctctccctgctgtaccaccttcaccaccatccatgcgaccccaagagccttaatgactctagaagagactccaggcaggcgaagctgaaaggacctttcactccctacttttggccagggccttctgtgccacctgccaagaccagcaggcctaccctctgaagaggtccaagcaacggaagtactactacgaagctgcctttctggccatccttgagaaaaatagacagatggccaaggagaggggcctaataagccccagtgattttgcccagctgcaaaaatacatggaatactccaccaaaaaggtcagtgatgtcctaaagctcttcgaggatggcgagatggctaaatatgtccaaggagatgccattgggtacgagggattccagcaattcctgaaaatctatctcgaagtggataatgttcccagacacctaagcctggcactgtttcaatcctttgagactggtcactgcttaaatgagacaaatgtgacaaaaagatgtggtgtgtctcaatgatgtttcctgctacttttcccttctggagggtggtcggccagaagacaagttagaattcaccttcaagctgtacgacacggacagaaatgggatcctggacagctcagaagtggacaaaattatcctacagatgatgcgagtggctgaatacctggattgggatgtgtctgagctgaggccgattcttcaggagatgatgaaagagattgactatgatggcagtggctctgtctctcaagctgagtgggtccgggctggggccaccaccgtgccactgctagtgctgctggggcctggagatgactctgaaggacgacggacagcacatgtgggaggcccaagaggttccccagaacagtctactggcaatctaggcgagtcaagcattgggtcttggaaaacagggactgagctgtaacctctgtaagtacactgttcacgaccagtgtgccatgaaagccctgccttgtgaagtcagcacctatgccaagtctcggaaggacattggtgtccaatcacatgtgtgggtgcgaggaggctgtgagtccgggcgctgcgaccgctgtcagaaaaagatccggatctaccacagtctgaccgggctgcattgtgtatggtgccacctagagatccacgatgactgcctgcaagcggtgggccatgagtgtgactgtgggctgctccgggatcacatnctgcctccatcttccatctatcccagtgtcctggcctc

SEQ ID NO: 86268 - DNA, 1000 bp, Homo Sapiens
  misc_feature (923)..(957): n is a, c, g, or t
gtggccctctttggggccggcttagcatctgcagttgggctcttctctgaggccagtgccttctcaaagatggaagctttctcagacaccagcctccttcctgagcccagtgccatccccggggccagcgacttctcagagacactgcttttttctagaacagacttcttctctgaaccgtttcttttctctggacacctgctatcttctctgatagagatgtcgtctctgaggccagcaccttctcagagatggaggttttatcggagaccaggctcttttcaggtgccgtcttctttggcatggaggacttctccaagactggggacttttctggaacccctttcttcctctcttctggctccctgcccaccaagctctcctcctccaggggcccaggggccccgctgttcccgactcagtctccggcgaggtgggatttccagttccttcttggagactaggggtttctgtgtggcctgcacagggctcaagctgttcctcccctcctctgcctccagcctctcctggatgggggcctgtgcagcctccaccacctgccgcctctgcctccgctcctgccgtgttctgaggatgctctggatgtcctcgtcctcatctttggaggctgggggcagtggcttgggcacctctgcttcttccacgctcggtagtctctcagaagcagaggcctgccggtctccattctggctgagcctgggagcctcatcgtccgtggtggagctcaggttgcggtgccgccgcctgcgctcgcgctcctgttcctcctcatcctccagagtcctctgccgggcaaggctggacagcgcggaccagtccttcctgctgacagccatgctgcaggagccccccccggccgtaatggccgaattcccgggcatatgtccggtaccgtcgactgnnnnnnnnnnnnnnnnnnnnnnnnnnnnnnnnnnncggccgcttcctcgctcacattgactctctgcgctcggtcgtt

SEQ ID NO: 86269 - DNA, 709 bp, Homo Sapiens
  misc_feature (643)..(643): n is a, c, g, or t
cagccagtgccagagccagatttgccctgtgatctgagacatttgaacactgagccaatggaaatcttcagaaactgtgcaaagattgaagaaatcatgccgaatggtgacccactgttgcctggccagaacaccgtggatgaggtttacgtctcccgccccagccacttctacactgatggacccttgatgccttctgacttctaggaaccacatttcctctgttcttttcatatctcttgcccttcctactcctcatagcatgatattgttctccaaggatgggaatcaggcatgtgtcccttccaagctgtgttaactgttcaaactcaggcctgtgtgactccattggggtgagaggtgaaagcataacatgggtacagaggggacaacaatgaatcagaacagatgcttgagccataggtctaaataggatcctggaggctgcctgctgtgctgggaggtataggggtcctgggggcaggccagggcagttgacaggtacttggagggctcagggcagtggcttctttccagtatggaaggatttcaacattttaatagttggttaggctaaactggtgcatactggcattggcccttggtggggagcacagacacaggataggactccatttctttnttccattccttcatgtctaggataacttgctttcttctttcctttactcctggctcaagccctgaa

SEQ ID NO: 86270 - DNA, 731 bp, Homo Sapiens
ctgctacagggctgttgtctcatgttgaagagggtttggattccgatgcaactgatagcagctctgatgacgatttggatgaatatacccttagaaaaaatgtggcagttaactgtagtactgaatggaagtggcttgtagacagagcacgagttggcagccgatggacttggcttcaagctcagatttcagacctagaatgcaaaatccaacaactaacagacattcacaggcaaattcgtgcctccaaggggatagtggtcctagaagaatgtcagcttccaaaagatattttgaaaaaacaaatgcaatttgcagaccaagcagcttcactaaacattctagggaatcctcaggttccccaggagtgtcaagatcctgtaccggaacaagattttgaaatgtcaccaagcagccctactttacttcttcgaaacatcgaaaaacagagtgcacagttgactgagatcatcaacagtttgattgcccctctcaacttggccccaacttcatcacccctctctttccaaatcctgtagccataaatggtctggctaatggcatttacaggagaacacagagaacaagggaaagcatcatgcaagatgagacaagggaaagcatcatgcaagatgagaacaagttatgttatatgcctgcaacccaaaggatctaaactacatcatttggaagatttttattattctccagcttccagttagaaatctaaa

SEQ ID NO: 86271 - DNA, 1776 bp, Homo Sapiens
ctggtgcttttggcttcaatatcagcttcctctgtaagcttcgagacaccaagtccacagatcagaagatgacgttgttacacttcttggctgagttgtgtgagaatgactatcccgatgtcctcaagtttccagacgagcttgcccatgtggagaaagccagccgagtttctgctgaaaacttgcaaaagaacctagatcagatgaagaaacaaatttctgatgtggaacgtgatgttcagaatttcccagctgccacagatgaaaaagacaagtttgttgaaaaaatgaccagctttgtgaaggatgcacaggaacagtataacaagctgcggatgatgcattctaacatggagaccctctataaggagctgggcgagtacttcctctttgaccccaagaagttgtctgttgaagaatttttcatggatcttcacaattttcggaatatgtttttgcaagcagtcaaggagaaccagaagcggcgggagacagaagaaaagatgaggcgagcaaaacttagccaaggagaaggcagagaaggagcggctagagaagcagcagaagagagagcaactcattagacatgaatgcagagggcgatgagacaggtgtgatggacagtcttctagaagccctgcagtcaggggcagcattccgacggaagaagagggccccgtcaagccaacaggaaggccgggtgtgcagtcacatctctgctagcttcggagctgaccaaggatgatgccatggctgctgttcctgccaaggtgtccaagaacagtgagacattccccacaatccttgaggaagccaaggagttggttggccgtgcaagctaatgtgggtcctgtgaccgcggcagctcctcagcggagccgcagactgtcctgccctgcagcatgtgcctaaaggctcaaggggatattcctctggggtggccactcccaccaccctgaccctgtctttctctctggcctgctgctctctcaacatcacatacagcttcagctgcctggaggccagaaggaaagggcagtgcaggggaggcctgagcccgacttagccagccctggctgttgtattaccaaagcagggtccatgtttgctgccttaaccctgtctcctctctgttactcagagggcctcatctcagacaaggcccagcctgctttttctcagccctgactttctaatgggctttcccccctaggtcagtcttgctggatttgtgcttttcttttgtggtttctctggccctgagaatagcatggggcttgtaaacctttgggctagatccctcctttcattgctgttgtctctgctcttccctctcctggctgtggttatttattattagtggtgtggcactgggagctgctcctaaggaagcagggagcaaatcccacctttaccccaccttcctgggaaaggcctccaaagcaaaggatctggaccagtttccctgctgtgctgtggcccaggccagagcctgtgggcaggcaggcagggcatagcgacagtgtgggacctgcccccagcttctgccacgctttatgcccttgcctctctggacgctctgcaccaaccccaggctactgagccaccttccctcctcatgccttccctgagctttggtgcatctcatctggactatgggttgtactgtgaccatcccaacacctcaccctctgtctacaaggaaatgggaggtggagcctcctggctgagaaattgttttgcaaatggatctatttttgtatgaaaacctcgtgc

SEQ ID NO: 86272 - DNA, 848 bp, Homo Sapiens
  misc_feature (583)..(583): n is a, c, g, or t
gggtcagcaaggctgctgtgcaaaaagaaagacggtaccaagaagggacgtgttaatggggcccagacctatggattgaaagcgtgtgctttacccatctgctgtcttgctccatctgagaccagagccaagatctgcccaggactggaatgctttcccgagtggcttgagttggagcctgggactaggagcagccttattgaggtacaattcatgtgcttgtgggtttggatggcacaatctgtgtctgggctaaggaaagcagacttggcaccaacattaaccctgacagatccaggcatctattccaggaactggaagccaagcgcaacaggtgcttggaggtcatcatgatcagcccagaccccaggccctcccctggcttggcccggtgggctgagagctatgaggccaagtgtgagcgcaggcaagagatccgtgaaagccgccgctgccgtcccaatgtgaccacttgccgccaggtggggaagacgctgaggatccaacagagagagcagctccagagagctcgactgcagcagttcttcaggaggaggaacctggagctagaggagaaggccanagcgcagcatccccagccagggagcaaggcccctccaggcgggcaggacaggtgactgtcctcaaggaacccttgtcttgtgccaaaaagatttcttctcccaaagagcaggggacaggcacccaactctgaagtcttttcagcccaacattctccctccctagggattttgcaaggaatcctgcctgaaccccctcctcctcacagggatggagggcctttacctccaaaagaacacttccctttaaagaagccgccccccaat

SEQ ID NO: 86273 - DNA, 818 bp, Homo Sapiens
tggggcgagagaggaaaccaggccacccggatgtgggccagggatctcttttgcaagtgtaaacagcactcaagctgaagccatagatgtaccccctggatcagcaagaaaggccacctcaaagatagacttgaagaggatactgatgatgtaggttcgcagcgacccccctcgcattttcaccttgaccatgctgcttcgataccgtgcttgaacttctgttatctcaatctgcttcaagtgcatgtccacattgacaccatcagtttgggcaaccttgagttcttcctctttcttgttcagtttctcttcctttcgcatcacatagaacacatgagccaggtacaagagtgtgggtacagacacaaatatgatctgcaggacccagaagcgcacatgagagattgggaaagacttgtcatagcagacattttcacaaccaggttgctgagtgttacaacgaaaggcagactgctcatctccccaggctgactcaaccgctgtccccagcagcaggattcggaaaatgaaaagtactgacagccacaccttccctccagcagttgagtaggcttgaaccttgtcaaggagtttgcctaaggcgctccagtcacccatgttgcctgggcaccactcttttgcttaaaagtagtgaagtcacgccaagtgattgaactccttggaggatgaagtaaaatgaaaaggcaagttcaggcactcagacctgtctatttaaagtttaaaactccgctgctgtttggtactttcctcacgccttccccctaatgaaagaaaagtgctcatacctcgtaaaagct

SEQ ID NO: 86274 - DNA, 1397 bp, Homo Sapiens
  misc_feature (1265)..(1265): n is a, c, g, or t
  misc_feature (1310)..(1310): n is a, c, g, or t
  misc_feature (1360)..(1360): n is a, c, g, or t
agccactgaacaagcagaaagagaggagatcatgaaacaaatgcaagatgccaagaaagctgaaacagataagatagtcgttggttcatcagttgcccctggcaacactgccccatccccatcctctcccacctctcctacttctgatgccacgacctctctggagatgaacaatcctcatgccatcccacgccggcatgctccaattgaacagcttgctcgccaaggctctttccgaggttttcctgctcttagccagaagatgtcaccctttaaacgccaactatccctacgcatcaatgagttgccttccactatgcagaggaagactgatttccccattaaaaatgcagtgccagaagtagaaggggaggcagagagcatcagctccctgtgctcacagatcaccaatgccttcagcacacctgaggaccccttctcatctgctccgatgaccaaaccagtgacagtggtggcaccacaatctcctaccttccaagggaccgagtggggtcaatcttctggtgctgcctctccaggtctcttccaggccggtcatagacgtactccctctgaggccgaccgatggttagaagaggtgtctaagagcgtccgggctcagcagccccaggcctcagctgctcctctgcagccagttctccagcctcctccacccactgccatctcccagccagcatcacctttccaagggaatgcattcctcacctctcagcctgtgccagtgggtgtggtcccagccctgcaaccagcctttgtccctgcccagtcctatcctgtggccaatggaatgccctatccagcccctaatgtgcctgtggtgggcatcactccctcccagatggtggccaacgtatttggcactgcaggccaccctcaggctgcccatccccatcagtcacccagcctggtcaggcagcagacattccctcactacgaggcaagcagtgctaccaccagtcccttctttaagcctcctgctcagcacctcaacggttctgcagctttcaatggtgtagatgatggcaggttggcctcagcagacaggcatacagaggttcctacaggcacctgcccagtggatccttttgaagcccagtgggctgcattagaaaataagtccaagcagcgtactaatccctcccctaccaaccctttctccagtgacttacagaagacgtttgaaattgaactttaagcaatcattatggctatgtatcttgtccataccagacaggggagcaggngggtaacggtcaaaggagcaaaacagactttgtctccctgaattnagtactcttttcactaatccccaagggtcccaaaggaacaagttcccggncccaaagtaactgtggagggggtggatttttgaaaag

SEQ ID NO: 86275 - DNA, 768 bp, Homo Sapiens
  misc_feature (272)..(280): n is a, c, g, or t
ttggcctgcaagctaaatcaaaggccaatttgtgcccactacaggcatatatttatttgtctccctaaaaaatgctcaatacccctccccatatttaaaacaccacaataaaaatacataggaaattcaagtttacatagcatgccacgaaaaataaattgtcatgacttaacattaaacagctatgcaaatttggatcaacacaaaatcaagctagatcataattagaactcgatctgttctttctttaaaatactacaaactactatttnnnnnnnnncacaacaactttacattcagaaatcagacaatctggagataggccactgaatgcgagaaacccaaggcttttgctctgatgctagagttgccctggaatccacacacataggacaaaaggtccagggctcaagttttaaaatccttttgctaagaaaagacatatgcacagtgattgcagtggttgcataccactgaaagaagggggtggggggaggacgtaacattaagaatggttgaaattttgtgtttttctgttaaattacaactaccaaaaagatcacaccaatccaattttagcagcactctccgaattttcacgaataagaaaaccataatttaaagaaaaattctaacctatttcacgacaatttagcaattctatcaccgggaatgtgttccacggccaccaaattttgggatgtgtacagttctgactcttgggtgacactgcgaacacatcaagaaatttggtggcatcgataaaca

SEQ ID NO: 86276 - DNA, 1431 bp, Homo Sapiens
  misc_feature (1085)..(1085): n is a, c, g, or t
  misc_feature (1169)..(1169): n is a, c, g, or t
  misc_feature (1279)..(1299): n is a, c, g, or t
tatgcttcctcaaatgcggctgagcgaacacccagtcacagtggtcacctccagggtgagcatccctacctgacaccatccccagagtctcctgaccagtggtcaagttcatcaccccactctgcttctgactggtcagatgtgaccaccagccctacccctgggggtgctggaggaggtcagcggggacctgggacacacatgtctgagccaccacacaacaacatgcaggtttatgcgtgagagagtccacctccagtgtagagacataactgacttttgtaaatgctgctgaggaacaaatgaaggtcatccgggagagaaatgaagaaatctctggagccagcttctagaggtaggaaagagaagatgttcttattcagataatgcaagagaagcaattcgtcagtttcactgggtatctgcaaggcttattgattattctaatctaataagacaagtttgtggaaatgcaagatgaatacaagccttgggtccatgtttactctcttctatttggagaataagatggatgcttattgaagcccagacattcttgcagcttggactgcattttaagccctgcaggcttctgccatatccatgagaagattctacactagcgtcctgttgggaattatgccctggaattctgcctgaattgacctacgcatctcctcctccttggacattcttttgtcttcatttggtgcttttggttttgcacctctccgtgattgtagccctaccagcatgttatagggcaagacctttgtgcttttgatcattctggcccatgaaagcaactttggtctcctttcccctcctgtcttcccggtatcccttggagtctcacaaggtttactttggtatggttctcagcacaaacctttcaagtatgttgtttctttggaaaatggacatactgtattgtgttctcctgcatatatcattcctggagagagaaggggagaagaatactttttctcaacaaattttggggggcaggagatcccttcaagaggctgcaccttaattttttcttgtctgggggcaggggcttcatattaaactttaccaggaangaaagggtgggaggtttggttggtttttctgggggatggggccctgggcagtgggaaaggttttatcccttgaaaagtctagantacttaggaccccttccccaactttttttaaaacccagaaaaaagggtttggaattggttggaatgacccaagaaaaccagtttaacctccggggaagaacccaggttannnnnnnnnnnnnnnnnnnnntacttttcgtggcaaggaaatcccattggactggccgtggaagggaaaaccattttggcccccccaatctgagccattctcaaggcccgggtttccccttccatcccccccggtaatttggaaacctaagtt

SEQ ID NO: 86277 - DNA, 796 bp, Homo Sapiens
  misc_feature (656)..(656): n is a, c, g, or t
gggacatgaagaaagagcggcctgcaattcaaggactgtacaaagctgaaacgcagagattttcatattatttgggagactcagaaatgagcttttaaggttgttccttgacttgcgggtcaataagcgcacaatggtgaagaaaaggctgccttctagtgacacggtgttccggtttgagactccgggcagcccaaggaaggccaacgtggaggcctcacgcagctccacagacagccccagctcggtgttcctcagctcagaggctgagaatggtgtggaggagaaaaagaaagcctgcaggtcgccaacagcccaatcccctaccccatctgtggaggcggactccccagaccagaagaaaatcattagcctatggtcaaaatccagttttgatggtgcctctttagcaagtgataagaacgactgtaaaacagaaagcaaaaatgaccctaagactgaaagaaaaaagtcttcatcttccagccagtacaaggccaatatgcactttcacaagttggttcttagtgtcccaaacggaggaaccactgaagcaaagctttacctgtgcctctacagaaaagaaatactataccaaggaaaagctccttggatcagaaaacctggatttgtttttcattcccaaagtctttggnaaaagacaccaagatactctatttccagcttttctcggggaacccctaataaaggaaaacccaaacctggctcttcctaatggcccaaaccgcccctgaatcctttagcaaccggtccaccgaacagggtaaccttattt

SEQ ID NO: 86278 - DNA, 2588 bp, Homo Sapiens
ggaactacttcttttggcattctgcagtctactctccatgttgcagtgtgcttccgcggaagcacactgcaacagtgagagtagcagtggtggtaaaagccaagagttaaattttgtgatggatgtgaattcctctaaatacccctcactgctccttcattcccaagaagaaaagacaagtactgctacttccaaaactcagacacgacttgaaggtgaagtgactcctaattccttgtcaaccagctacaagacagtgtcattgccattaagctctccaaacataaagctgaatctcactagccctaaaaggggtcagaaaagagaagaagggtggaaagaagttgtacgaaggtcaaagaaattgtctgttccagcctcagtggtgtcgaggataatgggaagaggaggatgcaacatcactgcaatacaggatgttactggtgcccatattgatgtggataaacaaaaagataagaatggcgagagaatgatcacaataaggggtggcacagaatcaacaagatatgcagttcaactaatcaatgcactcattcaagatcctgctaaggaactggaagacttgattcctaaaaatcatatcagaacacctgccagcaccaaatcaattcatgctaacttctcatctggagtaggtaccacagcagcttccagtaaaaatgcatttcctttgggtgctccaactcttgtaacttcacaggcaacaacgttatctacgttccagcccgctaataaacttaataagaatgttccaacaaatgtacgttcttctttcccagtttctctacccttagcttatcctcaccctcattttgccctgctggctgctcaaactatgcaacagattcggcatcctcgcttacccatggcccagtttggaggaaccttctcaccttctcctaacacatggggaccattcccagtgagacctgtgaatcctggcaacacaaatagctctccaaagcataataacacaagccgtctacctaaccagaacgggactgttttaccctcagagtctgctggactagctactgccagttgtcctatcactgtctcttctgtagttgctgccagtcagcaactgtgtgtcactaatacccggactccttcatcagtcagaaagcagttgtttgcctgtgtgcctaagacaagtcctccagcaacagtgatttcttctgtgacaagcacttgtagttccctgccttctgtctcctctgcacctatcactagcgggcaagctcccaccacatttctaccttgcaagtacttctcaagcacagctttcttcacaaaagatggagtctttctctgctgtgccacccaccaaagagaaagtgtccacacaggaccagcccatggcaaacctatgtaccccatcttcaactgcaaacagttgcagtagctctgccagcaacaccccgggagctccagaaactcacccatccagtagtcccactcctacttccagtaacacacaagaggaggcacagccatccagtgtgtctgatttaagtcctatgtcaatgccttttgcatctaactcagaacctgctccattgactttgacatcacccagaatggttgctgctgataatcaggacaccagtaatttacctcagttagctgtaccagcacctcgagtttctcatcgaatgcagcccagaggttctttttactccatggtaccaaatgcaactattcaccaggatccccagtctatttttgttacgaatccagttactttaacaccacctcaaggcccaccagctgcagtgcagctttcttcagctgtgaacattatgaatggttctcagatgcacataaacccagcaaataagtctttgccacctacatttggcccagccacacttttcaatcacttcagacagtcttacttgcatagtagtcaggtgccagcataaccagtgcctggggagatggtccactgtcctcacgagttgctacaagatgcctctttcactgttcagtacagcgtacctggggtagcctcaggtgcttggacccttgtgaacagcatgacagccctgataactacaacagtgcacctggtttcagagcaggcttcccagcgagtatattactagtccaagtaggagtacacatccatttgaccatcaaggcacagatccccgatctaacatcatactgatccatcctggcaagtagataccggacataccaggaagcacgagatactaccatgccacggggtcaggatccatgatgggaaactcctaatatccaaacagaccaacagttgacttcccaaatccttggacaacagcggcctcaaagcccatgtaagcacatccgtgggaaggaaaagcgttgcccaaagcgagtattagaagtaagggttacataacagtagagttagttaaggtgacacaagacaccctggtctggaaaaattaagagaaacaaacaggggagcatagagtagtgcacaaggggaaaggagtagagtacgaaaggttaaaaaaatgtgacgcagtttaaggaagtgaacgatagaaaacaatacttagcagagcaaaatgtat

SEQ ID NO: 86279 - DNA, 633 bp, Homo Sapiens
agtctcctgggactttgactcgccgtactcggcgcgctcctgctgagggtcgccggagatgtcgctcggccgccttctaccaggagcctgatccgtgccgcccgccgcccggatgggaccaccagagtgctctaaagtctccagtgaatattgaattgctgaggattttgggaaaagacaaatcaaagttcccattccatggatcccttaggtgcaccttcccagtttgtggatgtggatacactaccaagctggggtgactcatgccaagatgaattaaattcctctgatactacagctgaaatatttcaggaagacactgttcgatcaccttttctttataataaggacgtcaatggaaaagtggttctttggaaaggagatgtggcattactgaactgtacagccattgtgaataccagcaatgaaagtctcacagataagaatcctgtgtcagaaagtatcttcatgcttgcagggcctgatttgaaggaagatctccagaaacttaaagggtgccgaacaggtgaagcaaaattgacaaaaggattcaatctagctgcccggttcatcattcacacagtgggacctaaatataaaagccgctatcgcacagcagctgatagttccctt

SEQ ID NO: 86280 - DNA, 1256 bp, Homo Sapiens
agcctttgggggttgctgggatccgggactgccgcagggggtgccacagcagtgcctggcagcgtgggctgggaccttgtcactaaagcagagaagccacttcttctgggcccacgaggcagctgtcccatgctctgctgagcacggtggtgccatgcctctgcaactcctcctgttgctgatcctactgggccctggcaacagcttgcagctgtgggacacctgggcagatgaagccgagaaagccttgggtcccctgcttgcccgggaccggagacaggccaccgaatatgagtacctagattatgatttcctgccagaaacggagcctccagaaatgctgaggaacagcactgacaccactcctctgactgggcctggaacccctgagtctaccactgtggagcctgctgcaaggcgttctactggcctggatgcaggaggggcagtcacagagctgaccacggagctggccaacatggggaacctgtccacggattcagcagctatggagatacagaccactcaaccagcagccacggaggcacagaccactccactggcagccacagaggcacagacaactcgactgacggccacggaggcacagaccactccactggcagccacagaggcacagaccactccaccagcagccacggaagcacagaccactcaacccacaggcctggaggcacagaccactgcaccagcagccatggaggcacagaccactgcaccagcagccatggaagcacagaccactccaccagcagccatggaggcacagaccactcaaaccacagccatggaggcacagaccactgcaccagaaagccacggaggcccagaccactcaaaccacagccaacggaggcacagaccaactccaactggcagccatggaggccctgtccacagaaacccagtgccacagaaggccctgtccatggaacctactaccaaaagagggtctgttcataactcttttctgggtcctctggtactcacaagggcattccaatgggcaaccagcaagttgtccgtcaactacccagtgggggccccagacacatctctgtgagcagtgctgctggccatctatctggcgctggtgcactatctctcgtgtgcatgtgtgctgcgtcgctctccgcaggcaatgtaccggctatatcccacgaatgcgcttatctgtgcgatggggaggctcgcaacatggctgcagcagacgctgacacagagctgagaaccct

SEQ ID NO: 86281 - DNA, 857 bp, Homo Sapiens
gcacttcttctgggccacgaggcagctgtcccatgctctgctgagcacggtggtgccatgcctctgcaactcctcctgttgctgatcctactgggccctggcaacagcttgcagctgtgggacacctgggcagatgaagccgagaaagccttgggtcccctgcttgcccgggaccggagacaggccaccgaatatgagtacctagattatgatttcctgcacagaaacggagcctccagaaatgctgaggaacagcactgacaccactcctctgactgggcctggaacccctgagtctaccactgtggagcctgctgcaaggcgttctactggcctggatgcaggaggggcagtcacagagctgaccacggagctggccaacatggggaacctgtccacggattcacgcagctatggagatacagaccactcaaccagcagccacggaggcacagaccactcaaccagtgcccacggaggcacagaccactccactggcagccacagaggcacagacaactcgactgacggccacggaggcacagaccactccactggcagccacagaggcacagaccatccaccagcagccacggaagcacagaccactcaaccccacaggcctggaggcgctgaccatgcaccaggcaaccatggaggcccaagaccactgaccagcagccatggaagcgcagaccagtccaccagcagccatggagtggccagaccactcgaaaccaacctgccatggaggcacaggaccactgcaccagaagccacgggggcgaagaccatcaccctatcagcacgggacgcccagaccactccctggcggccatggagccctgtcctgaagc

SEQ ID NO: 86282 - DNA, 1328 bp, Homo Sapiens
  misc_feature (851)..(865): n is a, c, g, or t
  misc_feature (979)..(1049): n is a, c, g, or t
  misc_feature (1201)..(1210): n is a, c, g, or t
gtgctacgggagttctgaacatggctgggttcatgaaggcaaatgtatggatgagagtgtggtttaggaaagagggcactgatatcagattagacctatgtgtttgcacccatctttgttggcgatctgagtgcagtgtggcaagtgcacacctggcatccctgcgtcagatcgcgcaccttcaggtcgcgcaccttcgctgaaggaagatgacgcagagctttatctgaaatcagaggggagctatccaaaatgggagtttgggggcagctaaagttgacatgcgaataaattgatactgaaacttagcaacttcttaaaagtgtaaagaagcctcataagatcataaggaaaatgtatatatgcttttcacagctttctagaattttttgacatttgattttcttgagacttgtaaacctggatatgttgaagggtatttgttaattttacttttcaaagatactttaaaacagtagagctagcaatgacaccttgcatttcatttcaacactgcttcaaggtttcttttgtatataattcttagaatgctcatttcttttaaatggtttaatttgtacagcagaggaatgttattgtagtagtatgtaactattacctaatactgagtttttgcaaaaaacaatgaatgctcatatataattgaaatacttcagatcacatgaaaatgctgatttaacatttaagtatcacagcattaaaagaaaaagaaagtatgaaaccgaaaattttattatattgactcaatgttctagaaaatcattcttaatagaccaatgattgtacacccccccttgaatattttttctaataaaaccttccatgtcggnnnnnnnnnnnnnnnaaaaatttttcaaaacttttgtttgggcggggggccccaaagggaaagggaactgggccaaaatttgttcccaaagaaaacccgggcaaggcaatggggtttggaattcccccnnnnnnnnnnnnnnnnnnnnnnnnnnnnnnnnnnnnnnnnnnnnnnnnnnnnnnnnnnnnnnnnnnnnnnncccttttcgcggggtacttttccaagggggggccccaggcgcgaccctccaaaattaaaatttaaacccccgcgccccggggcactttttttgggaggagaggggggtggaaactctctttaaaccttctttctcggcccacctggggaaannnnnnnnnnaaaaggcgggagtggaggaaaccctggaacgtccccaggggggaatcccagccctctttggccccccttgggaataataaatatattctccccccgcgggggaaaaacagcgggggcc

SEQ ID NO: 86283 - DNA, 861 bp, Homo Sapiens
gctaggtacgaggcctggtttgaatcggcaacgaggttcgaacttagacttccggaaggactttggcgagggggcagccattttggggggtgctgatggatacctgcggggtcggctatgttgccctgggggaggccggccccgtggggaacatgactgtggtagactctcctggacaagaggtgctaaatcagcttgatgtcaagacctcttcagaaatgaccagtgcagaggcttccgtagagatgtcattacctacccctttgcctggatttgaggattctcctgatcagaggaggctccctccagagcaggaaagcctctccagactggaacagccagatctttcttcagagatgtcaaaggtctcaaagcctagggcctcaaagcctggccggaagagaggtggtaggacacgaaaaggccccaaaaggccccaacagcctaatcctccatcagccccactggttcctggtctcttagatcaatccaaccctctgtccacccccatgcctaagaaacgaggtcgaaagtccaaggcagagctgctgctgctgaagttgtcaaaagacctagatcggccagaatctcaatctccaaagaggccccctgaggactttgagaccccttctggggaacgaccccgccgaagggctgccccagtggcacttctgtatcttcaggaactggctgaagagctctcaacagccctgcctgcccctgtgtcctgtcctgagggccccaaggtgagcagccccaccaaaccgaagaagatccggcagccagcagccctgtccagggtggaaaaaaagggggatggtgcctccccgggatgaagactttttttctccaggttggagg

SEQ ID NO: 86284 - DNA, 982 bp, Homo Sapiens
  misc_feature (954)..(954): n is a, c, g, or t
tacattctgttgcctaaatatgtgtgtaaaatgagctgataaactggagtactacttaaaaaaaagtctgtgatttataagatgtatatgctttctatgtgaatataagcttgtgcacaatgtttaaaagaaaaacaatgaattagaagagatcccccgtcccccagtctgacatatttcatacagaatgtttaaaagaaaaactctgctagtcttggcaaacatttggccatgtgaggcatgtggtcagtttccattttctattacctggaaagggccataaggaagcaggcagggcttaggtagcttggttacctaagttagaaagtaagagaatcatggttcggatatgaattgaagtggttggtacagggatacctgttctttaaaaggaatgtgggagatgagtcaagggtgaggccgattgttctgcccatgccctaccataccaatttcaataacaatcttgcctgtcattgcactcagaatcttaagatcatgtttcaaatatgttgattcaaacttgcttctaagcctgagtccagggatagcaatggtactgaccagctatggactgggagaacattgagtcctgttttccattggcttcagggcgcatccatgtggatataggaaaagcctctttccacagacttaggaagccccccgaccacgcggacgctcgctgggctgcactcagcaggctgcttgagtgggagctgactccaacatgccctgccctggctgggactaggcatgcttccagcccttcccgtgctctccctgctgtcaacacttgcgtacaaacctgcctagctgttgtaagttttcatcagtagcttaagtactagtagcaaaaacttaaattcattcagaaagttgccacttctgaatgagtagagcaggaaaagtaaactttactgaaacataatttgctgcaacagtcaacattgntatgctgaatgtgctctcaactgccctt

SEQ ID NO: 86285 - DNA, 1209 bp, Homo Sapiens
  misc_feature (1097)..(1131): n is a, c, g, or t
caccttacatatcattgatgagaagcactttcgttttgttttttaaaggttggatggttggatggcccttagttaaacaccaatgcattcaaatggtagaaagaacaggaagatgcatttatgtgtatgcattgagccgctctttggagcgagtagagtggatgtcatgaagctcttgctcttccttcgacttgatgtcttcatacttctgcatccggcaggcgtctttcacataggcccagttggcagacagaaccataaggtagtgaaccatagcaatgactgctgccccagctccagcaagtgccacaataaacaagtggaaggtcatgttcagctcagtagattcgcacatcctcaagaaattctcagagacactacaaattttcttttcctctccaattgtcacaatgacaaactgacgaaggtccaagcagagatttgctccctccactaatggtggtgttccggcagatggtccacagattgaagtacatgtaaactggcagtgaaggtgaaagccgggactcacagccaggccaacatgaaaagatatgtcagcataatgaaccaagcgctcacacatctgccacaagtggtgattttgaaatccccatagagatctttgatggccccagttgtgaagaaaccttccaccatcagcaaaatgccatacacaagaacgcagctgcgatgccgtagatcacatacttaaagatgtcaatcatggtaaaaacatccagtgtgtctccagcagttcttgccatctcaaagtaggtttgcagaatgttgacagttccagaaagcgcttcatgaccgcagccacagaacagggcaacacccgcatagagcaggatggtggcaatcagagaggcatagggaatgccccccaggcatttgatacggcattcaaaacaccccatggcccgaggtcctgcttctctgcagtccccagaggagagcgagtgaccagacgctgcgcggggccaagttctccaagccgcgctgaggctcctcgcgcctggcaagtgacagcctcgcccctccccggccgtaatggccgaattcccgggcatatgtccggtaccgtcgactgnnnnnnnnnnnnnnnnnnnnnnnnnnnnnnnnnnncgccgcttcctcgctcactacttcgctgcgctcgtcgttcgcaaaagacggagcgccctatagtgagtgaaccaagtt

SEQ ID NO: 86286 - DNA, 966 bp, Homo Sapiens
  misc_feature (146)..(157): n is a, c, g, or t
  misc_feature (835)..(869): n is a, c, g, or t
cgaaatattaattaaaatcaaataatgagtctgcaaatcagatgctatcaagcaattgcccatccaggtccaaaaatcttaaaaaatttatctccagatgaatatatacgattcagtaaattttaatgttccacaaattgtttctnnnnnnnnnnnnttatcaaaagcttccagtaacagttggctaattcattgcccccaacgaactacctgtttgtttgtgaggtagcatcaaagactatgatcttctgtgacagtagtagccttaattcatacgcattccctcgtcataggaagagtatggacaacaaaaagggacagatgagtcacctttcattaatcattgactcctggtgttttcatagtatgttaaatgcctgatttcaattttacaacaacaaaaataccaatatttattctgaaaggcaatcgtatgttccaagtagcagatattaacaacttccaacacgatctctaggaataatccgcagttctgaaccatgttttagaaaaacatttcttcattttctttatggctgaatttcaactgcaaggccagcagtctgtgcaggatttattcctattccatcattggtaataattgcacttgttgcagcaggaactttaaattcttctgctgcaaacgtgtaagactgctgtgaaaggtgtactttcaggaacactgagtactttgtacggcagccgtgggtccgacgtcagcgtgatcttaaaggaaaccttcgacatggtggtgccggaatgaatccagaacacacgacaactccccggccgtaatggccgaattcccgggcatatgtccggtaccgtcgactgnnnnnnnnnnnnnnnnnnnnnnnnnnnnnnnnnnncggccgcttcctcgctcatctactcgctgcgctcggtcgttcgctaaaacagcgatgcgccatatgaggtatatatgtcttgtagtctttttttctg

SEQ ID NO: 86287 - DNA, 1174 bp, Homo Sapiens
  misc_feature (642)..(652): n is a, c, g, or t
gggggggcggtccccagcacactagaggaagtcgtgctacccccgcggagttgtcgtgtgttctggattcattccggcaccaccatgtcgaaggtttcctttaagatcacgctgacgtcggacccacggctgccgtacaaagtactcagtgttcctgaaagtacacctttcacagcagtcttaaagtttgcagcagaagaatttaaagttcctgctgcaacaagtgcaattattaccaatgatggaataggaataaatcctgcacagactgctggaaatgtttttctaaaacatggttcagaactgcggattattcctagagatcgtgttggaagttgttaatatctgctacttggaacatacgattgcctttcagaataaatattggtattttttgttgttgtaaaattgaaatcaggcatttaacatactatgaaaacaccaggagtcaatgattaatgaaaggtgactcatctgtccctttttgttgtccatactcttcctatgaagagggaatgcgtatgaattaaggctactactgtcacagaagatcatagtctttgatgctacctcacaacacaaacaggtagttcgttgggggcaaatgaattagccaactgttaactggaagcttttgataannnnnnnnnnnagaacaatttggaacattaaaatttactgaatcgtatatattcatctgagataaaaatataaaaagaattatggaccctggatggcaatttgcttgatagcatctgatttgcagactcataatttgatttttaattaaatatataggttatgatgaagtgaatagacatatcagtgaacagttaactatattaaatttttatcatttactttttttaagattcagacctcagttatataaatttcagtttaatatcaaccaaaaaattaaaattttaatctaacccttatgtgtataaattggtgtcccataccagcttttaatggtggacctatagaatccagtacttttaatggtgggaatttacagtagaagcatcctttgctgagttatacattcctttatcaatctcttttgatacaacatttaaaacaagtagcttcaagaaaccactggtgttttgaggatagtatttctaaatagcattcaggaacagagtattattgcacagatctgaagatc

SEQ ID NO: 86288 - DNA, 1061 bp, Homo Sapiens
  misc_feature (968)..(968): n is a, c, g, or t
attctgcatccgggtccgtgggattcgcgctccactggtcagctggggtcgctctcgggtggttgggtgttgcttgttcccgctgttccagcgtcgaagaaccattgggtctgccggtttgaacttgttctggaagctgtgcgtcaccgtaatgaggcttgtaattcttgataactatgacttggctagtgaatgggcagccaaatacatctgtaatcgcatcattcagttcaaacctggacaggacagatattttacactgggtttaccaacagggagtacacctttaggatgctataaaaaactaatagaatatcataagaatggacacctttcttttaaatatgtgaagacctttaatatggatgaatatgtaggacttccaagaaatcatcctgaaagctaccattcttatatgtggaataatttttttaagcatatcgatatagatcctaataatgcacatatccttgacgggaatgctgcagatttacaagcagaatgtgatgcttttgaaaacaaaataaaagaagctggaggaatagatctttttgttggaggaattggtccagatggtcatatcgctttcaatgagcctggatccagtttagtgtcaaggacaagattaaagactctagcaatggataccatcttggcaaatgccaaatattttgatggagatttatcaaaagtgccaactatggctctaactgttggtgtggggacagtgattggatgctagagaagtaatgatccttataacaggggcacacaaggcatttgccctgtacaaagcaatagaagaaggagtcaatcacatgtggactgtttcccgctttccagcagcatccccggaatatttttgaatgcgatgaagatgctactttagaattaagagtttaaactgtgaaatacttttaaaggtctaatgcatgtgcacaataaaccttgtgggatcccctattcantatgaaagatggaaactgaaggagactgggaccaaatttcgccttgaatgaaaaaaacactttttcctaaagaaagaaaatgaattttccagc

SEQ ID NO: 86289 - DNA, 857 bp, Homo Sapiens
  misc_feature (592)..(602): n is a, c, g, or t
taacagagatcaagcatggtcaagtttactagcccatccatagcatttgtctgcagtttggagatttcattgtaaccaagaaggagtctttccagagatttaggaagaggaaatggaaattcttctaaattattatgctctagatgaaattgtagtagatttggaagcttagcaaacacaccataatcaatcttttgagatttaattttgttgtggctcgaggttaatttctttaagatgagcttgcattgatgaatgaatttgcagtcacagcctcaatttcattgaactgaaggtagagttgctgaatgtgcatcggaatatttgggatagtcttgagtttgcgattatcacagtacattgatgatggaaagttagttggacagaagcattcactgacacagcctaaagtatactgatgaaaaggaactccgtagtctacattttgacgaaatgggaatcctgtttggtaatcatcatctggctcttggtcatagtcttcatcccactgataagtttcatattggcaatgtactttgactccaaaaaagatagaaaataacatatattggactttaaaaacccatcttcnnnnnnnnnnncctgttcaatttgctttagttttcaggggttgatgaatttgtaaatcctttaaatgaatcagaaattcctaaattctttaactgagtctcttaaaaatccacagtaactctgtgtccagacagggctgtctcttgaattactgtagcaatttaagcaaatacaatcttcttggaaaacactcgggttgaattaaaattatgtatttcttttcattacatgaaactttgtggattcaaattaagatgcttgtgttc

SEQ ID NO: 86290 - DNA, 693 bp, Homo Sapiens
agtgctagctcgccgcggccgcctccggggaccacctggcttcatgtgtggatttccacggctcttgcccagaggcgggtacactgtgttccaatgtgccacggaactcacgcagtggcactttgtggcttcatgaaggaagaggcaggccacgcaacacttcctccccaagccaaggagaagatcacttttagaggcagaggagcggaaggcagtgggtgtgaccaaaagtgccatttgttaaagactgttggagcagaactactgagaaaaaccaggcattgtatcttcagttgtcatcaagttcgcaatcagattggaaaagctcaacttgaagctttcttgcctgcagtgaagcagagagatagatattattcacgtaataaaaaacatgggcttcaacctgactttccacctttcctacaaattccgattactgttgctgttgactttgtgcctgacagtggttgggtgggccaccagtaactacttcgtgggtgccattcaagagattcctaaagcaaaggagttcatggctaatttccataagaccctcattttggggaagggaaaaactctgactaatgaagcatccacgaagaaggtagaacttgacaactgtccttctgtgtctccttacctcagaggccagagcaagctcattttcaaaccagatctcactttggaagaggt

SEQ ID NO: 86291 - DNA, 500 bp, Homo Sapiens
agcctccggggaaatctgagggcagtcattggctaacatggaagggctcacaaaacaggcttcctccagaggttcctttaagggcagtaaaatttcccagaacttgaacccataactccacactctgagacaagaatttcctctactcctttcaaggataaatgaggcaagaaagcttcaagttgagcttttccaatctgattgcgaacttgatgacaactgaagatacaatgcctggtttttctcagtagttctgctccaacagtctaaaacgcaatcacaaaagacacgttgtttcaaatggaaattctatcctgaaatgattcactccagcacaaactgaaaacccatccccgatggaccttgactaaccgtaatgatctcaatgtctgcaatttcctgtcaaatatgagaacaacatcccaaagtgggagaacagatgaaacaagacggataaaatactgagaagtcttgaatataagtgataggtacctgaaaaa

SEQ ID NO: 86292 - DNA, 551 bp, Homo Sapiens
acaggcattgtatcttcagttgtcatcaagttcgcaatcagattggaaaagctcaacttgaagctttcttgcctgcagtgaagcagagagatagatattattcacgtaataaaaaacatgggcttcaacctgactttccacctttcctacaaattccgattactgttgctgttgactttgtgcctgacagtggttgggtgggccaccagtaactacttcgtgggtgccattcaagagattcctaaagcaaaggagttcatggctaatttccataagaccctcattttggggaagggaaaaactctgactaatgaagcatccacgaagaaggtagaacttgacaactgcccttctgtgtctccttacctcagtaagtgttgcttttttcctttgattaagtagtatgcaaactttttatttaagtataatatgtacttgcctgtatcaaaacatctcatgtaccccataaatatatatatctcctgtgtcacaaaaactatacattcaaataaaataaatataacatgtacaagaaagtacaaaactcaaaa

SEQ ID NO: 86293 - DNA, 581 bp, Homo Sapiens
gagaataaaaaagagagagagacgaaaagaaaaaccacaaacttcctttgaaaaccagcttgtagtcagggcccggagcgcatgccatagactcggcgactcaggaatcctgaagactctctgagcgacctggagcaccttggctgtgtccctgcctgccttcaccctcctccagtgcccccagtactgggcgtgagtccggaagtggccacaacccagcctggaccgtcgcttataaagctgtgtaaacctgtataagctcaggcgttgacagctggaaggcagctggcactggcagcccccttcattgcacctatctcccccatctcattgccacggctgaaccctccttctcaatcttggaacagcacccccttctttaaggagcttcctcagtcccccaggacccgacagcctgagccagatttctactgtgtcaagtggatcccttggaaaggagaacagacacccatcatcacccagagcactaacggcccttgccctctccttgccatcatgaacatcctctttcttcagtggaaggtgaagctccccccgcagaaggaagtgatcacatcgga

SEQ ID NO: 86294 - DNA, 1314 bp, Homo Sapiens
  misc_feature (206)..(239): n is a, c, g, or t
gaagaacaatcaaacaggaccgcttcggcattcccgggatggaagagaaagggtctgttgtttttctctcctgtttctcgctccctctctgctgatcacaaagctgctgaccgggtcagaaagtcctgatggaaatccaccagcgctgggcaggcccctcctcctccagggagcttgtccttgcctaatttttcttcgtcctgatnnnnnnnnnnnnnnnnnnnnnnnnnnnnnnnnnnccacaaacttcctttgaaaaccagcttgtagtcagggcccggagcgcatgccatagactcggcgactcaggaatcctgaagactctctgagcgacctggagcaccttggctgtgtccctgcctgccttcaccctcctccagtgcccccagtactgggcgtgagtccggaagtggccacaacccagcctggaccgtcgcttataaagctgtgtaaacctgtataagctcaggcgttgacagctggaaggcagctggcactggcagcccccttcattgcacctatctcccccatctcattgccacggctgaaccctccttctcaatcttggaacagcacccccttctttaaggtcactctttggcatcccaagcctggcttaagcaagtcccgtgaggttagtaaacaccttcagtgcccctctaaccgaggtcccttttgaccactggaaagtaccatcagcctgaagatccagcccctggataaggccgggaactgcagaagcaatcatcccctgaaaacccatgaggttctggcagggccccagatgagcaccctcaggacacagatgcaagagatgctagatggggaggctagagaagcgggtagccagcagaccaagctttgctggctagccagtgtggggacaagcttgagtcccctctgcctgaagctagctcagcgtccagccggggccaacccttgggacactgcctgaagtagagacaataagggcatgctccatgccccaggagcttcctcagtcccccaggacccgacagcctgagccagatttctactgtgtcaagtggatcccttggaacggagaacagacaacccatcatcacccagagcactaacggcccttgccctctccttgccatcatgaacgatcctctttcttcagtggaaggtgaagctccccccgcagaaggaaagtgatcacatcggatgagctcatggccatcttggaaacttgctcctgtacatcaagccccaggagaagtcagagggacttcagcttaatttcaggcagaatgtggatgatgcaatgaccagtgctgctaaactggcaca

SEQ ID NO: 86295 - DNA, 581 bp, Homo Sapiens
ttcatctcaagtcatccagcagctgagaggtgacagctccatgctcatccaaaattggcccctggaaaggactcagcagcaagatctcaatggggcagcctccacccctctcctccactttgaccgccagtgcccacaaccagccggccatcaccccttgcgggcaaggggttagggagagcaggctgggcaggggagccactgcagcctgcacagaatggcagagagtgccaaagccagacaagttcactgtttaataaaaatgaagtgacctctgaatcatctctaagagtaaatcatgcacggggaagcaaaaccagccccattgttttcttgtaaaacgacgtcaaggacgaagaccatgtggattagccgtctgccctcatttgtcgataaatccagtccgtgaataccatcacattcccgtacactcctggtctgtaagctttggcacagccagaaccccagcttgtatcccctatcagccaccagatattgttcttcgaagtgaccagaggccctccactgtcaccctggcaagaatcgacgttcccctgcaggaagccggcacaaatcatggc

SEQ ID NO: 86296 - DNA, 832 bp, Homo Sapiens
ctgaagatcgctctgatgcagagcctgaaaaccatgtggttgtgtcctattgtccacccatcattgaggaagaaataccaaacccagccgcagatgaagctggagggactgcacaggttatttacattgatgttcagtcgatgtatcagcctcaagcaaaaccagaagaagaacaagaaaatgaccctgtaggaggggcaggctataagccacagatgcacctccccattaattctactgtgcaagatatagctgcagaagaggacttagataaaactgcgggttacagacctcaggccaatgtaaatacatggaatttagtgtctccagactctcctagatccatagacagcaacagtgagattgtctcatttggaagtccatgctccattaattcccgacaatttttgattcctcctaaagatgaagactctcctaaatctaatggaggagggtggtcctttacaaacttttttcagaacaaaccaaacgattaacagtgtcaccgtgtcacttcagtcagccatctcaataagctcttactgctagtgttgctacatcagcactgggcattcttggagggatcctgtgaagtattgttaggaggtgaacttcactacatgttaagttacactgaaagtgttcatgtgcttttaatgtagtctaaaagccaaagtatagtgactcagaatcctcaatccacaaaactcaagattgggagctctttgtgatcaagccaaagaattctcatgtactctaccttcaagaagcatttcaaggctaatacctacttgtacgtacatgtaaaacaaatcccgccgcaactgttttc

SEQ ID NO: 86297 - DNA, 798 bp, Homo Sapiens
gtctttccttccctccctgctcggcggctccaccacagttgcaacctgcagaggcccggagaacacaaccctcccgagaagcccaggtccagagccaaacccgtcactgaccccccagcccaggcgcccagccactccccaccgctaccatggccgaagacgcagacatgcgcaatgagctggaggagatgcagcgaagggctgaccagtttggcgtgatgcagtcgctggtaaagcacccgtcgtatgctgcaactggttgaagagagtaaagatgctggtatcaggactttggttatgttggatgaacaaggagaacaactcgaacgcatcgaagaaggcatgaaccaaatcaacaaagacagtgaaaggaagcagaaaaaaatttaaaagacctaggaacacatgctgcggagctttgcatatgtccctgtaacaagcttaaagtcaagtgatgcttacaaaaaagcctggggcaataatcaggacggagtggtggccagccagcctgctcgtgtagtggacgaacgggagcagatggccatcagtggcggcttcatccgcagggtaacaaatgatgcccgagaagaatgaaatggatgataacctagagcaggtgagcggcatcatcgggaacctccgtcacatggccctggatatgggcaatgagatcgatacacagaatcgccagatcgacaggatcatggacgaaggctgattccaacaaaaccagaattgatgaggccaatcaacgtgcaacaaagatgctgggaagtggttaaagtgtggccacccgct

SEQ ID NO: 86298 - DNA, 1157 bp, Homo Sapiens
gaaccccataggcggacggtcatcagagaggaaaggaagccaagtgatgtgaagagggaagaggaaaagaagaaaaaagacagaacctcaacagtcccctcccctccagtgcagaaaataggaaacaccaacacaaaacatacaaccttttctctttcctgggccaactgggtttcagaccaaaagtagccaccacaggctctatgaggaccaaagcaatttcagcgaagccttcactcggggtggagggttggtggggggcttggcgtgctgaagacccaagcggcaagaaactgctctgctacaaggacgctggcagcctccaggacgcgtgccctgactcgcccttcactggctcccaggcaggtccggtagcttccctgcagtaactccactctctaccagaactgctatttcacaagtgagtctatgcagaaagaacggaggggtccggggggtgtggtttttcttccacccatgactaacgaagcagagatcacccaagcaccccaactggtcagcctcaagaccccaaattggcatctcacttccttgacatacacgcagatggacacacatgagagacccctgccgagtgtggcgtgggcctttacaagcctatgaccctccagggtctggactcagcttgtcattagtacagccagaataccagtcccgtgtgcgctagatgatatttcttaaaaatcagcaaaagggcttaagcacgtgcttccaggggcctatttacacgttcacaggtttgttagttcacgcattacagtagtagctccatcaaaaacaggctcagctagacattcaagtaacaaaagcgctacagggccatgagccccagcaaggtcaggcctgcccagtgcctgcaatgggcagcctcacctggagcacgaggggaagcccaggacagccaggtccccgggcatcagtgcatgcgatgacgaagccaggcagaggccatgccagcaagtgtcagcccttcctctcagacacgcagcgcatccgtatggttttgcccctcccagcgcctcattggccgcgctgcaaacaggaccaggagccttgcatcctggctcacccgtggacttccgggccgttgggagtcatcagcttgcctttcatcccaaaattccggccgtaccagc

SEQ ID NO: 86299 - DNA, 900 bp, Homo Sapiens
aaggctagtacgaggcctgggtgttgaattcggcacgaggatcagatgtaagtcttctttcttcaaaggtgggtgtgtggacttacatcggattgcaaaagactccttggaatctgattcagaaagcctcacgcaagagattatgtgccattctgagtttgatgatcgaatccggggcaacggtatggagcccgacagcttagacgaggaggaaagccctcgatggggaagcctacacgagatggaagaggaagcaagtggaaaagcagctcagatggctcgcgagcaaaaccaccatacctgggaccagggcgccaataacaggcaacaaccaatagaagacaaatattcagacctccgctatgacccgaactggaagagtaagaaggaggaagggcagctgctgtctgtggaagcgttgccggagtccacggacagctctttagaaaatctgcctttggctcccctctacccttcccaggagacgtcaatggaactctccgggggaaaaggcgagcagaaagagagtccacagagtgcagcttctttacttggtagtgaatttttaagcccaaactatgagcatggtgcccgtcgcagcaagccgttttcagagctgagcgacagtgacctggaggagaagtcgagcagcctttctccgtacgtgaagagctcaagttcacataacgaggttttcctgccgggatcacgtggccctcggcgaaggaaatccaaacaacattttgtggaaaaaaacaagctcactttgggattacccagcccgaaaaacggactcttatcttcaacttcacaataaacaaagaggggaatctcatccagaacaggtccttgagagttaatctctccacgtgatggttcaaaccttggagccagaaactg

SEQ ID NO: 86300 - DNA, 1102 bp, Homo Sapiens
  misc_feature (285)..(285): n is a, c, g, or t
aagaattcctgtaacactcagcactcgatacaggaatttcaaacaaaagacaaattcaaatttggaaaccaatgtcagcaaatgactcaattcatcggcgaaacttgtatttgaagaatggcttgctataacttccaatgtttcaataatctctggaagactgtcaatcacagatagtaatgtacgatcatggactgtccaacatgattgtgatatatgtttcttgccatgttttgtttttgacttagcctataaaatgttttcgaaaatttgccaaacatttcncccagacatacaaaatagtgttgaacaaagaactgagagtttttagagcacttcggagttcttttacttctttacaaaacctaattattgataaatccaaaaagtgtgcataacaatgtatgtataaagctcttggttcttctttcttgaattctgctgctattttattaaattttatcttcaaattagtggtgctatcataggcctggccatgtattttatccatatcaactccaatttgctgcagataagttttgatagtcctatgtaagtgggtcccagtcatctcctcagtatcaacaaaacccaagaatctttccttaattaagatagcctttgatgatttttgtgggtatcttacacaaattgaaagctgttctttcatggcactattgattgtctcatcacatatgattgaaaatgctgaggagtcattgatctcattcacaatatcctgcaacatttcagtctttattatttcgataatatcactttgaatttgtgtactgttatagaagtcaacttgtgaattcataagtcgaaatgtttcttctcctttatcttttgctctcatttctaacaattctaaaaaattgcctttattcacagatgaaactgactggtcgtttcctcttaagggtaaacactgctttccaagaaataaaatattttcaattataagctttaggtactttttatttccctcaatctgtttcgaatgaatagataaatcgtcactgacagctccatcacaaaattggtattctctccaaaattccaatgacttcaaatgcatttcacttttttcatgctttct

SEQ ID NO: 86301 - DNA, 585 bp, Homo Sapiens
gcacttttatgttcatattttttctttaatgaaggaaacgttcaataagtgagtcatgaggttggaaattcgttcccctgacagtcatattgcataacattgcagcgcctttagtcgtgggttacatatgcttgagcttttaaagtgatgttgtcaagtttctagcttcataatgatcctgtcttcatcatatcatattcactttgagaatcggtttgactttgctttcaaacaaaacaaaaacctcttgcttttaggggttcttacccaacaaataacctgtttgaactctcttatattctcccactagcctgaagcaatgacctcattccagtaatgtctttgggagttgcattgcctaatggcacaatattgctttaataaacatgtaaggaaagataggaccaaatatgtaagtgcagggggaaacacatttcagaccaggaatccacattgaaaagttaacactagtaatcatcttctgcccttaattgacactcctatttatttcatcctcagcaaatttcatcctggctcacagaccccacaaaaaagatcccaggtacagatttcacatcttttggg

SEQ ID NO: 86302 - DNA, 878 bp, Homo Sapiens
ccggaatgaaaacaaacggcggccgctgccgaatccgggcactctgctggtcgcggcgggagtggcgtggcgcagggatggcacaaaagaaatatcttcaagcaaaattgacccagtttttaagggaagacaggattcaactttggaaacctccatatacagatgaaaataaaaaagttggtttggcattaaaggaccttgctaagcagtactctgacagactagaatgctgtgaaaatgaagtagaaaaggtaatagaagaaatacgttgcaaggcaattgagcgtggaacaggaaatgacaattatagaacaacgggaattgctacaatcgaggtgtttttaccaccaagactaaaaaaagataggaaaaacttgttggagacccgattgcacatcactggcagagaactgaggtccaaaatagctgaaacctttggacttcaagaaaattatatcaaaattgtcataaataagaagcaactacaactagggaaaacccttgaagaacaaggcgtggctcacaatgtgaaagcgatggtgcttgaactaaaacaatctgaagaggacgcgaggaaaaacttccagttagaggaagaggagcaaaatgaggccaaactcaaagaaaaacaaattcagaggaccaagagaggactagaaatactggcaaagagagcagcagagacagtggtggatccagaaatgacaccgtacttagacatagctaaccagacaggcagatcaatcagaattcccccatcagaaagaaaagcccttatgttagctatgggatatcatgagaagggcagagctttcctgaaaagaaaagaatatggaatagccttgccatgtctgttggacgctgacaaatatttctgg

SEQ ID NO: 86303 - DNA, 897 bp, Homo Sapiens
  misc_feature (712)..(712): n is a, c, g, or t
  misc_feature (714)..(714): n is a, c, g, or t
  misc_feature (881)..(881): n is a, c, g, or t
caagctctgaactgtttgggcctcgggcagccttcttgctggcgctgcaaaatggctgtgcgggagccttgctgaagctcccttttctcaaagctgcccacgtgagtgagcagttcgcccggcacattgaccagcagatccagggcagccggatcggtggagcccaggaaatggagaggctggcacagctgcagcaatgcctgcaagctgtcctgattttctccggcttggagatagccaccacttttgagcattattaccagcactacatggcggaccgtctcctgggcgtggtctcgagctggctggagggggccgtgctggagcagatcggtccctgcttccccaaccgcctcccccagcagatgttgcagagcctgagcacctctaaggagctgcagcgccagttccacgtctaccagctccagcagctggatcaggaactcctgaagctggaggatacagagaagaaaatacaggtgggccttggggccagtggcaaggagcacaagagcgagaaggaagaggaagctggggcagcagcagtggtggatgtggcggagggagaggaggaagaggaggagaatgaggacctctactatgaaggggcaatgccagaagtgtctgtgcttgtcctgtcccgacactcctggcctgttgcctcaatctgccacacactgaaccccagaacctgcctgccctcctacctgangngcactttgaacagatactccaacttctacaacaagagtcagagccaccctgcccttgagcgaggctcacagaggcgactggccatggaacgtgggctggggctggggcttgagctggcagttttggggaaacccagacccctgccatgtgttccacccggtggcaanaatgtgggcttacctg

SEQ ID NO: 86304 - DNA, 767 bp, Homo Sapiens
aaaacgttacggctaggtacgaggcctgggggtttaattcggcacgaggcgatgatgcttcagtctgggaggcacggtgattggaagtgcccggtgcaaggactttcgggaacgagaaggacgactccgagctgcctacaacctggtgaagcgtgggatcaccaatctctgtgtcattgggggtgatggcagcctcactggggctgacaccttccgttctgagtggagtgacttgttgagtgacctccagaaagcaggtaagatcacagatgaggaggctacgaagtccagctacctgaacattgtgggcctggttgggtcaattgacaatgacttctgtggcaccgatatgaccattggcactgactctgccctgcatcggatcatggaaattgtagatgccatcactaccactgcccagagccaccagaggacatttgtgttagaagtaatgggccgccactgtggatacctggcccttgtcacctctctgtcctgtggggccgactgggtttttattcctgaatgtccaccagatgacgactgggaggaacacctttgtcgccgactcagcgagacaaggacccgtggttctcgtctcaacatcatcattgtggctgagggtgcaattgacaagaatggaaaaccaatcacctcagaagacatcaagaatctggtggttaagcgtctgggatatgacacccgggttactgtcttggggcatgtgcagaggggtgggacgccatcagcctttgacagaattctgg

SEQ ID NO: 86305 - DNA, 988 bp, Homo Sapiens
gtgtccaggtgacaaagatgtgacaaggcatggatgagaagaaattttacgaagccctgaagctgagaggccggagcttcatgaacaactgggaggtgtacaagcttctagctcatgtcagacccccggtatctaagagtggttcgcacacagtggctgtgatgaacgtgggggctccggctgcaggcatgaatgctgctgttcgctccactgtgaggattggccttatccagggcaaccgagtgctcgttgtccatgatggtttcgagggcctggccaaggggcagatagaggaagctggctggagctatgttgggggctggactggccaaggtggctctaaacttgggactaaaaggactctacccaagaagagctttgaacagatcagtgccaatataactaagtttaacattcagggccttgtcatcattgggggctttgaggcttacacagggggcctggaactgatggagggcaggaagcagtttgatgagctctgcatcccatttgtggtcattcctgctacagtctccaacaatgtccctggctcagacttcagcgttggggctgacacagcactcaatactatctgcacaacctgtgaccgcatcaagcagtcagcagctggcaccaagcgtcgggtgtttatcattgagactatgggtggctactgtggctacctggctaacatggctggactggcagctggggccgatgctgcctacatttttgaggagcccttcaccattcgagaactgcaggcaaatgttgaacatctggtgcaaaagatgacaacaactgtgaaaaggggcttggtgttaaggaatgaaaagtgcaatgagaactataccactggacttcattttcaaccggtactctgaaggaggggacggccatctttcgacagccaggaagaatgttgcttggtcaccatgcagccaaggtggggagccccaacccccatttgaatagggaattttggccc

SEQ ID NO: 86306 - DNA, 1491 bp, Homo Sapiens
cgggcagtactataacggtcttaaggtagcgaggcctgggtggcgaattcggcacgaggctgtggcaccgatatgaccattggcactgactctgccctgcatcggatcatggaaattgtagatgccatcactaccactgcccagagccaccagaggacatttgtgttagaagtaatgggccgccactgtggatacctggcccttgtcacctctctgtcctgtggggccgactgggtttttattcctgaatgtccaccagatgacgactgggaggaacacctttgtcgccgactcagcgagacaaggacccgtggttctcgtctcaacatcatcattgtggctgagggtgcaattgacaagaatggaaaaccaatcacctcagaagacatcaacgaatctggtggttaagcgtctgggatatgacacccgggttactgtcttggggcatgtgcagaggggtgggacgccatcagcctttgacagaattctgggcagcaggatgggtgtggaagcagtgatggcacttttggaggggaccccagataccccagcctgtgtagtgagcctctctggtaaccaggctgtgcgcctgcccctcatggaatgtgtccaggtgaccaaagatgtgaccaaggccatggatgagaagaaatttgacgaagccctgaagctgagaggccggagcttcatgaacaactgggaggtgtacaagcttctagctcatgtcagacccccggtatctaagagtggttcgcacacagtggctgtgatgaacgtgggggctccggctgcaggcatgaatgctgctgttcgctccactgtgaggattggccttatccagggcaaccgagtgctcgttgtccatgatggtttcgagggcctggccaaggggcagatagaggaagccggctggagctatgttgggggctggactggccaaggtggctctaaacttgggactaaaaggactctacccaagaagagctttgaacagatcagtgccaatataactaagtttaacattcagggccttgtcatcattgggggctttgaggcttacacagggggcctggaactgatggagggcaggaagcagtttgatgagctctgcatcccatttgtggccattcctgctacagtctccaacaatgtccctggctcagacttcagcgttggggctgacaccagcacctcaatactatctgcacaacctgtgaccgcatcaagcagtcagcagctggcaccaagcgtcgggtgtttatcatttgagactatgggtggctacctgtggctacctggctcccttggctggactggcagctggggcccatgctgcctacatttttgaggaaccctttcccctttccaaacctgcagggcaaaggttgaacatctggtggcaaaggatgaaaaccaactgtgaaaaagggggcttggtggttacggaaatgcaaacgtgccaatgaaaaactattccacctggacttcatt

SEQ ID NO: 86307 - DNA, 987 bp, Homo Sapiens
  misc_feature (963)..(963): n is a, c, g, or t
cagtcgacggtaccggacatatgcccgggaattcggccattacggccgggggacaatctgcaagaaagcagcggcggaggagagctaagactaaaagagtggatcatgacccatgaagagcaccatgcagccaaaaccctggggattggcaaagccattgctgtcttaacctctggtggagatgcccaaggtatgaatgctgctgtcagggctgtggttcgagttggtatcttcaccggtgcccgtgtcttctttgtccatgagggttatcaaggcctggtggatggtggagatcacatcaaggaagccacctgggagagcgtttcgatgatgcttcagctgggaggcacggtgattggaagtgcccggtgcaaggactttcgggaacgagaaggacgactccaagctgcctacaacctggtgaagcgtgggatcaccaatctctgtgtcattgggggtgatggcagcctcactggggctgacaccttccgttctgagtggagtgacttgttgagtgacctccagaaagcaggtaagatcacagatgaggaggctacgaagtccagctacctgaacattgtgggcctggttgggtcaattgacaatgacttctgtggcaccgatatgaccattggcactgactctgccctgcatcggatcatggaaattgtagatgccatcactaccactgcccagagccaccagaggacatttgtggttagaaataatgggcccgccactgtggatacctggcccttgtcacctctctgtcctgtggggccgactgggtttttattcctgaatgtccaccagatgacgactgggaggaaacccctttgtcgccgactcaacgagacaaggacccgggggttctcgtctcaacatcatcatttgtggctgaggttgcaattgaccaagatggaaaaccaatcccctccaaaaaacattccagaatctggtggngttaagcggcctgggaaattaacc

SEQ ID NO: 86308 - DNA, 1086 bp, Homo Sapiens
tagggtgcgaagagtatgaagtcgacggcgcgccgaattcggcacgaggggacaatctgcaagaaagcagcggcggaggagagctaagactaaaagagtggatcatgacccatgaagagcaccatgcagccaaaaccctggggattggcaaagccattgctgtcttaacctctggtggagatgcccaaggtatgaatgctgctgtcagggctgtggttcgagttggtatcttcaccggtgcccgtgtcttctttgtccatgagggttatcaaggcctggtggatggtggagatcacatcaaggaagccacctgggagagcgtttcgatgatgcttcagctgggaggcacggtgattggaagtgcccggtgcaaggactttcgggaacgagaaggacgactccgagctgcctacaacctggtgaagcgtgggatcaccaatctctgtgtcattgggggtgatggcagcctcactggggctgacaccttccgttctgagtggagtgacttgttgagtgacctccagaaagcaggtaagatcacagatgaggaggctacgaagtccagctacctgaacattgtgggcctggttgggtcaattgacaatgacttctgtggcaccgatatgaccattggcactgactctgccctgcatcggatcatggaaattgtagatgccatcactaccactgcccagagccaccagaggacatttgtgttagaagtaatgggccgccactgtggatacctggcccttgtcacctctctgtcctgtggggccgactgggtttttattcctgaatgtccaccagatgacgactggggaggaacacctttgtcgcccgactcaacgagacaaagacccgtgggttctcctcctcaacatcataatttgtggctgagaggtgcaatttgacaagaaagggaaaaccaatccacctccggaaaacatccaaaaatctgggtgggttaaagccgtctgggggatatgaacaccccccggggttacctggtccttgggggggcattgttgccaaaaaggggttgggggaaaccccccatttcaaaccccttttttgaaaaagaat

SEQ ID NO: 86309 - DNA, 1059 bp, Homo Sapiens
  misc_feature (733)..(733): n is a, c, g, or t
ggcctgggtggcgaattcggcacgaggcaagaaagcagcggcggaggagagctaagactaaaagagtggatcatgacccatgaagagcaccatgcagccaaaaccctggggattggcaaagccattgctgtcttaacctctggtggagatgcccaaggtatgaatgctgctgtcagggctgtggttcgagttggtatcttcaccggtgcccgtgtcttctttgtccatgagggttatcaaggcctggtggatggtggagatcacatcaaggaagccacctgggagagcgtttcgatgatgcttcagctgggaggcacggtgattggaagtgcccggtgcaaggactttcgggaacgagaaggacgactccgagctgcctacaacctggtgaagcgtgggatcaccaatctctgtgtcattgggggtgatggcagcctcactggggctgacaccttccgttctgagtggagtgacttgttgagtgacctccagaaagcaggtaagatcacagatgaggaggctacgaagtccagctacctgaacattgtgggcctggttgggtcaattgacaatgacttctgtggcaccgatatgaccattggcactgactctgccctgcatcggatcatggaaattgtagatgccatcactaccactgcccagagccaccagaaggacatttgtgttagaagtaatgggccgccactgtggatacctggcccttgtcacctcntctgtcctgtggggcccgcactggggtttttattcctgaaatgtgccaccagatgaaggactgggaaggaaacaccttttgtcccccaactccaccgagacaagggacccctgggttctccgtctcaacatcatccattggggcctgaaggctgcgaattggaccaaaaatgggaaaaaccaaatccccctttcagaaggaaatccaaggaaatctgggtgggtttaaaccgctcctggggaaataattaccccccccgcggtttaacttgtcctttgggggggcatttgttgcccacaaaagggggggtggggacacccccccca

SEQ ID NO: 86310 - DNA, 583 bp, Homo Sapiens
gtatgtgcctatccagatgtaatcgatccaagtgcacatgagactcctaagcagccggtggtacgttttaaaaggaataaacatcataaaggatccatttactgtgtggcctggagtccttgtgggcagttattagcaacaggatcaaatgacaaatacgtcaaagtgctgcccttcaatgcagagacttgtaacgcaacaggaccagatctggaatttagtatgcatgatggaacaattagagacttggcatttatggaaggcccagaaagcggaggagctattttaataagtgctggagcaggggattgtaacatttatacaaccgattgtcaaagaggacagggcctccatgctttgagtggacatactgggcatattttagcactttatacctggagtggctggatgattgcatctggttcccaagataagactgttagattttgggatcttcgagtaccaagttgagttcgtgtgtgttggcacaacatttcatggaactggcagcgcagtggcatctggagctgtagatcccagtggtcgtctcttaaccacaggtcaagaagattctaactgcatg

SEQ ID NO: 86311 - DNA, 585 bp, Homo Sapiens
aagtgtgtgaacattcactcctgtcctccccacatacatatatagacatacaataagaaacatacatacatatataccctagattgtcaatgtatgctgctgaaatgcctgaaaggttacttttcacttaaaaataaaatttgatgaattattctgcaagtatggatttggccctagcaaatttttataaatatagtttgagaggacagcaacaaaggttttaactagaagctgtcttgagggttttcctgatagatattgttaatatgtatgttatttaaaacaggcatatccttatggattataaaaatagaaatgtatatatttgttaatacatattcacagcttatgctggaatggctcacaggagaaatcatggttcatgcagagaataaacattactcaagtaaataaaaataagattaggtccataaaggctgagaacttatagtcagtaatcagctcatttggtttctctttgtagggcaatcaaaaacatgaaaggtggtgacacataaaacacacacagacatacaattacatgaattacatggaaagaatataaattaaccaaaaaagcaccag

SEQ ID NO: 86312 - DNA, 1623 bp, Homo Sapiens
gcattggacatgaacaagctggtacaaaaagcaggcggtacgggccggaattcccgggatatcgtcgacccacgcgtcgctgctgtcttccaggtctctgcattagataccatgactacagtagcactggatctctcacatctattccagaaaatgtgtctactcatgtttctcagatttttaatatgatactaaaagaacaatcattagcagcagaaagtaaaactgtactacaggaatggattaatgtactcaagactgatcttctaagttcactggaaatgattttatccccctgtggtgtctatactgaaaatcaatagtcaactaaagcatattttcaagacttcattgacagtggccgataagatagaagatcaaaaaaaggaactagatggctttctcagtatactgtgtaacaatctacatgaactacaagaaaataccattgttccttggttgagtcacaaaagcaatgtggaaacctaactgaagacctgaagacaataaagcagacccattcccaggaactttgcaagttaatgaatctttggacagagagattctgtgctttggaggaaaagtgtgaaaatatacagaaaccacttagtagtgtccaggaaaatatacagcagaaatctaaggatatagtcaacaaaatgacttttcacagtcaaaaattttgtgctgattctgatggcttctcacaggaaactcagaaattttaaccaagaaggtacaaaattggttgaagaatctgtgaaacactctgataaactcaatggcaacctggaaaaaatatctcaagagactgaacagagatgtgaatctctgaacaccaagaacagtttatttttctgaacagtgggtatcttccttaaatgaaagggaacaggaacttcacaacttattggaggttgtaagccaatgttgtgaggcttcaagttcagacatcactgagaaatcagatggacgtaaggcagctcatgagaaacagcataacatttttcttgatcagatgactattgatgaagataaattgatagcacaaaatctagaacttaatgaaaccataaaaattggtttgactaagcttaattgctttctggaacaggatctgaaactggatatcccaacaggtacgacaccacagaggaaaagttatttatacccatcaaacactggtaaagaactgaaccacgtgaacatctccttgatcagctgaaaaggaaacagcctgagctgttaatgatgctaaactgttcagaaaacaacaaagaagagacaattccggatgtggatgtagaagaggcagttctggggcagtatactgaagaacctctaagtcaagagccatctgtagatgctggtgtggattgttcatcaattggcggggttccatttttccagcataaaaaatcacatggaaaagacaaagaaaacagaggcattaacacactggagaggtctaaagtggaagaaactacagagcacttggttacaaagagcagattacctctgcgagcccagatcaacctttaattcacttgggggttggcaattttatttttaaagaaaacttataaataaaacctgaaaccccagaacttgagccttgtgtat

SEQ ID NO: 86313 - DNA, 643 bp, Homo Sapiens
tcgggctacaggtcctacatgcggagtgggacccaatagctggagccttgcaggaaagtccttccagccaacccagccctctgcctcccgtcagcatcagcacacaggccccgggcaccagtgacctgccagccccagccgacctgactgtgtactcgtgtcctgtgtacatgggagggccccttggcaccgctaagctgcagagcaggaacatcgtgatgcatctgcctttacccaccaagctcacccccaacacctgtgtccaaaggagggtccatgtgtgcagcccacccctgtcttgagcccgtctaccaaaataaagttgtagtgattccatgaaagatttctgagatatgggggtagagtagggtgtgtgcacaccaagaaggcagaatgtgacacactaggagaaaggtacagtgtgcataactgagaaaagaggaggtatattcacaccgaaggtagaagagggcatgtgcctggcagccgggaaggggaaagtgtgggtacagttggggtggggtgggacttggtgttaatcatgtatccaagaagctaggcagacccagcagtggctgacacacagaatcctaaatccttgccccgctctctactgtggtctcagcacttgtgctaaatccac

SEQ ID NO: 86314 - DNA, 920 bp, Homo Sapiens
cagtcgacggtaccggacatatgcccgggaattcggccattacggccggggaaagaagaaccatgaggctcatcctgcctgtgggtttgattgctaccactcttgcaattgctcctgtccgctttgacagggagaaggtgttccgcgtgaagccccaggatgaaaaacaagcagacatcataaaggacttggccaaaaccaatgagcttgacttctggtatccaggtgccacccaccacgtagctgctaatatgatggtggatttccgagttagtgagaaggaatcccaagccatccagtctgccttggatcaaaataaaatgcactatgaaatcttgattcatgatctacaagaagagattgagaaacagtttgatgttaaagaagatatcccaggcaggcacagctacgcaaaatacaataattgggaaaagattgtggcttggactgaaaacgatgatggataagtatcctgaaatggtctctcgtattacaaacttggatctactgttgcaagcataatccactatatgttctgaagattggggaaaccagaatgacaagaagaaaggctattttcactggattgtggcattcacgcacgagaatgggtctccccagcattctgccagtggttagtctatcaggcaaccaaaacttatgggagaaacaaaattatgaccaaactcttggaccgaatgaatcccaacattcttcctgtgttcaatgtcgatcggctatatccggtcatggaccaaagaaccgcatgtgcgagaacaacactcgttccaagaaccaaaactccaaatgcctcggcactgacctcaacaggaactcttactgctttcatggaactccattcctaaaaccaatgacccatgtgccgatactatcggggctctgcaccagagtccgagcaa

SEQ ID NO: 86315 - DNA, 1211 bp, Homo Sapiens
ttacggctaggtacgaggctgggtttgaattcggcacgagggaagagttgctatgacaatgcagaggcagccttcagtgacgatgaagaggatctcaacagcaaaggaaagaagagggagtttcgcttccaccctatcaaggagacagttgtggaggagccagttgatatcaccccttaccttgaccagttggatgagtccctgagggacaaagtactccagctacagaaggggagtgatacggaggcccagtgtgaggtcatgcaggaaattgtggaccaggtcctggaggaagactttgactcggagcagctgtctgtccttgcttcctgcctacaggagctcttcaaggcccactttcgaggggaggtcctgcctgaggagattactgaggagtccctggaggagtctgtaggaaagcctctgtacctaatatttaggaacctatgtcagatgcaggaagacaacagcagcttctctctacttctagaccttctctccgagctatatcagaagcagcccaagattggctaccacctgctctactacctgagggccagcaaagccgccgcagggaagatgaacctgtacgagtcatttgcccaggctacccagctgggcgatctgcacacctgcctgatgatggacatgaaggcctgccaggaggacgatgtgcggctcctgtgccactcacgcctccatctacacaggagtttccagatgaaaccttgaggagcggagagctgtgaacatgatcgtggctgttattgactctgcacagtcccaggagctgggtctgccagtgatgatgggtacctgggtatgttcggaaagatccagtctcaaattatcattcagagcctaactgggaaaccttgtgcagtttggccggagacctttggcacaaaattcccgtgggacaataattcccagaacgggagacgaccataaatatagggacccccaaggcgccgcgcggggacaagcggacaccaccaaaaaaagcagcgggacgacgctacatagcagttggtcgcgacgcgacacctaacatacaaaaccaaccatcggcagggcacaataacgaaggtggcagcaaaaccactcaagaagcgggcgacacagagcgaacagacgcgtcgacaaagcagagtggaccgacaaacaagccatgagcagaggagcacaacgaaccgatagcccgtagagta

SEQ ID NO: 86316 - DNA, 689 bp, Homo Sapiens
gtgaggggagcacttcctggacccaggaagggagagtcttcttccaaggtctgaatttcctgctgctgttcacaaagatgctttttatctttaactttttgttttccccacttccgaccccggcgttgatctgcatcctgacatttggagctgccatcttcttgtggctgatcaccagacctcaacccgtcttacctcttcttgacctgaacaatcagtctgtgggaattgagggaggagcacggaagggggtttcccagaagaacaatgacctaacaagttgctgcttctcagatgccaagactatgtatgaggttttccaaagaggactcgctgtgtctgacaatgggccctgcttgggatatagaaaaccaaaccagccctacagatggctatcttacaaacaggtgtctgatagagcagagtacctgggttcctgtctcttgcataaaggttataaatcatcaccagaccagtttgtcggcatctttgctcagaataggccagagtggatcatctccgaattggcttgttacacgtactctatggtagctgtacctctgtatgacaccttgggaccagaagccatcgtacatattgtcaacaaggctgatatcgccatggtgatctgtgacacaccccaaaaggcattggtgctgatagggaatgtagagaaaggcttcaccccg

SEQ ID NO: 86317 - DNA, 672 bp, Homo Sapiens
  misc_feature (409)..(479): n is a, c, g, or t
gtcaactacagacatagtttaaataaaaaacaaggcacacttacaagtcacatggaagccaggaaccttcacattccaacctgaaaatacactccgaacccctcgcctacccttctcctttggtgtgtgaacacacaggctagcgggacaggctttgcttcaaagacatgccacgcactgggttaatactgtcggaaacaccagtaagcaaaggctgagagactctattatgctacatgtaggatgacaccaccgacgtggctcaatggaagcaaaaccgcttcctgctagttgagtttttagtgctttcttcttttggaacaccattgtatttcataatagttactaaaaatttggtaaaatatattaaggattctttaacaaatgccacaagttcttcaaataattnnnnnnnnnnnnnnnnnnnnnnnnnnnnnnnnnnnnnnnnnnnnnnnnnnnnnnnnnnnnnnnnnnnnnnncatgatagaacacaggtaagatgaagtcaatggcttcggggggttttcatgacacagaaaaggatgtatttttgaaacccacttttgtgtgcagaatcagacagtgttttcccatcctaattctatattccaaatgggagttaaagcttggttataggtgctaaggaaaagttggctgccaatttgactctat

SEQ ID NO: 86318 - DNA, 875 bp, Homo Sapiens
ggcatgcgcactgtggaactggggcacccgaccaggtcaataggaagcccttccgtattccagcccaacagtcttccccagacacaagttttccaggtcctgaggcttgactcttctaaggctcaaaatgggttctgtttccagacgtgcttgcctcgctttgtctttgcttgtcttaaggactctatttcaggccatacttgatcctcagacaactgggacaggttgggaactttgatgttgagatcgccaatgttgatgttccgaggaatctctggcaggttgatgtttttcacagcagacacagcccgcgcaggggctgctgaaaggccaccctcggatttctccagcctgttttgagcctcaatctgagccacgatttcattcatgtttgtttccaacaccatcccacccatcaccacctcctggaggatgtagtgcaccttatccatatggaagatcaaatccaattcacacacattttcgaaacacttatccagagtttccacaaaaacctggatgaggtccaagattccaagttcactctctgaggaatccacacaaaatacaaagtagagggtagcatagtgccggtagatcagtttgtagtcagagccaccaatcaaacttccaccctccaagaagttacagatgttgtcatcccgcttgaggactagatggaaagtctctcgaacaatctgctgttgaatttcttctgggaaacgctggtagaagcggactagccgtggcttcccatggttgttgaaaaccagaatcgcctgaatcatctttgccagccacggttctctcagcaccggctcctcgtgccaattcgccaccccaggcctcgcttaacaaaggaccgttatagtact

SEQ ID NO: 86319 - DNA, 955 bp, Homo Sapiens
tcctaggtagcgaggcctgggtggcgaattcggcacgaggggctggcaaagatgattcaggcgattctggttttcaacaaccatgggaagccacggctagtccgcttctaccagcgtttcccagaagaaattcaacagcagattgttcgagagactttccatctagtcctcaagcgggatgacaacatctgtaacttcttggagggtggaagtttgattggtggctctgactacaaactgatctaccggcactatgctaccctctactttgtattttgtgtggattcctcagagagtgaacttggaatcttggacctcatccaggtttttgtggaaactctggataagtgtttcgaaaatgtgtgtgaattggatttgatcttccatatggataaggtgcactacatcctccaggaggtggtgatgggtgggatggtgttggaaacaaacatgaatgaaatcgtggctcagattgaggctcaaaacaggctggagaaatccgagggtggcctttcagcagcccctgcgcgggctgtgtctgctgtgaaaaacatcaacctgccagagattcctcggaacatcaacattggcgatctcaacatcaaagttcccaacctgtcccagtttgtctgaggatcaagtattggcctgaaatagagtccttaagacaagcaaagacaagcaaggcaagcacgtctggaaacagaacccattttgagccttagaagagtcaagcctcaggacctggaaactttgtgtctggggaagactggttggcatggaatagggaagggatttctattgacactgctcgggtgcacccagttctcacatgtggcagtcatgccgtttctctgatgcataccgccactgcagatgtgaagggcccctgcccttcctccgtaggggagtcaacatgccccaagtcatttgcaccctttaccctctcacatgg

SEQ ID NO: 86320 - DNA, 1290 bp, Homo Sapiens
aaatcatgtagaaaaggagtaggagaagcaaaacgtttcatttttgggccttaaccatttgaaatgtttggactttaaacataaagccatggagtttataaagccaagtaaccatttgatatggataataatatctactctagagagagtatatatatgcacattgatttttaatgctgttaagatacttttgtaaaactgtaggaacaagagtaattagaccaaattgaagcttaggggacagtaaagtggttgctttccatttagggtaaccatgcatgtggttagtcctctcctcctgagattcagaaccagttgactgtccccttaggtgtataaggagaaaagttgacatgtctgggacctctgacatgtgtacacatgcttgcacacatgcacacacagtgaatgttttaagttatacaaacataagaccttaagatgcaaagagccagaatattctaaagaggtgatgaacagagggggtggaaactgcatcacagatgttttccaagggccagggtggaatctgagctctagtgtctgactttgagatgcattatatttttaacacataaatgaggggatccatatcacattctttcttgtggaccaccaaattgaaggctttcttgtaattcacaagcagcagctctccagcatctctccgtagcctgggtgaagtcccagaagctggtgtgcatcattttccaaggtggcagagctgcttgctctgcagatcattcctttgagagaggagtacaagtgaagaaacaaggaggcacttcctgtaggagcactgatgtgccttgtccagactcccctctgagctttactggtaagagagctccgactgaacatgctgagcagttgagcacttttccatcagcaacaacagcgaggatggaaatggaaaggaaccgaactaaaatgcatttccctttgcagggcagagagctaagctcttaggaatagtgttatagaaataagcaccctaacttcaattcctgaaaatgttggttaatggagaaaaattttggagtttcacttaatattttcccctcgggcgccataaataaatcctttcagatgcttcctagaagagtccccagcccaaggcttcgatttaggaccccccctgcagggtctgaaggcttcactgcttcctgatccctggaaaaccagaacccccgccaaaaaaggggtggataaacccatctatccttttggcaaaaaagaaccctcttccccccgggccgcccaattccactccagggttttttaacgggg

SEQ ID NO: 86321 - DNA, 2882 bp, Homo Sapiens
  misc_feature (70)..(141): n is a, c, g, or t
  misc_feature (1806)..(1836): n is a, c, g, or t
  misc_feature (2429)..(2429): n is a, c, g, or t
  misc_feature (2655)..(2655): n is a, c, g, or t
gcggccgcgggcacccccgcctgtgccccggcgtccccgggcaccatgctgtccaactcccagggccagnnnnnnnnnnnnnnnnnnnnnnnnnnnnnnnnnnnnnnnnnnnnnnnnnnnnnnnnnnnnnnnnnnnnnnnngcgcagccgacgacgacgaccccgcagcagttcccgcagttccacgtcaagtccggcctgcagatcaagaagaacgccatcatcgatgactacaaggtcaccagccaggtcctggggctgggcatcaacggcaaagttttgcagatcttcaacaagaggacccaggagaaattcgccctcaaaatgcttcaggactgccccaaggcccgcagggaggtggagctgcactggcgggcctcccagtgcccgcacatcgtacggatcgtggatgtgtacgagaatctgtacgcagggaggaagtgcctgctgattgtcatggaatgtttggacggtggagaactctttagccgaatccaggatcgaggagaccaggcattcacagaaagagaagcatccgaaatcatgaagagcatcggtgaggccatccagtatctgcattcaatcaacattgcccatcgggatgtcaagcctgagaatctcttatacacctccaaaaggcccaacgccatcctgaaactcactgactttggctttgccaaggaaaccaccagccacaactctttgaccactccttgttatacaccgtactatgtggctccagaagtgctgggtccagagaagtatgacaagtcctgtgacatgtggtccctgggtgtcatcatgtacatcctgctgtgtgggtatccccccttctactccaaccacggccttgccatctctccgggcatgaagactcgcatccgaatgggccagtatgaatttcccaacccagaatggtcagaagtatcagaggaagtgaagatgctcattcggaatctgctgaaaacagagcccacccagagaatgaccatcaccgagtttatgaaccacccttggatcatgcaatcaacaaaggtccctcaaaccccactgcacaccagccgggtcctgaaggaggacaaggagcggtgggaggatgtcaaggaggagatgaccagtgccttggccacaatgcgcgttgactacgagcagatcaagataaaaaagattgaagatgcatccaaccctctgctgctgaagaggcggaagaaagctcgggccctggaggctgcggctctggcccactgagccaccgcgccctcctgcccacgggaggacaagcaataactctctacaggaatatattttttaaacgaagagacagaactgtccacatctgcctcctctcctcctcagctgcatggagcctggaactgcatcagtgactgaattctgccttggttctggccaccccagagtgggagaggctgggaggttgggaggctgtggagagaagtgagcaaggtgctcttgaacctgtgctcattttgcaattttatcagtaatttgacttagagtttttacgaaacctcttttgttgtccttgccccactcctctccaccagacgccttcctctctggatactgcaaaggcttgtggtttgttagagggtatttgtggaaactgtcatagggattgtccctgtgttgtcccatctgccctccctgtttctccacaacagcctggggttgtccccgctggctcacgcgttctgggagctcaaggccaccttggaggaggatgccacgcacttcctctctcggagccctcagacatctccagtgtgccagacaaataggagtgannnnnnnnnnnnnnnnnnnnnnnnnnnnnnncacacgtgtgtatgagtgcgcagatctgtgcctgggatcgtgcatttgaggggccaggggcaggcagggctgcagagggagacggccctgctggggcttaggaaccttctcccttcttgggtctgccctgcccatactgagcctgccaaagtgcctgggaagcccacccagattctgaaacaggccctctgtggcctgtctctattagctgggttccgggaggcagagaggagtgaccgggcactggcactgcgatcaggaagactggacccccagcccccagggttctccctccgcccatttagtggtgggtcttaggccctcctgaggcactcatctcactgaatgaccctctcctacttcccccttcttggccatttattaaacccccttctttgttttacttttccctcaaatattttaaaccatttttctcccatgggggccaactggcgcccagcctcatgattaagctgtacccctgggggtcagccttttcctgttgtggccaaaaatgcttttctgctcatttctcccctcggcgagctttgtgacgctgggcgcggatccctacggggggagaacttcagaangtaccatggccctaaccaccccctcgcggagtggggttccaaaaacgcgcccaagggagcccccactctttctctgtaagagcgctccccggcgcagttgcgcaataagctctgcccacattagttgcgtgtcgcgcgccccctcccctgcgcgggcatcataccggtcgcggcaatactgctcctgttgccgacgtcaatacataattagcgcgcccaccacagnagatctgtctcgccccgtctctttggcggtcaacattcagaagtgcaaattaatgtggcacagttctagcgctctggtaatggcggtacatatcgaccctcttacccgcacgagcccgcgccttcccagccgcctgaaggccgctctctattcgatgatccatcacgcatcgtacgtcttactcgccgcacatttttactcgtcgcagtctggcgcggcacgtcttt

SEQ ID NO: 86322 - DNA, 489 bp, Homo Sapiens
  misc_feature (301)..(330): n is a, c, g, or t
accccaccgcaggttgtacttggatggcttcttgtaggtgctcccgttctggggccgcagattctcgccggtcttcagtttttggatgaagaagtcgtacttggaggcccgggctaccaggttctgcatctggaccctgctgtgtgggtatccccccttctactccaaccacggccttgccatctctccgggcatgaagactcgcatccgaatgggccagtatgaatttcccaacccagaatggccagaagtatcagaggaaggtaagaacccaggctttcaggacaaggggaagagcccnnnnnnnnnnnnnnnnnnnnnnnnnnnnnnacacgcagacacatgtatgggcctccatctcatgtgcgtggtgtaactgtgggttagcacctatgcccacgcctgcggggtgcgtcctgcttcattttgcctgtgtggagggctggaggcagggccaaggctgtggggctgtgcagggcctctcaagtg

SEQ ID NO: 86323 - DNA, 1388 bp, Homo Sapiens
agggtatgctgttcccggtcaaacacggctgagataacctcaccaccatggccttgcttgaggaagctgaagacggttttctggtgataagcacagtcgatacaggcctggacagcttgctgcaacaccacagaggcacgggctggtccaaaatggtcagggagttgctggaccttcttcttatctaagtgggggcctgtgctgccattcttgttcaagtagatacaaactgttggggcctgcatggctgagctggggatggtggcagcatcctggggtacagtgctggtatccggttcaggagtgctggttgttggtgaggcaggtggtgggttcagcaaagtccgaggtttcctctttggtgccaggaggctgcaggttgtcttcccagtcaaggaacaccagcccacagggaagatgtctcgggagtcgaagcggcaccagtagtcaaaggcccctcgccacccatcaaaagtgacaagcacctctgagccccgaacctccccaatagtggctgggcaaatgaaatgagggttcttcctgtccacagcttctagcttcattcccattttgaagaagttgtgggaaggcgatggtggctccttgtggaaaatcctgatgggagccatctctgctccatttagcgtcttcaaaaggaacatgggccaagaagacgcattcagccgaaatccaagaggtggctgtagcatacccccattcttttcacagttcccaataggctggatttcagctgagtcaaccagccgccagaagtcatttttgttgtcgctcccatcaaggcgcaggcgaaggcgggcacctgtcagtccaactactgtggcaatacaggtggatgtggtgttcctggggtcctgtgcttccaatttcatactgatcttgaactcgttgcttggaggtgtgtaggactgcttgaagcaatggacaggcgctgggactgaacatgtttcttttaggtatttgtcccaggtaaaatgacctagaggtgaccccatgatggagcagggaaggtcccagagaatctcacaagctaaaacactgtagcaaaccagcatttcttgaagtttcctctgtagtggagcagcacagagcccctttgggccatgcaaaaagcactagatgctgcattatttcatttcattcatttcttcagctcacattcatagaatgcttcacttcaaagaatgtcagaagatttgacttttagagtaaagtctgagtatagccgctgaacagaatgaaaatcataataatcctccaaagttgaaaagtatttgagagtttttaagatgttttcacatccattagctcatgtaatctcctcgtgccgaattcggcgcgccgtcgacttcatactctctcccccctaa

SEQ ID NO: 86324 - DNA, 376 bp, Homo Sapiens
caggaggcacatggtcagcgtggggtccaagctgaggatcagcttcccggacaaactgcatcacatcctcgactgtccatgaggaggggtcccggccactcagtcgagaggcatcgcggctctccagaccaggttggtgtcaccatctccagtttgcacatgaggaacattctgcatatgaggaagacctgagagaaacacttcaaggaagctggggttgatgagcggtgagcttgggcatggagatgagaatcgggtataatctggctctgccactcagcagagtgcttctcggagcatgttagtctcctcatctacaacatgggaagcccctttcttccaaggagtttgtgaatatcacaaaagaatggcaaaa

SEQ ID NO: 86325 - DNA, 1232 bp, Homo Sapiens
gcggcgggaagggagtgagccgccccgcgcccccgccgcgccctcagatggagaaattagcatacaaagaaactgacttgtcagaagtcagagcaaggtattggtggatccagggataaatcccaaacttcttaacccctagaccggtttttagtccattgactatgcagcctaagtgaggaaacctcggactttgctgaacccaccacctgcctcaccaacaaccagcactcctgaaccggataccagcactgtaccccaggatgctgccaccatccccagctcagccatgcaggccccaacagtttgtatctacttgaacaagaatggcagcacaggcccccacttagataagaagaaggtccagcaactccctgaccattttggaccagcccgtgcctctgtggtgttgcagcaggctgtccaggcctgtatcgactgtgcttatcaccagaaaaccgtcttcagcttcctcaagcaaggccatggtggtgaggttatctcagccgtgtttgaccgggaacagcataccctcaacctcccagcagtcaacagcatcacctacgtcctccgcttcctggagaaactctgccacaaccttcgtagtgacaatctgtttggcaaccagccctttacacagactcacttgtcactcactgccatagagtacagccacagccacgacaggtacctaccaggtgaaacctttgtcctggggaatagtctggcccgctccttggaaccacactcagactcaatggactctgcctcaaatcccaccaaccttgtcagcacctcccaaaggcaccggcccttgctttcatcctgtggcctcccaccaagcactgcctcagctgtgcgcaggctatgctccagggggtcggaccgatacctggagagccgcgatgcctctcgactgagtggccgggacccctcctcatggacagtcgaggatgtgatgcagttttgtccgggaagctgatcctcagcttggaccccacgctgacctgtttcgcaaacaccaagatcgaaggcaagggccctggctgctggctgcgcaatgaacatgaatgatggaagttacattgggcccttgaaaacttgggggcctggcactttcaaggttcctccctaaccaccttttgaccccggctgaaaaaccaggggcaaagttccttgaaccccagaaaaaaggcaaccccctaaaaacaaccccaagtggggccaccaaa

SEQ ID NO: 86326 - DNA, 839 bp, Homo Sapiens
  misc_feature (42)..(76): n is a, c, g, or t
acgacgagcgcagcgcagtcagtgagcgaggaagcggcccgnnnnnnnnnnnnnnnnnnnnnnnnnnnnnnnnnnncagtcgacggtaccggacatatgcccgggaattcggccattacggccggggggcatatgtattttagcaggatcattagtatctgaaggagcaacacttcttgttgctgtaaatgaacttcgtaggaatgctcgggctaaaggaatgtcattttacaagtatgtaatggaaagtcgtgatcctagtacaaatgtgatagtattggaggatactgctgcagtcttaggagttataatagcagccacttgcatgggccttacttctataacaggcaatccactgtatgacagcctaggttctttgggtgtgggcaccttattaggcatggtctcagcattcctcatctacactaacacagaagcactcttagggcggtccatccagccagaacaagtacaacggctcactgaactcctggagaatgacccatcagtaagggcaattcatgatgttaaagccacagatctgggattaggtaaagtaagatttaaggcagaagtagattttgatgggcgagttgttacaagatcatatttggaaaaacaagattttgaccaaatgttacaagaaattcaagaagtgaaaactcctgaagaactagagacctttatgcttaaacatggagaaaatattattgatactttaggagctgaagtagatagacttgagaaggaactgaaaaaacgaaatcctgaagttcgacatgtagatttggagatactgtgagtttgatggaatgaatcacctgggtggggaccttgga

SEQ ID NO: 86327 - DNA, 798 bp, Homo Sapiens
taggtagcgaggcctgggtggcgattccgacgagggcaagaggaagtgtccggaccatgggcttgatttgagtacctattgccaggaagataggcagctcatctgtgtcctgtgtccagtcattggggctcaccagggccaccaactctccaccctagacgaagcctttgaagaattaagaagcaaagactcaggtggactgaaggccgctatgatcgaattggtggaaaggttgaagttcaagagctcagaccctaaagtaactcgggaccaaatgaagatgtttatacagcaggaatttaagaaagttcagaaagtgattgctgatgaggagcagaaggcccttcatctagtggacatccaagaggcaatggccacagctcatgtgactgagatactggcagacatccaatcccacatggataggttgatgactcagatggcccaagccaaggaacaacttgatacctctaatgaatcagctgagccaaaggcagagggcgatgaggaaggacccagtggtgccagtgaagaagaggacacatgaaggcttgctacccccagtggaaaatcatcccctccccttgtgtgtatgtgacagcgtgtatgtaacggcttctgatttctgggaaagctgctcagcaacaaacgtacttccaccagatgtgtccccagatccacagcaggcacatatctctccaagggatgaccagttttatgcttactgtgtgcttctcatcccctggttgtggtaggtcaaggaaaagagcccctttgatccaccaggagcaattaaga

SEQ ID NO: 86328 - DNA, 791 bp, Homo Sapiens
atatacacaattaaaactataaatttccatctaagtactgtttaacctgtatctcatttaaaaaatgaatttttcaaagagtcattcaaatttttctttggtactaggtaaaaaatactctcttgggaattggggaggagttgaatggaaaagaatctaagggaatgtttctccataatcctagtatgaattgatttacttctcagtaaccttaccttattaccatcaaatagacagaggcgtacatgtctgctgagaacctgtatgctcattcctggaagaggaatcattttacagctccataatgtcagaatcaatgaaatacgacttggtctcgacctaatagtgccttctgtagcatcccacatcagatctctgaaggccagttgtgaaggcatgagctctggttgtaagaagtaatttgctcgaaattgattcccttcctccagaagctgtgagagcgtggaaggcctgaaccctgcaggaatagctcccatcgtagttaacacatcaacagtgtttatctgctctgaaatcgctttctgaacagcactccagtggggatcagttctttgcttaacttctgctccatctgctgtttcatccaccgcctctacatcttcttcactgccctcttcacttgattcttggccttcttcttcttcactataaggctctaggtaggttctgggaacaagaccttcatttcctttggcatccttagctatccaccaaccatcaggttttttttcaattacaaggagaatttcccctttcttaaatgtaagatt

SEQ ID NO: 86329 - DNA, 1596 bp, Homo Sapiens
  misc_feature (967)..(986): n is a, c, g, or t
  misc_feature (988)..(996): n is a, c, g, or t
  misc_feature (998)..(1014): n is a, c, g, or t
  misc_feature (1016)..(1018): n is a, c, g, or t
  misc_feature (1020)..(1025): n is a, c, g, or t
  misc_feature (1027)..(1029): n is a, c, g, or t
  misc_feature (1031)..(1105): n is a, c, g, or t
  misc_feature (1108)..(1110): n is a, c, g, or t
  misc_feature (1112)..(1114): n is a, c, g, or t
  misc_feature (1119)..(1130): n is a, c, g, or t
  misc_feature (1132)..(1133): n is a, c, g, or t
  misc_feature (1136)..(1137): n is a, c, g, or t
  misc_feature (1144)..(1156): n is a, c, g, or t
  misc_feature (1173)..(1173): n is a, c, g, or t
  misc_feature (1200)..(1200): n is a, c, g, or t
  misc_feature (1205)..(1205): n is a, c, g, or t
  misc_feature (1335)..(1335): n is a, c, g, or t
  misc_feature (1384)..(1423): n is a, c, g, or t
gaggtttataactccgcgccacgcaggcattgacacacaaccaacagatggatccctttactcggcggcagtgcaagcctaccatcgtttctaattccagagacccagctgttcaagctgccatcttggcccagctgaatgcaaaatacggttctggagtgttaccagatgctccaaaggaaatgagcaagggtcaaggcaaagataaagatttgaattctaagtcagccagtgacctctcagaagatctgttcaaagtacacgattttgatgtgaagattgacttacaagttcccagctcagagtcaaaggctttagccatcacctccaaggctccgccagccaaggatggggctccaaggagatctctgaacttggaagactacaaaaaacgacgagggcttatttgagcacacccagcctgctgcttctgaccctgcatgccccatcgcagcgtcccacctttcctcctttcctttgatttagcctctttgggctggagcagctgttgaactgggaagagactctaaactgccagtcatctgtaatataaaccatttgctgtatagacctcctttgtctgcacaccatctcccaccagcctcccctcccccagggcccacccagtgtgggcctgggctctcttgggctttatccatgtctttagatttgtgtttgccttttgtttttttaaccgcgcagttcattggccactctgcacgcattcagtattaccatggagctgggaatcttgctggagcccctggggcaatagcagcagcaccaggcggtctcctctacagactgccttggcccacccattgaacattcggcacgtgaccttgtggggggagcggggattgggcacctgcgatcctctttcctctcttcatctttctcttctgcccttctttttggaagaaggggtttcaaaaccagtttagtttccaaaaagtgtacatttgtnnnnnnnnnnnnnnnnnnnntnnnnnnnnnannnnnnnnnnnnnnnnngnnncnnnnnncnnnannnnnnnnnnnnnnnnnnnnnnnnnnnnnnnnnnnnnnnnnnnnnnnnnnnnnnnnnnnnnnnnnnnnnnnnnnncannncnnntcccnnnnnnnnnnnnannaannccacccnnnnnnnnnnnnncaacccccaaaacacancccaaaaccccacaaaaccccaaacanacccntcacacctcacctccccaactattttttcttaactacaaaccctcttccccaataatccccaacctttctccccacatattacctttcacttcactaccatccctctacccaccccctttacacttaaantccacaccctcccctctcataaccctactcatatccacaaacatacaannnnnnnnnnnnnnnnnnnnnnnnnnnnnnnnnnnnnnnntccatttacctttctccaacccccccacctcttttacctcccaccctctcaatttacctataaacatccacccctatttctccccccccaaccctctcttttatatactcacttccaaccccataccacacaacaatattgtctttgcacaaaaaacatatcgcttcacaaac

SEQ ID NO: 86330 - DNA, 765 bp, Homo Sapiens
gttaatatttttgtcaaacactgaagaactgaagttagtagctggtatttacccattactgattccaaacctgtctgactgcttaccaagggttgattggtttgcagtgcatggacagctcttatatatgtatgtggaaagctgtactttcctgttttagatttataaaggactttgggaatgcctaaaagtgcattagctattatcatactaaccatggtttcttctgattgatggcattttttggcataattgagaagatagtaatgtaacaagatctcaaaattaccacctactggcaaaacacaaccagctggcatagatgaggaaaggtaactctgggaagtacccatattcggtaacttacagctcactggtaacatgcttccctttctagtaatatttgtgacctgtaaattttcgtaagaaatttctattctatttccccttgttgaataagcagtggaattgttcttgagtaatggttcataataatcagttagcctgtttctttccaaagacaaacatgtcagcgtttcaactgtttggaatgtatctgttggtgtcagtgtgggggttgaatacggaatatatgtttctaattctacatctggaattaccaaattagaatgtacttttaaatatgtttgagttttttccaatgcatctttgttctctgcaactgtgtcctgataaggcctttgtattgagccattaccaggatctggtgcttgataactttctccactgttcttataaataaaa

SEQ ID NO: 86331 - DNA, 757 bp, Homo Sapiens
atcctggggaacaggactgctagcagtaaagatgggggagccagggcccccatcccctccagcccccaaggcgtgccccaggcctcattgacagcttctctgagatgaacaactaccggcgggccatgcagaagatggcagaggacatcctgtctctgcggagacaggccagcatcctggaaggagagaaccgcatactgaggagccgcctggcccagcaggaggaggaacgaggggcagggcaaagccaatgaggcccagaacacggtgtccatgaagcagaaactgctgctgagtgagctggatatgaagaaactgagggacagggtgcagcatttgcagaatgagctgattcgaaagaatgatcgagagaaggagctgctccttctgtatcaggcccagcagccacaggccgctctgctgaagcagtaccagggcaagctgcagaacgatgaaggcgctggaggagactgtgcggcaccaagagaaggtgatcgagaagatggagcgggtgctggaggacaggctgcaggacaggagcaagccccctcctctgaacaggcagcagggaaagccctacacgggcttccctatgctctcagcctctggccttcccttgggttctatgggagagaacctgccggttgaactttactcggtgctgctggcagaaaacgcgaagctgcggacggagctggataagaaccgccaccagcaggcccatcattctgcagcaacagggccctgccggtggacc

SEQ ID NO: 86332 - DNA, 883 bp, Homo Sapiens
cagtcgacggtaccggacatatgcccgggaattcggccattacggccgggggccgcggagcacccggcaggggctgacagcatggcctcgcccgacccgcccgccaccagctacgccccgtccgacgtgccctcgggggtcgcgctgttcctcaccatccctttcgccttcttcctgcccgagctgatatttgggttcttggtctggaccatggtagccgccacccacatagtataccccttgctgcaaggatgggtgatgtatgtctcgctcacctcgtttctcatctccttgatgttcctgttgtcttacttgtttggattttacaaaagatttgaatcctggagagttctggacagcctgtaccacgggaccactggcatcctgtacatgagcgctgccgtcctacaagtacatgccacgattgtttctgagaaactgctggacccaagaatttactacattaattcggcagcctcgttcttcgccttcatcgccacgctgctctacattctccatgccttcagcatctattaccactgatgcacaggcgccaggccaagggggaaatgctctttgaaagctccaattattggtccccaaaagcagcttccaacgtttgccatctggatgacaaacggaagatccactaaaacgtccacgggattaacagaacgtccttgcagactgagcgatgacaccacactttgtttggacatttaaattcactctgctgaataggaggaagcttttctttttcctgggaaaacaactgtctcttggaattatctgaccatgaacttgctcttctagacaactcacatcaaagccctcactccactaatggagaatcctagccccactaatgcccagtctgtatggg

SEQ ID NO: 86333 - DNA, 777 bp, Homo Sapiens; identical to SEQ ID NO: 14957
  misc_feature (655)..(683): n is a, c, g, or t

SEQ ID NO: 86334 - DNA, 815 bp, Homo Sapiens
  misc_feature (538)..(538): n is a, c, g, or t
  misc_feature (587)..(587): n is a, c, g, or t
  misc_feature (601)..(627): n is a, c, g, or t
ggggcggcggggaaaatggcggacgggaaggcgggagacgagaagcctgaaaagtcgcagcgagctggagccgccggagtaatggaggggaaagttccagtcgcagcgctgagaagcgatcagctgaagaagaagctgccgacctcccaacaaagcctacaaagatctccaagtttggatttgccataggtagtcagacgacaaagaaagcatcagccatatccatcaaacttggatcaagtaagcctaaagaaactgttccaactcttgctccaaaaactctttcagtagcagcagcttttaatgaagatgaagatagtgaaccagaggaaatgcctccagaagcaaagatgaggatgaagaatattggaagggatacaccaacatcagctggaccaaactccttcaataaaggaaagcatgggttttctgataaccagaagctgtgggagcgaaatataaaatctcatcttggaaatgtccatgaccaagacaattaaatgatgttttgaaattggggtgtgggggtggggtgtanagttaaaaggaacagtttccctttttttaagaaatggtaatagactatnctttggagcccgcnnnnnnnnnnnnnnnnnnnnnnnnnnnaaaagaattgagtgggtacacctaataaatgaagaagtttgaaaattagaagggaattttatggttttatattaccgaattttcaaggacctttggcctaaattttgggaaggtttccatggggaattaagtgttcccacaaggggtccccgaagtaattaaaacgaaaatccccgaaattggggtac

SEQ ID NO: 86335 - DNA, 3709 bp, Homo Sapiens
  misc_feature (3478)..(3478): n is a, c, g, or t
  misc_feature (3648)..(3648): n is a, c, g, or t
aacttagctaggtacgaggcctgggtgttaatcggcacgaggctgagccggagacaggcagttgtgaaaaacttcaggacaaaaatgtttcatttaaggacttgtgctgctaagttgaggccattgacggcttcccagactgttaagacattttcacaaaacagaccagcagcagctaggacatttcaacagattcggtgctattctgcacctgttgctgctgagccctttctcagtgggactagttcgaactatgtggaggagatgtactgtgcttggctggaaaaccccaaaagtgtacataagtcatgggacattttttttcgcaacacgaatgccggagccccaccgggcactgcctaccagagtccccttcccctgagccgaggctccctggctgctgtggcccatgcacagtccctggtagaagcacagcccaacgtggacaagctcgtggaggaccacctggcagtgcagtcgctcatcagggcatatcagatacgagggcaccatgtagcacagctggaccccctggggattttggatgctgatctggactcctccgtgcccgctgacattatctcatccacagacaaacttgggttctatggcctggatgagtctgacctcgacaaggtcttccacttgcccaccaccactttcatcgggggacaggaatcagcacttcctctgcgggagatcatccgtcggctggagatggcctactgccagcatattggggtggagtccatgttcatcaatgacctggagcagtgccagtggatccggcagaagtttgagacccctgggatcatgcagttcacaaatgaggagaaacggaccctgctggccaggcttgtgcggtccaccaggtttgaggagttcctacagcggaagtggtcctctgagaagcgctttggtctagaaggctgcgaggtactgatccctgccctcaagaccatcattgacaagtctagtgagaatggcgtggactacgtgatcatgggcatgccacacagagggcggctgaacgtgcttgcaaatgtcatcaggaaggagctggaacagatcttctgtcaattcgattcaaagctggaggcagctgatgagggctccggagatgtgaagtaccacctgggcatgtatcaccgcaggatcaatcgtgtcaccgacaggaacattaccttgtccttggtggccaacccttcccaccttgaggccgctgaccccgtggtgatgggcaagaccaaagccgaacagttttactgtggcgacactgaagggaaaaaggtcatgtccatcctgttgcatggggatgctgcatttgctggccagggcattgtgtacgagaccttccacctcagcgacctgccatcctacacaactcatggcaccgtgcacgtggtcgtcaacaaccagatcggctttcacaaccgaccctcggatggcccgctcctccccctaccccactgacgtgggcccgaagtggtgaatgcccccattttccacgtgaactcagatgaccccgaggctgtcatgtacgtgtgcaaagtggcggccgagtggaggagcaccttccacaaggacgtggttgtcgatttggtgtgttaccggcgcaacggccacaacgagatggatgagcccatgttcacgcagccgctcatgtacaagcagatccgcaagcagaagcctgtgttacagaagtacgctgagctgctggtgtcgcagggtgtggtcaaccagcctgagtatgaggaggaaatttccaagtatgataagatctgtgaggaagcttttgccagatctaaagatgagaagatcttgcacattaagcactggctggactctccctggcctggcttcttcaccctggacgggcagcccaggagcatgtcctgcccctccacgggtctgacggaggatattctgacacacatcgggaatgtggctagttctgtgcctgtggaaaactttactattcatggagggctgagccggatcttgaagactcgtggggaaatggtgaagaaccggactgtggactgggctctagcggagtacatggcgtttggctcgctcctgaaggagggcatccacattcggctgagcggccaggacgtggagcggggcacattcagccaccgccaccatgtgctccatgaccagaatgtggacaagagaacctgcatccccatgaaccatctctggcccaatcaggccccctatactgtgtgcaacagctcactgtctgagtacggcgtgctgggctttgagctgggcttcgccatggccagtcctaatgccctggtcctctgggaagcccaatttggtgacttccacaacacggcccagtgtatcatcgaccagttcatctgcccgggacaagccaagtgggtgcggcagaatggcatcgtgttgctgctgccccatggcatggagggcatgggtccagaacattcctccgcccgcccagagcggttcttgcagatgtgcaacgatgacccagatgtcctgccagaccttaaagaagccaacttcgacatcaatcagctatatgactgcaattgggttgttgtcaactgctccactcctggcaacttcttccacgtgctacgacgccagatcctgctgccattccggaagccgttaattatcttcacccccaaatccctgttgcgccaccccgaggccagatccagctttgatgagatgcttccaggaacccacttccagcgggtgatcccagaagatggccctgcagctcagaacccagaaaatgtcaaaaggcttctcttctgcaccggcaaagtgtattatgacctcacccgggagcgcaaagcacgcgacatggtggggcaggtggccatcacaaggattgagcagctgtcgccattcccctttgacctcctgctgaaggaggtgcagaagtaccccaatgctgagctggcctggtgccaggaggagcacaagaaccaaggctactatgactacgtgaagccaagacttcggaccaccatcagccgcgccaagcccgtctggtatgccggccgggacccagcggctgctccagccaccggcaacaagaagacccacctgacggagctgcagcgcctcctggacacggccttcgacctggacgtcttcaagaacttctcgtagatgctgcctagggttgcttgggccactgccctctccacacccatgactgccccttgcttctcaactaaagaatagtgcctcagcgctgcccaaaccaccgcccctcctcgctgtggcaccacccctccctctgctctcataggagttaggctgtcgtccccctccagtgcctggcctgccccacaggccacacgctgccccagctctgctgaacttctgagcaggttttccagaaggcccggggggagcaggaaggagaaaggtagcccccgagggatgtccttggggaggggtcagctctgggcaacatcctccccanccagtctcacccactaggaataggactgggcccttgggggctgggctccggttgtcaccccagcaaggggacaggggctcctggatttgggaactaggaaagccttattctggaggctggaccctaaaaatctgaaaaggaacttggagtccgaacttaacctgggctgncaaaaggtttttagggttgggccccaccccggggcgtgatgtggagaaccccgcggggggg

SEQ ID NO: 86336 - DNA, 975 bp, Homo Sapiens
gtagcgaggcctgggtggcgaattcggcacgagggtttggagccccggagtggggtgtcggcgcctcattcgggtggagctgagccggagacaggcagcgtccttgtgaactttccgcttggatcctgactctgctgttagtagcctatgaccttggatgaaatgcagttgtgaaaaacttcaggacaaaaatgtttcatttaaggacttgtgctgctaagttgaggccattgacggcttcccagactgttaagacattttcacaaaacagaccagcagcagctaggacatttcaacagattcggtgctattctgcacctgttgctgctgagccctttctcagtgggactagttcgaactatgtggaggagatgtactgtgcttggctggaaaaccccaaaagtgtacataagtcatgggacattttttttcgcaacacgaatgccggagccccaccgggcactgcctaccagagtccccttcccctgagccgaggctccctggctgctgtggcccatgcacagtccctggtagaagcacagcccaacgtggacaagctcgtggaggaccacctggcagtgcagtcgctcatcagggcatatcagatacgagggcaccatgtagcacagctggaccccctggggattttggatgctgatctggactcctccgtgcccgctgacattatctcatccacagacaaacttgggttctatggcctggatgagtctgacctcgacaaggtcttccacttgcccaccaccactttcatcgggggacaggaatcagcacttcctctgcgggagatcatccgtcggctggagatggcctactgccagcatattggggggggagttcatgttcatcaatgaacctggagcaatgccagtgggatcccggcagaaatttgaaacccctggggatcatgcagtttaccaaatgaaggaaaaacggaccctgctgggccaagcttga

SEQ ID NO: 86337 - DNA, 1002 bp, Homo Sapiens
  misc_feature (935)..(935): n is a, c, g, or t
  misc_feature (952)..(952): n is a, c, g, or t
  misc_feature (986)..(986): n is a, c, g, or t
tcccacgccccacacggtccaaggtagcgaggcctgggtggcgaattcggcacgaggctgggctctagcggagtacatggcgtttggctcgctcctgaaggagggcatccacattcggctgagcggccaggacgtggagcggggcacattcagccaccgccaccatgtgctccatgaccagaatgtggacaagagaacctgcatccccatgaaccatctctggcccaatcaggccccctatactgtgtgcaacagctcactgtctgagtacggcgtgctgggctttgagctgggcttcgccatggccagtcctaatgccctggtcctctgggaagcccaatttggtgacttccacaacacggcccagtgtatcatcgaccagttcatctgcccgggacaagccaagtgggtgcggcagaatggcatcgtgttgctgctgccccatggcatggagggcatgggtccagaacattcctccgcccgcccagagcggttcttgcagatgtgcaacgatgacccagatgtcctgccagaccttaaagaagccaacttcgacatcaatcagctatatgactgcaattgggttgttgtcaactgctccactcctggcaacttcttccacgtgctacgacgccagatcctgctgccattccggaagccgttaattatcttcacccccaaatccctgttgcgccaccccgaggccagatccagctttgatgagatgcttccaggaacccacttccagcgggtgatcccagaagatggcccctgcagctcagaacccagaaaatgtcaaaaggcttctcttctgcaccgggcaaagtgtattatgacctcaccccgggagcgcaaagcacgcggacatggggggggcaggtgggccatcacaaaggattttgagcagctggtcgcccattcccccttttgaactntcctgtgctgaaaggangttggcaaaaaagttaccccccaattggcttggnaacctggggcccctgg

SEQ ID NO: 86338 - DNA, 455 bp, Homo Sapiens
  misc_feature (376)..(377): n is a, c, g, or t
agccaaaatcacagaatgaaggcggtgaagagcgaacgggagcgagggagccggcgaagacaccgggacggggacgtggtgctgccggcgggggtggtggtgaagcaggagcgtctcagcccagaagtcgcacctcccgcccaccgccgtccggaccactccggtggtagcccgtctccgccgaccagcgagccggcccgctcgggccaccgcgggaaccgagcccgaggagttagccggtccccacccaaaaagaaaaacaaggcctcagggagaagaagcaagtctcctcgcagtaagagaaaccgaagtcctcaccactcaacagtcaaagtgaagcagggagcgtgaaggatcatccccggagaggacgggnnaggatcggcagcacagggaaccatcagaacaggaacacaggagagctaggaacagtgaccgggacagacaccggggcc

SEQ ID NO: 86339 - DNA, 1352 bp, Homo Sapiens
  misc_feature (915)..(915): n is a, c, g, or t
gtccttcctctctggacgtgtaagaatatgtctccagggccagtgtctgctgcgatcgagtcccaccttccaagtcctggcatctcaatgcatctgggaagctacctgcattaagtcaggactgagcacacaggtgaactccagaaagaagaagctatggccgcagtgattctggagagcatctttctgaagcgatcccaacagaaaaagaaaacatcacctctaaacttcaagaagcgcctgtttctcttgaccgtgcacaaactctcctactatgagtatgactttgaacgtgggagaagaggcagtaagaagggttcaatagatgttgagaagatcacttgtgttgaaacagtggttcctgaaaaaaatcctcctccagaaagacagattccgagaagaggtgaagagtccagtgaaatggagcaaatttcaatcattgaaaggttcccttatcccttccaggttgtatatgatgaagggcctctctacgtcttctccccaactgaagaactaaggaagcggtggattcaccagctcaaaaacgtaatccggtacaacagtgatctggttcagaaatatcacccttgcttctggatcgatgggcagtatctctgctgctctcagacagccaaaaatgctatgggctgccaaattttggagaacaggaatggaagcttaaaacctgggagttctcaccggaagacaaaaaagcctcttcccccaacgcctgaggaggaccagatctttgaaaaagccactaccgcctgagccagcagcaggcaccagtctccacaagtgagctgaaaaaggttgtggccctttatgattacatgccaatgaatgcaaatgatctacagctgcggaagggtgatgaatattttatcttggaggaaagcaacttaccatggtggnagagcacgagataacaaatgggcaggaaggctacatccctagtaactatgtcactgaagcagaagactccatagaaatgtatgagtggtattccaaacacatgactccgaatcaggctgaagcaactgctaaagcaagaggggcaaagaagaaggtttcatcgtcagagactccagcaaagctggcaaatatacagtgtctgtgtttgctaaatccacaggggaccctcaaggggtgatacgtcattatgtagtgtgtccacgacctcagagccagtattacctggctgagaagcaccttttcagcagcatccctgagctcattaactaccatcagcacgaatctgcaggactcatatccaggctcaaatatccagttgtctcaacaaaacaaagacatgcaccttccactgcaaggcctgggatacggatccatgg

SEQ ID NO: 86340 - DNA, 1101 bp, Homo Sapiens
  misc_feature (77)..(112): n is a, c, g, or t
aagtgatcatcactatagggcgtagttctgcgagccgaacgaccgagcgcaggatgtcagtgagcgaggaagcggcnnnnnnnnnnnnnnnnnnnnnnnnnnnnnnnnnnnncagtcgacggtaccggacatatgcccgggaattcggccattacggccggggctagcttaagtttgaccgtcagaaattcttttatcaccatcatggtttcgtagccatgtttaaatttttgtcttttcgtgttcgctctatacaggaagaagtcagtatcaaagaaatgcaatcacacatcatgtaaaggaaggacatgaaaaggcagatccttcccagttgaacttttaaaagtattagggcagggatcattggaaaggttttcttagttaaaaaaatctcaggctctgatgctaggcagctttatgccatgaaggtatgaagaaggccacactgaaagttcgagaccgagttcggacaaaaatggaacgtgatatcttggtagaggttaatcatccttttatgtcaagttgcattatgcttttcaaactgaagggaagttgtatcttattttggattttctcaggggaggagatgtgtttacacgcttatccaaagaggtgatgttcacagaagaagatgtcaaattctacttggctgaactgtgcacttgctttagaccatctacatagcctgggaataatttatagagacttaaaaccagaaaatatacttctgtgatgaagaaggtcacatcaagttaacagatttcggcctaagtaaagagtctattgaccatgaaaagaaggcatattctttttgtggaactgtggagtatatggctccagaagtagttaatcgtcgaggtcatactcagagtgctgactggtggtcttttggtgtgttaatgtttgaaatgcttactggtacactccctttccaaggaaaagatcgaaaagaaacaatgactatgattcttaaagccaaacttggaatgccacagtttttgagtcctgaagcgcagagtcttttacgaatgcttttcaagcgaaatcctgcaaacagattaggtgcaggaccagatggagttgaagaaattaaaagacatt

SEQ ID NO: 86341 - DNA, 1093 bp, Homo Sapiens
  misc_feature (501)..(509): n is a, c, g, or t
  misc_feature (1026)..(1026): n is a, c, g, or t
  misc_feature (1029)..(1029): n is a, c, g, or t
  misc_feature (1032)..(1032): n is a, c, g, or t
  misc_feature (1064)..(1064): n is a, c, g, or t
agagctgggtaggctgcttgggttagaggaatgaggagactggctggctggtgttgaatgatctgaactggcaggaagtgatggagaccacggagtcccttcaaaaagggaatacagagatgtttcctggggggccattgagggactgagttctgctttggagctggatgtcaggtttttcccatatacctcattgaacatactattatttgggtatctttcctgattgagagagaatccggtgagggacaggaaagaggatgaatgtgacatgagctctgagggcttctccaataaggatttctcaaacggcattctgggtacaggatcctgctctggacggaagactcctggtgaccgtttgcccctgcggtctatgtttgcttgctgtgccattacagatctgttatcagccatgctgtaggaagaatcccagtagaattctgggaccttgacttctgagggattatggttatatggctccatgggaaaaggcttcannnnnnnnnctagaggctgctgctgcattacaggaggttgcaatgacggctcaaacagttttatggggtcttgggtctgaaggtagtagggctgtttcacaggcataattttccctaatgggccttgaacctgagggggattccacagctgtttggaggcatctgcctgttgatactgctggaatccagagtggtgaggcgggcttttccccaaagccggcacagcttttgtaggggattgttgttgctgagttagagcttgaacctgcagctggcttgtagactgtgctgttggctgagctggtaaagatgtaaggggttgctgggaaggtggctgtgattgttgaggtccctggttcattggccctggtccagagggccgttgctggctgtaaggaatgtgggactgtttcccagctttgcactgggttcctgctggagagtgagctgtaggctgaaagaaacgttcctgggacagaaacacccagctgggaaagtgtacctgagcccatagaaaatgccacangcnggnggattaacatatggtggggccgaaacccctgnctgcctggaagaagaggaaagttttccgg

SEQ ID NO: 86342 - DNA, 783 bp, Homo Sapiens
tgcctgacgatgcatacgtactcactgaagatggtttaagactgagaactccgtctcttagagctgcagaatttcatcgcccgggattggaagctggaccctgtcctgtaccgcaagtgccagggagacgcttctcgtctttgccacacccacggttggaatgagaccagtgaatttatgcctcagggagctgtgttctcttgtttatacagacacgcctaccgcactgaggaacagggaaggaggctctcacgggagtgccgagctgaagtccaaaggatcctacaccagcgtgccatggatgtcaagctggatcctgccctccaggataagtgcctgattgatctgggaaaatggtgcagtgagaaaacagagactggacaggagctggagtgccttcaggaccatctggatgacttggtggtggagtgtagagatatagttggcaacctcactgagttagaatcagaggatattcaaatagaagccttgctgatgagagcctgtgagcccataattcagaacttctgccacgatgtggcagataaccagatagactctggggacctgatggagtgtctgatacagaacaaacaccagaaggacatgaacgagaagtgtgccatcggagttacccacttccagctggtgcagatgaaggattttcggttttcttacaagtttaaaatggcctgcaaggaggacgtgttgaagctttgcccaaacataaaaaagaaggtggacgtggtgatctgcctgagcacgacatatcctaggagtcca

SEQ ID NO: 86343 - DNA, 1102 bp, Homo Sapiens
  misc_feature (189)..(205): n is a, c, g, or t
tgaatcattaatgatgtctcacaaattactgtgtacctaagtggtgtgatgtaaactacctggaaacaaaaacagcagttgcattgattttgaaaacaaacccccttgttatctgaacatgttttcttcaggaacaaccagaggtatcacaaacactgttactcatctactggctcagactgtactacnnnnnnnnnnnnnnnnncctgaaaaagaaaccagaaaaaaatgtactcttactgagataccctctcaccccaaatgtgtaatggaaaatttttaattaagaaaaacttcagttttgccaagtgcaatggtgttgccttctttaaaaaatgccgttttcttacactaccagtggatgtccagacatgctcttagtctactagagaggtgctgccttttctaagtcataatgaggaacagtcccttaatttcttgggggcaactctgttttatcctacaactaacacagcattggtttgttaaagagctttcaatgtatattaaaaccttcaatactcagaaatgatggattcctcccaaggaaaccctttactaaccctaaagctttcctcaaatgtttggaaaatttcaagtgaaatgggaaaggaaaaacccacctgggctttttcaaaactttaaacttggcaaaaaagtataccctggggcttaaatttcccaccctcaaagcccctttcccatacaataaaattttagggtttcccccttccccgctaaaaggagggggggcaaaaattttatccagtcccgcggtaaaaaggttttaaacaactctattttgggaaatttcggggccgccccttgtggaacacctctccacctgggcgggttctctgggggtggaccacattgtttatatcaacggggaatttatataatatgggagcggggaaaaacaaaagaaagatcaatattatataagtgtcggccgagaagaatacgctttttgttcgccaccaaccccacaacaagtcgttggtgtggttaaaaacatagcttccccaacacgtaacgcgtagtgtgttttttatagaacacccgaggcgcgtgagatattcttctacaacgggcgggcgct

SEQ ID NO: 86344 - DNA, 1143 bp, Homo Sapiens
  misc_feature (264)..(312): n is a, c, g, or t
cagtcgacggtaccggacatatgcccgggaattcggccattacggccgggagatttggatagtctaaaacagattttaaaaaataattcagatggggctttatcataattaggaggggtggctagtactgctcagccccagttgcatgttaggattatctgcagaccctgggtcacgccctgagagattccattttatctgtttgtggtaggacccaggcatttacagttttaatcaaattaaatttaatctacttttaaaaannnnnnnnnnnnnnnnnnnnnnnnnnnnnnnnnnnnnnnnnnnnnnnnntatgtaggttataattatgcttctgtaactatttctgtatatggggggagagcacatcataattttttaacaacagtttgtcgattacattatagtgtgcaaagttttacataatttaatgcttcttcccagggactactattatacagtgggaaccggtcttacagtgactggtcttagattatacaacagttaggaggaaccgggatcggaagccacagacatctgacctttaatctactatctttctcaccacaccagtattctgacctcagagtcctcaactgaaactgatgcgatcttgaacttatttcatcttcagaactttatgtcattgtgaacgtactttttgcctgtggctatgttctgtaagttagctttacacaaaatactacaaggcacagtgaacttcattcaaatgcagtgtggaactctcaggtttccttggtctgcctcagtcttctactcatcagcaccacactgtcaaaatgttggacattacaaggggcgaacatagacataaataaaaaatattggtattgcatagacacttgatgcctaaacctaataattattaacttttatgtgcaagcttgggttcttgactaattggtaaatgataaatgaactagattagatccaattattagaaaagcactcttaagagtgcaatgaatgtgatttgaaaacttgaaagcagcctagattttactatatttgttattgttatcaatgggggtttgtcaaccttaaaaattattttttatgtaaagatacctaggaatttctagtaactgtatttgttttaataaactttgactttgctgtaaa

SEQ ID NO: 86345 - DNA, 2717 bp, Homo Sapiens
ctaccaaccgtcgttctctgcgtcagcaccacactgtcaaaatgttggacattacaaggggcgaacatagacataaataaaaaatattggtattgcatagacacttgatgcctaaacctaataattattaacttttatgtgcaagcttgggttcttgactaattggtaaatgataaatgaactagattagatccaattattagaaaagcactcttaagagtgcaatgaatgtgatttgaaaacttgaaagcagcctagattttactatatttgttattgttatcaatgggggtttgtgaagtcgtggcccgttagcaggaagcctaacagtcgccccgacgctagtgagggacccaatctgagtccccggacagccgaatccaagccgtgtgtactgcgtgctcagcactgcccgacagtcctagctaaacttcgccaactccgctgcctttgccgacaacatacccaaaacgatcagtgtgcgtgtgaccaccatggatgcagagctggagtttgccatccagcccaacaccaccgggaagcagctatttgaccaggtggtgaaaactattggcttgagggaagtttggttctttggtctgcagtaccaggacactaaaggtttctccacctggctgaaactcaataagaaggtgactgcccaggatgtgcggaaggaaagccccctgctctttaagttccgtgccaagttctaccctgaggatgtgtccgaggaattgattcaggacatcactcagcgcctgttctttctgcaagtgaaagagggcattctcaatgatgatatttactgcccgcctgagaccgctgtgctgctggcctcgtatgctgtccagtctaagtatggcgacttcaataaggaagtgcataagtctggctacctggccggagacaagttgctcccgcagagagtcctggaacagcacaaactcaacaaggaccagtgggaggagcggatccaggtgtggcatgaggaacaccgtggcatgctcagggaggatgctgtcctggaatatctgaagattgctcaagatctggagatgtatggtgtgaactacttcagcatcaagaacaagaaaggctcagagctgtggctgggggtggatgccctgggtctcaacatctatgagcagaatgacagactaactcccaagataggcttcccctggagtgaaatcaggaacatctctttcaatgataagaaatttgtcatcaagcccattgacaaaaaagccccggacttcgtcttctatgctccccggctgcggattaacaagcggatcttggccttgtgcatggggaaccatgaactatacatgcgccgtcgcaagcctgataccattgaggtgcagcagatgaaggcacaggcccgggaggagaagcaccagaagcagatggagcgtgctatgctggaaaatgagaagaagaagcgtgaaatggcagagaaggagaaagagaagattgaacgggagaaggaggagctgatggagaggctgaagcagatcgaggaacagactaagaaggctcagcaagaactggaagaacagacccgtagggctctggaacttgagcaggaacggaagcgtgcccagagcgaggctgaaaagctggccaaggagcgtcaagaaactgaagaggccaaggaggccttgctgcaggcctcccgggaccagaaaaagactcaggaacagctggccttggaaatggcagagctgacagctcgaatctcccagctggagatggcccgacagaacaacgagagtgaggctgtggagtggcagcagaaggcccagatggtacaggaagacttggagaagacccgtgctgagctgaagactgccatgagtacacctcatgtggcagagcctgctgagaatgagcaggatgagcaggatgagaatggggcagaggctagtgctgacctacgggctgatgctatggccaaggaccgcagtgaggaggaacgtaccactgaggcagagaagaatgagcgtgtgcagaagcacctgaaggccctcacttcggagctggccaatgccagagatgagtccaagaagactgccaatgacatgatccatgctgagaacatgcgactgggccgagacaaatacaagaccctgcgccagatccggcagggcaacaccaagcagcgcattgacgaatttgagtctatgtaatgggcacccagcctctagggacccctcctccctttttccttgtccccacactcctacacctaactcacctaactcatactgtgctggagccactaactagagcagccctggagtcatgccaagcatttaatgtagccatgggaccaaacctagccccttagcccccacccacttccctgggcaaatgaatggctcactatggtgccaatggaacctcctttctcttctctgttccattgaatctgtatggctagaatatcctacttctccagcctagaggtactttccacttgattttgcaaatgcccttacacttactgttgtcctatgggagtcaagtgtggagtacgttggaagctagctcccctcctctcccctaccactgtcttcttcagggtcctgagatttacacggttggagtgttatgcggtctagggaatgagacaggacctaggatatcttctccaggatgtcaactgacctaaaatttgccctcccatcccgtttagagttatttaggct

SEQ ID NO: 86346 - DNA, 969 bp, Homo Sapiens
agaaagaactatgttgctgctggagatcaatgaagccgagtgaatgggggctgaatgtgcgagtccatagctgaagaggagcgccagatggtggaggaatacacttatttatgaaactgtcttgagttcttcttgaattgccagttttcagcctcctcatgcctccgtctcctttagacgacagggtagtagtggcactatctaggcccgtccgacctcaggatctcaacctttgtttagactctagttaccttggctctgccaacccaggcagtaacagccaccctcctgtcatcgccaccaccgttgtgtccctcaaggctgcgaatctgacgtatatgccctcatccagcggctctgcccgctcgctgaattgtggatgcagcagtgccagctgctgcactgtggcaacctacgacaaggacaatcaggcccaaacccaagccattgccgctggcaccaccaccactgccatcggaacctctaccacctgccctgctaaccagatggtcaacaataatgagaatacaggctctctaagtccatcaagtggggtgggcagccctgtgtcagggacccccaagcagctagccagcatcaaaataatctaccccaatgacttggcaagaagatgaccaaatgcagcaagagtcacctgccgagtcagggccctgtcatcaatcgactgcaggcccttcatggagtacaacaagagtcacatccaagggagctgtccacatcaactgtgaccgatacgaccagccggcggacaactgcagcccggccaacgacgcacctgccacacgacctcgaacgtccatgtaccggaccagccacgcacactccacccacgagcgatcctcctccaccgaacagaacaacgacacacagacggcgccactcccactcaacgcaagccacaagagaccgccccagccacgccccacacgacccaacaccccaacgccc

SEQ ID NO: 86347 - DNA, 805 bp, Homo Sapiens
  misc_feature (73)..(126): n is a, c, g, or t
ccttcttcccaatgatcttgccattccgagtgaagaaacccaccaccttcctgccttcatgctccggctctannnnnnnnnnnnnnnnnnnnnnnnnnnnnnnnnnnnnnnnnnnnnnnnnnnnnnggtgcaggtacatgacattccgcacgttccggacggcccgggcagtcggagacaggatcactgtgtcacaactgtcatcactgtccccctcactgtccaaaatgtagtcccgggggaacatgattccacagcccatgatgtcccctttgtaacagcgtggcccaaaggggtcccccacaccactgccatggaagatcttcccatcgtctgcatgataagccacagaccctctgctccagccagggtgcctgttcttgggatagtccttccgtgccagccccagggcgatgtagcatttctctccagggtccacgatctccacctcgaagtagtggctgcgggtgctgagtgggtgccgggcctgggccagccccacatccacgatgcttttgcccttccctaagtactccagcagagtcccacagactctgacatcatgtagccggccccattcatcctcgtaactgtccaccatcatgacgctgtcgtcctcacggcccagctcagcgttgaggtgcagccgcacctcctcacccagggagtgcatgcccactgctgggaacagtccatctggggacatgggcatgatggtagagcccacccgcttcccatttttggtgaagaagatctgggcggtctgcacatcaaaggacacaggctcaccgccacagccaaaccg

SEQ ID NO: 86348 - DNA, 1521 bp, Homo Sapiens
  misc_feature (1194)..(1194): n is a, c, g, or t
  misc_feature (1335)..(1335): n is a, c, g, or t
  misc_feature (1408)..(1408): n is a, c, g, or t
  misc_feature (1455)..(1455): n is a, c, g, or t
ggccggtacggtccggtttcccgggatatcgtcgacccacgcgtcggtaggaccccgccacggcgggaccgcccggccggccccagcccgcgcctctccgtgccgcccgcgctccgatccggccctctccgcgtccccgcccgcgcggccggaccgggcagccagaagaacatcatttttcttctctgggaaggtgaacatttgtagcattgatttcccggatctggtaacatggcaaaagatgccggtctaattgaagccaacggagaactcaaggtcttcatagaccagaaccttagtcccgggaaaggcgtggtgtccctcgtggccgttcacccctccaccgtcaacccgctcgggaagcagctcttgccaaaaacctttggacagtccaatgtcaacattgcccagcaagtggtaattggtacgcctcagagaccggcagcgtcaaacaccctggtggtaggaagcccacacacccccagcactcactttgcctctcagaaccagccttccgactcctcaccttggtctgccgggaagcgcaacaggaaaggagagaagaatggcaagggcctacggcatttctccatgaaggtctgcgagaaggtgcagaggaaagggaccacttcctacaacgaagtggcagacgagctggttgcggagttcagtgctgccgacaaccacatcttaccaaacgagtcagcttatgaccagaaaaacataagacggcgcgtctacgatgccttaaacgtgctaatggccatgaacatcatctccaaggagaagaaggagatcaagtggattggtctgcccaccaactcggctcaggaatgtcagaacttagaggtggaaagacagaggagacttgaaagaataaaacagaaacagtctcaacttcaagaacttattctacagcaaattgccttcaagaacctggtgcagagaaaccggcatgcggagcagcaggccagccggccaccgcccacccaactcagtcatccaactgcccttcatcatcgtcaacaccaagcaagaagaacggtcattcgactgcagcatctccaatgacaaatttgagtatctgtttaattttgacaacacatttgaaatccacgatgacatagaagtgctgaagcggatgggcatggcttgcgggctggagtcggggagctgctctgccgaagaccttanaatggccagaagtctggtcccaaggctctggagccatacgtgacagaaatggctcagggaactgttggaggcgtgttcatcacgacggcagggtccacgtctaacggcacaaggttctctgccagtgacctgacaaacggntgcaaaatgggatgctggccacaagctccaatgggtctcagtacagcggctccagggtggagactccggtgtnctacgtcggggaggacgacgaggaggacgatgacttcaacgagaatnacgaggacgactgacgtcctccccacttcagattcggcttcaggaaaacgtttagcgaaaagaaac

SEQ ID NO: 86349 - DNA, 633 bp, Homo Sapiens
atgacgtggtccatcttcaacttctgagcacagagtgattccggatgaattatacaacagatggacttcagttccgcacccttgcagaacgtcgccaccctggacttcagttttgtgacaagcccgttattggcatccaccatcgctggggtgccagtggaggccacgcttactaatctcgaccagtcgatacagaactttttcaggctcttctcaacacgcaaaaagatctcgttgccagattttgaacccgtcatgggcaccgtgtccagaagttcttcggacacatcgaaattctcatcgacaccacggatgaatatggccaactgggtggtattatttatatccgtgatctcatcgattgcgatagaatatgccacaaaagacctgattttttcacgtaacttctcccataagttcccagctaggtcctctacaggctgcacgggggatttctgggttggacttgggtttgcaaacacttgtttttgctcgggacactcggtgtctgacgagcctaagagatacttcctgagcccttttttcagctcgtgaagcttctcgtcacgcattctttccatatactggtcataatgcttgctgtgattggtttgatagtggcgtcttaggtta

SEQ ID NO: 86350 - DNA, 587 bp, Homo Sapiens
cacagagccggcctccagcttgctggggcctgcagggaggggagctgccttgccaggggtgggcaaggccccctccaagctcatcaggttattcttcttgagcaaatctgggtactctggggttccagacacgttctctgtcaggaatttcatgaggtgtgtggggctttcaaggggagtgaggtccgtctcatattccatgccatggtagtacctctttccttggtcattcctgcccccagtgctggaggacaatatccgcttctccttgggacccatgtagtaatcatagaggaagctcaaggccgcaacactgtcatcatctccattgactctcatcatggcctttgtggcagctgtcaacgggttttctaggtacgtcttccaggcctcatcctcactagtgtaagagaatttctgcaagttgactgggtcgttctttagcagccgcacagacctgaaatcaagttcattcgacatcttcctgctcccaagctccgacgatcagcactgaggctctgctgaccgcttgtctctaattcttgcctgacacagacattctctgcccccgaaagtgtttgatttat

SEQ ID NO: 86351 - DNA, 587 bp, Homo Sapiens
ggagtccaggaccggcccctcctccacggatggccagcttcctcctgactgcccccaagcccggctgtgttaagcacttcgcgtcgatataaagcattggtatttgacattttaacagtaacaaacttgccagtgctttacacactgccagcttccagagcttatcatctgtgctcccagaacagacgccaaggtcatgctcccagccggattgtcgtagcctcgccgccgtgatgaggcaggtgtggaggccccagcagccttcccggcgctggcgtggaggcccctcccgcggatcacctgaagcagggccacgttgcattgcagttgcacagtattgtaaggatcaagcagcgatgtcctaaccgtaaacgaagaggaaggtgaaatgaaggcaaagagaatcaaccacttcccaaaacttggccacaaaccgttacagaataagtcctgcaaagtggatcaaagtgacccactgctacctcaggcccagatggtgtgacctgcgtggaaatcatataatgtccctaacattattgcaatagagccactaacgggccattttctaacccacactgttgacatcg

SEQ ID NO: 86352 - DNA, 583 bp, Homo Sapiens
aatgctaattgataatataaataccccctgcttaaaaatggacaaaaagaaactataatgtaatggttttcccttaaaggaatgtcaaagattgtttgatagtgataagttacatttatgtggagctctatggttttgagagcacttttacaaacattatttcatttttttcctctcagtaatgtcagtggaagttagggaaaagattcttggactcaattttagaatcaaaagggaaaggatcaaaaggttcagtaacttccctaagattatgaaactgtgaccagatctagcccatcttactccaggtttgatactctttccacaatactgagctgcctcagaatcctcaaaatcagtttttatattccccaaaagaagaaggaaaccaaggagtagctatatatttctactttgtgtcatttttgccatcattattatcatactgaaggaaattttccagatcattaggacataatacatgttgagagtgtctcaacacttattagtgacagtattgacatctgagcatactccagtttactaatacagcagggtaactgggccagatgttctttctaca

SEQ ID NO: 86353 - DNA, 582 bp, Homo Sapiens
ggtcgtgctctggcaagagttccaagagggtctggactttactggagaacttccggaacccaaaaggaggatcgtacttggattcagcttcactgtctttgggggccttctgcacaaaagggagtaagtccacgctatacctgtgctcaaataacagcgccattgatgtcttggcaaacttgggacgacattccttctgcaagacttgctgagcatatttctgagctctctggaatgaaatcacaccaatctgggttttaaaaactctcctgcattaaaaatatactcttctagatgacaatttgtcctatgatgtctgatgtagctcccgtgttgattactgtcttttaacacagaatatttgctttttagagttaagtttggctcagaaacttgaagaaacaacctgggagaatcacatgacaaggagataaacacagcagggtattcatttcattgcacaggcaaagcaagaaggactcctgcctcccacccccagcctaacactgttcaaatacatttggggtgaaaatgtacttcggggtgtctaagacttcatgtttcataaaattctgatacatt

SEQ ID NO: 86354 - DNA, 894 bp, Homo Sapiens
  misc_feature (65)..(116): n is a, c, g, or t
cacgcgcccctcctccgcatctgagcgggggagcggcggcccccagctgaatgggcgcgagagcnnnnnnnnnnnnnnnnnnnnnnnnnnnnnnnnnnnnnnnnnnnnnnnnnnnnccccctcattagtatgcggacgaaggcggcgggctgcgcggagcggcgtcccctgcagccgcggaccgaggcagcggcggcacctgccggccgagcaatgccaagtgagtacacctatgtgaaactgagaagtgattgctcgaggccttccctgcaatggtacacccgagctcaaagcaagatgagaaggcccagcttgttattaaaagacatcctcaaatgtacattgcttgtgtttggagtgtggatcctttatatcctcaagttaaattatactactgaagaatgtgacatgaaaaaaatgcattatgtggaccctgaccgtgtaaagagagctcagaaatatgctcagcaagtcttgcagaaggaatgtcgtcccaagtttgccaagacatcaatggcgctgttatttgagcacaggtatagcgtggacttactcccttttgtgcagaaggcccccaaagacagtgaagctgagtccaagtacgatcctccttttgggttccggaagttctccagtaaagtccagaccctcttggaactcttgccagagcacgacctccctgaacacttgaaagccaagacctgtcggcgctgtgtggttattggcaagcggaggaatacctgcacggattagaactgggccacaccctgaaccagttcgatgttgtgataaggttaaacagtgcaccagttgagggatattcagaacatgttggaaataaaactactataaggatgacttatccagagggcgcaccactgtctgaccttgaat

SEQ ID NO: 86355 - DNA, 856 bp, Homo Sapiens
gggaatatgagctaggtccggatcctgttagacaccggcgggcgcgagccgttgcagttctctttgggtgatcgcgccttccctcttcaacggatccctccccgcctccatcctcgttctgtgggagagaccagccttctggtgctgcagtcaggaatggagcttgacagcgctctggaagccccatcgcaggaagactctaatttgtccgaggagttgtctcactccgcctttggacaggccttctccaagattttacactgtcttgcccgcccggaggcacgacgaggcaatgtaaaagatgcagttcttaaagacctcggtgatctaatagaagccacagaatttgataggttatttgaggggactggtgcacggctccgcggaatgccggagacactggggcaggtagcaaaagccctggagaagtatgcagccccctccaaggaggaggaaggtggaggtgatgggcactccgaagcggccgagaaagcagccccaagttgggttactgtttcttaaactgttaggggaaagttgagacctgctaagaattccctgggtcggccctgcatggcagacgggcctgcatcacttggcagggacccgtttatattttttgccatcaccacccggtttggagcaaccatggaccacctccgagaatctcgggaagttggctagggaggggctccccctcactgctttcagttacctgaatgccggtccgtggccaggattcctactggggggaaaatggagaatgagcaaggggaaaacttttcggggataaataggggctttcctcaaacccggatttgtgataaggaaatccctgcgaaaaataaaccccggc

SEQ ID NO: 86356 - DNA, 582 bp, Homo Sapiens
tggtgttccatagtggctctcattgcattcatttagttcttcaagttctagttcgggagagttaatataatacaaatcacacagacgcctagcattttcatagccatctttaataacttcaagtacattgcagtttggatttatgcttccaatgtgttttcgatgagatggacttcctttgccttttccaccaaacaataaagagtgctgattgagtaacattctaattgaaatgcgactcatgtagaatcgatccaaaaagtactgaacattctgactggtgacaggatccaccccaaagctctccttgtattcaatcacaccctgggccattgtgggaatgacatcattgtgtcggtttctgatccgtatcacagtatctataaagtcataaatagctttagcatcctcagcacttttgtccttaaaatcaagaagctcctgaagactctggatataccagctttgtaccaattgaacggatggtgtcctgagaagattatctggaaggagacttatttctttcattatatttgccagtctgacaggcaactcttgccgcaccaacataaatgaggtctt

SEQ ID NO: 86357 - DNA, 582 bp, Homo Sapiens
ggaaccgtgcctgctgctgccttaatgtttccagagcgacactcccatgtatacgatctaaagcctcccctataggtaatcccgaggggttctcatcaatgaagctattcagatgtgaaggaagaatggggccgggttgtgcaatggctctcagaggactgtggccttcttgcagcatgggagggggctgctgctccggaattacagcttctgcaggaggagactgtggccgatgagcaactgcactattaaaaaaagcattgttgggtcccgcctgatatgcaggagaaagctgaggaggtggctgctgaggctgctgattcaactgactttgctgctggactacctgatttggctgaggtggtatctgatttggttgttcaggcaaattattctgctgctgatttaacaaggtgtgctgctgtggaattggaaagggtggtcttggtagctggggaaggggatgaaagtggcgattagggattgcatactgtgcgtggggagcaggaaggggaagatttatgtgtcttgggttgagattatctttgcgaggaaatttggtactcggataaacaacactag

SEQ ID NO: 86358 - DNA, 1874 bp, Homo Sapiens
  misc_feature (580)..(580): n is a, c, g, or t
  misc_feature (1337)..(1337): n is a, c, g, or t
cagtcgacggtaccggacatatgcccgggaattcggccattacggccggggggggaccagatggattgtagggagtagggtacaatacagtctggtctcctccagctccttctttctgcaacatggggaagaacaaactccttcatccaagtctggttcttctcctcttggtcctcctgcccacagacgcctcagtctctggaaaaccgcagtatatggttctggtcccctccctgctccacactgagaccactgagaagggctgtgtccttctgagctacctgaatgagacagtgactgtaagtgcttccttggagtctgtcaggggaaacaggagcctcttcactgacctggaggcggagaatgacgtactccactgtgtcgccttcgctgtcccaaagtcttcatccaatgaggaggtaatgttcctcactgtccaagtgaaaggaccaacccaagaatttaagaagcggaccacagtgatggttaagaacgaggacagtctggtctttgtccagacagacaaatcaatctacaaaccagggcagacaagtggaaatttcgtgttgtctccatggantaaaaactttcaccccctgaatgagttgattccactagtatacattcaggatcccaaaggaaatcgcatcgcacaatggcagagtttccagttagagggtggcctcaagcaattttcttttcccctctcatcagagcccttccagggctcctacaaggtggtggtacaggaacaaatcaggtggaaggacagagcaccctttcaccgtggaggaatttgttcttcccaagtttgaagtacaagtaacagtgccaagagataatcaccatcttggaagaagagatgaatgtatcagtgtgtggcctatacacatatgggaagcctgtccctggacatgtgactgtgagcatttgcagaaagtatagtgacgcttccgactgccacggtgaagattcacaggctttctgtgagaaattcagtggacagctaaacagccatggctgcttctatcagcaagtaaaaaccaaggtcttccagctgaagaggaaggagtatgaaatgaaacttcacactgaggcccagatccaagaagaaggaacagtggtggaattgactggaaggcagtccagtgaaatcacaagaaccataacaaaactctcatttgtgaaagtggactcacactttcgaaagggaaattcccttctttgggcaggtgcgcctagtagatgggaaaggcgtccctataccaaataaagtcatattcatcagaggaaatgaagcaaactattactccaatgctaccacggatgagcatggncttgtacagtcctctatcaaaaccaccaattgttatgggtacctcctcttactgttagggtcaattacaaggatcgtagtccctgttacggctaccagtgggtgtcagaagaacacgaagaggcacatcacactgcttatcttgtgttctccccaagcaagagctttgtccaccttgagcccatgtctcatgaactaccctgtggccatactcagacagtcaaggcacattatattctgaatggaggcaccctgctggggctgaagaagctctccttctattatctgataatggcaaagggaggcattgtccgaactgggactcatggaccgcttgtgaagcaggaagacatgaagggccatttttccatctcaatccctgtgaagtcagacattgctcctgtcgctcggttgctatctatgctgcttacctaccgggacgtgattggggattctgcaaaatatgatgatgaaaattgtctggccaacaaggtgattgagcttcagccatcacaaagtctcccagcctcaacgccac

SEQ ID NO: 86359 - DNA, 928 bp, Homo Sapiens
cgtaccataactctaagagaatggctcacattaagtaaataaatagccagtaaaccaatcgcatccatgttaccccttcctgcaacttcgcacttaacatgccaaatccaccctagtactctataatcaagaatcccttctcatccactcatcacccggtatttccttccagttcctcccttcagttgttgttgaaacaaagaattcatcaccacctcatctgcaaaaaggatttctcttctgacattagagtccctgctttttcaatatcaacaccagtatttcaaattgttcctttatttggcactctatagatttttatactccagggcattgttccatgtttggttgtgggagagaattgtctttattttttataaaatagaaaatggacccttgagaaagaggaaataagaaaagataaatagcatggtctcaagtagatcaatatgaatgtgaatatctaaaatttattcttttaaaaagctaaaaatttctgacaccccttaggaaggctttgcatattagagcttcagagagttggggaagaatgattaaaagtaagcaagtaatgagtaaactagatttgtaaaatctggaaggaatcttagagataagaagatgacagtatcataggaaagaaaaaggaatgatataaagaaaaatctgcaataaatgaaggactctaggttcatgcttcacgctctctgtgtggaactcacggttttccagagactgaggcgtctgtgggcaggaggaccaagaggagaagaaccagacttggatgaaggagtttgttcttccccatgttgcagaaagaaggagctggaggagaacagactgtattgtaccctactccctacatccatctggtcccccccggccgtaatggccgaattcccgggcatatgtccggtaccgtcgactg

SEQ ID NO: 86360 - DNA, 581 bp, Homo Sapiens
  misc_feature (473)..(473): n is a, c, g, or t
cccacccaacacgctggctcagctggaggaggcctgtcgcaggctagctgaggtgtcgaagcccccaaagcagcggtgctgtgtggccagtcagcagagggacaggaatcattcggccactgttcagacgggagccacacccttctccaatccaagcctggctccagaagatcacaaagagccaaagaaactggcaggtgtccacgcgctccaggccagtgagttggttgtcacttactttttctgtggggaagaaattccataccggaggatgctgaaggctcagagcttgaccctgggccactttaaagagcagctcagcaaaaagggaaattataggtattacttcaaaaaagcaagcgatgagtttgcctgtggagcggtgtttgaggagatctgggaggatgagacggtgctcccgatgtatgaaggccggattctgggcaaagtggagcggatcgattgagccctgnggtctggctttggtgaactgttggagcccgaagctcttgtgaactgtcttggctgtgagcaactgcgacaaaacattttgaaggaaaattaaaccaatgaagaagaca

SEQ ID NO: 86361 - DNA, 671 bp, Homo Sapiens
ataggacatcaatcaaagaatgccccagtggagctaaaaattagatgtttggatgcaatttcatctcttctgtacttaccacctgagcagcagactgatgaccttgtgaggatgacagaatcctggttttcttctttatctcgggatccactggagctcttccgtggcattagtagtcagcccttccctgaactacactgtgctgccttaaaagtgtttacggccattgtaaaccaaccctgggctcagaaacttatgtttaacagtccaggttttgtagaatatgtggtggaccggtctgtggagcatgacaaagcttcaaaggatgccaaatatgaactagtgaaagcacttgccaattccaagacaattgcagaaatctttgggaacccaaattatttgaggctcagaacttacctgagtgaagggccatactatgtgaaacctgtttccacgacagcagtagaaggagccgaatgatttcttctagagctcatgtagaggaccacgttttgaccaaaacttcttcctaaggcatttgactccatctatatttcacaaaagagacttcctttccccaagaattatcatggaatgtcagatgttactttgttaccaacactgttatatttctacattgaaatgcaaaggtggaactaggagtttggaat

SEQ ID NO: 86362 - DNA, 960 bp, Homo Sapiens
aaggtagcgaggcctgggtggcgaattcggcacgaggttcattatatgttgttggtatctgaagtagaagaaactgaaatctttaaaatttgtcttgaatactggaatcatttggctgctgaactctatagagagagtccattctctacatctgcctctccgttgctttctggaagtcaacattttgatgttcctcccaggagacagctatatttgcccatgttattcaaggtccgtttattaatggttagtcgaatggctaaaccagaggaagtattggttgtagagaatgatcaaggagaagttgtgagagaattcatgaaggatacagattccataaatttgtataagaatatgagggaaacattggtttatcttactcatctggattatgtagatacagaaagaataatgacagagaagcttcacaatcaagtgaatggtacagagtggtcatggaaaaatttgaatacattgtgttgggcaataggctccattagtggagcaatgcatgaagaggacgaaaaacgatttcttgttactgttataaaggatctattaggattatgtgaacagaaaagaggcaaagataataaagctattattgcatcaaatatcatgtacatagtaggtcaatacccacgttttttgagagctcactggaaatttctgaagactgtagttaacaagctgttcgaattcatgcatgagacccatgatggagtccaggatatggcttgtgatactttcattaaaatagcccaaaaatgccgcaggcatttcgttcaggttcaggttggagaagtgatgccatttattgatgaaattttgaacaacattaacactattatttgtgatcttcagcctcaacaggttcatacgttttatgaagctgtggggtacatgattggtgcacaaacagatcaaacagtacaagaacacttgatagaaaagtacatg

SEQ ID NO: 86363 - DNA, 577 bp, Homo Sapiens
tcactgtaccttctacaaaaatggctttataattatttaagtgtgttttaatgtgatttttttaaccaacttctgttacaggagtttcctgtgtctcattcctagactctggtttagtagattggcaggtggccaatgaatttgcctaacgaaatcacaaccaatgttgatactgagagaaggaccacactcttgagaatcaaggttctagactcaactcctttcatgttctagttttccacactcatggagaagttgttgggttctctttttatagctaatttatttacacagattagaagtatttggattcagacctcaaaaccacagtatgcaacaggaagaacactcaaccaaccgctctgttaccttgaataacatgggcaaatatagctgtctcctgggaggaacatcaaaatgttgacttccagaaagcaacggagaggcagatgtagagaatggactctctctatagagttcagcagccaaatgattccagtattcaagacaaattttaaagatttcagtttcttctacttcagataccaacaacatataatgaagggcctacacagaa

SEQ ID NO: 86364 - DNA, 582 bp, Homo Sapiens
atatttactggaaaataataagcactaaacagatcataaaaaaaataataagcactaaacagatcataaaaacattctcctatgcaaaggaattccaattaatatatctgtatattggttatcatggcgtaagcataattaatataggtacaagtacttcatttatattttttgctttcttcttttatgactatggtgtctttccccatccctctctttccttcttctcgactcacagtttttatccttatctttgtttctttttcttttatgtgggcttctactcctatcccttctatgtcgtgaacactcagcatccaaatagcttccaccagactgccgtgaatctactgaagctgatcgcctttcttcattcttttcggcatcatcctctgccttctcttgctcttcttgccaatgattgctgagttcttccatgtgcacatttatcacatctcgaatcacctcagtatatgatttcttggttatgtgaacattcttggctctataggactggcgtcttcttttataatctcgtacttctgccaggatttcaaggtagcactttggactttttagact

SEQ ID NO: 86365 - DNA, 1115 bp, Homo Sapiens
caagtgtcattacgatggatcactattaggtaccaagaagattttggaggtgatttttttccataggaggataccatctggcggctgcacattgtaacagtaaaggcagaaagctgtagtgataacctctctcctaaaagagttaactggtctcatccagcagaagctatcttaaatctgtgatgtgtcaggtgcagccaaatatcacaccttctgatcttagccatcccaaaccagtatctgtcccgagaggaaattccccccacccccagaagtttacagaaaactgcctcttcaagtgtttgccttattcagcttttcacttgtgccattaagcaagcactgtagcaaaagccacttccacatggccctggcagggagcactgctgctccatgctccattctcactgtacttggtattgtattttttataaataagatttttatgtaaagcttagaatttgatttacagggaccttgctgcagtaaataccatctcaattttgtgccactggttcagctgttagcacagtaaaaaaatcatttgtatcaaaggggcaaatgctttattaaggtagtaaaagggaacattacttctgcttttaggaagttactgcaagcacaagcatttgtgcttttaagcaaattaaagtagtaaaagaaaaacttaagtgaaacctttgccatcttcatgttttataatataaagcttacccaacaccagttaagccatggttaacctaaatgcctcatgccccagttcagcaaaaggaggaaaatgtgcctgcctcacagtcatcagtctttttaaatcttttttgttgttgttcttaagggtttggaatttgtctgcattccttgtctttaggggaaattcccttttcatattgtggggcttcccaaagctatagtcataaatttcttccagaaactattggtcataaatggcaactgggatggcttaaatttaccctactatactgacaaaaataccttgggaagggagttttccacggagggttcaaccctaatccctcggcaaccctttgatgaaccttcaccccttttcccccgggtttttggaaccgcttccccccctggccccgctaaatgca

SEQ ID NO: 86366 - DNA, 585 bp, Homo Sapiens
agccagttctcttcggggactaactgcaacggagagactcaagatgattccctttttacccatgttttctctactattgctgcttattgttaaccctataaacgccaacaatcattatgacaagatcttggctcatagtcgtatcaggggtcgggaccaaggcccaaatgtctgtgcccttcaacagattttgggcaccaaaaagaaatacttcagcacttgtaagaactggtataaaaagtccatctgtggacagaaaacgactgtgttatatgaatgttgccctggttatatgagaatggaaggaatgaaaggctgcccagcagttttgcccattgaccatgtttatggcactctgggcatcgtgggagccaccacaacgcagcgctattctgacgcctcaaaactgagggaggagatcgagggaaagggatccttcacttactttgcaccgagtaatgaggcttgggacaacttggattctgatatccgtagaggtttggagagcaacgtgaatgttgaattactgaatgctttacatagtcacatgattaataagagaatgttgaccaaggacttaaaaaa

SEQ ID NO: 86367 - DNA, 1399 bp, Homo Sapiens
ccgtgggtcgcccgcgaaatctgatccgggatgcggcggcccaatcggaaggtggaccgaaatcccgcgacagcaagaggcccgtagcgacccgcggtgctaaggaacacagtgctttcaaaagaattggcgtccgctgttcgcctctcctcccgggagtcttctgcctactcccagaagaggagggaagcacagtatgaagactttggagactcaaccgttagctccggactgctgtccttcagaccaggacccagctccagcccatccttctccccacgcttccccgatgaataaaaatgcggactctgaactgatgccaccgcctcccgaaaggggggatccgccccggttgtccccagatcctgtggctggctcagctgtgtcccaggagctacgggagggggacccagtttctctctccactcccctggaaacagagtttggttcccctagtgagttgagtcctcgaatcgaggagcaagaactttctgaaaatacaagccttcctgcagaagaagcaaacgggagcctttctgaagaagaagcgaacgggccagagttggggtctggaaaagccatggaagatacctctggggaacccgctgcagaggacgagggagacaccgcttggaactacagcttctcccagctgcctcgatttctcagtggttcctggtcagagttcagcacccaacctgagaacttcttgaaaggctgtaagtgggctcctgacggttcctgcatcttgaccaatagtgctgataacatcttgcgaatttataaccttgccccagagctgtaccatgaggggggagcaggtggaatatgcagaaatggtcccctgtccttcgaatggtggaaggtggataccatctaatgatttactgctggctattctctgatgtcctcaagcccagccagaaacctcctaagtggcaagcagcagccgggagaacccgattcatatctgggacgcattcactggagagctccgggcttcctttcgcgcctacaaccacctggatgagctgacggcagcccattcgctctgcttctccccggatggctcccagctcttctgtggcttcaacggactgggcgtgttttttcacggcccggcctggccgagactgcgaggtccgagccacatttgcaaaaaagcagggccagagcggcatcatctcctgcatagccttcagcccagcccagcccctctatgcctgtggctcctacgggcgcttccctggggctgtatgccctgggatgatggctcccctctccccttgcttgggagggcccccagggggggatcaccccaccttcggttttcatccccgatgggaaaccggttttctctccgggaggcccggcaagggttgctggagcctcccggggg

SEQ ID NO: 86368 - DNA, 1060 bp, Homo Sapiens
  misc_feature (50)..(92): n is a, c, g, or t
  misc_feature (96)..(130): n is a, c, g, or t
aggcacccacaaagaactgatagatcactatagggcgctagcgcgttatnnnnnnnnnnnnnnnnnnnnnnnnnnnnnnnnnnnnnnnnnnnccgnnnnnnnnnnnnnnnnnnnnnnnnnnnnnnnnnnncagtcgacggtaccggacatatgcccgggaattcggccattacggccgggggagggccaccgcccagcaatagacggtgcctcagcctgccgagccgcagtttccgtggtgtgagtgagtccgggcccgtgtcccctctcccgccgccgccatgggctgcacgttgagcgccgaagacaaggcggcagtggagcgaagcaagatgatcgaccgcaacttacgggaggacggggaaaaagcggccaaagaagtgaagctgctgctactcggtgctggagaatctggtaaaagcaccattgtgaaacagatgaaaatcattcatgaggatggctattcagaggatgaatgtaaacaatataaagtagttgtctacagcaatactatacagtccatcattgcaatcataagagccatgggacggctaaagattgactttggggaagctgccagggcagatgatgcccggcaattatttgttttagctggcagtgctgaagaaggagtcatgactccagaactagcaggagtgattaaacggttatggcgagatggtggggtacaagcttgcttcagcagatccagggaatatcagctcaatgattctgcttcatattatctaaatgatctggatagaatatcccagtctaactacattccaactcagcaagatgttcttcggacgagagtgaagaccacaggcattgtagaaacacatttcaccttcaaagacctatacttcaagatgtcgatgctcggtggcccaagcatccgcaacgaaacacaggggattcacctgtctgacggcagtgaccgccattatcttcgtgtggccctcaatgattatgaccttgtctggctggagaccagcacatgaccgattccttacagctcaactgtttgccgctttgtataccactcggccccacactt

SEQ ID NO: 86369 - DNA, 583 bp, Homo Sapiens
ctcatgttgctgttgatgttgaccacaaatacatcaaagtagtactgcgtgtcgggtttcagatcagagacggtgaagatgttcttgtttcctatgcagattttctgaatatcaaccttgggcctggagtagacatgacgccccagttttggagaaggctttgcctggaaactgcgttctttacctgaattatcagaaggaaatccaaagtgggcaaagtcaaaggggctgaagtccagaccaggtttcggtgccatcataaaagcatcatctgcactcagttttgcttccactgcacagagacttttgaaattgtgctctttgttgatgaccacacagtactgaatgggttgtttcagcaaagaggcagtggggcttggtttccaggccaaagtgaccgtggtgcgccccagtgaggtcacatctactcttgggtcatagggtaactcagggtatggctgatcagattctggagttgtggtggcatatactttgaaatgtgtgtctttctctgttgaaagaagatccaactgatataaaccggatggggaactagacgatataaaatactcaacatcattgt

SEQ ID NO: 86370 - DNA, 587 bp, Homo Sapiens
taaaaggcccatagcagccagttcaaaaacacccgacgtcatgtatttgagcatatcagtaacccccttaaatttaataccagataccttatcttacaatattgattgggaaaacatttgctgccattacagaggtattaaaactaaatttcactactagattgactaactcaaatacacatttgctactgttgtaagaattctgagaatgccatctatctagttctaacagtgaagttttactgtctattaatattcagggtaaataggaatcattcagaaatgttgagtctgtactaaacagtaagatatctcaatgaaccataaattcaactttgtaaaaatcttttgaagcatagataatattgtttggtaaatgtttcttttgtttggtaaatgtttcttttaaagaccctcctattctataaaactctgcatgtagaggcttgtttacctttctctctctaaggtttacaataggagtggtgatttgaaaaatataaaattatgagattggttttcctgtggcataaattgcatcactgtatcattttcttttttaaccggtaagagtttcagtttgttgg

SEQ ID NO: 86371 - DNA, 1161 bp, Homo Sapiens
ttgggactgctgaggggcaggcggctgcaggctaggggcggctcggagtccgctggccacccagctgagaggagaggcgcccccggggacgcactgagattatgaggctctggcctccactggccactcactcgtgaccctttccaccacggcggagccttccaagcctacctcctgccgtgtggtgatctacctgcagcgggagatgtcgggggacacctgcctgtgcccagcctcaggggccaagcccaagctcagtggcttcaagggaggagggttgggcaacaagtatgtccagctcaacgtgggcggctctctgtactacaccactgtgcgggccctgacccgccacgacaccatgctcaaggccatgttcagtgggcgcatggaggtgctgaccgacaaagaaggctggatcctcatagaccgttgtggaaagcactttggcaccattttgaattacctccgagatgacaccatcaccctccctcagaaccggcaagaaatcaaggaattgatggctgaagcaaagtattacctcatccaggggctggtgaatatgtgccagagtgccctgcaggacaagaaggactcctaccagcctgtgtgcaacatccccatcatcacatccctaaaggaggaggagcggctcatcgaatcctccaccaagcccgtggtgaagctgctgtacaacagaagcaacaacaagtattcctacaccagcaactctgacgaccacctgctgaaaaacatcgagctgtttgacaagctctccctgcgcttcaacggccgcgtgctcttcatcaaggatgtcattggtgacgagatctgctgctggtccttttatggccagggccgtaagctggcaaaggtgtgctgtacctccatcgtgtatgccacggagaagaagcagaccaaggtgggaattcccagaagcccgaatctatgaggagacactcaacgtcctactctatgagactccccgcgtccccgacaactccttgttgggagccacaagccgtagccgcagccaggcttcccccagtgaagatgagggagacctttgaactgcggggaccgtgtcccgccgcatccacgttcaagcgctacagcacttaccatggaccggcagctcggccacagtctacccatcgcgatggg

SEQ ID NO: 86372 - DNA, 584 bp, Homo Sapiens
  misc_feature (289)..(352): n is a, c, g, or t
catttactgagcacctcctgtgtgccaggctcctagaaagacagggagttggtgccctgcacagatgacaaactgccccagacagcagacagacaaacaaactgccccggacagcagacagacaaacagacacattgccctggacagcagagagacaaacagacacactgccccggacagcagacagacagacacgttgccccggacagcagacagaaaaactgccccggacagcagacagacagacaaactgccccagacagcagacagacaaactgccccggaaagnnnnnnnnnnnnnnnnnnnnnnnnnnnnnnnnnnnnnnnnnnnnnnnnnnnnnnnnnnnnnnnnacaccctgccccagacagcagacaagctgccctggacagcctgctcaccttgcctgccacagtgcatgccccacagggagaagccttccttctcacccagggagtccagccattttcacctcccctggtccatgctcaggaagtctggtcaccctggcaaactgcacctgacattgaggtcccttttcaccaaagatgcacaaggtgtccatgccgagccgacatcattcag

SEQ ID NO: 86373 - DNA, 582 bp, Homo Sapiens
atgactgtggcgagtagaacgactggcaattcttaaagattttgtttctgtaggaggagcagagtttatctttcttaggcttctaccagttttagaagaaacagttgttttgggtgtgctctgctgactccttgaagggtatcttccaggttcttgttgttggccacgacttgagaaagaagagctaagtttccctcttgttttaactggcaatctaacttgtggtcttcctcgtttgggtaggctgacttcttcctcttcttgagagtcatcttcatcttgttctacctcatactcttcctcctcactttgaccttcttcttcatcgccatcaacttcatcatcctcacctcccatactgtcttccacatcttcatcactttccaaggatggtctctgtctagaggagagtcttctagaacgttgctttggtcgacattctggacaaaaccagtctccttcaggcacagtcttgagctttggtcgaacacagtaggtatgatgacccctatcacagccatcacaaagaaccatgttttcagcatcgcctttctttcgacatatcctgcaacgcgcattcag

SEQ ID NO: 86374 - DNA, 646 bp, Homo Sapiens
  misc_feature (246)..(246): n is a, c, g, or t
ggaacacgggaaactcgctctcgctgtcggtttccacaggccgcccttcactgatgagttcgcttctctcgtcatctgcctcgtcccccttgctctctgccacggattgcacctcagggctcagtcgactggagtccaggctagtcaagtatgtagcagacgatgtggtggaataatctgaggtgatggtgctgacgttggccaaaaactcgctatgtttcgtttctggactggttgatttctgcnatggaaaaccttgccagggaggcctgggaagacgtgctgagcaaagtgccagagtcagagcctgtctcttcaaggtgggaggacttctgtgccagaagtgacctggggctctctttcaggatggcaaagcgacagctgagagttggtgacttgttgtgttttgagttgtgtggtggtgagggttcttcagaaggcgtgctctcttttcctagtgatatcttttcatcttttgtcgtgctggggtctttcctagtgctgttttctttggcaatgatgatcttctgttttctgcccagtgtctcactttcttttttggactcctctttagtatcattgtgacactgttccacattttctttcttaaaaaatacattgtccagttcatcttctgagcggccgc

SEQ ID NO: 86375 - DNA, 861 bp, Homo Sapiens
agtgttttacttccgcttgacctggcccggacgccagaaaatgttccacgtgggataccctgcgtggggttcactgtagtagctgcactaggtgattcttggagcgggcctgagagacaaggacatgtggatcccagtggtcgggcttcctcggcggctgaggctctccgccttggcgggcgctggtcgcttttgcattttagggtctgaagcggcgacgcgaaagcatttgccggcgaggaaccactgtgggctctctgactcctctccgcagctgtggcccgaaccggatttcaggaatccgccaaggaaggcgtctaaggccagcttagactttaagcgttacgtaaccgatcggagattggctgagaccctggcgcaaatctatttgggaaaaccaagtagacctccacacctactgctggagtgcaatccaggtcctggaatcctgactcaggcattacttgaagctggtgccaaagtggttgcgctcgaaagtgacaaaacttttattccacatttggagtccttaggaaaaaatctggatggaaaactacgagtgattcactgtgacttctttaaactagatcctagaagtggtggagtaataaaaccacctgctatgtcttctcgagggctctttaagaatttgggaatagaagcagttccttggacagcagacatccctttaaaaatagttggaaatgttcccaagtagaggtgagaaaaagggcactttggaaactcgcataatgacttgtattcctgtacttctatatatacatttggacgaactagaagtaaatatgtgtattggtgaaaaagaaatccagaaactaatggcagatcccggaaatccag

SEQ ID NO: 86376 - DNA, 1009 bp, Homo Sapiens
acgtgattactcgcttacgtgagcagaagtagttctggtcgtcgtctaccgtctcgctatagccgtttgagggaagaaggaggaaaattacccggtatcgttagagctacaccaaaattgcattgagccaaacttgccaccaagagcccaacaatcaccatgatgctgagcacggaaggcagggaggggttcgtggtgaaggtcaggggcctaccctggtcctgctcagccgatgaagtgatgcgcttcttctctgattgcaagatccaaaatggcacatcaggtattcgtttcatctacaccagagaaggcagaccaagtggtgaagcatttgttgaacttgaatctgaagaggaagtgaaattggctttgaagaaggacagagaaaccatgggacacagatacgttgaagtattcaagtctaacagtgttgaaatggattgggtgttgaagcatacaggtccgaatagccctgatactgccaacgatggcttcgtccggcttagaggactcccatttggctgtagcaaggaagagattgttcagttcttttcagggttggaaattgtgccaaatgggatgacactgccagtggactttcaggggcgaagcacaggggaagcctttgtgcagtttgcttcacaggagatagctgagaaggccttaaagaaacacaaggaaagaatagggcacaggtacattgagatcttcaagagtagccgagctgaagttcgaacccactatgatcccccctcgaaagctcatggctatgcagcgggccaggtcccctatgataagcccgggggctggccacaagggtataataacaattggcagaaggaacctgggttttgaaaaggattgaaggcgtgggtgcccttaatggtggaaggggtattggagggctatgtatggacttttgggtggcgctataaagtgaagggaatatggggttttttggggtcctgaaataaattttgggaaaaaagaaccctcccaatttactggc

SEQ ID NO: 86377 - DNA, 847 bp, Homo Sapiens
gggcatttcgtcttagccacgcagaagtcgcgtgtctagtttgtttcgacgccggaccgcgtaagagacgatgatgttgggcacggaaggtggagagggattcgtggtgaaggtccggggcttgccctggtcttgctcggccgatgaagtgcagaggtttttttctgactgcaaaattcaaaatggggctcaaggtattcgtttcatctacaccagagaaggcagaccaagtggcgaggcttttgttgaacttgaatcagaagatgaagtcaaattggccctgaaaaaagacagagaaactatgggacacagatatgttgaagtattcaagtcaaacaacgttgaaatggattgggtgttgaagcatactggtccaaatagtcctgacacggccaatgatggctttgtacggcttagaggacttccctttggatgtagcaaggaagaaattgttcagttcttctcagggttggaaatcgtgccaaatgggataacattgccggtggacttccaggggaggagtacgggggaggccttcgtgcagtttgcttcacaggaaatagctgaaaaggctctaaagaaacacaaggaaagaatagggcacaggtatattgaaatctttaagagcagtagagctgaagttagaactcattatgatccaccacgaaagcttatggccatgcagaggccaggtccttatgaccagacctggggctggtagagggtataacagcattggcagaggagctggctttgagaggatgatggcgtggtgcttatggtggaggctatggaggctatgatgattacaatggctataatgatgctatgatctggtcaactgttc

SEQ ID NO: 86378 - DNA, 653 bp, Homo Sapiens
  misc_feature (387)..(400): n is a, c, g, or t
gcctccgcctccatcataagcaccacgcctcatcctctcaaagccagctcctctgccaatgctgttataccctctaccagccccaggtctgtcataaggacctggccgctgcatggccataagctttcgtggtggatcataatgagttctaacttcagctctactgctcttaaagatttcaatatacctaaagcattgttcataaggaaggggtagggaggggagagaaaacattagttcattttatacaggtatttagttatacaagaaaacaatctagtcatagccatgaaactgactaatatttaaagccagatttcttatatttgcataggcaatgaccagaaattcactcaataaatagtaagacaatgtaaactttatagnnnnnnnnnnnnnnctcactcctctgaggcagagcccaaccttaggggtagagaggagtactgtaaataaatgttttaggagggaaataattccactcaactttcaacatttcaagtcttaaatccattggcagcatgtatagcaagtgggctaaaaagccagcctccaccaacagtccagcccacactacacatttcctttcgccaataaataccccagcctatgcttttagtaagaatcagcataggtaagcgcatgcttcaatg

SEQ ID NO: 86379 - DNA, 451 bp, Homo Sapiens
aatatatactgtaccatgggtgtgttaagaatagttatactttataataatggaacttcatattattgcaatgcatatttaaagagtacttgttgaaagcataccattcacctaaagttaaaaattctggtttatttaaagctataagaagaatcatttctgggcttgtgatgttaatattgcccccctactggggttatttgtccttgggttgaagggttggaaatcgtgccaaatgggataacattgccggtggacttccaggggaggagtacgggggaggccttcgtgcagtttgcttcacaggaaatagctgaaaaggctctaaagaaacacaaggaaagaatagggcacaggtggggatggatggttggttggatatgtcacttttcttatggtaaacaattaaatccatattctctctgcttaaaagaagaaagaaaatggattt

SEQ ID NO: 86380 - DNA, 642 bp, Homo Sapiens
ttgaatcccatgacatagttcagggggtacctccactggctctgtggaacctgtctggtacagctctaaaatgaagtcatggagtgggtgatgtttccccacaaataagacatcacctccaaggctgtttcttctggtctcttctggagtgaggtctgggtatacctcttctagggcagctcgtagccttcgctcatccacgaatggcaagagagcaacaccttgccatgcatatttcttcccattcaaatcaatagcaaaatcttcaggatagaagtcaattatactagaatcaggatcactcatgagcttccgccatgatggaggtagaaaattaccacttgcagctggaaatacccccataagttgttctagtggtttaaacggtttcgtacccttctcaaaatcagatggcatgtctgcaatgccttcaaagtctgaagcaaatggtgcataatgaaatggataataccacttccaggaagcacagccctggtaataatatctaagaacccagcaaagtccttcaacgtacgactgcacaactttccgacggaatttctcatcagctgcatccacattaaatttgttcttgtagtaccgctgcttccagccagcttcccataactctctctatccttg

SEQ ID NO: 86381 - DNA, 846 bp, Homo Sapiens
ttcatgtgtggaacccaaaatgcaagtcactatcacactgacatctccaattattcgagaagagaacatgagggaaggagatgtaacctcgggtatggtgaaagacccaccggacgtcttggacaggcaaaatgccttgacgctctggctgctctacgccacgctaagtggttccaggctagagctaatggtctgcagtcctgtgtgattatcatacgcattcttcgagacctctgtcagcgagttccaacttggtctgattttccaagctgggctatggagttactagtagagaaagcaatcagcagtgcttctagccctcagagccctggggatgcactgagaagagtttttgaatgcatttcttcagggattattcttaaaggtagtcctggacttctggatccttgtgaaaaggatccctttgataccttggcaacaatgactgaccagcagcgtgaagacatcacatccagtgcacagtttgcattgagactccttgcattccgccagatacacaaagttctaggcatggatccattaccgcaaatgagccaacgttttaacatccacaacaacaggaaacgaagaagagatagtgatggagttgatggatttgaagctgaggggaaaaaagacaaaaaagattatgataacttttaaaaagtgtctgtaaatcttcagtgttaaaaaaacagatgcccatttgttggctgtttttcattcataataatgtctacattgaaaaatttatcaagaatttaaaggatttcatggaagaaccaagtttttctatgatattaaaaaatgtacagtgttaggtattatttgaatggaaagacaccc

SEQ ID NO: 86382 - DNA, 1776 bp, Homo Sapiens
  misc_feature (138)..(151): n is a, c, g, or t
  misc_feature (1625)..(1688): n is a, c, g, or t
gtaatagggaatgggggtaagtgagaggtgagaaaagcaaggagagataaagtaggctgtgaacatagcgctcgttaaccaagccatactcatactgttgagatttccatcattttgaagtacattatcataacattnnnnnnnnnnnnnntgttaagaaaatgtatctaatttttaaagttatcactggaatatgctgaaatattttggctttttgtaaaatataaataatgaagacactgacttttgttgtgcttgtgaagctaatagatcatctccacgagacaggcagcaatgatgaattgcaatacgttattactgaagggaaaaggttcaagccaatattcacactgcaggtcaatgaaagagtaaggggccaaagcagtgagcttctgaagaaggttgaagatgacatgggagattagcaggaacagcctccttcactgactgctttgctcctgaggcttttccagttttatgtcaatcatatcttctctgcttctgtcctgtgtgctttccattcccggcaaagctgctgctacacgtcgaaagagctgctttacattgtagtccagcttttgcactagtttcaataaacataacattcagctctattggctttcctctctccctcctcaattgacacttgcctcttgtcagcaagatctgttttatttcctactagcatgatgataacatcacttcctctttctgttctgacatcatcaatccactttgtagtttgctggaatgagttaacatttgtgatatcataaacaacaactgccacagtggagtcacgaatgtagctaggaatcaagctcctgaaccgctcttgacctgctgtgtcccataattgcaagccggactgttcgatcctccaagtacatagtttttgataaaaagtcaatgccaattgttgcctgataggtgttgtcaaaactgtcatacatgaatctggtgatcaaagatgtctttccaacgctttgctcccccaggaacaccagcttgaatttcctcagcggattcccgaagtctccgcccgtggacattgtggaactagaggagcggccgccgcctcagcctagagacctcccggaccgatgctgctccagccagctgacgaaaaaggcgagcggaagggcgggcaccgagctctctcggcccctgcaaggcccggtggaggagcccggctggagggcagcaggactctccacagactggcagccgccgccgcctcccggcagagtagcctagcaccgagcgaggcccgcggctgggaagggaaggagggcggtgtcggcaggagccaggggtgtcctctggcttcccaaagctagggccgttccctccttccgcactcggctcccagacctggggaagagaagctgagggtggcggagccggaaccgcagacgtatctgggacctctcacgcgcagcgcctgagcttccacagctgccgccgccgccgcagcccaacctgctgagtgcgcgagcctcttggcgcaaggcgaaccagggcgcctccacaacatttttttaaatccccaaacctatgtactaaaaacaatggtgccggtgaaaacaaaataatggcaacttaaaaaaaggacaaaattgacnnnnnnnnnnnnnnnnnnnnnnnnnnnnnnnnnnnnnnnnnnnnnnnnnnnnnnnnnnnnnnnntaacgtccctaatttccccgttttctgttgaaaggccaaaaaacctaacttttttttaacccacaattttaagccaaaaacatcctgg

SEQ ID NO: 86383 - DNA, 401 bp, Homo Sapiens
gtgtggcagattaatgaatttttaaactaatgtgacctgtataaccagtccttatatcaaggaaagttattttcagagctatctttataatctttataatactgcctcatgtctcaaaagtaagaagtttgtttgtttctttacaggcaagtgtcaattgaggagggagagaggaaagccaaagagctgaatgttatgtttattgaaactagtgcaaaagctggatacaatgtaaagcaggtaagttgagttgaggttaccaaattgaaaaaatatgaaataattgtgtgagtattctattctctggtgtataggtttccttccacctggcaagagcaggccttacaaactagcagtatattttcaaacagtgaaaaatataaatgtggcatagtttttgg

SEQ ID NO: 86384 - DNA, 513 bp, Homo Sapiens
ggattgtttaaaccaatggtatcagagccaattcatatacacaggaagtctccacttccaagatctaggaagacggctacaaatgatgttgtatctgaaaatgctaattacctgagaacaccaagaactcttgtggaacagaagcagaatcctactgtaggctttgaattgtattccatggtgccatctatttgtcctctagaaactcttcataatgccctatctttaaagcaagtggatgaatttcttgcttccattgcttctccatcatctgacgttccacggaagaccgctgaaatttcctctacagctttacgttccagtccaataatgagaaaaaaagtatctttaaatacgtatacacctgcaaagatcctcccaacaccaccagctaccttaaagagcactaaagcaagcagcaaaccagctacaagtggaccttctagtgcagttgttcctaatacctcatctcggaaaaagaatataactagcaaaacagaaacgcatgaacac

SEQ ID NO: 86385 - DNA, 1113 bp, Homo Sapiens
cagtcgacggtaccggacatatgcccgggaattcggccattacggccggggttcatcaaccgtcagccacacaactgggaacaccactcaacccagtaaccagaccacccttccagcaactttatcgatagcactgcacaaaagcacaaccggtcagaagcctgttcaacccacccatgccccaggaacaacggcagctgcccacaataccacccgcacagctgcacctgcctccacggttcctgggcccacccttgcacctcagccatcgtcagtcaagactggaatttatcaggttctaaacggaagcagactctgtataaaagcagagatggggatacagctgattgttcaagacaagaagtcggttttttcagcctcggaaaatacttcaacatcgaccccaacgcaacgcaagcctctgggaactgtggcacccgaaaatccaaccttctgttgaattttcagggcggatttgtgaatctcacatttaccaaggatgaagaatcatatcatatcagtgaagtgggagcctatttgaccgtctcagatccagagacaatttaccaaggaatcaaacatgcggtggtgatgttccagacagcagtcgggcattccttcaagtgcgtgagtgaacagagcctccagttgtcagcccacctgcaggtgaaaacaaccgatgtccaacttcaagcctttgattttgaagatgaccactttggaaatgtggatgagtgctcgtctgactacacaattgtgcttcctgtgattggggccatcgtggttggtctctgccttatgggtatgggtgtctataaaatccgcctaaggtgtcaatcatctggataccagagaatctaattgttgcccggggggaatgaaaataatggaatttagagaactctttcatcccttccaggatggatgttgggaaattccctcagagtgtgggtccttcaaacaatgtaaaccaccatcttctattcaaatgaagtgagtcatgtgtgatttaagttcaggcagcacatcaatttctaaatactttttgtttattttatgaaagatatagtgagctgtttattttctagtttcctttagaatattttagccact

SEQ ID NO: 86386 - DNA, 2355 bp, Homo Sapiens
  misc_feature (81)..(81): n is a, c, g, or t
  misc_feature (668)..(677): n is a, c, g, or t
  misc_feature (1937)..(1945): n is a, c, g, or t
  misc_feature (1984)..(1992): n is a, c, g, or t
  misc_feature (2231)..(2240): n is a, c, g, or t
  misc_feature (2330)..(2330): n is a, c, g, or t
cgatagtgaattaacagaagtcactcagcactcgtgtggtgaacagactagagaagactgttttctcctagaggacaagancaggagaggagatatggaacagaatgactctgacacacgtagaataattcgctatccagatagtcatcaactttttgttggtaacttgccacatgatattgatgaaaatgagctaaaggaattcttcatgagttttggaaacgttgtggaacttcgcatcaataccaagggtgttgggggaaagcttccaaattgtggttttgtggtttttgatgactctgaaccagttcagagaatcttaattgcaaaaccgattatgtttcgaggggaagtacgtttaaatgtggaagagaaaaaaacaagagctgcaagagagcgagaaaccagaggtggtggtgatgatcgcagggatattaggcgcaatgatcgaggtcccggtggtccacgtggaattgtgggtggtggaatgatgcgtgatcgtgatggaagaggacctcctccaaggggtggcatggcacagaaacttggctctggaagaggaaccgggcaaatggagggccgcttcacaggacagcgtcgctgaagctccactgttggcaaagtcttggcagtggtacattattcatcgtgtttgcattcttgttaannnnnnnnnnggctttggaatgtgacacagcctttttgatcatttctttgatgtgaaaagcatcttgggttatcagttaaattgaggtggacattatttccccaatttcacaacaggattcacattgttaatttataaatctagacttggagaattaaggactgagaaatgaccatatcttaaactatctacgacaaagtgaacttaaaaggacatgcccactgaattcaggtcctttgagtacaaaaaaaatcttctgctgcacattttgtttaagtgttactgtttctgcctgttaatgctgggaacacaaatagtgcaatttgtgcaattggagaatcttgccttttttcttggctccccccaaaaatacaaaccaacagaaacttgttatgcactcatcaaaatgtactaatgggtactctgaactcattaacattgacatctgcaacaggaggcaacagggaaaaaatctcatcttcttttccagtagaaaatagtttgtgaaatgatgagggcattttatctgcttgctgtgaccagcgtgtgtacacataaaccttaacaagactacaagtatattccagaaggaaatcattttagttatgaactaaataataaaaattagaacttcaaatgcgatggtcttgactattagaccagatttagtagctccatatctaagatttttctacctgcccctcttcagtacagggatggctggctgctcaacacactcctcctccccttttttcctttctttaagctgtgtacagtgaaaattgtctttactgtatttttgttctctggtaatgtaataagcatgatggtgccttctattaatacatcattccagtcttgctggtaattttgtacagtatagtgtatgaattgctgtgctgcaaagccaaacagctgcaaaatgttgaaaaatcatcgaaatgtataaaaattgcagtatctttaaaatcagtaaaatggactagcatattatttatcttgttcttcagttaacaactttgtgttctctgtgggagggagggagtcctgtgtgtttgtggggagagggaaggaggaagtcagttatttgagtaagcctctagttgacttttctcttagcctgaatgtggacgttgaaacatatcacttcaggggcttgaaaaagtcagtcaacttgacgtacatttttattggacatttaaaagcaggcagaattctataaatggccaagtaagccctgaagtgaaggatactgcaaatttttcggagnnnnnnnnncgccagctcctttgaagggtttggcatttttcctaattnnnnnnnnnaagggaaacctgttcattccattttttgcccaattcccttgaaacttgatggtcaaacaaccccaagtgggcctccccgtaaatttaaagtcttgggaacgaaaaacctttttaattttttaccctggaaatccttttaaaaccaattttctggggaagcaaaaatttttgtaaacccgggcttggaaataaatttggcccaggcccttttaaaataaaaaaggtttcccgttttaaannnnnnnnnnagattttgggggcaaacaaccctcttatccccaaattttttatatagccctgggggagacccttacccaagttattctttaccccgggtntttttcctggaaaaggattttccaa

SEQ ID NO: 86387 - DNA, 800 bp, Homo Sapiens
aatggaggcatgtatatgggtacttccaacagtaagtggaaacacagatattcaagttgagatagcactggccatgcaaccattaagaagtgagaatgctcagttacgaaggcagttgagaattttgaaccagcaactcagagaacaacagaaaactcaaaaaccatctggtgctgtggattgcaaccttgaattgttttctcttcagtcattgaatatgtcactgcaaaatcaattggaggagtcactaaagagccaggaattactgcagagtaaaaatgaagagctgttaaaagtgattgaaaatcagaaagatgaaaacaaaaaatttagtagtatatttaaagacaaagatcaaactatacttgaaaataaacagcaatatgatattgagataacaagaataaaaattgaattggaggaagccctagtcaatgtgaaaagctcccagtttaagttagaaactgctgaaaaggaaaaccagatattggggataacattacgtcagcgtgatgctgaggtgactcgactaagagaattaaccagaactttacagactagcatggcaaagcttctctccgatcttagtgtggacagcgctcgctgcaagcctgggaataaccttaccaaatcactcttgaacattcatgataaacaacttcaacatgacccagctcctgctcacacttccataatgagctatctaaataagttagaaacaaattacagttttacacattcagagccactttctacaattaaaaatgaggaaaccatagagccagacaaaacctatgaaa

SEQ ID NO: 86388 - DNA, 1378 bp, Homo Sapiens
  misc_feature (1351)..(1351): n is a, c, g, or t
aattgtaggttgggagtggaaggtggtggctgctgctccgcagtgtcgggaagatggcgccgccggtggcagagagggggctaaagagcgtcgtgtggcagaagataaaagcaacagtgtttgatgactgcaagaaagaaggcgaatggaagataatgcttttagatgaatttacgcactaagcttttggcatcgtgttgcaaaatgacagatcttctagaagaaggtattactgttgtagagaatatttataagaaccgtgaacctgtcagacaaatgaaagctctttatttcatcactccgacatcaaagtctgtagattgtttcttacatgattttgcaagtaaatcggagaacaagtataaagcagcatatatttacttcactgacttttgccctgataatctctttaacaaaattaaggcttcttgctccaagtcaataagaagatgtaaagaaataaatatttccttcattccacatgaatctcaggtgtatactcttgatgtaccagatgcattctattactgttatagtccagaccctggtaatgcaaagggaaaagatgccattatggaaacaatggctgaccagatagttacagtgtgtgccaccttggatgaaaatcccggagtaagatataaaagtaaacctctagataatgccagtaagcttgcacagcttgttgaaaaaaagcttgaagactactacaagattgatgaaaagagcctaataaagggtaaaactcattcacagctcttaataattgatcgtggctttgatcctgtgtccactgtcctgcatgaactgacctttcaggcaatggcatatgatctactaccaattgagaatgatacatacaaatataaaacagatggaaaagaaaaggaggccatccttgaagaagaagatgacctctgggttagaattcgacatcgacatattgcggttgtgttagaggaaattcccaagcttatgaaagaaatttcatcaacaaagaaagcaacagaaggaaagacatcacttagtgctcttacccagctgatgaaaaagatgccccatttccgaaaacagattactaagcaagttgtccatcttaacttagcagaagattgcatgaataagttcaagcttaatatagaaaagctctgcaaaactgaacaggacctcgcacttggaactgatgcagaaggacagaaggtgaaagattccatgcgagtactccttccagttctactcaacaaaaatcatgataattgtgataaaataagagcaattctactttatatcttcagtattaatggaactacggaagaaaatttggacaggttgatccagaatgtaaagatangaaatgagagtgacatgattcgtaact

SEQ ID NO: 86389 - DNA, 572 bp, Homo Sapiens
atttttataacgtgagggctgaatgcagcccattctctggagaacttcctcacacaccgcagcaaagagaagactgaaagacaaacctgggtgcagccagagaggtccagatagatgagcttgtggcatccattccccaagttcagcctagggactccacgtaccccagctgggtctcattgttccagaactgcattagttaagattacccagacttggatttcaaaggaatactttcattgttccgtctgtaacacgaagtaattggggccagctggatgtcaggatgcgtgtggttaccattgtaatcttgctctgcttttgcaaagcggctaacctacacaaagcaagcccaggcagtataagaagccgagtaaatcatggccgggcgggtggaggccggagaggctccaacccggtcaaacgctacgcaccaggcctcccgtgtgatgtgtacacatatctccatgagaaatacttagattgtcaagaaagaaaattagtttatgtgctgcctggttggcctcaggatttgctgcacatgctgctagcaagaaacaagatccgcacat

SEQ ID NO: 86390 - DNA, 778 bp, Homo Sapiens
ggtgacagggcaaaggctaacctggctgtctagcaaggcttgcatagaagaggtaaacacgttgactcctgagtttaggggtttggcttagagattggtggatgaggcagggccagggggtcccgttggtgccatctgctgttgtgtgttgaaagccacttgcttctctgggcctgacatcccctcccctttcatcttccatgtttgaggattgtgtcacggtggagagaaactcaaaacttcctggagagaaatggaggtgtcatcctggtccccccgggcctgtttctcttatccttcacgaggaaaggaagaaaccaaaatcccaacccaagccattgcatgggcactgtccgaagcctgttctgcctcccagatgaataaatatataaaacaaagctctggcaggcaatgctttggtcttctctgtctttgaataaaacaaggccggcgaggtctcaggaagggttctgggcagggacgggactccaggcagatgttcacgccacgtcatcctccagactgaccatctgtctcgaggggtagctgtagccgtcctggttgtggcaaatgtggacctcatcctctgtggtcttctgatagacggggttgtcaaagttgatgctgttgatgttcttaagccgccagttcttccatagaaggaagacccccaggcaaaggaagacgaggagcacgatggggaggacaatggacagagccctcacgctactgggcttcttctcatttcctctgccagcaacgtcgcccagagcttagt

SEQ ID NO: 86391 - DNA, 1003 bp, Homo Sapiens
atctgagccccagactgccccgagtttctgtcgcaggctgcgaggaaaggcccctaggctgggtctgggtgcttggcggcggcggcttcctccccgctcgtcctccccgggcccagaggcacctcggcttcagtcatgctgagcagagtatggaagcacctgactacgaagtgctatccgtgcgagaacagctattccacgagaggatccgcgagtgtattatatcaacacttctgtttgcaacactgtacatcctctgccacatcttcctgacccgcttcaagaagcctgctgagttcaccacagtggatgatgaagatgccaccgtcaacaagattgcgctcgagctgtgcacctttaccctggcaattgccctgggtgctgtcctgctcctgcccttctccatcatcagcaatgaggtgctgctctccctgcctcggaactactacatccagtggctcaacggctccctcatccatggcctctggaaccttgtttttctcttctccaacctgtccctcatcttcctcatgccctttgcatatttcttcactgagtctgagggctttgctggctccagaaagggtgtcctgggccgggtctatgagaacagtggtgatgttgatgctcctcactctgctggtgctaggtatggtgtgggtggcatcagccattgtggacaagaacaaggccaacagagagtcactctatgacttttgggagtactatctcccctacctctactcatgcatctccttccatgggggttctgctgctcctggtgtgtactccactgggtctcgcccgcatgttctccgtcactgggaagctgctaatcaagccccggttgctggaagacctggaggagcagctgtactgctcagcctttgaggaggcagccctgacccgcaggatctgtaatcctacttcctgctggctgcctttagacatggagctgctacacagacaggtcctggctctgcagacacaaagggccctgctg

SEQ ID NO: 86392 - DNA, 481 bp, Homo Sapiens
cataacaaaacaaaacggaacaaaaaactagatatgtaatttctaaacacccagatcacaatgacaagatgccactccaaccatgggacaccttcatgatactaggtttgtacttcctggtctctgggatgacttcagattctgctggccaaggcaaattgaactcagttcaagatggccaccactggtagacgtgtagatagaaaagaggactggtcttgggaacatctttggaaaaaccaacaaacaatagttctagggagatgagaaaaaaattcaccttacagtgctaagaaagtgcattagaatggaattgccctttccttaaggagacagtttgggctctccccttgccaccggctctggtgttttggcttatgcgttccttcaggttgagctgagcagtgtgttatgggaagctgctcaatttcctttcattcaattccacctccttcctgaactctaatagaggttaaaaggg

SEQ ID NO: 86393 - DNA, 583 bp, Homo Sapiens
ggggcaaagtcttcacgcctaacccaaatgacttcctcgcttgcgctctccaggcctccattgatccccgacagggcagcttgcttcttgagctgtgccatgcgggacgcgtgactatccagggttttccggcctctttcccgttgactgatggaggtggcctgaagccgctcctgcaggtctctgtccactgaggcacccttcacggactcacagaactcatcatcgtcactgaggatgtctgtctccttgatgtcatcttgctcctcatactgagcaagatcaaactgctcctctacccatcggtcagtgtccccgccaccggggggctgctgggactctttctccgggctgcttgcggagacggcatcagaatcaatggtaaacctgtttcgagccagccgccgcctcctcctcccaagagacttgcttggggcagacactgcacacacacacaaaaatataaaaataaaacccccacatgctttacatgagatgaaaatccagaaagcaaaggacaggagaaaataaaaaccaaaacggtatgcattgaatgccttgaggtcctttggggcttaaagtc

SEQ ID NO: 86394 - DNA, 634 bp, Homo Sapiens
ttgtaaatataatgaggaagttttctggtagctgcagatgctgtgcaaaacagattaaattctatcgcatgagacatcattacaaatcttgtaagaagtatcaggatgaatatggtgtttcttctatcattccaaactttcagatctctcaagattcagtagggaacagcaataggagtgaaacatccacatctgataacacagaaacttaccaagagaatacaagttcttctggtcatcctacttttaagtgtcccctgtgtcaagaatcaaattttaccagacagcgtttactggatcactgtaacagtaatcacctatttcagatagttcctgtgacatgtcctatttgtgtgtctcttccttggggagatcctagccagattaccagaaatttcgttagtcatctaaatcagagacatcaatttgattatggagaatttgtgaatcttcagctagatgaagaaacccaataccaaactgctgttgaagaatcttttcaagtaaacatctgaaggctgtagacatctctgcatctttgtacctgcaagtgccatctttaagggggaaactacatgaagtcaccgttacagtaacttgatgtgtatattaataaaagtaattcagtcaaaaa

SEQ ID NO: 86395 - DNA, 767 bp, Homo Sapiens
agttctgggctggtcccgcacgcgctcggggttggagccagcgaccgtcggtagcagcatggctctcctctttctcctaccccttgtcatgcagggtgtgagcagggctgagatgggcaccgcggatctggggccgtcctcagtgcctacaccaactaatgttacaattgaatcctataacatgaaccctatcgtatattgggagtaccagatcatgccacaggtccctgtttttaccgtagaggtaaagaactatggtgttaagaattcagaatggattgatgcctgcatcaatatttctcatcattattgtaatatttctgatcatgttggtgatccatcaaattctctttgggtcagagttaaagccagggttggacaaaaagaatctgcctatgcaaagtcagaagaatttgctgtatgccgagatggaaaaattggaccacctaaactggatatcagaaaggaggagaagcaaatcatgattgacatatttcacccttcagtttttgtaaatggagacgagcaggaagtcgattatgatcccgaaactacctgttacattagggtgtacaatgtgtatgtgagaatgaacggaagtgagatccagtataaaatactcacgcagaaggaagatgattgtgacgagattcagtgccagttagcgattccagtatcctcactgaattctcagtactgtgtttcagcagaaggagtcttacatgtgtgggggtgttacaactgaaaagtcaaagaagttgtattac

SEQ ID NO: 86396 - DNA, 885 bp, Homo Sapiens
aagtccaacagggtttgggcagctcgggagggaagtccagtgactgaggggtacgttgatagagaggtgagggtcacccctcagccatagcccttcagcctttggcttcttcttagtaaccaattcagtaacggtcttagcctgaacttcaacctccttaaaaggcaaatttggggtcaaagaatttactgtcaaccttgtcaggggccaggaatccttggcagactacaaagatctctgcagattcatggcgagaggcttggggcttggtggcctggacacggcggaacagctgctgaaagatccatagcagaggctgatagtcacgagaacggaaaacctttgtgatgaagctgccaccacgggccaaaaagtcacaagccaaacgtagagccatcagtgtcaaatgggcttgtgagtaagcatcatggacccagctagccccaacgttgggggccccatcattgagcacaacatcaaccttccaggtcttcagctccttcctcagggcctgcctacaacgttctgttgtgatgtcctcctggagagtcaccacattggggagaggcttgattggaaccaggtccactcccacaataaggctggatacaggcataaacttggcagctacctgcagccatccccctggcgcagcacacaggtccagcaaggctcgggctttctgcaggaactgaaagcggcgattgagctggatcagcttgaaagcagatcgggaacggtaacccgtctccttcgccaagtgataaaacttgtctcgtcggctcttgccaactttgcccttcttgcccatggtggaaagggggagtatccctcaatctagacccagagccgctttctccacacttggaaccgcacaagtatccc

SEQ ID NO: 86397 - DNA, 861 bp, Homo Sapiens
aggggggagagtatgaagtcgacggcgcgccgaattcggcacgaggagaaagcggctctgggtctagattgagggatactccccctttccaccatgggcaagaagggcaaagttggcaagagccgacgagacaagttttatcacttggcgaaggagacgggttaccgttcccgatctgctttcaagctgatccagctcaatcgccgctttcagttcctgcagaaagcccgagccttgctggacctgtgtgctgcgccagggggatggctgcaggtagctgccaagtttatgcctgtatccagccttattgtgggagtggacctggttccaatcaagcctctccccaatgtggtgactctccaggaggacatcacaacagaacgttgtaggcaggccctgaggaaggagctgaagacctggaaggttgatgttgtgctcaatgatggggcccccaacgttggggctagctgggtccatgatgcttactcacaagcccatttgacactgatggctctacgtttggcttgtgactttttggcccgtggtggcagcttcatcacaaaggttttccgttctcgtgactatcagcctctgctatggatctttcagcagctgttccgccgtgtccaggccaccaagccccaagcctctcgccatgaatctgcagagatccttgtagtctgcaaggattcctgcccctgacaagttgacagtaattcttgaccccaaattgctttaagaggtgagttcagctagacgtactgattggtacaagaaagccaagtgaagcttgcgagtgaccatccttccgtactcgctgcttccgacgcactgtgatcctcagcacaactgaagataatg

SEQ ID NO: 86398 - DNA, 846 bp, Homo Sapiens
  misc_feature (519)..(581): n is a, c, g, or t
gggaagcgatggagtccgggaagagaagaaccaaagatgatacctggaaagcagatgacctcagaaaacatctctgggccatacagtcaggtggttccaaggaagaaagaaagcacagagagaagaagctgcgtaaggagtctgagatggaccttcctgaacataaggagccgaggtgcagggatcccgaccaggatgccaggagcagagacagggtggccgaagtccacaccgctaaggagagtcctcgtggggagagggacagagacagacagagggagaggagaagagacgcaaaagaccgggagaaagaaaagctgaaggagaaacatcgagaggcagaaaagtctcacagcagaggaaaggacagggaaaaagaaaaagacagaagggcccggaaggaagagctccggcagaccgtggcccaccacaacctgctgggccaggagacacgcgaccggcagctcctggagcgggcggagaggaaaggccgctcagtaagtaaagtaagaagtgaannnnnnnnnnnnnnnnnnnnnnnnnnnnnnnnnnnnnnnnnnnnnnnnnnnnnnnnnnnnnnnctgcagtacggagaccatctcttcctttctttccccttcttttacttagaatgtctttgtattcatttgctagggcttccatagcaaagcatcatagattgctgatttaaactgtaattgtattgccgtactgtgggctggaaatcccaaatctagattccagcagagttggttctttctgaggtctgcaaggaagggcctctgttccatgcctctctccttggcttgtagaaggcattcttgtccctatgactcttcacattgt

SEQ ID NO: 86399 - DNA, 1397 bp, Homo Sapiens
  misc_feature (1288)..(1323): n is a, c, g, or t
ggtatgaagagtctatgttacagagacccttgcctttcagacttcagtggatggtccgtctctgtctggaattcgtagatttgggatttgccagcccaacagtacggccatgacaattactagtttaaagtcagcaatctatgatgctttgctatggaagccctagcaaatgaatacaaagacattctaagtaaaagaaggggaaagaaaggaagagatggtctcagtagagatgaactcaggtgcagaatctgagtctcagcacaagggctactatgcagaagtgggtaaaggaatgagaacactcaggagctcggtgggcacacagtcatggggactaggcagttccaaggattgaaatacggataagcaggtcgagaaaagcgacatccagagaacttgtagatgagtgctccgtggtttgtgacattgaaaaatgagacaatgcctgcctcatagtctaggaaaaccccaatacgacagggaggcacagccataaagagagtcaaaaccttgggatcagaagaggaggagtcctcaaaagcattatattcacatgtattctgtaatcctataacccagtagccatattgaggtctatatctggagtaaacttttgaataatttacacttggatcaaaagcaaacccagagctcttccttttattcagactacttattttactgtgtacgcccaggatccaggcaatctttccagacacatctacttcccagtaatatttccccgaagagaaatattggcagccgaagacaccaaaagcagaaaaatcacatggatttgaattcttaaatgtgcaggtgcgtacagttttcacttgtctctgatccacagaaatagcaacattcgaagtggcactgcctggattcagcatcacgtccacccagtagtactggacatctgtcagctctttaagaacttgcagcatcccactcagatctggtactcggaatacactctttagtttcttggaaacagattttggcttcttcaatgtccagctttcactccttttcatgacgtcaatcacatcctgcagcatctctactgacgatcccctcaacctccgctggagatctgagatgagcgtgctggcatcctgcctctgctggaccagctggtctgtagctgctgccaggttatccagcacattcacctcaccttcctccagcttttgcagctctctctgctcctcattgtccaagatgactctcatttccccggccgtaatggccgaattcccgggcatatgtccgtaccgtcgactgnnnnnnnnnnnnnnnnnnnnnnnnnnnnnnnnnnnncgcccgcttcctcgctcactactcctgcgctcgtcgttcggctcggccgagtacgccctatatgattgatcatt

SEQ ID NO: 86400 - DNA, 411 bp, Homo Sapiens
  misc_feature (138)..(138): n is a, c, g, or t
  misc_feature (258)..(313): n is a, c, g, or t
tgcggccgcccgggcctgcgggaagcgatggagcccgggaatgagaagaaccaaagatgatacctggaaagcagatgacctcagaaaacatctctgggccatacagtcaggtggttccaaggaagaaagaaagcacangagagaagaagctgcgtaaggagtctgagatggaccttcctgaacataaggagccgaggtgcagggatcccgaccaggatgccaggagcagagacagggtggccgaagtccacaccgctnnnnnnnnnnnnnnnnnnnnnnnnnnnnnnnnnnnnnnnnnnnnnnnnnnnnnnnncgcaaaagaccgggagaaagaaaagctgaaggagaaacatcgagaggcagaaaagtctcacagcagaggaaaggacagggaaaaagaaaaagacagaa

SEQ ID NO: 86401 - DNA, 534 bp, Homo Sapiens
aggatcccgcagttaagggctaccagtactactggacatctgtcagctctttaagaacttgcagcatcccactcagatctggtactcggaatacactctttagtttcttggaaacagattttggcttcttcaatgtccagctttcactccttttcatgacgtcaatcacatcctgcagcatctctactgacgatcccgtcaacctccgctggagatctgagatgagcgtgctggcatcctgcctctgctggaccagctggtctgtagctgctgccaggttatccagcacattcacctcaacttcctccagcttttgcagctctctctgctcctcatagtccaagatgactctcacttcattgaaccctttcagaatcttctgtctctcggatctggatataattcttgggcaatgaaaagagaaagaggcagtcagtctggctggttgaaggcctgctttgtataagcctgggagacaggataagaacagttttcctcagggagttctcaaaaggaatagggggtagcccttaa

SEQ ID NO: 86402 - DNA, 1034 bp, Homo Sapiens
aaggtagcgaggcctgggtggcgaattcggcacgaggccacgtttcagcacagcgctggccgcagtctgacaggaaagggacggagccaagatggcggcggccgacggcgacgactcgctgtaccccatcgcggtgctcatagacgaactccgcaatgaggacgttcagcttcgcctcaacagcatcaagaagctgtccaccatcgccttggcccttggggttgaaaggacccgaagtgagcttctgcctttccttacagataccatctatgatgaagatgaggtcctcctggccctggcagaacagctgggaaccttcactaccctggtgggaggcccagagtacgtgcactgcctgctgccaccgctggagtcgctggccacagtggaggagacagtggtgcgggacaaggcagtggagtccttacgggccatctcacacgagcactcgccctctgacctggaggcgcactttgtgccgctagtgaagcggctggcgggcggcgactggttcacctcccgcacctcggcctgcggcctcttctccgtctgctacccccgagtgtccagtgctgtgaaggcggaacttcgacagtacttccggaacctgtgctcagatgacacccccatggtgcggcgggccgcagcctccaagctgggggagtttgccaaggtgctggagctggacaacgtcaagagtgagatcatccccatgttctccaacctggcctctgacgagcaggactcggtgcggctgctggcggtggaggcgtgcgtgaacatcgcccagcttctgccccaggaggatctggaggccctggtgatgcccactctgcgccaggccgctgaagacaagtcctggcgcgtccgctacatgggggctgaacagttcaccgaggctccgaaaagcagtgggggcctggagatcaccaagaccagacctgggtccctgcctttcccaaaaactggatgaaaaaactgttgaaggccccaaggggaagggcccgcaacccctcccccaaaggggggcaaat

SEQ ID NO: 86403 - DNA, 946 bp, Homo Sapiens
  misc_feature (234)..(234): n is a, c, g, or t
ttctgggaaggccagggaaccagggtctgttcggggggattttccgggccccccatggcttttctggagttcggggaacttgttcagcccccatgttagggggacgcgccaggacttgttcttcagcggccctggcgcagaggtgggcatcaccaggggcctcccgatcctcctggggcagaagctgggcgatgttcacgcacgcctcccccgcccagcagccgcaccgagtcntgctcgtcagaggccaggttggagaacatgggggatgatctcactcttgacgttgtccagctccagcaccttgccaaactcccccagcttggaggctgcggcccgccgcaccatgggggtgtcatctgagcacaggttccggaagtactgtcgaagttccgccttcacagcactggacactcgggggtagcagacggagaagaggccgcaggccgaggtgcgggaggtgaaccagtcgccgcccgccagccgcttcactagcggcacaaagtgcgcctccaggtcagagggcgagtgctcgtgtgagatggcccgtaaggactccactgccttgtcccgcaccactgtctcctccactgtggccagcgactccagcggtggcagcaggcagtgcacgtactctgggcctcccaccagggtagtgaaggttcccagctgttctgccagggccaggaggacctcatcttcatcatagatggtatctgtaaggaaaggcagaagctcacttcgggtcctttcaaccccaagggccaaggcgatggtggacagcttcttgatgctgttgaggcgaagctgaacgtcctcattgcggagttcgtctatgagcaccgcgatggggtacagcgagtcgtcgccgtcggccgccgccatcttggctccgtccctttcccctcgtgccgaaatcgccacccaggcctcgctacctagaccc

SEQ ID NO: 86404 - DNA, 777 bp, Homo Sapiens
  misc_feature (649)..(649): n is a, c, g, or t
  misc_feature (656)..(656): n is a, c, g, or t
  misc_feature (686)..(686): n is a, c, g, or t
catcagcgcaaacaggaaataaaaagattatccacagagcattccagtgtatcagagtatcatccagccgatggctatgcgttcagtagcaacatttacacaagaggatcccacctggaccaaggggaagctgctgttgcttttaagccaacttctaattgccatatagatagaaattatgaaccactcaaaacacaacccaagaaatatgccaaatccaagtatgactttgtagcaaggaacaacagtgagctctcggttctaaaggatgatattttagagatacttgatgatcggaagcaatggtggaaagttcgaaatgcaagtggagactctggatttgtgccaaataacattttggatattgtgagacctccagaatctggattgggggcgtgcttgatccaccttatactcatactatacagaaacaaaggatggagtatggcccaagaccagctgatactccccctgctccatcacctcctccaacaccagctcctgttcctgttccccttcccccttccactccagcacctgttcctgtgtcaaaggtcccagcaaatataacacgtcaaaacagcagctccagtgacagtggtggcagtatcgtgcgagacagccagagacttaaacaacttccggtggnccgaagnaaatctcagatggaggaagtgcaagatganctcatccacagactgaccattggtcggagtgccgctcagaagaaattccatgtgccacggcagaacgtgccagttatcaatatcacttacg

SEQ ID NO: 86405 - DNA, 1249 bp, Homo Sapiens
  misc_feature (1042)..(1042): n is a, c, g, or t
  misc_feature (1067)..(1067): n is a, c, g, or t
cctggcagatgtgttcagagtggaggagaaggctggccgcatccatgcagtagaccatatggagatctgccattccaacatgctgcgttggaaccagacccaccctacgattgctatccttcccacaagccgaaaaatccacagctcccaccctgatatccacgtcatcccttactctgaccattcctcttactccgagcttcgtgcctttgtcgcagcactgaagccttgccaggtggtgcccattgtaagtcggcggccctgtggaggctttcaggacagtctgagccccaggatctccgtgcccctgattccggactctgtacagcaatacatgagttcttcctctagaaaaccaagccttctctggctgttagaaaggaggctaaagaggccgagaacccaaggtgttgtgtttgaatcccctgaggaaagtgctgatcaatctcaagctgacagagactcaaagaaggccaagaaagagaaactttctccctggcctgcggaccttgaaaagcagccttcccaccatcctttgcggatcaagaagcagttgttcccagatctctatagcaaagaatggaacaaggcagtgcctttctgtgagtctcaaaagagggtgactatgttgacggccccactgggattttcagtgcacttaaggtctacagatgaggagtttatttctcaaaaaaccagggaggaaattggtttagggtcccccttggtacccatgggagatgatgatggaggtccagaagccacagggaatcagagtgcctggatgggccatggttctcccctgtcccacagcagcaagggcacccctcttctagctactgaattcaggggtctagcactcaaatatcttctgactccagtgaactttttccaggcagggtattcttccaggagatttgaccagcaagtggaaaaaataccataaaccctgctgaagacaggagagtacagaatgacaacattgagcccacactgcagttttgaagatagtaactgatggctgggtgggaaaagagtttgntttttgggggcctacttttctatcntttacaagactcttatgggcccaccggtggagcagcacttcccaaaacttggttcactgggggtcctcgtgcctatggaatccctcttttttataaactaagtttaagaaaatactttttttataaaaatctttggagtatgcgtgagcaaattaaaagttctttgaagtcctacagtaaaa

SEQ ID NO: 86406 - DNA, 587 bp, Homo Sapiens
ctatgcatagtctcccacaacccatcagtagccaacaccagaaacttatcctgtggccttaatcggtggtaagttacctctggctcagcagtgagataaggaggtgtgtgataattaggaggaataaacttggtatattcattgtcattcaactggtctgggccagattctatcactctcttttgaaggtcaatgctccatttgaactttacatctccaaatgccctaaatggcatcagcaagccaagcagccgatcctgtttcacgacactcttggcctcactctttggatgttccaatttcagccgttctagttctctttcattttgagcattgtggtcattagacagcgtgactgctgaccatgagccgtcctcttcctgcacacccagcatggctctgctatcgccagtattggccacatgaaggtcaacaccatccacatgggccacacaagcagtggctccagaaaatgccactcgaagcaccaggtagttgagaaaagaattaggatcaccaacttgcgcctccaaggagatgtcattatcaagcctcttgaaggcattaatcagagcctccttaacatc

SEQ ID NO: 86407 - DNA, 966 bp, Homo Sapiens
gcggccgcaggcccgttcatgcacattggccccattctccaccaggagcttcacacactgcagactcctcttctcaatggcgatgtgcagagcgctgtggcctcggtaatagtcatctgtgcactgggcatttaccaggggctgaggattgccagagtccctgtcgatctgcagcagtggcagaatgcaggcattgaccccgtccttaaggttcagcacagccttcatcaggcacgtcttacctgtggagccctctgtgtattccgagtcggtgaggtacttgctggtcttgctcaggtactctggaagtccagccagatcctcggggacaccccgggagaccgcattgaagagccgatctcggtcaaatcggtttggatccggctgactggcacctgttccctttcggtagttgaggttgactcttatctgaggggcgaatttccggtcctcgccctggaactgtgactccatgggaggcagcccgctcccaaaatccagctttcctctgtccgcctcagagccatcttcttggcctccatctaatgtctccaacctgaaaactggagagctggagggtgaggtcatcctaggaggaggaggctgctcggtccagccaggacctctgtgcagatggagatgtcaagggtcctgtcttcctcccagctgcgcgtcggtgttggcctgactggagccccgcaggctgaggccagggcgtggcggctgctgggatcccggagcttctcagtagcaggggctgcgggaggaagtgaagccgggaggggctgccggcgctgacagcagaggagcggcggaacctccctccccagctctgagcactaagctccagcaagcaggttctggtctctcggtcaccctcagcccacctggccagccggcacggtggagaacgggagcttaactctcccctcgtgccgaattcggcgcgccgtcgacttcatactc

SEQ ID NO: 86408 - DNA, 1662 bp, Homo Sapiens
  misc_feature (1478)..(1478): n is a, c, g, or t
  misc_feature (1481)..(1481): n is a, c, g, or t
atggttcaaaactgcgtggtggcagacacaaacttctaattttatttctcctctcatacagccgaaaacctggtttaacatacactgtttcatttatgccccaaaacagtcctgtcgaggtcaaaacgtcattcacttacgcacggtgggtgacagttcacaaggcacatgacatccctcatcttgatctcccggtatccgcgcattttaggaagaaacatgctcaaagggatgaagggtccgctctcaagcattttagctagcgaagttacagtcacatccggcaaactcgcacactgcagatctaggactaccccgcgcggccccgcccactttcccagcagcgggacgctgtcaccccgactcaggagctcctgggcccgcgggctcccggaagctgccgaccacgtgattcgctggctcagctcacgtgacaaagctcccggaggtgggagccctgggccaaaatggcggcctacctgcagtggcggcgcttcgttttcttcgacaaggagctggtgaaggagccgctgagcaatgatggggccgctcccggggccacacctgcttctggatccgctgcttccaagttcctttgcctccctcctggcatcactgtctgcgactcaggccgagggagcctggtctttggagatatggaaggccagatctggttcttgccacgttccctacagcttacaggcttccaagcctacaaactacgggtgacacacctgtaccaactgaagcagcacaatattctggcatctgttggagaagatgaagagggcatcaaccccttggttaagatctggaacctggagaagagagatggtggcaatccactctgcactcgaatcttccctgctattccaggaacagagccaactgttgtatcttgtttgactgtccatgaaaatctcaactttatggccattggtttcacagatggcagtgttacattgaacaaaggagacatcacccgggaccggcatagcaagacccagattttgcacaagggcaactatcctgtaactggattggcctttcgccaagcaggaaagaccactcacttgtttgttgtgacaacagagaacgtccagtcctatatagtttctggaaaagactaccctcgcgtggagttggacacccatggttgtggcctgcgctgctcagccctaagtgacccttctcaggacctgcagttcattgtggccggggatgagtgtgtctacttgtaccagcctgatgaacgtgggccctgcttcgcctttgagggccataagctcattgcccactggtttagaggctaccttatcattgtctcccgtgaccggaaggtttctcccaagtcagagtttaccagcagggattcacagagctccgacaagcagattctaaacatctatgacctgtgcaacaagttcatagcctatagcaccgtctttgaggatgtagtggatgtgcttgctgagtgnggnctcctgtacgtgctgacgcgggatgggcgggtcacgcactgcatgagatggaacacagaccaactggaatgcgttaagagaaactattagaggcgattaccttgcagagcacatcggcaggaggctggccaatttctgcatgaaactcttcagcagcaccaatggtgcacatatcaacatg

SEQ ID NO: 86409 - DNA, 376 bp, Homo Sapiens
gggttctatgagccagaggaattcccaattcactttgaaattaccatacctatcttgccatatcaaacatttcaattctgttaactaaatgaactacataatatccttaaaaatcagccagagaagagaaaaacaaatctcgtcttcattatccactttgaaccaaaacttattctttcaaaggagtagtttaacctactaaatatgtctattataagatcttctttcttagaaagtagtattccttctttttcattactgaaatggtatttcttacacttaaacaagttatggacaattgttagctaagtatcagttatgataaattgctaaaattaaattatctgtttaaggtacatataacacattcctatcc

SEQ ID NO: 86410 - DNA, 856 bp, Homo Sapiens
ttccatttgctacccatctgaacttatgaacacaaattctacaaaccactcaagtcccatttttaaattccctccttccacttaaacttccacagtgtgctaagtaatctaatctgcagggcagaagggagaatgagatgaagtatgagtgttgacataattcctcaaggcagaactacaaaaccaacctccacctggactgaaacaagagcaaagaattatgaggggaaacttttgctaaagctcaactcaaaatggtgaagtggatcaaaatccctcgtttgacaaaggaccattgctttagatgcagatctcccttttctgatctacaaacattatgaggcctcccaggactacagaggtctctagagaagacttgatgctatgcagtacgcatagttcagtagaagcagatgaaatttctttaaaatacatacataaaaacatattaagttatcctaaataagaaacgcaaagtgtccataactatacatcactttcctgcccaaccagggcctgaaacgttgaatatgcaagtactaattacaatgatttaagattagtcagaaacatcactaagtagcatcccaaagtgtacaaaccagttaagcatgtataaaattagtactaatccagttagaatacaaaatgaaaattatgaatgctgccccaaatacctgtggttccacaaaatttacaagctgactatgtaacaaagtagactctagttttaagaaaacattattacagttcaatatctattccaaaaatgttcttaagtcccaacaataacatcaaaaatcatttatctggaaattagaaccatttaaatgtttgtacaaatttgcaaataaca

SEQ ID NO: 86411 - DNA, 414 bp, Homo Sapiens
aagttggtgggacaaagaaactggtaaaagtacagcttctggaagatcgagagtaggagggaaaacttactcttcactgtatatgccctcttataagctactataatttttcatcatgtgatgcattttcaaataaatttaataaaaaattgttagggcaataaagtaaaagcatgttccagtttaagatcaatgccaaatttctgaactggggcataatacttactctgcatctttaacaacacttctaagagttaatcacatgaacatgaatacaaacaaatgtagattcatcacaaaatacaaatgtattggtcacaattatgtagaaaaaaataagctgtaatatctgttttcaatgtaagctcacagtatctgtactcaaagtttctctaaacttaaaacaagtccact

SEQ ID NO: 86412 - DNA, 1753 bp, Homo Sapiens
cccacaaccacgatgcaaaaaagattaaaaatccctacgtagcgaggcctgggtggcgatttcggcacgaggcgcgtccccgacaactccttgttggaggccacaagccgtagccgcagccaggcttcccccagtgaagatgaggagacctttgaactgcgggaccgtgtccgccgcatccacgtcaagcgctacagcacttacgatgaccggcagctcggccaccagtctacccatcgcgactgaccagaccctcagggagtcagggcacgggaggccctatctcccatcctgtggaacccgccccattggccaccccatgctgctgctgcctgggtctctgctctagcacccagaggcatgacaggccctgctcagaggtcagagggtctgggcagaggagggaccacattcccctgccttgcccctgagcacttctggagactgcgtcctgtcctatctgctcaccatcacccttcctgcccgacggagctgcttctgctccctggggcatatggactgacccacctcctgctgagaaccttcccctaggccctgtgcagaagggctactgccccttaggcctcagctgggggaaaggcagttctggtgctgtagaggccctggtgcagaaagtgggacgtcttttttcctaaggtgtttaagcacaggcttgataagtttggtttttaaaaaataatctaggaaatgaataattctaaatctagtaatgaggaaactgagcatttcttttgccctccagggtgccaagaccctacatatgacagaacccttggcccttctccatgcctgtgggatctgtttctttaaagcactttgtactgttattcaggaggttgataatctccttgacccatgtctttctaccctaatccccacttccctgcagaatcaatctgagggaggggataaagaggaagcaataagaaacaaacatccgacagagcagctctggctttgccagcctggccagcagctcagagtgcaccgaggagggaaggatggctaagctgggaccggcagtcctcacagggtgcctgtgagaaaggacattttacccccacatcatagtcacatcactgactcctaggtctagcacgactgctctttgtgattctcttgagtacccttggcttccagccatgctgtcctcacatacggtaaagccaaagagctgtcacatgggccagaaacatgagccacggcaggaagaccgtggagcccgtgggcactgcatggtgtaggctggcatgcccatcagctgaggacagcaaactcccagcagcccctacagaggtggcacatgcttggccacacatctactccctgcccacaccatctatgctcttggttggtgctggctgggatggcggttctgcccagtggtgtctctgagcgcgggatgacaggagcaaccgaagcaccctgaaggccttcactccttgatgggtaactcagccatggagatgccaagcactagccaggaggtgagttcctctttagggctttggttttcattcctttttgtttggcttggccaaaccaggaattcagcttatctgaattatttttccaaaggaaatgctgtcagggaaggggactggtttctgccacccctaaccaaagcaaccgtaagccccgtaataggaacccccccttttcctggcttcttttgggaagaagcaaccaccagggtttatttcaaggtttcaatcctcccttcttggaacct

SEQ ID NO: 86413 - DNA, 584 bp, Homo Sapiens
  misc_feature (92)..(101): n is a, c, g, or t
  misc_feature (431)..(442): n is a, c, g, or t
gagctctctcttcaagtagattggctgggcaaaagaatgttttggcaagagcgttactgtagacctttctccctccttccttttactaccannnnnnnnnnaacactgtcatctgtaggtcactctccagcagttaggcaccttaactggagaccagaaaccttccagagaacacagggctgcatcccgagcaaccctctgaagaagggaattaggctttagattttgatagcaatgttccaggaatgaaatatagatgttagcccaagacaccatgacaaaatagcccagccttttgagagtaatttgggaaaagaagctgtcagaagtttctaacttacaaactggtttgaaatttttgatgcccagacagcaagtataaatcattttggaggcttacttttcatgatacaaaagcaattctgtgtgannnnnnnnnnnnaagaagaaagaaaatgcaagctagttttgagaaaggaaggccaaattggcgtcgggggagggtgggagtgaggaacttaaaatcactattgggagaaaaaacttttttcaagattttcaaagagatgaaaattttcttaatc

SEQ ID NO: 86414 - DNA, 675 bp, Homo Sapiens
ggtccctccagacctcggctttagtgctgtctccgcttttctttcaccttcacagaggttcgtgtcttcctaaaagaaggttttattgggaggtaaaggtcaatgcgtaggggtagagtaagatgtcttatggtgaaattgaaggtaaattcttgggacctagagaagaagtaacgagtgagccacgctgtaaaaaattgaagtcaaccacagagtcgtatgtttttcacaatcatagtaatgctgattttcacagaatccaagagaaaactggaaatgattgggtccctgtgaccatcattgatgtcagaggacatagttatttgcaggagaacaaaatcaaaactacagatttgcatagacctttgcatgatgagatgcctggtaatagaccagatgttattgaatccattgattcacaggttttacaggaagcacgtcctccattagtatccgcagacgatgagatatatagcacaagtaaagcatttataggacccatttacaaaccccctgagaaaaagaaacgtaatgaagggaggaatgaggcacatgttctaaatggtataaatgacagaggaggacaaaaagagaaacagaaatttaactctgaaaaatcagagattgacaatgaattattccagttttacaaagaaattgaagagcttgaaaagg

SEQ ID NO: 86415 - DNA, 583 bp, Homo Sapiens
taccttgagcatgaatggctggagaaatcgttttcatagctcaccaatggtgagtaaagatacagctcttttaaaggtcataaggataatatattttccccatcaatgctgattctgagaaaagagcaagttatcaaaattaaacactgtaaaagaaaggtgtccacatgtctttacctacctaagtaaaacaggaagaaaatcagtaacattatccttaggttttgacaatggtacttgcttcttgttgttttattgtttcctgaattcatgcagatgcctggccattcctgggaagagtggataactcagaagtcactgtattccacagggcctcactgcagtgtctaaaggtagatgcaaattaaaatgcagggaaaataacttttctgatgttgatgcatgtcttaggaaaacacatttataaacatggatacctgataatagatattgaaacccatttcctgtgtgttaaaatatttaaaaagtggatattccaggaatgttttgcagctttgtacaagtaacataaattggacacctcagaatgaaagttcatgttggttctgaatggttcgctgca

SEQ ID NO: 86416 - DNA, 826 bp, Homo Sapiens
  misc_feature (770)..(770): n is a, c, g, or t
ggagggacctctctggttctgctcagaggtggagtgctccacggtgaccacacgcatcgtgtctcagatcaagaccaagggggccttgggcatcagcttcaccttttttggcacctccttcctcttcatcacgtcccacttcacctgcgacgggaaggtggcggagcggctgctggactacaccaggactgtacaagccctggtcctgcccagaaatgtgcccgacaccaacccctatcgctccagcgcagcggacgtcaccacccgcttcgatgaggtgttctggtttggagacttcaacttccgcctgagtggcgggcgcacagtcgtggacgccctcctgtgccagggcctggtggtggacgtgccggcgctgctgcagcacgaccagctcatccgggagatgcggaaagggtccatcttcaagggcttccaggagccggacatccacttcctcccatcatacaagtttgacatcgggaaggacacgtacgacagcacctccaagcagaggacgccctcatacacggaccgcgtcttgtacagaagccgccacaagggtgacatctgtcctgtgagctactcttcctgccccgggatcaagacgtccgaccaccgccctgtgtatggcctcttccgggtgaaagtgaggccggggcgagacaagaattaaaagacggatttcgaaggagattcagaggcagcaagcactacagagtcagaactccagcaccatctgctccgtttcttgaagtttgctggacgagganctcacagctgcaacgtggggtgattgtatagatcaaaacccactggttaggatgct

SEQ ID NO: 86417 - DNA, 583 bp, Homo Sapiens
ccctgggaggtgaggcctgagcagtcatggcattggcagatggtgcctgccagcctggtcctactgaagcaggttgggcacttccaccttcttgagctgcttgaggttgctggagcggatggcagccaatagctggtcacgggagttcttctcctgggcagggaggactttgtctcccatcttcctctgggtagctggtgagagtgaattcttcaggttctccatgataaggggtggagccaagggagggggagggggtggtggggcagctggagcacccccttttttgggtgagttctttggagagggctttggagatggttgaggtgaaggttttggggagcccttagccacggccccggccttgggtacctccagcagatccttcttctctcccttggcttcctgtgcctgcctttgctcctgcagccgcttttgtctctgcttgtccatgttgcggctgagcagattggtgacagtcattcggggcccggccagctcaaaatggtagcccagcttgagcagggtagtattctccttcagcagcttggcgatctccatctccctcttgcctccaaagatt

SEQ ID NO: 86418 - DNA, 582 bp, Homo Sapiens
tcaaagccttctctagaatctcataaaagttctcgaagacctctttagtttggaaggtctctaccacacccccaataaagtcttccatgacctcgatggcactacctcccttcagagcttcatagctcccatttagcttggcgtaggctttttccaacaaggcgctccagaactcattgtggtcggcacagtgaaggaaaaccaaacggtccctgaaggtgggcaggcggtcatcgatcaccacgtccaaccactcactgtgctgccagaactggaaatggaatatcccggcataaccagggccaaagctttggtcctgggggatgactctggccagtgctttttaattaagcgtaaggcagccgatggcggctaatagccagcagtctcccagctctccctgacaaatatcagtcctggtggcccctccaagaatgaattctgggtttttcacgatttcccctggtcgtttccacacaaaggggatctgcggcctctcactgtagaacagggaggaattgctggctgggaagtctgcatcctcaaacagggtgcctctgtgcacgcactcctgcctaattt

SEQ ID NO: 86419 - DNA, 909 bp, Homo Sapiens
  misc_feature (615)..(623): n is a, c, g, or t
  misc_feature (650)..(661): n is a, c, g, or t
  misc_feature (761)..(798): n is a, c, g, or t
cttccccttggttctctcccataagatgagtatgagcccctttctgttttactttgtattctggaattgacaaaaggtgcagagagattgtcatgtgacccaaggtccctgctggtcatgtggtcatgggagtcccatctccatagttcctgggacgggcttggatgtcctccattcccccaggaccctgagctacttctgtcttctacatttgagccagtaaaatgtccacttgccaaagaagttggtccatttttcccactgctcacaggaggtgaaaacatcgcactgaaatccagtaaatcactcagctctttgtccgtccctaaggcagccattcgctgttggtgatgcattttagcaaaatcacacaaaccttaaatggccacaaatattctcacaatattccaaggaaagagactttaaaaagagagacaaaaatcttctgcaagtacttagtatctcacatgtgtatccccaaaaagtattttaactggtactcagtcctgctccagggatatccacagattacaagattatgcacctggctctggtttttgcattttccaccataaaactgcaacaaaattccctcccccaaaaaagaaatccttnnnnnnnnntcccacaactttttcttattgtttatnnnnnnnnnnnntgaacacaggatagttataatttttcctcaaacaattcttgttggtgattttttttcttctctcataaagtcttaaacttgttccaagtttagaggtgtnnnnnnnnnnnnnnnnnnnnnnnnnnnnnnnnnnnnnnggactcccccgtggagtcacattgataataataggtttccctgaaagatacattgtaatcccccggccgtaatggccgaattcccgggcatatgtccggtaccgtcgactg

SEQ ID NO: 86420 - DNA, 1909 bp, Homo Sapiens
  misc_feature (88)..(88): n is a, c, g, or t
tgggttatggagtgattggtggtgcagttgagtcccgtaactctggtaacatataggagctgctgaccttccagagcctggggacagntgagttccagcacaccctggctaatggagctggggccttggttgatgagctcatagacatggtggacagcaggtcccaggtcctcctccttctgaggctggtctcggggatgccagtcgcttactgggaatagcactgcctcaggcttggagacaccgttcagggtgacctgggcctgagcctccacggagagccgaaaggaaaccacgtcgctttgcgagttgttgagattcttgctgaggatctggaagtcaaactggatggttttcttagtgtcccggagatgagggactgtaaaccgaaggccaccccacagactggctcctgccttcatggggttgcccaggtcacacaccagcaggcggctctggttcacggcaaagtagtcacagctcaggctggagaagttccctgggtgtctgacgagtcctgagtactcagcctctggaggggcggtgacccgaagctcagcctcataggcgccaccctcacccacattctgggcatggaaagtgaggttcagggcattcttgtcacccaggtacacatggttctgctccccaaacacttccagctgcaggtcaggcacacagatgttgtcttctccacagtccagcaagatctgagccttgtcctctatccggctcttgctctgataatgtagggctggcctgaggccgtggctgtccactggggcttgggggtccaaggagaagttgagagcgatgtgaatcggcgagagtttgtctcgaaattctgactcgttcctgaggtagatcttcatctctctgcaatcctctcgagccccattctggatgagcagggtctgggtcagggttgcctgcctggaggccaggaacagtgcccgccgtacccctcccttctgcttctgccagtccagctgaagttccactgtgaaaccaatggagtcagcaacgtgttttccagaagcattgaggcagaagctaaggttgatgcaggccacagggttcccctctaagctgcagctccgctcctctgggttgaacatggcggggaagatggtgagggaggcactagcggacacgatggggcggcccctgtataccacagccttgtccacaccaaaggaccccacaatcagatcaggatatccattgccatccaggtctcggcctcctcgaagggcagagccaaagaagtctggggtgtggctggctgcccacaggggctgcagaacctgggaaggcttagagcccagccctcctgggcccccaggaaatacaaacactactccctgctgggtctccccaccaaagggagccccgatggccacatcattgtagccatcctggtccaggtcccccaggggggtcaaggagctgccaaatcggccaaactcatcatggccagtgagggtaagggtgggcgtgggctctatgccggctgggtgctgcaggtagacgtagaccctgcccacctcctgaggccgcccgtcaggggtccgatccatgagcaggggtgcccccaccagcaagtcatccagcccgtccccattgacgtctgtggcggccactgcatagccaaagtaggaggccatctgttcccctgagaagttgtagagggatcgaatgtctgagccattaaggatggtgacatagccgtaagtgaggttccctttgggcacaccagcaacaaagtcttctgtgtcatcaccactgaattcaccaacagccacagagtatcctaggtagctgtcatcatagatggaactggcctggcgagtctgcagctgccactcaggagcagatgcagaatcttagtaccccgagacctgatcac

SEQ ID NO: 86421 - DNA, 379 bp, Homo Sapiens
tacccgaacgggtgatgcggttgggaaaatcaatgcagaggacacacattctggcgcttgggcatcagtttcctgtgtccaggttacagaggagtcctaattctattgaccccacattcactcttggcaggggccgccccatcgtgtccgctagtgcctccctcaccatcttccccgccatgttcaacccagaggagcggagctgcagcttagaggggaaccctgtggcctgcatcaaccttagcttctgcctcaatgcttctggaaaacacgttgctgactccattggtttcacagtggaacttcagctggactggcagaagcagaggggaggggtacggcgggcactggtcctggcctccaggcaggcaaccgcatc

SEQ ID NO: 86422 - DNA, 982 bp, Homo Sapiens
tttgttcgagcaaagacatgggtgaaggaactacagcgacaggccagtcctagcatcgttattgccctggcagggaacaaagctgacctggccaacaaacgtatggtggagtatgaagaggcccaggcatatgcagatgacaacagcttattgttcatggagacttcagccaagacagctatgaacgtgaatgatctcttcctggcaatagctaagaagttgccaaagagtgaaccccagaatctgggaggtgcagcaggccgaagccggggtgtggatctccatgaacagtcccagcagaacaagagccagtgttgtagcaactgagggggtggctagcagcaaacaagtatggagctagcacaagagctaagaaataacctccatccctacccctcagcacacaacccctacggtaacagcacactgagccctggctcccaagggctgcctcctgacagctccgtcatggcactttttaacgcttcagcaacaaacaccaggcagctgttgccactggcctcctaccccctactctggggcttgggggtcaactccccccaggacttaccttccaaaacaaactttcttcactttgtattataggtacaagacagcgacttacgtatcttttctcctcctccctagtgttcctccccattttttcagaaaacacttctgactcctgtcccttccccttctgcttttggtcagtccctgttcttgagcctcttttctcctctccccaggatgcagaaagtggtgaacccaggaactgaggaaggaggtttccagttcatttacattaagggccctgggggagaataaagctcagagcaggagggagtaaggaaacatttcctttttgtttttatttggttggagtttctcatatttgaaaacattgcggtatccatgatttggccttgtggagggtgttcctaggtagaggtgagaatggggaggcaagatctcaggcaca

SEQ ID NO: 86423 - DNA, 1355 bp, Homo Sapiens
  misc_feature (1252)..(1252): n is a, c, g, or t
  misc_feature (1279)..(1279): n is a, c, g, or t
cccccttacacctttaatcaccaaatacgtgtatacacaaacaagcttggaccggtccggaattttcgaaatatgggcgacccgcgcggcttttacccatcagcaacaaactatctctatgttacctacaatggtcaggagcatgatgtcaattttgatgaccatggaatgatggtgctaggcgtgtggtccatatcacattggtcagcagtgtggaatttgattggtgtgctgtctctagtatccgcacactgcgtcaacttggcaagaagacggtggtggtgaattgcaatcctgagactgtgagcacagactttgatgagtgtgacaaactgtactttgaagagttgtccttggagagaatcctagacatctaccatcaggaggcatgtggtggctgcatcatatcagttggaggccagattccaaacaacctggcagttcctctatacaagaatggtgtcaagatcatgggcacaagccccctgcagatcgacagggctgaggatcgctccatcttctcagctgtcttggatgagctgaaggtggctcaggcaccttggaaagctgttaatactttgaatgaagcactggaatttgcaaagtctgtggactacccctgcttgttgaggccttcctatgttttgagtgggtctgctatgaatgtggtattctctgaggatgagatgaaaaaattcctagaagaggcgactagagtttctcaggagcacccagtggtgctgacaaaatttgttgaaggggcccgagaagtagaaatggacgctgttggcaaagatggaaagggttatctctcatgccatctctgaacatgttgaagatgcaggtgtccactcggggagatgccactctgatgctgcccacacaaaccatcagccaaggggccaattgaaaaaggtgaaggatgctacccggaagaattgccaaaggctttttgccatctctggtccattcaacgtccaatttcttgtcaaaggaaatgatgtcttggtgattgagtgtaacttgagagcttctcgatccttcccctttgtttccaagactcttggggttgacttcattgatgtggccaccaaggtgatgattggagagaatgttgatgagaaacatcttccaacattggaccatcccataattcctgctgactatgttgcaattaaggctcccatgttttcctggcccccggttgagggatgctgaccccattctgagatgtgagatggcttccactggnagaggtggctgccttttggtgaagggnattcataacagccttccctaaaggcaatggcttttcaacagggattttaaggatacccccaaaaaaaggcatcccc

SEQ ID NO: 86424 - DNA, 1268 bp, Homo Sapiens
  misc_feature (323)..(378): n is a, c, g, or t
ataataatgtactaaaaccttccatttttttcagtaccttttgaaaacatgaccaaactcatacttcaaaaatatatatataatgaatgtgaggaatatgaaaaaactttctttgtctagcaaactttcaaaggtggttattataacatactagcaatggaccttactactgtaaggaatgtagaaatgcatttactagtcctaattcatttcagttacatgaaagatttcaaactgcagagaaccactatgaatgtaaacaatgtggtaaagcatttagtagcttcagtttcttttgaatacagtcttctctagtttctgannnnnnnnnnnnnnnnnnnnnnnnnnnnnnnnnnnnnnnnnnnnnnnnnnnnnnnntgatattaaaaacagcatatttgcatataatctaggcacatttttctgtatatcttaaatcatttctagattacttataatacacaatgcattgtaaattctgtataagttgcttttgtattatttagggaatcatgacaagaaaaaagtctacatgttcagtacaaatacaactgtcattcattgtcctaagtacgtgtacatgtcagcaacaatgtcaggatctgtggagtttgcgagtataagatctttaagtgttgaaggtttcatctccataattgcagctgctttagctacaaatattataggaagctgttccttctttttctttacatcaccaaaccttccagtggttacaggcattttgttatccttcaagtgacctggagcctttgttgcatgacaggattgtacctgaagatcacattctttaacaattggacctactgaatctgtaaaactactagaagaaaacatattgaaaatacttcaggacattggtttaggcaaagattttatggctaatacctcaaagcacagacaacaaagataaaaatagacaaatgagactatcttacactaaaaagtagctgtgcaaagtaaagggaacaacaagagtgcagagaaaacctgttgaatatgagagaatatttgcaaactatgcgacaagggactaatatccaaatatacaaggaactcaaacatctcaacagcaaaaaatataaataatcccattaaagtgggaaaaggatgtgaacagacagttctcaaaagaagacatgcaaatggccaaaaagtatatggaaatatgttcaacatcactaatgattaggaaaatgcaaattgaaaccacaatgagatactctacttagaattgatcttactaaaaa

SEQ ID NO: 86425 - DNA, 969 bp, Homo Sapiens
  misc_feature (211)..(229): n is a, c, g, or t
gaatggggggagaatggaggtaacaaaaaccgcgggcaagagcggcccttggaagctgttccaaagaaagcgggggctaagctggcctttaataccggtagggggtccaggggaagggcttggcgccacaggcttaaaaaaacggtaaagggggttacaaaaggttggttttttcagtgaggggataagtgggactccccttatagaaaannnnnnnnnnnnnnnnnnncagaagaggtgaaggggtttgacccttgggcaacacgcggaaacggagggagaaagggaaccttccctcagcgccgctggcattatgactgtggcagattgccatgttataggccctttagagagggcaggcgatctggatgcagcccagacgcttcccactgctgctcaggacgctctctatgcggtagttcccggtggtgagccaactgggcagctccaggtcaggcacaacgaattcgctcttgggcagtgagtaggttccttctttgaagggacagtggcaaggaagcccataggtacgcaggggctctgggcagggctccccagtaggaattaacatgtcaagcacatcacagaagtgttcaaaggtacagctgccaatgtagtctgtgcatgggatcttgatccagaggccagccacctccttctccaaaactaaatccaccttcagaggagaactcagggggacactggtgctgcccacgacactgagggtcacatttccaggaacgacgatggggtcaggctccagagtcaggcttctgatcaccgcagggtccttcccttcatcacagttatcccaggaaaagctactgagctgggatggctttttcaggtgggcttgcgcaggggccgcgagaagcaagcccagggcgatcaggaggggagcctgcatcagggactgcatcgggaagggtgggtcagcgcggagttaactgcaaggtctgtggcggccgc

SEQ ID NO: 86426 - DNA, 983 bp, Homo Sapiens
  misc_feature (807)..(807): n is a, c, g, or t
accgtcccttacacgccctaagtagcgaggcctgggtggttcctcagcacgaggccgctcagactttccctgccggcacatggacctggcccaaccctcacagccagtagacgagctggagctctcggtgctcgagcggcagccagaagagaacacgcctctcaatggtgccgacaaggtcttcccttctttggacgaggaggtccccccggccgaggctaacaaggaaagcccctggagctcctgtaataagaatgtggttggaagatgcaaactgtggatgatcatcacctccattttcctaggtgtcattacagtgatcatcataggcttatgtcttgctgcagtaacttatgttgatgaagatgaaaatgaaatacttgaattatcatcaaacaaaacattcttcatcatgctgaagattccagaggagtgtgttgctgaagaggaattgcctcacctgctcaccgaaaggctcacagatgtgtacagtacatcgccctctctgagtcgttattttacttcagttgaaatagtggacttcagtggtgaaaatgccacagtaacgtatgacctgcaatttggggttccatcagatgatgaaaattttatgaagtatatgatgagtgaggagttggtgctgggcattttgctacaggatttccgtgatcagaatataccctggttgtgagagtctggggcttgatccaacatccctcttgctctatgaatgaagtgatggaggctggtctctgtctgaaagcagtgctctaccaagtcctggagatgaagggaattcactctgtnttgcagaaaagattctgtgggattatacagaagcaccagcaacaccagagggggtggagactcctttctctcccgatctacagtctggctctaagcccagtaaaacagcttccgagcactgctttcagctgggtccagtctttgacaaagccaggaagccagctagggtgggggcg

SEQ ID NO: 86427 - DNA, 822 bp, Homo Sapiens; identical to SEQ ID NO: 6938

SEQ ID NO: 86428 - DNA, 524 bp, Homo Sapiens
tcacttgacccacaaaaacaaaggccatggtcaccaagctggtcaggcagatggcagccacgggtgttatgtttggccccttcccttgacccagacaggcaagtgcagggatcactttctcctgggcaatgcactgcaggatgcggggagctccataaagtcctcccatgcaggaagccagggacgagatgtataagcccaaaaggaacaggaagcccatgagggataccttttccgctatcaggaagtcatagcgaagggcctctcgagtgcagatggcgcccaggaggaagacgaagacgatgtacagaaaccacgagatgccaacagctgccagggagcccaggggaatgctggcggcaggctccctgaggtcgccccccatgttgaagccggccatgactcctgtagccgctgggaagaaaaccccaaagacagtgaaaaaagattcccccgggctgtaatcgggcagcgtgttgttctgtagcagttcgggtgaatatccaatgaaaccatgttcaggg

SEQ ID NO: 86429 - DNA, 583 bp, Homo Sapiens
ggagaagcttccccgatggcagaggccccgttctctctggtgcaacattcgaggaaagctgtgcttctgggcggcccgcctaagccccagctgccctgtggccagttccacttgtgtcttgatctcattgaattccagctcccgggtgtcaggggtagcatccacaggtgggttgtatcgatccccaagacgaccatcccaagctctgtcattctcttcctctgagtccaagagggcctgaatgaattgtaaatttgctgcacctcctccctgcaccaacctcacttggcctctgcggaggagataggccagtacctgggccagatccacatcttcatcctcttcttcctcttcctcactccgacgcaggccagcccctcttcggggcaagccctcggaggggtctccggacccggatcctgcactgctgctgttccgcgatcccatcttctggtcacagcattcttaggtcctgtgcgggggctcctcctgtcacctccttctccaatcctgtgaagcaaagaaagcaagagtgaaccgtagtgcgctaccctagctcaccaactcaagaaagatttgtttt

SEQ ID NO: 86430 - DNA, 1060 bp, Homo Sapiens
ttgctgtggtcttcgctcacacccctgtctgtttcgccaggccagtaccacgtgcgttgcggaaccgtccgatgttccacatcgagatgtgcaggagggtccacccagagacagaggttccatcggggtagggcacaccagcgttcagcgtcgtgcggcctgagctcttattcggacgccatatcgccttcttagatcggatttcttgttctgccaacagacatgaaattgaccatcctttgctgtagagcgccaggaagcctctgagagtagctatcagtgaagcccagatcagttggccaagaagtgagatatcactcgagactgttctccaagggagaagcttccccgatggcagaggccccgttctctctggtgcaacattcgaggaaagctgtgcttctggcggcccgcctaagccccagctgcccctgtggccagttccacttgtgtcttgatctcattgaattccagctcccgggtgtcaggggtagcatccacaggtgggttgtatcgatccccaagacgaccatcccaagctctgtcattctcttcctctgagtccaagagggcctgaatgaattgtaaatttgctgcacctcctccctgcaccaacctcacttggcctctgcggaggagataggccagtacctgggccagatccacatcttcatcctcttcttcctcttcctcactccgacgcaggccagcccctcttcggggcaagccctcggaggggtctccggacccggatcctgcactgctgctgttccgcgatcccatcttctggtcacagcattcttaggtcctgtgcgggggctcctcctgtcacctccttgggtttggtgaaagcaaagcgtgctctagaaataccagggtctcctgagacggggtagtagctatctctaggagggtgacccttcctcggggctgagatcccttttctttagcctatgccaactaccaaggcgtcgggaacacaaaccttctccaatcctatcgaagtccccctcgtgccaaattaaccacccaggcctcgctcctagctcaatcttttttt

SEQ ID NO: 86431 - DNA, 822 bp, Homo Sapiens
  misc_feature (593)..(593): n is a, c, g, or t
  misc_feature (709)..(709): n is a, c, g, or t
  misc_feature (713)..(713): n is a, c, g, or t
acccagacccagaaggcgccaccatggcggcgcccccgcagcccgtcacccacctcatctttgacatggacggacttcttctggatactgaacggctgtattcagtggtgtttcaagaaatatgtaatcgctatgacaagaaatacagctgggatgtaaagtccctggttatgggtaagaaggcattagaggcggcacagattataatagacgtcttgcagctcccgatgtccaaagaggagctggtggaagaaagccaaacgaagttaaaggaagtgttccccatggctgcgctcatgccaggggcggagaaactcatcatccacctgcggaaacatggcatcccctttgcactagccaccagctcggggtccgcatcgttcgatatgaagacaagccgccacaaggagttcttcagcttgttttcccacattgtgctgggagatgaccccgaagtgcagcatggcaagccagacccagacatcttcctagcttgtgccaagaggttctctccccctcccgctatggagaagtgccttgtctttgaagatgctcccaatggggtggaggcggccctggcagctgggatgcangtggtcatggttcctgaacggaacttgaaccgagatctgacaacaaagggccaccctggtgctgaattccctgcagggactccagcccgacctggttgggtttgccctcctatgantganagggaagggcctccagtcttccgcccccagccccatctcatggtccacactggctgggggaaaagggaaaagaaaatcaggcaattccttcaatcccaaccggccgctg

SEQ ID NO: 86432 - DNA, 648 bp, Homo Sapiens
  misc_feature (638)..(638): n is a, c, g, or t
ctcaagacccctgtctcctgaaaagctccacctggcaacactctcaagcctctcagagattcattttcctcaagttaaaaggttggaagctcccttctgccagcatatagagcccttgtcagaaccatctgcattgttgggacaacgcttcgaacggcaaacgcagtaatggtgtggttctttaagaaactggcagaaagacagccagtgagacagatacaggggacacaggggtgttgctcagccacgtggatggggctcggtgtggaatgggctctgattcccccaataatcgaggcctgcaaattccctgcaaatatgctgtgcacatctgtcaggatttatttccaaggcagaatggggctcaaacctcctcttggggaggcaggaaatcagcttgaaaaaggacccaagagcagatgacagccttgccaaatgtctggatggagccatccgggcaggcgcgaggctgccgccacggtcaaaagaccagcatccagaatcccccggggaccgcaccacctacgcagcctctccgaggaccaatgtccacgtcattctctgctcttttctatcttgataataaatgcatgacttctacagtgactcagaacacatcatacacttttatttcaganattgcacgag

SEQ ID NO: 86433 - DNA, 806 bp, Homo Sapiens
acacctgcaactgttacaaatcccactactaccccaacagctacagtgatgcccactacacaagtggaatcacaggaagctatgcagtcagaagggcctgtggaacatgttccagtttttggaagcacaagtggatccgttcgttctactagtcctaatgtccagccttctatctctcaacctattttaactgttcagcaacaaacacaggctacagcttttgtgcaacccactcaacagagtcatcctcagattgagcctgccaatcaagagttatcttcaaacatagtagaggttgttcagagttcaccagttgagcggccttctacttccacagcagtatttggcacagatttatataatttcaaagtttcggctacccccagttcttctttgccaaagcgtacacgtgaagaggaagaggatagcaccatagaagcatcagaccaagtctctgatgatacagtggaaatgcctcttccaaagaagttgaaaagtgtcacacctgtaggaactgaggaagaagttatggcagaagaaagtactgatggagaggtagagactcaggtatacaaccaggattctcaagattccattggagaaggagttacccagggagattatacacctatggaagacagtgaagaaacctctcagtctctacaaatagatcttggccacttcaatcagatcagcagacgacaacttcatcccaggatggtcaaggcaaaggagatgatgtcattgtaattgacagtgatgatgaagaagaggatgatgataacatgatggggaacgttgtgttt

SEQ ID NO: 86434 - DNA, 238 bp, Homo Sapiens
acaaagaaacaaatgcagagaaacaagactgtgtgaaatcttaacatctaaactccaaaaagtgaagaagcaaaactaatcattctgtacaagtaggaatcatgagataatcctaccactgaacccagcaattaatagactttacataatctttattttcacaagctaataaaatatgaaaaatttgcaaagactacaaataaagccattaaaatgactacataattgggaacaaaga

SEQ ID NO: 86435 - DNA, 1105 bp, Homo Sapiens
  misc_feature (34)..(34): n is a, c, g, or t
agaaggctgtcaggctccggtggcaggcaggtgnaggtgctgtctggggggccgtcagtctgggtgctcccacctctgctcccgtgtttggcatgggcagcagggggagctgtgaccactggctcctctgtgggtgctctgtctgctgtagtcagccgagcaggggcgtctgctgtttgtcgctcactagaagagagcccttgccagccctgggttcctgctgccgcagccgcgaaaacagatggcaccgacttggcaggccgcagggagccctggatggccttgccagggtctctcctggagcgctgctgaaggaccttgatcactgcatccttctccaggatctgggcatggagcacctttaacctgctttccatctcctgatgcctgaggccaccagtgagcagaccctcattgaagctgctgctgggtgagggctggggggaatgtcggatgagagtggtgtcacgctgagcagcagccgtggcagccgcatccatggcaaactgcctcatggcacgttcctccaaagacttctgctcccacttggtcatgtcggcctccagcgccaggatctgctcctccttctctcgcagttgttctgacagtcgcagggcgctgagctctggagacccaccactgccactgctaccacctggggcacctgcctgtctctgctgtgcacgcagggccttgagttcctgctccaggcgagtccgcagacgcagctccagctgctcccgcttctcacaggctgcctgcagctgcccgagcgcctgctgcagccgctccactttctccacataggcctgcttcttgcgcagctcctcttcggctcgagctgcccggccctgcgcattgcccagagcctgctccagcagctcggcacgccgccgctggtcctcgatggcgccgcgcagcagtgccatctctcgctccagcttctcttgctcctgctgctgttcgtagctctgagcaagcagcttggccaccatgtcctgactgccggcctgggcctcctgtgtcttgcttgccaggcggcgatttgcagattcccctcgtgccgaattcggcgcgccgtgacttcatactctctcccccttaa

SEQ ID NO: 86436 - DNA, 1127 bp, Homo Sapiens
tcggctaggtagcgaggctgggtgtgtgaatcggcacgaggagagcttcctcgggtactcggccactcggggcatcgcggcggcctttctagccgctgtcccaagggttggtctcgcgctttcggctgcgagctctctgtggtgctggcagcgacatgtggcgcctcccgggactcctgggccgagctcttccccgtacactgggacctagcctctggagggtgactcctaagtccaccagcccagatgggcctcagactacctcctccactttgctggttcctgtgcctaacctcgacaggtcaggtccccatggcccaggcacgagcgggggtccaaggtcccatggatggaaggatgccttccaatggatgtcttcccgtgtctccccgaacaccctatgggatgccatatcttggggcactctggccgtgctggccctgcagctggcaaggcagatccacttccaggcatccctgccagcaggacctcagcgggtagaacactgctcctggcacagtcccctggaccgtttcttctcatctcccttgtggcacccatgctcctcactgcgacaacacatcctccccagccccgatggcccagctcccaggcacactggcctcagggaacccaggcttggccaggaagaagcctcagctcagccccggaacttctcacacaactctttgagaggagctcgtcctcaggacccctctgaggaaggtcccggtgattttggcttcctgcatgccagtagtagcatcgagtccgaggcaaaaccagcccagcctcagcccactggtgaaaaggaacaagataaatcaaaaactctttcccttgaggaggctgtgacttccattcagcagctcttccagctcagtgtttccatcgctttcaacttcctgggaacagagaacatgaagagtggcgaccacacggcagccttttcttacttccagaaagctgcagcccgcggctacagcaaagcgcagtacaatgcgggcttgtgtcatgagcatggcagaggcacccccagggacattagcaaggcggtcctttattatcagttggctgccagccagggccacagcctggctcagtaccgctatgccaggtgcctacta

SEQ ID NO: 86437 - DNA, 869 bp, Homo Sapiens
gcagtactataactgttcctaaggtagcgaggcctgggtggcgaattcggcacgaggaagggttggtctcgcgctttcggctgcgagctctctgtggtgctggcagcgacatgtggcgcctcccgggactcctgggccgagctcttccccgtacactgggacctagcctctggagggtgactcctaagtccaccagcccagatgggcctcagactacctcctccactttgctggttcctgtgcctaacctcgacaggtcaggtccccatggcccaggcacgagcgggggtccaaggtcccatggatggaaggatgccttccaatggatgtcttcccgtgtctccccgaacaccctatgggatgccatatcttggggcactctggccgtgcctggccctgcagctggcaaggcagatccacttccaggcatccctgccagcaggacctcagcgggtagaacacgtgctcctggcacagtcccctggaccgtttcctctcatctcccttgtggcacccatgctcctcactgcgacaagcacatcctccccagccccgatggcccagctcccaggcacactggcctcagggaacccaggcttggcaggaagaagcctcagctcagccccggaacttctcacacaattctttgagaggagctcgtcctcaggacccctctgaggaaggtccggtgattttggttcctgcatgccagtagtagcatcgagtccgaggcaaacagccagctcagcccactggtgaaaaggaccagataactcaaaatctttccttgaggaggtggattccattcagcagtcttcagtcagtgttcatcgtttcattccgggacaggaactggaggggggcccccg

SEQ ID NO: 86438 - DNA, 1293 bp, Homo Sapiens
  misc_feature (81)..(115): n is a, c, g, or t
  misc_feature (920)..(920): n is a, c, g, or t
  misc_feature (945)..(1183): n is a, c, g, or t
tctataccactcatatagggcgctagctttccgcagcgaacgacgagcgcagcgcagtcagtgagcgaggaagcggccggnnnnnnnnnnnnnnnnnnnnnnnnnnnnnnnnnnncagtcgacggtaccggacatatgcccgggaattcggccattacggccgggggctcccctggcgactgcctggacagtcagcaaggaattgtctcccagtgcattttgccctcctggctgccaactctggctgctaaagcggctgccacctgctgcagtctacacagcttcgggaagaggaaaggaacctcagaccttccagatcgcttcctctcgcaacaaactatttgtcgcaggaataaagatggctgctgaaccagtagaagacaattgcatcaactttgtggcaatgaaatttattgacaatacgctttactttatagctgaagatgatgaaaacctggaatcagattactttggcaagcttgaatctaaattatcagtcataagaaatttgaatgaccaagttctcttcattgaccaaggaaatcggcctctatttgaagatatgactgattctgactgtagagataatgcaccccggaccatatttattataagtatgtataaagatagccagcctagaggtatggctgtaactatctctgtgaagtgtgagaaaatttcaactctctcctgtgagaacaaaattatttcctttaaggaaatgaatcctcctgataacatcaaggatacaaaaagtgacatcatattctttcagagaagtgtcccaggacatgataataagatgcaatttgaatcttcatcatacgaaggatactttctagcttgtgaaaaagagagagacctttttaaactcatttttgaaaaaagaggatgaattggggggatagatctataatgtntcactggtcaaaacgaagactagcnnnnnnnnnnnnnnnnnnnnnnnnnnnnnnnnnnnnnnnnnnnnnnnnnnnnnnnnnnnnnnnnnnnnnnnnnnnnnnnnnnnnnnnnnnnnnnnnnnnnnnnnnnnnnnnnnnnnnnnnnnnnnnnnnnnnnnnnnnnnnnnnnnnnnnnnnnnnnnnnnnnnnnnnnnnnnnnnnnnnnnnnnnnnnnnnnnnnnnnnnnnnnnnnnnnnnnnnnnnnnnnnnnnnnnnnnnnnnnnttggtgaaccccaaaatgcaccattggcgctctaaccttggggcaacaacagcaaaaactcccttctcccaaaaattaaatttatttaatttaacccatttaaaaaattt

SEQ ID NO: 86439 - DNA, 843 bp, Homo Sapiens
  misc_feature (270)..(291): n is a, c, g, or t
atctacgctgcctccctcttcacttgatctccctctcagtctcttttttgtggagagaagggtatgacagaacttttttctcaaaagatgataaacaatggcatcaaatggacaaaatggttataaagtaactttaaaaaatctgaaccccaaaggaatccaggacacatacagataattcagaggtatacttctgatttggggcaaattcccagactaaagaaatgatcatctcaggtaaatgttacaatagatgaaactaagtccagnnnnnnnnnnnnnnnnnnnnnnaaagtgtcctcactaccaccttcagctatcaatcatttctgatagctcaagcagaaggtcatcttcatctttcccaggatccaggtcaatctcagcttccaatttgcctcctgaaatctcccatattagtttctcaaaatcatcctccacagagagtgggggctttcctgttgaggcagagctgagtcggcgagttttcatgctcatttgggatgaggaagggccagacacctccgggggtgaggaatctgaagaggactgggttggaggcagcacaagactgtctctaggattttctgcttcaggcacagtgactgatttgtcctcagagacaagcgggacaacagccacagctgcctttttggctgggggttcctgtaggacactgctggagctgagtggcttcacagcggcaatgacagcagcgtgcatctccactgccttacgttttggggccaatttgggggatgacacaactttaaccacagatggcttcacgttcactttgggtttagctttaccccttttttccaaggtctgtgctgcacattt

SEQ ID NO: 86440 - DNA, 1266 bp, Homo Sapiens
  misc_feature (1125)..(1125): n is a, c, g, or t
  misc_feature (1219)..(1219): n is a, c, g, or t
gctgtgaatgggaacatagaatcggagctcctggagttgaggaaataaaaagtaactctttttttgaaggcgttgactagggaacatatcagagagagacctgctgcaatatctattgaaatcaaaagcattgatgatacctcaaacttcgatgagtttccagaatctgatattcttaagccaacagtggccacaagtaatcatcctgagactgactacaagaacaaagactgggtcttcatcaattacacgtacaagcgctttgagggcctgactgcaaggggggcaataccttcctacatgaaagcagcaaaatagtactcttgccacggaatcctatgtggagcagagttctttgtataacatcatgcttttcctctcacactcttgaagagcttccaagaagttgatggaacccaccaatatgtcatagtaaagtctcctgaaatgtggtagtaagaggattgtcttccataatgcatctgaaaaactgtaaacaaagacaaccatttctactacgtcggccataaacagctatcctgctttggaagagaagcatcatgagccaatttgataggagttttaaaaataacttgagttttcctaagttcatcagaatgaaggggaaaaacagccatcatccaacattattgagattgtcgtgtatagtcatcgaatatcagccagttcctgtaattttgtgacacgctctctgccaagcccaccaagtatttcctttatagctaaaagttccatactactaaggaaataaagcaataaagacagtctcagcagccaggattctggctgaaggaaatgatccgccaccctgagggtggtgatggtagtttctacccatacctcatcctcaagcgagtggcttatagcctccattcatggtgcactttatttatgggactaagataaagactgtcaatccattgatttatctcctcctgtcccccatctaaaatacccatgctgcttttctgagtgctgatgggggataccagcttgatccactgttgctcttagaaggcccagaaagtctttgggcattgccaagaaatcccggattatgtggaaaaccctcactttctcatcacggctgtgacagactatccnctaagacagatcttgccgtggactagcaatgactgcgagtgctgccaatgggaactcaatttattgctgggaacctaacgaggagagcccaggncctaggtaggaggcctggaacccctctggggatagggatgctgttcc

SEQ ID NO: 86441 - DNA, 582 bp, Homo Sapiens
agagttaaaacggaaatttgaacagttgaaacaggagagaattagtcgatatcagggggtgaatctctacattaagaacttggatgacactattgatgatgagaaattaaggaaagaattttctccttttggatcaattaccagtgctaaggtaatgctggaggatggaagaagcaaagggtttggcttcgtctgcttctcatctcctgaagaagcaaccaaagcagtcactgagatgaatggacgcattgtgggctccaagccactatatgttgccctggcccagaggaaggaagagagaaaggctcacctgaccaaccagtatatgcaacgagtggctggaatgagagcacttcctgccaatgccatcttaaatcagttccagcctgcagcgggtggctactttgtgccagcagtcccacaggcttccaaggaatgccaagtgctatacgccagtctgggcctcgtccaactcttcgccatctggctccaactggtaatgctccggcctctcgtggcctccctactaccactcagagagtcggtgagcaaactggcctttagaagtgtggcctggggagg

SEQ ID NO: 86442 - DNA, 377 bp, Homo Sapiens
caaaaattattttggcttgtaatagccaagacttattgtctcttctttctccccatatggctttgatttgtccaggttcttgatgaagacgtttcccacaccagattttctcaaagagggatccctctgagaccacatgatgcggattggctttcccttaatcacatcaaagttcatggtgcccaaagcccgctcagctgtaagagagaaacacatttcaataaggagagaaaacgtcagctcccacaggccaacagcctaagaacagattactccaggacttttcaagtgaggtattgcatcaaagttatcaagtcatttagtctgcaatccacctatggagacaagtgacaaaacctgtaaagcaaatgatctgg

SEQ ID NO: 86443 - DNA, 1690 bp, Homo Sapiens
gcagtaactctaacggtttaaggtagcgaggcctgggtggcgaattcggcacgagggcagctaccccatggcctccctgtacgtgggcgacctgcattcggacgtcaccgaggccatgctgtacgaaaagttcagccccgcggggcctgtgctgtccatccgggtctgccgcgatatgatcacccgccgctccctgggctatgcctacgtcaacttccagcagccggccgacgctgagcgggctttggacaccatgaactttgatgtgattaagggaaagccaatccgcatcatgtggtctcagagggatccctctttgagaaaatctggtgtgggaaacgtcttcatcaagaacctggacaaatctatagataacaaggcactttatgatactttttctgcttttggaaacatactgtcctgcaaggtggtgtgtgatgagaacggctctaagggttatgcctttgtccacttcgagacccaagaggctgccgacaaggccatcgagaagatgaatggcatgctcctcaatgaccgcaaagtatttgtgggcagattcaagtctcgcaaagagcgggaagctgagcttggagccaaagccaaggaattcaccaatgtttatatcaaaaactttggggaagaggtggatgatgagagtctgaaagagctattcagtcagtttggtaagaccctaagtgtcaaggtgatgagagatcccaatgggaaatccaaaggctttggctttgtgagttacgaaaaacacgaggatgccaataaggctgtggaagagatgaatggaaaagaaataagtggtaaaatcatatttgtaggccgtgcacaaaagaaagtagaacggcaggcagagttaaaacggaaatttgaacagttgaaacaggagagaattagtcgatatcagggggtgaatctctacattaagaacttggatgacactattgatgatgagaaattaaggaaagaattttctccttttggatcaattaccagtgctaaggtaatgctggaggatggaagaagcaaagggtttggcttcgtctgcttctcatctcctgaagaagcaaccaaagcagtcactgagatgaatggacgcattgtgggctccaagccactatatgttgccctggcccagaggaaggaagagagaaaggctcacctgaccaaccagtatatgcaacgagtggctggaatgagagcacttcctgccaatgccatcttaaatcagttccagcctgcagcgggtggctacttgtgttgccagcagtcccacaggctcagggaaggcctccatattatacacctaaacagttagcacagatgaggcctaagtccacgctggcagcaaggttgggagacctcaaggcttccaaggaatggccaagtgctatacgccagtctgggcctcgtcaaacttcttcgccatcttggctccaacttggtaatgctccggcctctcgtggctacctattacactcaaagagtcggcgtcccaaaagttgtgagaattagggcagccgcctgtgtagtggtggttgccccgggtgtgccccttaaatagttccatttcggagctgatcgccaaaactctgggccccagcgggcattgaggcgaggctgatgtcctgtgggggaccccggaacagatggggacgtgccccacaagtcattgggaacg

SEQ ID NO: 86444 - DNA, 921 bp, Homo Sapiens
aagcctcctctgggagcgggcagttggcgaccctgcactgacccgcgtccctccgtcccgagcccgcgcgccctcagagggtgcccggacagactgaagccatggcgattctttttgctgttgttgccagggggaccactatccttgccaaacatgcttggtgtggaggaaacttcctggaggtgacagagcagattctggctaagataccttctgaaaataacaaactaacgtactcacatggcaattatttgtttcattacatctgccaagacaggattgtatatctttgtatcactgatgatgattttgaacgttcccgagcctttaattttctgaatgagataaagaagaggttccagactacttacggttcaagagcacagacagcacttccatatgccatgaatagcgagttctcaagtgtcttagctgcacagctgaagcatcactctgagaataagggcctagacaaagtgatggagactcaagcccaagtggatgaactgaaaggaatcatggtcagaaacatagatctggtagctcagcgaggagaaagattggaattattgattgaccaaaacagaaaatcttgtgggattcttctgtcacctttccaaactaccagcaaaaaatccttgctcgagcccatgtgtatgaaagaacctcaaagctccctattatcatcatcatcgtatcaaattggggtcctctatatcattggttcccctcctctggggggggattacttggcccagctggggtggaagaaataggaaaggaagaaagttaccattaaccaaggattttgaaaaaaccaaggaggttaaaaggcaatcccatggggactccaagcctttcccactaccgggacggaagggatcccggccaatttcctttcaaccttcttttctcaccttt

SEQ ID NO: 86445 - DNA, 582 bp, Homo Sapiens
aggacatctactttggactctggggtttcaacagctctctggcctgcattgcaatgggaggaatgttcatggcgctcacctggcaaacccacctcctggctcttggctgtgccctgttcacggcctatcttggagtcggcatggcaaactttatggctgaggttggattgccagcttgtacctggcccttctgtttggccacgctattgttcctcatcatgaccacaaaaaattccaacatctacaagatgcccctcagtaaagttacttatcctgaagaaaaccgcatcttctacctgcaagccaagaaaagaatggtggaaagccctttgtgagaacaagccccatttgcagccatggtcacgagtcatttctgcctgactgctccagctaacttccagggtctcagcaaactgctgtttttcacgagtatcaactttcatactgacgcgtctgtaatctgttcttatgctcattttgtattttcctttcaactccaggaatatccttgagcatatgagagtcacatacaggtgatgtgctctggtatggaatttgaaaccccaatggggccttggcact

SEQ ID NO: 86446 - DNA, 626 bp, Homo Sapiens
tgtattacttcaggcttgtgggcaaggttaggaagaatcaatcacccttaactataaatacctgcactgtctctgaggacttactattttatgttctttttaatcaataccgatcagaagtttaggttataaaaacaattctacttcatgctttggtgcttggtaatttttggtgcgtctttaagcattactcttatatatcatatattaaaataccataaaaatgaaattcagacaaaatcactggcaccaaaaatggtttattctgagctgtcttcactttgactatttggggggcttctctcaagtacagatgtgggttggggtcccctggagcaggcaggattggcagtaagagatattggccactcaagtctactgtgtgtgtgtgcctctggaagagtgaagaatggacttcaaaagtaacatcaaaaatctaactgccaccatcctggagacattttgcagggctttcctttcaagtctttcaagtacaggatattaccacaacagcagctgaactgttgtaaccagcatgtttttcctatttccactgtgacctgcagctgactcaaagccttgcgtgacctgacccaggtgcaagagacaggggaagagggatagag

SEQ ID NO: 86447 - DNA, 854 bp, Homo Sapiens
  misc_feature (754)..(754): n is a, c, g, or t
aagttttttgttaatgggtgctgggttggaatacataaagatcccgaacaacttatgaacaccctaaggaaattgagacgtcagatggacatcattgtgtctgaagtttctatgatcagagatattcgagagagggagattcggatctatacagatgcaggccgtatttgtagaccacttctgattgtggaaaaacaaaagctacttttgaagaagaggcatattgaccaattgaaagagagagaatataacaactatagttggcaggatcttgtggccagtggggtagtggagtatattgataccctggaagaagaaacagtgatgcttgcaatgactccagatgatttacaggagaaagaagtagcttattgttccacatatacacactgtgagattcatccctcaatgatccttggtgtctgtgcatctattattccctttcctgatcataaccagtcccctagaaacacataccagtctgctatgggtaagcaggctatgggagtttacatcaccaacttccatgttcgcatggacacattggcccatgttctctattatcctcaaaaagccacttgtgactacacggtctatggaatatctacgatttagagagctgccagcaggcatcaactcaattgtggccattgcatcatacactggatataatcaggaagactctggtatcatgaatcgttcagctgtagaccgcgggcttcttcaggtctgttttctatcgctcatacaaagnaacagggatcctaaaaaaggaatttggatcaagaaagagttttttgagaaagccctacacgtgaaaacttgcccagggcatggaaggcttgcccttttac

SEQ ID NO: 86448 - DNA, 764 bp, Homo Sapiens
  misc_feature (229)..(229): n is a, c, g, or t
  misc_feature (289)..(353): n is a, c, g, or t
aaatcccgaagacccatgccaacaaacagtgtccaaaccagaagtgagcaaagaggccactgcagaccaggggtccaggctggagtctgcagccccacctgaaccagccccagagcctgctccccaaccagacccccggccagattcccagcctacccccaagccagcccttcaaccagagctccctacccaggaggaccccacccctgagattctgtctgagagtgtnggggaaaagcaagagaatggggcagtggtgcccctgcaggctggtgatggggaagagggnnnnnnnnnnnnnnnnnnnnnnnnnnnnnnnnnnnnnnnnnnnnnnnnnnnnnnnnnnnnnnnnngagtgctgcagcagctggttgaggaggatcgaatgagaagggcacacagtgggcatccaggatctccccgaggtagcctgagccgccaccccagctcccaactggcaggtcctggggtggaggggggtgaaggcacccagaaacctcgggactacataatccttgccatcctgtcctgcttctgccccatgtggcctgtcaacatcgtggccttcgcttatgctgtcatgtcccggaacagcctgcagcagggggacgtggacggggcccagcgtctgggccgggtagccaagctcttaagcatcgtggcgctggtggggggagtcctcatcatcatcgcctcctgcgtcatcaacttaggcggatgctgcatgagtctgaaacaccaataaacggagactgcatgaaaaa

SEQ ID NO: 86449 - DNA, 734 bp, Homo Sapiens
aacactgatttcaggcacaatggctgaatccacttctgggtcatctttctcctcctcttggttggtttacaagagtagtgaatacttcagttatggacagaaagaaagacacaaactctgaaacggagacttcacttttcactacaaagaaatcaaagtcactgagttctcattgttgtgtgtatctgctgcccctgtgcaaaaataggggattcaaacttaactttaggagcaagaactggataaaagattcatctactgattcaggtaacaagttttaagatggtattgctcacatcacatgaacaggttggtaaaaggtccactgtgtttctttaccactttggtcttgctgcagtattatggtgccctagtaggtacattcaggtttagctagtttcagtctgcgcaatcaggaagcaggtcactcagtgcaatgactccattctgggaggatttagggtaaacagagaagaacctcatttggtcgagttttagatagtatgtgtcactctgctggttgtgttgttggaattattttccaaagtggtttatgataaacccagccatctccctgaaacaaataaaaagataaagaatcatccctctaatattatcaaaatcagtaaccaaaactagaagcaacaccttcactgaaatggaattctattttcacattcaaaaacaagtttttgtgaaggaataaagtctttgtgattaagacatcaaaaaaa

SEQ ID NO: 86450 - DNA, 787 bp, Homo Sapiens
  misc_feature (755)..(755): n is a, c, g, or t
ttaacgatccacagagactccaagatcgaaagaaatggtctcaatgttctcgtgaacaaaggaaacaatagcctgccagtccagaatgtctcccagccagctattctgacgactgacactgcaacttctgtcctttgtgccttccagagtgtgttacattcttgtacaaaccaagagtgatacagtctgtgcccaaagttctagtacttgcttgttcaattacagcagtattgttcaccttatctcctagaattttatggagcttgtgagcttatgccattctcgtccatactgatacacgttgttagccgcagaatgtcagggctctttggactacctgagcctcaggaagccaatttgcccactcagggtgatttgctagagtttcattaatcaaattacttgtgacttcaatcatgtgtacactctctttgatgtaccctttgcagtcaggagtagggctaaaagaagagttcctatcactaacaaaaatactgatgaaacatgctatattatttctatctaacatcttctcgcagaccagatgatcatcttgcgtgactcaacttgtaacaagaacttttctcaagccctgagcaatgcgccaaggcgcgagagctccctgaacgctccttcaggaagctttctataatgccccaccacacatggtagcgtttctctaggaaatacaccgacgcgtggtcgacgatatcccgggattccggaccgtaacagcctgcattttcttttacacnaacgcgtgggtctatagttcacctaaaacgct

SEQ ID NO: 86451 - DNA, 989 bp, Homo Sapiens
acttctactccaggaaccgtggtcaaaggccaactcttctaccagcctcactcccagaaaccctaaatactgtctcagcactcgctctgtagagttcagctttgaaacatgctatcacagctcttcagtggcattcaactaaaaggcaacatcttaattaggcagatatgctccagggacaagagcaaaacagaaggcatgaacgagagaggaaaaaatagaaaagacactgaataggaacaggcaaacgggcaaggcagaccagatagaggcagcaaacatgggccaaaacgcaaaacaccaagtggtccatcagctcaggccagcacgccaccttctcaattcattccagaaaaattagcctggagccagggggcggcagagagcacagtgattggtaacaaaaataggaagagttgggtaacaaaataggagacgaaagagatgtcattctaatcagcatgaagtgaccagggtgatgatcagcaagacaccaggcagcaggaaccctgtgaggcaccaactacgtagccaagtgtatctaacggagaatccagggcctgaccaccaacacccgctttggccttcacctgccctacgtctgcagcagcacctctggctcagacaatgagcaatacagagtgtatcctaattcgtctatttcttcaggggtgagctctgcaaataagttcaccttggggtttagggcactgggcaggactccagcctctaagtagctgataagtcccctcaaggcctgcaggaaacggtcggccagcatatccggagaccagtcagcctcctcctgggccaagtggaggatgacattggttagctggctggcagtgaggtggcccagagccggggtggacttgcatatggccttgaggatcttgaggcacagagatcggcagcccgagtcagcctggtccagagcccgcaggcgcctcgtgccgaattcggcgcgccgtcgacttcatactcttcgc

SEQ ID NO: 86452 - DNA, 878 bp, Homo Sapiens
ttgtcacagatctcccgcctgttgtcggtggtgagcctcttcatggccagctccaggtcctccttctgcttggctacaaagtcccggtcaagaagctgctttttctgcgtgtgctcctccatcttctgcttcatgctttccttccgctgctgtcgggggagcttctccacctcgttcttcacctctttcttcatcagtttgagctgctcttggaacctggtgtagtcccgatcctgctccaggcggatccgcctggcctcctcccggcggcgcacggcatggtcttgctccatcttctccacttgctgcttttgctgacgctccaggttctctaattccgtgtcaaagaacttcttcttggcgttgatttcctgttcaaaacgtttatgcatttgctccagctgcagctcatgcttgttactcagctgggtctggttccgatgctcttctttctggagcagccgaagctctcggagttcctggcgcctgagaaatctcatctcctcatccttcttctcatcttcgctgatgatcttggaggtggtgatgctcaccgccacaccatccaccacaaatttgcgtgtccgcttgagggtttttttgtacagtttcgggtcctggccagggaaaaccatcagacaagtctcagcatttcagctaaggacccatggctgtcgcagcaggtgaggccacagctctgctgggcccacagcttcagaaccacccccagagagatgtggccatccatcgtccctcttgcctcaacttaacctaggacctggggttctgagcattacttcccttgctcattgcctgatctcagccttcagaactgtgctgaggtcggggagagtctccgtcaactggtaccgagctca

SEQ ID NO: 86453 - DNA, 582 bp, Homo Sapiens
ggggctgggccacacgggagacaggagcaggcagagggcatgcccaagggagctgtcagagacggagggttttgggactgccgagtcaggctgggggccttctctggatccacccctttgtccctttgtcgtcttctccaggattcaggttgggcctgctgggaggctggactgatccccactctatgatccctggcaggggttgtgccctggctggccagatgctctccctccccacccaccagcaggaagacttcaccccagtgggggacaggattcatctcaggacagggggcagagatgaaaccattcacagccactgcctgttcctgttcccgggtcccacatccatagccagtgaaggctggaggccatggtaggctgtgcttcctgcctgtgggcctctcactcccagaacagtcgacttggagactgtccctcacagcatcctctcctctgaccagatccttgtttcctccccttggtgctcgaggctctccaacatcctcatctgtgcactttctctggcttcctatatcctggagttctgcaacatcctcaactccaccgtcattctaattt

SEQ ID NO: 86454 - DNA, 680 bp, Homo Sapiens
taggcagtacgaggctgggtggttaatcggcacgagggttagttactacctcctctcctgacaatactgtatgtcgtcgagctccccccaggtctacccctcccggccctgcctgctggtgggcttgtcatagccagtgggattgccggtcttgacagctcagtgagctggagatacttggtcacagccaggcgctagcacagctcccttctgttgatgctgtattcccatatcaaaagacacaggggacacccagaaacgccacatcccccaatccatcagtgccaaactagccaacggccccagcttctcagctcgctggatggcggaagctgctactcgtgagcgccagtgcgggtgcagacaatcttctgttgggtggcatcattccaggcccgaagcatgaacagtgcacctgggacagggagcagccccaaattgtcacctgcttctctgcccagcttttcattgctgtgacagtgatggcgaaagagggtaataaccagacacaaactgccaagtatgggtggagaaaggagtttctttagctgacagaatctctgaattttaaatcacttagtaagcggctcaagcccaggagggagcagagggatacgagcggagtcccctgcgcgggaccatctggaataggtttagcccaagtggagcctgacagccag

SEQ ID NO: 86455 - DNA, 947 bp, Homo Sapiens
ggattcaatgtcagacaaagagatgtcactccaacttccttctaaatctacatcttgtccaagttcatggaatttcttgtggatttcctgtcgtagaagctccttaagctctgctagacactgagtgaacttaatttggtcaggatcacaaaagtccagaagggtgtcacagacatgataacctaaggacttcagatcttcgatggtaaagtgggtgtctcttttattacccagggtggacccgccaaaggtagactccatggtgtagctgtttaggattcccatccgccacataacaactcgtcctgttccttctttgcatttttggaccttaaaattacaactgtgaaaagagaacttttgatcatgttcctggtgtaccaaatacaagggaaagactccttcagaatggttttataatgcctgttcaaatcccttccggccaaggaacaccgataattccccacaatcacaccatctggatttaacatgggaagcaccttgaagacaaaaatatctctgaggagctgggcatctggggagttgctaaggatgaagtccaaaaagcctttcataacccaggagccattactttctccagggtgaactctggcactcaagaccacagctttctttgcagctgcctcttgaggggtctgggatgggttggtgatggtgagcaagtaaacggtatttcctgctaggctcctgcataaagtttggagcttgcagaactgagactggatagggttgtttgccactgacaggaggcagcattgcaaatcagtgtatgtatatgggtagaagtgtgcaaagaagcaagtgtcctggtcatatggaaactgaatggtccacgtgagacagtagaagggctgctgcccatcatccgtgttgttcttgtagtacttgatttcatttccttctctcccccagccaatataaagggt

SEQ ID NO: 86456 - DNA, 576 bp, Homo Sapiens
attctgtgacgggcaggaaaccattacaccaccacctgggctgtgctctccggctcccgccgccacccccgccctcgccttcgcctccgcctccggtgcacattaaagatccaaagtcatgactgactccaagtatttcacaaccaataaaaaaggagaaatatttgaactaaaagctgaactcaacaatgaaaagaaagaaaagagaaaggaggctgtgaagaaagtgattgctgctatgaccgtggggaaggatgttagttctctctttccagacgtagtgaactgtatgcagactgacaatctggaactaaagaagcttgtgtatctctacttgatgaactacgccaagagtcagccagacatggccatcatggctgtaaacagctttgtgaaggactgtgaagatcctaatcctttgattcgagccttggcagtcagaaccatggggtgcatccgggtagacaaaattacagaatatctctgtgagccgctccgcaagtgcttgaaggatgaggatccctatgttcggaaaacagcagcagtctgcgtggcaaaactccatgatatcaatgc

SEQ ID NO: 86457 - DNA, 583 bp, Homo Sapiens
acttacggaagggaggtggctcagggacctccactgtgggacccttgagacgcttccactctgattcagaaacacacttctacctctttactgttaactcttaacagatgcagtcagcagtttctgggcacttctctcagtaggtgcctcatgctgacttctccagtagggtggcaggacaaactaccaaggaattgcctcagcctcctaccagtcctccctcacccaccttctgtctaggttcacttggtttgtcatcaggaactgagcaggtccaggactcagctttctacttcagcctaagccagtactccttgtttgaggtaaaagccttaaaatttagctccctagctcttgattagaagcaatttggagtaagtgtgttttgatttaggcagggtagcttgggatacctttttaaaaacaccagatattaaaatgtctggcaaggttagaatcagactagatgatttgcttctaaaaattagtttcagtgagtcccagggactaattaaggtttattttaaaaagtgtctaccttggtacgcagccacctcctgcatgctgtgcatgttattgggac

SEQ ID NO: 86458 - DNA, 582 bp, Homo Sapiens
aaagaactagcttgtgagcaggctcatcagtatcttgttaccaaagcaaaaaacagatggtcagacttgtctaagaattttctagaaaccgataatgagggcaatggcattcttcgacgccgggacataaagaacgcactgtacggttttgatattcccctcacaccaagagagtttgaaaagctttgggcaagatacgacaccgagggaaaagggcacattacttaccaggaatttttacagaaattgggtattaactattcgcctgctgtccatcggccctgtgcagaggattatttcaacttcatgggtcattttacaaagccacagcagctacaggaagagatgaaggagctgcagcagagcacagagaaggctgtggcagccagggataagcttatggaccgccatcaagatatcagcaaagcattcaccaaaactgatcaatccaaaaccaactacatatccatatgcaagatgcatgaagtgctggaagaatgtggatgttctcttaccgaaggggagctgacccatctgctaaacagttggggagtcagccggcatgataatgctatcaattac

SEQ ID NO: 86459 - DNA, 894 bp, Homo Sapiens
  misc_feature (670)..(670): n is a, c, g, or t
  misc_feature (710)..(710): n is a, c, g, or t
  misc_feature (772)..(772): n is a, c, g, or t
  misc_feature (801)..(801): n is a, c, g, or t
ggctttatagttccgggtgtggcgcgcggacggaaagtttatgccgacggaaagtttatgccgacggactgtgtccggcgatgggcacgggcatttcttcgtttatagctgtctgtttgcattctgattgggaacactgggatcattttcatcatgccgacagtggtggtaatggatgtatccctttccatgacccgacctgtgtctattgaggggtccgaggaataccagcgtaagcacctagcagcccatggtttaacgatgctgtttgagcacatggccacaaattacaagcttgaatttacagcacttgtggttttttcatcactttgggagttgatggtccccttcacgagagattataataccctacaggaagcactaagtaatatggatgattatgacaaaacctgcttggagtctgcattagttggtgtttgcaatatcgttcagcaagaatggggtggtgcaattccttgccaggttgtcctggtgacagacggctgtcttggcattggtagagggtcactgcgacattccctagccactcaaaatcaacgaagtgagagcaacaggtttccactaccttttcctttcccatctaagttatatatcatgtgcatggcgaatttggaggagctccagagcaccgattccttgggatgccttngacgtctcatagatttaaaccatgggtgaagggcagattnttactattgatggccccctgtgctttgaagatggtacagtctatggttggaaaaactgatanattttggcatatacgccctttcctgctgnttctcaagtgtggccaccctaactggctgatgtacaagtccttccccagccagaaaacctttttggtggtaaaatgaagaaatttggatccta

SEQ ID NO: 86460 - DNA, 921 bp, Homo Sapiens
atcagtgatgccagtacccacctcatcaccttctttgttaagtgctataggtaagaccagatgtctggacagaactgggggacttgaaatatcagctatatcaataaatcccactatttccaaatctgtgttaatgactttagggataggatcaatttcttcatctacaacaaaaggttctggcctggggaagacttgtacatcagcagttaggtggccacacttgagaacagcatggaaaggcgtatatgccaaatctatcagttttccaaacatagactgtacattcttcaagcacagggggccatcaatagtaaaaatctgcccttcaccattgtttaaatctatgagacgttcaaggcattccaaggaatcggtgctctggagctcctccaaattcgccatgcacatgatatataacttagatgggaaaggaaaaggtagtggaaacctgttgctctcacttcgttgattttgagtggctagggaatgtcgcagtgaccctctaccaatgccaagacagccgtctgtcaccaggacaacctggcaaggaattgcaccaccccattcttgctgaacgatattgcaaacaccaactaatgcagactccaagcaggttttgtcataatcatccatattacttagtgcttcgctggtattcctcggacccctcaatagacacaggtcgggtcatggaaagggatacatccattaccaccactgtcggcatgatgaaaatgatcccagtgttcccaatcagaatgcaaacagacagctataaacgaagaaatgcccgtgcccatcgccggacacagtccgtcggcataaactttccgtcggcataaactttccgtccgcgcgcccggacgcgtgggcggacgcgtgggtcgacgatatcccgagaattccggaccggtccag

SEQ ID NO: 86461 - DNA, 294 bp, Homo Sapiens
cccctcaaacttgaaaagaaggacagagccacacaagaggacagctccttctgcagtgcctcctctggcctgactgaaaggagacagcctcagagctatgcctccagacgcatcattcctcttgcaacactgactgttttcacagcaagatgggccctttagctctcctcatgaaatgtgaggctgtgtgccctctctgccttcctctgactacagaggaccactggaatgtatttatggagttggaagagtcagaatgcgtttgcctatgaaaattttttttggaactgaaac

SEQ ID NO: 86462 - DNA, 1418 bp, Homo Sapiens
atgggggagaaagtatgaagtcgacggcgcgccgaattcggcacgagggcagacaatgcgacccgaccgcgctgaggctccaggaccgcccgccatggctgcaggaggtcccggcgcggggtctgcggccccggtctcctccacatcctcccttcccctggctgctctcaacatgcgagtgcggcgccgcctgtctctgttcttgaacgtgcggacacaggtggcggccgactggaccgcgctggcggaggagatggactttgagtacttggagatccggcaactggagacacaagcggaccccactggcaggctgctggacgcctggcagggacgccctggcgcctctgtaggccgactgctcgagctgcttaccaagctgggccgcgacgacgtgctgctggagctgggacccagcattgaggaggattgccaaaagtatatcttgaagcagcagcaggaggaggctgagaagcctttacaggtggccgctgtagacagcagtgtcccacggacagcagagctggcgggcatcaccacacttgatgaccccctggggcatatgcctgagcgtttcgatgccttcatctgctattgccccagcgacatccagtttgtgcaggagatgatccggcaactggaacagacaaactatcgactgaagttgtgtgtgtctgaccgcgatgtcctgcctggcacctgtgtctggtctattgctagtgagctcatcgaaaaagaggtgccgccggatggtggtggttgtctctgatgattacctgcagagcaaggaatgtgacttccagaccaaatttgcactcagcctctctccaggtgcccatcagaagcgactgatccccatcaagtacaaggcaatgaagaaagagttccccagcatcctgaggttcatcactgtctgcgactacaccaacccctgcaccaaatcttggttctggactcgccttgccaaggccttgtccctgccctgaagactgttctgaggccctgggtgtgtgtgtatctgtctgcctgtccatgtacttctgccctgcctcctcctttcgttgtaggaggaatctgtgctctacttacctctcaattcctggagatgccaacttcacagacacgtctgcagcagctggacatcacatttcatgtcctgcatggaaccagtggctgtgagtggcatgtccacttgctggattatcacccaggacactatagaacaggaccagctgagactaagaggaccactaagcagctcactctgaccatcacactttcacctcttttccattgagattggagggaaattaattatttttgatctgtagatgttacaattctggttcgagaaatttgttaaaaacttatttgttatttgcttctaccacttgacattttattttcgtctgtctaca

SEQ ID NO: 86463 - DNA, 582 bp, Homo Sapiens
atgtgaggcagctctgggggcggtgtatcctgcatcatcagaaattccctcctcggcctggaaaagacagccagcatatccatcgcagaccccttcttcaggagcgcccagccctggatcgcggccctggcagggaccctgcctatctcgttgctgcttctcgcaggagccaggtacttcttgtggagacaacagaaggaaaaaattgctctgtccagggagacagaaagagagcgagagatgaaagaaatgggatacgctgcaacagagcaagaaataagcctaagagagaagctccaggaggaactcaagtggaggaaaatccagtacatggctcgtggagagaagtctttggcctatcatgaatggaaaatggccctcttcaaacctgcggatgtgattctggatccagacacggcaaacgccatcctccttgtttctgaggaccagaggagtgtgcagcgtgctgaagagccgcgggatctgccagacaaccctgagagatttgaatggcgttactgtgtccttggctgtgaaaacttcacatcagggagacattactgggaggtggaagtgggggac

SEQ ID NO: 86464 - DNA, 1070 bp, Homo Sapiens
ctttcctgcaccccaggtttcctatctgtataaggggaaaataaggtggtaccaactcaaacactgtcatatgaataattgaatgagtatcagtaaagtgcttcagtgcgtgcttgtagctttatggttgtgattggttgctgtggagggggaggccctcagatctgagctgggcagggagaagcagagaaaagttacttcagcctgaggctccccactttcgttagctaagcccggggttactggtatctctagggaatgatcaagcactcggtcagaattggaggaactctcttcttttggtattgggcaaacggtcagggcagtgggctccaaggtcaaaattctgaatacaggatacagaggctcagaggaagaggcgtgcagaaatgtgtagatatgagatccatccgtggcattgtagaacgagatatgtccagtctcatagtccaggatgacccccactttcctaggaggctcaggaagtttcaggttggttctgggctcagtgagagcccgatacttattcccatcagtcaggcccatagtccagtatccgttctccggtgtcattttgacccaaacttttttcctctccacgttcttactacataccccaatatgccactcttttctgtcccccacttccacctcccagtagtgtctctctgacatgaagctttcacagccaagcacacagtaacgccattcaaatctctcagggttgtctggtaggtcatggggctcctcagcacgctgtacactcctctggtcctcagaaacaaggaggatggcgtttgccatgtctggatacagaattacatctgctgcagagagtttgaggaggtgtccatggggtcagccatttttcctggatttaagagccacagcatgcaaggcttgggccatgctgaggaggtctgagtccaaagcctggtgtccctagtctgccctaaatgtgactctctcatcgatgtcaggagagaaaaccccaggtatcaggtatcttgtgtccagaggggaagaggagggtgaaatgagggttgcctcagcatctgcctaacccaata

SEQ ID NO: 86465 - DNA, 906 bp, Homo Sapiens
cttctccctccctgctgcttcccgcgccgtcttcccttcccgcgttccccgggagaaacatggccgggagcagcgaggaggcgccagactacgggcgaggcgtcgtgattatggatgattggccagggtatgacttgaatttattcacgtacccacagcactattatggagacttggagtatgtcctcatccctcatggtatcattgtggacagaattgagcggctggccaaggatattatgaaagacataggatatagtgacatcatggtcctgtgtgtgcttaaaggaggttacaaattctgtgctgatctcgtagaacaccttaagaacatcagccgaaattcagatcgatttgtctcaatgaaggttgatttcatcagactaaaaagttacaggaatgaccagtccatgggtgagatgcagataatcggaggcgatgatctttcaacgctggctggaaagaatgttctcattgttgaggatgttgtcggaactgggaggaccatgaaagcactactcagcaatatagagaaatacaagcccaacatgattaaggtagccagtttgttggtgaagagaacatccagaagtgacggctttagacctgactatgctggatttgagattccaaacttatttgtggtgggatatgccttagattacaatgaatacttcagagatctgaatcacatatgcgtcatcaatgagcacggtaaagaaaaatatcgagtctaaagacatgaattctcaccactaaagtccccagatagcatcatatttacgcctgtacttgggaagccagctgtcaagtttgtccccccaggcatcttcactcagcaggatataacacgaacaaatgttcaatgagagagcttctttctgaggttaatattaacgagtatca

SEQ ID NO: 86466 - DNA, 894 bp, Homo Sapiens
ttgcacagccaaatttaaaactgttggaatggatttttctttaactgccgtaatttaactttctgggttgcctttgtttttggcgtggctgacttacatcatgtgttggggaagggcctgcccagttgcactcaggtgacatcctccagatagtgtagctgaggaggcacctacactcacctgcactaacagagtggccgtcctaacctcgggcctgctgcgcagacgtccatcacgttagctgtcccacatcacaagactatgccattggggtagttgtgtttcaacggaaagtgctgtcttaaactaaatgtgcaatagaaggtgatgttgccatcctaccgtcttttcctgtttcctagctgtgtgaatacctgctcacgtcaaatgcatacaagtttcattctccctttcactaaaacacacaggtgcaacagacttgaatgctagttatacttatttgtatatggtatttattttttcttttctttacaaaccattttgttattgactaacaggccaaagagtctccagtttacccttcaggttggtttaatcaatcagaattagagcatgggaggtcatcactttgacctaaattatttactgcaaaaagaaaatctttataaatgtaccagagagagttgttttaataacttatctataaactataacctctccttcatgacagccttccaccccacaacccaaaaggtttaagaaatagaaatataactgtaaagatgtttattttcaggcattgggatatttttttactttagaaagcctgcataatggttcctggattttcatactgcaaacatttcaggaaatttccttgggagaaaaatggggctttattttcaactgaaacatcctagttggccgggttta

SEQ ID NO: 86467 - DNA, 1206 bp, Homo Sapiens
ctccagcctcggctgtggtgcactgacctctcaccccaggcaggctgaagaggaaacccctgcagaggtggccttggacacctggttcctggaagcagctggctgccgtcatctgcagggcctgcagttccaccgcaccctatggccccctggggtcacagcctcccacatccgctaaccagcctcatcacttgtttccgccagcaaaccacaggtccccagaacccacccaggggaagggggctgcaggaccttctcccccagtcagtcactgtcagtgggcccaagtgctgacctcagtttaggtttccctgacataaggtgctaagaaaaatcacaaggattctagggtccctgccagccccctaccttcccggagtctgtttcattaaaaatcccagcctgaaaggtgtgccagggagagtgacctgctggaactccatggcagaaagtaaggggatggattgggggctgggcctgagccaggtattgcctggaaaacttgggcatctgggtaccaccgtccctacgcacccctgggcctgcttagggcccactgctcccatcccatcatagctgttacttcctccaaaaaatcttccgggagcccccagtccctgcacacccagctgccctggacactgtgccgtaagcacctcatacccagctgtccccagactgggctgtgaactcagccaggccagaggcccctgtctggaatgggaccaggcatgcaggaggtacccaataactgctcgctaatgcagggaatgaagcagctgtagctgcagggccttctagctctgtagcccgctcagtgtatgcaagttctggaacggggacagccactcaggaggtacccagtaaccaggcactaatgcagggaatgaagcagctgtagctgcagggccttctagctctgcagcagcactgccctggcctgacctgaggcagcagaactggtgagtggggtgtgggctcccagcccagactgcccaagtttgggtcctgatctgttactcgctgtgcaccctggggaagtcactcagtgacctgcaccctggaagacaagacaaccaactgttggggttcccgggtactgctgcggtcaccacttagacatcagcatgggcacccagtaagctggtaatcccctccttcccaatcaagccccagccaccaaggcaaagctcactgctgctttat

SEQ ID NO: 86468 - DNA, 583 bp, Homo Sapiens
ttcttaggacctcatgggcgatacatccaaaagcctgacaacagtccctgctccattactgactctgtcaaacggttccccaaagaggaggccacagaggggaatgccaccagcccaccacagaacccacccaccaacctcactgtggtcaccgtggaagggtgcccctcatttgtcatcttggactgggaaaagccactaaatgacactgtcactgaatatgaagttatatccagagaaaatgggtcattcagtgggaagaacaagtccattcaaatgacaaatcagacattttccacagtagaaaatctgaaaccaaacacgagttatgaattccaggtgaaacccaaaaacccgcttggtgaaggcccggtcagcaacacagtggcattcagtactgaatcagcggacccaagagtgagtgagccagtttctgcaggaagagatgccatctggactgaaagaccctttaattcagactcttactcagagtgtaagggcaaacaatatgtcaaaaggacatggtataaaaaatttgtaggagtgcagctgtgcaactctctcagatacaagatttacttga

SEQ ID NO: 86469 - DNA, 1203 bp, Homo Sapiens
ggaattcccgggatctttccccgtgggctgagtttgtggctgcatttttatctctggtggctctgctacggcggcgcagaaatgaggcagaagcggaaaggagatctcagccctgctgagctgatgatgctgactataggagatgttattaaacaactgattgaagcccacgagcaggggaaagacatcgatctaaataaggtgaaaaccaagacagctgccaaatatggcctttctgcccagccccgcctggtggatatcattgctgccgtccctcctcagtatcgcaaggtcttgatgcccaagttaaaggcgaaacccatcagaactgctagtgggattgctgtcgtggctgtgatgtgcaaaccccacagatgtccacacatcagttttacaggaaatatatgtgtatactgccctggtggacctgattctgattttgagtattccacccagtcttacactggctatgagccaacctccatgagagctatccgtgccagatatgaccctttcctacagacaagacaccgaatagaacagttaaaacaacttggtcatagtgtggataaagtggagtttattgtgatgggtggaacgtttatggcccttccagaagaatacagagattattttattcgaaatttacatgatgccttatcaggacatacttccaacaatatttacgaggcagtcaagtattctgagagaagcctcacaaagtgtattggaattactattgaaaccagaccagattactgcatgaagcgacatttaagtgacatgttgacctatggctgcacaaggctggaaattggggtgcagacgtgtttatgaagatgtggctagagacaccaacagggggccacactgtgaaggcaggagtgtgagtcatatcaactgggccaaagaatccgggtttaacaaggtggtggggcccatatgattgcctgaacatggcaaaagtgggactaagaacaggagacgctttcgaaccagctacaacggaagtcaagatggaaaaacgccacggccataacggcccccaaatggggcggaaaagcctaatcctaaccccgggggagaaacgggcgaaccggagcctcaaagaagctcgggaatccgcgaaagaaatcacaagtaaccaccccaaagggaccgcgcgagaaggcgggcaacggaacacaacgcagggcgcaccag

SEQ ID NO: 86470 - DNA, 728 bp, Homo Sapiens
ctggtgcggagcttccctccacctgcatgtgaatgggcatcaccactgggctctccccgaggcacaggggctgcaacacagtggccgccaccttcagagccatgccactctgagactcggcaggggggttcagaatggatggggctggcacggtcaccagggccttctttaccaggtcagtggagttgatgttccaggcctcggtggtgatcagctgagccatgccattctccagtctgttattagccaaggcaggaggggagtcagtcatgtccatggagaggttctgggactgcaggtcgtccatcactcagctctgatgccacttggccttccaaggagtaatttaatcactgggaaacctggatcataaactctgaagttctcagaaatgatgtctgtttggtagtggaattctgtgtccaggcaagcctgccacccttcttaatgtgatcctcttcccccaaaggagagaagtcaagacaggccttatgcaagttgactgcttcattcttcctgggaagcccggctccgggggggatgcggggctggccgcgcgtcacaaagaggagcccggcgcaatctggcaaaacccaactttccaccaggctcgccagggccgccagatacgtcaactagaatccatctttcgaagggcactggaaggcgcctgggttttccggcccggggcagaacggcagatccggagactgcccggtgcggtgcct

SEQ ID NO: 86471 - DNA, 744 bp, Homo Sapiens
tgacttcatctgttatatctgtaaaaaatgcctcttctgagtactctgggacatacagctgtacagtcagaaacagagtgggctctgatcagtgcctgttgcgtctaaacgttgtccctccttcaaataaagctggactaattgcaggagccattataggaactttgcttgctctagcgctcattggtcttatcatcttttgctgtcgtaaaaagcgcagagaagaaaaatacgaaaaggaagttcatcacgatatcagggaagatgtgccacctccaaagagccgtacgtccactgccagaagctacataggcagtaatcattcatccctggaatccatgtctccttccaacatggaaggatattccaagactcagtataaacaagtaccaagtgaagactttgaacgcactcctcagagtccgactctcccacctgctaaggtagctgcccctaatctaagtcgaatgggcgcgattcctgtgatgattcccgcacagagcaaggatgggtctatagtatagagcctccatacgtctcatctgtgctctccgtgttcctttcctttttttgatatatgaaaacctattctggtctaaattttgttactagcctcagaatgtatcagaaaataagttaatcaggagctgtaaggaatatatttttaaaaatttttgtttggttatatcgaaatagttacgggcattaaagttagtaaagacaagtttaccatctgaaaaaaaa

SEQ ID NO: 86472 - DNA, 1133 bp, Homo Sapiens
tgcactcatagagaacacatactccagaagaggaatagactgtatttctttctccttcgaagtaggttcgtccttgaaattggcatatcgatttgcattccttacagcatttgccatccacatacgcaagagccgacttaagtgggcagtcaggatttgggcagattagagtttcacactggatggttccattcaggcatgtgcagttcttacagccgtctatccaggactcaaattctcggtaggtggttcccttcatggtgcaagtcctttcacaatagcactgatccaatctattcattcgctgttcagctcgagacagcttggctgatgttttggctaaaatatcctgtagctccatgattttctgcacaagtccatggaagtcattgcaagttggacaggtgcgattaagatctgggcactgagcaataaatccctggggcatgacaagtaattggacatcttgcattatacccttaaaatatccatgcgcattatttctcggtcctagccaaaatgttgtgcctagaggcaagtctgtggagggcttttctactaccctttcataaattttattgcagtcaatgtgtaaaatcaaatgggaagcactgatggctaaggagagcttgtgccacttgtcatcagccaaaatgtaaggaaacacttctgtgtgagggcggtgactgcctgagcggtaatgcagtctgacttcattccgatggccactactttccagttccaggtacctgtgatccaagtggtgaattgagagaataactcctgaatttaagtgggtctgttttagggtcaccaaaatagtaaattcatgtttatttctcagcttctgaaaaaactgttcagctgtagcagtggatgcttttatgcttctgggagtatcttgaaagagaaaggctttcgtcccattatgcagccccgggacctgacgcactccggtcgtggactccccaagttctaactctgttaagacgtcaatctgtagggaagggtccacaccaagcccccaaactgctccgagaccgaagatcaaacagaatgttctcagtaagacccgagactccatggtgcggatcagctcagtccatcgtctccatcccgggaattccggaccg

SEQ ID NO: 86473 - DNA, 1316 bp, Homo Sapiens
  misc_feature (587)..(587): n is a, c, g, or t
  misc_feature (1091)..(1091): n is a, c, g, or t
  misc_feature (1194)..(1196): n is a, c, g, or t
  misc_feature (1219)..(1220): n is a, c, g, or t
ctgtgattagctactagtaaaactatgaatgatttttattttcatttttctcacttccctggattttctagttcttctatgacagatatatttgtttcttaacaagttatttttatttacaaaaaagccaatcaaaggctttgaaatggatggtgaactgcttaaagttaaataatcatcgtttacccaactctgtgtcacagtataggttttaaattaagtcacatgtgctacataagagagattagaatcaaattctgacatcctggaaaaataaaggtacttaaaataattaagtaaatgatagctaaaaaatatatatataatattcagtatgaaaaacattgttttattacttgaaaaataatagaaattgtatataaaatacaaaatatacacttgcctagtgcaattggtctccattttacattttttacatgttttttccctatttaatggcacccaaaatgcggtttcattttcactgccctggtcaactaataccatttaacaacgtatttaagaacttcttcaaaagacagtaaaaacaatttgtaaaataactatgctttcttacatttacaaancagaattttgataatatatgaatattttatatcacataattaccatgtaactactaatctgtttatctatatcaaaatcagagcacataaacattttccaaatacacctgttttaataaagagattagaaaacaggacagtaacagtttcttaaagcaatcttacaggaagtctaatttaatattctgttaggtgatgtactcacgtaggctcccagaagacccagaaactacatgaattgcggaaggctgatttaagatgccagttcttcaataaacagtgaactttgtaattagaatgatttttaagccaaaatactactccttactcttcagaaataaaatatagctatcctcttataatacagcaagaaacataattgttctggtaattgccagcttaactaaagaagacctccccttttcgttttgtccattaatttcttgctggtatcacttcctttggcaaaccacacaggtaatcgtctctttctctctgcagatngaagcctccagtattgatgcctacttcttccttgcttctctaggacttgacccagatctcttcagaccgggaaacatctccttttgttgcatcatggaagggnnngagcccgtgcgggaccatgtttnnaagtctattgccagtgatagggggacggggcaaatgttttaagaccacattctgataggcgatttactatttgaaaaaacgtctttataaatagtt

SEQ ID NO: 86474 - DNA, 743 bp, Homo Sapiens
gtggtagctgcagcctcctggctgtcaatcttgcaccaggaagttgatgagggcagttctcggggaaaggaaggacttcttgatgcttcgtccttgcaaaagcctgacacccagctcgctttgaagaacaaattcgtggactttgtcctggtcccgggcaacttgttggggcacaggaattttgccacaagctttattgttgatcagaactgccatctggacaacctcaggctgctgcaggaactccgggtccacagcaggccatgcctggagcagcacactggcatcccaagtgtagtgggcacagagcttcctcggcaccagcgccaggcctgcaatgccgaggcacagaagcgtggggtcactctaagaacagggaggcttatgagagcaggaccaaagcttccatcccaacacagcctggcttggagctgtgtgaggagccggtgggaagccagaccatggctgctgggtgctcaccactttggcctggtttataatcccaggttgttgggtagcttttgtttttcacaaatggcacgcagagctgtaaagatggatggataagccattctaaagtgtgcatttggaaaaacaaggctgctgatttgaatgggtcatctctctgaagttctgctggtgaaggaatgcctttgtgctacctgagagctgattccaagtactgagcagcattcgctactcttgcctatgcattccccacgcataaagtggggtaccgagcc

SEQ ID NO: 86475 - DNA, 536 bp, Homo Sapiens
  misc_feature (102)..(125): n is a, c, g, or t
  misc_feature (472)..(492): n is a, c, g, or t
gaaaccaaagctgtctcagaaatggccaatttaactttacagtaacaatagacagcacaacacaaactctctcaatacagataaactcacacatactggagnnnnnnnnnnnnnnnnnnnnnnnnaaattattttaatgcattgtagtgtaatatttatgcatactatactgtataacatgttattcaaaagggattgccatttctgagacacagtaacaaaaaaatgaggaaatgattttgcttctatttatagcctctgtcaaaagtcaaaagactataaatgctttgcaaaaatggtttcacgtttgcttaaatgcttcatcacagtcacattcaaaatagtgactctaaacaaagaagaaagcagcactgtcatcagatgcatgataaaccaaaatatgaaaatgggaaatgtttaattaacctagtaattgggtgggttaagtacatgggtgaattttatatgtgannnnnnnnnnnnnnnnnnnnnttcagattaactgcttatagccttagaaagccttttacaaaatt

SEQ ID NO: 86476 - DNA, 1068 bp, Homo Sapiens
  misc_feature (75)..(109): n is a, c, g, or t
ttgaaatacgatcctatggggctgcgccttattcgaacgacgagcgcagcgagtagttgagcgaggaagcggcgnnnnnnnnnnnnnnnnnnnnnnnnnnnnnnnnnnncagtcgacggtaccggacatatgcccgggaattcggccattacggccgggggacttccgcaatcccgatggaataaatctagcacccctgatggtgtgcccacactttgctgccgaaacgaagccagacaacagatttccatcagcaggatgtgggggctcaaggttctgctgctacctgtggtgagctttgctctgtaccctgaggagatactggacacccactgggagctatggaagaagacccacaggaagcaatataacaacaaggtggatgaaatctctcggcgtttaatttgggaaaaaaacctgaagtatatttccatccataaccttgaggcttctcttggtgtccatacatatgaactggctatgaaccacctgggggacatgaccagtgaagaggtggttcagaagatgactggactcaaagtacccctgtctcattcccgcagtaatgacaccctttatatcccagaatgggaaggtagagccccagactctgtcgactatcgaaagaaaggatatgttactcctgtcaaaaatcagggtcagtgtggttcctgttgggcttttagctctgtgggtgccctggagggccaactcaagaagaaaactggcaaactcttaaatctgagtccccagaacctagtggattgtgtgtctgagaatgatggctgtggagggggctacatgaccaatgccttccaatatgtgcagaagaaccggggtattgactctgaagatgcctacccatatgtgggacaggaagagagttgtatgtacaacccaacaggcaaggcagctaaatgcagagggtacagagagatccccgaggggaatgagaaagccctgaagagggcaggggccgaatgggacctgtctctgtggcatgatgccagctgaacctcttccagtttaccagcaaagggtgtactatgagaaagctgcacaagcgaa

SEQ ID NO: 86477 - DNA, 746 bp, Homo Sapiens
gggacagatggcggcgactctgggaccccttgggtcgtggcagcagtggcggcgatgtttgtcggctcgggatgggtccaggatgttactccttcttcttttgttggggtctgggcaggggccacagcaagtcggggcgggtcaaacgttcgagtacttgaaacgggagcactcgctgtcgaagccctaccaggccatgtttcctgagagactgggagttgcaggtgcacttcaaaatccatggacaaggaaagaagaatctgcatggggatggcttggcaatctggtacacaaaggatcggatgcagccagcgggtattcccctacatctcagccatggtgaacaacggctccctcagctatgatcatgagcgggatgggcggcctacagagctgggaggctgcacagccattgtccgcaatcttcattacgacaccttcctggtgattcgctacgtcaagaggcatttgacgataatgatggatattgatggcaagcatgagtggagggactgcattgacagtgcccggagtccgcctgccccgcggctactacttcggcacctcctccatcactggggatctctcagataatcatgatgtcatttccttgaagttgtttgaactgacagtggagagaaccccagaagaggaaaagctccatcgagatgtgtacttgccctcagtggacaatatgaagctgcctgagagtgagcacaggggcccgcgggaaatggtcccatagt

SEQ ID NO: 86478 - DNA, 870 bp, Homo Sapiens
gcttcaaggaaatgaccatcatgatatgtctgagaagatccccagttgattggaatgaaggtcccgaaagtatgtagccgcgggggccaggcggacccccgggccacttctatgcagtcccttccactcatgctttgccatcgattatccatcatgtatcgtcaaatgcctcttgacgtagcgaatcaccaggaaggtgtcgtaatgaagattgcggacaatgcctgtgcagcctcccagctctgtaggccgcccatcccgctcatgatcatagctgagggagccgttgttcaccatggctgagatgtaggggaatacccgctggactcctggagaatatcgcctcttctgggcctcttgctgcttctcctcattggggtaggtgtctacaaatactcccagccccacaaatttgtccatgtttccaaacacaggccatggctgcatccgatcctttgtgtaccagattgccaagccatccccatgcagattcttctttccttgtccatggattttgaagtgcacctgcaactcccagtctctcaggaaacatggcacccggttccacaaggcaccctgtttactttgcatatctggggtaaggcggatatactgggtcatcaccatggcattgcccatcagattccacagtgaggaactgcctgtgcccacaccctggtagggcttcgacagcgagtgctcccgtttcaagtactcgaacgtttgacccgccccgacttgctgtggcccctgcccagaccccaacaaaagaagaaggagtaacatcctggacccatcccgagccgacaaacatcgccgccactgctgccacgacccaaggggtcccagagtcgccgccatctttcccac

SEQ ID NO: 86479 - DNA, 948 bp, Homo Sapiens
gctggtaccggtccggaattcccgggatatcgtcgacccacgcgtccgatggattcgatagacgtccactggtgacagcggatatccagtggcctaacggaattacacttgaccttataaaaagtcgcctctattggcttgattctaagttgcacatgttatccagcgtggacttgaatggccaagatcgtaggatagtactaaagtctctggagttcctagctcatcctcttgcactaacaatatttgaggatcgtgtctactggatagatggggaaaatgaagcagtctatggtgccaataaattcactggatcagagctagccactctagtcaacaacctgaatgatgcccaagacatcattgtctatcatgaacttgtacagccatcaggtaaaaattggtgtgaagaagacatggagaatggaggatgtgaatacctatgcctgccagcaccacagattaatgatcactctccaaaatatacctgttcctgtcccagtgggtacaatgtagaggaaaatggccgagactgtcaaaggatcaatgtgaccacagcagtatcagaggtcagtgttcccccaaaagggacttctgccgcatgggccattcttcctctcttgctcttagtgatggcagcagtaggtggctacttgatgtggcggaattggcaacacaagaacatgaaaagcatgaactttgacaatcctgtgtacttgaaaaccactgaagaggacctctccatagacattggtagacacagtggcttctgttgggaccacgtacccaaccaatatcagtttgtaagcacagaataatggatcctaccttgactctctgtggacaaatgggtggacccttttgaagggtcttaaaccaaaataaataacccccccgtccgggaaatgggtaaacccggagcccaagccaagcttggaaaccccctca

SEQ ID NO: 86480 - DNA, 1763 bp, Homo Sapiens
  misc_feature (1088)..(1088): n is a, c, g, or t
cagtcgacggtaccggacatatgcccgggaattcggccattacggccggggaaaacaacatgccacagttaaaacttacttcagtttggacaactactcacagctactacacagagacccgaacgagtcactgatatacacctggaccaccaccaatggatatacaaatggcaaacaattttactccgccctctgcaactcctcagggaaatgactgtgacctctatgcacatcacagcacggccaggatagtaatgcctctgcattacagcctcgtcttcatcattgggctcgtgggaaacttactagccttggtcgtcattgttcaaaacaggaaaaaaatcaactctaccaccctctattcaacaaatttggttatttctgatatactttttaccaccgctttgcctacacgaatagcctactatgcaatgggctttgactggagaatcggagatgccttgtgtaggataactgcgctagtgttttacatcaacacatatgcaggtgtgaactttatgacctgcctgagtattgaccgcttcattgctgtggtgcaccctctacgctacaacaagataaaaaggattgaacatgcaaaaggcgtgtgcatatttgtctggattctagtatttgctcagacactcccactcctcatcaaccctatgtcaaagcaggaggctgaaaggattacatgcatggagtatccaaactttgaagaaactaaatctcttccctggattctgcttggggcatgtttcataggatatgtacttccacttataatcattctcatctgctattctcagatctgctgcaaactcttcagaactgccaaacaaaacccactcactgagaaatctggtgtaaacaaaaaggctctcaacacaattattcttattattgttgtgtttgttctctgtttcacaccttaccatgttgcaattattcaacatatgattaagaagcttcgtttctctaatttcctggaatgtaagccaaagacattcgttccagatttctctgcactttacagtatgcctgatgaacttcaattgctgcatgacccttttatctacttcttgcantgtaagggtataaagagaaaggttatgaggatgctgaaacggcaagtcagtgtatcgatttctagtgctgtgaagtcagcccctgaagaagattcacgtgaaatgacagaaacgcagatgatgatacattccaagtcttcaaatggaaagtgaaatggattgtattttggtttatagtgacgtaaactgtatgacaaactttgcaggacttcccttataaagcaaaataattgttcagcttccaattagtattcttttatatttctttcattgggcactttcccatctccaactcggaagtaagcccaagagaacaacataaagcaaacaacataaagcacaataaaaatgcaaataaatatttcatttttatttgtaaacgaatacaccaaaaggaggcgctcttaataactcccaatgtaaaaagttttgttttaataaaaaatttaattattatttcttgccaacaaatggctagaaaggactgaatagattatatattgccagatgttaatactgtaacatactttttaaataacatatttcttaaatccaaatttctctcaatgttagatttaattccctcaataacaccaatgttttgttttgtttcattctgggtcataaaactttgttaaggaactcttttggaataaagagcaggatacagcaaaa

SEQ ID NO: 86481 - DNA, 1059 bp, Homo Sapiens
  misc_feature (45)..(87): n is a, c, g, or t
  misc_feature (92)..(126): n is a, c, g, or t
  misc_feature (810)..(810): n is a, c, g, or t
taaaaaaatgtatagatcacctatagggcgctgactcgttctatnnnnnnnnnnnnnnnnnnnnnnnnnnnnnnnnnnnnnnnnnnnccggnnnnnnnnnnnnnnnnnnnnnnnnnnnnnnnnnnncagtcgacggtaccggacatatgcccgggaattcggccattacggccggggacttcagtttggacaactactcacagctactacacagagacccgaacgagtcactgatatacacctggaccaccaccaatggatatacaaatggcaaacaattttactccgccctctgcaactcctcagggaaatgactgtgacctctatgcacatcacagcacggccaggatagtaatgcctctgcattacagcctcgtcttcatcattgggctcgtgggaaacttactagccttggtcgtcattgttcaaaacaggaaaaaaatcaactctaccaccctctattcaacaaatttggtgatttctgatatactttttaccaccgctttgcctacacgaatagcctactatgcaatgggctttgactggagaatcggagatgccttgtgtaggataactgcgctagtgttttacatcaacacatatgcaggtgtgaactttatgacctgcctgagtattgaccgcttcattgctgtggtgcaccctctacgctacaacaagataaaaaggattgaacatgcaaaaggcgtgtgcatatttgtctggattctagtatttgctcagacactcccactcctcatcaaccctatgtcaaagcaggaggctgaaaggattacatgcactggagtatcncaaactttgaagaaactaacatctcttccctggattctgttggggcatgtttcataggatatgtacttccacttaataatcattctcatctggtaatctcagaatctggttgaaactcttcagaactggcaaaaaaagaccatccactgagaatctggggtgaccacaaaggccctccacaccaattatctcataatagcgggagaggccctgggtacaccttttccgttgccatttcccccttgctta

SEQ ID NO: 86482 - DNA, 696 bp, Homo Sapiens
aactgaaacctctgtacttgaaggcagcatatttactgaattttcaaaagtgtaagtctctctcttttgggcactagatggaataacattttgtgatacagatgtttttgcatccaaaagaacagaaggtgagccaacggataagtaaaattcttcatcagcttcactgtgatgatcatttatgtttctacttgatatttttttcgagtcaggtgtatttttggaactaacatcagttgccagaattttctgatgaacttcatgggcctgaactgatctgtttgtggcttcacttggttctacaacaaactgtagagaggcttctttcttctttgaagaaactggaactgactttggatgtgatttctggcactctttgcttggtgactgaatacaaatgtcttttattttgcgtgttgaaataggcactgattttgtagaatttgtactaaaatcattggcaagacttttttcttcaaaacagtcttgtaagatttccagaacattctggccttgctctgtgttaatgtcacgtgccctggaaggtcgacaaaatcttcttctgtagccatttttgagatgatccagaccggacgcagccatgttccggccccgctgagccagcgcaactgtctgaggtggaagcccacacggaccacagctccaggaagccgagcaagaaacgaatcgccggaa

SEQ ID NO: 86483 - DNA, 669 bp, Homo Sapiens
ccccgactagcccgacagacctgctgctgcttcaatgtccgcatcgcaaccaccgccctggccatctaccatgtgatcatgagcgtcttgttgttcatcgagcactcagtagaggtggcccatggcaaggcgtcctgcaagctctcccagatgggctacctcaggatcgctgacctgatctccagcttcctgctcatcaccatgctcttcatcatcagcctgagcctactgatcggcgtagtcaagaaccgggagaagtacctgctgcccttcctgtccctgcaaatcatggactatctcctgtgcctgctcaccctgctgggctcctacattgagctgcccgcctacctcaagttggcctcccggagccgtgctagctcctccaagttccccctgatgacgctgcagctgctggacttctgcctgagcatcctgaccctctgcagctcctacatggaagtgcccacctatctcaacttcaagtccatgaaccacatgaattacctccccagccaggaggatatgcctcataaccagttcatcaagatgatgatcatcttttccatcgccttcatcactgtccttatcttcaaggtctacatgttcaagtgcgtgtggcggtgctacagattgatcaagtgcatgaactcggtggaggagaagagaaac

SEQ ID NO: 86484 - DNA, 985 bp, Homo Sapiens
  misc_feature (17)..(17): n is a, c, g, or t
tcaaggagcgagcctgngtggctattcggacgaggcctgggtttctgcaaaagatgctggtttcagcagccctgatgggtcagatccaaaattgaatttaggaggacttttactccaagcactcctgaaatattggcctagaacacatgtgaatccaatggatgaagaggaaaatgaagtaaaccatgtaaatggggagcaggagaaccgagtgcagaagggaaatggatattttcaagtgcccccacatacacccgtgatctttggtgaagctggaggtcgcacactgttcaggctgctctgccgagattccgggggtgagactgagtctatgcttcttaatgaaacagtgccacaatgggtaattgacatcactgtggataaaaatatgcccaaattcaacaaaattcctttctacctccaacctcatgcatcttcaggagcaaaaaccttaaaaaaagatagactctctgctagtgacatgctccaagtccgaaaagttatggaacatgtttatgaaaaaattatcaacttggataatgagtctcaaaccactagctcttctaataatgaaaaaccaggagaacaggaaaaagaagaagatattgctgtgttggcagaggagaaaattgaacttttgtgccaggaccaggttttggatccaaatatggaccttcgaacagtgaaacacttcatatggaagagcggtggagacctcaccctccattaccgtcagaagtccacgtgaaggctggggctaatgctcctggatattcatttacgaccttcctctatggccccaagagtagtcctaagaaagcccactgatccccaacggggagcaagactcctaacgggctgaattggtatggaccgaagattatcttttcaattggaagtgacctaatcggaaatgtaaatatagaaacccagtctccatgggtaagattaagctgtccccagggaaaccaaaatgcaaaaaccc

SEQ ID NO: 86485 - DNA, 913 bp, Homo Sapiens
  misc_feature (80)..(114): n is a, c, g, or t
ctgattatggaacgctaacctatgggcctacgctatagcgaacgacgagcgcagcgagtattgagcgaggaagcggccgnnnnnnnnnnnnnnnnnnnnnnnnnnnnnnnnnnncagtcgacggtaccggacatatgcccgggaattcggccattacggccggggggtcgcatttttccggggagcgcggattcgcattcccaattttaggtggcagtcgcaacccatactattcggacagatggcacagaaaccgctgcgcctcttggcttgtggagatgttgaaggaaagtttgatattttattcaatagagttcaagcaattcagaagaaaagtggaaactttgatctgctgttgtgtgtaggaaatttctttggctccacccaagatgctgaatgggaggagtataagactggcatcaagaaagctcctattcagacatatgtgcttggtgctaataaccaggaaacagtaaaatatttccaggatgctgatggatgtgaattagctgaaaacattacttatctgggtcgtaaaggtatcttcactggaagctcggggctgcagattgtgtacctcagtgggacagaatccttaaatgagccagtaccaggttatagttttagtcccaaggatgtgtcttctctgagaatgatgctgtgtacaacctcccagtttaagggtgttgatatcttgctcacatccccatggcccaagtgtgtggggaactttgggaattcttctggagaaagtggataccaaaaaatgtggttctgctttggtttccagtcttggccacggggcttgaaaaccaagataccatgtttgctgctttggaaaaagacctattatgagagggttccatatcgaaaccaatatcatttctaccaggaaaaattgcccagatgcaac

SEQ ID NO: 86486 - DNA, 795 bp, Homo Sapiens
gaaaaaaagttgtgaatattcatatcctccagctccttgcttagaacactagtaaaattaggtcgcagtgaagcaaatgttggagagaaagatagatgaagcattttgctaattattattgtccccctttcctgtttttgaaattattgatcagaacaatatacaagggaaatgccatacctctgtttgtgatagataccccagagtagttattacctctttgtgagataagtaatctttgatgaagattgaaatacaatttctcatccaatttttatatcttggcatacgctgaccctcttgaccatttgtaattttttcatattatctaaaacaggtgttagagtcagacagattcattcttagattctagctctgacacttactagagattttgagtatgttgttgattattttgtgtgtggttactgatagaatcaagacaattacaacttcataaatgacaaataataggattatctccacattttctgttgctggaggaacaaaacattgtgcccatttgaaaattttaatttttgttggtttaactatcccacattataaatcatccttcaccattttatatcagttaaatatgggtgtgttggggaggaatgactggcatgtagacatgtattgatttaggaagatctgagcatttctttcattgttggtaagatataatgatgaaatttaaaaagcagtatggagcattatatatcagtaatgtgatatatatacttaagccagtttaaccattttgggaaatgttagcattaggaaataaaatcc

SEQ ID NO: 86487 - DNA, 812 bp, Homo Sapiens
  misc_feature (758)..(758): n is a, c, g, or t
  misc_feature (783)..(783): n is a, c, g, or t
  misc_feature (788)..(788): n is a, c, g, or t
agtaaaagaggcaagagaatgtgcagcgatggtgagaaggcagaaaaaagaagcatagctggtatagaccagtggctagaggtgttctgtgagcaggaggaaaagtgggtatgtgtagactgtgtgcacggtgtggtgggccagcctctgacctgttacaagtacgccaccaagcccatgacctatgtggtgggcattgacagtgacggctgggtccgagatgtcacacagaggtacgacccagtctggatgacagtgacccgcaagtgccgggttgatgctgagtggtgggccgagaccttgagaccataccagagcccatttatggacagggagaagaaagaagacttggagtttcaggcaaaacacatggaccagcctttgcccactgccattggcttatataagaaccaccctctgtatgccctgaagcggcatctcctgaaatatgaggccatctatcccgagacagctgccatccttgggtattgtcgtggagaagcggtctactccagggattgcgtgcacactctgcattccagggacacgtggctgaagaaagcaagaatggtgaggcttggagaagtaccctacaagatggtgaaaggcttttctaaccgtgctcggaaagcccgacttgctgagccccagctgcggggaagaaaatgaccctgggcctgttttggctactgggcagacagaaggagtatcagcccccccagtgcccggtggacggggaagggtgcccccgggaacgnagtttggggaaatggtgtaacctcnttccntggccccagcatggatggccttat

SEQ ID NO: 86488 - DNA, 783 bp, Homo Sapiens
  misc_feature (211)..(231): n is a, c, g, or t
attacaattgaagatgtatcgataaaaagatgaatgatgctgattccacttcagttgaagctatgtactctgttgctagtcaatgtctgcatgaaaagaaaaataagagaccagacattaagaaggttcaacagctgctgcaagagatgacagcttcttaaaactttattggaaaagactcttgactttttatatacacctatctcaaccnnnnnnnnnnnnnnnnnnnnncctaaatattcttctttacctttaacaaggcataggctgttgcaggacagtggttattaaagcatgggttgaacttccaaaatataaaaatagagccaccatatcaacacttagccctacccattagtatcacccccagttcttacagtaatccctgagaaatctccttcaagcatcaccaaacacagtttgaaaattacagggttagcaaaaagagcctgggctgtatgtagggtggaaacactctgatctgaagcccagctgactccactactaatttgctgtaaagctttggacatacacttagctgctgtgagccactaataacattgggctaatatctgctgtgcttctctgaccggtagtcatgcaaatcaaatgatgcaaaatatatacaagcactttgtaaattgtaaaatgatacaaaatttaaagtttatagagccagttacaaatcctattagtcatatatttatagattgtgttcacagcaatcatttaaccacaaataaaatatcccttgatgatactgccgtagtgaggttccacgcg

SEQ ID NO: 86489 - DNA, 712 bp, Homo Sapiens
cctcacagcattgactggggcttatctaggaatttagtagaaaagctgtttcagggtgaagtagattcataacatggctctggattattattcctaagctgctagatagtagcaactattttgtgagctgaaattttattatattccttatataacaatttccttatacttctccacttactgtccactaaatgacagcttaccagataagcagatatcactcagtttatagtaaagattatatttaaacagcaaagatatgtatgcatttttttaggcaacttagtatatagggaggctagtgtctttggaattcactgtagcatttcaatgtagaggaatgtcttgatgttgtggaaactctgtaagctgaaattctaactatattattcatcgatgaaggaaacatttaatcttttctttaccatcctcacagatagacttgttgaaacaaggggacctctatgttcattgagaagtgaaaagaggtgttcaaaggggaaaattactgatacagagacgatggtcggaatcagatttgaaaatgaaagtgtaagtaaaaatcctagttacatttgatacctgtttacttatgtaacttatgttttggtgcccatgaaaagcaagaaaaagtatatatatataactttgattgttaattctgttgtttttctttaaaaaagcagcaagccagccagtcacagtggctcat

SEQ ID NO: 86490 - DNA, 1629 bp, Homo Sapiens
gctggaccggtccggaattcccgggatatcgtcgacccacgcgtccggtcaattctcacaggtgaatctgtctctgtcatcaagcacactgatcccgtccctgacccacgagctgtcaaccaagataaaaagaacatgctgttttctggtacaaacattgctgctgggaaagctatgggagtggtggtagcaactggagttaacaccgaaattggcaagatccgggatgaaatggtggcaacagaacaggagagaacaccccttcagcaaaaactagatgaattttggggaacagctttccaaagtcatctcccttatttgcattgcagtctggatcataaatattgggcacttcaatgacccggttcatggagggtcctggatcagaggtgctatttactactttaaaattgcagtggccctggctgtagcagccattcctgaaggtctgcctgcagtcatcaccacctgcctggctcttggaactcgcagaatggcaaagaaaaatgccattgttcgaagcctcccgtctgtggaaacccttggttgtacttctgttatctgctcagacaagactggtacacttacaacaaaccagatgtcagtctgcaggatgttcattctggacagagtggaaggtgatacttgttcccttaatgagtttaccataactggatcaacttatgcacctattggagaagtgcataaagatgataaaccagtgaattgtcaccagtatgatggtctggtagaattagcaacaatttgtgctctttgtaatgactctgctttggattacaatgaggcaaagggtgtgtatgaaaaagttggagaagctacagagactgctctcacttgcctagtagagaagatgaatgtatttgataccgaattgaagggtctttctaaaatagaacgtgcaaatgcctgcaactcagtcattaaacagctgatgaaaaaggaattcactctagagttttcacgtgacagaaagtcaatgtcggtttactgtacaccaaataaaccaagcaggacatcaatgagcaagatgtttgtgaagggtgctcctgaaggtgtcattgacaggtgcacccacattcgagttggaagtactaaggttcctatgacctctggagtcaaacagaagatcatgtctgtcattcgagagtggggtagtggcagcgacacactgcgatgcctggccctggccactcatgacaacccactgagaagagaagaaatgcaccttgaggactctgccaactttattaaatatgagaccaatctgaccttcgttggctgcgtgggcatgctggatcactccgagaatcgaggtggcactcactccgtgaagctgtgccaggcaagcaggcatccagggtcatcatgatcactggggacaacaagggcacatgctgtggcacatcatgtcagccgcatcaggcatcttcgggcaggatgaggacgtgacagtcaaaaagctttcacaggccgggagtttgatgaactcaacacacactccgcccagcgagacgcagcactgaacgcccgctgttgctcgagttgaccactcccacaagtctaaatcgtagaatttcagttttaacagggaaacagcatatgacataa

SEQ ID NO: 86491 - DNA, 768 bp, Homo Sapiens
ggaaaccgaatcctgctttaattcaagcttggggagaacaaagtcctacagaaacattccacagaattttctggaaaagagggatcacaacaaccctgtaaaaaggagactgagagtaattcatagctcaccaagttctctccgtatcaaatttccagaatacccacaagatttcttcaccagctcagtcctgactcaacctcttcaatctttatttcattagaagacaaagggtcatattatttaaaattattctagtctcaagaaatttaaagacttgaagtagtagagcattcaaaacttaaataactttaacaagaaagccagctgatcttaacaagttactctgctagtaaatgggaaatagactgaatcatcctagacataatttcattagggctgcaaaccacccaggggagagtagcacaattataccattttgtaatccacattcacaagaagtttgctacacaaatgaagaaaactttgtgcccatagacaacttattttttaaaatatcactccccaaaagtagccatgtttccacttttgttcccttttccacatcaaaaataccaacttgatttcttcaggaggaatggacaatccaagtttatacagtgggctggaaaaagaaaacactgaaaagtctaaaagcacaaaataaacaaagctgggagggaagcggacgcgtgggtcgacgattggaaggaattccggaccggtaccagccttttggtgtgtttgtctgggggctggggagaactt

SEQ ID NO: 86492 - DNA, 743 bp, Homo Sapiens
ctgctcgtcgacagagatcacgttgaaaacatgaccgagctccagcaacagggtgatgcgatctgcactgaattcgtcaccatccagagtcttctcgactttggtcttattgaagaccgcgtcaattttggatttggtttcttcgtcgatcacgaagtaatgggtcataaccccatccttgaagaccgaggtgtacaggaaagcgccaccgtgcacttccttggttggaacaaaggtcttgccgaaagcccgtgctgcacgcagatggagctcgtggagcaacatcagagctgtctgattatgactaccgtaagcggacatgtaacgcagctgttccagcaattgagcatcggaagccatcgcgtgttgattgccacccaggatgttcatgttcatggctgcgtatcgattgaaattgttgtgcatgattattacctcagtgtcgtaattaaattgggatgaaaaataaaacataacgttagggagtccgaagactccctttcgtcgttacttgattactctgcttcttttggacgcaccagtgcatcgaccaggccagtagccagaccgctgaacgatacgcctaccaggccagcgacgccgccgttgaggatgcgagcgctggtacccaggtcgtcggtgatgccgaatacgtcaccaacagcataacccattgcaccacccagagcggcaccagcagcggcgccgagcagagtgctaccttggttgtagttggcggccgc

SEQ ID NO: 86493 - DNA, 715 bp, Homo Sapiens
agaattcggcacgagggcatgcgccagccacgtggcaagctcctggtcggagcatcggtgctgctctaacaccactccacgcagcacatcgcagcgctccagaaggtccagcacctgttcgcattcccacccacgctggcccacaagaaccaaacggggcattccatctttcatccgtgcgaccaattggcgccatacctgtagcacaagcaagtggtttttgcgcggctcaatagtgcctaacattacgaaatagggctgctgcagtgggcgttgcggcgaggcagcaggcaacctgccgggcgctaaatgtgccaccacacagggcggcagagccacaccctggccctgtgcatacgcctgcaaatcagccagcgttgcagcagagttcaccaccatggcaccggccgtggacaacatggtttgcagacgctggtgatgtagtacggcctccccggcccggcaatattcggggtgtgtgataggaatcaagtcatgcagaaaatacaacgctcgccagccaagggcgttcactcttaggccgtaatcggcatcttgcaaaccactgtggccgatatttagaagcaggcagtcttcacccggggtatcccaactgaatgcgtacgcctgtgcaacccacctgcgtaacctccacggcaaagaagcgtctggcattgacagtgcagaaaacacctcttgtgaggcctgcggccgc

SEQ ID NO: 86494 - DNA, 1053 bp, Homo Sapiens
ggaaccgagcaggctcaggttcagcacgaagcaggcgaaggccaccagtgcggccagcttggtgaagtagccggaagcgtcgcgccggtgcagccaggcggtgagcaccagcgtgccgagcgaagcgccggccagcacgagcacctgcacggcttccggaaacagcggccagtactggcggaacaggaagaacacgctggccgccagcgccagcgcgccgaggaaggacgcgatgcgcaggcccagcgtgagctggcgcgcgcgctgagtggtgtcgacatcgggccgtgcggcaaagcgcgcgagcagtgcgtcgtgatgtgcgcggatcgccaccgcatcggccgccgccatgccgtcggcgctcagccgtgcctgttcgcggcgataggcgtgaatgtcatccacgcgctgctgcgcatcggtgcgggacagggtgtcgtccatcggatcgcttccggatgtcatccgccgcatgatgccacgagcgcagcagcctgccgatcgggcacaatccggcgatggatcacgcccccgtaccgttgctgcgcggcagtctgcgcgcgctgaaaatcatcctgctcaccttcaccggcatcggccgcgcgcggatgatcaaccgcaccaccgaggggctgggcccgcagcacttcctgctcggcgggctgttcgccgcgatcgcggtcaacgtcgtgctgatcggcctcgtgttgtgggccaccggctgaagcgcccgggcgtagaaggctccagcgggctattcgcccttatagccgaccagcaccacctcggccccggcctcgcgcagcggcaccagcgcctgataggccggcgagtcgtgccaggcgcgcgcgctggccgcatcggcgaagcgcagcaccacggtatcggtgcccggccagtcgccggccagcaccacgtccaccccgccccgcatcaccacctcgccgccgaaaggcaacagcgtggcaccgacgcgcgcgcggtaatccgcccagcgcgaggcatccagcacacggatgtggccgatcacgtagtagctcatgcggccgc

SEQ ID NO: 86495 - DNA, 936 bp, Homo Sapiens
gcggccgcgaatccgattgccgctggcgcaatggctgcgcgctggcggtgatttgcgggaacagcccggcatgcaattggctggcatacgcctgggacgcatcaaagtgcgccagtgccgccgccaggtccgggttggccttgagcagttgctgttgcaggtcattgaggtgcgaatcgttgtagagcttccaccattcgggtgccagttggtcggacggttgtgcgctgtgccacgggccatcgctggtctgttcgcggtagccggccggcaggtcaacggcgggcaccttgtaggtgggcgccatcgagcaaccctgcaaggccaatagtaccaacgccgctagggggttaaaccttgcgcgcatgcgcacctccggcttgggcaagctctaccgggtcgccttcgcgcagggcgtcgggcgggttgtcgaccacgcggtcggcgggtttgaggccttggtcgatcaccaggcgttcgcccaggtccaggccgatgtggatgtcttgcaggtgcacatggttctgcgcgtccagcaccgccacttgggtgccttgggcgcggaagatcaaggcgctggccgggatgctcacgccgtgggtgtcggccggaatcggcagcgtggcttcggcgtagtcaccgggcagcagttcgccgttgggggttgtcggcgacaaactgcgcaagcagggtgccggaacggcggtcgatggcggtggagtcgccgatcaggcgcgccttgaagtgctcgccagggtgctcgggtacggtcagctcggcctcaagcccagggtggatcaccgacgcgtagttctgcggcaccggcacatacagacgcagttggtgagtgtcggcgatgttgaacagttccgggtcgctgtcggtgtcggccttgatcaactggccgatatcggtgttgcgcgcggtgatggtgcc

SEQ ID NO: 86496 - DNA, 551 bp, Homo Sapiens
gcggccgccacgttaccgcccgccgccgaagtaaaggcaatcgccgactgaacggtcgccggcagtgcgcacaggtacaggaagcccagataaaccgtcggtgtcatcaaacccggcaccatcaggttcatcgccagccccagcagcgggaacagcgcaaaggtgctgagaaacaccaccaaatgcagcttccagtgccccatgccggcgatgatcgcctcacgagacagcttggcaccgtgcataaagaacagcagcgcgatagccgcggtggtcagatgctcaaaaaaggttgcccatctgccttcgcaggggaaaaccgaagcgacaatcaccaccagaatcaataccagcaaaaatttatcaatgcgcagacgctgcaaccaggacatgggtcaggatccctcgaggagtaagacgggttcggcacgccgaaccctgagaataaaacgccgcggtcagactaccggcaacgccttttgttgtttcgcagattcaatccccagctcgatcatttccatcaccttgatggcgtcagcagccctcgtgcc

SEQ ID NO: 86497 - DNA, 575 bp, Homo Sapiens
gcacgaggtcaaaataaatattactaattgatttttttatgagtggccatgccagatgtagtggagaggagagggaagttaaagacggaaaaaacgtccattggtgttagcaatggagagttcattgagggcctctcccacagcagatgtggggaagcaacagggtatggagttgagtggatggagtaaggaatggatgtgagaaggttgcagcctggaggacaagttattcggcagtgaagaggaggaaacggacaacaggctcggggagtgatttttggaagatgggtggatgtagcaagttcatttctagtccaagggctgagagcccacagagaaggtgaagggaggggccagcttccagagcaataaagagatttaggaacaatgaaccaacgcttgtggtccctacctcatggcctctgctgccttttggagaggaaggtagtaggttatagagtttcaagagaatggtgtaattttggaatatctcttgtgggaaatgggagaaagagttgagaaagagcccatgtaaggattttcaagaaaccctggaagattttgtgctcaggagc

SEQ ID NO: 86498 - DNA, 777 bp, Homo Sapiens
gcggccgcactcgccgcagccgggctctatccgaccttcggcggcatcatattacgcggcggcttcgcaaccggcgggatggccttcctcacccaccagccgctctggctggcctatggcctcggtgccgccgtggcggccctgctgttcggcggcatcctgggactgttcgcggtcgcggcaaatcggccgctgcggccgagcctgcgccgaatcggcttcggcgcgctcgccttcctgaccctgtggttcggcgccgctatcatcggcctcgccgccgatctgggattcggaccctggccgaagcgggcgctgcggccggacgaggccggcctcgccgcccttcttctgatcgccgccgcgctgccgcacacggtgctggcgacattgcgcaggcatcgtccggtcgcctgagcccgcctccttgcgggccggccgccgttcccgcagagtcgtcgcgacaggcgttgcgggactcggccaccgagagtcgggcccgcgggaggcatcgcgatgcatgaggcgaacgtgatcgagcacggcgctcaagccgctgcggccggaccgttgccggatgcgcccggcaacgggttctccgatcgaccttggctgaccgcctacccccccggagttccggcggagatcgacgtggcaggcctcgggaccctggtcgacttgttcgaatccagcatggcggccttcgcggatcggcctgcgatgctgtgcttcggctcgaccatgacctacgcgacgctcggtcagcaggcgcgcgacttc

SEQ ID NO: 86499 - DNA, 575 bp, Homo Sapiens
tgttgccaagctgtgccagggtagaagatgaggtgatgcagataaaacgcttccaacacttttatatacagctgtccttggtttgggggtgctttaatgggttcctgcagcttcttcactgtactctggagtatactcagagctatttttgttggcaagtagctgttaaattcttgcttttgttggggagacaagagctgggatctcctagtgtatcatcttgttgatattacttgcctgcttttaatattttaactaatttttctgattacaaaggaattgaggttctctgaagaatatttcagatatttaggaaattttaaaataagatgaaaatattgattaatattctggtataaatccttccagacttttacaatgcatttgtaagtacatctacatttttgcaaagagaatactgtatttttcagatgatcatattgaaaatgcacttttgtcttggtgtactactattttgtgaacattttttgaggtcattatttgtctgtagcttgacttgtaatggctgcctggtattccatcatgactgactttattaaaccactttcatgcca

SEQ ID NO: 86500 - DNA, 580 bp, Homo Sapiens
acccatcagctgtaccatgtcgcagaattcatgcaggcacaaagttggagttacagagatgggttgacagcaggcaaacttggcctatgtattataaccacaacttcaagttcttacctcatgtgaatattcaccctttctttagtcttccaaggcaaacagccccgtctcatcaccagatgagcaaggtcttgatatggcatagcagatctccctagacacagatcatgagaaaagatggaagagacttagggattcaggcatcagatgaagttggcttttcccttttatgccttgtttgtatttaccctgtctaatacactaaggatacttactcattgtacttgcagctcaatatgtctttgctgttcagatactaaaatgtacctctgagtcattgtgagctgtgtggtaggttggacattggcatagttggtgatgggactcaaaatgaaaaggtggtctctttaccaggtcacagactgtagcagattgtgcttgttatctgacaatgactgtcactttgagggtcgttgatttgcatgcactactctggggccttgtattggagccttttttt

SEQ ID NO: 86501 - DNA, 625 bp, Homo Sapiens
  misc_feature (130)..(261): n is a, c, g, or t
  misc_feature (270)..(283): n is a, c, g, or t
  misc_feature (308)..(317): n is a, c, g, or t
  misc_feature (355)..(452): n is a, c, g, or t
ggaagggtcaacatcttttacattctgcaagcacatctgcattttcaccccacccttcccctccttctccctttttatatcccatttttatatcgatctcttattttacaataaaactttgctgccaccnnnnnnnnnnnnnnnnnnnnnnnnnnnnnnnnnnnnnnnnnnnnnnnnnnnnnnnnnnnnnnnnnnnnnnnnnnnnnnnnnnnnnnnnnnnnnnnnnnnnnnnnnnnnnnnnnnnnnnnnnnnnnnnnnnnntttgggggnnnnnnnnnnnnnnaaaaattttttaaaacctttttttnnnnnnnnnnccccaaaaggaaaggaaacagggccaaacttgttcccnnnnnnnnnnnnnnnnnnnnnnnnnnnnnnnnnnnnnnnnnnnnnnnnnnnnnnnnnnnnnnnnnnnnnnnnnnnnnnnnnnnnnnnnnnnnnnnnnncctttacgggatttttcaacgggagcccaagggagctcaaattcaaattaccccccgcccggccatttttggaaaaatgggggaaattcttaaaccttttgccccaaggggaaccctccccaaggggattgataaacctgattccccaggggaataaaaacccttggccccct

SEQ ID NO: 86502 - DNA, 552 bp, Homo Sapiens
tttccagagtcattatgaaactttagggccattacacttagcatttaaaataggtaatacattcacatggttcaaaaatgaaaaaatacacaaagtgaactgttttctcatcccatttcccaaccaccaaaatcctaaagtaataaataagtagtctaaatttcaggaggaacgcctctgtttttccattaaatataatgtctgttgttactcttatcaaggagaattaaagacagctggaaaacctgtaaaacttaaatacttccattttcactgttcttgttaagaggctgctctcctttcttgtcaaagaaactgctagtgttatgagaaagagaagaatatcctaacacgtacagtacacacaaaaactataaaaactaagacaaatttattcagcacctggttcagacatctgctttggtttccattaataggatctctactatctgccaggcatagcctgtctaaaaggcaattattacctgatcttcatatccttctatcttcacaggcgtgaactgatccatgttatactgggcacatgcactg

SEQ ID NO: 86503 - DNA, 616 bp, Homo Sapiens
  misc_feature (174)..(214): n is a, c, g, or t
  misc_feature (359)..(420): n is a, c, g, or t
ggacactgagttgaccagcaaaaattgggatttgtgacgaggcttgtatttgtggagctgatgttctagtgagagacagtaaatgtgacaaaagtaaaatatatcagatggtgagaaaacagaaaaatgagatcagaagtggagatgttggggccaggcacagtggcccaggcnnnnnnnnnnnnnnnnnnnnnnnnnnnnnnnnnnnnnnnnncttgagcccaggaattcaagaccagtccgagcaacatagcaaaagcccttatctgcaaaaaattcaaaaattagccaggtgtggtggtgcgtgcccaggttcccaggtactcggaggctgagaggtgggaggatgccttgagctnnnnnnnnnnnnnnnnnnnnnnnnnnnnnnnnnnnnnnnnnnnnnnnnnnnnnnnnnnnnnnaccctgtttttttaaaaaaagaagtggaggtgtttacaccagcaaaatactcattttttaagtgtaattaagttgaagatcaaaaaatggaaatgtataattaaatcatacttagcaaatctaacacatgaaatgtaacatctgcatatggagaaccgtgttactttattgaaaaacattaaaagtttgagaactt

SEQ ID NO: 86504 - DNA, 585 bp, Homo Sapiens
agtaaaataaatagttcagatgactactaaagtcaaagtcattaaatctggaagtaaacacgagaattcattctgggaaatcaggctgtctgtgtaaaggttactgctgtgctcaggagttgaaccgtgtggtgctgtatccggatactcatgacgaatggatggagggcgtgaaaagtgagcccagctgggactctgggtcaaccctacctgacacccttccagtctaaacctttgtttcctatccaggcccaggcttgtggctgagaacatccactttcagtcccatatacctgcctccaagtgtggtacagagaacttgggcctgctgggggcgcttagccttactctctccaccacctctcccaccaacccccagatgaactgcaggtagacgtttcttccttgcttggagccccagtttttgcatttcattttcattaaaatgaaaggtggtttggttttggttctaaggagctctacagtttaacagagagagggaccttaggggccaagaaagcaggggcctaccaagtatctccacttttgaaaattgtaattactgataaaaaattttttaaaggc

SEQ ID NO: 86505 - DNA, 326 bp, Homo Sapiens
agtccagtgttgccaaggagctttgtttatagaaagaagcttggtcccctcagttctatgctgttgtgtggcctggttggtacatgccggtcatgatgaaggatgactttggtttgagataatttgtcactccacattccatggagaaaagtgtttcattttgatgttggaaaaacatgaccagagaagcatgtgactcagataatgttccccggaagttgcagagcaatctgtggtgtctgtcatagcccaactagtcctggagcacatggacaattctgtaccccaataatcagaacaataaaatggtagttgtgattcaaaaa

SEQ ID NO: 86506 - DNA, 364 bp, Homo Sapiens
aatatgtctcccacccccacccatactgccctgtaaaatattcctatattttaatccatagtgatgatcaatgatagtgctttctcctcatgatacatgttacacaggggttgaaaacattaaaataaatctcaaatggaataaattgggacatgtaaaatttaaagaattagcagcattgagaaaggatgcatcatttgtcttttaaaatgttggctggcagaaaaagaatttaggtaagcttccatattctgcactcctcacaccactaataagttttacccagaaatatataaataaaaatgattgacatctgaataacaaatcctgtgacaacacattgtagtattccataaagaacatg

SEQ ID NO: 86507 - DNA, 697 bp, Homo Sapiens
  misc_feature (128)..(142): n is a, c, g, or t
  misc_feature (313)..(377): n is a, c, g, or t
  misc_feature (387)..(401): n is a, c, g, or t
gtcccgcttcccctcggtgaaccacgggaaaaatctttttataattttttgtggcctaagaggcggggtgaggggccttccagggtgttttgttaaattccccacgccactcttttgcggtggccccnnnnnnnnnnnnnnnattccctcttgaggcccacggggagttcaaggaccccccccttggcccaactttgggggaaaatccccattttcttttaaaaatcccaaaaaattaacttgggtgccagtggcgcaatcttgttattccccagttattcaggagccagagccagggagattcccttgaccnnnnnnnnnnnnnnnnnnnnnnnnnnnnnnnnnnnnnnnnnnnnnnnnnnnnnnnnnnnnnnnnnacttgtctcnnnnnnnnnnnnnnntttaatttttaatgtagacagtatgaattatcttgttctgcagttggttgctttttgattgcttatttaatagagttgttaagatattttacatcttctcctgttagctgttcagcttttcctttcatattgagaacactacacagtgctgaagtccagctggtacacaccggggtgacaccttggctgcatctgttctcaacagtcagacacttcttctaattggttgatgctgggctgtactggttgctaaatattgcacatcattttaaaactatttgagatgcacttttgta

SEQ ID NO: 86508 - DNA, 2149 bp, Homo Sapiens
  misc_feature (43)..(119): n is a, c, g, or t
  misc_feature (1238)..(1246): n is a, c, g, or t
  misc_feature (1270)..(1504): n is a, c, g, or t
gcggccgctccaacatcagaatggtaactgttaccattctgannnnnnnnnnnnnnnnnnnnnnnnnnnnnnnnnnnnnnnnnnnnnnnnnnnnnnnnnnnnnnnnnnnnnnnnnnnnnatgagccaccacgcttggctaagaacacctaaatttttatgtttcttggctcaaaaaccagttccatttctaatgttgtcctcacaagaaggctaattggtggtgagacagcaggggaggaggaagagctgtggtttgtaacttgttcaactcaggcaataagcgattttagctttatttaaagtcttctgtccagctttaagcactttgtaagacatggctgaaagtagcttttctatcagaattgcagatagtcatgttgggctaacagtcaattggatatattcctttacctcacatgaccccagcaactgtggtggtatctagaggtgaaacaggcaagtgaaatggacacctctgctgtgaatgttttagagaaggaaattcaaaaaatgttgtaactgaaagcactgttgaatatgggtatcggctttctttttcactttgactcttaacattatcagtcaacttccacattaatgaaagttgaccatagttatttccaaataaaaagaaaccaactcttaccaggtcttggactgtgatgtcatattattcagttttatgcttgttcctgagcagaactcataagagtgacatagtcagctgctgacggcacctcagccacgccactcttactcagttcagtgggtgtgcttgcgtggtaggatgtggtgcagccctctctacgctcttctatttttggtatatttcctatctaaccttcaaatagcttccaattctttttttcttggactggcttcattctgaatttgtgctaaaataatctttcataaagagacctcagtttatagcgtaacagactacacaatgcactgatgttttcataatgtttaagggacccactgcaagaaggttgctgcctccttttaattgtattcatttagattttgattttccatgttaagaaggtgaggtccatgttggtgcccttcagagtagagaaccatgtaaacattaggaatgaacagaggccttaggaatgaatagagagtttgccttatacaatttcctgttacaaagctctccctctcatgcaaagtagggaacaccttttgagcatctttgaatttgacaaatggtgctgttgcaaacacnnnnnnnnngagatgaagtctcgcggttgtcannnnnnnnnnnnnnnnnnnnnnnnnnnnnnnnnnnnnnnnnnnnnnnnnnnnnnnnnnnnnnnnnnnnnnnnnnnnnnnnnnnnnnnnnnnnnnnnnnnnnnnnnnnnnnnnnnnnnnnnnnnnnnnnnnnnnnnnnnnnnnnnnnnnnnnnnnnnnnnnnnnnnnnnnnnnnnnnnnnnnnnnnnnnnnnnnnnnnnnnnnnnnnnnnnnnnnnnnnnnnnnnnnnnnnnnnnngtgtgagccaccgtgcccggcctgcaaacacattttaattgacaacactagggctgttgtacaaaatagtaatgatagccatggaagttttaccttattctgtgagaagtgttcttaaacttattaagtgtctaaactaaggtttagtgcttttttaaaggaaagttgtcccaggattcatcctaaagaaagcaaaagttaattcaactgatccaccaatggaattagatgggtagagttgggttcttgagttttaccaccacttagttcccactgaattttgtaacttcctgtgtttgcatcctctgttcctattctgcccttgctctgtgtcatctcagtcatttgacttagaaagtgcccttcaaaaggaccctgttcactgctgcacttttcaatgaattaaaatttatttctgttctagtgggaatgtgtcctttgttttagttcacaagtagtaattttgacaagatgctttcttctgatgcagtttgttttaatcactcacctagtactagaaatgggctttctagtcagatcctatagtctctacctgtatagctcttacatacatggcccctactgataacccctgaatgaagcaccatgtagaaaatatttcctgataaatctgtatgtatttac

SEQ ID NO: 86509 - DNA, 411 bp, Homo Sapiens
cctgagcagtaggtctcaacaacacgtgggctgacaatatttagtaaaccacactggtgtaagtagatgtgctgtcatctaggctttgttgttctatctacacagcagaggcagactagaattagcataacgcttaaggactctaggattttcagaatgataaatgagcactggcttcaacataaagtcatcagctgcactagccccctagcaagggtcagcctgtcctttggagctctgaagccaggctttgacttctcctctctagttatgacagtcctgggcggcatcttttcccaaaataagggtggttcaactccaatgaaaacctattggttagcaaagccgtcttcatcagtgatcttagggagatctcctagatgacttgctgctttatcttgcacttgcaca

SEQ ID NO: 86510 - DNA, 1536 bp, Homo Sapiens
  misc_feature (1057)..(1170): n is a, c, g, or t
  misc_feature (1244)..(1309): n is a, c, g, or t
  misc_feature (1323)..(1323): n is a, c, g, or t
gttgcttcactgctggaagtgtgagtgcgcgaagatgcgaaaggtggtttgatcaccggggctagcatgtggcattggcctggccctctgcaagcggctgctggcggaagatgatgagcttcatctgtgtttggcgtgcaggaacatgagcaaggcagaagctgtctgtgctgctctgctggcctctcaccccactgctgaggtcaccattgtccaggtggatgtcagcaacctgcagtcggtcttccgggcctccaaggaacttaagcaaaggtttcagagattagactgtatatatctaaatgctgggatcatgcctaatccacaactaaatatcaaagcacttttctttggcctcttttcaagaaaagtgattcatatgttctccacagctgaaggcctgctgacccagggtgataagatcactgctgatggacttcaggaggtgtttgagaccaatgtctttggccattttatcctgattcgggaactggagcctctcctctgtcacagtgacaatccatctcagctcatctggacatcatctcgcagtgcaaggaaatctaatttcaagactcgaagggaacttcaagaacagcaaaggcaaggaaccctacagctcttccaaatatgccactgaccttatgagtgtggctttgaacaggaacttcaaccagcagggtctctattccaatgtggcctgtccaggtacagcattgaccaatttgacatatggaattctgcctccgtttatatggacgctgttgatgccggcaatattgctacttcgcttttttgcaaatgcattcactttgacaccatataatggaacagaagctctggtatggcttttccaccaaaagcctgaatctctcaatcctctgatcaaatatctgagtgccaccactggctttggaagaaattacattatgacccagaagatggacctagatgaagacactgctgaaaaattttatcaaaagttactggaactggaaaagcacattagggtcactattcaaaaaacagataatcaggccaggctcagtggctcatnnnnnnnnnnnnnnnnnnnnnnnnnnnnnnnnnnnnnnnnnnnnnnnnnnnnnnnnnnnnnnnnnnnnnnnnnnnnnnnnnnnnnnnnnnnnnnnnnnnnnnnnnnnnnnnnnntaatagctgggtgtggtggcatgcgcatgtagtcccagctactcagaaggatgaggtgggaggatctcttgagnnnnnnnnnnnnnnnnnnnnnnnnnnnnnnnnnnnnnnnnnnnnnnnnnnnnnnnnnnnnnnnnnnaccctgtctcaaancatatatacatttaatatatatgtaaaaccagagctgacaatgacactctggaacattgcataccttctgtacattctggggtacatggatttctactgagttggataatatgcatttgtaataaactatgaactatgactctcttttccttccttttgggattatctccaagactgggtatgtgtatgcatatgagaaaaaagattgggccg

SEQ ID NO: 86511 - DNA, 699 bp, Homo Sapiens
agcataagcaccacacctggctgaacatcagatattttaaagtgtagcccagagtctagttggtaaatgttacttatattgggactagtattttctaatgtttctgggatatgctccctataaaatgaaatgttttcctggaacaatgctaattaggattgcattcctggccaaagacatgacatcaaataagtaatagacatcaccagcaatgaattttgaaaagcaaaaaatactattaacctatataaccatttaaaatttaaaaaattatgttccaagtacctctattttctgagctagaagaaaccttagaggccatctgatgatagattcccagagctggatggatccctagggactacctaatctgactttctgtccactgcatggattcttctaaaaagtatgtcacttatttccctaccttattaagactaaataagtggaacatcatagagctctttatttataacagtcattctttgatagtcaactcttaaatggagacttgagatgcttaaatattgtactactgtgcttatcttgtaaagatttcataaaatgatagtattggttattttaaaaaggctttggcttatgctgaattatacatgtagcaccaaaatgttacaactctactaaatttccttgttctaaactattatattagctataataaatattagtcatacatgt

SEQ ID NO: 86512 - DNA, 355 bp, Homo Sapiens
gcagccggacggggagcaggccaagccggaaccacagcctgcaggtgtgggtgtgtgtcatgtgctgagatgccagggcaccagcaagggggatatgttggcagtgatgtctggcttcggagggtacagtcctggctcccagacaaggggcggggagaacactgtgtccttccagaggctgtaccacactcccactgctgtcacccggcactgaagcctcgagcctcggtagggcctccctcttctccctgtcctatcaagacttacagcaaggtcccaggttgacagggagacagatatcaagggcatagaaaaccctgcaaggaggcctggcatggtagctcatgcctgtaat

SEQ ID NO: 86513 - DNA, 662 bp, Homo Sapiens
tagaatgttcataatagatgtaaaagggaatggttctccaaaaatgagcaaaatataattaaaatgtgtttaggaaaatataattaaaatgtgtttaggttgtgcataaaaagccatccctttctatttccttataactcattaggattagccattgagtattattttaaggtcaacccagtttgtgtcatgtacatgccacaaagcctaagaagaaggttggaaagaggacgtttctcaccatcaaagtgcccacagtttcctcttaagtcaggcactatgcctgactaaacaagatggctggcaaacccactatgataaagatacagtattattggcatttaaggttcagctgaaaggtgtcagcatttttctggtagtggtactttgccttccaaactgtaacaactggatattgatcacaataagtattttacagctaattgaaagccagatgtgatacccatagtttattatctaaaaattacttgcactcctaaattcagtaaattaatcagaatgggaatattctgagctaaatgttaccatcaccctgaatctgagcaacaatattgtatgtcttattgtatgtcttataaggtagaaaaataaaaatctcaatacctactgtttaaataaaaatctcaatacctactgttaaa

SEQ ID NO: 86514 - DNA, 606 bp, Homo Sapiens
ctgaaaaatgaactggaagaagcatctggagtatgcctgtgtgagaaaaacaagaataattaatatttcataaaagtttggatataggttggtctatcagctatataaaactacattatttaacaagaatttagcactaaaaataaaatggcacttttacaaggctatgcagatggataatcctatctgtaatcacacagagcaatgattattgtgtatcttattttcactttggaaaagcattatcaaatctgaaaaattggattgtaactagaaaagtttgaaaagttttcaaacttcactttctcttcataaaatcgatactgcctgccaacagttgttccttgtgtgtgccaatatctaagtatcacttgacccccctcctctgtttatttaatgcagaaatgggaaattttatgatgcatataaaaataacaggattctggtcagcatgatatatttaagcacttaagctgacattaaacttttgtcttgcttcaaaaataattttgaaaattatagcaaatgcaaaacaaactgcaatctaagcatcatgcttaatttcagaattctcaaattacttgcccaaaagaaaaaatttaaaaa

SEQ ID NO: 86515 - DNA, 586 bp, Homo Sapiens
  misc_feature (73)..(73): n is a, c, g, or t
  misc_feature (530)..(530): n is a, c, g, or t
taacgcctctgtgcctcagttccccagctataaaatggaaaaggcaacaataccaaccttgtagattatgttntggattaaatgaggcaacacatacacagcacttagaacgtgcaaggcacaatggaagcatgcagtgaacatgacttgtaatgatgctgactgtcataactctcatccatagggatgctgcctctgcttgtcacccttgacctatatattttcaggcagtcctcacccagtccccatttgtgtgttctagatagaaaaggccccatactatgaaatgactactgtccttctgcatgaagcctggtgaacctgataatgtaaccttcaagttcccttactgagccttgagctcccttcaaagtatccaagccaaccctgtcttgggaaactcacctagataatgccctgaaccccaataaaggctccagcccacaggtccctccctctctcttggtccccaccctttggctgggcatgtgtgtcctcaatgtctccaagcccttccagtaagccctgcnaaggtgtgctggccactgttctctggaatctgtgagtaataaacaatctttttgcc

SEQ ID NO: 86516 - DNA, 855 bp, Homo Sapiens
  misc_feature (605)..(605): n is a, c, g, or t
ggggcctcctcagtcggccgctcaggctgcggctcctcccggggccggttcccgctgtctcagccgcggcgcagagggcacatcggcctgaccgactagccggctgccagtgccgggagccgccgcgtccatccccgcccgcctggccggggacccaggactgagtcgtccagctgcgcccctcgcccatagccccagcggtcgccgggcgggcgagcagctcttcggcccttcccggacagcgacgcagtcgcagcgcgcgccctaacacagatgtgggaagataaatgaaggggtctagatgtaaatgtcagtggaaaggagagctaccatcactaagggctgaaaacacagttaaatcactttcaaagttaaaagactattaagaacacaagatggggactcctgcttctggaaggaaaagaacacctgtgaaagaccgattttctgcaaaagatgaagctttgagtaacattgccagagaggcagaggcaaggctggcagcaaaacgggctgcccgggcagaagcaagagatatacgcatgagagaactggaacgacaacaaaaagagttggatgaaaaatctgacaaacagtatgctganaattatacaagaccttcctctcgaaattctgcctcagcaaacaacccctctaagatggaacctcctcccagaccgaggaaagtgggggaccccaagcagccttaattagaatccagaacacctccatttaagtggaatttgccgggggatttcctactgaaaccctttaaggggacccaccaataacaaggaatgtgtacacaagggggaaagaataccactgtgccccgggggggcctatataaaagaa

SEQ ID NO: 86517 - DNA, 445 bp, Homo Sapiens
actacaacaaagcttctgaatgctttcagcaagcttttgacacaacagtagagctaatgagcatgcctctgatggatgagacaaaagttcactatggaatagcaaaagctcatcagatgatgcttacagtgaacaactatatagagtctgcagatctcaccagcctcaactacctgctgtcatggaaggagagcagaggtaacattgaacctgatccagttactgaagagtttagaggatccacagtggaagctgtatctcaaaactcagaacgtttggaagaactcagtaggtttccaggtgatcaaaaaaatgaaacttaaagcagcttttcacttaacatcaaagcaagaagaaatccatcatgtcaccttagacttcaatacttgtaataggagcatgttacagataatatagagttataataaaacggactatgactttt

SEQ ID NO: 86518 - DNA, 668 bp, Homo Sapiens
  misc_feature (37)..(37): n is a, c, g, or t
  misc_feature (58)..(58): n is a, c, g, or t
tacacgcacgttaaccgtgcagccgccctgctgtatnttaggcggttgttggcactcntagttgggcccttccctggcccctcacagcagggcctgcctcctgtggacgcttgtgtgctgccctggcaccggccactgtgttttgcataaaggagaggctccaaagatgttggccaaaggaatgaagccttgagagtccaggctttctatttctgagacactctactcaaggacttcccagatgcaaagcttcatctttgagcaaatacaaatatggagagggaacattaactttctgaagaaaagaaggaacatcttttcaaccttttatattgagttaacaccatggtcttagttttgtgaaagcactttaatacatccaactagcgggaggaatacaagatattcctacctttttattattattattaaaagagggctaaaccatgttgtaaactacttaagaactgaatgttcaagttgtacagtatattggccagattccttactgcccactaggcttgggagcatgttttcagctcagttttatgaatgttttaaatttgtattactgatctttgttatagccaattagcaattcaaaatggtaatttttttagcagtaataaatataccatcccccaaacagtacaataaactttatttgt

SEQ ID NO: 86519 - DNA, 657 bp, Homo Sapiens
ccaaaagttagaaaggtggagctgtaagccatgtgcttgttgcctttgacagtgacagtgcgcgtcttacaactaattccactaggcatgggaatgtcacctcctttgccactgtaccccatcaagcttactctgaatcaaaggttttgtaaaacttttgaaaatgaacttagctgcaaaatatagctaaccactttccattgcaagctttgcaaagtgaagagaggttcgtacttctcataattggtatttagcacaattgtaagatacagttttactgtttgtacatcgtttttttccattaaacttttctagagaagacaaaagcttacactggtgacatggataagtgagatggtgtctaacgagcagtgcaatattaggcggtgcaatagaggccctgttggcaagatgagttttgctggagagctggacagtgttggttagcttcctgcattgattgcccctgggcgttcttcccccttaactgtgaaagcagagtctataaatgaactctttgctcttacaaggtaatttacatattttctttctgttgaaataactgaaaatgttaaatctaccagtttatgtcttgtaaacagagtgtcatatgtatttaagttgtgtatttttataaagtaaagccaagtatcaaac

SEQ ID NO: 86520 - DNA, 1208 bp, Homo Sapiens
  misc_feature (18)..(18): n is a, c, g, or t
  misc_feature (57)..(57): n is a, c, g, or t
aaaacgacaggagcatcncaggaagggttcccagaagtcagaatccaagatggatgngaagcacaaaatgcaagaggaaaatgttaaactaaaaaagcccctggaagaaagccacaggctgcaaccccaccctatggatgaacaggatcagctgctgctctctgaaaagccacagttgtgtcagctatgccaggaagacggcagcctaacaaagaatgtgtgtaagaactgcagcggaaccttctgtgatgcctgttcaacaaatgaactgcctcttccttcaagtatcaagcttgagcgagtttgcaatccctgtcacaagcatctgatgaagcaatattctaccagcccatcataagactggaggccaagacctggaccaaaacgtttatgcaggctcctctgtacctgtgttttagctgtcaggatctcatagagcccagttcttagagtcaactaaagagttgataggaatttactaggtccagggagaaaaggcagtggttggggttactggaaattttgctcattttctctaatgactgtatgaataaaagtgaacttacttgagcctttctcttctaaatctaaacaacctgatattgaaggtttgctttatagcatatctttggaaaggcaactcatttttatgattagtgatactggggtggatttaataggagagagaatccaggcagataagaataaaaaggaaaatgatcatctccttctatagcatttgcagattcaagggggagaggtagatgctgagatcaaaatgacagttgttacttatttttccaggtgctgttagtataaacattgtttcctcttcacccctgctaactacctctttaaagtatttctaccaaactgtgaacccaatctcagggaaaagaaattaaaaagtaatataaattctgcatatattaaaaacaatattgtaatatgttataatttcaggaccagaattttctggtctttacctacaagggttttcattatcaaaaaaaagaacatttgtttttctactttatgacttcaaagtaaataactgcccttttcagaatctccttccacaaaacaagccaactcttccccattccctccatcttcctttccaagtcataatggaaattgtaaggagttttaaaaatagggtttggcttttgcaaatagaagatattgattaaagcaaagtcaaatat

SEQ ID NO: 86521 - DNA, 615 bp, Homo Sapiens
  misc_feature (129)..(198): n is a, c, g, or t
  misc_feature (270)..(523): n is a, c, g, or t
gtgtgagccacctcgcctgggcccccttctccatatgcctccaaaaacatgtccctggagagtagcctgctcccacactgtcactggatgtcatggggccaataaaatctcctgcaattgtgtatctcnnnnnnnnnnnnnnnnnnnnnnnnnnnnnnnnnnnnnnnnnnnnnnnnnnnnnnnnnnnnnnnnnnnnnngggaccgcgtatgcggccattccaaaatcaaaagggaaacccccgggccgaattcttggcctcgagggcaannnnnnnnnnnnnnnnnnnnnnnnnnnnnnnnnnnnnnnnnnnnnnnnnnnnnnnnnnnnnnnnnnnnnnnnnnnnnnnnnnnnnnnnnnnnnnnnnnnnnnnnnnnnnnnnnnnnnnnnnnnnnnnnnnnnnnnnnnnnnnnnnnnnnnnnnnnnnnnnnnnnnnnnnnnnnnnnnnnnnnnnnnnnnnnnnnnnnnnnnnnnnnnnnnnnnnnnnnnnnnnnnnnnnnnnnnnnnnnnnnnnnnnnnnnnnnggctcttccgtttcctcgttcaatgactcactgggcacggtcgttcggttgcggggatcggtaacaattcactcaaaggcgggtatacggtt

SEQ ID NO: 86522 - DNA, 429 bp, Homo Sapiens
ctcaccccaaataacccccaaacaaacaaaaaaacagattaaataaaatttacagtgaatatacccagcaaacatctgtatgtgcaattaaatactgtgtctgttactgcggcacgaacctcaaacaaacaatatacaagtgttctgggggggccaggggaatcccaagttttaactctgtggggtctaggaagacaagatggggaagtgagagaatggggcaatcaattttgtttatcttaattctgtccatataaatatattcataaagaccaaaaaaggaaaggaagcttgggatgttaaggtaataggaggacagtgtgggactttcccaattctacctgaccaaaaaatgagaaattaattttatgataggagaagagatttaaaaaaatgatagaagaggatggaagccaggcacagtcgtca

SEQ ID NO: 86523 - DNA, 198 bp, Homo Sapiens
gaaagaaagaaacaaagaaagtaatggatgtaattagggaataaagtttttaggaggaaaaaggtaaaatttgatgtttgcgcttcagtgtgctccatgttgtttgattggattgccttgtataattccatagctgcttcgcttattaccagttacagcttatgtttgaagtcacaataaactcttcttcaaacatga

SEQ ID NO: 86524 - DNA, 736 bp, Homo Sapiens
  misc_feature (41)..(41): n is a, c, g, or t
  misc_feature (68)..(68): n is a, c, g, or t
ctgaagctggagagcatgatgtcaccatgtcagctggagcnaagaaaggacattggttggaaggaccnactggtgttgcagagcaacagtctcgaagactctcggaggctatggctgagaccacccccagagccctgcttcatatgtgccatgaagcccgtgaggtgtggggagactgccctgggagtcagagttgggcacgcacaaggtgaacgatgcctgctgccattggatgtcatagacctgaggcagcactgtgaacagaacatggaagggtgagagtggatgcatgggtccacacatgtgacaatgggcttttgatagcccagagttctgaacttattctgtgaaaaatgtgagtgagagtcaccctaagtcagaccttcagcaccattttaggcacccataccctaggatgcacatcgtgggattcgtactctgggatccacaccttgggatctcaccctgaccattgcttcgtgtgagagcttgagtattcatgctgtgatgtgtggattatcacccaaagaaacaaggatggagttttcctgccatcgacatcactgactcacaaaggacagcttagaaactgtgaagactcctgagagactagaaggggctggacttgcttttaatcaggtttcaatgcagagacgggtgtcctgtcagttcccttattcagagacacgtttgttgtggcattaataaacaaagtcagcattccctggagaccaac

SEQ ID NO: 86525 - DNA, 592 bp, Homo Sapiens
acattgttaagatggcattactcccaaaattagtctatagatttaatacaatccccattaaagtcccagtgacccttttacagaaactgaaaagctgaccctagaatttatatgggattgcaagttactgaaggtactcaagtctgttcaaaacaatcttgaacaagaataaagttgaaggactcacattttccaatttcaaaatttactgcaaagctacttcaatcaaaacagtgttgtgctggtataaaaatatataaagcaatagagtagaatggaaagtccagaaacaaattacgccaatacactatggtcaattgatttttgacaagggttccaggaccattcaatgaagaaagaacagtgtcttcaactaatagtgctaagacaagtgaatattcacatgcaaaagaatgaatttgtacctgtacttcataccatatataaaaattaattcaaaatagatcaaagacctaaatgtaagagctaaaaccataaaactttgagaagaaaatacaggaataaatcttcatgaccttggatttggcaatggtttcttagatatggcaccaaaagcacaagcaacaacagc

SEQ ID NO: 86526 - DNA, 216 bp, Homo Sapiens
aaaaaaacattaaatacaaacttagcaggtgctgtggaaatgtacgagagaatgaagaacatcttggattctcaaagtcttgctcaggcagagacactctgcacaaaggaatgaaccattcaaaaaatccactgaatatagatttatggatgggcgtgttggctcatgcctataataaaatcctccatattcacaaccaagaagatccaagcagga

SEQ ID NO: 86527 - DNA, 873 bp, Homo Sapiens
  misc_feature (590)..(620): n is a, c, g, or t
cagagactcctgagaattttgttactggagctataggaactaggactccctcctcagactcatcaggaaatctgggaaaatctcatctccatgctgcagtctccccgcttggcaccatctagggctctgaagatctttaaagtgagcgttaaatgaagcaggccttctggggcatcgtgatggagctcctgaggactgggagggccgttttcttcataattcctacccagtttagggaatgagaaaaggccctgtggctcttaagtctcctgactatatccactagtttggccttgagtttgagacacctggtagatgtacctggctgccctaccaagagatttgatttgtttcttcccgtggtttcaggtgatagaacccaaaggtagctttttaattggagaattgaataatcagcatatgtaagcgcactagaaccctgtgttgaaaactgccaggtgtgggtataagaaaaggccgagagatcaccacctcctcttaccctaccccacacccataaaccagacatgtctcccaggaagcaggtgtccctggagacagaggatgacagggctctacaatctgtgtannnnnnnnnnnnnnnnnnnnnnnnnnnnnnnggggcccaagaaaggggccaggagagggtacaccccagctggggagagcaaagcagatggatccagttttctgtgtgttcttacctctgtacttcctcgtagctctgctgacaaagcaagcaggcctcccgtgtccaagaccccattcctcccacttgtgtacacctaggctggcaaatcttggagcctctgggctctgaaaactagacaatgatcattaaacctggcttgagtctctgttctggcaaaaaaa

SEQ ID NO: 86528 - DNA, 535 bp, Homo Sapiens
ctttatgttaacttttttaatcttcacaaacacattttgaagtaggtactgttcaaaaccccattttacaaagaaaaaactgaattttagggagtttaattgctgaaccaaggccacaaaattggtgagttgcaggtaaaatttgaacccatttctgcagatgtcaagttgggtttttttgtctttccaccatgctactgacacccaaaccaaatgaaactggcagcccggattctttcagagagatgttgtaaaagagttcccccagcaacctcacctgttaaacccccaaattaagtctgaagagcaaagcaggagtctgactgctcttcaaagggagagatgtcaggaagcatgatgtagtgaagcctctctctgctaggtgctaaaagtgtactcctaaacctgtcagcggccctctttggtattcaggatcttcatcagtcagaggaaaagcatccaagtatcaggagagatgcatagttccaagaggagccatctaaaagcaggcagagtttgaaagaaacttccaatt

SEQ ID NO: 86529 - DNA, 492 bp, Homo Sapiens
cagatcatgttttccaagagaaaagcctgtgttttcagaaactctgaattcagaaaaagaaacggaatgtgcgtaagaatcaggccactgcctggaaagactttctctcaattcgtagcctgaggctcagtgaaggaaacatgcagaaagaatgcctgagacgcccccagggaataagggaactctttataacctgtccagtgctgtcatctgggatttttctctgaagtacaagaatttcaggtgatttaagctgcttgatcacacttatttgtgcaaaattgattttcatttaatgttaatgttttcctgcttaattttatataacttcagaatgtaaagagcttcaaggtaaattacaaggtgtttaacctggggagttaaatgtgtacacttgaattaataggagcaccggttgttgctagtataaagtaatttgtgtggcagtttgtactgtgctgagtttttaaaataaacccaatattttaaagt

SEQ ID NO: 86530 - DNA, 979 bp, Homo Sapiens
  misc_feature (402)..(479): n is a, c, g, or t
  misc_feature (498)..(533): n is a, c, g, or t
tttttttacctcttaatagtattttatttaaaagttcacaattagagcacttgtaataacagaaaatatttaaaagtaacaaaggctgcccttggggagagacttttttcttatatgtagaaggaatggtgtccttgcccttacagtgggtggaattaatagtgcagtgtgggaccccatagttcaacagaatccatcgtcttaagggaatgaaccttacttccaagttattccaaaactgggggagagtgtgaatgacaaaaatctgattatttcactcgggccaagttaaaatccaatgataaaaacaacaacacatctacataaacactgtctaccatctgctgatatagtccagaaaacaaaactgcaaaccagtattccttaaagaaatccatagtnnnnnnnnnnnnnnnnnnnnnnnnnnnnnnnnnnnnnnnnnnnnnnnnnnnnnnnnnnnnnnnnnnnnnnnnnnnnnnagagtgtgactccatctcnnnnnnnnnnnnnnnnnnnnnnnnnnnnnnnnnnnntccatactctaaatgcctctgtcacatttctcaacttcaatataatgggaagggataacaatattcctggattagccaaatgggtgagaatgaggatccaaaaagaagcaatacacaaacatcatgatggaaggttcataaattaaatctatatttaattttatcaagtttttagagtattctgccctgttaaagtgtcctgagtttgcagatagtgttttaaaaatagagtatcttaaagtatagaaggagttcagaaaatagaacagcaacttttcctaccttgatcaccattaatcagcaccataaaaagtaaaaagctacacataagcacataggcaagcctagtccaccaaaaatacagtattagtaaatggatgaaatctcatgaagagtaacttacggacgcgtgggtcgacgatatcccgggaattccggaccggtcc

SEQ ID NO: 86531 - DNA, 533 bp, Homo Sapiens
tcttagatgtgatgtgttatagtatctgcaatttatactcaaatactacagcaaaatatgtaaatattatgtataagcaaaccaaatgtgacaacatattaacaattgctgaatctagatagaacataactgttcattattcttttaagttttccaaatggatagtggctgtttttaatttatcattgtgggcagaaaaagcgactgacatacctgctttttgggttataaaaagaaaaaagcattacagctatccctgagtcttcaaaactttactctcataatcttcacacccatcaaatctagagatttctttctcacattaattttcagagataggttctgactttataaatggaagtttaatctattttactggatattatctccagttaattattccaatctaaataaggagtgaaaggtaatggacagtttttacaaatttcttacacccacagggccttcctctcacatgaatgtactaaatgtatccccaatgaaaaaaataaagcaatatttattgataaaaa

SEQ ID NO: 86532 - DNA, 240 bp, Homo Sapiens
tcaggccaggcgcactggctcacacctgtaatcccagccataccatccatcagttttaagatacttaaccaaaacatttgtgctaggtgtcaagatatacttctaaatatttagctatagtgatggaagaggtagaagagtgacaccaaaggggcgagacacagagctaaatacaattaaatttcttcttaaaatgattatcaattgtctaagaaattttatcaggagtgatttgttctc

SEQ ID NO: 86533 - DNA, 748 bp, Homo Sapiens
actgaggtctccagttaacagaaaacactggctctgtatcctgggctttgagaaaacttatcaggctgtcacacttaccatcccttcagtctgcttgtcaggttccttaaggacgcatatctcaaatgtatggcatctacctctacctgggtcacaaccaagtgggtttctactagatcggtgttccttgacagccaacaagggagctgacactgccctcctaagttctgatcttgctcctgttcaactggaacttgatggatcccatgtggtttcccccatcctgacgctgtggctcagacactctccctaagctggtccttccctccaaatcctgccttaaacacactcagaaggtagaaaacacttcagcagcaaagtcctcttcccaagccaacagttgtgttcttccaatcacatgatcttaccttttcaataaaaggcaaaacaaaccaatttccaacatagcattacagcctttaaaaccattcacttctcatagtgattcacagagaacaagagattaaagtgctggattttaaatgtctaaagttgccttcagggctacaaaaagccctgccgtgtgtgtttttccttcatggtgttgaggggaaggaaagatagggaagggcagtggggagaaaccctaaaattttcaatcagaaactggaaattgtaaaagtgggaggtggggagttctgtgcaaatcaatctcccaaggttctgcgtcctctagtgagcctcaaag

SEQ ID NO: 86534 - DNA, 905 bp, Homo Sapiens
  misc_feature (717)..(719): n is a, c, g, or t
agtgtacctggaatgtctactggaccagtacttggtgctggtagtattggaacagatattgcaaatgaaattctggatttacagaggttacagtcttcttcataccttgatgattcgagtccaacaggtttaatgaaagatactcatactgtaaactgcaggagtatgtcaaataaggagttgtttccaccaagtccttctgaaatgggggagctagaggctaccaggcaaaaccagagtactgttgctgtccacagccatgagccactcctcagtgatggtgcacagttggatttcgatgccctatgtgacaatgatgacacagccatggctgcatttatgaattacttagaagcagaggggggcctgggagaccctggggacttcagtgacatccagtggaccctctagcctttgatttttaactccaaaaatgagaaacattttaaagcatttcatttacgaaaaactgtctcaactattcttaagtactgtattgatattgtttgtatcttttattaatgttctaccactttttatagatttgcatcttcctgtcacagggatgtggggaaatacgttttcctcccaagagaaccaagtttattatagactcctttattcagtgaaatggcttataatccactagttgccatatttttgctaaaatatttctaaccaagaatactaccttaaacgaacccagggacggtgggnnngacatggggggcgcccttcgcccccagaaaagctttttaagaccctttccttttgggccgcgggcccccgaaggtaaggggacttgggccatactgtttctccaggaaatcctgggaactgaaaaaaggcttggactccccccacataaaaaacgcccgggggggaacccgaggcgttgtaacaaa

SEQ ID NO: 86535 - DNA, 435 bp, Homo Sapiens
ggagacacaagacttactgcaaaaatatttttccaaggatttaggaaagaaaaattgccttgtattctcaagtcaggtaactcaaagcaaaaaagtgatccaaatgtagagtatgagtttgcactccaaaaatttgacattactgtaaattatctcatggaatttttgctaaaattcagagatacgggaagttcacaatctaccttattgtagacatgaaatgcgaacacttacttacatattaatgttaactcaaccttagggacctggaatggttgcattaatgctataatcgttggatcgccacatttcccaaaaataataaaaaaatcactaaccttttttaaggaaaatatttaaagttttacaaaattcaatattgcaattatcaatgtaaagtacatttgaatgcttattaaaactttcccaattaat

SEQ ID NO: 86536 - DNA, 1130 bp, Homo Sapiens
  misc_feature (56)..(174): n is a, c, g, or t
  misc_feature (548)..(585): n is a, c, g, or t
  misc_feature (609)..(617): n is a, c, g, or t
cctcagcctcccgagtagctgagactacaggcacctgccaccatacccagctaagnnnnnnnnnnnnnnnnnnnnnnnnnnnnnnnnnnnnnnnnnnnnnnnnnnnnnnnnnnnnnnnnnnnnnnnnnnnnnnnnnnnnnnnnnnnnnnnnnnnnnnnnnnnnnnnnnnnnnnnattgctcccagccattagaaagattgttaatcctatgaactcccttttgtaggagagaaagggccaatctgtaggggtagccctgtccaggtaaagttgttttcagcctcatgtctactgttaggtgagggagtcacagccagacagagagtattgctggagggtgagagaattgtggagaccaactaccacatagcaagagcccagctcttgggagcattgagatgtaagctcagggttacacagttccaaatcttgggaaggggcttttcagacagactgtttgctttctgctgagataaggaatgcatcactctgccagagtatgactttttacagattattaaataaagctgcatatgtctcattggttnnnnnnnnnnnnnnnnnnnnnnnnnnnnnnnnnnnnnncctccgggggcttcttattttttnnnnnnnnnaaaaaggagggtattggaagtgggccagtgggtcatatagtgtgttttcgtgacccagtttttttgtgtcaaaggggggaaaatattggggggccccccaattgaggggcggggtattaaattgggaaagcccggggttaccctgtgttagaacttttgggaagaagggaaatgagcagccgcatgaagcaaggaaggaaatctacacactgaacacacgccccacaaacacactcaagataacaagagaaaccaagtaacagagaaagagagaccgagacaacacgcaagaaaccagcagcggcggcgaacaacacaacgcacatgacagaaaaaagagtacgacaaacaagacacagcatcacgtaccatgcaaaacgcgacaaacaaaaagacgaaagagaaagtacaaacacgacgagcagcagagagagcaggcacagaaaaatgacgcagaacgacgccagacctaagagagcaacaacgagaggtaggagacaacccaaagcataa

SEQ ID NO: 86537 - DNA, 560 bp, Homo Sapiens
  misc_feature (545)..(545): n is a, c, g, or t
acaaattggacctttatacattttctgaaaacaatgaaaagagtatatttaaccttttctggctgtaaatggttaccttcctgtaactgccccgcacctggaggcatggagttgtgtgcatcctgcttatgtacaattgttttcagtgtttctaagaatgagtctgaatggttcttgaaaattagccaggatcaaatgctattgcagacaaagccaataaaaagttggacttcttttggggataacaagttttggaagagaaatgcaggccatatgtgcgcatgaccgagattttgaaaaaagatgtacatagtgacatgtttggtgcatggtttttaaggaaggcttttgtcaaaaagaaggtataacctttcccccacagacctgaaagctgtgccttttctatgcaatattacaaacggtacatcggaacccaaatggctggattcacatgtaggttttgggcgtgattttaaccatttggcccatttaaagggcaagggaaattgccctctttcctttgtgggtttatattttacccattnccctgttaaaatgtg

SEQ ID NO: 86538 - DNA, 1192 bp, Homo Sapiens
gtgcttcatcatcaaaacggctttaatccagtgtttgttgaaaatacttctcaatgaagcttattctaccacatatactacagaagtttatctacttccttaagcaattttatttccttcaggcatctgctgttcttaagagatcattccaaggatctcattttcataacttaagtcccactgatccttttcaatcctctggcacagcccgtttgagccctgaaaagccttaagtacttttcaataccagagaaatactgcagtcactgtatagtagggatctttaccttgaatgtggaatgcagtttccgtcagggaactgggagaataagtgaacttttaatgcagagtcattctgaagatattccaaagatgccagttaccttagggtcatccggagggtcatactgaacaatccagtcgacttcaggaatgtctagtcctctcgctgccacatccgtacacaatagtgttcccgaattctgcattgcagaactggaagaatgtggttgtacgcttattttgctttttgctttccatgaatggccaagacgggcaaatcaatgtagttcagcaactcatagtggtatttcacagacatacaagatgaaaagaagaccataagcttcttctttcggttcttcttaaggaatgtaaagagcagaaggaatctcttttcagaaggacaaacaacatatccctgttcaagaccatccactgttgcattcgctttatcatcatcaacgccaacatacaatggctcctttttcagagaaatccttgccaggtcttcaacttttcgagtttgggtggcagaaaagagcatagtctgtctacgtgttggcaaaagtttaataatttgctttaattcctcttcaaaccccacatccaagatacgatcagcttcatcaataaccagacactgcaggtttttatacataaatcctggggtattctgcatatggtccagcagacggcctggtgtggccacaatgatgttgatcccattaccaagtttctgtgcttcagcagatctgttactgccacccattatcaagccataggtatgcacgtggtgagtcatcagctccttaagaacaccaaaggtttgcatggctagttctctagtaggtgagagaataaggactcctgttccattcctgggcatgaaccttaacttaacaatgagtcc

SEQ ID NO: 86539 - DNA, 533 bp, Homo Sapiens
  misc_feature (360)..(421): n is a, c, g, or t
tttaaaataactgcatcctttaatggcagtaatacaattactggattaagagaccacaggagaaaggcaggtgacgtttctggaagacagatatggagtataaaaagggtgtgaaatagtcatgcggcgatcattgtaaaaatacagttcattatatacatatttgcaccaccaactctcaactctgaaacagtatttacacttttgttacaatcctggttagagaacaatttttctttaaaagctcggcctgatggcaaatgagaatttcgggtgaattcatagtcctatgaggttcttaggctgaatattccaagaggagggctccagcttctatttcatccacagatttcggtttannnnnnnnnnnnnnnnnnnnnnnnnnnnnnnnnnnnnnnnnnnnnnnnnnnnnnnnnnnnnncacaacactgccacactgtgtattcatacttattttacaaacaccaagggctgtgccctctgcttcaaggccaacactggtggctgaagacaaatctcattaatgattgtgt

SEQ ID NO: 86540 - DNA, 428 bp, Homo Sapiens
gtgtgaaatagtcatgcggcgatcattgtaaaaatacagttcattatatacatatttgcaccaccaactctcaactctgaaacagtatttacacttttgttacaatcctggttagagaacaatttttctttaaaagctcggcctgatggcaaatgagaatttcgggtgaattcatagtcctatgaggttcttaggctgaatattccaagaggagggctccagcttctatttcatccacagatttcggtttaaaaaatatttttcttttacaaaagaaaattctcaaaaggagaggaaaaacaacaacaaaaaccacaacactgccacactgtgtattcatacttattttacaaacaccaaaggctgtgccctctgcttcaaggccaacactggtggctgaagacaaatctcattaatgattgtgtaaa

SEQ ID NO: 86541 - DNA, 618 bp, Homo Sapiens
ttaatagtagttcaaataaaattacatatgtaaataaaaagaaaaattttcttcattattaaaaggaagaaaaataaccctgcctcaaaacaggtcctgttttgcacggcagttgtttcaatattttcagaaacaaatttgccatttatatcagataaagttactagagtactgtatatacattttcctttctaattttacacacgctattatttatagagcacaaaacactcaaaactaaatcaggaagtatagtcggttagttgagataggatgtggtcttaagtagtaaacagtgttctaaagtttcaggttgcatgtagtcacatctgtagagggaaacataatttgaaagatgctcttgcaggaaatttttctttgtttagtcaaaatatgctctctttgtttttaagttaatttattatgacctaaaggcatctaaaaaataaataagaaaatgaaattccatatttgtggaaattcatattgaagtctaactgtggctgttttggtaaaagtatttgctgctttgaatcaaatttagcattaaagggctgccacagtataatcatgttaaggagaaaagaatgttgtgcacacttgcattataagccaata

SEQ ID NO: 86542 - DNA, 693 bp, Homo Sapiens
  misc_feature (184)..(204): n is a, c, g, or t
ttatattcatatgtattgcattgcaattataattacatatgcagattgattgatagtcatgaataataacgtctgctcctcttacatagaaagaaaaacgatattaaaagaagatcttctctttatttgagactcagaattccttctagaagaaggaagtgctttttgttataggatcccttcnnnnnnnnnnnnnnnnnnnnngtaagatgtagatgcttattctttgctttagaaaacttctcacttaaaaagatggcatgcacctaggggaataaaaggtcacctcagacaccaggtgtcattcctggtgaggcctgcctcgtcggtggcctggggtctgccggcaggttctggctgcacctgaaggctgcgtgcaccttgtcccctggacaggtctcctttcctggccctgctccagcccagcccttcttctagtggtagctctggctttgcaggcccagctccaggccctgctcctcagagagactcttccagagctggagctgggcacagccataagacaggactggaccagatgctcctgtaaacatccaggggtgtgccaggcccaccctcacaactgcttgttcaggtatcgtgatgggccactcggtccaaaatcagccaggccatcttttccatcatctcacttcaaataaacataataattatatttgatcatttgcagag

SEQ ID NO: 86543 - DNA, 723 bp, Homo Sapiens
  misc_feature (194)..(194): n is a, c, g, or t
  misc_feature (504)..(513): n is a, c, g, or t
gcagagtcagagtttggctccaatatattctaacatgtgctgttgattaactattcaaagtgactcaaagtggaacttgtatttcccttgaatctgagtttaatagcattaacaaacaaggaagaatttagtaggagtcctaaaattacgggctctttctaacatttatgtgagtcttttatcaagttcttctnaatgaattttaggattattttggcttatttcatcaaggaaagtttggtgtaagaacttgttacctaatgagtgcccctccttgtaagttcatatttcaagttacatggttcatgccataaataaaccacacttgctttaacatcgttcagaatggtacatttaacaattggacatacagcactgtaaacaattcaaagtccattgagcttaccatgaaagaactgaaacgtatgtaggaactgtgtcctgctgcagacaagcagctgctctggctctggtgcggtgcggtgcagtgaggtgaggtgggcnnnnnnnnnnaggtgtggaagggagaattcctgaggccagtcacaattattgaagctaaattaatttcttactgacactttagcattaattctaagtagttctaagttctaaaccattaactgtatagttaatttttttaaatcaaagaagaaaaaggctttcacacagatgaatgtataggaaaacacaagtaatgacaattttcaagagccttattgt

SEQ ID NO: 86544 - DNA, 477 bp, Homo Sapiens
ctcgtctctactaaaaacacaaaaaaattagctgggcgtggtggcgcatgcctcattcacgtacatgggagagtctacaaagtcacacgtattcataggttaagccacatgctgacaaatgtcataagaagaccctacacttttaccttggccgatccctcccctcagtgcaagctctgtgcaagagtgaacttgaacttcactcagtgcaagagtgaacacacactttgtgccggctttaaagaacccagcacaaagccagtctgcatggcctacagacatattttgctggacaatgattacttgcttttctttttgtttttcttgtatatgcctgtttgattggttcctgacataccagaaaatcactgtcaaaacattagcttaacatttgttaaggaaacaaaaagacttcggtgaccacaccttataaaccaaacagttttgtaaatcactttggaaaatttcactaaaaaa

SEQ ID NO: 86545 - DNA, 623 bp, Homo Sapiens
  misc_feature (34)..(34): n is a, c, g, or t
aaatagacgctgttctggaaaatgatttatactntaaacacaaaatccaaaaaatagaactcagtggagtgacaatgacaatgcatgatggtggcccagtggctgtcccatgtgaaatacttcttgcctgacatgtatcatctacttgttgactgacctattgaggtgccttcatgacaccttttacattcatgataggtctcaggaagacagcagtgtacttggtggaaactcatgtaaaaagtgggttgtagggagctaaacagtgagtacacatggtatatggatacggaatggaataatagacattggagacttcaaaaggtgggagatgaaagggggatgaggtatgaaatcctacctgttgagtacaatgtacactacttacgtgcacagtacactgtttgggtgagaggcacactaaaagcccggacctcaccgctacccaatatgttcatgtaacacagctgcacttgtaccccctaaatgtatacaaataatctaaaaatagcccggacctcaccgctacacaatatattcatgtaacacagctgcatttgtaccccctaaatgtatacaaataatctaaaaataaagtggatatggtggctgtcgtgtccccc

SEQ ID NO: 86546 - DNA, 715 bp, Homo Sapiens
  misc_feature (42)..(42): n is a, c, g, or t
  misc_feature (520)..(556): n is a, c, g, or t
aaaagaagcgaaagaagaaacaaaagcagagagttcgctcgngaaagcggagcgacaagtttgctcctcggagtcggagagcgagtcctcagagagtggggaggatgacagggactctctggggagctctggctgcctcaaggggtccccgctggtgctgaaggacccctccctgttcagctccctctttgcctcctccacctcgtctcacgggagctctgccgcccagaagcagaaccccagccacacagaccagcacaccaagcactggcggacagacaattggaaaaccatttcttccccggcttggtcagaggtcagttctttatcagactccacaaggacgagactgacaagcgagtctgactactcctctgagggctccagtgtggaatcgctgaagccagtgaggaagaggcaggagcacaggaagcgagcctccctgtcggagaagaagagccccttcctgtccagcgcggagggcgctgtccccaaactggacaaggaggggaaagttgtnnnnnnnnnnnnnnnnnnnnnnnnnnnnnnnnnnnnngagaagggacagtgttccatcagccaagagctgaagttgaaaagttttacttacgaatatgaggactccaagcagaagtcagataaggctatactgttagagaatgatctttccactgaaaacaagctaaaagtgttaaagcacgatcgcgaccacttt

SEQ ID NO: 86547 - DNA, 1469 bp, Homo Sapiens
  misc_feature (106)..(106): n is a, c, g, or t
acggcgctgcacgaggcctgtacccgggcctactacgacgtcgcgaagcagctgctggctgcaggtgcggaggtgacacccaggggcctagatgacgacacgcctntgcacgacgctgccaacaacgggcactacaaggtggtgaagctgctgctgcggtacggagggaacccgcagcagagcaacaggaaaggcgagacgccgctgaaagtggccaactcccccacgatggtgaacctcctgttaggcaaaggcacttacacttccagcgaggagagctcgacggagagctcagaagaggaagacgcaccatccttcgcaccttccagttcagtcgacggcaacaacacggactccgagttcgaaaaaggcctcaagcacaaggccaagaacccagagccacagaaggccacggcccccgtcaaggacgagtatgagtttgatgaggacgacgagcaggacagggtccctccggtggacgacaagcacctattgaaaaaggactacagaaaagaaacgaaatccaatagttttatctctatacccaaaatggaggttaaaagttacactaaaaataacacgattgcaccaaagaaagcgtcccatcgtatcctgtcagacacgtcggacgaggaggacgcgagtgtcaccgtggggacaggagagaagctgagactctcggcacatacgatattgcctggtagtaagacacgagagccttctaatgccaagcagcagaaggaaaaaaataaagtgaagaagaagcgaaagaaagaaacaaaaggcagagaggttcgcttcggaaagcggagcgacaagttctgctcctcggagtcggagagcgagtcctcagagagtggggaggatgacagggactctctggggagctctggctgcctcaaggggtccccgctggtgctgaaggacccctccctgttcagctccctctctgcctcctccacctcgtctcacgggagctctgccgcccaagaagcagaaacccagccacaacagaccagcacaccaagcactggcggacagacaacattggaaaaccaatttcttccccggcttggtcagaggtcagttcttatcagactccacaaggacgaagactgacaagcgagtctgactattcctctgagggctacagtgtggcatcgctgaagcatgggagaaaagaggcaggagcacaggaagcgagctccctgttggcaaagagagcccttcctgtcaacgcggaggcgctggtcccaaactggaccaggagggaagtgtcaaatcatagagagagcaccaaacaggaggacgggtcctcagccaactgagtgagagttatacgcattagctcacggatcaaggatgtaaagatctctggaaatcaagtccggcgcttagcgagccacatacaacaagcgcgcgagatctgcgctgcaggcgaccacatagtaaagaaagtgtaacaaacg

SEQ ID NO: 86548 - DNA, 966 bp, Homo Sapiens
gtggcgaattcggcacgaaggaagaagaaagagaagcagggccctgagcggaagaggattaagaaggagcctgtcacccggaaggccgggctgctgtttggcatggggctgtctggaatccgagccggctaccccctctccgagcgccagcaggtggcccttctcatgcagatgacggccgaggagtctgccaacagcccagtggacacaacaccaaagcacccctcccagtctacagtgtgtcagaagggaacgcccaactctgcctcaaaaaccaaagataaagtgaacaagagaaacgagcgtggagagacccgcctgcaccgagccgccatccgcggggacgcccggcgcatcaaagagctcatcagcgagggggcagacgtcaacgtcaaggacttcgcaggctggacggcgctgcacgaggcctgtaaccggggctactacgacgtcgcgaagcagctgctggctgcaggtgcggaggtgaacaccaagggcctagatgacgacacgcctttgcacgacgctgccaacaacgggcactacaaggttggcatccccccgttcttcacacatccggcctgtcctggcatctgggtgggtctgtagctttgtttccccgtagctagccggttccatgatgtggggcacaggaaagcgagttttcgccttgcccaccctcaaggccgagctgtgccctctgtctgcccccagctttcccccttctgggtcagcccgggacggccctctcacaggttttcccaccaagtgccatctatgaaaggctcgtatccgctagccgtgtaggtctggttggatttgagcaggtgaaggattacaccaagtggaaggaggcctgcaggagttgctgccggtccccgtcaccactgtgggactgttagacctgcaaggcagaccaacctcgtctggaatgaggtaacaccaagaggtgtggcagtgcacaga

SEQ ID NO: 86549 - DNA, 756 bp, Homo Sapiens
  misc_feature (381)..(426): n is a, c, g, or t
tttttcaatataaagtgttttctttaaaagtcatattggttcgtggcctagtgccttggattttacatatttttcttttaaaatgcaaaaccttttcaacaaaatagtgtttgtcatcaggttggtactaaacatttataattactgtgtaattataaacaaaaatacataaagctttgaatataattatgtagcataaaagttaaggttgttcactatgatggcatcttagaattaaacaaaacttttactagggctgaaaagagaagactgatttaatgtggtgtgattattctgaagataaatgtctggctacagggaatattttgtactaaaaaatgattacacatatggctgtgtgtgtttgagtctgtgtctgtnnnnnnnnnnnnnnnnnnnnnnnnnnnnnnnnnnnnnnnnnnnnnncacacacacgccccttgaattgctttaactcctaagtgtttcagtcctcattccggtaaactccccatgctgattctttgttttaaactgaaccataggcacagtttcctttttgccaaatgtcaaaacaggtacaaattttaaaatgtaatgctttttaaatagaaaaatgtataaaattagaagtgcccacatataaaaaatacttgagatgaagattatctttagtgaatatcatctgcatatctctgtaagttcaattgtgtttcttacagtccctgtcatattaccaacagaggcaataaaagctgcagtgaaattgccatgact

SEQ ID NO: 86550 - DNA, 313 bp, Homo Sapiens
ctgtcattcattctctttctggcaggacgtcacgtctgtgtgagagggccttcatgtgtagagtgcagcatttgggacctttttgaaaaagaccaaaacggaatgttttctgactttagagaaacgtggtgatgtctgaaggaagatggaatgagtgacagaaagctacaaacgagaaatgacattcagctttgtataataaaaacacctattaacattcatcacaaggtacagaaaactttaagcctccaagaggccatcggcccaaatggaggcctgaggtcagaacttaaaatggtatagtagaaggaaa

SEQ ID NO: 86551 - DNA, 672 bp, Homo Sapiens
  misc_feature (78)..(78): n is a, c, g, or t
gaatcggcacgaggagaaatataagcctggagttgcctctgaattacatatttaacaaacctagaagctaaatcagtngtcttttatcaaaactgcaactcctctaagttgaaagcacagtgacaagagaaagcattacaaattcttgagaaataatagaaattaaagctcttttcaaacctgtgaacaagtatagtaccagaagtataagattcagataggcccaagttgtagttcttgttatgagtcttacaaccctatggactttggacaaattacttctctgcgtctgtttcctcatctgtaaaatgaaaataatttctgtttcatacaggtatagtctaaatagggataattacacctacttcaaagttgtaaaatacacaattacaactagataggaggtataagttctagtgttctgtagcactgtaggatgactatagttaacaatattgtatagtttcaaatagctagaagaaggatattgcatgttcccaaaacaaagacataagtttttgagatgatagatatgctaattaccctaatcactatatgttatatgtattgcaacatcactatgtacccccataaatatgtacagttattgtgtattaaaatttttttaaactaaaattataagacattaaaaaaaggtatcacatgtaaaaa

SEQ ID NO: 86552 - DNA, 140 bp, Homo Sapiens
gtaactttatatgcttcatataaaagtactgagttcaaagcagtattatacttgctaatcattaccaaaattctgattttgctatacttttcatcaggatttctgggacacctcccaactaaacatattaagattctaga

SEQ ID NO: 86553 - DNA, 1087 bp, Homo Sapiens
ggggagggcagcggaggaggcgaggagcgccgggtaccgggccgggggagccgcgggctctcggggaagagacggatgatgaacaagctttacatcgggaacctgagccccgctgtcaccgccgacgacctccggcagctctttggggacaggaagctgcccctggcgggacaggtcctgctgaagtccggctacgccttcgtggactaccccgaccagaactgggccatccgcgccatcgagaccctctcgggtaaagtggaattgcatgggaaaatcatggaagttgattactcagtctctaaaaagctaaggagcaggaaaattcagattcgaaacatccctcctcacctgcagtgggaggtgttggatggacttttggctcaatatgggacagtggagaatgtggaacaagtcaacacagacacagaaaccgccgttgtcaacgtcacatatgcaacaagagaagaagcaaaaatagccatggagaagctaagcgggcatcagtttgagaactactccttcaagatttcctacatcccggatgaagaggtgagctccccttcgccccctcagcgagcccagcgtggggaccactcttcccgggagcaaggccacgcccctgggggcacttctcaggccagacagattgatttcccgctgcggatcctggtccccacccagtttgttggtgccatcatcggaaaggagggcttgaccataaagaacatcactaagcagacccagtcccgggtagatatccatagaaaagagaactctggagctgcagagaagcctgtcaccatccatgccaccccagaggggacttctgaagcatgccgcatgattcttgaaatcatgcagaaagaggcagatgagaccaaactagccgaagagattcctctgaaaatcttggcacacaatggcttggttggaagactgattggaaaagaaggcagaaatttgaagaaaattgaacatgaaacagggaccaagataacaatctcatctttgcaggatttgagcatatacaacccggaaagaacatcactgtgaagggacagttgaggcctgtgccagtgctgag

SEQ ID NO: 86554 - DNA, 1003 bp, Homo Sapiens
cagtcgacggtaccggacatatgcccgggaattcggccattacggccgggtggttatgatgtaaacagattcagtgtttgtgttcattcgtcatatgttgtgatagggatgttgggagcacagctctattctgcctgctcagacttaagttagacccttatcttttatattatgtcatgaaaaaagtctcctaaaattgtgaaactagttcttgatgagtgatgtgatcatcagcaataaagatataataactctgttttcttagcctgtatagaggagaggaacttgcttggctttaaaatatatttatttgccatttaagtataaatatgaaatctgtttcttatgggaagatagaatatatatattttcctttaaactttttaaggtcacttttaaataaccaaatttgatttatggtttttaacaaaggactaaagagctggaaccaacctagtttgttttgtgatataaactttaagtgtcgagggaccatgccagcaactaccaaaaatctcttaaatcttcaggtacagctggcattttggcagatgcatagagacatctgagaccctcagaaaggaaggataatccaagaatataggaaatctgtgttctcttcctttcattttatcccttatatttctaaagactaattataagtaatctgacattttaatgtagctactcttatttattttttctttctgaggtattaaaatatctggactgagttttgccaaatgttaaagggagaagagttactgaagactttgaacacttgctttttgtgattgcttatgtcattagtgcctcatgactgtgtttgatgtcctttattgatacaaagtgagcctgtgccttcattatcttgcccattttaatacaaatggaaacctggtgtttgaaaatctctgaactgtgtgggttttggaggaatatacctgaattttattcaataacagtttctggacaggaagaaaaatacagttacatatttata

SEQ ID NO: 86555 - DNA, 753 bp, Homo Sapiens
  misc_feature (70)..(70): n is a, c, g, or t
  misc_feature (429)..(429): n is a, c, g, or t
gagcgatcaatgcacacaccagcactggtagaggctgaccagaagctcatcgattccatatgctgtcacncagggtgcagattactctcttttgctgttattttattgtttttcttaaattaagccattgtttttcatggattatttttaaaatacctaccccataattttcaggcaattgtaaaaataaaccttatttaagataacttttaatggtacatatcaactatatgtggggaaaaaatgcaattttctgggcaagagaaaccaaaggattttcaatatatgagatgccaggttgtcaattttctaaaccttttcctctagattattctggccctaggcctttcagcaaccccactaatcaattattagatcctgccccaaggagcagtggcttgggggctggatttagggaggaaaacctgnaataaactgttttgcttagtactggttacagctgtagctggagaagagtttataatcataaagtacatttttgttattaccttgtggattttaattatccatcttgtctaatcttgttctctgtcatcctagataatgaggtgtttgtgggagcagagctctgcacacaccaggggatgtaataaatgtttgcacttggcccagtatattatgaatgtggcacagtaaataaagtttgtgtacaaaatactagtttatttctatgggagccattatgttcaggatatataaaatgtatctaattaaacaattttgaatctaaaa

SEQ ID NO: 86556 - DNA, 790 bp, Homo Sapiens
  misc_feature (24)..(24): n is a, c, g, or t
  misc_feature (45)..(45): n is a, c, g, or t
  misc_feature (57)..(57): n is a, c, g, or t
  misc_feature (562)..(639): n is a, c, g, or t
aattagaagaaaacaaataataanaattagagcataaataaatanaattgaaataanaatcaatgcaaaagaacaatgaaacaaaaagttgctttttttcaaaagttaaacaaaactgacaagcctttagcaagactgagaaaaaagagacaagatacaaatcagaaatgaaaaagacattacaactgacactgcagaaattcaaaggatcattaggggctactatgagcaactctatgccaataaattggaaaatctagaagaaattgacaattcctagacacatacaacctactgagactggaccaggaagaaatccaaaacctgaacagactaataacaagtaacaaggttgaagccataataaaaagtctcccactaaagaaaaccaaggacccgatggcttcactgttgaattctaccaaacatttaaagaagaactaataccaatcccactcaagctattgaaaaatagaggaggagagaatatttccaaagtcattctaggagaccagtatcaccctgataccaaaaccagacaaagacacatcaaaaaaagaannnnnnnnnnnnnnnnnnnnnnnnnnnnnnnnnnnnnnnnnnnnnnnnnnnnnnnnnnnnnnnnnnnnnnnnnnnnnnggggacttttaagggggctggaaatggtctccattttgattgtgaggtggtggctacaagattgcatgcatttgtcaaactcatagaactgcacactgaaaagagtgaattgtactgtatgtcaattatacctaaataaatctgacttaac

SEQ ID NO: 86557 - DNA, 692 bp, Homo Sapiens
tcattcattcagcaaggaaagtctccatcatcaccagttccagtagtgaaaaacagaacccaacaaactcaaaatacattacatttaccactaaaaaacagtagctatgagagagagaatttgatctcaggaagtaatcaaacagaattatcatctgggatttctgaatcatcccattttattccgtatgttcgaacaaatgagatctattaccttgatcccgatgcaccattgtctgggccttcaacccaggaccctcagtaccaaaattcacaagactgtggccaaaaacgacagctatttgattctgactgtgtcagggatccacttcttaatcctaacatggtgaaaaatagggatcgacagcaagcaatccttaagggactttcagaactgagacagggccttctccagaagcaaaaggagttggaaagtagtctcctgcctttagctgaaaatcaagaagagagttttggttcttcattttaaatgtagaaaatcaaatccttcacatttgatttgtgtcttccaaattataaaatgtgctcactggctcaactgtatttttcaaatagcctagatttacttatttttttaaatgctcattaaaaacttgtatactatgtagtaaaatgctgtacttgttctatacaataaaacagatacttcttttgtaaaagcttagtagtaaa

SEQ ID NO: 86558 - DNA, 562 bp, Homo Sapiens
  misc_feature (482)..(501): n is a, c, g, or t
aaattgtagaattacttctatagctatattttatgataaagaagtgattgtttctcaaaatcgcattttaaagacgttttatggtacttgttggaattgggacttaggagttttgattttgataagaaactgggataattttctgaactttttttcctctgtatcacatttatttactatttttaaaaactttgacatttaacacttgggacaacatttattataaatgataagaaaaatcttagaggtttgtctacccacagtgtcatggaatcttctctgaaaactaatccataaagttccctggagaaattggtcagaatgatctgtcagaaccatttgaaaacttgctcaagaccagttgcttatatatagtaggattttactttttcctgcttatgtactactatatgcttaaaaaacctggaggaatacttaccaaaaaggagtaaccatctctgagggtgggattctgggggaannnnnnnnnnnnnnnnnnnnctataatgtgaaacttttgtagtatgtatttttctaattgaagagaataaagattaaaaca

SEQ ID NO: 86559 - DNA, 659 bp, Homo Sapiens
ccttgctatctgtgcaggcttgggcaggtcatctccctgctggtctcaatatcctcacctgtaaaatgattgtaaatgatccccctaccttcaagattctctgattgatagaattttttctttaattaaaaaattttaaatattccttgagttggaagcactgatcaataagtggattgcttagggaggttggaacgaatagattcagtcccaacttcctcttttaaattccctcttcctcactcttcctgcaacacttatttttacagttgagttttaaaaataagtaatatataaaataatttctgtagtgtggtttcagatttaaaaattcctgcagacaggctgggcttgcaaccccatcagtcgatggtcagagccctttgctttttgagaccatttttaggtgagcttggcttgcctggatacagtgtgcagtgcattcttcctgaattttgcaattctggtatctgggtgtattttctaggtgtgtcagggtgagtgtaatccacctagggtgtggaaaaagccaagaaagggaaattaaaagaggttcctatccagtcatgttaatgatcttccacttgtactatcctgtgcttcgttgttaacctcgaaaacatactttgttggctgcaaaaataaacaaagggaaactc

SEQ ID NO: 86560 - DNA, 676 bp, Homo Sapiens
atgtccctgatgtcctcgtggctgacggtgtgcagcgcccctttgtgcagccggtctaaccgaaggctctcggggaggaaggcggggaggtttcacactttatggttgtcttgtcatctcgtacctcttctctggaaggtggcaaaagggtcatgacgcccagtctgtccacttcccgagctgggctgtgagggatccttcgtggggtggagcgcccactgcccggaggggaggagctagcaagcgaggaagcagggtaggggggaatggagctcattgatctaaaacgaccaagattgtctagacttccactgccaactcgactttcaatctcctctgcccgctgctctgtattttctttttcttcctgaatcaacccgatctctttgttgatggcgtccagctgctcctgaagcatcatggctagtgtgtgcgcgtcggcctgcccgctgggcgatagcaggtcaactgagctgaggagagtgtccctgtcatcttcaccatcagacacgtcagcatcactctcgaatgcttgtgctacatttgccaagacactagcttgctgggcacgttcccaatcctgctcattaagagtttgtaccttggaaggctcatctcgcagggctgccagccggcctttctgtgggcgccatcaacaaagagatcaggttgattc

SEQ ID NO: 86561 - DNA, 1151 bp, Homo Sapiens
ctgaatcaacctgatctctttgttgatggcgtccagctgctcctgaagcatcatggctagtgtgtgcgcgtcggcctgcccgctggcggatacgaggtcaactgagctgagggagagtgtccctgtcatcttcaccatcagacacgtcagcatcactctcgaatgcttgtgctacatttgccaagacactagcttgctgggcacgttcccaatcctgctcattaagagtttgtaccttggaaggctcatctcgcagggctgccagccggccctttctgtgggcgccgcagcactgcactggtgctgtaggagtctgtgtggccgtctgcaatggggaacctgaaatctgggacactgcccaagtggggtcggccatgatgaagtgaagcacctcttagtctcatgtggtctagttcagccctcagtgcttcaatgtttaggacaagctgatccttatcgtgttgtgtttcttctaactgcttttttgcactttcaacttctcttaaaagagagttcttatcttccaaagcagccattctctctttaagatgaagttgaagcctctcattagattctgaaagcagcttgtcaacagtgtctgataaacgtttattatgttcttcgttcattttttctctttgccttgcccgctgcagttcttgattcttctcctccaactgtgcttccatctgtcgtaacctttcttcaatgttgccgtgtctctcttcagccttggaaagcgctgccaccctctgggccagctccgcctccacctccgggagcgtctctgccttcctcagtgtctgttgcagcttttgctctgccaattccaagcgctcctgtaactggcggtttttatcttcagtctgtcgatgcatagaatctttatttgcaatttcattttcaagtttatcattgaggtcatgcacagatgtggcttcacgctgtgcagcgaggtagcgtttttcaagagtagtgattctctcttccatatcttccttttgggccatggcttcacggacatctcgttgcaattttgtgttcatttcttcagatttgatgagatcttttctagccgtgtccagatcctcttccagttctgtcacatgactggaaagggaagccaggcgttctttcatttggcggccgca

SEQ ID NO: 86562 - DNA, 1753 bp, Homo Sapiens
tcaaggcgtacttgtgacctatagaaccacgtggttaagaaaagcaggctggtacggtccggaattcccgggatatcgtcgacccacgcgtacgcccacgcgtccgggcctgtacattttcaaggaattcttgagaggttcttggagagattctgggagccaaacactccattgggatcctagctgttttagagaacaacttgtaatggagccttcatctcttgagctgccggctgacacagtgcagcgcattgcggctgaactcaaatgccacccaacggatgagagggtggctctccacctagatgaggaagataagctgaggcacttcagggagtgcttttatattcccaaaatacaggatctgcctccagttgatttatcattagtgaataaagatgaaaatgccatctatttcttgggaaattctcttggccttcaaccaaaaatggttaaaacatatcttgaagaagaactagataagtgggccaaaatagcagcctatggtcatgaagtggggaagcgtccttggattacaggagatgagagtattgtaggccttatgaaggacattgtaggagccaatgagaaagaaatagccctaatgaatgctttgactgtaaatttacatcttctaatgttatcattttttaagcctacgccaaaacgatataaaattcttctagaagccaaagccttcccttctgatcattatgctattgagtcacaactacaacttcacggacttaacattgaagaaagtatgcggatgataaagccaagagagggggaagaaaccttaagaatagaggatatccttgaagtaattgagaaggaaggagactcaattgcagtgatcctgttcagtggggtgcatttttacactggacagcactttaatattcctgccatcacaaaagctggacaagcgaagggttgttatgttggctttgatctagcacatgcagttggaaatgttgaactctacttacatgactggggagttgattttgcctgctggtgttcctacaagtatttaaatgcaggagcaggaggaattgctggtgccttcattcatgaaaagcatgcccatacgattaaacctgcattagtgggatggtttggccatgaactcagcaccagatttaagatggataacaaactgcagttaatccctggggtctgtggattccgaatttcaaatcctcccattttgttggtctgttccttgcatgctagtttagagatctttaagcaagcgacaatgaaggcattgcggaaaaaatctgttttgctaactggctatctggaatacctgatcaagcataactatggcaaagataaagcagcaaccaagaaaccagttgtgaacataattactccgtctcatgtagaggagcgggggtgccagctaacaataacattttctgttccaaacgaagatgttttccaagaactagaaaaaagaggagtggtttgtgacaagcggaatccaaatggcattcgagtggctccagttcctctctataattctttccatgatgtttataaatttaccaatctgctcacttctatacttgactctgcagaaacaaaaaattagcagtgttttctagaacaacttaagcaaattatactgaaagctgctgtggttatttcagtattattcgatttttaattattgaaagtatgtcaccattgaccacatgtaactaacaataaataatataccttacagaaaatctgaaaaaaa

SEQ ID NO: 86563 - DNA, 618 bp, Homo Sapiens
  misc_feature (103)..(156): n is a, c, g, or t
ggtgcaaaaaaatagaaaaatcagcagggtgtggtggcatgcacgtatactcccagctactcaggaagttgagtgagaggattgcctgagcccaggagtacannnnnnnnnnnnnnnnnnnnnnnnnnnnnnnnnnnnnnnnnnnnnnnnnnnnnnaccctgtctggaggggtggggggagaaaaaaaacaccatagaaacaacccaaatgtccaataacaaattgtagtccatccatacaatggactactactcagccatgaaaaggaatacagcactcacatatgctacatgtgaatgaaccctggaagcattatgctcagtgtaagaacccagacataaaaggtcacacattttatgattccacctatatgaaatatccagaagaggtaaacctataaaaataaaatgtatatttatagctgccgggggcttcagggtgaaggcataggaagaaactgtttaatgggtacggagttttatcttgcagcggtggaaatgttttggaactaaagtcgtggttctacaacattgcaaatgcactcgatgccactgaactgttcactttaagatggttcgttatgtaaatttcatcttaataaatgcatgaagaaaaaa

SEQ ID NO: 86564 - DNA, 593 bp, Homo Sapiens
  misc_feature (202)..(210): n is a, c, g, or t
catttaaaaaatctctaaatctctttaatataacatttctgccatcagaattggaacagaagcatatcagagtaattctgagatagtttgtatagactcacatttatatcaatttttctaatgaaagagaaaaatctagcaggtcaatttagttatttcactgattagtaccttctcacaaacacccctccagaagaaaccnnnnnnnnnactcgcctcttctctttgtttgactcacaagaagcgctgtcttccatagccacaaagtttgggacttgaattttttccagtgtttccctgagttgatcaacttctgctcgatattcatcaagctgacattctaatttttctctacgtagtcgttcatactccagctggccctgcagttctttgatggtcctctttgccacatcactgggtctctcccctgctttgttggtaatattactgtctgctcccattttaattaaccactgcaaacactctatgtggccttgtccatcagctttatgcataggagttgatccattatcagcacgctcattaatattgattactccatcttccagtaatttcttaagcatccccaaatc

SEQ ID NO: 86565 - DNA, 539 bp, Homo Sapiens
gtcaagattgatttttagatgcaaggacttgaaaagacccagaaggatgccaccagtttttccttgaggcctaggattttttattctgtcccgagcagaggtaattcctcacaacttagtgcaccagtagcaccagccattttgagcagagtacctctttggggagcttttcgttttgttttgtttttaattctctttccttagcagcaaggtcttttttcctagagaatctactccgttgcagaatcattgcaacctcaggagccctcactgattgagtgctgtcagcctgatatactactttggactctggaaacagatatgggttctattctctatttctactgtgtgtcgttaaacaaccgtcggagaccagatgacctgttagatggctagtcctgtataactcgactctgtatgtttcaatgtatgttactgcaatgcttcacctgctgtacagtgtttgtgagatgctctttgaagatggtacttttatattttttcattttcaataaaagtacattcctaacacaaaaaaa

SEQ ID NO: 86566 - DNA, 366 bp, Homo Sapiens
cctttaagtaagctctttattcatcttatggtgcagcaattttaaaatttgaaatattttaaattgtttttgaactttttgtgtaaaatatatcagatctcaacattgttggtttcttttgtttttcattttgcacaactctctgcaacttagaaattacatctttgcagttctgttaggtgctctgtaattaacctgacttatatgtgaacaattttcatgagacagtcatttttaactaatgcagtgattctttctcactactatctgtattgtggaatgcacaaaattgtgtaggtgctgaatgctgtaaggagtttaggtcccatgaattctacaaccctataataaattttactctataca

SEQ ID NO: 86567 - DNA, 594 bp, Homo Sapiens
  misc_feature (79)..(127): n is a, c, g, or t
  misc_feature (398)..(408): n is a, c, g, or t
caaagtcctgcttcagggttaccttccctgaccactgctgcctccctcccagcatttgccaggactgtcattgccttannnnnnnnnnnnnnnnnnnnnnnnnnnnnnnnnnnnnnnnnnnnnnnnnggagacagcgtctaaagtctgtcgccaaggctgaagtgcaggggcgcaatcaaagttggcggcagcctagaactccggggctcaagcaatcctcttacctcagcaactaggactacaggcacatgccaccacgctgggccttctaatttatttctgtgtcaacaaaataaaactcaggcctaggaatagcttggttcagaaatcacagagggacttagtattccattaatacaaatggaaacattaagttcatcatcagatgataaaaggnnnnnnnnnnncctgatactcatctcaaagacgcagaaaagacatttgcataaatccagtacctattattatttcaaatttaaaaacttcttcttttttaagagatagggtatcactatcgacgcgtggtcgacgatatcccgggaattccgaccgtaccagcctgcttttttaccactgtttaagtacaattgccc

SEQ ID NO: 86568 - DNA, 1037 bp, Homo Sapiens
  misc_feature (76)..(110): n is a, c, g, or t
  misc_feature (270)..(279): n is a, c, g, or t
  misc_feature (494)..(503): n is a, c, g, or t
  misc_feature (737)..(792): n is a, c, g, or t
tgatagatcactatgggcgtagctcgtccgagccgaacgacgagcgcagcgaagtagtgagcgaggaagcggccgnnnnnnnnnnnnnnnnnnnnnnnnnnnnnnnnnnncagtcgacggtaccggacatatgcccgggaattcggccattacggccggggagaattatgatgttataaaaaggaaaaaggaagaatgtcgtctactgcagtctatttaaagatgacatttggtgaaaactctcttcctccttacaatattttaaatgannnnnnnnnngggggttaattggtaaaaatcattattggttcaaaatgttatgtcccaccctcaaagatatgcacttttaagtgaagaaaatgatactgctagcagcttatttaaaactgggggtcctttttaaataagaaaaattatataaattttagaagttatttcataaagccatacggtattggacatatttttaaggtagtcaatgagtattttggaannnnnnnnnnggagagttatcctgggaaatggtgttataagctaggagaatcccttgggacagtctttattttccttcttaaaaatttatatgattcaaaaccatttcttcaggttaacatggagggcatttaaatctggcgacagtttatcttctgcgcaaaataaaaatttactatttcctttatatactggtcaatctgggactggccagtaaacacaattggtgttttcaacaaaggaannnnnnnnnnnnnnnnnnnnnnnnnnnnnnnnnnnnnnnnnnnnnnnnnnnnnnnntttgtggcggggacgcagaggccacagaagaaggtttttacaacacattccgtggagggccgcggggccctatgggtcaagctgagccggggcacaaacagcggggcccaagagagaaccggggacaacaacggcgcgcgggctctctccaataaaaaaacccggggggggaacacagggttctcggaacatccacaggggggcagggagagcacggggctccacaaggggccaggcgccgtcta

SEQ ID NO: 86569 - DNA, 891 bp, Homo Sapiens
  misc_feature (260)..(277): n is a, c, g, or t
cattgctatttataacttagtatttcatagacttaagtgtattcctaatttaacggtgcaaatattaatgtatatactgtacagttcagattttaaagctgatatttttatatccctgaattgtaagccgtttgttacgctgcagtgctagatttgccagggaaccagaatttatggatgaactgattgcttatattttagtcagggtttataaatgtagatggtcaaatttacattgcctagtgatggaaaattcaacnnnnnnnnnnnnnnnnnnccaatattaaaaaaggctctgtatgcatggtggggctatgtaagtactctttaaaactatggccctattaatcttacaagtgttacttatgggtcaagcaatgtaaactgtataaatgtaaaaacaacccctccacacacataacccctggaatatatggtaaaaacaagtagaagctgtttcagcgagtgggttttttccccctgcctgcggggggtgcctttctcattttcagcaaggtgatgattatctcatgggaaatgacaaagatctgcttttgtggcagaggactttgtagatttgttattttaagagaggttattcctttttattccttccctcccactaatttgttggcctttaacagcaattttgaaaactgggtcttctggttatgtttttgttttaaaatctttaaattagaggatgctgtgccattgagtactttaagttaatatgaggttctggttcaaggaaaacttacgttggatctgaaccaatgagcagatattttgatatgtgccactcttgcatatacatctcagtcctaactaaagattctagtggcatccaggacctttagggaggcatttaataaacacttaataaatacc

SEQ ID NO: 86570 - DNA, 611 bp, Homo Sapiens
gcttagaaaaaactgttttttatatgtatgcttttcttttgatttcctaatgtttattctacatatagtcgaaaatctgccaaagaagtaagagataaattgttggagttacatgtgaattattatgttttagaagaggcatggtgtgttgtgagaactaagcctggttgcagtatgcttgaaatctgggatgtggaagacccttccaatgcagctaaccctcccttatgtagcgtcctgctcgaagacgccaggccttacttcaccacagtatttcagaatagtgtgtacagagtattaaaggttaactgagaaggatactacccattttactatggcacaatgccgtgtgtcaaaaacaatcaccctttggcttattcacattaataaaaatcacaagctttaataacagacacttaaaaataagataaaaatggattggaaatttttctgattactaaaaggtaaattacttttctgttcattgaatgtcagccttattaagcttgtcatataagttattaaatcattcatgtcatactgcataaacaaatgttcatttcagaattttaaagagaaatgtatataaaagaacaatgaattttaataaa

SEQ ID NO: 86571 - DNA, 421 bp, Homo Sapiens
tcttaggcgtttcagaccacactgttcgtgatatttcgtgtgttttagctacaaacacttatctaagatgctgtcttcgcagtgccatgcctacaatggcaagcgtgaagctgtctacacttcatcccattgtgaatcatccacattacgaagatgcagacttaaggcctggttgcagtatgcttgaaatctgggatgtggaagacccttccaatgcagctaaccctcccttacgtagcatcctgctcgaagatgccaggctcgaagatgccagtatttcagaatagtgtgtacagagtattgaaggttaactgagaaggaaactacccattacactatggcacaatgccgtgtgtcaaaaacaatcaccctttggcttatctacattaataaaaatcacaagctttaataacagaaaaaa

SEQ ID NO: 86572 - DNA, 483 bp, Homo Sapiens
tcatctttgatctactaaaaactggtttcttagttgtgaggtgtcacaggcaggttgatgtgggtagtagtccttgtctttggaatctgaatatttatactcctgctctaagctgttctaagacttggggttatgcctttaaatcattttcaagcattggccaaataataattggacaaagttctaaagttgtcaagtgtgtaagaattagtgaggtagctgttgaaaatgagtgaggatggtatttgtatttgtaataagcactgcaggtagagatatttcatgggttataataagagaaacacagatgagatgtagatggtaaggagtcttactgttgttggggtccttcctttctctttcttttttcccccttacccctcccacaatttcatgaagtcttttaaattaaatatatagctgaattgtgttgtgaatcagacctgaggactattttttcgattatgtgtgttcattctttgt

SEQ ID NO: 86573 - DNA, 688 bp, Homo Sapiens
cacatgttacattattagctgaatacattagaaaatgacagatggtagagacttccatagaattaagagggttctcatggaggggataggaagtaggtttaaagcctaccagtgtaacctaccagtacaactgtgaatcctaggcgaggcaaaaatgcacttccactgaaacgaagcatttctgaccgctttttcttggttatgaatcttaatttcgaatataagatgataggtaagcgcagctttcttggataatctgaattcccaagtgccaggagtaggatttcattataaaattaatagctaatcttattctatctcctgaagatttaattgctattgttacccattcgaaatcagctgtactgtgtgaacgaaataaagacaataatacgaacccctctctggctgcacggtcgcttatggcagttccacacagtagttggcgcccaatggggggtccctgagacttgcatgtaaaactagtctagatgtcttctttttttgtaagttttatttttgtaattgtgcatgtaaagcatcattgaatcaatggatctgttgaagaactcagctgctggaaaccatgcaaaatgttttgaattgcccttaaaatatggaaaatgttttctgaatgctttatattctttctgctgtaaattaaaaatgaagaaaatttccccataaa

SEQ ID NO: 86574 - DNA, 642 bp, Homo Sapiens
  misc_feature (93)..(93): n is a, c, g, or t
gtagctttagaaaaatccttgcctgacaaaaagcttcttaatggattatgtcccaaaatcacatatctctttaccaagttgtttacattatantcgtggatgctgagtgttgtacttctactattcttaaatgttaagattgctttatttctgttgttatttctttggttgttaggtataatatgggcatttaaaaacaacacccagttttgtacttgtataagtatggaattcttatataggattgttgttggattcattcttatctttacattttttaatattaagggacagaataccaagtgtccaatgtcttgttattatattgttagggtactgggcactttggggatattgactgtattctgggtttgccccctcactatttttaatccagactattttatacctatcagtataactatagttcttactcttcttcttggaattctttttcttattgtttattatgggagttttcacccaaacagaagtgcagaaacaaaatgtgatgaaattgatggaaaaccagttctaagagaatgtagaatgagatatttcctaatggaataagctattcatttatgatatatattttcttatattttgtttcattggttagtaaagaaaatgtgtgttaaa

SEQ ID NO: 86575 - DNA, 867 bp, Homo Sapiens
ctcacactatggcagccatccatggagagtttcaaaggttatcaaccatatgaatttactactttaaagagcttacaagaccctatgaaaaaattagttgagaaagaagagaagaagaaaatcaaccagcaggaaagtacagatgcagccgtgcaggagccgagccaattaatttcattagaggaagaaaaccagcgcaaggaatcctctagttttaagactgaagatggaaagtattttatctgccttagacaaaggctctacacatactgcatgctcaggacccatagatgaactattagacatgaaatctgaggaaggtgcttgcctgggacccagtggcagggaccccggaacctgaaggtgctgacaaagatgacctgctgctgttgagtgagatcttcaatgcttcctccttggaagagggcgagttcagcaaagagtgggccgctgtgtttggagacggccaagtgaaggagccagtgcccactatggccctgggagagccagaccccaaggcccagacaggctcaggtttccttccttcgcagcttttagaccaaaatatgaaagacttacaggcctcgctacaagaacctgctaaggctgcctcagacctgactgcctggttcagcctcttcgctgacctcgacccactctcaaatcctgatgctgttgggaaaaccgataaagaacacgaattgctcaatgcatgaatctgtacccttcgggagggcactcacatgccgcccccagcagctcccctgggggctagcagaagtataaagtgatcagtatgctgttttaataattatgtgccattttaataaaatgaaagggtcaacggccctgtttatattggtgaaa

SEQ ID NO: 86576 - DNA, 568 bp, Homo Sapiens
  misc_feature (15)..(15): n is a, c, g, or t
cccgtccagcgtggnccaccactggggccgggggccacgggccgcatgctgggcgggccctcctagagaaggacacaaacgtgtttcgtaagcccaggcaccaatgggaatggaccaaagagtttcagggaaactccagtatattccagagtcagatctaagctccaggcacgcctgaagatgtgttgctactctgacatcccgagtttctgtccacacattgcatgcacagcgccccacacattggatactgttgttcacgataatttctcccgttttccagagcatttaacatagcttggaggcgtaaaatggctctgtattttaataacacagaaacatttgagcattgtatttctcgcatcccttctcgtgagcgcttagacctttttctattttagtcggattttgttttggaattttgcttttgtatgaacactcagcagaaaagtacttacttcttgccagttatctattaaccaaaacctttgatttgtagttttaaagattaaccctcaaagttctcttcataactgccttgacattttgggttgttctgttctgttaa

SEQ ID NO: 86577 - DNA, 808 bp, Homo Sapiens
  misc_feature (97)..(97): n is a, c, g, or t
accgtcttcgcgcagaacacagcggtcagcggcacgggcacccagatcagcgcacgcggtactcaggccgtcggtcagcagatcgcttccaccggtnacggtcagcgctccggccgcccgtacctttcaagtagctccgatcgttcaggtcgcagcgcagaccacccagaacgcacaaggcgtggccgagcaaattcgcaccgggggcccgtccctggaattgccgaataacagcctgttcaccacccatccgcagaccaccagcaattacctggtcgaaacagatccgcgtttcgccagctatcgcacctggctgtcgtcggattacatgctggagcgcttgcaagtcgaccctgccttgacccagcagcgcctcggcgatggcttctatgagcagaaactgattcgcgaacaggtcgcgcaactgacggggcgacgctttctcgacggctacgccaacgacgaagcgcaataccgggcgctgattgacaacgccgtcaccctggccaatcaatggcaactggtgcccggcgtagagctgtcccccgagcagatggcgcaactgaccagcgacatcgtctggctggtacaaaaaaaggtcaccctcgccaacggcgaaacccgcaacgtgctggtgccacaggtctacgtgcgggtgcaggaaagcgacctcaacggctccggctcactgatcgccgggcaacgtctgaacctgaatattgcaggcgatctggtcaacagcggcagcctggccgggcgcagcgtgatggcgattaccgcgcagaacatcgaaaacctcggcggccgc

SEQ ID NO: 86578 - DNA, 941 bp, Homo Sapiens
  misc_feature (833)..(868): n is a, c, g, or t
caaggtagcgaggcctgggtggcgatttcggcacgaggcaggagatgatgctccggtacgaggagactatggagctccggggcacctacacatccctgcagcaggaggtggaggtcaaaaccaagaaactcaagaagctctacgccaagctgcaggcggtgaaggcggagatccaggaccagcatgatgagtatatccgcgtgcggcaggacctggaggaggcgcagaacgagcagacccgcgaactcaagctcaagtacctaatcatcgagaacttcatcccgccggaggagaagaacaagatcatgaaccggcttttcctggactgtgaggaggagcagtggaagttccagccactggtgccagccggcgtcagtagcagccagatgaagaagcggccaacatctgcagtgggctacaagaggcctatcagccagtatgctcgggttgccatggcaatggggtcccaccccaggtacagggctgaaaacataatgtttctggagttggatgtgtcccctccagctgtctttgagatggaattctctcacgaccaagaacaagaccctcgtgcgctacacatggagaggctcatgcgattggacagctttctggaaagaccttccacgtctaaagtccgaaagtccagatcctggtgccagagtcctcagcggcctccaccttccaccacacatgcctccctggcctctgcttctctgcgccctgcaacagtggcggaccatgagtgacaaccatcacgtcaggctgcccatccaataaactcctgggatggggcagccaaccctggctcatctcatctgccgcttggtgcnnnnnnnnnnnnnnnnnnnnnnnnnnnnnnnnnnnnaggggtgaaaatctggcaaatggtgcctctgcctgctcttcttcgcctcctttatttaaatctggtatttatt

SEQ ID NO: 86579 - DNA, 880 bp, Homo Sapiens
gcggccgcagagggctatgacatcaccatgaaggacggtttttctttacatctgtccaaagaagaattgagtcgcacggccggggtctcgcggtttaccggcggtgacggcggtattgtgatggatgccaatttcatcttggcggcctatgtaaaacgtgtgcaactgtccagtacggaccctgataaacaggggagcttcgagcgcgcgttatccgcggtcatgcttaatgatacggtgtaccgggcattaaaagggatggggatgatcggtttcctgcgcattgtcgaacccgaaaaaatgttgaaaaaaggcgccgttgccgtcttggataattacgctggtgagtttgtactggatggcatcaaatactcgtcgggaaaacaacagcctgttgtcaaagactatggctatatgctcgccatgcagccgtcgaacacttcgtcggcgccaccgggcgggaacatttcaaacctctccagtcgtcaggtgggcgtcaagcctgacaatatctggagtgggttctatcaaggttcagaactcaactgcgtcaccgtctctgcgatcaaggccgcgatgatgaagtacggtcaaaatccccagggcatttataaacgcattattgagacacccgagggttataccgtgaccatgcgtgactcatgcacggtacacctgacccacgatgagttgaaaaaagcgcaaaaaggttcgcacttcttcggtgaagataaaggtcttttgcacgacgcgattttcatgttcgcggtgagcgcaaagcgcgcgcaaatggaaaatcacgagtttcgggctgaagcgagttttgaggccgccatggggacgctcaatgatagagaaacccctggcgaagcacttcggc

SEQ ID NO: 86580 - DNA, 721 bp, Homo Sapiens
gcggccgcaaggtcgggcgtgggacggtccagcgcgacgcgcagctcatggccgccctggggcaccgcgatggcttgccggtatttgaggaacgtcgcttcgtcgcggttatcggcgtaaaggctcagatagtagatggcgtctttctggcccttggaccacaagctctcgcctgctacatagccgcgcaccgctgacagcatgtagaggctgacgcagcccagcaatgcctggaacagcacgacggcgataaagggccagacaatgcccaacaaccgaggcttgcttaacgtcgctgcgagagtacgcttttgcttcatgagatcccttgcacatgcactgcttgatacgcacgcgagaatccgctctcgatagctcagccaaatcaacgcacttgttgcagatgcccgtagagcttggcgtataaccctccatcggcaatcaactgctgatggtcgccatcttcggcgatatgcccgccatcaaacaccagtacccggtcggcctgtttcaccgcagaaagcctgtgggcgatgatcagtgtagtacgcccactgagaaaccgcgccagcgcctggtgcaggttgtactcggtggcggcgtccagggccgaggtggcctcgtccagtattaccactttgggctcggccagcaccatgcgtgcaatcgccaggcgttggcgttgccaccggaaaagcgcaccccgagcgctcgtgccgat

SEQ ID NO: 86581 - DNA, 687 bp, Homo Sapiens
gtgtggaagatgctgcgttccaatgctgccggcctgtatggctgggacatcttactggccggcaccgcctggccaggcaagccgatcggccgtgacctggggcacttgatgcgccaggccaaggccgccggccatgaagtcggcctgcacgcatgggaccatcacggttggcaagccaacaccgggcgctggagcgacgcacagctggtcgagcagatccgtcgtggcgtggacaccctgagcgacatcctgggtgaacgcatcgactgttccgcagccgccggctggcgtgccgatgagcgcgtggtgcaagccaagcaaggtttcaactttcgctacaacagtgattgccggggcaccagcctgtttcgaccaaccctggccgatggcagtgcgggcaccccacaaattccggtagacctgccgaccttcgacgaagtcgtcgggccggtggtggctgccaaagatttcaacggcttcattcttgaccggttcgccgagtcgaagctgaacgtctatacgatccacgcagaagtagaagggattctgatggctgaagattttcgccaactgctcgcccaggccgggcagcgcggcattgacttcaaacccttgggcgacctgttgcccgcggatgtgaccaccctgccccagcaacagctggtacgcggcgcgctcagcggccgc

SEQ ID NO: 86582 - DNA, 674 bp, Homo Sapiens
ttcggcacgaggtctggcgctccctgcataaccgttgggcgtggcttgcgatcaacctgatcacggcgttcatcgcttcgcgcgtgatcgggttgttcgaaggttccatcgagaagcttgtcgccctcgcggcgctgatgccgatcgtggcaggtattgggggtaactccggtaaccagaccatcaccatgattgtgcgtgccatggcactggaccaggtgagcacggccaactcctcgcgcctgttgcgcaaagaattggctgtgggcctgatcaacggtttggtgtggggcggcgtgatcggtgtggtggcttacttgctgtatggcagttggtcactgggcgtggtgatgacggcagccatgaccctcaacctgctgttggcggcgctgatgggcgtgttgatccccatgacgctggcgcgccttgggcgcgacccggccatgggtgccagtgtgatgatcacggccatgactgacagcggtggcttcttcatcttcctgggcctggcgacgatctttctgctctgaacccctgtgggggcgggcttgctagcaaatgcaagctcgctcccacacaagtcctctacggtgccctcaaatttcacgcaaaaaaaagccagcatagcgctggcttcggctttcagttgcagatcaattggcttctgcggccgc

SEQ ID NO: 86583 - DNA, 608 bp, Homo Sapiens
agaattcggcacgaggtggatggattcatttaactcatatcaagtaactgcagtgggtgcctgtagcagagaagttgtagcagaggagtaggatagtgataaaggcaggagacatggtacctactaaaaatctgtggaatcaacaaatgacttttcacatccatcccttttcataggagcttgaactggcagtgactccattgtgcaatttggaacacaagaaaaagcatggattttgaagtcagacaaatgtgagttcaaatcctggctcctccagatctggaaggacctgatgggaggactgggaggacttgattttagcaagttagtttcctgactcagtgtcctcaccttattataagatgggatccacaccttcagggtgactctaagggttaaccagaaaaaaacatgcaaagctctagacccagttcccttcacccttaccccatttttctggcattagggatggttgtgcacagctgctgtggatcccccaattccttgaatagccatcctgagtgcttcgtcagtgctcttttctatttctcttaattccgtatctcttttcagaaaccttctccaaagaagccttcagccgcggccgc

SEQ ID NO: 86584 - DNA, 519 bp, Homo Sapiens
atggcctgctaagagctcagctatctgtcagctgggggacaactctgtgaggcttgatgaccacagactttaaaccaaagaccgatccatggtgttcttctattcacagccagaaaacagaggtctggcaaccaaagggtgaagtcgaaatggctcttctcacttttacttctagcttatctggtttttgcctcttgcattgctttgtcacatgccttctcaagacttgttactcaagggataccagacaaatccatttcatagcttcaattactaaggagcttgaactggcagtgactccattgtgcaatttggaacacaagaaaaagcatggattttgaagtcagacaaatcatttacttcggtcgcattggtgtgtggttcaaataacagatgtcactgaactgttgacttgggtagatgccctgtcttccttattaaactgtgtcttactttgtaccttagtagctaatgcagtgctttgattctagcagatgcttaataaatgctactcatgat

SEQ ID NO: 86585 - DNA, 450 bp, Homo Sapiens
gcggccgcgtactgatggcccacctcggcaacggcgccagcctgtgcgccgccgtcgacggccgcagccaggccaccaccatgggcttctccgcgctggacggcctgatgatgggcacacgcagcggcacgctcgacgccggcgtactgctctatctgatggaacagggctgggaccacgaccggctgcagtcactgctgtaccggcagagcggcctgctcggcgtatccggcatctcggccgacatgcgccggctgcgtgccgacgccggcgcagcggcgcgcgaggcggtcgaactgttcacctaccgcatcgtgcgggaggccggcgcgatggccgcctgcattggcggcctcgacctgatcgccttcagtggcggcatcggcgaacacgacgcgacgctgcgtgccgacgtgtgcgccgcgctcgcatggatgggcgcctcgtgcc

SEQ ID NO: 86586 - DNA, 406 bp, Homo Sapiens
  misc_feature (299)..(299): n is a, c, g, or t
gatgaggccctggcagacaacacaccctcctgctcatacaatgcgctctgccttgtaggagacttccatgcccacccgccccgccgccactcgcaaaccccgcgcccgcagccaggcccggatcgatgcgatcctcgacgccgcccgcaccttgctggcgagcgaaggcgtggcgagcttgtcgatctacagcgtggccgaacgggcgcagatcccaccgtcgtcggtgtatcactttttcgccagcgtgccggcgctgctggaggcattgaccgccgatgtccatgccgctttccgcngcggcgatccaggcccccatcgagcatgattcactcaaggtgtggcgcgacctgtcctctatcgtcgagcaacgcatgctcggcatctacagcaacgacgcggccgc

SEQ ID NO: 86587 - DNA, 446 bp, Homo Sapiens
ctggtaccggtccggaattcccgggatatcgtcgaccccgcgtccgcccacgcgtccgactagttcttccattaagcctcggctgagtgagggaaagcccagcactgctgccctctcgggtaactcaccctaaggcctcggcccacctctggctatggtaaccacactgggggcttcctccaagccccgctcttccagcacttccaccggcagagtcccagagccacttcaccctgggggtgggctgtggcccccagtcagctctgctcaggacctgctctatttcagggaagaagatttatgtattatatgtggctatatttcctagagcacctgtgttttcctctttctaagccagggtcctgtctggatgacttatgcggtgggggagtgtaaaccggaacttttcatctatttgaaggcgattaaactgtgtctaatgcaaa

SEQ ID NO: 86588 - DNA, 718 bp, Homo Sapiens
  misc_feature (223)..(223): n is a, c, g, or t
agtggtcagccaatcgtcgggcagcattctttggcctgggcgtaaccgtgccctccaccggcgcgccggggtcgcgctgttcgcggatgccccggtgaataccggccagaatcgcggctgccgcgaggtacgggttggcgtcggcaccgcagatacggtgctcgatatgccgggaaaacgccggcccgccgggtactcgcagcgtgacggtacggttgtccancgccccaagtggcggccagcggcgcgtagctgttggtctggaagcgccgataagagttggcgttcgggcagaacatcagcaacgagtcgagcaacgtactgagcatgccgcccaccgcatggcgcaacagcggcgtgccgtcgggcgcttcgctggcaaacaggttattgccgtcgcggtccgccaggctgacgtgcatgtgcatgccggtgccggccaggtcatcgaaaggcttggccatgaaacacgcggtcatcccgtgcttgtgggccacgcccttgaccaggcgcttgtaacggaccgcctcgtccatggcttgcagggcatcgctgcgatgctccagggtgatttccacctggcccggggcgtattcggaaatcgccgtgcgcgccgggatgccctggagtttgcaggcgctgtagaggtcggcgaggaacggttcgatctgctccagttctcgcaggccgtagacctgggtcgagcgtgggcggccgc

SEQ ID NO: 86589 - DNA, 442 bp, Homo Sapiens
gccggcgcaattcgacgccctgctcgaacgcctcagcgccgagctggccagcagcgcgcacctgtatgacgaaagcggcgccttcccccacgccaacttcaagcggctgcatgaacatggcctggtcgccctcaccgtgcccaaggccctgggtgggggtggcgcaagcttggcgcaggcgcgcaaggccatcagcgcgattgccaggggcgagccgtctaccgcgctgattctggtgatgcagtacctgcaacacacacgcctgcaagacagcaaaacctggccgcagcacctgcgcgtacaagtcgccgaagacgccgtgcgcaacggagcgttgatcaacgcgctgcgcgtcgaacctgacctgggcaccccggcccgtggcgggctgccggcgaccacggcggtgcgcaccgctgacggctggcgcatcagcggccgc

SEQ ID NO: 86590 - DNA, 455 bp, Homo Sapiens
  misc_feature (249)..(310): n is a, c, g, or t
ctgaaaactagcaaagatctgcttttataaagagcaaatagatggatagatataggagaagatgcttgacttgatgaataagagaaaggacatatagaaaatgaactgaacataagcaagtattttattgaagatatactattttaaataacatttaaacacggaatgattggcaataaactgcaaaatgagtaatttggtatcattttaaaatggttattatcagagattttccttttattaaacagnnnnnnnnnnnnnnnnnnnnnnnnnnnnnnnnnnnnnnnnnnnnnnnnnnnnnnnnnnnnnnatggctgtaaaggaaccatctaggaagtaattatgcaatcatttctgaacctgtttcagaaaagtaaatcagtgttgggtttatcagtgtttaacattgtttgatagtcccctcacttcttgaataaattgttttttttcacctc

SEQ ID NO: 86591 - DNA, 660 bp, Homo Sapiens
agaattcggcacgaggtgccgtgccccgcccagccccggctccgtcggagcatgaggaccgtggagggtgcgctccgcggcagggacgccttggatcggggccgtgagcgcgaagtcgagcgtcgaggacttcggcgcggtccagccagtccgtcatgttgatcagttggatcaagattgattgatccgccgacggccggcagggtgcaggcacccttcgagggccgcgaccatgctcgaacgacacgccgccggtgacgccctgccgtcgatcctctcggaggtgctggctgccctggcgctccggcccgatgccggggaacggctgacggtgaccggcgcggagaatctgccatcctgcttcccggtcaccgcgctggcgacggcggcgatcggtgctgccggcctcgccgtctccgagctcctgggcctgttcggacacgcgcctgaggtaacggtggaccggcacttggcctcggcgtggttcgggacgtcgctgcgaccgtgcggctggacgataccggctgcctgggatccgatcgccggcgactaccggacagcggacggctggatccgactgcacaccaacgcgccccaccaccgcgccgccgccctcgcggtcctcgactgtccgggcgaacgggacaccgtcgcggccgc

SEQ ID NO: 86592 - DNA, 770 bp, Homo Sapiens
  misc_feature (670)..(670): n is a, c, g, or t
  misc_feature (738)..(738): n is a, c, g, or t
gcggccgccgaaatggccacgctgtcgcctggcaaaggcatcttcgctgctttttttgagacgcatggggtttcgcttcaaggcatgagcgccgcgcagctgcttgaaagcatactgggcagtgctcagatcagaaacttgggccaaacgctggaaatggccctcaacagtgacgcgtcactgaccagcaaagatgcaagttgggcgttggctgcaatggtgctggagctggatccgcaggccggcagcaagcgtggcgtcgtggccgggtatgacctttaccagccagccaatcgagatgtccatccttcggtggtcgtctcgcgcctggagaaacatctggtggaccagggcaaggtgcctgtcgagctggcaccggccgccgcgcgcttattgcttgcaggcgctgaccctgccttcattgccgaagatatgcccagcaacctggtggttaagtctgcggcctttgccaagctgtcggcggttgtgcaggcgcaagagttttggacgccgggcattgcgacatacaccgattttcaaacgttcatgaggctggccaatcacagtcctgtctcggaggccgagggggtttgtcgaggccaaggctcagtccaatgcggttgattcagtgggggcgttgcccaggatgaaatggcaggaaaggacgatngaagactatacgtcgcaagacgtggtcgggttacgcgacgccttcaaatgaggactctcctcattganaaaacccatgagcagataagcgcgccatgcca

SEQ ID NO: 86593 - DNA, 574 bp, Homo Sapiens
agaattcggcacgagagacacgtactcgacgttgatcgggccgccgggcagctgcgcgcggccgaacgtctccggtgcggacagcgcgtcgcgcaggaccgcgtggaagatcgcggggtcgagccgcaggttgatgaagcccggcccggcgacgctcgcctcgacgatccgcggatccgtgcggagctccgccgccagggcctcgcccagcgccttcgggttggcccgcgcctccttggccagaaccagcgcggcgttcgtggcgaggtcgccgtgcgacgcgtcgcggggcggctcgaccaccacgcggcccaggtcgaggccctcgggcaggtggccggcgcgagtcagcgcctccacggcctcgcgcacgcgcgcctcgaacagggcgaagatgttcatgggtctcgatctcgctcgcgcgggggtctcgtcgcccggcccgtccggcctgcgcccgccgcggcggtctagcaagggggcgggagggtgtcacggcgccgggccgcgtgcccgaccggcggagtccacatccgcggcatcggtccgataaccaagtccgggctgcggccgc

SEQ ID NO: 86594 - DNA, 630 bp, Homo Sapiens
gcggccgcgctgcataacgcccagtgcctggtcgaattcgccgaccagcacaagatcccggtcattcacatccagcacatcgcgccagccggttctgcagtgtttgcccaggacggcaacaccgtcgatttccacccactgatgcagccgcgcgctcaagacacactggtgcagaagaccagcgtcagcgtgttcgccagcactgacctgcacaaccaacttcagcaccagggcatccgtaccctgatcatctgcggcctgatgactcacgcctgtgtcgcgggtgcggcccgtgatggtgcggcattgggctacgccattgtggttgctagcgatgcttcggcgacccgggcaatcacccgtgccaacggtgagtcggtgacccaggaccaactgcacgcctcggcactcgctgagattgaagacacttttggtgacgtgctgaccacgtcccaggtcgtcggcttgtctgtgcgctaacggtcggcctttcagcaccctaattcaactcgtcaaacaggactgcatcatgacttgcacattcgccactccatcgagccgccttctgcccaagttgctcaagtcagccgtcatcggcctgggcttgatgatgggcctcggcctcgtgcc

SEQ ID NO: 86595 - DNA, 564 bp, Homo Sapiens
gcacgaggctgactcacatcctgatgcaaacaggcgtctgcgcctttggaacgtttgccttttttactccactcagaattgcctgatggacaggcgcaggtttggacttccctgagttggcagtccgacctattcaatgagtttatggagagttacatggctttttttgatgctgtaattgctttcaaaagtgcgctgctcggagccctgttgggcaataatgcaccgcgcaacaattttggaaatggatataggtcggggcacgcaacaaacaatcaccactatccccaacatcgtcctcatacagtccggccgaacgtgggccacacctatccaacccagacgaaccatggcagaccgtatccacagcaacccgtggtctaccagcagccttcaccctacaggcctacttacccgctttttacgctgaatcgttaatgggcttggcctgaaacaactgcgccaaggcccgtggttagcggtcttggcgcagtgggtccagtgtgtttgagaagcttatagtgccccaaacaccttcttggccaagctggtggccgcggccgc

SEQ ID NO: 86596 - DNA, 754 bp, Homo Sapiens
gcggccgcgtgtttcactcgttgatcgtgcactttgaaaacgacattcccgtacaaatcgaagaccgcttcgtcaacgctctggttgcgccggaatacttgcagcaggatttcacccagcaaacgccgtacgcctacctcaaccaggtcgcgcccctgaccgagggcgagcatgtggttgaagccatcctcgccgacgccgccgagtgcaagctgttgcagatcgagccgagcgagccctgcctgttgattcgccgccgcacctggtccggccgccagccggtcaccgccgcgcgtttgatccaccccggttcccgtcatagcctggaaggacgtttcagtaaatgagtgcagtgaaagtctggcgcgccaccgattacatccgcatgccgtggaaaaacggcggcggcagcaccgaagaaatcacccgtgacgcaggcactggcctggatggctttggctggcgcctgtcgattgccgatattgccgagtcgggcgggttttctaccttcgccggctaccagcgtgtgatcaccgtgatcaaaggtgcgggtatggtcctgaccgtagacggcgaggaacagcgcgggctgttaccgttgcagccgtttgcgttcaagggtgaaagtgaagtgtcctgccgcttgatcaccgggccgatccgcgatttcaacctgatttattcgcctgagcgttaccacgcacggttgcaatggattgacggcgtgcagcggtttttcagcacggcgcacacg

SEQ ID NO: 86597 - DNA, 568 bp, Homo Sapiens
gcggccgccatacaggcgtgccattggaatgccgatcaacatgctgctgaggatgaagcccaagggctcgaaagtgccggcaaacacgatcagcagcgcgacgcaaaggctgatcttgatcagggtttcgcggtccagcgcgggttcttcttcggtgtgcttggttggctgcgggcgaaagatcatgtagatcaggcccaggctcatcaggccgagcatcagcagcggaaaggcacgtgggccgaccggctcgtaggaaaacgccgcctgatacggccaggccatcagtgccaggccggcgcagaccagcagcatcaccgaggcgaaaatgcgttgtaagagcatgtggaactcctgggctgcgccgcccgttaaagagggcgcagccgtgcaaaagaggggcgattactggatcaggccgaactctttggccagcactttgtagtcagccacctgtttcttcacgtaggtgtcgagctccgggccggtcatggcaaacgggaacagctcgcgctggtcacgcagcttggcgaactcttcggaggccagcagtttgtcgcctcgtgcc

SEQ ID NO: 86598 - DNA, 1070 bp, Homo Sapiens
cgaaaaacctgtggcgcctgccgaatcaaacatgcagacgcaaaaaagccgggaatttcccggctgccgcatcatacacccgttttctgaaaggatcaccccgccaggcattttagccgcccgacggagtgcgccctaaggtcacaggcttggttacttggacttttccaggtagcggaagaagtcgctgcttgggtccagcaccatgacgtcggttttgttcgcgaagctttcacggtaggcacgcaggctacggtagaacgcgtagaactcctggtcctggccgtaagccttggcgtagatcgccgcagcttgagcgtcgccgtcaccacgagcctcttcagactcgcgataagcctctgccagcagtacacggcgctgacggtcggcatccgcacggataccttcagccaactcgttacctttggcgcggtgctcacgggcttcacgctcacgctcggtgctcatacgctcgaacacgctgcggttcacttccttcggcaggtcgatagccttgacccggacatcaaccacttcaatgcccaactctttttctgccatcgtgttcagcgaacgggtgatgtcagccatcagcgcatcacgttcaccggataccacctcgtgcagggtgcgtttaccaaactggtcacgcaggcccgattccagacggcgcgacaatcgctcgtcggcaatctgcttgaggccggaggtcgcggtgtagaagcgctcggcatccttgacgcgccacttggcgtaggcgtcaaccatcacggctttcttttccagggtgaggaagcgttgtgtcggtgcatccagggtcatcaggcggccgtcgaacttgcgcacctggttcacgtaggggactttcacatgcaggcccggctggacatccgcctgcaccacacgaccgaattgcagcaacaccgcgcgctcggtctgagacacgatgtagaagcagttccaggcagcgatgaccacgacgacgcccacaatcagggcggtcagcgatttattgctcatcaacgactctccctggtacgtgtttgctgttgcagcaagtcagcggccgc

SEQ ID NO: 86599 - DNA, 216 bp, Homo Sapiens
agcataagcatgaccccgcccgttggcctgcgatgtgaccggccattcagagactgaataacccgtctgcgttcacagtcgccggggctgcgcggtatagtccgggcattgatgaattcgaggaatgaccgatgaagttcgaaggcacccaggcctatgtggctaccgatgacctgaaactggccgtcaacgccgccatcaccctggagcggccgc

SEQ ID NO: 86600 - DNA, 752 bp, Homo Sapiens
gcggccgccttggccatcggcagcactggtggcgacaaattcatcctgcgagctgaaggcttttttcgccggcgccagcggtggctgggcaatcgctcggccataaacctgcatgcgcccgctcggcacggcaaagttgcgcgcggtgctgttgaccacgttatcggtggcggcgctgttacgcagtggcgcactcgcggcctgcgtggcgggctgagtgctcggcacgatgccggccagcaggcggtcggtcagcttgctcggcaacgccatgcggcgctggttcatcagttccatgtcgttggtgtgcgcactggcgccttgcggctctgcaacgcggtaagcccacaacggccgctggccattggagcgccccaacgggccattagccagggtgccggcgccgatttcagtcggcacatcaaccttcttggccttgaccggctcggccgccgccgggccttgcaaggtcgaggactgcgcctcgaccggcttgttcttctgcatctggcgcatcagcacgtcagccaaaccgataccaccgccttcgcgggacatcgagaccgccaactgctggtcgtacatttcctggtactgcttggcagccggggtgttcagcgggttgtccttgcccagcgcctcggtggccgaacgcatggacttgagcatctcgctcaagaacagcgactcgaactcctgcgccactttgcgcatgttgccttcgctgttcttgtcggcgccgacttgagctg

SEQ ID NO: 86601 - DNA, 732 bp, Homo Sapiens
gcggccgccggtggcttgcacaggctccaggtcacgtggcgcaactcgccaatgcgccctgcctgcagccagtcgcgtacttgttgaaagcgcggcaacgaacggcggtagtaagagacaaacaagtgcagcccggcccgctcgaaggtgcgctgcatcaaggcgctctgctcggcattcaacgacatgggcttttcgacgcagcaatgcttgccggctgccgccaccatcaggctgtattcgaggtggctgtcgggcggtgtggcgatgtacaccgcgtccacttcagggtcgtcgatcaaggcctgggcgtcggtataaaaacgggcaatgccgtggcgtgccgcataatcacgcacagcttcttcacggcgccccatcacggccaccagcgccgaacctggcgctttgtagaaggcgggtccactcttgagttcagtgacgctgccacagccaatcatgccccaacgtacggtattcatcagttgtcctcgtccgttttcatcaagggggcagtatccacatcaccgctggtgcatgccagcctgaatcagcatgacaattgcattacactttcatgacagccattgggccaggcaggtgtagacattgaaaatccgtgcaaccgtaatttgtgaaaacaggggcatatcctcttcgtgcgcaaggcccgctcgaaatgggccttgccgggcggcaaggtcgagcgtgacgagcgcccgcctcgtgccg

SEQ ID NO: 86602 - DNA, 1103 bp, Homo Sapiens
gcggccgccacgcatggtggggctgacggctacatggagatcctgggcacaggcggctgggaaacctcggcatcggccatcggcttgagcgatctgtacctgggcgcccgcgtggccctgggtctgggcgggggcggcgcggtggaaaccggcggcggcacgcttggcaaggcggccggggtgctgcgctgggagttggggtgcgatgcttttgtgggtgtcgaagccggtgccgtgcgttccggcagcggcgcgtacaacgcgcgttacgcccagtggcaagtgggcctgcagctggaccaccccggcctgccccaggatgcgcccgtggttggcctggcctggtcgggcagcgtgcaacacgtgctcaaagcagcgcgcaaggacggtcgccagctggatctggacaccgtgggcatcaagctcaagcgcctgctggggccgaatgtctacctgaccgggcaggcgcacagtgcggtggccggccaggcgggtgcctattcggtggggctggcgggtgccggggtgcagacgggcctgagcgaccagggctggcgcttgtcggccgagttgctcgccggggccgcgggcggcggtggtgtcgacaaccagggcggggccgtggcacaaggcatggcctacctgggcctgtcgctcaacccgggcagcgagtggcaattgggcgtgggccgcatccgtggccagcatgccgggctcaacagccgggtgctcgacctcagctggacgcgcagcttcggggtggggcagcgctgagcaaggtgcccggggcattgcgcccctaaatcacgaacgatcgtccgatttccgtatggcccgctaaagcggtcacccctcaagccgaaagtgcttgggttgtgctgtggcacgtctgccgcttggagggcttatgcgtcgaatttctcttgctctgggctttggcctggttatgttgggtctgactgcctgtggcggtggtggcggttcgtcctcgacggctggctccggcggtggcaatgcggtgacttcgtcgaccgtgtccctgccgtcttccgtgcaagtcgtgacccccaccaactgagcatcaggagcatcgacatgattcg

SEQ ID NO: 86603 - DNA, 777 bp, Homo Sapiens
gcggccgcggcgccgtgcgcgaagtctgcgaatacctgctcgacgcccgcggcgcgctcgacgcgctgctgcaggactgcctgcgttgaaccttcagcgcaacgtccagcaggcactgccgctgctgatcctgatcctgctggtcggcctgaccatgtggctggagcgcgccacgcgcgtcgatgaccgcccgtcctcgggcaagctcaggcacgacccggacgtgatcgtcgacaacttcaccgtgcgccgcttcgacccgagcggccaggtgcagcacacgctgaccgcgcagcagctgcgtcactacccggacgacgacagcaccgaactggaccagcccttgctgctctaccgcggcaagcagtcgccgacccgcatcagcgccgaccgcgcgcagttgctgaaggatggcaaggaagccatcctgcgcgacaatgtgcgcgtgctgcgcgaagccagtcccggcaacccggaaatgacgctggagaccagcgtgctgaacgtctacccggacgacgagattgcccgtaccgacaagccggtgaagctgacgcagggcaaatcggtggcacacggtgtcggcatggtcgccgaccgcgtcaaacagacctacatactcgaatcgcgcgtcaaagccaccctccgaaagaacccgccgcccatgactctgcgccctgcccttaccggcctgatcctgctcaacctcgtgctggccgccggccttagcacgcccgcccgcgccgagcgcgccgaccgcgacaagccggtcaacct

SEQ ID NO: 86604 - DNA, 905 bp, Homo Sapiens
  misc_feature (754)..(754): n is a, c, g, or t
gcggccgccttgaatgcggtggaagccggcgcccgcgtcactctgatcgagcgcggcaccatcggcggcacttgcgtcaacgtcggctgcgtgccgtcgaaaatcatgattcgcgccgcgcatgtggctcatttgcgccgcgagagtccgttcgatgacggaatgcccgccacgccgccgaccgtcctgcgcgagcggctgctcgcgcaacagcaaggccttgtcgacgaactgcgtcacgccaagtacgaaggcattctggagagcacaccagccatcaccgtgctgcgtggcaccgctcgcttccaggacggccacacgctcagcgtcgaactggtcgaggggggcgggcgcgaagtcgcgttcgaccgctgcctgatcgctaccggcgccggtgcggccgtgccgccgattcgcgggctgcaagacaccccctattggacctcggaggaggcactggccagcgccagtattccgcaacggctcgccgtgatcggctcatccgtggtggccttggagctggcgcaagcctttgcccggctgggtagccgcgtcaccatcctggcgcgcaactcgctgttcttccgcgaagatccggccatcggcgaggcgctgaccgcagccttccgcatggagggcatcgacgtgcttgagcagacacaagccagtcaggtgacccacgccaacggcgaattcgtactgaccaccaaccacggtgaactgcgcgcccgaccaactgttcgtcgccaccggncgcacgcccaacacccaaagcctgaacctggaagcggcgggtgtactgttggatgaacgcggcgccattcagatcgatcagggcatgcgcagtagcgcagtggatatctatgcagtcggcgactgcaccaacagccgcagttcgtctacgt

SEQ ID NO: 86605 - DNA, 386 bp, Homo Sapiens
  misc_feature (288)..(288): n is a, c, g, or t
gacaagaaaagagaagaatataagcttacaataaaaagcaatcttgacctaccccaaaatcccactcccttgaagacaaccacttctgccctgttgcttctctcagtaatactccttttctgcagttatctcttgacttcctgccatgtgtgtttgggggagcttgagggaagagggtgtccctgtctcattgagagaggtgccaccctgccgtgaaaagaggtgccaccctctgtcaattaggagaggagggatgagagaggaaaggggtctccagtgtatttctcncagccggggccttaaatccctcttgggagatatgggatggggtggatcggaaaataaatttttttaaatccctaccaaaatatcagctggcttttttt

SEQ ID NO: 86606 - DNA, 808 bp, Homo Sapiens
  misc_feature (717)..(717): n is a, c, g, or t
gcggccgccagttctcggccagtgcgctgttgaacaaggcggtggggggcgggtgggagatggccggcacgccatgagccgtctggtcagtcggtttcgggggaagcattgtcgtcatgtgtgtcgccgtgcagccggcctttctgctcgcgtgcctgatcgacaaccgcccgaacggcaggatgttcgtttgctccgaaacgccggtcgatttcattgaatacgacaatggcctcggcggtacgtccgagttcgccgagccagacgcctttattgatgagcgcctcggcgacctgttcgcgcagggctgaggcattatcggtgccgtagcgccggtccacttcgtcgcaggtggcgattgcgtcttcatagcggccaagttggctgagcgcgacgcctttgttgcgtagcgcactggcgaccttctcgcgtagggcgggtgcatcgtcggcgttgtatcgccggtcgacttcgtcgtaggtggcgatcgcgtcctcgtagcggccaagttggttgaacgtgaggcccttgacgaagagtgctccggcaacctgttcgcgcagggcgggtgcgtcgtcggcgccgtagcggcggtcgacttcgtcgtaggtggcgatctcgtactcatggcgaccaagtcgtccgagtctgaagcctttgaggtagagcgccccggcgacctcctcgcgtaaggtgggtgcgttgtcggcgccgtancggcggtcgacttcgtcgtagatggcgacgcttcctcgttgcggtcgagtcgaccgagcgagatactttattgacgagcgtattggcgacc

SEQ ID NO: 86607 - DNA, 1049 bp, Homo Sapiens
  misc_feature (85)..(119): n is a, c, g, or t
  misc_feature (312)..(324): n is a, c, g, or t
aaaactttatcgatcactatagggcgctagctccgctatatccgaacgacgagcgcagcgaagtagtgagcgaggaagcggccgnnnnnnnnnnnnnnnnnnnnnnnnnnnnnnnnnnncagtcgacggtaccggacatatgcccgggaattcggccattacggccggggagtgcggaggggcgcgaggtttcaagatggcggtagctgaggggttgaccgagagacccagttgaaggcctttacgaagtgaaagaggccgggagtcgccccctacccgcttctcgtagtcctgggagcacagcagaagtgnnnnnnnnnnnnnaatgaacaagtaaaccatacaaattgtcaacatgggacggagatctacatcatccaccaagagtggaaaatttatgaaccccacagaccaagcccgaaaggaagcccggaagagagaattaaagaagaacaaaaaacagcgcatgatggttcgagctgcagttttaaagatgaaggatccaaaacagataatccgagacatggagaaattggatgaaatggagtttaacccagtgcaacagccacaattaaatgagaaagtactgaaagacaagcgtaaaaagctgcgtgaaacctttgaacgtattctacgactctatgaaaaagagaatccagatatttacaaagaattgagaaagctagaagtagaatatgaacagaagagggctcaacttagccaatattttgatgctgtcaagaatgctcagcatgtggaagtggagagtattcctttgccagatatgccacatgctccttccaacattttgatccaggacattccacttcctggtgcccagccaccctctatcctaaagaaaactcagcctatggacctccaactcgggcagtttctatccttcctcttcttggacatggttgtccacgtttgccccctgggagaaaacctcctgggcttcccctggtccacttcgtctcaagtcgtgcagattgtttggccgtaaagggggtttgccctaatcttccgctcgtagggaatgcagctgt

SEQ ID NO: 86608 - DNA, 850 bp, Homo Sapiens
  misc_feature (179)..(191): n is a, c, g, or t
cagtcgacggtaccggacatatgcccgggaattcggccattacggccggggggaggtttcaagatggcggtagctgaggggttgaccgagagacccagttgaaggcctttacgaagtgaaagaggccgggaatcgccccctacccgcttctcgtagtcctgggagcacagcagaagtgnnnnnnnnnnnnnaatgaacaagtaaaccatacaaattgtcaacatgggacggagatctacatcatccaccaagagtggaaaatttatgaaccccacagaccaagcccgaaaggaagcccggaagagagaattaaagaagaacaaaaaacagcgcatgatggttcgagctgcagttttaaagatgaaggatccaaaacagataatccgagacatggagaaattggatgaaatggagtttaacccagtgcaacagccacaattaaatgagaaagtactgaaagacaagcgtaaaaagctgcgtgaaacctttgaacgtattctacgactctatgaaaaagagaatccagatatttacaaagaattgagaaagctagaagtagaatatgaacagaagagggctcaacttagccaatattttgatgctgtcaagaatgctcagcatgtggaaagtggagagtattcctttgccagatatgccacatgctcccttccaacattttgatccaggacattccacttcctgggtgcccagccacccctctatcccaaagaaaaactcagcctatggacctcccaactcgggccagtttccatccctccctccttccttggacatgggggtttccaccgtttgcccccctggcagaaaaacctccctgggccttcccccc

SEQ ID NO: 86609 - DNA, 713 bp, Homo Sapiens
gcggccgcgattgccagtcaggatcgtattgcagtgccccgccacgtaattcgccgaggcgcaggctgtcgcccacctgtaattgccgagcaatagcgctgaattcgccgggcaggcggcaatcgaggtgaaactccaaaaacgggtcttcctgcggcaagctggccaacgaatacgggcgcgctacctgacctgcccacagcaccagatgttgcccggcccgataacgcaagccacgttcgggttgcaggcgcaggcgcagtacctcggggctcaaccagtcgacgcccaccacttgcgcgggcaaaccatcgtgcagtgggtcaaatgcttcaacctgtaaatctgcgacaacttcacactggcaggccaaacgccaaccgtcctggcgctgcgccgggctcagggcatcgggttgcttatcatcgacctcaccccggcaacgcaccaggcacgcatggcaactgcccgcccggcaactgtagggcacagccacacccgccagattcaaggcatccagcaggttgctgccggtggctaccgaccagtggcgttcgccgacgtgcagttcaagcatataaaggctcaatcagaagggaccggcacagggaatcatgcctgcgacagtttgaccatagtcgggtgtatcggccaccgcgtcgggttatactgccgcgcctttttagcgtcgcgccttgcacactgtggcgtgc

SEQ ID NO: 86610 - DNA, 717 bp, Homo Sapiens
gcggccgcggtgtcgcgttgggacgcggcgcgggaggtgttgaacaacctcgcgccaggctttgcccagacgctggcgcgagtggatgccgacccggtggtggcgccggtatttgcgcggcattggccgcaatagaacgcctcgtaatggttccgcaatctgaagaaacaatgactgataaccccattcgagcccttgcgtggcaggcttactgacctacgcttcttaacgaggtgtaggaatcatccttgaaattgactgtcgcagacatgaaactcaagaaccctgcatggaattcaaaggaggtgcgcatgctcatccggtcgctgaccctggctaccttgatggcttttacggggccgctgttggccgctgatgatatcaacccgctcaagcaggacttgggcaaggctcggccgctggtggtggtggagctcgattccggcaacgacactttggcgaccctcaagaaacaattggatgagcctgctaccaagcagtcctttgaagagcgcagcagggtgttctacaccgtgaagttcggcagcatcggtgctgaaggcgaaaaattcgccaaggaccccaaggacaacaagaagctcacgccacctgaaaccaacgcgctgatccgtgccctcaagctcggcgccggcagcggtacaaaggtgatcctgatcggcaaggatggcgagaagaactggagaagacgtacgccgg

SEQ ID NO: 86611 - DNA, 1252 bp, Homo Sapiens
  misc_feature (735)..(753): n is a, c, g, or t
ccatatatgctttaggacgtgttgaagttacagcaaaaaaatggtatacactcacgttaactattaagggtcatttcgcctctggcatgctgaatgacaagtctctgtggacagacatccctgtgaattttccaaagaatggctgggctgcaattggaactcactcctttgaatttgcacagtttgacaactttcttgtggaagccacacgctaatacttaacagggcatcatagaatactctggattttcttcccttctttttggttttggttcagagccaattcttgtttcattggaacagtatatgaggcttttgagactaaaaataatgaagagtaaaaggggagagaaatttatttttaatttaccctgtggaagattttattagaattaattccaaggggaaaactggtgaatctttaacattacctggtgtgttccctaacattcaaactgtgcattggccatacccttaggagtggtttgagtagtacagacctcgaagccttgctgctaacactgaggtagctctcttcatcttatttgcaagcggtcctgtagatggcagtaacttgatcatcactgagatgtatttatgcatgctgaccgtgtgtccaagtgagccagtgtcttcatcacaagatgatgctgccataatagaaagctgaagaacactagaagtagctttttgaaaaccacttcaacctgttatgctttatgctctaaaaagtannnnnnnnnnnnnnnnnnnaagatgatacttttgaaatgcacgatatgatgagtgggatgattttaaaaacgcctctttaataaactacctctaacactatttctgcggtaatagatattagcaaattaattgggttatttgcattatttaatttttttgattccaagttttggtcttgtaaccactatcactctctgtgaaacgttttttccagtggcttgggaagaaggacaaaaaacctgatatagcccatgctgttgtactcgtttccctcaccctcatcttcactgggcctgggggtccggtccctcaccctgtggcacttgggtaaacacaacttcacaccgggctgaaggaaatggcttttcctccccccttaagcggtgggaacaggaaggggaaccccctttacaaccatttgggttaaacctccccgaaaaattgggaatcctccctccctaaaaaatggaacctttaacttttttttacagctcccgaaaaaagggttcaaccattt

SEQ ID NO: 86612 - DNA, 757 bp, Homo Sapiens
gcttgcggccgccaccggccgcgtgtggcggcgcagttcgcgcggcagggccgaccacagcgccagcgtgtcgatgtggctggagtggttggcgaagtagatgcgctgcgccggcgacggcgcgctgccctgccagcgcggcgccgcaccgaccagcgcgcgggtgattccgatcagcagcgcggaaatcagcatgacggagccccggcggtgagctggcgggcgatgccctgcgtgcgcgtgatgcaggtgagcatcgagccggccgcaataacgatgcaggccacctgcagcgcccactggctgccggcccaggccagttcgccggcgccgatcaggcaggcgacggtcatcacggccatccggtgctgcttggccatcggcccgcggaagctctgcgcctgaccgagcgcgccgccgaacacgcgcacgtaggcggtcagcgccgccgccagtgcgccgaaccagcccagcgccggccagccgacggcgtagccgagcgcgacgatgagcagcgagtcggcgacgcggtccgggaattcgttgtacagcgcacccagcgccgacttcttgccgccctcgaccgccaccatgccatccagcagattgcagatcagccgcccctgtatcgcgagcgcgcagccgaccagcccggcgggcgtcggccaccacagcagcagcgccgcaccgaccgcagcgaacaggatgctgacgacggaaatctggttcggcgtcacgtcggtgcgcctcgtgccga

SEQ ID NO: 86613 - DNA, 692 bp, Homo Sapiens
gcggccgcaatttcgcgcgcacggtgatgatcctgccgatcctgctgcccgcggtcgccatcggcagcatgtggaagctgatgttcaactacgatttcggcctgttcaaccagatggtcgggctgatcggcctcaacccgatcaactggctgggcgacacgcgctgggcgctgctgtcgatcgtcatcgtcgatgtgtggcactggacgcctttcgtgttcttgatcctgttagcgtcgatcgagaccctgccgcaggacgtgctggaagccggccgcgtggatggcgccacggcgtggcagatgatcagcttgatcatcctgccgctgctgggcccggctttggcggtcgccgccttgttccgcgccatcgtcgcgttcaaggcgttcgaccaggtctatctattgacctccggcgggccgggtacgtcgaccgagcttctcagcctgcatttgaaccgcgtgttcttcgagcagaaccagctcggctacggcgcaatgctgtcgctgagcatcatcggcgtaatcgtcgccaccctcgccgtcggcaaatggtcggcgacgcagatcgaacgcaaaaggaccggccgatgatccccttgcacggccgcgccgcctggatcggctatagcgtcgtggcgctggcgattctgttcatcgtcggccccaccgcctggatcttcctcaactcga

SEQ ID NO: 86614 - DNA, 974 bp, Homo Sapiens
gcggccgcggacgatcttcggatcgctcagccgacggcctcattacacatccagaagctcgagcatcaactgcgtgttcagctattccatcgctcccggacgggctgcgatccgacccgggaagcgatgaattttctaccctatgcccagactatcttccgggtgaacgagcgtgcgctcgccgctgtctccagggaacggctgcggatcggcgccagttccaatatcggaatctatctgctgcagccctatttacggtcatttctcgaaggccgtgattcatcggcctttgatatcgtgattgaccgcaatccatctatcgccgagaaactggagaatgtcgaaattgacgtagccgtgctggaatggtgggacagccgcgacggttgccaagccgagcgctggaaaagcgaacccgtcgtcgttatcgtgccgcccgaccatccattggcgtctcaagaacagatcggtcgggctcaattatccaaatttgagcttctcggcggcgagcctggcaccgggacagggcgaatgcttgcgaaatatttcggcgacagcgctcaagtgccgcgggtttcccttcagctaggcagcaccgaggctgtcaagcaagcggtaaaggctggaatgggcatttctctggttctggcgtcggctgtactggacgaggtgcgtgtcggaagcctgcgcgccatatcttttgttgacccgccgctacggaaagacctgtttgtcgcttggcgtaccagcattccgggcatctctacaccagccttcgcccagcatctattgaatgccaactgaaattgaggactaagccgacgtcagcgctgccaagaggtcgggtgacacagcaagacggagccgagttttcgttcgcaaagattgtggactgacgatcgccctttcggatcaggccgacgcccgctcggcgcgggagacgacaggatcgaacggaagcaggaaggtatcga

SEQ ID NO: 86615 - DNA, 515 bp, Homo Sapiens
gcggccgcttccggaagtgctgaaaaaatttgtaatggatgaaataggggcttctgatacatggcgttggtttggttatgaaaattcctatgtggtaatagacggtaatatagtccaatccgtaagcggaggcggacattggggcggcggtatttttataaactcttatgatatggggcggtttggtttgcttactctccgcaatggaacttggaatagtaaacagattctgcctgccgattttattgcccaggcaaaaacgccgaccgtttcgcagccaacttatggttttatgaactggtttctgaataccgaccgcaaactttttccgtcagctccggcaaaggcatttgcacatatcggaaacggaacgaatcttatatatgttgacccggacaatgacctggtcgctgtcgtacggtggattgaaaacggtaaaattgatgaatttcttggcttgttgacggttgccgtctccggcagcaagccgaaaatgtaattaacatcctcgtgcc

SEQ ID NO: 86616 - DNA, 722 bp, Homo Sapiens
  misc_feature (11)..(11): n is a, c, g, or t
gcagtactgtntacgggaacccagcagcgggtgctagggctgttgttcggtcgtgctggacagagctttcataccaacgaaatcgtgcggctcgcgcagtcagggggcggtgccgtgagtcgcgagttgaagaagctgtcggcagccgggctggtgacggtgaatcggcgtggcaaccagacgctctatcaggccaacccggactctccggtgttctcggagctgcgcgcccttgtcgtcaagaccatgggggttgccgatcagctgcggcaggcgctgtcgcccttcgccgaacagattacgtttgccttcatctatggctcagttgcgcgcggtaccgagggcgcggacagtgatgtcgatctgctggtggtgagcgacacgctcgcttacggcgagctgtacggcgcgctgacggaggtcgagacggtcatcggccgtaaggtgagccccactctgtattcgcgggccgactggcgcaagcggctgcaggacgacaaccccttcgtcgcgcaactgatggcgcaaccgcgtatcaatgtgatcggtaacgaccgtgaccttgcagaatctgcctgaccgggtcggcccgggcaagctgaaggaagaagtgccatccggcgtgacgcctctcgtccgctgtccggaccgactcccgcaggacatcgtggtgctgatcgagcaattcggtcgcgcgtgggctgacagcccgctgcggccgc

SEQ ID NO: 86617 - DNA, 1063 bp, Homo Sapiens
gcggccgctgtgcccgtgagtttgccggcaaacgcttgagcgaactgaccgtacaccatcgcaaccacaatcatgatgacaacccccaggacggttccaactgggagttgctgtgcctgtactgccacgacaacgaacactcgcgctacaccgaccagcagtatttcggcgaaggctccaccagcagcccgacgattgccaaggcgacgcacaacccgtttgcggcgttggcggggttgatgaagaaggacgactgaagcccttctttgcctgtgcgggccgcatcgcaggcaagccagctcccacaggggaatgcatcccaagtgtgggagccgggcttcttgcccgcgatagcgatcgcccaagcaacacatgcctccaaggccgtataatcgcggttttcctccaaggcacccttccccgtgggcaataaacgctacagctgcatcggtctgtataaccccaaatcccccgaaaacgtcggctcggtgatgcgcgccgccggctgctacggcgtggcctcggtgttttacaccggcgtgcgttacgagcgcgcccgggacttcatcaccgacaccaagaaggtccaccacgacattccgttgatcggcatcgatgacttgaaaaagatcctgccgctgggctgtatcccggtcgccgtagagctggtggaaggcgcccgcccgctgcccgaatacacgcacccggaccgcgcgctgtacatcttcggccccgaagacggctcgctggacaaagagatccgcgactggtgtgaagacgtggtgtacatcccgaccaccggctgcatgaaccttgccgccaccgtcaatgtggtgctgtacgaccgtctggccaagggcaacaacacccgctcaggccccaagtactgatatttcgggaacatccagcgcctgcaaacagtcagctacttacacttgcctttgttggagacaaaccatgagcgacagcaaaaccctgcgacctatcatcgaacacctgcaaccagcccccaaaagtgagcaaaacgtacacgggtcggaacgcattctttcggtggccggcg

SEQ ID NO: 86618 - DNA, 884 bp, Homo Sapiens
cggaagatgcgcatgcggattggtgcggagtcacgattggcgcgctcagaatcggaaatccgaagaatttcctccgctttggtgagcatctcgtagccgcggctgattttttcttcaccggtttcgtcatcggtgaagatccgttcgcccagatagccgttgtcgatgaatacctcgccgacctgagagcccgcgttgataagaacctgctggcctggcggggtctgccggagtttcgtaggaaccttggttagggcgttgtacagcgccacgcgctcaaagtttacgaatgcatccaggttgaacacatcgtcgatgtactcgccgaaggtggaagtggtcttggagttgatgattcgccccatgtccttctcgccaccggtctcgacaaccgtgtagaagatcgcgcccttagacttcatggtgctgtaggcggtcggtgtcaggctttcggcgtcgatgcccggaagctttttgaattcaccggtgatggtcgagttggccgcattgaaatttacgcgactgaacacagccgccagctcaaacccggcgtagggctcggtagcatggctcacaatgaacatgcggcgagagccctgcacaaatgccttgctgacgatgtcggtggttacagacgggtctcgaacggttgcctggttggtggtgaaggcaaagaacttgcttgcggcatcgccagcagccgccagggccaaaacatctgcatccacggcacggatagaggtttcgaactcgtaccagtagaaccagatgcccttgctgatcgcgtcattcagcgactcgacaggggtatcttcctcgatgcgcaggtagatgcgcagagttttcggttttggaatagccgagaaccatgccagtgcggccgc

SEQ ID NO: 86619 - DNA, 961 bp, Homo Sapiens
gcggtcgcttcaatgctagaatgggagtttaacatcaattttattcttagtctttatttatacagaagtaaggtttgagaaaccatattcatacacaaatagatagaaatggaagggttttgttactaaaccatcactcaatttgttgatctccttagtaatatctccttagtaatacatcatgttatgatcttctatcaaacattatttttaatgatctatacgctgatgttttaaatgtgttccttcaactttgttgaaagctaagagttaaaagctacctgacttgaaagaggattttttacaaagctattatagctcatcactataattcacttcaattttgatgaagattaccaaaaaagcctttgccaagacttatcaaatgactgttaattgtactgtttcacgtagaggcaattatttaactcaacaggctcagaaaagggaaggaaaatgggagcagtgttaattttaagactctcttacaaatacagttttgttaaataaaatgtttatatcttatcacacgttttaaatacatttttgtcaaaaccttggactggagccctaaatctttcacttgtggaaaatgtctgccacataacctaacaagcaaacgctgtcccttttgtcaaaccaaactgccaagtctgacttgaaaagtctgatttcatttttcagttctaagaagcctattaattcttattttgagatatattttaaaccactgagaaataaattacaaaacgtattataagatagattactaaaagcatgcaattcaagattaaaatgatgtcagatctaaccgaattaattttttcattttataagttataaaaagagtaatcaatacgcagttcatcacttagcttgttataatacaatgtagcatgtggctacaagtaatgttatgtatattgcaaagaatatgataaaaggcatggtatttctttgg

SEQ ID NO: 86620 - DNA, 644 bp, Homo Sapiens
attcggcacgaggacaaacaggtagcgcacgatatccagcagcgcgggcaggcagatcggcacggtgacacgcagatagtggcggtacagcggcgccttgagggacagcgcagcggcttcgaactcggcatccaactggcgcagcgcggtggttgcggtcatttgcgcggtggtcaggtagtgcgcgatggtgcacaccaccagcaaggtcatggtgccgtagaacacgtgtagcgggttgccgttgaggttgaagaagaacacgtaacccaggcccagcaccaagcccggcacagccatcggcacaaagctgagcatgcgcagcgccaggttcaggcctttctggcccttggtcttttccatcaggtaggcgccggtgaagatcagtacgctgccgatcagcgcggtgcacagcgccatggtcaggctgttgcgatacgccagccagccgccgccggccgtgtcttcaaactggtagtgattgagcgatagagagaggttgtacggccagaacttcaccagcgaggaatacaccgccatgccgaacaccagcagcaacacggcgcatatcaacaacacaatcgccaggtagcagccatccctcaagcgcgatggcgccggctggaacacctgggcgcggccgc

SEQ ID NO: 86621 - DNA, 798 bp, Homo Sapiens
gcggccgctgcttcaggtcggcgggctccagggagacctgggtgggcagcgtcgccgtttctcctttcttgggcagtatttttcccagcgccacgcggaggctgggccattatgagctctgcatttccaggacctggtcactattcaggacacggttccagcgcagtgcgcgttagccatgtctcagggatgagtgacattccaagatgtggccattgacttctccaaggaagagtggggattcctgaaccctgctcagagagatttgtacacaactgtgatgctggagaattatcagaacctggtctggctgggactttccatttctaaatctgtgatttcactgttggagaaaaggaaactgccttggataatggcaaaagaagagataagaggcccattgccaggatatttcaaggtgtcagagatgaccatctcccaggagccaaaggcaaagactagaactctctttggaaaagatgtgccaggtgcagagattaaggagttatctgcaaagagggctattaatgaagtattatcgcagtttgacacagtgataaaatgtacaagaaacgtatgtaaggaatgtggaaatctatactgccacaatatgcagcttactctccataagagaaatcatacacaaaagaaatgcaatcagtgtttagattgtgggaaatacttcactcgtcaatcacctctcattcagcatcaaagaatccacacgggagagagaccctattaatgtaaccgaatgtgttaaaaccttctaccagagggcacaccttactaggcatg

SEQ ID NO: 86622 - DNA, 719 bp, Homo Sapiens
agaattcgcacgagggaagatcgggcgggctcggaaagatgcccaggtggatacgtgctcggtctttgcagccgcgctctatgacctgttgcacacgcgcgtggcctgcaagatggtaactgtggtcaaccgtggggctctgccttgggcacactcagtggttgaggtgggcggtcggtactacgactccatgggcgagttctcaacccccatataccggacccgagccaagatccaccccacagtcactctgcacctgaattatcagctggactaccgcgaagactgctacgagcccgagttcgatgaaatgtatgcgttctatctcaaggagctgaccaaggcggcccgccgcttaggggtgtgttgagtttgtgactccccgtctattttcaggtagcaccatcgccaccccgcccggctgtcatgggttctcagctcccgtgttggcggctgacgagtttctggtttttgccttgcccgtccaatgacacacaagtccgctgcggatactgggcacatcaaaaacgcagggccagcaggcctgaatgactgggagttaaagacatgggttccaccgtatcaactggcaagctgattggcgctttcgaaggttcagccggtaagcccgtctacgtcatgttcgagcagtcctacgacaagaatacctacccccgcacgccaaaatggcaggctcgcatgatcggcgacgcggccgc

SEQ ID NO: 86623 - DNA, 390 bp, Homo Sapiens
gcggccgcgaccgcagaccccaccgccgtcgcaacaaggtactccgccagacttcgacgacgacatcccgttcgggccgctaccttacctcgcaggggcataaagcgtagctggtagtttgatttcccctgcgcagggtaataacattgttagcaccttgcgcagggagaaccaatatgccggatatcactccgaacactgccgtaaaccaccctcaagcactcagcctacgagcagctgcagatcgagtctgcagtttgatcagcgcctcgccgatagagcgtggagaccagctcgaagcattcgtctccgagctcacaccggaacatgcgcagatctccttcaacttccaggggggagtggttcaaggccatctcaacccctcgtgcc

SEQ ID NO: 86624 - DNA, 839 bp, Homo Sapiens
  misc_feature (761)..(761): n is a, c, g, or t
gcggccgctgggcatttgctccagggcaagcatccagctatttaatagtcgatgcagcggtgcacgggacgttgcctgcaagagtagctgagcgcgataccgcccggcgcgccgctccatcggcgcggggactgggccgagcaattcgatgccggccagactcaactcaccgagcaaacgttcggcggcgctgcatgcctcgtcgagaaaattttcggcctgccctggcttgtgcgcttcggcgcgcaacagtgccaggtgtgcaaacggcggcaggccggcggagcggcgttcgctcagggcctgttcggcgaaagcgaagtagccctgttctgtcagttgaatcagcaaggggtggtcggccagatgcgtctggataatcaccttgcccggctcttcggcgcgcccggcacggcctgccacctgcacgatcagttgcgccatgcgttcgctggcgcggaagtcgccggagaacaaaccaccgtcggcgtccaggatcgacaccagcgttacccgtgggaagtggtgccctttggcgagcatctgcgtgccgatcaggatgcacggctggcctttctgaatggtcgcgaacagctggttcatcgcgtctttgcgcgaggtgctgtcgcggtcgacgcgcagcaccgggtaatccggaaacagaatgcccaggcgctcctcggcacgctcggtgcccgcaccacggggcgcaatccactttgccgcattgtgggaagtggcgcggcacgcgctccacatgngcgcagtggtggcagcgcactcgccgtggcgctggtgtacggtcatgcgcgcatcgcagcgttcgcactcggacatcc

SEQ ID NO: 86625 - DNA, 805 bp, Homo Sapiens
gcggccgccgagttcgcgcagatggcgggcgccgatcgcgtcgagggctgtctctttggccacggcgagcgcaccggcaacgttgatctcgtcaccttaggtatgaatcttgtcagccagggagttgacgcgggtatcgacttctctgacatgccaaaaatccgccgcaccgtcgagtactgcactggactaccggtgccggcacgccagccctacgccggcgacctcgtcttcacagccttttcgggctcgcaccaagacgctatcaagaaaggcctggaggacctcgaacgccaggcccaggagcagggcatcggtatccacgaggttgactggcaggccccctacctgaccatcgacccacacgacgtcggacgcacctacgaggctgtcattcgcgtcaacagccagtccggtaagggcggcatggcctacctcctgaagaccgagcaccaagtcgacctgccgcgtcgtctgcagatcgagttctcccgtgcagtgcagaattacaccgatgaccaagcccgcgagatcagccacgacgagatctgggatctgtttaaccgcgagtatctgcaagtgcctggcatcgagctggtgagccgcacgacgtccaccgaaaccggtacctatcagctcaccgccaaccttcggattaatggggcggacactcagatccgtggtgagggtaacggtgcgatgtcggctttcatcgacgcactggtctccctcgacatcgttgtccacgtgctcgactactccgagcacgccatgacagcggggtggtactgcgcctcgtgccgat

SEQ ID NO: 86626 - DNA, 556 bp, Homo Sapiens
  misc_feature (211)..(252): n is a, c, g, or t
gcggccgcggctgtaggctttttttatagtatatacattattggtgttgtcaggaggacttctttcagatcaatatttaactgtgggtattttgaaatgtaatagtttacagttctgaaatagcatgaagttcttaaaaggaaatcttatttaaaaactttaatgttagatagtttgtcagtaatctcttctttgaattattgcaatagcnnnnnnnnnnnnnnnnnnnnnnnnnnnnnnnnnnnnnnnnnncaaacaggaaagtacggcaaggaacatgaaccaacatacttgctccattaattccttttgctttaccatcttgcttcaggtttttttaaaatgaaatattatacaattgaacccctgatattattttcctttctttttacctagaagtaacagttatcctgaatttgttgagacctctattatgtctgtccgtaaaaaatatatagcattatatgataaatattaaaactgtatattgcatagtattagactgtatattgtatattatcatgtaatattaaaactttagtatattcctcgtgcc

SEQ ID NO: 86627 - DNA, 560 bp, Homo Sapiens
agaattcggcacgagggccacgcccgacagcgcacagacgatgaggaatggcaccacatcgcccgcgcccaggaacgccgtccacacaaacacggcaatggccagcagcatgccggccagccaggtgcgtgccaggccccagcgcgccacagcacgcagccacagcgggatggacagcgccgcgcagacgaaataagcggccaggaacatcggctcctgtgcgggcggggcctgcaagcggtcctggatgaagaacagcaccagcgtggccgggatggcgctggcaatgccgttgagcatgaacaccgccagcaggcggcggaaggcgggccgcccccagggccgccacaggctggcacgttggggcgggcggtacacgccggccacggcgcctgtgtggcctgtggggcgcggggcacgcgtccacgcccaccagcccagcagcaaggtgagtgcaaacacgctgagcatgaccggcaggcccagcagcgcgggcagcaccgaggccgtcaccacgcccaccagcgctgcaccctcgcgccaggccacgatgcggccgc

SEQ ID NO: 86628 - DNA, 848 bp, Homo Sapiens
gcggccgccgaccgaagtgtacggcgtggtgacgcaggaccgcttcgacggcgccgacctcacgttgcgcacgccgatcggcgacggcctgggcagcgtcaaggtgtatggcgggcagtcgcgcggcgacttctacctgtacggccagcgggtgacgcaggacgacgcgaccaccgtgggcgcgacgatcgaatgggcgagcgacacgctgacgctgaaggcggcctgggcagacattcacgcgcgcggcgaccgttcgctggtcgaactgcgcgatgcgctggcgtcggtaccgctggcgcaggcgcagttgcgggcatcgcagatacagacttcgcaccacatcaccttcgccggtctcagcgcgcgctacgaaaatggcccgtggtcgctgcagggcattctcgcgcgcgagaccttctcgcagtttccgcgctactccggctggggttcgagcgtggtcgccggctatcgcatcggcgcgtggaaaccctatctgacctggggacgcatctccttcgaaccggacgacagtgcgctgacgctgccggctccggcggctgcgctgcaggtcgtctacgaccgcgtcgtcgaccggctgacgatgaatcagcgcactttcggcgccggtgtgcgttatgacttcgccaccgattacgccttgaaggtacaaatcgaaaagatcgatgcctcatcgtcgtcgatactgatcacccccagcggcctgccggtccgcgatgccagtttgacgctgctcaccgtcgtgctggatttcgtcttctgatgccgctgatgcatttgttcacccgacgaaccctgctcacgctcgtacttgcgttcgtcctcgt

SEQ ID NO: 86629 - DNA, 560 bp, Homo Sapiens
  misc_feature (471)..(487): n is a, c, g, or t
gcgggccgcggctggtaggtaacaaaaccgttgaacctcccattagccaagtgggaaatgtagacactgcttcagaacttgagaagggggtgtctgaggctgcagtcctaaagccttctgaagagttacctgctgaggctacctcatccgttgaacccgaaaaggattctggctcagcagcagaggctcctcgttagagactggaatttgtgaaaatgtgacagtgacacttcctggagtgtagagcttgaggtgtacagatgctgtattatatccgctcccgctgtactgcagccccgcgccagctggtggggaactgtaagcaatttgattgcttcccttctatttaaaaatagccacaaaataacaaaaaatactgaaaatatgaataaatattaccctttttgctgtaactttttaaaagttttgactttaaaaagtttacaaatcgtaattagaagtgctctctannnnnnnnnnnnnnnnnaatttaagacaaggtaacggtgaaagctcctcaaaacaatagggatgtttttaataaactctattttcgtaac

SEQ ID NO: 86630 - DNA, 624 bp, Homo Sapiens
gcggccgcaactgggccgggcgcgcaggagtcgctggacgccagaccggcatgccggccaagccgagcagcccggcgccgcgcaccatgttgtgcagcagggtttccgcctggtcgtcggcgtggtgggcggtcagcagtgcgtcggcaccaagggtctgcgcctgcgcgttgagcgcccggtaacgggcgtcgcgggcggcgcattcaagtccgtccgggctggccgtgtcgacctgcacccggtgcagcgagaacggaatgccgagcgcggcagcctgcgcggcgcagtgatctgcccaggcatctgcgttcggactcaggccgtggtggacatgcgcgcacgccaaccgccagcgatgggcatcgcgggctgccgccagtgcgtgcagcagtacggttgaatcgagcccgccgctgaagccgatcagcagctgagcgccgtcggccagatgcgccgccgtattggcggcgatacgggcgtaaagatcaggcgaccgcctgctccttgaactttccataggacatgacgcgctcgaaacggcgctcgaccacctgggtgggggtcaggtcggccagctgtcgcagcgactcggccagcgcgcgcttcagcgaggccgccacg

SEQ ID NO: 86631 - DNA, 750 bp, Homo Sapiens
gcggccgcctcgtccagctccttgaggcgctggtcgatcagttggcacttgtccggcagatccgcgctggcagtctccaggttcatgtgttgcaactcatcgttgatttccttggccttggccgggttttgctgggtcagtttggtcacttccctggccagttgttcgcgtttggccgtggcctcttccggcgtgcaggcccaggcgggcagggcgctcagcagggcggcggcgatggccaggttcatcagggttttcatggtcggacctccttggcagtggtgttcagttgagggcgcgaacgtctggaaagttcagagaaatgacgctcgtctattgggatgaacggccagtgtcaggtcatgtcactacctatgacgggccactttttaatctgcccgcgggagtaatcaggatgacgacttacaactgggatctgatcgaacgtctactgcatgaagtgcagaacggcgaaggcagctttgcgccgcgcaaatacgccgagcaggaagccgccgagaaggccacggcgggcgaatccaccggtaacctggacgtgttgaaaaagaccgccgccgattacgaagcgctgttgttcaaacgcggtttcattgaatcgcgcccggaagaagagggcggcaatggtgagaacttcatcctcacggcgctgggcgcgcagttgctggccctgatcgacagctcaattccgggcaacgaccacccgcgccaggtgccctcgtgccgaattct

SEQ ID NO: 86632 - DNA, 850 bp, Homo Sapiens
gcggccgagccatcgtcagtactgtccagaactttctgttctggcacatgaaggaccatgggagcggcgagctggtcatgggtttctcggtcgccctcagcttgctgggggaaattctgcttcatccgttcaaagctacattgcttaggaaactgtccaggacgggcctggtggggctggggctgagctgcctcgctgggcagctgctgtactactctttcctctggagctggtggtccgtcctccccattcagatcttgagtgccattagcaacagagctttgtggtgggctgtgggggcctcagtagaggacctggccactccccacatggagagggctctgagtgccttgttccgaggccacttttacgggagtggctgtagcctgggcagctttgtcgggggcttcgtggtgatgcgcttcagcctggctgtgctctaccaggcctgctgtgtggccctgttgctctggttggccttgctcctgtccatacagcggaggctgccccgagagcggaaaatcaagtactcgaagctgcagtccatggaggtgagtgacaccagtgactctgagcaggggacagaacaggactggcttgtgaaggccatgagggaggaacactcagactgaaagggctgagaaatccagagtgtgctgatccagcaaggaacgaatggactgaacaaaactcagcctgctgaggacagaaacctgccctggactgctgggagccggggaagagaggatgggtctgtgctgaaggcccaacaggatcatctcattgcatgattttctttacttttgaagtaaaaggagatttaactttttgccaatcttttttagataat

SEQ ID NO: 86633 - DNA, 532 bp, Homo Sapiens
gcggccgcgcaagcggcctatgccggccgcgccgcgccggcgcaaccgcgagcgggggaagcggcgcagcggctcagggggtgtcaatccactcttgcccccgtggacttgaccacggcggcccagcgcgtgatctcgcgctcgatgtgcgcctgcagcgcctcgggggtggagcccacgggctcgtagccgccggcggccagttgggattgcagctggggctggcgcagcgcggcggcgatctcgcggctcaggcgctgggtgatctcgggtggcgtgccggctggcgcgatcagcgcataccagccggtcacgtcaaagccggccatgccctgctcctgcaccgtcggcacctcgggcgccagggccgagcgctgcgggctggtgacggccagcgcatgcatgcgcccgccgcggatgtgcggcatggaggtggagatgctgtcgaacgtgaggtcgatgtcacccgccagcatggcgttgaccacgccggcgctgcctttgtagggcacgtgcgtcatcttgaccccgg

SEQ ID NO: 86634 - DNA, 674 bp, Homo Sapiens
tgtggctcaggtcaaccacataaattggcctctcctggagactgccagaactttctcaaagttgtaacatccagagggagtcaccccacccccaagaccggcaactgagatgtttaaaggaactggctggccctgaaggaaagactgaggccattcatctgctctggagttcatcctcgggatctgagatgcacagcctgaagacatctcatcagccatcagctcccttaagctatctttcagatcattcagagcataaggatgggcatgtgagaaagccagggatttgacaccacctccctcccactggaggcgggaggacaacggaagcggtcagccagtttctgcgggaaacaagcaggccacacggaatagaaaaaaacgctcccccacttgttccctgatcacttcatcgtggatgtcagaccaaattgccttctcacaggacatcttggtgcatccgcgttctcaagcggaaaggacattttgcttttctgttggcaggattagtagccacgcgggtcgtccgcagcagtgctgtctttttggtttttcccttggtttcactaatgcgtgcatgtggccctctgaacgatcactggtttactttctatggatacaatctctcctccattgagaactgattttacaaataaatgtcttcgttcaacctt

SEQ ID NO: 86635 - DNA, 862 bp, Homo Sapiens
aacgtcgcccttcgtcggtcaattgcaccgagcgggtggtgcggtcaaacaggcgaatgccgaggcgtttttccaggcgggaaatcgcccggctgacccccgaaggcgtcatctccaggctgttggcggcgcgggcaaagctgccgctgtcgactacggcggccaatacgcccatgccgccggccaagcctggatcaaaactcatcggtgattgcccgtcagtgatctgaaggcattgatgctagcgcagaatgcttacagaaacatgccgcccgacgcttcgatacgctgcccggtgatccagttgctgccatcggccagcacgctcgaaattgcacccccaatatcgtccggcaaaccggcacggcccagggcggtcgttgtcggccaccatcgcattcacctgtgggttatcgcgcactgcgccgccgctgaagtcggtggcaatcgcgccgggtgccagggtggttgacggtgatgccacgcgggccgagttctttggcctgataacgcgacagcacttccacggcgcctttcatcgacgcataggcggcgtagcccggcaggctgaaccgcgccaggccgctggagatgttgatgatgcgcccgccatcgctgatcagcggcagcagtttttgggtgaggaaaaacggcgccttgaagtgaatggccaccagtatgtcgaactgctcttcggtggtttcggcaaagcttgcgtgagcgccgatgcccgcgttgttgatcaggaaattaaaatgttgctgggcgaaaacgtctttgagcaccgtagcgatttgcccgacaaaagcatcgaagctgccgctctggctgacgtccagttgcagcatggcggcgcggccgc

SEQ ID NO: 86636 - DNA, 598 bp, Homo Sapiens
gcggccgcctcgcgtttgtcgcccaggcccttcaactgggtgtcgaccaccttgtcgatggctttcgggtcgccgctggcggctgcgagacgaatggccgctgcgatctgtttgttttcggccggtgtcagccctttgatatggccgtcgaggatgtcgatctcatccttcatctttttgtacatgtcgtaggttttgtcgcctttgtccaagccaccgaggacggcgttgataccgcccttgatcatcgtgaacgaggctttcaacccactttcggcattttccggcgaaaccttgtcggggttctccatgtaggtgttgagctggtgcgtcatcatgttctggtcaaatgtctgacggcgtgcggtgtaactgtccggttcgaggatgcgcagcgattcaaaataacggtctacgtctaactcggccatttcggatttctttgggtcgccagagtcattcatggcaattacatagtcttcgaagttcaagttggcatcacgcgtgccgtctttgaacaatgccgggaacacttgctcgcgaacttcattcaagcgatcttgcgacaagctgccgacactgttcttaacctcgtgcc

SEQ ID NO: 86637 - DNA, 648 bp, Homo Sapiens
gcggccgcatcgctcagggcgcgccggcctccccttcgatcgccagcgcgctgaggtgccgcagcaggcgcgagagcgtgaccacgtcctgcaggttgtgcgccagcacgcgccgcaacggctgcgcgctgccgccgcgcagataggcgagccaggcggcgggcgcttccgcgccgggcaggtcgtcctcgcgcacgatgccgagcacgcggcgctcgatggtcgccagccggcagttctcgtacacgccgcggtagcgccggcgcgtgggatgcagcaggtcgacgtgcgcgagcccttccagcggattgcgcatgcgcgccagccggtagcgcgtggccagcagcggcgcgtcgtagcagcggccgttgtagctgaccagcacggtgacgggcgacagccaggcgcggaacgcctcgagcatcgcgctctccgcggccaggctcacgatggtgagctggcgcacgcgcagcgcacccgcgtgccagtcggcggcgccgatcatgaacgcgcgcgtgccggtgccgccggccaggccggtggtttcggtgtcgaagaacagcagatgctccgccggcagcggttcgcagcgtgcgaaagcgccgtccagccgcgcgggcacgtcggccgccgggaagacctcgtgcc

SEQ ID NO: 86638 - DNA, 904 bp, Homo Sapiens
cagtcgacggtaccggacatatgcccgggaattcggccattacggccgggggcctctccaactgcgactgcagaggaacagccagttgaacctgatggcccccttcctggctcagacaataaccaagaaaagaaagtaagattatctccagccaaaatgtcaaccaagaattctacagatctagttgaatatgttgacaagagtcatgcttttctccccatcattccaaacacccagagaggtcagctagaagacagactgaacaaccaggcacgtaccatagctttccttcttgaacaagccttccgcatcaaggaggacatctctgcttgcctgcaggggacccatggctttcgaaaagaggaatcgctcgccaggaagttactggaaagccacatccagaccatcaccagcatcgtcaaaaaactcagccaaaatatcgagattttagaagaccaaataagagctcgagatcaggcggccacaggaactaactttgcagtacacgagataaacatcaaacacctacaacgagttggagatcttcgaggaagagtagccagatgtgattcaagcattgtgaagctttctggagacattcacttattcaggcaagagcaccgggcaattgagaaagccattcaagaattcgtgcacagcctggaaactctttccaaaaacttggacatgaaggtgatgcagctcttaggaaagatagacactggcagttctgaggcaaactcgaatttacagatggtccaaggggattatcgccgagaaatggaaccttgtggaatgcaatcgcattcacttcaagtaatatgtacgaagagtggagatataagacatggcagaacaccattttcaagtttggagagacactggcatataatgaatgtctgag

SEQ ID NO: 86639 - DNA, 1694 bp, Homo Sapiens
  misc_feature (194)..(244): n is a, c, g, or t
  misc_feature (266)..(266): n is a, c, g, or t
  misc_feature (877)..(892): n is a, c, g, or t
  misc_feature (1081)..(1103): n is a, c, g, or t
tgggggagtgatcccaaaatagatgccgcagagagcggcggtatatggggggatgaattagaacggtggtatcggaatgcgcgcatcatacacacagccttaatggcgcctgttcgtataaaaatatggggcgattttccctaggtcgcagcctgaccgccgcgcgcagcgtatgagggttctcacctattacnnnnnnnnnnnnnnnnnnnnnnnnnnnnnnnnnnnnnnnnnnnnnnnnnnnctgacggctatagaaggggagncgatgcgggggtagagagagggggcgaaaaagaagcacgacgtcgcgggaagggaaggtgggcggtaccgcaaagaggggtgtaacggcatcgggaaggaccgagtaagttaagggggagaaaaggtagcgggaagatggggtcgacgcgtgcccgcaaatttggaagaaagggtgataaagtggtggccggcccgccattaggggaatgaaatcttcgggagagccgggagggaaccaaagtctaacgcgtttggtttttttcagttatccataaaaggtgtttatacctcagttccgggcacagtttagtgcaccattttggtcaaaccccacaggctccattccctttagccacatatttataatatgtttgggtcactcataggagtgaaacactgtcagcatcaatagttagcagcactttcaaaatacattttattgtcccgaatagaaaccttaactattcaattagtccagtaattccaaatggtcttattacttctatacataagatatgatcttacaacatttatgtagctaaatacttaacttcccatgctttttgaggattcccaaaagactttagggggttcccaagactttcagggnnnnnnnnnnnnnnnncacaataaaagaaaggaacagtgtcaatccataaagtcagaccagcagtttaataagatcctcttcatagctcagttctcagtgcatacagagattcaatatagccccatcgctctcagttattagaatctgagagggataaaagcaataactattgtttaaaagcctaagagagaaaacagatgtccnnnnnnnnnnnnnnnnnnnnnnngccaaattctttcatcccaggatgtctgaaaaggagagactctatggagcgtggatgtagaaaaggagttattcctaccggaaaaaaatgaactgtggacacagtcactcaagaccagagaaacaaccactatgagtaagtagcttcaatttcactgttaccaggagggcacacaccagaaagcctgggacaaagcctgggctagagccctcaggattcattctcaggcttcctggtgctgtggttcaacagcccttgtggggatggggagaaccagagactatcaccatcacatgtcaaaaatattaccacagcaacagctgtcaaaaaccagctggagctgaagttacacaccatttgaaatccacactgtacttgctttcttgtgatgggcttgagacatgtgcagagacaccctaaacatgtgtaggtgaccatgcttttgtaagcagaggatgacctcttcatgaactctttctactcatttgtctttctatcagttcaccattctaactagaaaagatgctgtaagctacttcagttagcttctaattttgacgacagaacaatactaccaacactattgaatga

SEQ ID NO: 86640 - DNA, 1101 bp, Homo Sapiens
gccgcgaactggacaccgcgaagggcatgaagaacagccggaaggtctgccacgaggctgccgcctggccccccacgctgagcagcagggccacgccgacgatgacgctgatgccgacggaattcagccagatcgcgggtgtcggatcgaaataggcgatgacggtgcagacgtaccagatcagatagcaccacagcaccatcttgcccagggacagggcctggaagtagcgcagcagcctcatgcgccccaggcgctcgcgggcctgaacaaacgcctcgcgaacagcaccgccgacaccagcaacagcaccagccccgacgcggcctcggcccagatggtcaggttggccatcaaggtgtgctcagagcacaggccgagccggtagtgcagcaggccatccaggcccaggccgccgtacacgcccagcgccagcaggccgagggcacgcaggcccaatcgggtcagtacccaggccagcaggcccacgccgcagacggcaaaccagaacagccagacccgccccggcgtcagccaggccggcatgccgggatagaaggcgatgtactgggcgttgtggctgaagtgggcgaggctggcggcgaagtaggcgaacgtcagcggcatcaggacaggggtcgttcttgaagcctgcatcacccctcctcaccagcccacgcggatgccatcgcggtctgattcttcgtcaccgctcttcagccatccgatggcggtcgcgatcagcagcaaggcgccggccagttcgaaccatcgacagtactggttggactcgatgcgctcgccgtcgcggtcgatgctgatgcacttcctgaacagattgctcgaccggatgaccacgctgtcgccgtccttcaaggccgtatacgttgcatagcccacgtcacaggaggacaggttgcctccgacgagatgaaccgtatagctggtgtcgatgctcagtctggcgttgatctgcgtgctgctggtgtgccggtcgacatgcagttgatgcgtacgcattggcagcgcggcatccacgaccaacgcaagcccgaagcagaacagggcgcatctgaaaagaaacttgagcaacgcggccgc

SEQ ID NO: 86641 - DNA, 578 bp, Homo Sapiens
gcggccgcgacgccacgccgatggagaaatgagatgaccctcaatgcgaccacgtcccacaccgtcgggccgtattaccacatcggcctgacctggctgaaccgcgaagacctgaccgtgccggccaccttgggcgagcgcgtggcaatcagcgggcaggtggtggacggcaacggtgatgtcgtcaacgacgccatgctggaagtctggcaagccaatgccgccggcaagtacgaccaccccgaagacgagcaggccaaggccgtcgatcccaactttgaagggtttggccgggtgccggtggatgccgaaggccgctttcggtttaccaccatcaagccgggcagtgtgccgggcctgcaaggcacgacccaggcgccgcatctggtggtgttggtatttgcccgtggcttggtcaagcacctgctgacgcggatctatttcgatggcgaagcgttgaatgtcgatgacccgttgctggcctgtgtgcctgcggagcgtcgcgctacgttgattgccaagccggatgcgcaaggtgtgcatcagtggaatgtgattttgcagggcaccctcgtgcc

SEQ ID NO: 86642 - DNA, 679 bp, Homo Sapiens
cgctggagggcactgatgcgggtgctgcctttaccggcagccaccagggcattggttagtcgaattctgccgaagcaacttgcaactggccagtctgaaacaacccggcctggatgatgagcagcgcaagaccatagacatggtcgcaagacatcccgaagaagccacacgccccgccccaactgaccccaactcatcaggggccaccgtctatagcctggtcggtacagcgccaaagatggtgattcatcgctacgtggcgaacataaatcgcgacattattatattagtggagcccagcgggaaaatcaccccgtttaagagctgggatgaactcaacggcttgggtgctatgaatgacaggctgaccggcaatatgttcagcgcccaggccgacatcatcatcgatcagcacatgggcgacagtttgtctgcgccttcaacgccctcaggcacagacgactcgacgaaggagaccatccctctgcccgactggatgagcaaagccggcgaagccgaacgttttgtcatgcatgaactcagcctgggattggcaagcactcaccaaactaaccaaggccgcagctacaacagcggcattgaggacattcggcagttttgcgcagcatcgatttgacagcctgcccgaaaaccaaaagctgacggcgcacgcggccgc

SEQ ID NO: 86643 - DNA, 1021 bp, Homo Sapiens
gggggtcccggcggtaagatggcggctgccgcggagtgcgatgtggtaatggcggcgaccgagccggagctgctcgacgaccaagaggcgaagagggaagcagagactttcaaggaacaaggaaatgcatactatgccaagaaagattacaatgaagcttataattattatacaaaagccatagatatgtgtcctaaaaatgctagctattatggtaatcgagcagccaccttgatgatgcttggaaggttccgggaagctcttggagatgcacaacagtcagtgaggttggatgacagttttgtccggggacatctacgagagggcaagtgccacctctctctggggaatgccatggcagcatgtcgcagcttccagagagccctagaactggatcataaaaatgctcaggcacaacaagagttcaagaatgctaatgcagtcatggaatatgagaaaatagcagaaacagattttgagaagcgagattttcggaaggttgttttctgcatggaccgtgccctagaatttgcccctgcctgccatcgcttcaaaatcctcaaggcagaatgtttagcaatgctgggtcgttatccagaagcacagtctgtggctagtgacattctacgaatggattccaccaatgcagatgctctgtatgtacgaggtctttgcctttattacgaagattgtattgagaaggcagttcagtttttcgtacaggctctcaggatggctcctgaacacgagaaggcctgcattgcctgcagaaatgccaaagcactcaaagcaaagaaagaacatgggaaataagcatttaagggaggaaattacacaactagcctatgaattctgtacccagaaagcccttggggaatgaccccccaccatataaaaaccaaaggcctaacctccaactgccaatgcgggggaacccggttacatttccccccgctctcggggaaacctagacacggattggaaaaaagaaagacaccgcccaataaatggcccagggggc

SEQ ID NO: 86644 - DNA, 954 bp, Homo Sapiens
gcggccgcgccggcgcccccaggcccattcggcggccatgcagagcaggaacacaggcagcgcgtaaatcagcaaggtctcggccatgtcagcggcccagtggacgttggcggtgccgctttccagcgggccgagcgccgggccgctcccaagctgtgatgttccacatggtctaggggagaaccgggaacgggcgggaagaagtgggaaagggcgggaaggctttgaaccacaacaacttagcgcgggccagggggcgtttgagggggcggggtcgcaacacttcgggcggcgcatggtttggggtggagatggcgggcctggaaaaccggcccggcggctcgaaacgacggtaaacgccctttggatacgggttgagcgccattctgacaggcatgcgcggcggagccgggaagtgttgcgaagcgtggcgccaagcgttgcgaaagacccgccgccctctctatagaggggcctggagcggccaaaaccccgaactgtgacgcgtcgcaacacttccgcgggccgaatcggccctccagaacggcccaggcgacgcgatctcgcccccgccaaggcctggccactgccgccgccggtggcgcgctcctaggccgttttaagggctcgccccttcccccaactctggatgatcagctcgccggtcggcttgcgcttcttggcgtcgccgatcgtgtaggtgatccccacccgcttcatcttcaggccggcgaagaccttgcgcatgtccgggtggtcgttcaccgtgacgatgccgcgcccctgcatagtccgcatcaactccgccaccgccgtgtactcatgcagcttgaagtcgccaccgtagccagcggtcttccagtagggcgggtccatgaagaacagcgagtgcgggcggtcgtactggcgcacgcattcatgccagggtcgccgctcgatgaacaccccgttcag

SEQ ID NO: 86645 - DNA, 517 bp, Homo Sapiens
gcggccgcgtccagctcgatctcgccggggtcgatacccccgccggggtgaccgggatgcgcggcgggaccgcgaccgagtttcgccgcgtctatctcggcgtcgatggcaagatcccgggcggctttgcctaccgcgtcgaagccgacatcgcgaatggcgaggtcgagctgaccgacgtctatatgagctatggtactggcccgctgacggtgaccgcagggcaggtcaaacccttctgggggctcgacgacatgacgagcgacctgttcaccagcttcatggaacgcgccgctttcgtccaggcgttcgggttcgagcgccgcgtcgggctgtcggcacaatataagggcaaggcgctgttgttgcagggcggggtgttcggcgacaatgccgccgacctgaccgacagcaaccatagcctgagcatcgacgggcgcgccgtgttcatgccagaactcggcgacacccagcttcatctcgcggcgtcgggtcattggcgcgatcccctcgtgcc

SEQ ID NO: 86646 - DNA, 1002 bp, Homo Sapiens
  misc_feature (85)..(119): n is a, c, g, or t
aaagactgatagatcactatagggcgccagcgtcgtagtagacgaacgacgagcgcagcgagtatgttgagcgaggaagcggcgnnnnnnnnnnnnnnnnnnnnnnnnnnnnnnnnnnncagtcgacggtaccggacatatgcccgggaattcggccattacggccggggcagatcgatctaagatggcgactgtcgaaccggaaaccacccctactcctaatcccccgactacagaagaggagaaaacggaatctaatcaggaggttgctaacccagaacactatattaaacatcccctacagaacagatgggcactctggttttttaaaaatgataaaagcaaaacttggcaagcaaacctgcggctgatctccaagtttgatactgttgaagacttttgggctctgtacaaccatatccagttgtctagtaatttaatgcctggctgtgactactcactttttaaggatggtattgagcctatgtgggaagatgagaaaaacaaacggggaggacgatggctaattacattgaacaaacagcagagacgaagtgacctcgatcgcttttggctagagacacttctgtgccttattggagaatcttttgatgactacagtgatgatgtatgtggcgctgttgttaatgttagagctaaaggtgataagatagcaatatggactactgaatgtgaaaacagagaagctgttacacatatagggagggtatacaaggaaaggttaggacttcctccaaagatagtgattggttatcagtcccacgcagacacagctactaagagcggctccaccactaaaaataggtttgttgtttaagaagacaccttctgagtattctcataggagactgcgtcaagcaatcgagatttgggagctgaaccaaagcctctttcaaaaagcagagtggactgcatttaaatttgatttccatcttaatgttactcagatataagagaagtctcattcgcctttgtcttgta

SEQ ID NO: 86647 - DNA, 697 bp, Homo Sapiens
  misc_feature (33)..(33): n is a, c, g, or t
  misc_feature (68)..(68): n is a, c, g, or t
gcatggccaccggcgcgcgccagcgcgacatcntgcgccagttcctaaccgaggcggtgatgctctcnggtggttggcggcctgttcggcatcgccctcgcgctgctggtgggcggcgtgctggtactggccgaggtggcggtgcaattttccctggtggcggtgtttggcgcgtttggctgtgcgctggtcaccggtgtcgtattcggctttatgccggcccgtaaagctgcccggctcgatccggttaaggcgttgaccagtgaataaacgatcttccctgctgggcgtatgcctgttgctcaacgcctgtaccggcaacccgccgagcgtcgacagcggcctcgcgccgccgcccgcctggcagtacgccgaacgcgatgccacgcaggcgaccaaccaacgctggtggacacacttcggcagcccgccgctcaaccgcctgatcgaccaggcgcgacgcgacagttatgacgtggccgccgccatggcacgcgtgcgccaggcccaggcgagtgcggtaattgccggggcgccgttgttacctgaggtcaagttcaacctcaccgccagccgtgaaaaactgctgcgcggcagtggcaatgcctccttggacgccaccgacagcaacaagaccgtcgacagtttcggtgccaacctctcagccagctatgaactggacttctggggcggccgc

SEQ ID NO: 86648 - DNA, 981 bp, Homo Sapiens
gcggccgccggcggccatagcctggtgcatggtcctgatgacgtctccgcgcataccgagctggcgaagcgtctggtccagtcccggcttcaatgtccagcaggcgggaccggcaggttcggcgagcccaaggcgctcaagtttagcggccctgccgaggagcagccggcgcgtttcagggtcttcggcgccggtgccgggcctcagatccgcgatgccaccggaggcatcggagatgtcgcgcagcgcgcggtcgagactggtccaacgctcggcatcgacctctcgctcgaggctcgttcggatgtcgtgttcgctgcgcggtccgagctcgagtgtgacgcggtcggccgcccggtcacgaaaaccgcggctgatgtattcgcggctgataacgaggtcctgaccatcgtcggcacgtccgcagatcagaacatggacgtggggattgtccgtattccaatgatcgaccgcgatccagtcgagcctggtgccgagatcggcctcgacgtcgcgcatcagctcccgcgtaaatgtcttgaggtcaccgagctcagctccatcttccgggggagatgatgaaccggaaatggtgccgatcgtccttgcaacgcgtggcaaaggcaccctcgtccgcagcatcggaggctccgtcgaacatccgggcattttcgtcgtcccgggtcacgccgtcccgcttcagataggtcatgtgtttggataggggcgcggagcggaagcggctgccgcggtgccgcacgacgcgggccttcattacgacgcgtcgggcattggagcgcagccgaatggaggccgccgcgcgccggcctcggccaaaccgggagcgactccgcccctggcttgaccgaaaactatcgccgagatgccctgccctcttcgcggcccgcatgacctccccgacgaaggactgcggtcgcttggcgccacggttgccatggttgatccgtccgggccggacgc

SEQ ID NO: 86649 - DNA, 714 bp, Homo Sapiens
ggtgcaacacggtcacgtggtcggcaatcgaaccgacaaaccccatgtcgtgtccaccaccatcagcgaatgttgcccgccaggcgcttgaacagctcggcggtgaactcggtttcggcgtcggtcatgcccgccactggttcatccagcagcaacagttgcgggtcctgcatcagcaacatgccgatttccaggaactgcttctgcccgtgggacagcaagcccgccgggcgctgtgccgaggcggtcaggcggatggtatcgagcacttcctcgatgcggtctttctgctcaccgctcagacgtgcgcgcaggctggcccataccgacttgtcagtcttttgcgccagctccaggttttcgaacacgctcagggcttcgaacaccgtaggcttctggaacttgcggccaatgccggcctgggcgatctgcacttcgctcatgctggtcaagtcgagagtttcgccaaaccaggccttgccgtggctggggcgggtcttgccggtgatcacgtccatcagtgtggtcttgcccgcgccgttggggccgatgatgcagcgcagctcgccgacgccgatatacaggttcaagtcattgagcgccttgaagccatcgaagctgacgctgatgtcttcccagggtcaaggatggtgccgtggcgtgtgttcagccccttgccggcagcctggccgataccgatggcatcgcggccgc

SEQ ID NO: 86650 - DNA, 1039 bp, Homo Sapiens
  misc_feature (666)..(666): n is a, c, g, or t
  misc_feature (696)..(696): n is a, c, g, or t
gcggccgctatggcagttgggaaatcgaaagcgtctcgccgcagtacaacgacaataaccaactgactcaatcgagcaaaactcgccagacccacaacgatatgtggacgccgtatgcggggctgctctacgacatcacccccgagtacaccgtgtatgccagctacaccgatatcttcaaccctcaggatgagcgcgattccagcaagaagtacctggagccggtggtgggcagcaactacgaagtcgggctcaagggcagcctgctcaatgagcgcctgaacctggccaccgcgtacttttggagcacccaggataacgtcgccgaactcgataacagcgcaccgccggatccggtcacgcgcgagcagttctacaagtcgggcggcaaaggcaacaaggtccagggctttgaggtggaagcatcgggcgaggtcatgccggactggaacctgacagccggctacacctacacccactcggtcaatggtgataaacagcgcaacaacaccgaccagccactcaacctgttgaaactatcgacggcctatcgcctgccgggccaatggcgcgggttgaccgtaggtggcgcggttaactggcagagcgacttctacaaatttgccccacgccctaccggtggccgggacagtgacggccggctgnattaccgaaagcaccaagatcacccagcanggcctacaccgtggtcaacctgatgtcgcgctatcaattcgacgaacacgtttcggcgtcagttaacgtcaacaatctatttgataaaaaatattacgaacgcgtcggtttttataatggcgtgtattggggagacccacgctccatcacactggcactggattggcggctataaactgcatccccgaagttaacaaaaccgttaacttcggggccgttccatgttaattcccacttaataagacagccccatagtcgctccatgaatcggatcacggagcgatcgaacaccactcactcttaatgggaatactgccatgaaactttcgactttgatgcttgc

SEQ ID NO: 86651 - DNA, 825 bp, Homo Sapiens
  misc_feature (673)..(673): n is a, c, g, or t
gcggccgccgacggccaattgtggaacctcaaggtcaccaacgtgccaggtccggacaccatcgacacctacatcgacacggccttggccggccgcgacgcgggcagcgtgatccccttcaccctggtgcgcgcaggcactggccaggtggtgggcagcacgcggttctggaaggtcgatcgggccaatcgcaagctggaaatcggtcacacctggctggccgagtccacgcaaaaaaccggcatcaacaccgaagccaagctcttgctgctgacctacgcttttgaagtgctcgactgtgtgcgggtgcagttcactaccgatgaactcaacgaaaaatcccgtgccgcgatcctgcgccttggcgccgtgcaagagggcattgtgcgccacgagcgcatcatgcccgatgggcgcaagcgcaattcggtgcggttcagcatcatagattcggaatggctgcaggtgaaggccagcttgcaggccaaactgcagcgataaggagacaacccccatgtacacgctctacggcatcgacgaatccggctcctgcatgatcgaaatcgccctgcagcgttgcgcggtggcatggcggcgcatcgacgccagctcttgggaagacggcgaaggcagcgacgccctggcccgcatcaacccactcaaacaaattccncacgttggtgacgcccgagggccaggtgctgaccgaaagcgccgcgatcctgatccacctgggcctggagtttcccgcctccgagctgctcgccggcaaccgtgcgcagatcctgcgcgggctggtatacatcgccgccaattgctattcgg

SEQ ID NO: 86652 - DNA, 1020 bp, Homo Sapiens
  misc_feature (645)..(679): n is a, c, g, or t
atggaggatgaatgcacgaaccaggaagaataaaattccagacataattccagaaagcagtgggacacgaaccaagacatcacaatttttatcagttcagaccacttgacaccctcctgcccctttgccacgagggagaaaccaatagttgcaccaaacaatacaaagggttccagaaatagggagctttcaaaaacgaagcccacgagttgccacacagcagacccaaacatagcccctgactgagccggccatcagtagcccttgagtcgagttgtacatctccacgtcaatcaagcccttccggatggtttcgctcactttggcccccagtaagacagagcccactgtttcaaagatgctagctaggatgcaggcttgcttcagggtcactacacctgagcccacagctgtaccaaaagaatttgctacatcattggctcccacggagaatgccaagacaaatgcaataatgaagcccaggatgagcatccataggtagtccaccaaaggaccagaagcggcggtagcagctgtagtactggtaatcagcgttgccattctctggagtagtggttgtttagtaagagaactactgagcgcctttcaagatgtgtaaacagaatatgaggtatcaaaaatgcnnnnnnnnnnnnnnnnnnnnnnnnnnnnnnnnnnnctgtaaactacggcacagaaaccgagctggggagttactgctatacgctgcgtatgggcatctgttgtctggggtttctttggctcaggagggctaaaagcacggagcagaattccatggcggagaagagaaaggacgcaagttcatccagggaaaagggagggcggagcgggagacgaggagatcgaggcggcagcggctggagccacgggcacacggcccgggtcggcggcaccggggacagctcagcgggactcacgaccttcccaggaagcagccgcgggggtttgaaaagccgagaagaagaaccactattccgtaattccggaccggtccagcct

SEQ ID NO: 86653 - DNA, 763 bp, Homo Sapiens
  misc_feature (38)..(38): n is a, c, g, or t
gctggccgccaacacagacggcgtggccgtcaacatgngcgaacatcacccagttcaactcggctacctaccgcaacccgcccaccaccgacggttacgccaccggtcaaatcaccgggctgaaaatcgacggcagcggtgtgttgttcgccactttcagcaaccagcagagcaaggccatcggccagctctccctggccagcttcaacaacgagcagggcctgcagccagcgggcggcaccacctggaaagaaaccttcgcgtcgggccagccgggttttgataccccgcaagtcgggaccctgggttcgatcgtggccaactccctggagaactccaacgtcaacctgaccaacgagctggtggacctgatcaaggcccagagcaactatcaggcgaacgccaagaccatctccacccaaagcaccatcatgcagaccatcattcagatgacctgatgttgtcgccttaagccgcatcactggaaaagcccctcggtcgaggggcttttttttgcctgtcgattgtccagggcagtcactggatgacatggttttggcggaacgccctacgcctgtttttccacctacgaagccaagaaggctgaggtcaacgggtggagagcaggctatggcgagtgtggcggtttcaggtggtgtcatcgggggcgcggttttttcaggtcggggtgttgcgacgtcggatccgctgggcgatgaaaaaaacaagggtgtttctaacgaggaaacgctcaaaaaactgc

SEQ ID NO: 86654 - DNA, 534 bp, Homo Sapiens
cgtctaacagcggcacaatgtacattcttctctgcagaagatggatctttgcgtaggccttatgttacgaatcaagactagttttacatttaataatacagaaattataccacatttttaagcacattgcatgaacctaggaactattagtagaatgaacattagaatgttcacaaacacatagaaattaaacaatatgcttttgaataatgaatgggtgaatcattaaatccaaatggaagttaaaaaatattttgacaaatgaaagatgaaacacaaaacaccaatatttgtgataccagaaaagtacttaaaaaataaccttatgttacacctgaagcaactattaatataatgggaagaacaaacagtccaaattttacagaaggaagcatataataaagagcagcgtagaataaatgaaaaaatttgtactcatacaacgtacgcaaatccagtcatgagaaagaatatctgaagagaccaataacaagtaaattgtatccataaaaaaaagcctacagccgcggccgc

SEQ ID NO: 86655 - DNA, 371 bp, Homo Sapiens
  misc_feature (78)..(102): n is a, c, g, or t
gcggccgcggctgtaggcttttttttattcagaattatctttttaagagaccatttgagtgtgatatttaaaaagtgnnnnnnnnnnnnnnnnnnnnnnnnnaagaaaagattacttagtctttagagaaggctagtctaagtcagtgtatcacaaagtggtagtgagatagcaggggatagagaggtttaagaaaattatcagaatcacttggcccccattcaagccccacccaaagaaaaatctctagatgggtcctgatatctttatttttatatctcctgggtaattctgatgatcacacatgttttatattccctggcttgttgatgtctttgattgtttacttcactaaaattctcctcgtgcca

SEQ ID NO: 86656 - DNA, 608 bp, Homo Sapiens
  misc_feature (353)..(373): n is a, c, g, or t
tgtaaggaattcacaaagaaactactacaactggtgagttcagcaagggcgaaggatacaagagcaatggacaaatcgattgtatttctacaggttagcgttaacaacctgaaaacgaaaattagaaaacacttccaccattcaagacagcatggaaaaagaataaaatacttggcaataaatttaacaaaaagaattcaagactcgtacaccgaacaactacaaaacactgctgagagaaattaaataaagagacctctgtgtcatggattggaaaactcaacgttgttgacagtgagtctccccaaattgatctataggttcaaggcaattcctaccaaaactccagctgnnnnnnnnnnnnnnnnnnnnnggcagaaatggacaatttgtatggaactgtacaggacccggcatagtcaaaacattcctgaaaaagttagagggcttataattccaaatttcaaaattcactataaagctacagtcagtaagacagtgcagtattagcatgaaggatacacctacagaacaaaagagaactcagaatccggaaataaacccttatatttatggtcaattgattttcataagatgctacggcaatt

SEQ ID NO: 86657 - DNA, 943 bp, Homo Sapiens
  misc_feature (791)..(828): n is a, c, g, or t
  misc_feature (910)..(910): n is a, c, g, or t
ccgcatcttaacatgaaccgtggttaaacaagcaggctgtaccggtccggaattcccgggatatcgtcgacccacgcgtcgccacgcgtcgatgctatataatcattatcttctcatctttctgttattattgttttaaaggagagcatcctaagttaataggaaccaaaaaataatgatgggcagaagggggggaatagccacaggggacaaaccttaaggcattataagtgaccttatttctgcttttctgagctaagaatggtgctgatggtaaagtttgagacttttgccacacacaaatttgtgaaaattaaacgagatgtggaaggagaacctcagtgattttattccctagtgaggcctctgagggcctccacactgcctggcagaacataccactgaactagtatgtgctagaggagggcacaaacatccgctccttccctaggcctgctggctctggttttctatgcagatgattcattggattgggggtgagtgttttgtttttctgggggcagtgtgagctttgagggttggaatattgggaggcattccttagtttcctcaactagcctggaaagttaggagtctagggtaattaccccccaatgagtctagcctactattcactgctttgtgtgcatttttttctccctctttaaaaaaccctttcaaaaaacctcggctccgacttcttggtctcccgggtccagctctcccaataatagattccgtcttaacttccccacccatcccaaattcgtaccccgtcgggaaagtgcggnnnnnnnnnnnnnnnnnnnnnnnnnnnnnnnnnnnnnntaactctcaaacctctgcgccttaattgagttacataaaacaataactgtggttcgtcaattgctagttctacaccacaaantatcttgcaacgcgaataagtatcggcataccc

SEQ ID NO: 86658 - DNA, 911 bp, Homo Sapiens
gcggccgccatcggcctcgccctctacgcggtctgcgtctacccggcgaacctgaagcacgccttcgagcacatccacatcgagggcatcccggattcctggtggtatcacgggccccgcctcgcctttcagccggtcttcgtctgggccgccctctgggccggcgggctgatcgactggccgttccggcggcgggccgcgcgctgaatcgcctgtggccgccgggccctgccaccttgaccctcctcccctgcccttgtcattgaacggaccgggaacatccgaggacgagccgagcgatgcagacggaggtcgccctccggaagatcatccatatcgacatggatgcgttctacgcctccgtggagcagcgtgacgacccgagcctgcgcggcaggcccctggcggtcggcggctcgcgggagcggggcgtggtgatggccgcgagctacgaggcccgccccttcggcgtgcgctcggccatgccggcctcgaccgcccggcggctctgcccggatctcgtcttcgtgaagccgcgcttcgaggtctaccggcaggtctcggaggagatccgcgccgtcttcgcccgccacaccgaggtgatcgagcccgtcgccctggacgaggcctatctcgacgtcaccgagaatctcttgggacttccgaccgcgacagcggtggccaaggcgatccgcgccgagatcctggagcggacgggtctcgtggcctcggcgggggtgtcctacaacaagttcctggccaaggtggcctcggaccaccgcaagccgaacgccctgttcgtcatcaccccggcgatggggccggatttcgtggccgaattgcccatcgggcgcttccatggggtcgggcccgtcaccgaggccaagatgaagcgcctcggcatcgagacc

SEQ ID NO: 86659 - DNA, 545 bp, Homo Sapiens
gcggccgctatgtcgagggcgcggtgatgacctcggtgccgccctaccggatcaaggtgccgctgctgctcggcgggcccggtgcggaggaactcgcgcccctggtcaatgcgctcgggtttgccgcgcgggtcgccagcgacaagctcggcgtgtcgtcggcggtgaagatgtgccggagcatcatgatcaaggggctcgaggccatggtgatcgagagcttcaccaccgcgcgggcctatggcgtcgaggacgcggtgctggcttcgctggccgagacgtttcctcaaatcgactgggagaagcagggcgcctacttcttccagcgcgtgatcgagcacggccgccgccgcgccgaggaggtgcgggaggtcgccgagaccgtgcgcgaggcggggctgacgccgtggtcggcgcagggcacggccgagcgtcaggcctgggtcgccgatctcgccgatgagggattgttcggcaccagggggacacccgcgttcgcccgcagcgccgactggcggacggaggccgaccgcatccctcgtgcc

SEQ ID NO: 86660 - DNA, 769 bp, Homo Sapiens
gcggccgctggcgggggtggtcttggtgattttgtatgacacccagttggcaaacttggtcgagccattattgttcagggtgtacgcctggcggttcagcgtcagtgggctgccaccgctggggcagccgaccgagcagttgtcgaactgccaggcctgttggggctgggcttgcggtgtgacggccgactcacgggttctgtccggtgtggtacaagcggcaaccagcgggatcaacagaaacgcgaggtgtttggacttcatacttccatgcatggtgtagctccttgggatgattcaatgacagaaggtctgtcggcggctgcgatccatcgcaagccgacataaacattaaaccacttaaacgtttcaaattgcgtacaggtttcagtgggcgctaaaaaaaccgatcacaccgccgaaaatcaggttgctgctgtgcttttgatccgctggggatcacgtcaatgcaggcgattggacgcgcaggccttacaatgagagggtctgctgcgggtgcaggcacgggcacttatcctgaccgctcacttattcccaggctggggctttaaatggacatcaagcaactcaaattcctgatcgcgctggagcagacccggcacttcggccaggcggctgcgcgctgccatatcacccagccgaccctgtcgatgcgcctgcgcaatctggaggatgagctgggcctggagttggtcacccgtggccagcgcttcgaaggcttcacccaggccggcgaacgcgtgttggc

SEQ ID NO: 86661 - DNA, 939 bp, Homo Sapiens
aatcctgcccagagtagagagctgagcttgaagagaaggagagaatctctaccagtccatgccccggctctgggctgtctgcaaatactgcacataaagtaccagagctgaccggggtgtccagcaaacaggaactggaagccagcggaagtaatgcaggcggctctccaggttcagtactcttcatgagcccagcctggctgaggagctgagccaagtcctggctgacagctgcactggggagcccaccatgaagtgcaagaccacctcccatcgctcctcggcgtacttgtcaagggagggaacgtcccgggcatgcttgtctggtcccagctgacttgtgtcatcagaccaggccttccccccacccagaagggcaatgcggaggttctggcggaaaatggggttgaggatgaggccctggagcccgcctgggagcagctgtgtgtgccagatccggaggccgctcagcagccctgtactttcctcctgagccttgctgaattccttctttacccacagagctacagcagcctgtggcaaaggctgctccagaaagagcatccgcatcacccagttcttagccaaggatgggagctccctgaagacagccagacatgtggcagggtgcccatacaatcggtccaataccccagggctcaggccccctaagaattcctgcagattcctgcattgtaggtgtactcggttcagtccccttgaaggggtgctctccatcaccactctgtcgatcctcctcgcgcaccccgagtctcgggccgtcgcttaatcggagccaagtctcgcattggctcctggagattgagggaaagatggtgaaaaaatgcgaggaaaagatggggaaagcaagaaagatttcacaggcagagcccagaatggagaattcagcctcgtgccgattcaaccccagcctcgtac

SEQ ID NO: 86662 - DNA, 1001 bp, Homo Sapiens
  misc_feature (556)..(597): n is a, c, g, or t
cagattaaaatgcagtcgacgaaaaagggccccctgacgaaacgagacgaggggggcccgtctggtgggccagcagtaggagcacccccacctggagatgaagcctcctctgtaggggcagggcaaccagctgcgtccagcaatctccagcctcagcctaagcccagcagtggaggccggcgacgagggggccagcgccacaaggtgaagtcccagggggcctgtgtgactcctgccagcggctgctgaaccttcccctggcccaccctcaccacccaaggggtcatcatctctggccaccactccaccagatgggcagagcagctatgaccgccacccagccctcccgctcaggccacagccggagcctccgcattgcccccacccccattttccaggggggttgtaatttataagctgacgaaggtagccagacttccggaggactgaccatctctcactgtcctccccaccttcttcctcactcacacattttttgtacatctgggcccttagtttttattctgtttattatatgtctctgtctctctctatnnnnnnnnnnnnnnnnnnnnnnnnnnnnnnnnnnnnnnnnnngtgcaggagtgccacccccagggccctgtcaacctctcttttctcctccatggctgtctgcctgcgtatctgtctctgagaatcctcggggcggtcaggggatgtcaggaggggaaggagccgccctccctatcttgctgctcctcttggcactcaggggcaccttccatggagccagaccgggtggaggggcttctgggatatggtgtctgctgctgccagagcaggaacccccagtctaggacttgggcattttaacagggagaaagtagtggcttcccttttctctctctcctcctttttccctttaagcccacagattcaggtcatgccaaaagctctctggttgtaacctggagacatgtggaggggaatggcgatgggattatacctcgtgccgaatt

SEQ ID NO: 86663 - DNA, 1235 bp, Homo Sapiens
  misc_feature (896)..(896): n is a, c, g, or t
  misc_feature (912)..(912): n is a, c, g, or t
  misc_feature (928)..(928): n is a, c, g, or t
  misc_feature (974)..(974): n is a, c, g, or t
  misc_feature (1095)..(1095): n is a, c, g, or t
  misc_feature (1153)..(1154): n is a, c, g, or t
ggacagaaaaaaatgcatgagctccagtccaaagtggaagatcttcagcgccagctgggaagagaaaagacaacaagtttataagttagaccttgaaggacagcgactacaaggaatcatgcaggaattccagaagcaagaactagaacgagaagaaaaacgagaaagtagaagaattctgtatcagaaccttaatgagccaaccacgtggagcttaaccagtgatagaactagaaattgggttcttcaacagaaaatagaaggagaaacaaaagaatcaaactacgctaaattgattgaaatgaatggaggaggaaccggctgtaatcatgaattagaaatgatcagacaaaagcttcaatgtgtagcttcaaaactacaggttctaccccagaaagcctctgagagactacagtttgaaacagcagatgatgaagatttcatttgggttcaggaaaatattgatgaaattattttacaactacagaaattaactggccagcaaggtgaagagcccagcttggtgtccccaagtacttcttgtggctcattgactgaaagactactgagacaaaatgctgagctgacagggcatatcagtcaactgactgaagagaagaatgacttaaggaacatggttatgaagctggaagagcagatcaggtggtatcgacagacaggagctggtagagataattcttccaggttttcattgaatggtggtgccaacattgaagccatcattgcctctgaaaaagaagtatggaacagagaaaaattgactctccagaaatctttgaaaagggcagaggctgaagtatacaaactgaaagctgaactaagaaatgactctttacttcaaactctgagccctgattctgaacatgtcactttanagagaatttatggtanatacttgagggcaganagttttcgaaaggctctcatttaccagaagaaatacctgctgctgntactggggtgggtccaggaaatgtgagatgccaccttggccctgcttgccgggatgggggggcagccagctttcacggatctagaaggtgatcaccaatcgcccaagggcttcaccaaggnttccggtcgggcgtcagagtattccattgccatttccagatggaaatttttgggttcnnacgggggatccaagtccacgggttctggtttccttccatatttaccaaaaatggggttttggactgaaactaagggggccg

SEQ ID NO: 86664 - DNA, 935 bp, Homo Sapiens
ctgacgggtgtcggtgggccggcattgtcagtaccgatgatggtgctcgcaggcttcgcccccttgacgacgataggcaccagtcaggtgatacagatcctggcgggtgcgtcaggcacgcttggcaatctgcgcttcggcgtcatcgatttcggcctcgcgggcgcgctggtgctgttcgaactggcgggtgtgctgataggcgcgcgcatcgtgcacgccatcaacgcgcagcgtctgcgcttctgggttggcgtgctttgcctggcggtcggtggcgggctgctggtcaaggctgtcggcggatactagaacgcgtgggcgcgtcgcgctcctcccactcgacaccggcctcggtgcaggcaatcccgattcgtgttgcgccctcgtggcggcgctgcgcgtgctggcgagtgacggcgcactgcggcaactgcggtggccgtatgtgctgcaggacggtgagtgatgactggcggcgacgcgcgctgtcgttgcgcggcgccgaacagctttgacctggaatgcctgcgggcggtcgactgcgctgcgatgagagggcagaaccggacgccgccggttgcgggccgcagcccgcaaccgcgggtcaggagatggtctggtagtacaggttctgcggatgattggcctgtgcgaagaaataccagcgttcggccagcagaccgacgtactggaccgcgaaggccagccaaagaagggggggcaaagcggtcgcagcacctgcgctgagcagcagaacaggcagcacgaaggccagcagcaggaaggtccacttcaccgagcggaggaagtgcagcgtcttgtgatggaagaattcgcgggtgttgaaggagccacccatcaaaccctgggaacgttgtgcgatgcgcggatgatggatgccgatcgcggtctgcagtgacgagcgcggccgc

SEQ ID NO: 86665 - DNA, 790 bp, Homo Sapiens
ccgaatcagctttgctcagtacacgtcttcggaggatgttcagcgcttcctcttggccatgcagcattttcgctgagaggcgttgagccgctgatggccgccaggattatgaggcaatcgcgggtgagccctggcgcgaagcacccaggaaccgcaacaacgccaccagcgggaacgcactgcccaccagcatcacgcccagccagccgccgtgttcatacacgctgctggcaatcgccgagccgaaggcgccgccgatgaagatgctggtcatgtacagcgcgttcaggcggctgcggctgttggcgtcgagggcgtagatggtgcgttggccgaggaccatgttcatctgcacgcagaagtccaggaccacgccggtcaccgccaggccgatcacgctgtacaacgggtgcacaaaggctggcagaaaactcaacgcggcaaacagcatggccagcagtgaagcgcggtgcgtgtgcccggcatcggccaggcgcccggcgataggcgcggcgatggcgcccagggcgccgaccagggcaaacagggcgatttcgctttggctcaggccgtggttacgcgccagctccaacggtgcagcggtccagaacaggctgaaagtggcgaacatgcagccttggtagaaggcgcgctgacgcagtagcggttgcttgcgcagcaaggtgcccagcgagcccagcagttggccgtaactggcgctgtggtcgggttggcgcttggggatagtcagcatcagcacggcactgataaacaccatcaccgcggccgc

SEQ ID NO: 86666 - DNA, 676 bp, Homo Sapiens
  misc_feature (462)..(496): n is a, c, g, or t
cctcactgtcatgggatgttgtatccagcccctccctgtcccacccggtggtgtgacatcgttgggtgaggtgtgtccccaacctacatcagaccatgaagttcaacccctccagggaagctcctgatttcccctgcataattgaaaataggatatttctcagctattgaacagttactaatttatggggtggaaacagcattaagaatactgaatcaaatggaaaaacaaatgaatacaggaagataagtgttcgttcttttctgaaaaagagtatgtgtaccacaagagctggttttaattgggtgaattgtttttgtcctcattctgtacagaaatttgtatatatgatggttcttagaacttgttttaatttttgtggtccttctgtttattataataggcgtccaccaatgattatccatatgtgttcttaatttttaactgctggaagtgttaaannnnnnnnnnnnnnnnnnnnnnnnnnnnnnnnnnncagaactccaaagtcctgaaaattttggtggacaatgatttttaaaaaactaactttgtataacctaatatttgtattctctcatctatatttttttattcactataatcatgatactcttctaatagacttaaaagttaatcattgacaacgaaaaataaaatgttattttaaaagaca

SEQ ID NO: 86667 - DNA, 1058 bp, Homo Sapiens
gcggccgctgatgtcggcgtcgacgccggtggcttgcaactcggaacgcagctggcccatcacgtcggtgataaagcgctcacggtcgagccgccgctcgtgcaacagcgtggcaatttgtttgtattggtcgggttcgaggtagcggaaggacaaatcctccagctcccacttgatatggccgatgcccaagcggtgcgccagcggcgcgtagatgtcgaacacctcgcgggccacgcggttgcgcttttcgtcgtcggcggtcttcaccgcacggatcgcgcaggtacgttcggccagcttgatcagcgcgacgcgcacgtcgtcgaccatggccaccagcattttgcgcaggttttcgacctggccctgggtgcccagcaccatggactgacgcgggctgaggctggcgctgatggcggccatgcgcagcacgccgtcgatcagcttggccaccaccgcgccgaaacgctggctgaccgtcggcaacgggatatgcccttcacgcacgccacgataaagcacggcggcgatcagcgaatcctggtccagcttgagatcggcgaggatctcggcgatttccaacccggtgcgaaagcttgaagtgccttcggcccacaggttcttggccgcattgtcttgctgttcagactcacgagcgaactcgcaggctgctttcaaggcttcacggtccagtgccgggtcgacactgacggcatgatccagccatgcctcgagattgatactgccgtcggtgttgatcggctggtgtgctctcacctgtaccatcttgcttaccttccctacgacgcaccttggatgcgccaaaaatcatcgctgacctgctgcgtaaccctagcggtgcaaccattaggctaggtaccactccctgacaggtcacggcccaggagacgacaggccagtcggattaaacgggcatcctagcccgcttcaaataacgccatggcctcgacatgcgctgtttgcggaaacatgtcgaggatcccggcacgttttagccggtagccttgcttgaccaactcaaccgtgtcccgcgc

SEQ ID NO: 86668 - DNA, 1197 bp, Homo Sapiens
gcggccgcgccgacgatcacccaataactgccaaatgccgtcagcgccaaggcactcaagaacgaaaacaacagcagcatcgaggtggcaccaaaacgctgcgccgcacgcccacccagcgggctcaggagcatctccgaggcatagcgcagtgccatcaggccgccggcgatcagtaccgcatcgccgccaagaatcttctgcgcctggatcgacaggccaaagataaacagcccgtccaacgccacgccttcgataaacgaccacaccgccacgctgtccggccacttgaagcggcgcccggtgctgtgcaaatcatgcccggcggtcggcaaaccacgtgccacccacacgcccgccaggcagcagccggccagaatcaggaagataggtcgcggcccggcccacagggtcagccagccccccagcggcagcgccagcatcggcccgagggcgatcaccgccctggagcgccctgccctgcgcgccgcgcccgcaggctcagaggtggccaacacttgggtcgacaggttcagcgcggcaaaacacaggccccagatcagccgcagccccaacaaagcggcaaaacctgacagcatcgagttgcccaaggcgcacaccgtggcggcaccggcggcgatcatgcaggtcagccggtcgccattacgggcgtagaaattcaacacatggcggtagccgaaaatccgcaccaggcggttggctgcaagcaataccccggcctgggccagggtgatgccaaaggcctgggattccatgggcagcagcaagtagagcaacacatcactgggcaggcataacgcgagggtcagtgcggcacgtcgggaggtggtatcagcagtgcgtagagccaggctggacataaatctgaaacatcccgaaatattcaggccgccacgttagcgttgccgccgcgtgttttacaagggctaaaccttgtgtttatacggcaacaagcgcaacccactggccacactgcccaccagcgcaaacccacagcccagccacagcgcgtattgcgggccgctgcccagggagaggtgaaagcagaacgccaccaacgacgcccccagcgtttgccccagcaaacgtgaaatcgcgacgatgccactggccccaccgctgcgggccaacggcgcgctggtcatgatcgccttgaggttgggtgactggaaaaag

SEQ ID NO: 86669 - DNA, 600 bp, Homo Sapiens
ggtgatgcaatcgcaggcaagccagctcccacagaacagcattgcccctttgggcatcaccaaattcagtggcccgtgccacacagggagaaaacatggctgttgatattttcatcaagatcggcgacatcaagggcgagtccatggacaaggcccacaaggacgaaatcgacgtgctgaactggagctggggcatggcccagtccggcaacatgcatgtgggcggcggtggcggcgcgggcaaggtgaatatccaggacctgtcgctgaccaagtacgtcgacaaggcttcgcccaacctgatgatgcactgcgccagcggtaagcacatcgacaaggtcaagctgaccgtgcgcaaggctggcggcgaaagccaggtcgagtacatggtgatcaacctggaagaagtgctggtcacgtccctgagcaccggcggctcgggcaccgatgatcgcctgaccgaaaacgtcaccctgaacttcgcccaggtgatggtcgactaccagccgcagaaagccgacggcaccaaagacggcggcgcgatcaagtttggctggaacatccgttccaacaccaagcgctgatagccctggcggccgc

SEQ ID NO: 86670 - DNA, 603 bp, Homo Sapiens
gcggccgctctatgccatcaaccaggcgccggccatcccggaagccgccttgccgatcgtgccggaacatctgaacggccgcgcctatacgatcttcggcggcacttcggagatccagcgcgacatcatcgccaagctgatgctcggcctttgacgcgggaggcatcatgatcgacagccatgagccggcaacactcgtcgacatggtccgcctgcaggcgcaggcgcgcggcgaggcggtcgcctttcatttcgaaggccgcgaaaccagcttcgccgacctcgacgaacacaccagccgtatcgccaatggcctcgcggcgctcggcatccggccggacgagcgggtctgctatctcggcaagaacagcgacagctatttcgagctgctgctgggcgcgatgaaggccgggatcgtgatggcgccggtcaactggcggctcgccggtcccgagatcgccttcatcatcaatgacagccgggccgcggcggtctttgtcggccccgaatgcatcgcgcagatcggcgccatcgcagcaggtctgcccggcgtgcgaaccttcatgaccaccgaaggcggcaaggacgactggccctcgtgcc

SEQ ID NO: 86671 - DNA, 722 bp, Homo Sapiens
gcggccgcgcacgaaattcttcgacacgcgccagaagacgaggctgcggatcgcccagcgcttcaccggcttcagctcgcgcgtgacgtgcatataggtgtcgaaggcgacggccttgtgctcgacctcctcgatcgcatgccacgtccacatccgcttcgcttcctcggaagcgccctcgaacatgtgcggattggtcagcatctgatgcgcgaagatcgcggtgaaatgctcgagcgcgacggtgacgcacagctgcgcgacggggtgctgcgcccgcgattcggcgagccgctcgcgcacccattcctccatcgccttggtttcatagcccgcgtcggcgacctgccgattgaaggcgacatgctcgcgcgtgtggtgaatctcctgcttcacgaacaggtcgatctgctccgccagctgggccggcacggcgtcgcgaaagcggcgcacggtctcgatgaagaaggcctcgccctgcgggaaggtgatcgacatcgcattgttgaaggcggtcgcgaacggatcgccgccgagccaccagcgctcgcggcgctcgttgcggccaaagcggatgttgcgcgggacgatggcgagatcggcgggggtcgcgagcgaggccatggcaagcaggtccaatacggctatggtcggtacgcgatcagatatgagatactgacaactgtgtcaatagagcaagcgaagcgtgtccgccgccctcg

SEQ ID NO: 86672 - DNA, 609 bp, Homo Sapiens
  misc_feature (24)..(24): n is a, c, g, or t
tcattattaatatcactatatttntggagagagaggcacctttctcatcctctcttcctctccgcccacccttactccctccccctcatctacctgtcaaagtcactgatcttgtgcatttcggaagaggacgtcaacgggaaggaattccccctctgggtgcgggctctgagagggggcgacttgcaggaggctccccccgggggcggaggcgaagggtgttggtgccagaagaaaagaatgattgatgggaaacagacaccgggctatagacactcatccttttgcttcagatactgatatctcagcctgcttgagcatcccttgtgagctgtgaacattgaggatcactcagggttatcggatgtacaacgggagagccatcgctttgctaaattattatctgcaattggacatcttttacaaaaaccaaactagacctgagtctaatagatatgttctaagacaaagaaaaagctgcaagttgttaacgcctaacacacaagtatgttaggcttccaccaaagtcctcaatatacctgaatacgcacaatatcttaactcttcatatttggttttgggatctgctttgaggtcccatcttcattt

SEQ ID NO: 86673 - DNA, 467 bp, Homo Sapiens
ggctggctgcgcagggccgccgccccgcgccgtcggctcggctcccgcccggcgcaagggcaaacgagccacacgggtgttggtgccagaagaaaagaatgattgatgggaaacagacaccgggctatagacactcatccttttgcttcagatactgatatctcagcctgcttgagcatcccttgtgagctgtgaacattgaggatcactcagggttatcggatgtacaacgggagagccatcgctttgctaaattattatctgcaattggacatcttttacaaaaaccaaactagacctgagtctaatagatatgttctaagacaaagaaaaagctgcaagttgttaacgcctaacacacaagtatgttaggcttccaccaaagtcctcaatatacctgaatacgcacaatatcttaactcttcatatttggttttgggatctgctttgaggtcccatcttcattt

SEQ ID NO: 86674 - DNA, 712 bp, Homo Sapiens
gtcggtggccgtgatcaccctgctggtgattggcagcagcgtcagcgccgccctcgccgacaaaaaactgcagcacaaggagcgtgacctgcgccgggtcaacgccctgctcagtgagctggaccaagcccgtgcctcgctgcaacaagtggcgcacttcgatgcgctgaccagcctgctcaaccgtcgcggcttcaaccagatctttgccgagaaggtcgccgaaaaaaccgccggccacggcatgatggcggtgatcttcctcgatatcgaccacttcaagcgcatcaatgacagccttggccacgatgccggcgaccaactgctcaccgtactggccgggcatatcaaggggtcggtgcgcagccatagcgatgtggtcgcgcggtttggcggcgacgagttctgcatcctgatcaacattcaccatcgcgacgaagcgcggcacctggcccagcgcatcatgcataagatgaaagaaccaatcgaactggccggccggcgcatggtgatgaccaccagcattggcatcagcctgttccccgatgacggactgacctgcgaagagttgcttaaaaccgctgacctggcgctgtaccagtccaaggatgccggtcgcaacagcttgaacttcttcagctccaaccttaaaacccgcgccttcctcgagctgcaactggaggagcaattgcgcgctgcgttgcgcggccgc

SEQ ID NO: 86675 - DNA, 740 bp, Homo Sapiens
  misc_feature (517)..(517): n is a, c, g, or t
gcggccgcgcagatcgcgcatctggctctcggtcgccgccttgacgtcgatgccgagagaacatcaccgagccctcggcgatccggcccgcacgatcgaggatgcgcatcacggcgtaagatgtcaccgacttgccggagccggactcgccgacgatgccgacggtctcgcccttgccgaccgagatgttgacgtgctgcacggctttcacgatgccgcgacgcgtggtgaactcgacggtcaggtcgctgacgtcgagcagtggctgcgcagtcatgcgcgcctcccacaaaatatcgaaaacaaccccatgcaaagcagtgttacggtagcatgacaccgcggcgacacagtcatcacgtcctccgctgcgggtcgacgatgtcgcgcaggccgtcgccgagcacgttgaagcagaacaccgcgatcatcagcgccaggcccgggaatagcgcgatccaccattcgccggacaccatgaagcccgcgccctcggcgaccatgatgccccactccngcggtcggcgggcggacaccgagaccgatgaaagagagccccgcggcgttgaggatcgcatagccccatgggtcagcgacatctgcacgatcatgatcggcatgatgttgggcacgatgtgcccgagcacgatgcggtattcgccattgccggacagccgcgccgcctgcacgaagccggcgttgcggcggacattggcttccgcgcgtgcgacgcgggcata

SEQ ID NO: 86676 - DNA, 1289 bp, Homo Sapiens
ggcggtcgtgagcatttcgatgtatcgatagcttgatcgcccgtacgactgcgccaggaacatgacttcccacacgcccattaccgagatcagggacgagtctttgagcatggagatgaactggttggtggcgggcggcacgatggtgcgcatggcctggggcagggtgacgtgccagaagatcgcgctgtcacgcatgcccagggccagggcggcttctcgttggccgtggggaacaccgaggatgccggcgcggaagatttcgctcaggtaggcgccgtaattcagtgagagcgcgatgatcccggcgacgatggcgcctggtaccaggcccagttggggcaggcccagataaatcagcaggatctggatcaacaacggcgtgccgcgaaagaacgaggcgtaaaaactcgcaatgccaaaggccacggcgcttttcgacaggcgccccagcgcggtgataaaacccagcaccgacgacgcgactatcgagcaaaggcacagaaacagcgtcagcgctgcgccttgcaaaaaaaccgttcggcgccaagtgcacaccgaccaggttgggcagcttgtcgaggatgatcgagaattcaggtcaaagctcacgaagaagctggcgaacaggcaaaacagcgccgccccacgtcaggtacaaccgcgtacgaaagccaaagagtcgctgtagccgcgatgcgttcaccggcggcttgggaggtgtcgggaaggcggtcatttgctgatatcggcgccgatccatttttgcgacagcttgctcaaggtgccgtcctgtttcaactgcgcgaacacttcacgcaccttggcatcccactgcgggtcacctttctcgatggccaccgaattgggctcggcatacagcgactcaccggcgagcttgaagcgcttgtcctgattcaggcgcggttgggcagtgaccaggttggtgaggatcgcatccaggcggacaccggcgcccaggcccaggtcctggaaggcgacgttatcggtgtcgtacggggcgatctgcacatcctcgaacgggtactgaagttgcgtatcttcggcgccttcgatcaccaggttcttgttcaggtagctttcatagctggacgcgctggtgaggccgactttcttgccgctgaggtctttggcgccatggatgcgctcatccttggcattcacaacgatcaccgcaggcgaggcgtagtactccaccgggaaatcaaacacctcggcgcgggctttgctcggggtcatggagcagatgcaaatatcgtagcggccgc

SEQ ID NO: 86677 - DNA, 534 bp, Homo Sapiens
  misc_feature (46)..(72): n is a, c, g, or t
gcgtattcatataacgagatttatatacgacagaaaatagctccannnnnnnnnnnnnnnnnnnnnnnnnnngccaagcaatcaagcaaaacacaagaccaatagaattagtagacagaagccttggggacaatggcagtgcccttcctgagtaagacatgaatgccatctggaggatccatttgaaactacagtgcagtaaccaaagaacctaatgttttcaagcataaaggtactttttgtgaacaggtgggcaacacaggcaggaataactaccttcattctatggacttaaattcctatttctttctagcttccagtagaagactcttgagaatattgttgttgagtgaagtactttccgctgaaatgggaaatgaacccctagagtcttacaagtattattaagcatcactaaatacaggtcaggaagaattaggcaagagagaagcaggcaaatgtgtcctgtttgctgtgtcctgccatctcctctccctacactgcatttcattcatgagaagatgtaaatgactg

SEQ ID NO: 86678 - DNA, 648 bp, Homo Sapiens
tgtcgaacctcgatgccaacctgcgcgaggaaatgcgggtcgagatcaggcggctgcacgacgaatatcgctacaccaccgtttacgtcacccacgaccagtccgaagcgatgaccaccgccgatctgatcgcggtcatgaacggcggcaggatcgaccagctcggctcgcccgaagatatctatgcgcggccggagtccgaattcgtcgcgcgcttcatcggcgccagcaatgtgttcaagggcaccgcgcgcgatggcaaccatgtcgcgttcgcaggcaataccttgcgcgtgatcggcgcgccgctgaccgcaggccaaagtgctgcggtggcgatccgccagcacgatatcgcgctgtcgacgcaggcgccggcctcgccggacaacgtgatcaaggccgtcgtcacccgtcaggtctatctcggtgccaacagagactacatggtcgaggtcgccgacggcaccgcgctgcgcgtcaccacgccgaccgacgtcaatgtcggcagaggcagcgaggtctggctgaccttgccgcccgaccgctgccgcgcgctgagccggtgaaataacaagaagaagaaaaggaggacgtgatgaaaggacggagactttcgagacgcgacgtcctgcaaggcgcggccgc

SEQ ID NO: 86679 - DNA, 703 bp, Homo Sapiens
gcggccgcctactgcgctcctgaaggaattacgcgaggcgatcatgcagcggcactacctggcgcgtgcacgccggatctggtgggagaaactgcaaacggtttgcctggagaaccattcctgggattgggacgctggtgaattggttcaagggttggttattcgacgtggtgtctatgtcatcgcaagcgcccggcacgatgtcgtagagcaaagaacaattttgaatctggtcagagcgccagattgcgtggggattaatttatgaaaatcgtaaaagccaaagtcgtaccctataagccgctcactgacgccgatgtcgacaaggccatcgcccgtgggcgcaagctcaaacgtctgtacgcaaatgccagcaatgtgcgctatgaacacgagtgcatttccatcggtttcagcgacggcagccgcgtcatgttgcctgtagccgggttgccggagttcgaagggttttccctggaggactttcagcaactggaggtcggctttggcggcaaggcgctgtgctgtgaggcgcaggatctggacgtttcgatcaccgggctcatcgccaccagccagcccttgatggacctggcgacaagcctggtagcgtcgcgcaacggtcgcaagagcagcgccgccaaaaccgccgccgcccgagccaatggcaagaagggcggtcggccacgcaaggagccgttgg

SEQ ID NO: 86680 - DNA, 1248 bp, Homo Sapiens
  misc_feature (143)..(152): n is a, c, g, or t
gcggtcgcgcctgtagttcacaaaatgggtgtgtatgggtgggaagaaggagagaagtagcacatttggtatgtggttgggagctgataggtttttaaataggactcttgactgaacattttctttctctatttcttctcttnnnnnnnnnntttccaaaaccagaaagacctctagttttccagactcccggagccctggtctctacaccacatggacgttatccacctcctctgtgtcctcccaaggcagcatttcagaaggtgatccacggcaaagccgtcccttcaaatccgtctttgtgcccactgccatagtcaaccccgtgagaagcacagccggccctgggactttaggacaagggtctcttcggaaagggcggagcagcatgagaaagaatggatccctgcagagacccctccagtccgggatccccactctcgtggtaggctccctcagacgcagccccaccatggtccttcggtctcagcagttccaattctaccagccacaggggatcccctcctccccctcagccgtggtggtggagatggggtccaagcctgccctcacgggggaacccgccctcacgtgcatcagcaggggcagtgaggcccggatccactccgcggccagctccctcattatggaagacaaagaaatccccatcaagagtgagcctctgccaaaaccgcccgcatctgccccaccatccatcctggtgaaaccagaaaactcaagaaatggcatcgaaaagcaagtcaaaaccgtgagatttcagaattacagccctcctcccaccaaacattacacctcccatcccacctccggaaagcctgaacagccagccaccctcaaggcgtcccagcctgaagcagcgtccttgggcccagagatgaccgtcctatttgcccaccgaagtggctgccactccggacagcagacagacctccggagaaagtcagctcttgccaaggccacaaccctggtgtccactgcctcaggcacgcagaccgtgtttcccagcaaatgaacctacgggtggcttttcctagaccccaaagaggtgaattgcatttaaatacagtctgcctccactgagggcatcctgccattctttggggacttgagcatgggtccttgttcttcctatttcacctccaggaaagcaaaagtgggagcagaaattcctgccctgggtgggaggatagatggcgtggccttccaaacatacaaacataatgattt

SEQ ID NO: 86681 - DNA, 561 bp, Homo Sapiens
gcggccgcaatcttccataacgtgctgttcgccgacatagcgaacgggcacttgcttgccatcgctgttggtcagggtgatgccgaagacgcgttcgcactcaaaaatgccctctgcgtggtggcggagcgcgcgatggcggaaatcggcgtagctttccttggtggcatcgaaccagttgtggatctggatataatctgaggcgaggccgccgaagagcttggcggacgacacagcgtggtagtgcgggtgggtcattgtggtttcctttctgaccggccgctctctctgaatcgcggcccggagttcgccgggccagcgtctcactcgccctttccgggtgttcgggcgcatgcttggccgcggacgtttatgggtgcgggcgcgatttctgaacgtggcgcggcatgaaggaagctgagagtttcccggtatctcggtcgaggtggcgagcgatgccgacgacatcatgccagaagcttgccggttcagcggtcagcaatgccgggagatcgaggggggtgccgttgcagtgggtgagaatgatttcgacctcgttcc

SEQ ID NO: 86682 - DNA, 701 bp, Homo Sapiens
gaattcggcacgaggcccagaactggcatttttctgaaaataataagtaaaataaaaatctaaaggaatgtttatgtgagatataattgcccctggtaacttaggaactggagaaaagtaaatgggttcactctgtatggtgtgtaagaagcggcattacctttttgacagttataatcccttcctgggtttcctggtcggtgatgacatcaaacatatccagcccctcaccgtctgtgatgctgtactcaatttcagcattttctcccacatcagcatcgctggctttgattctgccaattggtgtccccggtggagaagattcaggagttttaaactggtatgtactctgggggaatcggggagggttgtcgttgacatcagtcagtgtgatgttcacggtggtggtcccagataatcctcccatctggccgcccatatccttggcttgaatcaccacttggtactgctccctgttttctcgatccatgttgagcaaagctgtcttgataatacctgtttctgattcaactgaaaaatagggctgtccctgtagaatactgtagacaactttagcactgttcccatatgttggatcatctgcatccgtcgcagtgacttggacaacaaatgtaccgacatcagacatttcagggacagtggcggtgtaaacctcccttggtgaatattggttcggccgc

SEQ ID NO: 86683 - DNA, 736 bp, Homo Sapiens
tcaagtgatccgttcagcgtgaaaactgtactggcgggtgtggtctgagatatcactttctatcaccggttgtgattcgtttggtcgtccgctcgcgcagtacctgcatctctccgcatttggtcttgatgagtgagtcaggcttgcagagcttttggtagatgtcatgagggatctgggtgtagccctcagatgtcgtggaatggctgtgaccatgccctatcgaaagcattccgaggcgctcgaaataatcctttcccagatctgggcttgtgaggaggagatacgccgagccatgacgaaatttgtgcgccgagatctttcgcttggtcttcccagccttctgggcccgcttgcttacacgctcaataagcttttcaacgctcttggtggtatagggcttcccatgtgaattgaaaaacgcaggcgtcttacttgggtctcttatccgctggctatgtcggtggtagagcggtgttctgtgatagttctcgatgcgctccagggttgtcctactgacgagtgttatcctaggcttttttgcattttttctacccttgcttcccaagatatgcaacggactgtaatccgcattcaccgggatattactgtcagcggaaacatactggagcttctggtactcaagtgcattgcggatgtcctgaagcgtgatgtgaggcagctcagactctcgaatgccagagtcgtgttaccattctgatgttggagcggccgc

SEQ ID NO: 86684 - DNA, 658 bp, Homo Sapiens
ccagcgcatgctgcggcgtttctaccaggaccttgccggcaccggcgcaccgaagctgctgcgtgtggaattgctggtgcatccgctggacacgcccaacaccctgaccggctcgggcctggcgattgccaacccgccgtgggggctggaggaggaactgcgtgagctgctgccgtggctgtccaagaaacttggtcagacccagggtgggtggcagatggattggctcatcgctgagtaatgagtcgcctgtcggaacgctatcgcgggcaagcccgctcccacatttggaatgcattccaaggtgggagcaactgtcttaacccaccgtccgtcagcgccattctgtaccgtctcgcagcatggcatttagtctgatcagcagtatccgcatgcaggcgatgagcgcgactttcgcgctcttgcctcgctcccttagagcctcgtagcgcgttttaaagtctgcttgaaagcggataacaacccaactcgacatgtataacgcatgcctgacacgggttcttcctccgtatatctgccgttttccattgtggtttccgctgtcgtcgttgtaaggggctatgcccgctaacgccgccacttctctgcgatccaactcgcccaactccggcaagtaaaccagcaaactggcggccgc

SEQ ID NO: 86685 - DNA, 406 bp, Homo Sapiens
  misc_feature (393)..(393): n is a, c, g, or t
acatttgaccgcatgtggcttgatatcgagccacattggccgacatcgcaccctcgccgcgatagccccatcgcgggcacgcgaccagacttcactcatcggcgccacccccggcgctttgttgaggagaacgaccatgagcaactccatcgcaggcatccagatcccggacagcgccctggccaaggccaccaccgaatacatccgcgacgtcgagtccgacttgctttaccaccactcgcgccgggtgtttctgttcggtgcgttgagcggtgagcgcaagcaactggcctacaacccggaactgctttacgtcggcgcgatgttccacgacctgggcctggtcgaaggccatcgcagtaacaacgagcgtttcgaagtggacggcgccanacgcggcggccgc

SEQ ID NO: 86686 - DNA, 535 bp, Homo Sapiens
gcggccgctcggtcttcggcgcgctgacattcaagcgggacgccgaggtccgcgaccgcatccacgccatcgccgagacgatcttcctgaaggaccagctcaaggagcgggccgagttcctgagccacggccagaagcagtggctggagatcggcatgctgctgatccaggatccggagctgctgatgctcgacgagccggtggccgggatgagcgtcggcgagcggatcaagaccgccgaactgctcaaccagatcatcaagggccgctcggtgctggtgatcgagcacgacatgaagttcgtcgaggacatcgcccaccgggtgacggtcctgcaccagggcaaggtgctgtctgagggttcgatggagcgggtcaagaacgacccgaaggtcatcgaagtgtatctgggacattgacgatggcctcgcttcagaccgcgcacgcggccaccgtccaggcccccccgctcgccgcgatcccgtccgcgacgccggcgctcgccgtcgaggacctgcacgccgcccctcgtgcc

SEQ ID NO: 86687 - DNA, 662 bp, Homo Sapiens
  misc_feature (377)..(467): n is a, c, g, or t
ctgagccacagcatctggtctcatcgcaaatttgatgtttcttcttgtttcagttttagcagaatttacattgccttgattgagtctcttttcaaactcatgtcttacccatctgagtgcctcaaaccaaaccctgttcagacatgttataacggatttgtaccagtttatcttggtgcaaaaaatgtgatatcatgcacaattttctcataatatgtatttttccatgaacttcctgaagaccccttgtactagcgaactgtattcaagaggttataaaaaggattgttgatatgcaagtgccacttatttctgggatgcaaaatggttcaacatagtcaagcaaatcaatgtgatataccacttgaacataatgnnnnnnnnnnnnnnnnnnnnnnnnnnnnnnnnnnnnnnnnnnnnnnnnnnnnnnnnnnnnnnnnnnnnnnnnnnnnnnnnnnnnnnnnnnnaaagagaaggaaatttacctcaacaatacaaagaccatccatgaaatgaccacagcagaaataaccagtcagggaaaatggaatgcttttcctgtaggatctcacatgatgcaagaatgctctcaccccttctattcaatcaatactggctgtcctagctagagcaatgaaatagcaaaagaaatcaaactcatc

SEQ ID NO: 86688 - DNA, 686 bp, Homo Sapiens
  misc_feature (634)..(634): n is a, c, g, or t
gcatgcaccatagaaaaagatttgatctctaacaaacatccagaaccaactattcgtctccttggaacgaagaagactgggacatgactggaacccgaacattcgaactctcagaagggaagggtctcttggcccagaagataggggctaaaatccacctcaacataccgtaccataaatggccaaatttgaaggccttcaaacagatcctgcccagccaacatttctaagtcctttcctttgccctctgcttccttagaacttgccccagacccaaaatcagggagaaagatttgaacctgcctcctgtctccttgctggctggtcttgcaataaagtctttcttttctcaaaggcagtaccatggtattgcttccgtgtacattgagcagtgagcctgaggcaggaaaatagggtcaggaggcagggaacataaggccaattcacacttcggctgtaacaggaaatatccactccatagggcgtatgctgtaagtgactttgtaactttacttcatcctctgcatttacgtagagggtaagtgaagtaaacaatggaatcatctaggggatatttaaacttccaaaaattctgtaacggggcctttgagcccctatgttcgggccgctcccnacactgtggaatgtaatttcgttttcaataaatcccttcattccttccttgc

SEQ ID NO: 86689 - DNA, 866 bp, Homo Sapiens
cggcattgagggcttgcgggtcggtggcgtcggccaccagtacgccgggccaggccagcacttccaacgggttcagcgcggccggttgcttgatcaggctggcgatggtttcggcggcggctaccagttgcgcggcgcgatcgcggtcgacctgcagcggcttgccggtggtttcttcggtaaaacgcagggtgcattccagcttgccccgcgagataccctggcgcaacgcttcacgcacggcgccttcgaggtcgcggaaggattccggcaggcgcaggtgcggctccaggtagcggctgttgaccgagcgcagttcccagctcagggtgccctgggcgccggctttttcgacgcgggcgaaggcggtcatgctgtgcaccatggaagtacctcgcgatgcagacccgcaaatgcgggctgatgggtaaattttgaagccgacaggctgcgaaggcgcaggattgtagcgcagtggggcgagcgcgcccaaacaatgggcgccgaccaggccattcgtaaccgaattttttagaagtgccccgaaacggttcgcggctctataatgctcggcagtttttcgtccttcgtacaggtatcccctatgaaacgtccaagtggtcgcgctgccgatcagctccgctcgatccgcattacccgcaactacaccaaacacgccgagggatctgtactggtcgagtttggcgataccaaagtgatctgcaccgtcagcgtcgaaaacggcgtgccgcgcttccttaaaggccaaggtcagggttggttgactgccgagtacggcatgctgccgcgcgctaccggcgagcgtaacacagcgtgaagccagccgtggcaagcaaggcggccgc

SEQ ID NO: 86690 - DNA, 662 bp, Homo Sapiens
  misc_feature (286)..(302): n is a, c, g, or t
tttattcattattttttaatatattgagacacttatgcttgtagaagatttgggaatgaatcactgatgggtatacacagaaaattttttgaaacactgttaatgccaaagacaataaaagttacataagtaaatttaatcatagcatactacatagctcagctgtattagttatgtagacttttgatctaatctataattgtgacaaaactataccgagagaatgaagaagtggaaatatatgtggaacagagccttcctccatggtatgaaatagatttctttnnnnnnnnnnnnnnnnngaagtgaacaatataagcatattacttagaaacatggaggtatatacctgaaaaactcaagagttgaaagtggtcacctctggggagtgggaatcttgaatgggaggaatgggctggggcttttttgttataagccttgactttttaaattatgatcatgtgtaactgataaaaataaaagttagaataaaagcactagcacaatgtctgccataaagtaggcccttgataaagaatggacatttatctaattgtcccatctctccactgctgctgccccacttcttgcattcagcaatatagacatctgatccgttcctcaagattctattctcacccttcctaacaaagtatgacagg

SEQ ID NO: 86691 - DNA, 1093 bp, Homo Sapiens
gcggccgcgctggattgctgcaacagctttagctctggggatagcagcactgccggtctaccgagcgtctgcagcatattgctgtgatccctgggggttcgtgggctattccgcgttcgttcaggccggcgccagtatggtctcggattttacttcttgggccagcgacattgtcgaagtgcttgcaggcgatatctacccggattggtggtcgggagtgaatggccatcaggcagtcatgacacagcagctcgctgctcagcaggcgctctttgagggtaaacaggcggtcgacgctaacctgcaggcccaagagcgtgccggtagtgcagccgaggagagcatccctgcgagcagccaggcagaaacaatggctagcgtacaggcggttggaagcgcgatggttggaagcgtccggcaaactgctgctgaaaatcgcacgctgctagacgccactcatggagctttctaccaagaccaactcgcgctgatccagcgtcacgtcccttactgctccgatcgagatgccagcgctggacggtgccaagctgtggctgccgccatgcaggatcgggacatccgtttcgacaggatgttggagccaggggaggggagaaagacctttaatgaggccgagatcgaggccgcccgagccttcgtcaagaacgttacgtttgagatggccaccaagcttcccgataccggtagcccgcaaggaaaggccctgcgggcgcacgagttggctgatgacgcggtgatgtcgctggccagcaacagcctcaatgggatgattgccaggcggtctcctgttgatggccaggcctcgttctacgagttgatgtccaacgaaatcgaaaagcgatttctctctccggagtggtacaccgctgaaagcgggaagactactgctccgctgctgaccgagtatctgcacatgcaagccctggaagatgttctggcgcttgaacgaagccgagcacgcgagcggatcgagatgatgctcgcgctgcagaccgagcggctgaatcggaaggacatacagccccgtcttgaaaatcagcgcggcgctgccgctagggcagggcagtaatgc

SEQ ID NO: 86692 - DNA, 766 bp, Homo Sapiens
gcggccgccggctctacggcgagctccgcttccgatcgagccgcaaccgctttgcgccgggggtggcggtcgcggtgtcggaggtcgaccagctgctgccgcttccaccgagcgacccaccgccgctgcccgatgccgagcgaacgcgcgattccgcgcgccagctcaccgccgggctcggctacgaggcgacgctgggttggctgcggctcaagggcggcgttcagaaagccttctaccgccgcgatttcgaagccccggcgcagccgcagacggcgacgcgcgaggagccctggctctacgacctgtcggcggtggcagcgctcggcgagcgctggaccggcttcgccgcgatcacccgcgggctcgaggacagcggcgtcgcgccggccaatgcggtgaatcgcaaccaggtgctccccgcgattgtcgccgagcagcgcgagatcgggctgcgctggcgcccgaccgacgcgatgacgctgatcgcctcggctttcgcgatcgacaagccggctgccgtgttcgacgccgccggccactacggcctgtcgggcgagctccgccatcggggcgtcgagctgtcgatcgccggccgcccgatcccgtcgctacgcgtcgtcgggggcggcacgctgctcgacgccgagcgttcgggcgagcgcgtcgacctcggcctgatctcggcgcgagtgcccggcgtgtcgcgctatcagggcattgccggcgcgacgtggacgacgccgctcgacggcctgtcgctcga

SEQ ID NO: 86693 - DNA, 716 bp, Homo Sapiens
  misc_feature (83)..(83): n is a, c, g, or t
  misc_feature (111)..(111): n is a, c, g, or t
  misc_feature (146)..(146): n is a, c, g, or t
  misc_feature (706)..(706): n is a, c, g, or t
tgcactaccggcagcttgatcgttcccacgctccgcgtggtaacgcatcttgtgacgctctgcgtcacggcgtcagaagcggnacgcggagcgttcagggcggcattcctntgcggcgcgtgggaacgatcctataggcactcctntgtgtgtaggcaacctctgatccgacccggctcgccgcactttttttgattctcctgatctatccctgtcacgaccccactcattcagagtgtgggcaacagaatcagacccggtgccgatggatcgaacgtcacatacttgtatctcccgctggccgttgtttttggttgttcttttggcactgtttaccagtggttgcagccagcagcagggccgcgatatcgccagccagttcagcaacggcaggcccgatgagttctttcagaccagcgttgaccgcatggcaaccctgagcatgcgcgacaacttgcaaagcctgtatctgttgatgagcaagctctacctgcgcaaccccagccagtggcgcctatccggttacccggatgcggtgagtgccgcgcgggaaatccgccaggctatcgagcatcagcaaccgctgccggccctcggcgagcggcgcgatctcgcggccttgagttactcgttaagccccgacttcaaaggcgaccgggtcggtgcgtttatctacgcgatcggcagcatgcgggtgaccgcccancggcggccgc

SEQ ID NO: 86694 - DNA, 512 bp, Homo Sapiens
gcggccgcaaggccccgccgggttaccacgcgcacctgggcatgctgtacctgagcatgggcaaggatgaccagatggtgcaggagttccgcaccgagaaggcattgttccctgagtccgctgcgtacatggactttttgctgaaaaacgccaaggctggagttgccactaaatgaacctgttaaaactcaccggcgccttgctggccctggcattgctcggcggctgcgcggcgcccaagaccattgattacacagcgttcaaacaggctcggccgaagtcgatcctggtactgccacccatcaatgagtcgccggaagtgcaggcctcctacagcctggtttcgcaggtcacctacccgttggccgaagccggttactacgtgttgccgattgccctggtggacgaaactttccgccagaacggcctgaccaccgccaacgatatccagggcgtggcgccgggcaagctgcatgacatttttggtgcggatgcggcgctgtcctcgtgcc

SEQ ID NO: 86695 - DNA, 665 bp, Homo Sapiens
taagcttgcgccgcatcgggtcaggtacgcggcggcgatggccatgggcggcacgatatgcactgcgccgcccgtggacgccgaggtgccggcgacgatatgcacataatccagctgcgtttgcaggtgttgcacggcctccagggattcgctttcggtaaggccttcgctgtcgcgctcatcggcagaaatgcgcaggccgatgatgaactgcgcgtcggtcgcggcccgcacggccgcaataatttcccgcaggaatctcaggcgttgttcaagcacgccgttgtagtcatcggtgcgccggttaacccgtgggttgagaaactgcgcgggcagatagccgtggctggcgaccacttccacgccgtcaattcccgcctgatgcaggcgcctagccgccgctgcgtaaccgctgacgatctcatcgatcatcgcctggtcgagcgcccgtggcatcacccgaaaccgctcattaggcactcccgacgccgagtacgccaccgccagcaacccgtctgccgactccatgatctcgcggcccgggtggaatatttgcgacagcaccacggtgccctgagcgtggcaaatatcggctaactcacgatagccgtcgatgcattcgtcgtcggtggccatcagcacatgggaggtgtaccctcgtgccg

SEQ ID NO: 86696 - DNA, 657 bp, Homo Sapiens
gcggccgcgttaacagggcgcccgccgcttcaatgggaaagagtgcgtgcgtgcagccggccgaaaccggggtgggctgcctcgcgaaaatagacgtcgtagtggccggggcttaccgccagcaaggtgaccggcgcggtgtgtgcggcagcgcaagagcgtgggcagccggacaggtgcacctcggcgccaggttgcagcgcggccagttgcagggcatcggccttggtgtcggccaggcctttggcgcagccgcttgagccggtgcaggcgatcatgcgtgccaggggttggtcgactgagccaaggaagcccaattgctccaagccttcagtcacggcgccgtggtttttaaggttgggcagcagtacgccctgccacggcgtaaaacgcaacgtaccgtcgccgaactcactagccaactgtgcggcgcctttgagcatgcttgagtccagacgacccagcggcgcaacggcggcaacgtaaaacagatctttttgtcgctgtggataagtgcccaagtgcaacaagtccccactgggctggcgttttaacccatccaccgacagtaacggcaggttcaggcgggccaataagttatccacagccagatgacgcatgcgggtttgcgtcggtgtcgccctcgtgccgaattct

SEQ ID NO: 86697 - DNA, 794 bp, Homo Sapiens
actgctcatgctccctttctcaagaaactgttatgaatgtactccaccaaggcaagaaaggaagaagacatggaatttaaaaaacaggatctactatgaaagagaaaggtgaagggaattccaggctgatggtaaatgcaaattccaggatgagagttgggcagcaggcctagagtgcactccgtcctgggaggagccagatgatagagggctctaggagagaaggctccaagggaaaatgaaacaagtaagtgacctgacgtgtgtctgaaccagcccagaggagatccatagttctgataaggagtctggggtggaaataataggtacatggaacactatgcaaacaaaatactaattattaatcctgggaaataaaagtaactgcagtttactatgtgactcagctataaataatataaatactgtatattaacctgataaaaatgatgatttacctaaattgggaggatggggaagagaagtatttgtccggggacaggggagctgcaagagtactaaaccgtatctcccacagtatgatgtcaaaagataatataaataaataagaaagaataacgcatgcatgtaatttagaagtataatgataattaccagaaagaaatgaaagtggttgcctctgaggagaagaaggaagaaggattaggaatggggaaaggtaatgcagggaactacttactgcttcttaaaataagttataactcctacacacttataacactgtattttttttaaattatacatttgtattcataaaaaaaatccctttttct

SEQ ID NO: 86698 - DNA, 553 bp, Homo Sapiens
ttagggacccactgttttcatttcttcttggagtttaccttgtttcagatgcagccatgggtaggtcagagatggattgttggtgcaataaacccaagaatcaatgtagcctcttaatcccatcaagatgtagtttgtagcagcaaagtgtacagtctgaaaccgtatgttttatccttatattttagagctttcagcagcctttttaagagaggccacttaccaaagttatttctataagctcaagagtgtttcggttggtaagttcttccagctgaagccactttttccttatagttaatacaaatgactatttttactttaaaaggcacagctgtcctggtgggaaatgaaacctgcagcagttcaggatgactaatgaaagcaattagcttgaacatttagaaaaaattcatatatgatctaaatttttatattatcatttctgtgccttctaattcctgcatcctgttcaaaacatctttccagacattaacttacacattgtataaaaccgaccaaaatgatttcctaaagttcataccctggtgcc

SEQ ID NO: 86699 - DNA, 691 bp, Homo Sapiens
  misc_feature (46)..(65): n is a, c, g, or t
  misc_feature (69)..(70): n is a, c, g, or t
gcacgaggtgcactccagcctgatgacagagtgagactccatctcnnnnnnnnnnnnnnnnnnnnaagnnaaattcacactcccaagaatgccataaaagcttcttcattatcattgatcttcagccactgatctgtccagcctttcctctcctgcctcttcttgcttctccaagcatttctacttcttactctagctaccccaaactctttgcaatctaccttggtactttccccatcctattattgaaaacctgcatgtttttaagacgggggcaactatgctatattttgaggtcttgtcactcattctacagttccctcaaggggaactgaataaatcctttcattaaaggaatcatctctgtagattcagctctctctacatgaatgcctttctttccttttctgccttctgtctgtaccactccctctaattcatctttcaggtctcacctaagcttttgcttcctcaagaaaccatgatttgaaagctctccctacacacatacacacatgtgctctaatttaggtatcactttattttcttagcaaattgttcagaatcctcttagcaatactgaaaacacagaattcattgtgatatctttctacttgcttcattccccctgactctgagctaagtattgtactaggaattagtctccttcatagcctacagccgcggccgc

SEQ ID NO: 86700 - DNA, 769 bp, Homo Sapiens
gcggccgcgccggcgacgtcgagcacggcggaggcggtcaccgccgagacgacgatatccgcgccggcaatggcacgggcggcggaagtcgccggcgtcacgccgatgccgccggccagcgcgcgatgggcctcggccctggcggtgtcgtcgaacaggatgtcataggccgtgacgctgacatcgccgcgcgccagccattgccgggaaaaggtctggccgacctcgccgaagccgatcagcgccaaagacaaggtgttggtcatagatccccgccggcccgcaggggccgcccagcgtgaacgtcaattgacgacacagaagcgaaagccgacccatgaatcaaatgagagttttgatgtcactctcccaacaggctcagctatcgccgtcgcctttcgccccttcacgcaaatgggcgacgatcagttcgagcaaggtcgccgccggcggcgacggcggaatgccgtgcttggagacgatgccgagcgtgcgggtgacgccgggattgcgcagcgacagcgcgacgacgccggccgggtcgaccgcgccgaaggccaggcgcggcacgatggtcaggccgatgccggccctgaccatgctgaccgcggtcgccacatgctggacctcgtagcgccagtcgagattttcccggcgcgaaccgagggcgtcgtcgatcagcacgcggttgccggtctgcggcgcgatgcgcaccagcggcaccccttcgagcgccgaccagttgaccgccggctcgcgcgccagcgca

SEQ ID NO: 86701 - DNA, 848 bp, Homo Sapiens
ggcgccgatcagcagatggccgcgcaggtcggtggccatcgcctgcagctcgttttcgagactggcgaacaggtcgaggatgcggtccgcgtagtccttcaccttgacgccttcgggcgtcagcgacacgcggccgtgggcgcgctcgaacagccgggtgccgaaatgctcttccagctgcttgatctggaaagtgaccgcaggctgggtcatctgcagcagttccgccgcgcgcgtgaacgacatctggctcgctgctgcgtgaaagacttccagccttctatcgggcatttttccctctatataagtgacgcctgccctcgtggttatagaccaagtcggggttggcgggtaaaccaaaatgcgtcagtggacgcgatgcgacagcagcgctgcggatgtcgaaatcgtgttgcggcgcgacaggatacgctttgtgacacgaagcgcgggggtggcaagggcgtcagggggttcatggtataaaggcgcacttttttcgcccggccggcggccagatccggctgcagacgttcgatgccttttggcttctacatcatcatggcggcgcagttcttctccgcgctcgccgacaatgccctgctggtcgttgccatctatctgctgaaggacatgcaggcgccgggttggcagattccgctgctcaagctgttcttcacaatttcctatgtggcgctggccgctttcgtcggcgccttcgccgactcgatgcccaagcggcgggtcatgttcatcagcaacatgatcaaggtgggcggctgtgtgctgatgttcggctgggtgcacccgctgttcgcctacgccgtcgtcggtcttggcgcggccgc

SEQ ID NO: 86702 - DNA, 626 bp, Homo Sapiens
  misc_feature (75)..(75): n is a, c, g, or t
tctgatttgttttttgggcaatagaacactttctggcattataggtacttcaatatgtgtccttcaatcaccctngaagtgaaagcagtcctggcaacttaatatttgcctccagatgggtctctagtcagttcatgctgaaacacagctctgccacccacaacttggagctgaccagcccccagggaacatggaagaggacaggacacacctgttctagaaaaccaggtcctcagtaaacactgctgggaatgaaagcctaaaattatacagtactccattcctgtgaacgggccaaaggatgacgggcaacacaggggaaacctgttttcacatttggtcatctcctcacatgtcgtgtgagctggaggagagccgtgtaacacgagggcttgctttgcccctggaaagctgcccctagcatagtatctccaggcaaagatgccatgctcactgcaaactatggaatgaggtcagaacagaatcaaagtaacgcttgatgggaaaagttggccccaagaccccagtactaagagggtcgcctacgtctcacacacacacactcacagcaagctttgggataaaaggcaaccgggatggttgacatctgaatgcaatggaacatg

SEQ ID NO: 86703 - DNA, 941 bp, Homo Sapiens
gcggccgctcaaggcccagagccagccgtcggtgtcgcctttttcggcgccttcgctgacgcccagggcgaacttgcgcttgaggctgtcgaagtccagcttgccgccggtcagcgccgcatcggcccaccagtggttttgctgatattgcgcgaaggcggtgcccatgtagctgttgagcttgtagtccgaatcgcgggcgccggcttcgagtgtctggcgatacaagccggcggccacgccgacgcgccagttttcgtcgaggcgatagctgccgccgacgttcacgttgtagccactgccgtcgccgctggccgaactgcgttgatcatcaaagtccaaatgctggccaccaccggcgacaatcgcgcgccattggcccacggcctgccagttgccattgtcggcttgccactggttgcgcagttcatcctggtgggcgcgcaaggtgccctgggccatctctggcagcaaagtcacttcccacggcgcggcgagcagcgagtaggcgtagtcggcgatcaactgttgcccggcgatggtggggtgcaccgagtcgttatagatcagcttggtcgggtccggggtggcgccgccaatgccatacaccgggttggcggtgcagccgttgccgctgaagcaggtgcctgtgaggttttgcccggtggccaggccaaagcgcgcagggttggcgaaggtttcattgagcagtaacgggatgttcagcgggatgacctgggcgtcgatctgcgacaggcgctgcaccagcgcctggttgaaaatgctgctcagggccgagctggcgccttgcgcgggcgtgccgttgatggcgggtgtcaagcccaggtcgggcagcatccacaccatgatgtagcgcgcgccggcctgttgcagggcttgggcgctgtcggccaggcgcccgccggcggccacggcctggc

SEQ ID NO: 86704 - DNA, 431 bp, Homo Sapiens
  misc_feature (130)..(142): n is a, c, g, or t
tttgctctcaaggtgtttgaggctttaatgcaaccctttagcccttggttctttttggtgcaagaattctggctgtttacctcagactcagacccctgaaatgttgccaaattcttcaaataactgtttnnnnnnnnnnnnnagatgaaagagagtcgcgttttgtttacagttaaagacatccaatatcttaaaaaggagttttcctttagaaacacacacacccttcctcttgctcaaaagatctcactccatgatactgtgtaaaatatttttgcactgttgtgaagtatttttgacttttttctgtacataactgtgttctcagagctgaatgtttatatcttttgctgtgcaaaagaaacatgtaaaatgttgttcagttgtatatacagaaatgtgtataaaacattttgttattttttaaaagt

SEQ ID NO: 86705 - DNA, 942 bp, Homo Sapiens
ttttcaatcacaagggagtaagtgacaacaaaaagaaaaaactctgagccacagctacactgggaggggggaggaccagattttgctacttctgtcacacaagctagaaaaaccctacctctcccattgggcaggcaacctgacattccacccagttccttgccttaccatactatgtattcctcctcttggagaattaagacctgagctaaatgctccactccaggataaggctgagcagtcctagttctctagactgcctcttttataaagattggattaaggtacgtgaaatggtgagaactgtaaagattttaaaaaataaagtagaacccagagaaaatgtcaaagctgccgccatgtagcaccagcaaccaattcttgcacttctcttccctgtctcagtaatcccctacagaaggttacatgattggaacaactctttcttccctgcaaagtctgctggtaccaggttataacctggacagtggagagtgtctgccttaggctggtttgtgcaagagggccaccttaggtctccttgaggacatttatcttggcgcagatcttgagggcagggcccagcttgatgttcatggcactcataagatgttcttctttaagtaataaaaaggcctgtccatcaatctcctgtgagcgaaattcctctgcaatctcttggcagccttggagagaagcaataaactcgtacacctcctctacactccaacggctgggattactggacaggaacacagggttgatgccatgtaattccggtgtaggtggagctgtattgggattccccaggtcacgttctccatgcccagctcttactgataaaggcccaggagatgttggagagagtgcttcatcataactggaattatctgaaccccggctagagtcttcttgaccccggtttgatgttggagcggccgc

SEQ ID NO: 86706 - DNA, 786 bp, Homo Sapiens
  misc_feature (231)..(288): n is a, c, g, or t
ctttacccaccacctgagattctaacattaacattttactatgcatgctttatctcacatttgtccatctaatcttccctctatccacccataaatctaccttgctttttggatccatttcatagtaagttgcagtcatcagaaaggaaaagtaaaataagtaaatttattggtaaataggcaattgatgggagtcaaaagatatttaaatgatatcaatgaatgtcactnnnnnnnnnnnnnnnnnnnnnnnnnnnnnnnnnnnnnnnnnnnnnnnnnnnnnnnnnnacttttaaaatgactcacacaagaaaacccaatgtgatagattataaaattggccacaaactcttcctctccctttatcatgattttgcagtgtgacattgcagatcttcccaccaggaagtggagtctttttctgcaccctttaagtctaggtcgttgatgtgagctgctttggccaatggggcattagcagttgtgatgcaagcagacacttcagtcatcagggtttgtcctctcttactgcacttgcaaccccgtgacctccatgtgtaccgtcttgcctgctggattatgagagacgtggtttgagtcactctcctagccctaaccaacagtctgctaattgtcagacatatgaacaaggctatcttagatcatccaacaaccaggcaacaccctagatgacctcagacacagaagcaagcacctgagagatcaactgagccaatctagaccagaactgtttagccaactacagattatgagctaataatggct

SEQ ID NO: 86707 - DNA, 663 bp, Homo Sapiens
cctagaattgcagaagaagctagaaaaaagattaattcctgggtcaagactcaaaccaaaggtaaatccaagaaaatattttatttacttctttccagttagaaaactctgatctatctttttccatccatgaacttagttagccctcacccctttacaatttgtccaactgcagttactttggtggatgtgaatttattcctgattagctcagtggtgttttaactgagaagaaataattgaggcctactaatagaagacatatgtttagtacttaaatatttgattttggatattgcttgaggatagaatatgaaaggaggcagaagctttcaaaataggaaatatcagcattgaaataattgtgagtctatgcccactgtggacaaaaagaaaacaaggcttgaccctgagcttagtaaatggtgtgagctataaagaatacaggcagtggaggagggaagaatcataaaattattttcactctttcttctctttcaccattcaaagccaatccattgtcaagtttttttggtctctgcttcatccctccttgattatctaagtcacgtctaccattttaactcatgcttttaattgtttcacaggctcctgcctccctctgtatattttacaatgaataaattatttaattgaatcatt

SEQ ID NO: 86708 - DNA, 554 bp, Homo Sapiens
gagaagtagtactgttatgtccattattgtagagaaattgagtaccttgcccaaggtcacacaggtcacatagtaataagaaccgagattcaaagctctaaaatcagtagtcttcaccatggcaccacactgcttcaaactgaagggtaggttgagctgtgactagaaagacacaagcatggctacatatctggagttgtcaactctggattttttagttggaattgggtcacctataattatctgtattcatctataattctgaaactaaattagatggctgttttgattcttacacttttagacagtggtagattattataaattattcagtatacaagatcttgtataatcaaattactctttttgttaaccaaaattttttaagttgcattcttaatgagtgcagcagccaaatttggttggtaacataaagtactttagacacttttggtttcttaagctgagcgtgtcataaaacttgtgttcttaagagcagaactgtagatgacgatcttagacttacagaattgcatgaaaataacatattctac

SEQ ID NO: 86709 - DNA, 354 bp, Homo Sapiens
agactttgtctcaaaaataataatagtaaaatgttacatgtgcatgaagttttaaattactcatttttattaatgaagaaaataaggtagtttagacattccaagagttaactatagtttacaaaaatatattaagcaaaaatatgcttgatatattaagcagaaatgttgtatattaagcaaaaatgtaaaattcagcaattataaactgttccttacagacagtgtacttgaagtcttttggtagttctgagaatgtggtcattgaagttggatctaagaggaaagtggttatcggttgctttttatttataaaggatgcaaaaataaaattagatttttggcagtccttaa

SEQ ID NO: 86710 - DNA, 1288 bp, Homo Sapiens
  misc_feature (595)..(595): n is a, c, g, or t
cggaacgaggagcaccttcgccatgtacgtcagcgacccctgccaggatttgatttccgacgcgccaactcgcttgccggtggcttctttgtagtgcctgagaatgacctcctcgatatcgtcgttatcgttgtctttgagaaattgctgtttggtagcagcgtaaacgatcacgaaaagtccttagcgcgtgggatgtcagagttggtcgtattttttgctggtgcttttggctttatcgacggggtacttcaacccgttaagcgcgagtttatttttggtggcttcgttgaggtcgacatccagcacgctggcaagacggaccagatacatgaggacatcggcgagttcgtcttttacggcctgtgctgtttcaggacgctttgccgcttccacggagtcggcctcactcatccattggaaaatctcgcagagttcgcccacttcacccgtcagtgccaagagaaggtttttcggagaatggaattgtcgccagtcacgatcatcagcaaagcgctgcaatgaagcagaaagactttcaacgtttaccagggtgctcggatgtgctacctactttgctcacaggctcgcctcnttgatcgccgatggttatcgcatccgtaaatggatttggaaaactagacagggattgtaagagaaatctatctttgcgtgagtcttttgcggcctgaacgtcaggtagatttttggcaggaatataggttttggaaagtggtggtaggtttgagccaagctggcttagctataaatgctgatcggggaattccagacattaaaaagccggcttgtggccggcttctcggggactgcctcagcttgtttttgacaaacctcaccagccttcaaatcgctcagcccacatcacgtcgggctgaatagtaggggcatctgcgggaactcctccgcatcgccaggcagaatagatagcgcaaagccaccccctgccaaatgtgggcggcatgatacccatattcacctcatatgcctacctccggatccgatttagagccttcccagcccagcaggtgttcgtccagtgggacgggtctgcggttgttgagggtggaccaccagaacacccagccgacgatcccgaagttctgttcaaagcgttgttcgtgggtgaggtattcgtccgggtgttcgctggcgttgtggctgcgcatgcgcaggccgccgccggggcggttgtagaggtatttgatgcggagcatgccgtcgtgttcgacggcgtagatttcgccgtcggtgatttggctgcggccgc

SEQ ID NO: 86711 - DNA, 578 bp, Homo Sapiens
gcggccgcctacaagcatgtgcccttggtagaacacaacccggtcgaaggcgtgaagaacaatgtgttcggcaccctcagcatcgcaaaggcagccatggccgcaggcgtgggctgcttcgtgctgatttcaaccgataaggccgtccgccccacaaatgtcatgggcgcaaccaagcggctggctgaactgatcctgcaaggattttccagagagcaagatatcacgcggttttgcatggtgcgctttggaaatgttttgggttcgtcgggttcagtcgtgcccctgtttcgcaagcagattatgctgggcggccccatcaccctgacccatccggaaatcactcgttacttcatgaccattcctgaagcggcgcaactggtcctgcaaactggcgccatgggcgaagggggcgatgtatttgtcctggacatgggggagccggtcaagatcatggacctggccaagcgcatggtacacctgagcggcctggaagtgcgcagcgctgcctcgccggacggaatcgagatcgaacacgtcggcttgcggccaggggaaaaaccctcgtgccgaattct

SEQ ID NO: 86712 - DNA, 1004 bp, Homo Sapiens
gccagcgcagtgggcaccccgcgtccctcccactctccctgcccctcggaccccatactctacctcatccttctggccaggcgaagcccacgacgttgacatgccggagatccgcctccgccatgtcgtgtcctgcagcagccaggactcgactcactgtgcagaaaatcttctcaaggcagacacttaccgaaaatggcgggcagccaaggcaggcgagaagaccatctctgtggtcctacagttggagaaggaggagcagatacacagtgtggacattgggaatgatggctcagctttcgtggaggtgctggtgggcagttcagctggaggcgctggggagcaagactatgaggtccttctggtcacctcatctttcatgtccccttccgagagccgcagtggctcaaaccccaaccgcgttcgcatgtttgggcctgacaagctggtccgggcagccgccgagaagcgctgggaccgggtcaaaattgtttgcagccagccctacagcaaggactccccctttggcttgagttttgtacggtttcatagccccccagacaaagatgaggcagaggccccgtcccagaaggtgacagtgaccaagcttggccagttccgtgtgaaggaggaggatgagagcgccaactctctgaggccgggggctctcttcttcagccggatcaacaagacatccccagtcacagccagcgacccagcaggacctagctatgcagctgtaccctccaggcttctagttgctgcctactcaaactatccagtctacagggccataggccagcacctgccaagcccaaggagtctccaaagggaagaggaagttggatttgaacccagaaaaaagaaagacgcaaggaaaccaccagccagtgtgcgcttttgttccaagaacttaattgccgtccattcgtaccagccagccaggctgccgacaggggcggaggaacccgggaggcgccaaaaccgtggccaggagggaaacc

SEQ ID NO: 86713 - DNA, 758 bp, Homo Sapiens
tcagctcggtaccttccaccagcaagacaagatattatatggcaatttcgtggtaaaatattcatgtatttgtgctgcatttctaatttttccgtaacgtgacacatcatgtttgtataatttaggaaaaaaatacctttttaaagtaaagcgaacacaagattctttagcaatgttcattccatcccacaatagagtctagagagtcacaaaaacctcagcctccttcgggagggggggagcttggtagtgaaaaatggtcatgaatgaatgggtgaagagagggatgggacaacctagtaggagggaggtagggataggcaagggaaaggtggggaccagtagtcatactggtcagccaaggaaaggggcattgtggagtcagggaagactctgactgctcaacagaggtctgtctagacccagtagtaggcactgacggtgttatcaaaggacaggatcaaagagagattttaggaagacacgtggattattttagggacaggggaggaaagaggaggggtgggtaaactacttggaaagaaaggaagaaggactgagaagatggcaatgggagtggggaggaaggggctgattgcctttgtgacctcactaccaaacatactttgctcacctccagataagtctttgtggggcaaatgcaaggataaagaaacagctcataagaggcacttgccaacatccaacaaattcagttcaaaaccacagaaaatctaggagtctccaaagaaaatcac

SEQ ID NO: 86714 - DNA, 917 bp, Homo Sapiens
gcggccgccgaacgcgccaaacaggccgttggcgtcggggccgttgcgaaggtcggtctgggactgagtcatggggcgctccaggaaagaaggtgaggagaggcaatgacggccactctacccctgacgcgccaggctgaaaaccgataagatcgccacaacctgtcaggaaaactcacagatgagccgagacctaccgcccctcaatgccctgcgtgcgtttgaggccaccgcccgcttgaacagcgtcagtcaggcagccgagcaactgcatgtgacccatggcgcggtcagtcgccagttgaaggtgctggaagagcacttgggtgtcagcctgttcgccaaagacgggcgcggccttaaactcacagatgcaggcgttcggctcagggatgccagtgccgaagcgttcgagcgtttaagggatgtttgcgccgaactgacccaggccagcgccgatgcgccttttgtgctcggctgctcgggcagcttgctggcgcgctggctgattccgcgcctgggccgcttgaacgcagacttgcccgacttgcgtctgcacctgtcggcgggtgacggcgacctcgacccacggcgccccggcctggatgccctgctggtttttgcggagccgccatggccagcggacatgcaggtgtatgagctggccagcgagcgcattggcccggtaatgagcccgcgcttcgccggttacgaacgcctgcgccaggcgccgccccacgccctgtgcggtgaagccttgttacacaccacctcgcgcccgcaggcctggcccatctgggcgcagcaacatgacatcgagcccggcgcgttgaagcacggccagggttttgagcatttgtattatttgctggaggcggcggtggcgggtttgggtgtggcaattgcgcccgaaccgc

SEQ ID NO: 86715 - DNA, 741 bp, Homo Sapiens
agccaagattcggcaagagatcagccatgccccacgcgttcttaaacgaaatttccgcttcaggcacactgctctggtcgacgacccgataaccgttgccgctgaaaaacgcgttcatattgtcgaagtaaccgcgcccgccgtagacgaacacgctgtcgtaaccgacggcaccgagttgttggccaaggcttgcgaaaccgctttcacggccaatgcgcttgacgatcgagcggccgggcgtgggtggaatcgccaaggtgatcgcttccagcccacggtcagtgcgggtgccggtggcatagaagttattgaagtacaggctttgtttacgcagcgcatcgaggttgggcgtcaggttgttctcatcgccattgctgcccatgtatttggcgctgaagctttcgatggtcaccagcacgatgttgggtttacgcaatgtgcctgggttgtcgatagtgcggcggatatccagcgggtctgtgccgataaagtgcgcattgggttcactgagttctgcgcgcaactgtttggcgacaacatcggttggcaggcttttgtagaactgcgtgtaatcgagttcgttattgcgaaaggcggcaaaaaattggtacgggccgttgctcgccaattcgttcatgtaggcattgccgccttgggcacgcgggctgttctggctgatcaattgcacactcagaccggcagctaccaacagacacagggcattcagcaagcggccgc

SEQ ID NO: 86716 - DNA, 1531 bp, Homo Sapiens
  misc_feature (1451)..(1475): n is a, c, g, or t
gcggccgcttgaaaattgggtgtgggacgtcgattccctcgcgaagattgtcaaaacattataaagatggaagccctattgcagacgatctgcttgaaaaacttgttgcttctaggctggtcaacacaggtcttctgaccctgcgccagattgttttgagcaaagttgatcagtctcttcataccaacacatcgctggatgctgcaagtgaatatgccaaatactgctcagaaatattaggagttgcagctactccaggcacaaatatgccagctacctttggacatttggcagggggatacgatggccaatattatggatatctttggagtgaagtattttccatggatatgttttacagctgttttaaaaaagaagggataatgaatccagaggttggaatgaaatacagaaacctaatcctgaaacctgggggatctctggacggcatggacatgctccacaatttcttgaaacgtgagccaaaccaaaaagcgttcctaatgagtagaggcctgcatgctccgtgaactggggatctttggtagccgtccatgtctggaggacaagtcgacatcaccatgtgttactggcctggaaactgaagggagttttgcaagtgaaaatttagatttctattgacatccttttgttttctaattttaaaaattataaagatgtaaatggaattataaatactgtgacctaagaaaagacccactagaaagtaattgtactataaaatttcataaaactggatttgatttctttttatgaaagtttcatatgaatgtaacttgattttttactattataatctagataatatgatataagagggctaagaatttttaaattgaatcatatatatgatataatttgatccttcttgtatcttgaagttttgtacttgggatttctggactgataaatgaatcatcacattcttctggtaaatattttcttggagctctgtgtcaactttgatcctttgtctcccaggaaggtgtgacctctcccttgcctgcatacctcaaggccaggggaatatgcctcagggatgcatttatctttggatatccaggccgcatgattcccaacttttcggccacactttaaattacggttcctccattttcaggtttgggctttttctggcctaaagtttcagtcaaagaagtattccaaaaatttattgtttcagcctaaaactgggggggaatggtaaataagcttttgggaaccctgggtattaaaagggattttccctaacccttttaaattaaaagaggctcagttttcccactctccaccatacaaaaaaaccggtttaccctttttgggccatgggggcgcccactttggaaaaacccctaaaccccggtccccagagcaccatattcttcccccctaccacccgttttctcatataaaagggttttagggggaannnnnnnnnnnnnnnnnnnnnnnnnaacccacgtccccccacaaaaaagatgtatccgggcaggaccaatgggtcccccca

SEQ ID NO: 86717 - DNA, 842 bp, Homo Sapiens
  misc_feature (235)..(243): n is a, c, g, or t
gcggtcgctccaacatcaaaatggaaaaactcgagaatttgtatactggccttccctggtgattaatttcaattggcaataaaagccataacctaaaggaactgaatgtttgaggaattcaaagagtcatttctatgggggcatgtgtgtgtgtacatgcacacatgtctatgaattaagttatacacagactttgaatttcacggccagatgaccagattcttctcaaatctgnnnnnnnnntacatttaaagtctcacccaattgggcacgcagctctttgaacagtttcttccagcattatgtccctatgccctgcagcctaataccttctcaagttgatctccccccaggcacagccttgttccagccacacattaaccccttgccctgtactctgcccccatcatcctcatcctgactgagaactaagctctgatttttttaatcttgcccaaattcctatctaaggggtctggagggtcatgccctataaaccataaattctcatcagatgggttttatttagctctatatatcatgagttactttgcaacctgactctggcataacattacaagacaaggaagaaaataaaaatattttaccccaaaacatgtttacttgccataacttgaaatggccctgcaaagctgtcctttgtgggggaaaatttgcatctgtaaagaatccctattaacatagctagatattttttttccaagtcttcctaatcctaaagagattatctaagagtctagcactttttaaagatctgaatagtaaacatttgtcacctattgtctctaaaggcagccattataagacttcaaaggaaccct

SEQ ID NO: 86718 - DNA, 832 bp, Homo Sapiens
gcacgaggcggcacgaggtgtttgacttgctgctgcagcgcctccagctgctgactctgccttttggatgagcttgttgagtaggagagctgggagaggctgttcaaggcctccttcaatttggtgacttccttcgacatctcatttatctttttatctttatcttcctccagttttgaagagctctcagagtatcttttcatttctgcaagttcttcctgagcttgctggaatttttgcagaagttcatttacttcttgctctttggatttcaagagagtctgaatattttccttttctcttttcacctgtgagacctcacttctaatctggacaacctctgaatggaccttctctttctctttcacagattcctttaatttcgatgccaacacactcacttcactctctaaggatgactggagtttttcataggaagaccgaggtaccattgcatcagtcatagcagctttctcttctaagagttgtttctccagctttgctacttccacttccttgcttgcaaggtgttccttaagattgcttattttttcttccatctcttttgctgcagtccgcagcgtggttatcacttgcaaatgttctgtgatagagacagagttctctttttgtgcatccaccagttgtttgagctgggtcaactcattcaacacttttgaatactgagacttcatttcagacagtgcatcttctgctttagccctggacacgtttgtcaattgcatcagtttctcatgctctgctttatggatatatgaacttcaatcctgacccctgcccatgaatgaacagaacacccatttcaagaaat

SEQ ID NO: 86719 - DNA, 744 bp, Homo Sapiens
gcggccgcggctgtaggctttgaaatgtggtgtgtaatttaagcttatagcacatctcaatttggactattccatttcaaggctcagtaggcacctgtcattaatggctactgtattgggcattaaaagtctaagaacttgtcttctgtagttttcctacatagggagataatttctgggcagtctgttgtcagtatatgcccctttgaaaatgatgcctagttgttattgaaacagaataaattggccattgggcatttggtacatcaggcttttgtgagtttggttagtgaaagtcaataccccttccagtcagctctgggataatcacaggacctggttcctcatcttgtgaggctgagagacagatgtctaactgtggtgaattcccaaaagaattcctttctatgggaacatatttgtggcccccagatgatgccttcctttaccacttttgtgtgctttgagctcctgtagtcctcaaggctttcagtgctgtgcttttcagtagctaatactttttaggtagacattatggcctcccatccagccaaatatgaagtatggtgaataacaatatctttttcatgaatgctaacagtgttgacttaatgacttcaaaaattagacattttctaaccttggtgcccagtctgggcacagcatttgggtttgtccaattaatgtgttggctaacatgggtagacctgtctccctatgctcaacctgaaacagccctggaat

SEQ ID NO: 86720 - DNA, 879 bp, Homo Sapiens
gcgggtgacccctcggccacggtcaacatgatccgcaagcgcccgaccgcagactggcaagccagggccggcgtcagcggcgccagccatgacaactactacagctacgttgatgtgggcggccccctggcgtttgatgggcgactgcgtggacgcacggtacttgcctatcgcgacagccagtcctatcgcgacaattacgccatgcaacgggaggtcggctacggcatcctcgaaggcgacctgaccgacgacaccgtggtcgccgtaggcttggactatcagaacaaacatgtgcaaggcacctcttggggcaccctgccctactggaacagcgatggcagcaaggcgcgactgtcacgctcggccaacatggctgccgactggagttcctggccactcaaagacaagaccaccttcgcctctatcgaccataaactgtccgctgactggcgcctcaaggcggcctacacccatcgccagagtgatactgatggcaaggtgtactacggcggcgccggctaccccaacccggatggcagcggcatgaacgcctggaccaaccagatggtcggtacatcgaaaatggacgtggtggacttcaaccttgccgggacctattcattgtttggccgtgaacatgagctgatggcagggtatggcgaatccgagcagcgagactcatcgccgtttcagcgctacagcacacccgaaggttatgaagacattcaggactggcggcacatgggcggtatccccaagttccccgaccgcaccaccggcctcaaaggcgaacacagcagcaaaaaacagaaagccggttacctggctacgcgcctgagcctcaccgaccaactgcacgctgtactcggcggccgc

SEQ ID NO: 86721 - DNA, 656 bp, Homo Sapiens
  misc_feature (591)..(601): n is a, c, g, or t
taggctgagctggcaggcagctattaccccggtctttccccaccccaggtctgtctcttgccttttcttggggcatataagctactgagtggaacatggagctgatcaagaggccgtaatggtcatggctgtttcccagacctgaatattggggtgcttcttgccagtattctaagacatttgagtaattgctgtttgcacttactgcatggtcagaccacgtcactacatttctatgcaaggggacagcaaggcagcgtggtggtcatggctcttagctaacctattcaaagaccttttcctgttgattaatctattttcatatttataaaggagtcttaatgttctgccccataagactttcaaccttgtggttgggagtggggctggttttgtaggccctagggcctgcttctatgtatttatcaacatgtgatacattcaattggttaaatggtttatacagggactgatttgcttcccttcctgccatggctggagctttgggaacagtctgtccttacagagctgcaataagaaataaccaaagatgaagctggtcaaatattttcataacttgcttctgttgannnnnnnnnnngtaaaactttcccaagacattttcagacttaaaaataaagtcagtgttacaggtg

SEQ ID NO: 86722 - DNA, 507 bp, Homo Sapiens
gcacgagggacagcctgtggtccggcttcgacgaggccgacgatgatccagtcgcggtcggcgatgcggtgatggctgccgacgctcagcgcaggttgctggcgctgcagcaggcggctgacgaccagttcctgcgcagcaccttcgcccagccagcggccttcgatgaggcgcggcaccagcagccggcccgcggaaggcacaccgagcaaggtcagcggttcgggcccgaggctggcgcgcaggctccgccaggcctcggccgcggcaatgccgggcacgtcgagggcgagcgactccagcttggcggcgggcgaaggtgtcgcgacgcgcacttgcagttgatagcgctgggcatagaagagatcgtccaccgaaccgcgcacggcgctgcgcagattgaccgcgcccagatacaccgcaccgccgctggccagcgccagcacggtcagcagcatgcgctggcggcggcggaaggcattgcccaccgacagcagcagcggccgc

SEQ ID NO: 86723 - DNA, 549 bp, Homo Sapiens
gcggccgctccaacatcagtaatgcaaaattgtcttgaacctgcgataaaattttgttggacttttttttcattgcagtgaaaagggccatgtagcatgcctcaaagccaggttactcagcctagtccttgtttaagcagttttgatattcattcaagttcaattttctcactgattttatgattaatttcttggaaaatttgaaagttttcaagaagtaaaaaattaatatcttgttatcccagtatatagagattaacttcagttcaatgtttggtgcattttcttctagtctttttttcaatgtataaatattaaagttatttcatagttgagatcatactgcatatatgatactgtatcttgcttttttcattttaacgtcgtgagcaattttcccatgacattacaaactgtctttgaaaaatggaaaacatttggggctgtcagcataactgaaaatgttttcttggtgtgacacatgtatctttgtaattggtttgatttagtgtgctttatttcaataaaaattcagtattataatttaaa

SEQ ID NO: 86724 - DNA, 1206 bp, Homo Sapiens
  misc_feature (570)..(570): n is a, c, g, or t
gcggccgccgatgtcgatcacttcgtcgtcgctcagccggcgataggagtcgggcaggggatagacgcccttgccgaaaccgccgaagcgcgcgcgataggtctccagcgcctcctcggtccagcccgcgccgcggaagaagcgcacgccgtcctccggcgcctcgcggcccgtgtcggcgatgagcatgcggcaggtgatatattcgagccgggtcatccaaagctgcgcctcgtgcttgcgggcgatccagccggccatgcccacatggtcggggtgcatatgggtgacgaggatgcgcgtcaccggccgcccgccgagcgcgccagcaaaggccgcgcgccagccgtcggcggtctccttggtctggatgccggtgtcgacgatggtccagccgtcgccgtcctcgatggcccagacattgatgaacttcagtgaaaagcccaggggttgacgcaaccacaagacgccaggcgccacttctatagctgatccatcgccgatctccggcgtttgctcaaaaggataggtcagcgcggcgcgcttctcgatctgctcctggccttccanatccgcccccatattcgcctttcaggtgttgtgcgctgaaatcctgcgtctcgtcaaagttcagccgcttgaccggtcttatgctggcggttcaaaggtgacgacaaatccacgcccttggttcttgggagcaacataatgaaacgcatcgggatggcgctgggcgcgctggtccttcttaacgccggcttcgcgccgctggccgcctcggccgccaaggctgatctgcctcccatcagcaaggaggaccaagccaagggcatgaaggaagcgccggccatcgtgcagactttgaagttgagctgcgacgtgaccgacgcccgcttcatcggcaacctgaccatgaacaacaaggacgggaagcctgccggcgggccggcctatgaagtagcctgtaagaccggggggggctacacgttcctgaacaagcagccggatccggtggttttggactgcctcgccgccggcgaaagcggtgcgctggcctgccgcctgccgggcaactccgatcccaagcaagtcctcgcgccctatctcgccgacgcgggccgcacctgtacgctgaaggccgccaaatacctgggcgccacgcctgccggcgtcaccttctacgaggccgcctgcaccgaggggccg

SEQ ID NO: 86725 - DNA, 854 bp, Homo Sapiens
  misc_feature (739)..(748): n is a, c, g, or t
gagatgggattgatatagtaggatttatgtggcgatagttccagctgaggggtacacattatgtgggcagtcccaactctaggatcagggtttcatggagcctaatgccaggattacgcacggatacccgaaccatggtgccatggaggtcctttgtcattaatccatggatctttgactgctcaggtctccttgtaccatagatagttgactcctctattgggaccattttgctaatgctgcatgtatatacactctaaacccttaccgtacctattgctgtatataatctataatgccaaccttgagttgtaacagttatagttaacttaaggttttaatggatttttacctttgcagacacccctttttatatattaaataaatatttttctgactgttcctgacttaaatgatggctacagggataaacccggaaggaagccttgcccagttaatccctgccaattgtaaataatgactgctaaaaaccaaccagaagtttttttcttttaaaggaaaccatagagccagtcctgaaaaaaatttcttcctagttctgcacaggataattacagccagaagacatgggaaaagtcccatggcaatcaccaattgcttaaagaggttttgttaccaataaaaatttggatagtataatagcagtgttgctggaacattagcaaaagtatatacattccagttacctttgatttagccataatcacatatgtatgcnnnnnnnnnncttggacaaaaatatatatttttataaaaaactgatcatccaactttaatgatttccccggccgtaatggccgaattcccgggcatatgtccggtaccgtcgactg

SEQ ID NO: 86726 - DNA, 694 bp, Homo Sapiens
gaattcggcacgaggggcggtgctgcgcgagctgcaggccgtgggcctggtggtcaacgtggagtcgatggccgcgctgacggcgctgcgtaggctggctcccggcctgaccctctcgccggcctccggcgacgacctggcccagcgcctgggcctgcgccactacccggtgctcgtcacgtccaccggcgtcgagcagtaggtgcgcagatggcccaaccgcatgcggtcgaggttctgctgcggccagcggtggagcttcataccgtggcggtctgcaccagcgccgcgattctgtgcctggtggcaccgtggtcgctcgcgctgaacccgctgctcggcctgggctcggcgctggccttcctgaccttcggcgcgattcgtctgcacgatgcctgggcgatcctgcgctatcgccgcaacatccgccgcctgccgcgctacgtgatgaccagccgcgacgtgccggtgagccagcaacggctgttcgtcggccgtggctttcgctgggagcagcgacacacgcaccggctgatgcagacctaccggccggagttccgccgctacgtcgagccgacggcgatctaccgggccgcccggcggctggaggagcggcttgagttcgcgccgtttcccgtctcgaagctggcgcgcgtgctggcctgggacagcccgctcaacccggcgcggccgc

SEQ ID NO: 86727 - DNA, 269 bp, Homo Sapiens
gccacaacaggccacttgccactaaccggttgtatagatatcgatggccatcgcgggcaagccccacatttttgatcttcaccacctccagcccttgtctacactcaattgcatcccaggagagtaagcgctcggcaactcgccggcacaggagtgctcgatgtctccccgacttggttccaggcaaggtggcgcaatcggcctgatggccgccggcgtgttggcggtggcgatgaccaaaacaataatgatgatcgcacagcggccgc

SEQ ID NO: 86728 - DNA, 777 bp, Homo Sapiens
gcggccgccggctttcaggcccgcagcatggaaggcgtcgaccgcggcgcggctcgtggcgcgaaacgcgacgtgggccgccgaccccgggcttccggtcttgacgagatggagccacagcgccggcgcgtcgcgcgggccgaggccagcaccgttcgcgtcctgcgatccgacgacatggccgagcggcgccagcgctgattgatagaatttcaggctcgcatcgagatcgcgcaccctgaggccgatatggtcgtacatgaagctctccgttggcttgaattgacaaggagaggctagccgcccgcgagagcggcaacttggagaaacttgcgcgatgcgagggagagaagaaggctacgagggcgagaattagtgccgcgccagccgttcgcccaaagcggcgcgatcgcccttgctcaggcggcggaagccgcgcggcgagacgccggccgcgcggtggaacgtgcggatgaagttggagagatcggcaaagccgacatcgagcgccacatcggttacgtcgcgttcgtcgtcggcgagcaggcgcgcggcgtgacgcaaccgcgagcgcaccagatactgatgcgggctggcgccaatcacagcgcggaacagccgcagaaaatgaaatgggctcagccctgcgcgcgccgcggccgtcgacaggtcgatcggccggtgcgagaaggtgtcgatccacagcgcggtctccaccgcgcggcggcgatcggccgcgcgaatccgcagcaccccgagcttgcgccccaacatcag

SEQ ID NO: 86729 - DNA, 858 bp, Homo Sapiens
agcgtgctgtacgccgaagcgctggagtcgttgatgaaaatccagctggccagccagccggacgtactgcccgaattcgaccgcgccttcatcctgcgcgaaatgaatctgttcccggaatggttcatcggcaagcatctgggcgccaccttgacggatgtgcaacaagcccagctggacaaggtcttcgaaaccatcacggcgaatatcttgtcgcagcagcaagtattcatgcaccgcgactaccattcgcgcaatttgatgcacatcaacgatggttcgattccaaatcccggcatcctcgattttcaggacgccgttttcggtcccgtcacctatgacatcgcctcgctgctgcgcgacgcctacatccagtgggatgaagaactggtactcgactgggtgatccgctactggcagcgcgccaagcagctgggcttgccagtcaatcccgacatcgacgccttctaccgcgatttcgaattcacggccctgcagcgccacctgaaaatcctcggcctgttctcgcgcctgaactaccgcgacggcaaggatctgtacatgggcgacctgccaaccgtgctcgactatgtgcgcaagaccgccaaccgctatacggaactcaagccgctggtgcgtttgctcgatgcgctggaaaacaaggtcccgcaagtcggctacactttttaatcagcgcacctgatccgtctgcagtggggccccggccccacctttcacttattgcacagaaaacgagttccaccatgaaagccatgatctttgccgcaggccgcggtgaacggatgcgtccgcttaccgatacctgtccccaaaccgctgctgaaagtgcgcggccgc

SEQ ID NO: 86730 - DNA, 1247 bp, Homo Sapiens
  misc_feature (1023)..(1102): n is a, c, g, or t
gggacaccacgaaagatccatcccggaagtgcttactcgtcgtctccatgcgccggttcctgggcgtcttagagccaaggcgcgaggctcggagtgagaggtagagctggaggggaccctaagcgccctccgcccgggacgtgagccgctgcgcccaccgggctagacccggcgccatcatgctgcttctgccaagcgccgcggacggccggggcaccgccatcacccacgctctgacctctgcctctacactctgtcaagttgaacctgtgggaagatggtttgaagcttttgttaagaggagaaacagaaatgcttctgcctcttttcaggaactggaggataagaaagagttatccgaggaatcagaagatgaagaattgcagttggaagagtttcccatgctgaaaacacttgatcccaaagactggaagaaccaagatcattatgcagttcttggacttggccatgtgagatacaaggctacacagagacagatcaaagcagctcataaagcaatggttttaaaacatcacccagacaaacggaaagcagctggtgaaccaataaaagaaggagataatgactacttcacttgcataactaaagcttatgaaatgttatctgatccagtgaaaagacgagcatttaacagtgtagatcctacttttgataactcagttccttctaaaagtgaagcaaaggataatttcttcgaagtgtttaccccagtgtttgaaaggaattccagatggtcaaataaaaaaacatgttcctaaacttggtgatatgaattcatcatttgaagatgtagatatattttattctttctggtataatttggattcttgggagagaattttcttatttagatgaaagaagaaaaagaaaaagcagaatctcgtgatgagaggagatggattgaaaaagcagaacagagcaacaagagcacaaagaaaaaaagaagaaatgaacagaataagaacattagttgacaatgcatacagctgtgatccaagggtnnnnnnnnnnnnnnnnnnnnnnnnnnnnnnnnnnnnnnnnnnnnnnnnnnnnnnnnnnnnnnnnnnnnnnnnnnnnnnnnaagctaaagaaaaacaaagacaagctgaattagaacctgctcggttagctaaggagaaagaagaggaggaagtcagacagcaagcattgctggcaaagaaggaaaaagatatccagaaaaaagccattaagaagaaaaagccaag

SEQ ID NO: 86731 - DNA, 761 bp, Homo Sapiens
  misc_feature (697)..(697): n is a, c, g, or t
  misc_feature (701)..(701): n is a, c, g, or t
aaagactactaattaaaataacttcaacaaatagaattcaggatataaggtttaaaaacataatgaaaacacactagttagccatattttttttaatgcctattcagagtttaaaagtttcccagtaacaaaagactgcacagctttgagacattaatttaaactgtacaaatacatataaccattaccactaggataaattactctttagattttaacatttttcaacatcttacatctgaacagttgactcttctatacaaaaatatcattattattttataatatgcctttgtataatgcccacaagatgacacttattacaatagcagttgttacaaagtcacaaaatacataaaaatctcagcagttggtaacattattattctttaaaaagaatttacagtactaaggtccagtccagaaagtggcaaatttaaacagagtagcccaaagttcgaagtgtctatttaaaataccagtttggaaataaactaaggaaataatatatgtactatgtgatatcactgccccagcagctgaacgcacttgcttcagagcaaatgtgaaggtcagagctgagtcagtggtcagcagcatgagctggcttgggggaaccagctggcacacttcatctttgtgtctggtagggacacagaaacaaaacaatttgaaaagtccaatgaaccagcatcanacanacacagtttccagaactttcttaatgatgtccagccaagagaccttgacttggttactat

SEQ ID NO: 86732 - DNA, 446 bp, Homo Sapiens
ttaatacagctaatgaaaaacactgatagcatgtagaaacaatgacctgccagagttgaaggtagacatttactttctatcaccttgtccatttaattcataattgacagctttatgccttcaaagaatcattctgagactggatgagtctgaagctttgcatgtgaaatactgctcaaatgaatttgaattaacagtactaaaatagttagtgatttcaggcaaccattgtaacgtgttgactcaaaactaacttttaagagttttgtctggagacaaattctgtgaaaaatgcttaaacaaattaaacacaaagttaaaatttatttggaagataatgttatactcagtccacttttgtatgtactcttggatcagaaacatgttagtcatttaagaaatatatatgtcctgaagatgttatttcgatagagcaaaaaccctaa

SEQ ID NO: 86733 - DNA, 536 bp, Homo Sapiens
acaaaatgtataattacatttatgtaaaactataaaatgcaaactaatctataataatgcaagcacatcattggttgcctggaatggggtgggcgaggggaaatgattacaaaagggcaaagggaaacttctggggctgatatatgtgtttactctcttgattgtggttatggttcacaagtgtagccatatggcaaaacttaacaaattgtacactttaaatatatgcagtttatcatacatcaattatacctcagtaaaggtgtcagaaataacaggatatttatatttaaatctacctttgaattaccgattgtgactgaggtctcatgtggcttactggtgaatccagtagttgaggaaacgaaagccgtcacttctgctaactcttttaccaactcacctgctgtcaccttacacaaccccaactgtgtttcagctttggagtaatgaacacaccattttcttcctacttaaaagtccactcaggataatgattaagaaatacattgatgccgagtaataaatactttaaa

SEQ ID NO: 86734 - DNA, 609 bp, Homo Sapiens
  misc_feature (22)..(22): n is a, c, g, or t
gcggccgcgctgcgcgctgtcnggttacacacaaggagacgccggagccgccggggggcgaaatcacgcgcgacgccaggggcaacccaaccgggctgctattggcgaagccgaacgccaacatcctgtatgcgacgctggcaaaggggcccaagctgccgttcgactaccaggtcaattcgacccgccatttcatgcgcgagctcaatcggctcggtgtcaccggcgcgatcgatgcgggcggcggattccagaactatccagaggattacgcagtcatccagcaactgtcggatcagggacagctcacgatccgccttgcgtacaacctgttcacccagaagccaaagggcgagaaggacgacttcctgaactggacccggacctctaagtacaagcagggtacggattatttccgccacaacggcgcgggcgagatgctggtgttctcggcggccgatttcgaggattttcgcgtcgcacgaccggacatgccacccgagatggaaggcgaattggaagaggtcgtccgtgtgctcgtccagaacagatggccgtggcggctgcatgcgacctatgacgagacgatttcgcctcgtgccgaattct

SEQ ID NO: 86735 - DNA, 491 bp, Homo Sapiens
caaaaagacaaaaatcagtttccctctttgagtgaccgtggatctattttttattcttagagctgaatattacttgattacaaatcagattgcttaagggtgtggaatagcaggctagttttaataccaacttgttaacataaaatcatatatgttttagaccattcttatttagttacaattttagaaagttaacaaagtaagcaggtacttatcgaagtgcatcttttcagtctaaatgtttgtctgtgtgtctaggtgctggtgagtccacatggacacatgagtgcccatggggcaggagtctgctataaagtcagaaggtgagatcctagagagttacacccagccccattttaatttgcatgaaaagccaaggttcttttaagcactcaaattatttaatggttaaaacacaagaaaggcacatctgttcatttaaatagttgtaaaaaactaatcagcaaaaataaatagaaaattaaaccaaa

SEQ ID NO: 86736 - DNA, 884 bp, Homo Sapiens
gcaacgtcggcgacggtgactggcagcgtggagtcgtggccctgcagcgtcatccccagcgagtcgcctaccagcaacactttaacgccttgctcttcaaacagtttggcaaagctggcatcgtaggcggtgagggaagcaaacttgcgttgttcctgcttccactggcgcaaatgggtcacggtggtggatttcatcactacgtctcctgaatagggccgagcggtatgcgcagggccctggctgcaaaaaagtgctgtcattctactgtaaccctaacggggtgggtagcgcagatcatcatgcttaagagcttcttaagaaccttgtggtgtaatgggcggcaatggctaaaaaaggacgcacatgcgaattttgctgatagaagatgacaagttaattggcgacggcatcaaggccggcttgaccaaactcggctttaatctggactggtttaccgatggtctggtggggaaaaacgcgctggaaagcgcgccttacgacgcggttattctcgatctcagcctgccgggtctcgacggtttggatctgctgcgacagtggcggcaggctggccacgacgtgccggtgctgatcctcaccgcgcgtgatgcgttggagcagcgggtcagcggcctgcagagcggcgctgacgattacctgtgcaaaccttttgccctggcggaagttgcggctcgcctgcaggcgttgatccgtcgtcgccacggccaactgatgccgcagctggtgcatggcaatgtggtatttgacgccgccacccgcagcgtgagctgcaacggtgaaccggtcacgctgacgccgcgcgagctggcggtgctggaactgtttttgcacaacaaaggggcgggtgctggcgcggccgc

SEQ ID NO: 86737 - DNA, 234 bp, Homo Sapiens
ctaaagcggcaggtgacggctcaacaaggcccgcaacgccgccggcttcaccggtttggccaggtaatccaacccggccgcatgcacctgggccaccatctccggccgtccatcggcactgatcaccacgcccggaatcggctccgccagttgagcccgcagccaacccatcaactcggtgccggtttcgccgtggtcgaggtggtaatccacccagggcccagttgcggccgc

SEQ ID NO: 86738 - DNA, 546 bp, Homo Sapiens
tcgattaggaaactttatttacaatttcaggtagtaatattcagtgtagttaaggccagtcttaacccactggatgaaaatctaggactgtatggaagtaagcaaacattacatttttaggtggaaatagtcagccttgcataaaaacaaggatgcgtgaaagccttaaattccagctcccttttactggagtctgtggttgtgtacaggtatgggccaagtgtaaaatctcatcaattttaagaacactcgggaaatgagtaaagaaaatgtaaaattgctgctagtcaaatcttttggaaagaattttctggaagtggtcactttaaaaattattttccacccttgcaaaattgccacatttaaattgttttactggcagttctatagtagtccagactttagaaaccaaacacaacaaaatggcttgttgccaatatggccacaacattgccagcaaatactgccttggcatcactcagcagaggtttttgtttataaagatgaagtcttgaatactgttcaataaacttgtcaaaaaataaa

SEQ ID NO: 86739 - DNA, 1403 bp, Homo Sapiens
  misc_feature (571)..(571): n is a, c, g, or t
  misc_feature (704)..(745): n is a, c, g, or t
gcgtatagccatagatgatgacggtcctgacggcgatctcggcgtagaacatcagcggatgctcgcccaggaacatccgtttcagttcgaagggaacgatcgggtcttccatcgcaaaaggggccggatcagtccgcggccgtgttccgctgcagctggccctggggcgccagccggcccgcgaaggcggtgaagacccggtcatagacctcgcgcttgaagggcacgatcttgcccgcgatctcggcgggcgtcatccagcgccattcgtcgaattcggggtgctcggtggcgatgtcgatccggtcgtcgccgcccgtgaagcggaccagataccatttctgcacctgcccgccatagcggcctttccacatcctgccgaccagttcggggggcaggtcatagcgcagccagccgggcgtttcggccagcacctcgcatagctcaggcgggataccggtttcctcgcgcagctcgcgcagggcggcggcgcgggggtcctcgcccgagtcgatcccgccctggggcatctgccaggcgtccgaggggttgtcgatgcggtggcccgcanagacccggccttcggcgttgatcagcaccacgcccgcgcaggggcgatagggcaggccggcggggccggtcgcggcatcgtcgggcccggtgccgccgggcgcgtcatccgttgtccgcatcgatccgctcannnnnnnnnnnnnnnnnnnnnnnnnnnnnnnnnnnnnnnnnnagagacgtccgtcgcgggcgcggcgtcgctggtgggggcgccgcctcgtcacccgacgcggcgccttcgcgcgcgtcctcgctggtcgcgtcctcgccggtcacggcgggcttggcggcctcggccacctcgcgggccgagaaatcgaccgccgccaggcccttgaggatgtccacggcataggccagctggtaatcctcgtcgcgcagcttggcggtggcctcgacctgcttggcttcctcctcgatctggcggcgttccccgtcgctgatcgaatcgttgttcagcgcgccccgcaactggctttccgaggtcgagaagttcgaggcgctgcgcggcgcctcctcctcctcgtccgcgggctgggcggggggctgctggacgatgatgtcggggttgatccccatcgcctggatcgaccggcccgagggcgtgtaatacagcgccgtcgtcagccggatcgcgctgtccgaggtgacgggcatgaccgtctgcaccgaccccttgccgaaggacttggtgcccacgacgattgcgcggcgatggtcctgcagggcgccggtcacgatttccgacgcgctggcggaacccccgttgatcagcacgaccatcggcttgccctgcgccaggtcgccggcttcggcgttccagcggccgc

SEQ ID NO: 86740 - DNA, 1075 bp, Homo Sapiens
gcggccgctactcggaaagctattcggaatcgctgcccgatttcgtcaagctggcggaggccttccattgcgtcggcctgcgctgcaccgacccggccgatctcgacggcgtgatcacggaaatgatcaacaccgaccgcccggtggtggtcgatgtcgctgtcgacaaagcggagaactgcttcccgatggtgccgtcgggcgccgcccataacgagatgatcctgcccgagatgatgggcggcgactccgccgtctcggaagagggcatggcgctggtctgacgccgaagccgagaaaagaaagccagaaacgatgactgcgccgcagcagccgatccaaacccatatcctctccgtactggtcgacaacgagccgggcatcctcgcccgtgtgatcggactcttctcgggccggggttacaacatcgagagcctgacagtggccgaggtgaacaacgccgcacacctctcgcgcatcaccatcgttacctccggaccggcgccggtgatcgagcagatcaaggcgcagctcggccggctggtgccggtgcataacgtgcatgacctgaccgtcgaggggccgcatgtcgctcgcgaactggcacttatcaaggtggccgggaccggcgagaagcgggtggaatccttgcgtatcgccgatatcttccgcgcccgcgccgtcgattccaccaccgaatccttcgtcttcgagctgaccggcaatcctgagaagatttccgccttcgtcgaactgatgcagccgctcggcctggtcgatgtatcgcgcaccggcgtggttgcaatcagccgcggcccaaaagcgatgtaagacggaccgctttaatcacacttcaacgacgcttcccgaggagagacaagatgcgcgtttactacgaccgcgatgcggacctgaacctgatcaagggcaagaaggtcgtcatcgtcggctatggcagccagggccatgcccatgcgatgaacctgaaagacagcggcgtaaagaacgtcgccgtggctttgcgcaaaggctcggccggcgtgaagaaggccgaggaggccggcttcaaggtgat

SEQ ID NO: 86741 - DNA, 1007 bp, Homo Sapiens
  misc_feature (563)..(581): n is a, c, g, or t
  misc_feature (668)..(776): n is a, c, g, or t
  misc_feature (996)..(996): n is a, c, g, or t
tccataatgtgtgccagattctgttatcagtagatacaaaattaatttcattcctattaggatggaaactggtatgctgctgtggccatagatattctgagaaacctcttaagccagtgaaccaaaaaccatatgaaagaaagtaatactttctatgattggtcaactggctgttcaaaaattcaacaagcaaacaaacatgcaaacatgtgacatatgtcattattttgtaaaaacataatgccactctggccccaggaatcactacagcccagctggtccttaaaggtgcaaacagcctttaattgctactaaacatcttctctggtattttactgcccatcacacttgccacatgattctcagaagcttaggcttccaagatgtttaaggaaaataaacagggtgtgatgtggatcaagttttcagtgattgttttaagtgtcattttaaaaagaacttcctagtaatgaagtatgtaatagtccttgatattaaattttttctagtgaaataaactatgctttaataagacaatgttgctctaagtttgaccgcctgannnnnnnnnnnnnnnnnnnagagggtactatttcatatattgtgtgagccccacaaaatgtctattttaaaaagagtatagtccctggccaggcgcggtggctcannnnnnnnnnnnnnnnnnnnnnnnnnnnnnnnnnnnnnnnnnnnnnnnnnnnnnnnnnnnnnnnnnnnnnnnnnnnnnnnnnnnnnnnnnnnnnnnnnnnnnnnnnnnnttatttaaatctacacagaaaaaaatatcaacttattaaaaactattaagagcactgtctataattcaaaatctttcaaacccaatcacaaagctctttgctgttttattgcccatccctgagtaaagattctatcatttgtaattttttaataacgtaaattttacattgataagaatgatgttataacaattcctttgccaatataaaataaaccatntgtcatttttt

SEQ ID NO: 86742 - DNA, 642 bp, Homo Sapiens
  misc_feature (32)..(32): n is a, c, g, or t
  misc_feature (148)..(148): n is a, c, g, or t
  misc_feature (632)..(632): n is a, c, g, or t
ttgtggctgactcggtgccggccctggaatgngaagaaaccctgaacaaacgccgcgcgatgttccgggctgtggcgttggcagagcaaacgccgcaaagctaaagtcagacattggacaacctgtgggagcaggcaagcccgctccncacagttgttttgtggggcgtttaagatccgcttagaaatccagactcacccccacactgacgccttgctgggtaaaactgtcatccttcctcacgttatacgccgcccgtaacgccagctcctgagtcagcttgtggctgacccccagactcaatcggtccgaattgctgcgcggcgtgtagccgtccagcttgaagtcgatgcctggcacgctgttgagcgacatctttaccttctgggtgtcgttttcgaactcatgctcgtgggccacttcgccaaacacttgggtttgcggcgtaatccggtagctgccctgcaggccgacgcccaggcgtttggaatcgcgttgctggtcatcgaaggtcagcgcggtggagcggttgcccttttccgaataaccatcgacttcgacccgcgaatagtccgcgctgatgaacggtgacaaatgccaatcgctgccggcgccggcaatgtcatagcccnaagcggccgc

SEQ ID NO: 86743 - DNA, 544 bp, Homo Sapiens
  misc_feature (159)..(159): n is a, c, g, or t
ctcaggctgagactctggcctgtgctctgggctccagcagtgtgtcaagagggcagcatggtgcagctgccatcacaggtaggtttaaaacaagtgaactagaagtcatgacacccaagtctgcctaaaatggggccaacacctgtcaccctgcctctntgtggggtgacaggtatccctaccacgagggggacaggagtgctccccacagacaggaagaagcctcaatagagtccaaccagtcccctgcctggcataaaaactggctcttggccacctgcaggtgacacccaggttccttggtagggagctcactaggtggcttggccactggcagactccttcatggtcacaatgcacttccatacatgctgctgagctggagtcaccctcccggctggcacccgctgggtcttacagctacgtgactttggaaggcatcagaggagttcagaccccaagaactctaaggcgttctcccaagtcagaaacttccctctaagcatggaaaaggaaaggacaaaaggtttctgtcggtgtcggg

SEQ ID NO: 86744 - DNA, 137 bp, Homo Sapiens
gcggccgcccttgagttcctcgaccatcaggaagcggccgttgtcttcgacgagggtggcgacggtgatgtggggttgccaggtcataggtgcctcaatgtgtagtgactgaagaaactcgttcagtgtggaagctg

SEQ ID NO: 86745 - DNA, 510 bp, Homo Sapiens
gcacgaggcggctttccacctcggcagcatcgcgcccgacaatcggacgaatgcccggcaaaatcgacaggctgcccgcatcacggccaaaacccttggcgcggcgttttaaatcagccgagtaagccttggcttcttcgagcgtctcgacatgtacaaaaatcgcatcggaatgctcagcggcaaagttgcgcccatcttcagaggtgcccgcctggaaaatcaccggctggccctgacgcgagcgggcgatgttcagcgggcctttgaccgagaaaaactcgcccttgtggttcaacgcatgcagcttctcgggggtgaaaaactcgccgctctgcttgttgtaggcaaaggcgtcgtcttcccaagaatcccacaggcccttgaccacgttcaagtgttccttggcgatgcggtagcgcacggcgtggggcgggtgctcggctttgccgaagttgtcggcggtgccgctcagccaggaggtgaccacgttccagccggcgcggccgc

SEQ ID NO: 86746 - DNA, 1036 bp, Homo Sapiens
gcttcgggcaggctgaagcaggcaaagcgggtcagccccgcctcaatcaaatgttcgtacgccaacttgatcagtgcatggttatcggtggccacatagggaatgcccttggggtaggcgcgtgcatcctgataggagccgcccactgccaccaccggcaaatgaatatcggccagcgcctcaccgatcagcgggtcatcgaagtcggcaatgatgccgtcgccctgccagcgctcgatgcctcttaaacggcacaaaaagtcttcctccaggaacaagtcccaggacacacgcgtgctgctcaggtaatgccgatgccggtaatgatgccgcgatcgtagattttgctgccgttgaacaacagggcaatgcggtgcacgggcggtagggttttcattgtttttatcctggggccggtcgctacagactagccctggctggtcaaaatcgcactacgtcttggtgattttcataatcggcagtcccgatgccgttgctagtatcggggcaccaccaagaacaataaggaaaacaccatgccgtacttcccaggtgtcgagaaggttcgcttcgaaggccccagcagcgacgcccctctcgcctttcgccattacaatgccaacaaactgatcctcggcaagcccatgcgtgaacacctgcgcatggccgcctgctactggcacaccttcgtgtggccgggggcggacatgttcggcatgggcaccttcaagcgcccgtggcagcgcagcggcgagccgatggacgtggccatcggcaaggctgaagcggcgttcgagtttttctccaagctgggcattgattactacagctttcacgacaccgatgtggcacccgaaggcagctcgctcaaggaataccgcaaccacttcgcgcagatggtcgaccaccttgagcgccatcaggaacaaaccggtatccagttgctgtggggcaccgccaactgtttcagccacccgcgttttgccgccggcgccgccagcaacccggacccggaggtattcgcctacgcggccgc

SEQ ID NO: 86747 - DNA, 998 bp, Homo Sapiens
  misc_feature (134)..(134): n is a, c, g, or t
  misc_feature (843)..(857): n is a, c, g, or t
tgacattgctgattgttgtaacacagtcacatcttgttatcccaacctatttgaaggaatgatctggttcattgtccccatatcttgtgtgatctgtaatgacatcatggcctatatgtttggctttttctttnggtcggaccccactcatcaagctgtccccgaagaagacctgggaaggcttcattgggggcttctttgctactgtggtgtttggccttctgctgtcctatgtgatgtccgggtacagatgctttgtctgccctgtggagtacaacaatgacaccaacagcttcactgtggactgtgagccctcggacctgtttcgcctgcaggagtacaacattcctggggtgatccagtcagtcattggctggaaaacggtccggatgtaccccttccagattcacagcatcgctctctccacctttgcctcgctcattggcccctttggaggattcttcgcaagtggattcaaacgagcctttaaaatcaaagactttgccaataccattcctggccatggaggcatcatggatcgctttgactgccagtatctgatggccacctttgtcaatgtatacatcgccagttttatcagaggccctaacccaagcaaactgattcagcagttcctgactttacggccagatcagcagctccacatcttcaacacgctgcggtctcatctgatcgacaaagggatgctgacatccaccacagaggacgagtaggggccacccagggccaggagaacaggaacagaactgagcaggggcaggtctccaaggcaagccccagctggtgtgacttagacaatgacgaggcttcaactcactgtcnnnnnnnnnnnnnnnggagggtattttttatttgtgggttcaaaaaatctgtatatacagtctatgtgtttagaatttgtgttgtaagtaaactacagctttgcctcgtgccgaattcggaacgaggtgttaccattctgatgttggagcggccgc

SEQ ID NO: 86748 - DNA, 1305 bp, Homo Sapiens
  misc_feature (514)..(530): n is a, c, g, or t
  misc_feature (1195)..(1229): n is a, c, g, or t
ctgaataaaataaaaactgaaactttcagtctgcgatgaaggtgaacccatcttataaagcagagcttacttacattctgcaggattttggtgtggatgcatagaaggcttacctggttagtaagcctccattcctccgacctacagaaggcaacccttctgcagctccaagcagggatttctagaaaagaccaggtgtacaaaacatctaagctgtgcctcccaccacaggtggggaagtcccctgatttggtcagacacagatgaatgtctgtgtctgactgagcccagaaacagttcaattgatgggggctggaaccaccaagaaaacactcctgacctgggcaacactgtcttccagattattaatacttttgttttaaaaaaatccaaatggttttacaacccgtgacttctttccaactcaaagctgtagtttacttacaacacaaattctaaacacatagactgtatatacagattttttgaacccacaaataaaaaataccctccnnnnnnnnnnnnnnnnngacagtgagttgaagcctcgtcattgtctaagtcacaccagctgggcttgccttggagacctgcccctgctcagttctgttcctgttctcctggccctgggtggcccctactcgtcctctgtgggggatgtcagcatccctttgtcgatcagatgaaaccgcagcgggttgaaaatgtggagctgctgatctggccgaaaagccaggaactgctgaatcagtttgcttgggttagggcctctgataaaactggcgatgtatacattgacaaaggtggccatcagatactggcagtcaaagcaatccatgatgcctccatggccaaagtcaggatgcactctcacccaccagttctgtccatactctgaagacaagttggaaagggccactattgaggacctccggggtatcatctgcaaagactggcaggggtgcggattctgcccggctctcactgtccgatgcagtctctccatcgacctttgctactgactctgactccttgtcctcgggtggcgcaaccggctcatgggccaccctctgcctcagctctgtcatcctgggaacaatcggcccgacgtcgccgcgagctagcagtcgaagccgccggagcccccggccgtaatggccgaattcccgggcatatgtccgctaccgtcgactgnnnnnnnnnnnnnnnnnnnnnnnnnnnnnnnnnnncgccgcttcctcgctcaaatacttcgctgcgctcgtcgttcggctatacgcgtagcgcccaaaaggtcagatagta

SEQ ID NO: 86749 - DNA, 775 bp, Homo Sapiens
  misc_feature (728)..(728): n is a, c, g, or t
gcggccgccgcgcatggcgcgcccagaattagccgcgccagcgatccgcgcctgaaggccttcgtcaagtcgttcaaccaggtgctggccacgctctcggaacaggtcgcccgcgacggcgaaggcgcgcgcaagctggtcgagatcaccgtcgagggcgccaagaccaaggcctcggcccgcaggatcgcgatgtcgatcgccaactcgccgctggtgaagaccgccatcgccggcgaggacgccaattggggccgcgtggtgatggcggtcggcaaagccggcgagccggccgatcgcgacaagctctcgatctcgttcaacggcattcgcgtcgccaagcgcggcgcgcgcgacccctcttacgacgaggcccgggtgtcggaggcgatgaaggcgccggagatcgcgattctggtctcgctcggcctcggcaagggccgcgaccgcgtgctgacctgcgacctcaccaaggaatatgtcgcgatcaacggggattacaggtcctgacgggatggccgacctgaagctcaccctcgtcgtcgcctgcgcgctcgtcgacaccgacaagcgtatcctgatcgcgcagcgtcccgagggcaaggcactggccggattgtgggaatttcctggcggcaaagtcgagcccggcgagcggcccgagcagagcctgatccgcgaattgcacgaggagctcggcatcaccgtcgccgagccgtgcctcgcgnggctgaccttcgcgagctacggttacgagaccttcaccttttgatgc

SEQ ID NO: 86750 - DNA, 922 bp, Homo Sapiens
gcggccgcggctgtaggcttcttttaatttggtatcgtatgttttgagcagaggaccctccaattcatgggatcaggggcaaaaatccacagctcatcccaggggccctggcaggttctcagagcctacctcttccttgtatatttgcatacagcctggtaacccccaggcatgcatatgtacaatgtgaccacacacagcctgacatctttcacctgtcaagtccaatttaaccaggaattggcatttgttaccataccctgcctcttgctttgcagagagcttctacagcaaggctgagtccttcccacagtcctccatgcctgctctttagggtctaacccagcccatgttttttgggaaggatagagaagcagaggaccctctttgctttcctgaaagtagccatgcccttgctggagggttcaccacagcaattggtgggaaagggtcttaaccaatctccaacacttttcttctcctgaaactgagaaggggtaaggaagtagctaggtccccttggacggagcatggacatgagacctgtgagtactggtgtctctccttcagagctttcatctttggttcgctgtagactctgggactatcagaagagaactgacccatacctgtctagccctgcccttccaaaaaaagagcctcccattaaagaggagttagagctgggccttgaggctcttcacttctttcaacagatatttaatatgtacctactaaatgccaggtactataaaaggtatagagagccatccttgctctccaagactccagggaagggatgggcaaacattttcttaaaagccagatagcaaatactttaagctttgtaaactacatagttttttaaaaaatattttctaccattgactaataaaaattgcctatgttaactgtgtaaaaa

SEQ ID NO: 86751 - DNA, 768 bp, Homo Sapiens
  misc_feature (643)..(651): n is a, c, g, or t
tttgcacgtttttgagattgcccccacccacctctgcatacttaccatttccaaactcggtttaaaaatctactttttccaaaaacagtaacactgacattcctcccctttttcaagggagacagagtagggtccttcaaatcttatttaccaacagatttgacaactgttttaacatcaaatctaaggttttacttcaaatcaacttcagcaggaaggaaagaaggtccagttggacaagctgatgaattttaagtaaccaggggaaggcagacagtggaacaaataggtgggagaccactgtcaaagcatatttttgcccaaaaggtctgcttacttcagtcagctggccccataaaccaagtcacacacaaaatcaatgtcggtcaaattagtgcaaatcaagctcgtggattcaaatgactatagaaaacgggaagagtagccaattcctggaagctgaagtcaggttaaccattaccaactccctagaggacacatgggaatacacataccaagtttccctactatttcccaggagtgggatcatcggtttcccttgcagagaaagaagtcttcacttccatgtttcttgcctaggatattaatgactccaatccatacgtatctatgtatggtttcnnnnnnnnnggaaacaagtatcattactcaaaatctctattcagtggtatggatgggagttcaggctcccaagttttcacaaaaataaaatggggatgtaaaaagaaggtcaacagccgcggccgc

SEQ ID NO: 86752 - DNA, 926 bp, Homo Sapiens
gcggccgcgtcgcgcatggcctgcagcttctgcaggcggaaggacagctgggcggcgagatcctcggccggcacctcctcatcgccaagcgccctgggcagcagcagccgcgacttcagataggcgagccacgccgccatgaccagatagtcggcggcgatctccaggcggcgctggcgcgcctgctcgatgaaagcgagatattgctcgaccagcgccagcatcgatatctgcgagagatcgatcttgtgctggcgggcgagatccaggagcaggtccatcggaccttcgaagcccagcacgtcgacgatgagggtctcctcatcggtctcggcctcgggcgccgcctcctggcggaccgggccttcgccatccggccatttggtttcaggtgtgttctcttcgctcgtcatcttcgtgcaatcgctttcgtccgcttgtcgcagaaagcggaggtgattcgcccgcctcagtagagattatccccagattccaagcttttcgagtaatcgcgcagttcgggcgcgggccggagcgcatcgggtccgacaatgacgctttcttgacgaccggctcagttgccgcgcaccaggcagtcgcgctcgccgccggcaatgagcgaatcgcacactttcgaggcctgggccctggaggccatcgggccgacgctgagccggtaacgcgggctgccggcgaccgtcgccttcacgatacgcgggctgaagcctccagcacgccgccgtgcttggcgcgcagtcggtcgaatttcggcctgcgcctcagcttccgagcggaaagaggcgagttgggcggtgaagccgccgcccgacgacggcttggccttctgagccggctgctcgggctcaggcgccgggatgggctgcggctccggcgccggcgtgatcgcggcgatctgctgcggctcg

SEQ ID NO: 86753 - DNA, 587 bp, Homo Sapiens
gcggccgctgcatggccagcgtggcaggaagacatcccccctccatcccaacccactggaccagaactgggagaggaagagagcaggacaaggcagacagaaggtcaggtcaggaactggtgctgtactgggtacacagtaggcgcccaggacaagtgggttgcaagacaggaagaaaggaaaaggaagggcagagtgctggtttctccaggttgggttgggggcactgctgtcccccctccagctaggacccagcccatccccagatgcctgagcctttgtccaaagtgaggtcactcgagaattcatggacacggcccccagtcagggggcatcttgcaagacctttagtgccacaaataagcatcgagcacctccccattcacacccccattcctcctggctccttatcccccatggtgtttattatttatttccctccccatgcccctggggaccccaaggccccagcttccctctgcacccccagcctatcccagaggccttgcaggtgaccagcagtgtcattgtatttatatacagagcttatgactttaatttttcaataaagaaatctgaacaaggtt

SEQ ID NO: 86754 - DNA, 996 bp, Homo Sapiens
aacttgcatttagtagaataactttatttctaacactgagccttctacataggaatttacagaaatgaataacactgtgctgcttattctccatttctcttcccagattctctctccacccttctctgtgcccacctgggctctccagcagatgtatctggttggtttctccaaagagagacaccagcaatttggcaccacagttctggtagtaatgatgtctcttacaaggtggcccctccttcatgacagcagttcttactgggctctggtaacactgtttccctccttgcccttcaaggctcagaatggcaatggcttcctgctgatacaagtctctgggtgtttcactgtcccttgtttctggcccacaccactgtaatcagtctgccattaaaatatttttagttggagaattctgttttccaccagaaagaaccatggctgatacaaacagccatccctatattaacttgtgaaaagaaataattcttccccctaattaccatatagaacattaacacttagaaaaatattcctctgtgtcagctggaatgccttcagctctaagtatcagacagccctaagaccaaataaaaaacagttattgagggttataaaaagtcccagtagagaacaggtatagagagcagagtagctcggcaacgtcacctctgagctggcttttcccacgatgtgcactgttatcttcaggctactgcccttcagagataaaaacgataagccaataccatgttacagacatgaaaaagcccagcagagtctcttctcatgtcatgacaatgttgtatcaaggagatctttcccagaagtactacacaatacttcccaaacatctcattgctcccaagttcaccccaacagaatcattaaaatggaacttccatgattagctttgactaatctggacttaccacctaagtcatctgggagaaggatgcacaaaaatataaaatttagctcagccgcggccgc

SEQ ID NO: 86755 - DNA, 763 bp, Homo Sapiens
gggcgcttccaacgcggttgttggttgggtagcgccatgccatttgatgctgcagctcctgataggggaccgtttcaagcataaagacatataacccgagtgccatcatcataattcccaccccagatctcgatcagaaaaattactgcgcgccttggccgcatctttctgcatgtgctcccggagcgctttcacggcatctgttgcaacagctttgctgttctggttgttcctcgcgtcaacactgagatcgatcttcggctggtagtagaagttaccgccgtttggcgccttcactggtttcatgcttgagccggtaaaacgaatggccatatcatttgccgtgtagcctgttggggctggctcgcccacagaaccatatttttgggcgatggggttattttttagcagctcattcgtttgggctaatgcctcgtttttttgcggcaacaggtccagcttttcaagcaaccatttaaagccatccatgactgcgcgcagcggtgcggtaatgacgtccagtcctcgcttcagaccaataccaattttttcagcagcgctactggccgcccgttttatttcttcccaggtttcgctggctttggcgcttatgctggcccaaacgcccgaaatgtaatccttgatggcctgccatttctcgctggtatatgcactggtgctgtccccaaagtctttttattttcggccccagggtgtcccaattcatccagatgtagatggctgcagcagcgattgcggccgc

SEQ ID NO: 86756 - DNA, 774 bp, Homo Sapiens
aagaccggcatgaccgccatccagttcacgccgaccctgcagggcattttcgtgctcagccagcgcagctcccaggcgccgaccttgtcgacggcgcgcgccgatggcggcatctggggctgcccggcgacccgcacgctcgcctgcaatgtcctcgatccgctcaacaacagcacctggaacggcttcgccaagctggtctggcggccggccgacgatcacgaatggcggttcgtcgccgaggctttcaaccgcaacaccacggtcgaccagcgctacgatttcggccagacggtcacggtttccggcgcgccgcaccgcaacggccagtatcagcgcaaccaggtgctcagccggcagaacttcgccatcgcccatgactggacgccgcattggggctggatcgacgcggtgcgctggaacgtctcctattcgccgcagagccgccagctcgacagcacccgctatcagctgaacctcaataccaaccagcagcggcgcaccaatgcgatcctgaactacaccgagaatttcctgcagggcgaggttcaattgacctcgcgcttcaacctcggcccggcgcagcacatcctgacctatggcttccagggcgacacgaccaagacggactatttccgacaggacacggtgaccaatgccacgaccggcacgcccatctcggtcaccaggggctcgggcttcaacttcgccaatgccaatacgacccgcgccgatctctatctgcaggacgagatcagcatgctcggcggccgc

SEQ ID NO: 86757 - DNA, 774 bp, Homo Sapiens
gcggccgcgatcgcgaggaacccgatgataaacagcgcggcgcgcactcgatcgaacggcgcggtgacgtccgactccttcatcagagccaagaaggtgatcggctcgggcgaatcgacgtcgcggagttcggagagtttgccgacatacggctggccgccgtcttggattcgcaaaacgtcgttgcgacgaattgcaggagcctgcgcggagatcgttcggccgatcggctttgtgccggaatacagcaccaactgcaggccactttgccgcgcgatcgactgggcgaaccgcgaatcaatttctaaccctacgacgatgactccgtaaacgacttgcccgatttttacgggcgtcgtcgcggtcatgtaggtgcggttcccgaacgtcgaaacgccccgccaggctcgcccatcgagcgcttcatcgaccttaaatcgatcccgcatgtccgcgccgcgggcgaaaattccggaagtcgtgcagccgagttcccgtccgtcctgatctatccccacgatccagtcggcgtgaagcttgtcgcgatactcgccgagatattcctcgagcgaggcccgatggtgagtcccgagcacctggcgggtgacgccgagataggcgaggaattcgacacccccggcgagttcatcgatacggcgcgcgaccgcatcgtgcaggagtgcgttggttcgtacggcggcgcggtccgaagcctgggtcacgggcccctgcattacataggaaagaagcgcaacaaacgacgacgacgcaagc

SEQ ID NO: 86758 - DNA, 552 bp, Homo Sapiens
gcacgaggatgattttcattcaaaggccttgtcaacacatttccatggagtattatagaaactctgagagagggtggtgagctcacagaagcccaaatgcaggaataacaatgtaagcctatgtttccagaagcctctcttttcttcatgctttggacagaaagcatcactaattaaaggaagattgcttgaaatactgtttattagaaagttcttcctaattacctattttgtttcatatcagaaagcagtgttttccaaatgtcaatctatgggttccgtgcctctgaattatattgttaaaaacacaaatttccaagttccatctcaaagctattgagtatgactctccaaattataattcagtgatctttcattgtaagtaattaaaaaaattatattaaagttcaaaaacctccactatttctgatgtatggtcatgtttagaaaccaccaatctcaaagaaaatggaagctttataaggctaaagcaaataattccaaagcccatatgtaggtttcaaataaaaaaaagcatacagccgcggccgc

SEQ ID NO: 86759 - DNA, 779 bp, Homo Sapiens
aatgtgaaatatatatatattcaaacatatataacttacatataaaatgctgaaaactttttctttaatgattatttatgccatgccaaaagacacatgattatttatgccattaaatctagactgtaatatcacaccatttgttctatacaaaaaagtcagactattttgtgcgagtttgctctttattgacgagaatatgagcaattccttaattgacagactgttgtgatgcatagtacagtgtgttattatattctacagtggaaataaaagggtttttcaaaaaagcctccattctaagtacataatttaaacccattagtagcttcaaaatataattagtatcgattctaataatttactttaaaaattttaatttttcaaagtagttttcaaaaaaactaaactcaagtttctttaacatgaagtctattacattatactttttactcaacattcaagacgttaatagcacttacaaaatttggtcatgatagcaaatgttccagccttttatattttaataatatttcataatctgcatactttgttaatatcgatagtatagtgtaatacaaaggcacactgaacaagaaatctagaaaattcaattatactatcaagcagctgtgtcattagctttgctgggtttcaaatttcttttctatacaatgagatgcctagttcaattacattttcttttggtctatattctgttacattgacttttacttattaatattaaaaaatacccaaaatagtatcctatgtgtttc

SEQ ID NO: 86760 - DNA, 811 bp, Homo Sapiens
cgcatcctcggcgccgatgggaagcgccggaccgtcaaggtcgatgccggcacgctcaggatcctggacgaggacgacgatgattgaggaggccggcccgtgcgcgtcctgatcgtcgaggacgagccgcgcatcgccgccgatatccggcaggggctggagcgggccggctacgtcgccgacgtggtggcggacggcgaggcggcgtggttccgggccgagaccgagacgtacgacgccatggtgctggatctcggcctgccgcggctcgacgggctcggcgtgctgcgccgcctgcgcgccgccgacgtcgccctgccggtcctgatcctcaccgcccgcgatggctggcgcgagcgcgtcgagggtatcgacgccggcgccgacgactacctcgccaagccgttccgcatggaggagctggtggcgcggctccgggcgatcctgcgccgcaccgccggccacgccgcgccggtgctgcgcgccggcgcggtggagctcgacacccgcacccgcgcggtcagcgtcgacggacgccccgcggagctgaccgccctggaataccggctgctggccttcctgctgcaccggcaggggcaggtcgttccggccggcgagctgctcgaccacctccacggggtcgggaccgagcgcgaggccaacgccctggaggcgctcctgacccgcctgcgccgcaagctcgggccgggggtgatcgagacccggcgcggccagggctacctgattgccggaccgggcggatcgtgaggcgcgactccctccgcctgcggctcggcctcgcggcggccgc

SEQ ID NO: 86761 - DNA, 649 bp, Homo Sapiens
cggcacgaggcccagcagtagcaacaccgccagccagaaggtggttacagcagcaccccgagcgcaaccagcttgaccacccacacgaacgcggtggcaccggccgccggcatccccttggacaccaaccaactcgatgcccggcgttcgccgcgcacgtaggcacgccatccgcgacccaaggtgcggccgaggcgttctgcggtgctgatgcgtgtcgtggtgttcatggtcgtctcctgctactgagggatgcctattccagtttgctccaatcctgcttgcttgcctgtatcagcgcgtgccagtcgtctggtgggttcccgcgtccgagcatcttctcgaacacgacatacgggtccgatttgctacccgaagaccgcagggtctgttcatcgttgacccaggcgtacacaatgaccttcgccttcgagtcgtaccggaagaacagccggaaccgccgtccgatcttggcccttcgccagtggcggtgggcaggtcccaaggtgttgccctggcggtactcgtcgcgtgccggatcgcctggcaccacatccaacatcaactggctcagggcccggaagagcttgacgttggcattggactcgaagcccgccgggtcattctcctgcgcgcgcctcgcggccgc

SEQ ID NO: 86762 - DNA, 822 bp, Homo Sapiens
gaaggtgatggcgcatgacggtggtggacacttctgaagccggttcgtcgaacgcccgccatggacgccgcacctatcggcgcgtgctgctgaaggtctccggcgaggtgctgatgggggagaccccctatggcatcgacatgaagaccgtggacgccgtggccgccgacatcgccgccatcgccgccctcgggggtcgagctgtgcctcgtcattggcggcggcaatatcttccgcggcctttccaccgccgccaggggcatggagcgggccagcgccgactatatgggcatgctggccacggtgatgaacgcgctggccatgcagaacgccctggagcgtatcggcgtcgacacccgagtgcagtccgccattcccatgcagagcgtgtgcgagccctacatccgccgccgcgccgagaggcacctggagaagggacgagtggtgatcttcgccgccggcaccggcaatcccttcttcaccaccgacaccgccgcggccctgcgcgcggcggagatgggctgcgatgcgcttctgaagggcaccagcgtggacggcgtctacaccgctgatcccaaacgcgaccctggcgccgtgcgttacgaacgcctcagctatcttgaggttctgtccaaggaccttaaggtgatggacgcttcggccatcagcctgatgcgggagaacggtattcccatcgtcgtgttttcgatccgtcgtccgggcgccctgcgcgacgtgatcgccggcgacggcgtgttcaccgtcatcagcgaagacgccgccaactgaaccggtcgcgtccgcggaccagtatgcggccgc

SEQ ID NO: 86763 - DNA, 770 bp, Homo Sapiens
gcggccgcgttgtcgccgtccatcgagccgaagttgccctggccgtcgatcagcggatagcgcagcgtgaagggctgggccagccgcaccatggcttcgtacaccgacgaatcgccgtgcgggtggtacttgccgatcacgtcaccgaccacgcgcgcggatttcttgtgcgcagcgtccggccgggcgaagccgtccatcgcgtacaggatgcgacgctgcaccggcttcatgccgtcttccagccctggcagcgcgcgcgaggtcaccaccgacatcgcataggtcagataggcctgcgccgcgtgcgcatcgaccggaatgtcggcgatgtcgggttcgaacaggttgtcagtcaacggagtgctccgggggtttcgttgtgtgtttggaggggctggggacgaggggctagagactagggaagaggtgtggcttcgccacacgggatgaacgcaacaccgcgcggcgctccagcccctagcccctagtccctagtccctagtccctagtccctgccctcacgcatccggcacgaccttgtcgccttccagttccatccagcggcggcgacgctcggcctctttcttgcccatcagcatggtgaaggtgttcagcaccagatcggggtcggcacccgcagtgatgcggatgagccgacgggtttccggattcatcgcggtttccttcagctcgtccgggttcatttcgcccagtcccttgaagcggctcaccgtgagcgcactctcggcgatgccgtcggcgatcag

SEQ ID NO: 86764 - DNA, 743 bp, Homo Sapiens
ccatccatgcatgggaaaagggctttagtatagtttaggatggatgtgtgtataataataaaatgataagatatgcatagtgggggaataaagcctcagagtccttccagtatggggaatccattgtatcttagaaccgagggatttgtttagattgttgatctactaattttttcttcacttatatttgaattttcaatgataggacttattggaaattggggataattctgttgtggtattaaataatattcattatttaaaaactcatcttggtattgagttagtgcattgacttccaatgaattgacataagcccatatttcattttaaccagaaacaaaaactagaaaatgttactccctaaataggcaacaatgtattttataagcactgcagagatttagtaaaaaacatgtatagttactttagaaacaacttctgacacttgagggttacccaatggtctccttcccattctttatatgaggtaaatgcaaaccagggagccaccgaataaacagccctgagtacatttgtaatcttgggctccatgggaatgtccttgattaagatgaaagaggaatggactgatgtttctattacaagatcctataatgctaggacttctacacagcttagaacaatggttggagcttcattctttgagcagaaagactcaaatattatttcagtcacttgtagcaccattggatgtgggtgcacacttggcctaaaatacc

SEQ ID NO: 86765 - DNA, 807 bp, Homo Sapiens
cggatcatcagcacgatcgtggccaccaatgccctgacagttatcagtttgcaatacagcctcggcaagcggatttccccgcgcgacctgaatcggtggcttgccgctggcctgagcctgtttattgtcgggctgggcgggtttgcgctgtcgaccacgctgctgatgtgggtgctgtcgatggcgattttcacccttggcgaaattatcgtgttcccggccgaatacatgttcatcgataacatcgcgcccaatcacctgcgcggcatgtactacgccgcgcagaacctgggcaatgtcggcgcggcgttggggccggtgttgtgtgggtgggtgttggctacgcagccggcgtacagcatgttttatatgttggtggtttttgttgtggcgggcgggttgatgtactttttgggagggctgactgctagtaagcgtggcagcctgacgccaccgtaagacgtttgaaggagtggattcatcttgttgcgaggcaacgacagcgggttgtgagcctcgttccttgcacgctacgcaatacacctttgtcatcacgcctattgatagctccctaacgaaaacgccattctagagggctcgcctctcgcttatatcattccgaatgatagttacctttgtttcattcgattcgtgacatagcacctcgccgcgcatgatccgcccatctcaaatacattggcggatgcacctcatggaacagtcactcaaacacgtgcgcttccccttggcgattttggccgtggtggtgatgagcgcatgcggtaagaccccggatcaagcggccgc

SEQ ID NO: 86766 - DNA, 1205 bp, Homo Sapiens
  misc_feature (234)..(289): n is a, c, g, or t
  misc_feature (1029)..(1040): n is a, c, g, or t
acgaggagaagactcaggacctatggaaaggctccttttagtaagacaaaagtgattcatgattcacaggaaacagcagagaaggaagtaaaaaggaagagatcgcatcctgaattggaaaatgtgaaaatctctgaaacaactgggaattcaaagtttagacctgatactagttccaaatcatcagatttgggatctgtaactgaatcagatattgactgtactgataatacnnnnnnnnnnnnnnnnnnnnnnnnnnnnnnnnnnnnnnnnnnnnnnnnnnnnnnnncttttacagctaacatatctaaaactgtgagacgtcaaagacaaagcaaacgccctaggttaagtgtggatgataatgactgggaggatttggactatgcaaaatctaaaagagttcttcgacgttcaaaaataaaaacgagaaatcagggtagaaggactgtgagataccatgatggggatgatgacagaagtttagaaaatgtgttagatttcaatggttgcaccttatgaccttgagggaaagccagttcatttaagagggaaatggactggcatttatggtgaaagctggctgttaaaattatttttttgtcttacaaattcagggaatatatttatatttttctatgaaaagttatgaatgtgactaaatcatgactgttatttttatttgcacttgctggtctttgtagcagcattcagcacaggtgccaaaatatgcttcattttgggggcagatctattttgacagtatttgactacatatagcaagagtttgaaatatgttaaacactagacatcctggttatcaaaaccaatgagcattactttcatggcagcaagtgtcatgcagttattttctgaatttgtcaaagaggcagtagtttctaacccctgttctatagtagttacaacaatttcacaacctatgtttacagattcttcataaatacatgcatactgacactataatcatgggaggtgtaaccatgattagtaggcgaggtacctaccacnnnnnnnnnnnncttcccctggctacttgagtagaatgcattataccagatctggtcactttcattgaaatggtttctaattttcttcccaagtgctgttgggtttttttcttcttaaggaaaacgttgtcacttttatgttataaacttgaatttataaagtgctggtaaattatt

SEQ ID NO: 86767 - DNA, 735 bp, Homo Sapiens
gcggccgcccgttgcggctgaccgaagccgggcgatttttctatgagcacgccaatgtgctgctggaacaactggccaaggtttgcgataccacgcggcgcatcggccagggcgaaaagacctggctgggcatcggctttgcgccatcgaccctgtacggcgtgctgccggagttgatacggcggctgcgcaaccatgaggcgctggagctggagttgggcttgtcggagatgaccaccttgcagcaagtcgaggcgctcaaggccgggcgcattgatgtgggtttcgggcgcattcgcatcgacgacccggccatcgtccagcgcgtgctggtggaagatcgactggtggccgtattgcccgccggccactcgctgctgggcgcgcccgccaccctcgcgcaattggccgcagagccgtttgtgctctaccccggcaacccgcgccccagctatgccgaccatgtgatcgcgctgttcgacgcccatggtttgagcctcaaggtggtgcagtggaccaacgagttgcagacggccatcgggctggtgggcgcgggaatgggcgtgacgctggtgccggcctcggtgcaggtgttgcaccgggcggatatcggctacacgccgattgtggaagccactgcgacctcgccgattatcctgagcaagcgagtgaatgatcagtcgccagggctgagtcattgtttgcagttggttgaagagttgatctgaaacctcc

SEQ ID NO: 86768 - DNA, 1116 bp, Homo Sapiens
gcggccgctccaaatcagaatggagcaccacagcagccatggcggccggaagcgctacgcctgtaagggctgctggaagaccttccacttcagcctggccctagccgagcaccagaagacccacgatgaaggagaaaagctacgcgctggggggcgcccggggcccccaaccgtccacccgcgaagcccaggcgggggctagggcgggcggtcccccagagagcgtggagggcgaggctccccccgcacccccagaggcgcagaggtgagccgctgtgctgtcccgttccggaggggccgctttgccggccgtgaatcccagacgaggcattgggcctttccacgcccctgggtggcggcttcctgtggtgtttgtggacgtcctctgcctgtgccctgaatccgctcctgaggctaagcgctcccaacgagaagggtccacgggaagccctcacctctgtaaacacaccctgggccagcgctcgcatccgaggggagccgccggatgtggaagaagactcggctttcctgcagccatttagtgccgccccatgctaggttatttgacattgtgcagtgtagagttgccttaaagtgcgtgatctgccagtgctttcttcaagtcacccttgccccgattcctcatgtttgcgctccccagggttgctcaagtggaaattttgtcagctgtttagccttttcgtacttggcgtgatgtcaacttcacttctaatctgcaaaagcagaagctgtttcctagtttacctcgcgtgtgtttacctatatggagtagctcgcagagatcacagaaatgcttgcagcctaaggcagggttttcagaccgtgggtcccagcccatttagtaaaatgggaaatcaattagcaagtggtcaccagcattacacagcaatgaagcagaataaagtaggccagaatgcatcatgtagtaaaggcaaatactgttttgtgaaacttttcacccatacatctaaatgtgagaactggttgcaatgtaagacatttcttgctgggaagttgtgagcaaaataagttgaaaacactaataaagatctgtctgtctgagcaaaggagactaaaataattgggctacaaaaa

SEQ ID NO: 86769 - DNA, 835 bp, Homo Sapiens
ttcaataacctaatctcaaaagtgacatttcatcctttctgccagatctatctgagtccttatgtccagcccacactaagaaaaggggaatgtagctccatctctttgggagagaagcatcaaataacttgtgaatatatctttaaaaatcaccttacaagtggtggcgctcgcttccccaaagagaatctgagttctttctaaaataccaatcctttgttaaaatgagatggagagtagatgagggaatgcagcggcaatagggaagacaactattccaggcagaagagaaatgctgtatcatccacacacattcctcaacatacctaaagctacctttaatggttttaagtaagaaaatggctgagggatttaaaaatctttactgggaattagaaagcccctagcaatacaactcagtaaactggcattaagatacagccatgcgattatcgtggatgggaaaacggcaagattgtaacaatctgcaagcatgttgattgatcagagttgcaaagtactatcagctggccgatggcatacacaaagtgcagaggagctttcaactctgtaagaagaacaatgccggaggagtagaatagctatccttagcccaggtgctcactgcccctgtcacgtatgctcatgccacacctgagataccgggagggcagcgtcttgtcctatgtcctcccattactttcattcccaaagtatttctgcctatagagctcttccggcctttaaactccttccagctgtgtccaaccttttcaatgcaaggactattttgcttatctgtggtggtggatatcatgaaaactatgcatggacc

SEQ ID NO: 86770 - DNA, 635 bp, Homo Sapiens
agaattcggcacgagggctgcgcacgccgctggcgttgtcgccgcgcacggcccggaagaagtcttcgaacgatcccgcatgtgcggaaaaagatgcagcaatgacaatgagataaatcgatttcttgaagtagtttttcatgatttgacgtccctgaacaaagtttcgaagttgtcgctcgtcgccttcgcgatggcctctacgggcgcttttcgcagttcggcgatctgctgcgccacatagggcacatacgacgggttgttggtcttgccgcggtacggcaccggcgccaggtacgggctgtcggtctcgatcagcatgcggtccagcggcacgaaggcggccacgtcgcgcaggtcctgtgccttcttgaaggtcaggatgcccgagaacgagatgtagaagcccaggtcgagcgcggcgcgcgccacttcggcggtttcggtgaagcaatggaacacgccgccggccgccttgccggcgccgtcttcgccctcttccttcaggatcgccagcgtgtcggccgaggcttcgcgggtgtggatcaccagtggcttgcgggtttgctgcgccgcgcgaatgtgcacgcggaagcggtcgcgctgccattccatgtcggaaatgctgcggccgc

SEQ ID NO: 86771 - DNA, 647 bp, Homo Sapiens
  misc_feature (372)..(396): n is a, c, g, or t
  misc_feature (585)..(600): n is a, c, g, or t
ttcggcacgagggggaatgaagcaaaatatccagaggaaaggcagaggctagagaaggaatcttacaggattccagaggagaaagacaagttacgtgtaaggaaagagattcagattggcctcagatttcctatcttgcctagagactagaatattgtaatttaacaactgtagactgtgaagagaaaaacgctttgacccaggaatgctcttgtcagccaagatattattctctgattaatacaaaagaaatatccttgagaatttggaatataatcacccatacacctagagctgccatattgtacacactccaacagtcaaacccacatttaccttgtataaccagaaacagctgagaatccactaacnnnnnnnnnnnnnnnnnnnnnnnnnccgaatcaaaacaaacacctcagttttgggaatagaaaaacaaaagtgagcaagatttgccaaggcttatgtcttttctcattggtcatgatagaaatcttaaaaaagaaaaagtagaatttttacaagccatttaatctagtcacaagtcaataaaactagaaaaaaatgaagagcaagaaggaagcnnnnnnnnnnnnnnnncacccttacctattataaaaaattaagaagcctacagccgcggccgc

SEQ ID NO: 86772 - DNA, 609 bp, Homo Sapiens
gcggccgcaaggtcgataccatgctgtgggtgagtctggccatcatcgtcgtgttcggcggcgccacgctgttcttccacgacgcgaccttcatcaagtggaagccgaccgtgctctactggctgttcgcgctgacactgacggtttctgttctcttcctcaagcgcaacctgatccgcgcactgatgcaggaacaggtggaactgcccgaacccgtatggtcgcgactcaacgcgtcgtggatcgccttcttcaccgtgatgggtgtgctcaacctctacgtggcctacagctacagcgaggaggcgtgggtaaacttcaagctgtacggcggcatgggtctgatgttcctgttcgtgctcgcgcagggtttcatgctgtcgcgtcacatcgaagaaaagaattcctgatccaatagaggactgcatgtactacgcattgatgggcgaagacgtccccaacagtcttgaaaaacggatggccgcccgacccggccacctggcccgtctgcaggcactgcaggacgaaggccggctgctgatcgccggcccgctgcccgccgtcgacgccgtcgatccgggtgctgcgggctacaccggccctcgtgcc

SEQ ID NO: 86773 - DNA, 342 bp, Homo Sapiens
  misc_feature (282)..(282): n is a, c, g, or t
ttccaggaactggccttagaaaatctaaatatcagagtgaggttggggagtgttccacctcaggaagaaatgctgagtaattgatttacagcccttttgtcaccggccagaccactaaattgtccattacccaagataaccattgcaaccagatatgccgacttgcatgccttgcccatcatgtgctaccagctcagcctgcaaaccttacccctgatgtcaattcccacactttgtctaattaaaaaaaacactcctactggcttttttcaggagagtcangctggagcgtccttgtactggggcacaagccccgaaataaaagcctacagccgcggccgc

SEQ ID NO: 86774 - DNA, 644 bp, Homo Sapiens
tgaactgtagacaagaaagtcttccttgaaacagggataatattcaggttattataaatatttaggcttgaagcatagagctactgtagggtgaaaaatctctgtaggactttctggggcttcagtaccatttacacccacgatgaagggcttaaatagaaaataatggaaaattaaatattactttaaggaaagcaaagctgcactaaaatttttaagggaaaaaaaacaagtagccatttatatttgtgaccttgcattaatatttaaatgttgattttaatatggagctagcacacatagatgcgcaggcacgcacacacaaaacaagcaaatgtaactccaggcatttgtaatttaatataataaatacaagcatgttagaaaaatgctttatgtcttattatttgttaagttaggggaatgagaaggaaaacaaaagcattctcttagtttcatcacaatggctgcatgtacatattgagattctaattgagatttactttgaaatttttcattaaaatattccacaataatcagtttttttcctcttcaattgagtgactgactccctcactcctcctgaatatagtaatgtagtttgatcataggatccctttgaaaaacaggaaggaggataacat

SEQ ID NO: 86775 - DNA, 429 bp, Homo Sapiens
gcggccgctcgctgtaggcgcggcgctcaagcatgccggcctccaccaaaccattcaggcggcgcgtcagcatgttcggcgcgatgcccaggctgcgcgagaactcatcaaaacgccgcaagccgtgcagcgcgtcacgcatgatcaacatgctccaccactcccctacccgctcaaggctgcgggcgatggggcattcgtcgctgataagggatttgcgttgcatggacgttcctggctgcgggtgcaaaagtgtgtgacgccatgttactttcatcatgatagtgacgtccacagctgtgtatccctcaagcaacaggagtcgattgatcatgagtaaacgtatcgtcgtgacaggcatgggcgcgctgacgccgctggggtcgagtgtggaatccacctggcagcgcttgttgaacgcctcgtgcc

SEQ ID NO: 86776 - DNA, 941 bp, Homo Sapiens
gcggccgcgggtcctgcgccggcagattcagcgccaacccctcgggcgacaggccgaagtcgccgcgcgggtggtgcggcgggttgggcacgagccacagatgggccagggcatcgccggccacgaaccgctgcacggcctgcgcctcgaaggtgaagtcgggcgcgaacacatcgcccgccgccagccagaacaccggccccagctgcggcagcgcgcgtgcgataccgccggccgtctccagcgcgcgaccgaaatcccggccttcatgggagtatgaaattgatagctgctcgcgattgtcctgcttgccttcgacggcaaaaacatctgaaaaccggtggccaatccgctcgcccagccacgcggtgttgatcacggcgcgctcgacacccgcttcgaccaacgcacgcaggtgccactccagcagcggccgaccacgcacttcgagcaatggcttggggcaggcgtcggtcagcgggcgcatgcgctcgccgcggccggcggcgagcagcagggccggcacttgcgcccagccgtgcgccgggccgggggccgtcgtgatggaggaatctgcgaagcaggaaggcaccgtgggcatggctgcgcactgtagtgcatgcgccccgcgcaaccgtgcaacaggccagccagccgccccgccaaccagcccatcagcctccgcgccgcccaggctgcggggcccccggtaaaatcccgggtttcttcacaagaacaccgccccctctgcggagccacccctcatggccaactctcaacaaatggcgaatgcgatccgcgcactcgcaatggatgccgttcaacaagccaactccggccaccccggcgcccccatgggcatggccgacatggccgtggcgttgtggggccggcacctgaagcacaaccccaccaacccccagtggatggaccgcgaccgt

SEQ ID NO: 86777 - DNA, 596 bp, Homo Sapiens
  misc_feature (504)..(553): n is a, c, g, or t
caagatgaaacaaacaatagtaacctatttagacaatgatccctggatcggtggtgcttacagaccaagggttacctgcaccctgtggcgtaagaccatctgacattcggttaagaagagaattatatacctaatatcctcttaactggaaatgctgcgagaatatataatagcctatgaaaacattttagctacatccctttatgtgaacacaccaaaaatttaaatacatattttattctctaattttaaaaaaccaatgcttttcatcttaagcagcaagaatgatccacaagtaagcatgaagtcacttttatagaagctgtgttaaattatggaaagtaccttgggagataagctcaagaaccttagtccaaatataaaacaaatcattgcattaaagagacttcctatgttttacaaaaacaaaacaggttgtgactacatgtgataaaaaagtgtctcctatctatcttaaaactaaaaacattcactccaacttgnnnnnnnnnnnnnnnnnnnnnnnnnnnnnnnnnnnnnnnnnnnnnnnnnntcgagaagtagctatgcaaacttataaacataactgaatagct

SEQ ID NO: 86778 - DNA, 720 bp, Homo Sapiens
gcggccgcgcctccaccatcctccacggcgcctggctgctggccctggtcgccctgctgcccggcgtgctgcagagcatcccggtagccagcctcggcgcagtgctggtgtacaccggctgcaagctggtcgatcccaaggccatgcgcaacctcggccaatatgggcgcatcccggtgttcatctacgccgccacggcgctatgcatcgtcttcaccgacctgctgaccggcgtgctggtgggcttcgccctgactctgctgaagctggtatggaatgcctcgcgcctgcgcgtgaagcttgtgcccactggcccggatagcgccgaactgcgcatgagcggcgccgccaccttcctccgtgtgccacaactggccaagctgctggccagcgtcgagcccggcacacgcctgcatctgagcctggcgcgggtcagctatatcgaccatgcctgcatggaactgctggaagactgggaccgctccgcccgcgcccaaggcggcggcctggagatcgtcgaaggggcggcgctgaaacggcgcgtggaaggtcgacagcgcacggcgctggcttgattgcaccacggctcactcacccaggccggtgagtgagccagactggggacagaccttgtgcttcctttgggcggggccggccatccggcgtttgccaaaagagattctccgtaagggcgaagcgtagtaacacctcgtgccgaat

SEQ ID NO: 86779 - DNA, 1173 bp, Homo Sapiens
gcggccgccgagcgtcgctgaaactcctgccagttatagggaacgagcacctcggtcgggagcatcctcagacgctggatacaattcgatggctctatagagttgtgcatgtctggctgtccactggcggctcgagccactggcggagcttcgcgtgcgcccgtgctagctgcgatttcgagaaactgacggaacgtccgaagtgctgagcgatctcgtcgtgcgagtacccctcaacttcgaagagccacacaaccgctcgcgcggtcggcgccaagctcgcgagcgcccgctccagatcgacgctctccgcccgcggtcccggcgtggccggcagcagcgactcgacccactcgctctccgaatccccaccagagcgcagccgcatcgggcccgatgccatggagatcgtaagtacatcaagcacttggaaacggcgatctgcctcacccaagcccccagcggtgcctcaccgcgaaacgactcgaggctctgaaagacggccatcatcgtttcctggaaaaggtcctccgccagagcgcgactgccggtaaggcgccgcaccagcccgaacgccgccggcgccaccgccgcataaatcgccgcccgagcgcattcattgccgcctcgcgcgcttgcgaggacttcccgagagacgtcgatgtcggtgagtccggccacgactgcttagatgcagcagagtcctgaaaggtcgcaatcggttcggctatacttcgcgcccccctcggcgcccgagtggcggaactggtagacgcagcggactcaaaatccgccgcccttaaaagcgtgtcggttcgactccgacctcgggcaccaacctcataccccatttaaaatcaatcagttgcgagcgattgcacgaagtcggcgggagtcgaaccggcatgcgtccccggtgtggattgttgcaattagttgattctgcttgtggtaccgatcttggcaccttcgaatggacccgcgcagcgtcgcattgttgtgagtaacttcggggtcaaaaatcaccccggagatcgggcaaaaattgggacatttgtcagacctcttggattgcgcagtgtccggtcgatggccgtcacacgtccggcccccaacgaactaactgtgcatctcctcgacatcggacgagccgatcgagggcatcgctagtcg

SEQ ID NO: 86780 - DNA, 743 bp, Homo Sapiens
attcggcacgagggctgccgggtgagttcgtcaccaccgacagcggcaccggcctcgtccacatggcgcccgaccacggcgaggacgatttcgacctgtgcaaggcgcacggcatcgatcccgtgttcgcggtcgagaatgacggcaagtaccgcgccgactgggcctggctcggcgggcaggggtcggtgatcaaccccaagctcaacgcgcccgacggcccgatctgcagcgacctgcgcgagacaggcggtctgctggcggcatccgccgactacaagcacagctacccgcactcctggcgttcgaaggcaaaggtgatcttccgctgcaccccgcagtggttcatcccgatggatcagccgcgcgaggacggcacgctgcgcggcaaggcgctcgccgcgatcgaggcgacgcgcttcgtgcccgagaaggggcgcaaccgcatccgctcgatggtcgagggccgccccgactgggtgatctcgcgccagcgcgcctggggcgtgccgatcacgctgttcgtcgatcgcaagaccggccaatatctgaacgaccctgaggtcaacgcccgcatcgtcgccgccgtgcgcgagaagggcgtcgacgcctggaccgacgaggcggcgccagcgatgctcggcgagaaatatgacgccgccaattatgagcgcgtcaccgacatcctcgacgtgtggttcgacagcggctgcacccacgccttcgtgctcgagagcggccgc

SEQ ID NO: 86781 - DNA, 748 bp, Homo Sapiens
  misc_feature (16)..(16): n is a, c, g, or t
  misc_feature (43)..(95): n is a, c, g, or t
atcggcacgagggcantggggtgaagccgagcgcccccatccnnnnnnnnnnnnnnnnnnnnnnnnnnnnnnnnnnnnnnnnnnnnnnnnnnnnnacatactggacggcaaagtaggagatcgcggcgacgccgagcgtcacatagtagaaggcgatgtcgctgcgccagtcgacgccccagaaatgcggcgtcgccaacggtgttgatgccggtgtggccgttgaagatcgcccagttctggttggtgaaatagtagaacgcagcgccgatcgcgagcgtgatcatgatggtgtagatgccctcggtgcgcaccgcgagcgcgccgccgagcgtgccgaacagcgtcgccagcgccagcgccatcggggttgccagccaccacggccagcccaggctgatattggcgttgccgctcacgccgaacaccgcgaccatgtagccggcgaagcccgcgatggtgagctgcatcaggctgaccatgccgccatagccggcgaggaacatcaggctgagggcgatgacgccgaggatcagcgtggtggcgaagatctcgatcaggaagaagccgttggcgatcagcggcatgatcacgaggatcagcgcgaccagccaggccacgggattctggaattccggccaggtgcggagcagggcgcggcgggtcgcgttgccggatcggtcggtgcggaactgggtgctctgcagcaatgacatctcatcgcctcgcgagcaggccctgcggccgc

SEQ ID NO: 86782 - DNA, 1150 bp, Homo Sapiens
  misc_feature (423)..(432): n is a, c, g, or t
  misc_feature (465)..(478): n is a, c, g, or t
tatatggctgcgagaagacgacagaagggacccttccaggatgacactaggaacagggctagggcactcgctcagtccctaggggcttgtttgttctttattattgtgtttaaatccttatagagcaatatcaggatggtgttaataggtctgcctcagaatgagaatcaatccttttagaaaacctttatactaagcctcctcttcgaaattcacagtggcgattagggactggagtctggtggcgattacggactggagtctggggacatccgtggcaaagacaccagctcaactttagtgcttcccaactttatttagaatgacatggggtgggtgtctggtgtgtgtgttttccctacgcacctcccatagctattaacaactgaggaaggccagtgcagaatatttttggagaacgannnnnnnnnnaaataatatatcattcctatggggggaaagccnnnnnnnnnnnnnnggctgagttattccctccctcccctcaataccctcagtactgactacttccctttcttttctcaggcctccccccaccgacttttgaggccagggttggccagatttagcaaaaccaaaacagagtgctgagttaaacgcaaatttcaggtaaacaaaagataattttctagcattaatatgccccacgcaatatttggaacacttatgtgaaaaatgatttgtttttctgaaattcacgtttctctctgagtcctgtaactgtccccgaggggattgagcagaagctcgggtatgagccctgaggttgactgccggttatttttctgtcctgggaacagcctgacccacctccctgtctccatgtagccagtgaggggagggggagacacagaaccaaccacagccaggggcgtccccatggcgactgtggcccggcccctcctctcttgcctgactctcctctcttgcctgactctagacactaacttagttccaggttcggtgccctgttggtgctcctgtttccaatagcttaggtcccatggtgggggaggaacctcaggggctatgcagcccccgccagctgccctcgaatcccgtccaggccaattccagattctaaactgatttttttcatgatattgtcaaaacagtgaggaaacattaaaaa

SEQ ID NO: 86783 - DNA, 354 bp, Homo Sapiens
  misc_feature (66)..(66): n is a, c, g, or t
tctccaagtacccactttataggagtgggaagcagtgtaggaagtaagtacgaaaagcacttttanaatgctgttaaagggctagagacagaactaaccacaatcagggcagtccctgctgtagctccggcctggcctccccattcttgcctgactcaagacactaacttagttcctggttcggtgccctgttggtgctcctctgtccagtagcttagctcccacggtgggggaggaatcgaaggggctctgcagcccccaccagctgccctcgaatcccatccaggccagttccagattctaaactgaattttcttcatattgtcaaaacgggaaacaaaaaaaccctaaagc

SEQ ID NO: 86784 - DNA, 499 bp, Homo Sapiens
tatgtgacatatagaaccagtgtggtgacaaaaagcaggctggtaccggtccggaattcccgggatatcgtcgacccacgcgtcggtaactgtccccgaggggattgagcagaagctcgggtatgagccctgaggttgactgccggttatttttctgtcctgggaacagcctgacccacctccctgtctccatgtagccagtgaggggagggggagacacagaaccaaccacagccaggggcgtccccatggcgactgtggcccggcccctcctctcttgcctgactctcctctcttgcctgactctagacactaacttagttccaggttcggtgccctgttggtgctcctgtttccaatagcttaggtcccatggtgggggaggaacctcaggggctatgcagcccccgccagctgccctcgaatcccgtccaggccaattccagattctaaactgatttttttcatgatattgtcaaaacagtgaggaaacattaag

SEQ ID NO: 86785 - DNA, 674 bp, Homo Sapiens
  misc_feature (80)..(80): n is a, c, g, or t
tacatgtaccagctaggaacagtacaagacaatatataatttggcgttaagaatgtcatacagacttgaagctttatagngattcagagacagacaataaaataggccttagagtcaagattttttgaggaatcaggaacaaggccaggccttgaagaactgaagagacttaagttgaggtccctgttaggtagaagtgggagtaaagttaagaaaaaaacaagtatgcatataatgtaggggcttactaagaagtcacggtggatttctgagcagaggagtgacttgatcatacaagattcaacaattttattgcaaactcataaaatatgtttaagtagcctggagacatcctacagaacacagaaaataatggcaggatcatgactaacaacatagctggaactcacctgtcaaagaaaaacagctacaacataaaacactggcaggatagatgacaatagttctaggaagcccattactcaacatggcaatagctccaatgcttccttattttcagaggccccagagactgagggtttcattatccagacccaggacttaggtgttctgcttctagagactacacaagaggtatgaaagatatgaggacatacaagagtgacacagataaaacaagaggaagagagaaacaaatagaaatccaacagccg

SEQ ID NO: 86786 - DNA, 816 bp, Homo Sapiens
gcggccgcggcctcttcagcggcggcgctggtgatttcctgctcgggcgtgagcatgtccagctcttcgcccaacgtcagcagcaacgtacggtcgtggcccaggtgcgactctgtttccagccgcgcgcgttcggcttctttcaaatcgtcctgcaactggcgcaggcgctgctggccgtgctggatgctctgttcgacccgagcaatatcgccgcctaccgagtagaaccgcccctgcaccagattgaagcgctcggacaggtcatggtgaccgtcacgcaagcgctcgatgctcgcgtcggcattacgctgctcggccaccagcgcttcgaagctgatttcctgggtgccaatgatcgcttcgcgctggccgacctgataattcagcgcctgccagcgcagggccgagagctgcgccttgagctggcgctcctcgcccttgtattcctggtacttctcggccgcctgggcctggcggtgcaggcgttccagttgacgctccagctcttcgcgcaggtcggtcaggcgggcgaggttttcgtgggtacggcggatacggttttcggtctcgcggcggcgctccttgtacttggagatgccggccgcttcttcgataaagttacgcaggtcttcgggcttggcttcgatcagcttggagatcatgccctgctcgatgatcgagtagctgcgcgggcctaagccggtgccgaggaaaatgtcggtgatatcgcgtcgacggcatttggtgccgttgaggaagtactgttctggctgtcgcgcgtcactttgcggcgaatcgagatttccgcgaagc

SEQ ID NO: 86787 - DNA, 473 bp, Homo Sapiens
gcggccgccaacatctatgtccccatccgcctgccgaagcaggcctcccgctcctcagatgcccaggcatccagcaagggctccgctgctggtggaggtggtgctggtgagcaggcatagcagaggccctccagagagactgccctgcacgccatgccttgggccacgttggcagtgtgacaggactgtgattgtgctagatgtacctgcccaagtctgctggtcacatttggcagcaaaatggatttctcctggggagaacaaagttaagggacactgagacctgcccttcagaattcggttcacttgggggcttctgtggtagagactaactggccttctgatgtctttgttcaactgtggccagctgtggcatcagcttcctggagcagtaaatgaagacagagtggaggacacaaatgtacaaaatgcacaagactgatttcttaccacattttagtctttcttgtttt

SEQ ID NO: 86788 - DNA, 723 bp, Homo Sapiens
gcggccgccatcaacgaactgggggccgccgcccaggaaatcgcccgcaacgccgcacaggcctccaaccaggccagcgatgcccgacaactggccgaagacgggcagcaggtggtggagcgcaatatcaaggcgatgaaccagttgtcgcagatgatcagcgcctccagcaccaatatcgaagcgcttaacaacaagacggtgaacatcgggcagattctggaagtgatcaccagcatttcccagcaaaccaacctgctggccctcaacgcggcgattgaagccgcacgggccggggaagccggtcgcgggttcgccgtggtggccgacgaagtgcgcaacctggcacaccgtacccaggaatcggcgcagcaagtgcagaagatgatcgaggagctgcaagtgggcgcgcgggattcggtcagcaccatgagtgaaagccagcgtcacagccaggacagcgtggaaatcgccaacctggccggcgagcgcctgaacagcgtgacccagcgcatcggcgagattgacgggatgaaccagtcggtggccaccgctaccgaggaacagacctcggtggtggagtcgatcaacatggacatcaccgagatcaacaccctcaatcaggaaggtgtggaaaacctgcaatcaacgttgcgcgcctgttcctgacctggaacagcaggcagcgcgcttgaaacaactggtgggcagtttccggatctg

SEQ ID NO: 86789 - DNA, 1192 bp, Homo Sapiens
cggcacgaggcgaccccgggcgaatggcgggaaacgacgacaccgaccggctcgccattctcatgctgggccgcgatgttgatccagtcggcgaacagcgtgccggtcgtgtagtatttgcggccgttgagcaccagctgcccgtccttgctggaaacagtggtcgagaacgcctgcagcttgttgtcgccgacctcactgtgcccattgccgaacagggtcttctcgccgatgcggcgcagccacagttcgcggcgctttggatcggccgagttgagcacgtcctccgtgaagccaaaatgcgagcggagcgaattggtgacgttcgagtcggcctccgacagttcgatcagcaggttgaacagctccggcagcgtcgcgccggcaccgccaaactcgtccggcacccgcacggtcgtgaagccagccgcgcgcaacgccttgatctcgtcatagggcagcgccgctcaagatcgcgcgcgacggcggtgtccttgatcgagcggaacaacggccgaaagggttcggcaaggtcttcatatcgtgacgacgggccactgccccaggcttgatcgatctgcgtcatcgctatcctcctgttgcggcttctgtcccttgagcaggaccggcgacgattgcgccggcaacttgcgcccgggcggtcaatccacgctggatatccgggactgcggcgagcagcgcccgcgtgtagggctgttgcggatgtccgagcaccgcctcgacggtgccctgctcaaccacgcgaccgtcgtggaaaacgagcacccgatcggccagatgttcgatcacgccgagatcatgcgagatgaagagcagcgccatgccaagcttcgactgcaactccgcaagcaggtccagcacctgagcctggatgcagatatcgagcgccgacaccggctcgtcgcagacgatcagggcgggttcggccgccaatgccctcgcgatcgagacccgctgacgctggccgccggacagcgacctcggccggcgttcgaggtattcggcactcagaccgacgagctcaagcagcgaaacgatgcgttcacgctgctgcttgcgctccggcaggcccgcgagattttcagcgatgatgtcctgaacgcgatagcggggatcgaaactgctgagcgcatcctgcggaatatattgcagcttacgccgaagcggccgc

SEQ ID NO: 86790 - DNA, 764 bp, Homo Sapiens
tggatgtacggctcgtcggcgatgtcgccttcgcgctttggacccagccactcgatcagttttggcgagaagtagaaacccttgcccttctcttaataacgacgcaggccgatgacgttggcgtagtcagtgttgatcaccaactcgccgttttcaaatgaggccaggcgcgagaaatcgtatttgctggcgtcgccatacggcgccatgcccatgaccttgaactcgccgtcaagcatctcgaaaccgaggaactcggtgatcgcgccatacaggccgcccagggagtccgggtcgtagaattccttgatcttgtggatcttgccgttttcgccatagccaaagaacgtggtggcgtactcacctttaccgtcgatgcccaggatcgcggttttttcctggaaacccgagcagtggtaggcgctggaagcgtgggccaggtggtgttcaaccggttcgatcttgattttcttcggatcgaagcccaactgctccaggcaccagacgatcttgttgcgatagcgcttgtagcgacggttgcccatcaggatcgcgtcaagggcgcggtccggggcgtaccagtaacgcttggcgtagtgccagcgcgcctcgccgaacaggctgatcggggcgaacgggatcgccaccacgtcaacgtcggaaggcttgatgccggcttgttccaggcagaacttcgccgattcgtagggcatgcggttctttgcatgtttgtcgcgtacgaagcgctcttcttcggcggccgc

SEQ ID NO: 86791 - DNA, 396 bp, Homo Sapiens
  misc_feature (357)..(357): n is a, c, g, or t
atgagccaccatgcccggccaaaaaacttgactattcttgatgccaagacaagagaaacttaattatgacgttagaagtttcaaaaatacagtgacttctgggacacttctagtagccaaaaatccacagatgcccagacccctccttctgcattccagaatcagatgtttacattccaagacagaaagaatctgaaacaacggcctacaagaaatttgggaaatgacatttgatctcattttcctctcaattggaagtcatgatatcaatgaatatcaaatggaaaaataagctcagaagtaggtgagaattatgatctctaaaacgcaggtgctgatttctaatccttctcacanaattccggatcacaaattgagggctgatgagcctcgtgc

SEQ ID NO: 86792 - DNA, 542 bp, Homo Sapiens
cctaatcatgtttttaacattttaaaataaaatttaatactaagaaattatggcttatagtatctataaattaacaagaagtatgcaggtgcaaaaaagtggtggaacaaataccaacatccatccaaaatgaaaaagaacaggaaattctgaatagaattgcactcagaacttatattaaaaattccatttggttaatgacattaaatttggtacatttcaaaacttctaggtcctccaaagattgaaagcttaataatctcctacctaaaaagataaaattaattgcaatctaccatatcttaagtataggaaatttggtgtccaacctggagatgattatatatttgaaatatttcctagagaatagtaaccaggttttgtttttaactttaaaacctaattacttttgtgcctctcagccgttgattgtaactttaaagtcccatggttttggagtgttattaatagattttgttatcggtgggcatgcactgcaagaattaagtatctcagactgaaataaaaccgttaataattaa

SEQ ID NO: 86793 - DNA, 755 bp, Homo Sapiens
tttgtcattaatgaaaaaacacaccatagacggttacctacactgagaagaatggaaacgatggtgttaggggagaggaataagaaggtccgttcagttagagctttgcaagattcgtatatacagcaccagatcctatgaaatcagcgcccctcgagtcagtacagtttgtgagaaatgaacacttcagaattgcagtagaaaatatggccataaaaaaacttcggtcttccagtcctatgcaggaaggggcaccatgcaaggtggggtctcgctggagtggctcgcggctctggcgaccctggggctccccttccccagccccgaccccgggccccacctccagggccagtcacttgcttccagagtgcactgccgtcacagtggtgggcctgggtctccgctcggctccaactcctgagacccccgacgaagaagaaatgaaactacagagcgtggaaggtgccagacagtctttttggctggccaaactgaggctgctcgaaacacttgcatttgaactgtccaggctgctgccgaggtgtagttttctcatatgtctcacgacggccgtggcattaaatgcttgtctccatttgctcttggcaaagtttttccggatctgggcgctgacggactcgtggatgtttttgttgagggctgtgtcaccagcgatcctgaaacagaggcaaaggtgctgctctgaagtgcttcttctgggcctgacactgcgtcccagctgaggaccatcgttg

SEQ ID NO: 86794 - DNA, 865 bp, Homo Sapiens
gggggcgccatgccctccagtgccaggttgcgcacgtgttccgccagttcgggactgtccaccagcaccccgacttcggtgttccacagcaccgagcgcgggtcgaagttgaatgagccgacaaaggatttctcccggtcaaagatgatcgccttgctgtgcaggctggaatccgagccgtggaaagtgcctttgcggaacagatgagggccgctgccgccgccgtctcccggctggcggcgcaactcgtacagtttcactccgtgctccagcaatgccttgcggtagggcgcatagccaccgtggacggcgggcacgtcggtagcttccagggagttggtcagcaggctcaccgagacgccggcgtccgcacgaccggtcaggtacaccaggccaggctggcccggcacgaagtaagccgagatcatcatcaactcgtggctcaccccttccagctccggtgccagctgggtggtcagcagcagccgtggatccggatcggccttggccagcaccttgctcggcgcatcccacagtgcctggttccaggcccagatcagttcgcggcgccagatgtccatgcgcggttgggtcttgtaagtgcgcaggcggttgtacagggcatggttttgctggcgagactcggcaagggattcttccaggcgtacgcgggcgctggccaggtcgcctttggaggcgctgctgacgaaatcgccaatgggcttgctcaacgcactgttccagtactgatcgaaactgtggcccagttgttcggccaccgggcctacgctgagcatgtcgatatcggtgaagttgaggttgggctacggcgtacgaaatattcatccccacaggttgcggccgc

SEQ ID NO: 86795 - DNA, 970 bp, Homo Sapiens
gcggccgcccaaggccatgctgcaccttatcgaaacgttcggtattgatgtgccggtcgcgggttttaatggcggcacgttgatcaacccggatggcagcatcctggttgcccatcatctgccggcagaggcggcgttggtgacactggcgctgttttcggccgaaccggatgtggaagtctgggtgttcgctgacggcgattggctgcgccgtgatccgcctgggccgatgatgcagcgtgaagccgatggcttgggttacgggccggtggtggtggagagttttgagccgtacctggaccgggtcgacaagatcgttgctgccagcaacaacacgcagttattggtggagctggaagcgcagttgcagcccaaggtgcagggcctggcgcaggtatcacgctcgcagccggtgtacctggatgtcacggccatgctcgccaacaagggcgaggccttgaaaaccttggccgcgcaccttggtgtgcgcatggaacaaacggcagctatcggcgacggcggcaatgacccggcgatgtttgcagtggcgggtttgtcgattgcgatggggcaggcggaagaaacggtcaagcgccaagccagtgttgtgaccggcagcaatgtcgaggacggcgcagctgaagcgatcgagcgctttattctcgtaccgcgataagccgcttacgttgtgatgctcacttccgatcattgttatgcaatgatcggaagttactgccgcgtcttacttgggcatggtccacgacaacacactgatggccatctttgtcgagttcggcacgcgcctgcaacaacaaatcctcaagttgagtcggatcggtataagtactcgaagacagctgtttgctgccgatgcgggtattggtacggtcgatgacgctcaggctgagggcgccgttgccatcgtgccaggccacgcactgaaagggctggaaggcacggtctgcgatca

SEQ ID NO: 86796 - DNA, 404 bp, Homo Sapiens
  misc_feature (180)..(210): n is a, c, g, or t
agcatgagacaccatgcctgacccctgcttttattttcaatataaaattttatgtttacaagcgtgagccaccacacccagccttacataaacttttaagagcaaacctgtagagtgtaattagatgcgtagttacttataaagtggtatatatttttcaaatgagcccttttctctaannnnnnnnnnnnnnnnnnnnnnnnnnnnnnntgacagtaaactttcaattcattaagatttgcttgacatataaagagtactattaaactcaaacatgtggaagtggatcactaggattgaatacagttttttaaagtattgtcttttcatctctttttgtttttctcagaacacacaaacaagaaacccaaatcataccaacactgaaaagaagagacaataag

SEQ ID NO: 86797 - DNA, 563 bp, Homo Sapiens
atacttaaggaaaaagaaagtcattatgtatgtgccttgcacgtttatgtaaatacagttcacattgctggtctcatttgtccttgtttagaaggaaaaaaataaagagattattataacttcagctcactttgaaagtatctgtccactttttttcaaaatacttcctcatattgtggccagctctgcctatatcagaatcatcttcattaaatgtttcacagttgtcaaaaacaagcctgacatctagagcaaaggtttcaaggtttggatactgtccactacttagtttctctctaattgtggaaaaatccataggcttcttaataactttcttataaccaggaacaagtttcaagtttacaggaagtagaaaaggccatgcatcctcatgagtttccatttcagtcagaatcatactgcaaagagctaggtccttggagtcatctcttttaggtttcttaactgaagtaaaactttcttgttttgacaagttaatagaagtgttttcctccatttttcttttcttgaggtctttgtttcctctttttagtgaattactt

SEQ ID NO: 86798 - DNA, 1182 bp, Homo Sapiens
  misc_feature (1167)..(1167): n is a, c, g, or t
ccgacatgcaccagacgaagaagggcaagcagtggtatttcggcatgaaagcgcatatcggtacggatgcgcacaccggcatcgttcattcgcttgccgccacggcggcgaacgcctccgacgtgagccagacgcacaagctgctgcatggtgaggagaagcacgtgcatgccgacgctggttaccagggtgcaggcaagcgtcccgaactgaaagactgcccggccgaattcgtgatcgcacgccggcgtacgacttacaagaggctggacaagacggacccgagacgccaactcatcgagcaggcggagcacgccaaggcgagcatccgctcgaaggtcgagcacgcgttccatgtggtgaagaacctgttccggcatcgcaagtgccgctacaagggtctggcgaagaacgcggcgcagttgcatgtgctgttcgcgatggcgaatctggtgctgtcgcagagaagtctgtgcgcgccctacaggacaggtgcgtcctgagggcgagaaatcggggcgatgaaccccgaaagggcctcgggtcgatgattcggggctgaaaaagagccgaaattcgatgtcatgacgatgcgaatttcggagttgctgcctcacggacgaaaaatcccggaagggtggctttgatcagcgtttccctaagtagctcgcgatgatttgccgcattctttttgtcgttctgatgctcagcggctgtgcaacgagccgcgtggtggcacccatttacccggaagagtcccgtgccctcaaggaggaggggactgtgctgctacgagtcgtggtcgaggcgtcggggaaaccaagcgatgttcgggttgagaggtcaagcggctcgccgagactcgatgcgtcagccgttcaggcagtgacccagtgggtgttcataccagcgatgaagggacgtgagcccgtgcaagcaaccgccttggttcccgtcgtattcagtttgaagaacgacgccagcggatccgggcgctgaggtcgaatatgtattgcggctctggatcaatcccaaaaagggctctatcattcccgttatgggatcgaatgagcgcctctccattgccgcagtactgtttacgggaacccagcagcgggtgctacggctgttgttcggtcgtgctggacagagtttcataccaacganatcgtgcggtcgcgc

SEQ ID NO: 86799 - DNA, 641 bp, Homo Sapiens
ggcaagaggaaaatttgtcaagagagtagatttctacagtttttatcacacacacccatgaatatgttaatttgtttgactgctataatcatttcactatgtatatgtatatcaaaacatcatgtataccttcaaacatcttgtaccccttaaattgatacaatataaaatttttttaaagttaggtgacttgcttataattcattagtttattcaacagtatttgttgagcatgtactgtgtgctgtgtacgctgagttaggttgcagtgggtagagcaatgaataagatacactagatccctgatccctgcctcgttaatatgctagacacaaaaggacaaatattgtagcgttccatttatataagtatctacaaaaagcaaactcatggagtcagaaagccacattagagggctgggggaataggagagctatattgcttaatgattacagtttcccgttggggtgatgaaaaagttttggaaataggtggtgacaaccattatatatcattgtgtatgtaatcaatgtcactgaattttacacttaaacatggtttaaatggcaaatttgagttgtacactttaaatgggtgaattgtatgttatgtgaatcatatctcaataaagctgttttaat

SEQ ID NO: 86800 - DNA, 658 bp, Homo Sapiens
agaattcggcacgaggcccgatgctggctcaggagaggggagatcctacccctgctggaggatctcccagtgaagtgaggagagagccctagaggcatgtaacactgacccctccacaaagacccagtagccctacctactccattttggaaagtacgtaactgggaagaaggaatgcacccaggaatttctaggatgtcatgcctgaggagccctgtgggagaggggttatgccagaagcatagtggggaagggagcaaaaagaggctccctttttccctgattagcgccactccattaggagcctcgagctgctcttccccctgcctggctgactgctgtcttgggtgtgtctgggaatcagccactggagacagtgagtgtggttgggggaaggccggagagtgactgctggtaaccccagctgcacatgatggtggccagctgccagctggctcctcccaaagcctcccagctggcaacggctttgaagtcagacaagccacggctcctaggctgtcccgaggggatgtaagtccaggacctacacacaaagcacctatccaatgacaagctaagtccaggcaggtcctcctaaaggcccctggctctcagaccagctgatgcaactagattagaaaaaacagaacatgcaaag

SEQ ID NO: 86801 - DNA, 585 bp, Homo Sapiens
ggcacgaggattattgcaaagttcaggcagacttttttccacagaggggagaaaacaagattagaaagaaaatagcagaagaatggtgaatagagagtgaaaaagtcaggttttagatcagaaaatgttttaccctgaagttagcatattcttagggtgaacataaaatggggttgtatgttggctcagactgagtgtagctcaaagtttagttgctgtgggaaaaagaagtttgattaagaagtattttattttgaccactgaagacaaatttagctgatttttttaagaaaaggaagaaaatatgcagagtctatgtctggctctacaacaggtgagaaaagagagcaccatctaagtcataataagagggtatttcttttgaaaaactatttttggagaatacaaagatggagaattttattaatcatagctctttaccaggattatctatgtgcttcatttttccccaccttttttcctggtcctatgtatttcttccatttgactttttctgagttgtatcttttataataaactggtagggataacacaaagtgaaagcaaaaaatgccgcctacagcc

SEQ ID NO: 86802 - DNA, 380 bp, Homo Sapiens
gcagcacagaatgcatttattcatgaggcagccaagtgaggagatgggaaaacaggtctcaaacccacttcctcgaagatggggtttagagacgtttatgggacaaagaagcaggtggcctaaggtgtggggaaggtgattggagggaaaagtaggacatcggcgatctgtgcaagcctagtcaagcttcatcgttcttcataggatgcaggttcacaaaatggtggcattagcatgacggaagatggagtttttggcgctctgacatcaaacgtcacctactggacactcacacagaccaagttgaaggattgatggtcataagtggcttgaactggataagagctgaccccaagttcctgaaaaacaaccctcgtgcc

SEQ ID NO: 86803 - DNA, 435 bp, Homo Sapiens
tgatatggcatttgccagagccccataagggtcagctgcctggctctttgatccagcagtccgttgattctatcctcatcagccctgcctccttgctcaagcctctctgctacccctcatcttcctctcaaaatacccaatggctcctccccgccactcctcaggcactaagactcccactcacaccaacagactcactacgagtctgtcaacctaatgcctcagatgaaacagggaggctgagatcccatgactctagccagctgcctgcaccttttcaccctcactcctgctgatgctgtggaatgtggcaaagctcctctaccatccatgaatccatgatccttttacttttactgggatgcaggccatggaagtctcaccttttggctctgaataccatatgccctgattcttaaatttgcccctcgtgcc

SEQ ID NO: 86804 - DNA, 1193 bp, Homo Sapiens
aacctgtacagaataaaaaattgaattagtttccaacatttcacaatcaagagatttcacagatgaaactagtttttctggaaaaatgagaagatctggaaatcctgggcctgcattcccatatggcaacagtaagctggagctgagtaaggtagttagaggaaataagagcaaattgcttaattgcttcaaatattctggaaggcaagcattccaagcacatcttactcttttggctgttggagtcataggtcttcaatcctcctaacacaggaagaatcttcaccgctaaaaatctggcataatttttttacactcacaagaaaacctgtcgtaggagaagaagtgacctcatggtccagatgttttactgcctctagtattgcaaatcccagtggagaaggttcctggttgaaccatgaattgaaacacctagcattgaaattggatcatgatggacacctgactcatggtgggcaaactggatcttttcttctgggaattagacttggaaattcagagaaaacaagtcagtttgtatgcatgccttggattgagagacatgaacattttggactggaggtgcgggcatcttctcccacttgcacaaagaaagcagattttcaggaaaataagacaaaagcagatatacaaagaaagaaaaagacaagagttcatgagatctaacagaggaactggttaatgatgactttccagtttctggttgtagccttcatgaagcctggcttataatatacagtgttattattatttattctcaagtcagtttctgttcctgcaatcaagtattactatataagatggctttacttttgggtgtttttggaaatatctctagtgagcatgtattactactagaatattatagtgtacataatgattgatgtatttttaaaaaacaatagatattttatcaagagctcctgctgacacaccatttatagcaagtaagaagcatagattattcatggacgtagaattacagtgcttcactgattttgtttttcttacttttgggaaatttgataattttatttgcctataatatgcagttatttgttattgtaaacaaacttaatgtgaccaatatcaattttaaaatgataaagggaagaaccaatcattaaggtgggttgtgtccagcctgttctctgcacttgtgccattgtcta

SEQ ID NO: 86805 - DNA, 328 bp, Homo Sapiens
ggcacgaggttgccctcagtatacctggggaaaataatcaacatttaccatctttttctcaaaagtcatttgtgaataatttatgaataaagggataatgaaaaacaagtttattagacattttagtagaggtattagacatttacctctttgtatcaagtaaatactgttgcacaaacataaaagatgaaagaatactgtcacacatcctcttagtaaaatgagattgtccaggttcctatcacaaaatagtatgtgattaagttcttcctgttgaatgactgaatgaaaataccatatttcctttttgtccttagaaagacacaat

SEQ ID NO: 86806 - DNA, 710 bp, Homo Sapiens
aaaagctaaaatgtttataaatatcaagcagaacaagagttaacagaataggctgaactaatagaaaaactgaaataatctttttgacttttgcttggaacattgctgatccttgttttgtttttcagagtcaaggaaacttcttttgagctagctacagcctttaacaattgagtaaggtttactcctgagaacaaaatttggaacatgtttgtttctctctgccttattggttctttaaggaccactgcaacatggtcttgggaattatacttcaagaagcctataaggttaaagggtgtttatactcacagtgatataggaatagcactgggtggttgcaggaggatggaaaaattcgaacaacaaataaaaacaagaactaggcaaagaaaccataggataacagaaaacccaaaataagagaaagaatggccaaaatcccagtcaggatgacatgtccatgactcttctgggcaaagccaaataagagagaaagggggcagtaaccaggtgggtccctgaatttccctccttttccagaatacctaataattattccactctctaattaaagaaacacccaaaaaataggaatgctgtgtggtcacaggagaagggggaaaacatcaagctgttaaaattagctactccaacaagaagactgggctgatgagaccttaacaaacaggattgggcctcgtgccgaa

SEQ ID NO: 86807 - DNA, 617 bp, Homo Sapiens
  misc_feature (88)..(142): n is a, c, g, or t
aaaacagaacaaaaattagccagatgtggtggcttgcccctgtagtcccagctactcaggaggctgatgcaggaggattgcttgagcnnnnnnnnnnnnnnnnnnnnnnnnnnnnnnnnnnnnnnnnnnnnnnnnnnnnnnntgacagagcgagaccttgtctcaaataaataaaatgcatttcttgaaagtagcctatttaacaaagaaatggaatcaatgtaggtgctcatcaatggtggattggatgaaggaaatgtgctacatacacagcatgaaatactacaccgccataaaaagaataaaatctagtcctttgcagcaacatggatgcagctggaggccattatcctaatcaaattaatacagaaacttttttactgcatgtgtttagaatctctgttaataaggggcatcaacttttaggattgttatgttctcttgatcaattgaccccttatcagtatggaattactatcttcatctatggtaatatttgttcgtctaaaaaccaatttttgtaatgctaatgtagataatccagctttcttttgattactgttagcatgctatatattttagtttatgtttttatattaaaaagtgtatttctttgg

SEQ ID NO: 86808 - DNA, 747 bp, Homo Sapiens
  misc_feature (26)..(26): n is a, c, g, or t
  misc_feature (70)..(70): n is a, c, g, or t
  misc_feature (269)..(294): n is a, c, g, or t
acaatgcacactagtcagtgacaganaaggaacaaactatcaatacttgcagaatcatggatgaatctcncacagcactgtgctacgtgaaagaagccagtctcagaaggctcgatactgcatggctccgtttacatgacattctggaaagggcaagactatggtgatggggagctcattaacggcagccaggggttaggagtaggaggagtgtgtgactacaaaggagcagcacaagagaacaacagaatcataaccatcaagctgtnnnnnnnnnnnnnnnnnnnnnnnnnngagttaattttactgtattatttttaaagaagttgttggtttacagtgataaaattgccttttttcccctgctttttcaagaaaacatctcatccttaagacacagacccaatgccagcattttgtgaagtcttccccctgtaactcagggagagtcagcagcctggatcatattttcatggaactttgttcatatctctactctcatgtttacttatcttcctcccgctactagaccagaaaattcaagttgattcgcaactggattatgatcaggtaaacaaatatatattgcgtgtatagcacatatactagacattcactaatgtttatttttgcattgctaatactcaaatgacaaaaaattagaatattagtactataatatttatcacattcaatcactcacctaacatatgtgagattaaatctaatgccgtgttcttcgacaaa

SEQ ID NO: 86809 - DNA, 685 bp, Homo Sapiens
ttttttttgtagagcagtttgagatgtttattgagcttggagaggtagcggacttttgccatcattcccaccttctgagctggagtcttgccgtccatttttctctcctgctctctttcatctactatccccaaatatcaaggatatcagacagttaatcatcagaataaaggagcggttcccacagagtaacatcccgcagaagaggtaggggaccgagagagtggggggtcaggcctgaagtcgaggtcaaaaaacgctgtgcctttcattatcctcggaaacctaggccgactttccagtttggaagggaagagttgtccgccccttctgtaggatcctgagagctctggacggggaggagactctgggaccgaggggtggcctgggagagccccgccacggaggttggaagggtgtttcctgcgtaggcagctgttggcaatcagaatggtttttactttgttcctgcaaccagccccatccgcttggttctgggcccctaaactgcctcctcttctcatgcactatgcactgggttgaacgcaggaacaatacagacttccctcccagcacggtggctcatgcctgtgattctagcactttgtgattttagtccgcccaggcggacggactgcttgagctcaggagttcgagaacagcctaggcaacaaaacgagaccct

SEQ ID NO: 86810 - DNA, 308 bp, Homo Sapiens
ggggctgtgggtgaaagagtatgatggggtggtggaaggtattacatatttctaaaacttaattaagctctaggtcagataacaatggagtaaagtgatacctgcatttttttccccagtgtaatcttaatttactattgtatttttcacttaaaattttgtagggaaaaaaagttttcaagggaacactaagattaaattgactaggttcaaatatgcttccttatgagattcaaaatttactgtgtgaaattaaagtttaagagacctaaaaaaatgtactcccaataaagaatcaatactgcttc

SEQ ID NO: 86811 - DNA, 571 bp, Homo Sapiens
gactatatctaaacctgtaagcagtatactcctaacagtaccctcataaattctgaatataattcttgtttgctgcagtcaatatttggcagtttaaattagcacagacgttgaggccttgctgagttattaggctatgtaaaagaggttaaaaatatgatcattctttattgttaattggtaatattttctcatacattaggtaaatgtcaagctttgggtctctggagtataactttttgtaacattagccattatttggtaacagaatttaaggatgatggaatgatggaaggtattacatatttctaaaacttaattaagctctaggtcagataacaatggagtaaagtgatacctgcatttttttccccagtgtaatcttaatttactattgtatttttcacttaaaattttgtagggaaaaaaagttttcaagggaacactaagattaaattgactaggttcaaatatgcttccttatgagattcaaaatttactgtgtgaaattaaagtttaagagacctaaaaaaatgtactcccaataaagaatcaataaagcttaaaaaaa

SEQ ID NO: 86812 - DNA, 1086 bp, Homo Sapiens
  misc_feature (170)..(178): n is a, c, g, or t
cagtcgacggtaccggacatatgcccgggaattcggccattacggccgggtgatctcaaaacagcttgacagagcaactgttattgaaatattacagatggaaagaatgaggctcagggaagttaaatgacttggccaagatctgctcatcgtcactgtctgtacagtannnnnnnnnagaggttgtaatgtctcagatttagtcctttaccatctatgttgatttgcttttgtctatttcctcattaattgaatatactttaaatatatatattaaagtatcaaaatatagagagacatttgaactgtattcaggtaatatgtttaaagatatttatatattgccatacaaaaacttaacatttaaaactgataatatctgtaatgacatcagaatgaaagaaaaaaaattgtacagtgtatattcctttgttttgaatccaaatctttttcataggtaatgacagatgccttaatgtgaagcttatttataatagcaataaacctaactggatttggatgaagaagtcttaatactgacatactggatttttaatgcactggtttgttatttggtattctatctctttttccaggcctccaggttgcacatttatttattatgttcaatactttggttcttagttcttaaagaatcaagaagttgtgtaatcttttaaaaatattatcttgcagataaaaaaaaaaattaagagtgtgtttacaactggttttctcttttttacagaacatgtatttaaatcattgctataataaagttaagttcattaggaatataaaaacttgcagttctatgatagattgcatttattaaaaatgtttcattgtatcacatagaaatatggccaggaaggacttgagaagacagtttgatccattgcttttagacaggactgggttttgctgtccaattatatacaataatagtttttcttacaactaagctggccccagccttgtcttgatattaatacatgaaatttttataattgtctcattgtctcatttagaaacatccatatttttctgctttttctattgccattttttatttgtgcatgaatt

SEQ ID NO: 86813 - DNA, 987 bp, Homo Sapiens
  misc_feature (807)..(827): n is a, c, g, or t
tattagcaaatgttggattattttctaattcatatcagaatgattttaagtctaccagcagtaatagactattagctgtttttaggtaaactatgacatttgaaagatcacagcattctgagaagatgcagtagaatttttaaaacaagaagaccacagaatatattccaggattaagtaacttcttctggtggccttagtgagtttgagcagacattctaactaaatttagtaaattaattaattacaatgtaaaaggtactaaatattttttattgatgagctccctctgaaagaactattattaaaaaaaattgtgtttccatgtcaagttattttctcttattgttattatattggacccaataatattctctgaattctctggactatcagatactacaactctgagaaagatctgttccaagttattagtttcctggaccagttgaggttacattctggggaaaaagttcaagacaactgtattccctcttttgacatgagttacatgtactaagaatatatttcaagaaactgaaatactaaataaaaacatgtaaaattaatgctaaggagaagactttttagaaaagggtcactacatgtatacagtgacaaaatgcttcttctcaaaaacagaaataaatttcaacagagttgagggagatgatagtaaattaagaaaagagattctattaatataaaaagctcattgaaaaagtaaaatcctttttataaggctgttcttaggtaacctacaacatttaaaagaccacagtgttgcgagaagatgcagtagaattnnnnnnnnnnnnnnnnnnnnngaccacagcatatcttccaggattaagaagataaaaattcacaatttgcacctttaaagttctgagcaccttgtattcactatgaatttctaatggcttacttttagccagtatctactatatggtaagaacaatgcaactattatgtatccataaatat

SEQ ID NO: 86814 - DNA, 757 bp, Homo Sapiens
  misc_feature (392)..(426): n is a, c, g, or t
aaatacaaaaatacacccaacaaagtaaaaaatatctgtgtctgatcagaaactaccaggtatgctgacaaacacaataccaggtatgctggataacacgacccatagagaggagaaagatcaggtgaacccaaaccagacctgacacagatgtcagaattagcagagagcattaaaacagaataactgtattccatatgttcaaaaagttacctagatttggaagatagaaaaaaagacccaaatggaactagagatgaaaagtacattgtgtaggatgaaaaaatagtgtgtggggttaacagcagataaggtacaagagaacgaactagtgaacttgaagaaacagacactacccaaaacaaaacattgaggaaaaggcagcactgggnnnnnnnnnnnnnnnnnnnnnnnnnnnnnnnnnnnccatcccttgctcatgcttttgctattttacacttttggacattcatacttgctattacatctgactaggatcacatgatttgccccccctcactttcctcaggtcttggcccaaaagtcttgtcagagatgcccatcttgaccttttatcctgccttatttttatttttcctcagcaccacctgatagatgtgcttatttattgtctgtctcccccaagattccttggacagtcatggggtagggatttttgttttactgttgtaacccagtgcctggtctgtagcagatgcttaaaatatgtattcaaagaataaattgagtgaatgtg

SEQ ID NO: 86815 - DNA, 687 bp, Homo Sapiens
  misc_feature (47)..(47): n is a, c, g, or t
gcttagaagtatcagggaccaaatctcaaaacaaaacaggcactctntggaattccccaccaggagattgtctcaagacaacaattaattcacaatccaattctatccatgatggtgcagaccagaccatcagatggcatcactcaatataagtcatccaagcgagtcacgtagaccccgcacctccttgcccttcacaccaactttccctttttaagcccttgctttcttccctgaaagttaaatcagttcccttaaggcaggagcctgttctgtttccccactgctaagctctggaataaaagtcactttctttttaccaccctcgtccttgttattcaattttgcaagcaatgagcagcttagcctgcgtttggttacagtaagaggaggaaggaggagagaaaccagtgggaagagagaagtcttagagacaccagtttggggagatgataagtttcccaaaaagaccagtgaagttccaaattatcctcagcaaaaccatgtcaacaagaaggagttggacagtgtaggtggagcatatagtcagtaggaattcaagaatggtgtttcagttgactcagaagttcctgtgggaaaaacaggatcaaatagaacagagaggcctcacaaagtaacaaggaaaaaatttccagcctgggcaacatagtgagactctgtctctac

SEQ ID NO: 86816 - DNA, 167 bp, Homo Sapiens
  misc_feature (1)..(1): n is a, c, g, or t
nattcttagatctaaaattattaattagcaccctactaatttttttgtcttaattatcaaactatgtttaataaaagcaacatattacccttcttacgtatttgctacaagtacttctagttggtattcctttgaattttatttttttgttgttggggagtattatc

SEQ ID NO: 86817 - DNA, 347 bp, Homo Sapiens
taaggtaacttaaagttacaggtctgtggaaattggcatggtgtcagaccttaaggaaaaaactcaagtgagaataaatcagtattattatattatcactgttaatagtttcctctgatcactgaagttcattagctctcatcatttatatgaccgtaataattgagaaaagtgaaaattaaatttcttggttatttaaattttactcaaccaaacacaaaccatgtaaaaatacatttttcctcttccttggatttttctcagtatatttctaccaagtacctcaaataatttcgtgtctgtaaaagactggtatttccccaagaccccaatactgaaaagtttat

SEQ ID NO: 86818 - DNA, 759 bp, Homo Sapiens
  misc_feature (17)..(17): n is a, c, g, or t
  misc_feature (285)..(319): n is a, c, g, or t
  misc_feature (669)..(681): n is a, c, g, or t
caattctgtggaaacancaaagaatcattaggggctactatgagcaactatatgccaataaatttgaaaatctagaagaaatggataaatttctggaaatacacaacctatcaagattgaaacatgaagaaatacaaaacccaaaccaatcaataacaaataatgatatcgaagccattataaaaaatctcccctcaaagaaaagccagggacctgatagctttactgttgaattttaccaaacattaaaagaacaaataccaatcctactcaaactgttcaaannnnnnnnnnnnnnnnnnnnnnnnnnnnnnnnnnnaaggtagtactttcgaactcattctacaaggtcattattaccctgatacccaaatcaaagaaagaaacattaaaagaaggaaactacaggccaatctccctgatgaacattgatgcaaatatcctcaacaaaatactagcaaaccaaattcagtgacacattaaaaagatcattcatcatgacaaagtgggggttctgccaaggatgcaagaatggttatatatacacaaatcaatcaatgtgatacaccatatcaacataataaaggagaaaacccacatgatactttcaattaatattgaaaaaagcatttaataaaaatcaacatcccatcatgataaaagccctcnnnnnnnnnnnnnctggatatagaaagaacctatctcaacacaataaaagggatatatgacagacctacagctagtatcatactgaatagg

SEQ ID NO: 86819 - DNA, 560 bp, Homo Sapiens
  misc_feature (109)..(109): n is a, c, g, or t
gcacgaggggaaaggtattttaagtatagtgactgtttaataaatacttaattggatgatggaggaggagaaattgttttcttcccaggattctctttgggggtcattntgtgtgacagatatattttagacatttggagaaacagtttcagatcctgccaggatatttttgtaaaaaaggaaaatggaagattccaataaactagaaacagtacgtatctaagatgctgacacagaagctaatgtgacttttcagcttatcaagaggatggccaataaaacttaaaggtgtggttagatgttttctcacttttgtgacattaatttatcactgagtctcattcaaccaagtaatctaaaatactgtgcaaattctagcagtatgtcttcgataacttggatgttaggatagccaatatgtacaaaaaattaaatcaagtattttgtcctatgtataacacaaattaattttacacagagaaagatgtttctaggcaagtgaaattctggtaattcatactatttctttgtatgaacaaataaaatatattttgccaaaa

SEQ ID NO: 86820 - DNA, 655 bp, Homo Sapiens
ttctaccaactgaccaagctgctggactccatgcatgacctggtgagcgacctgctggaattctgcttctacaccttccgagagtcccatgcgctgaaggtagagttccccgcaatgctggtggagatcatcagcgaccagctgcccaaggtggagtcggggaacgccaagccgctctacttccaccggaagtgactgcccgctgcccagaagaactttgccttaagtttccctgtgttgttccacacccagaaggacccaagaaaaccggtttttaacatgtgatggttgattcacacttgttcaacagtttctcaagtttaaagtcatgtcagaggtttggagccgggaaagctgtttttccgtggatttggcgagaccagagcagtctgaaggattccccacctccaatcccccagcgcttagaaacatgttcctgttcctcgggatgaaaagccatatctagtcaataactctgattttgatattttcacagatggaagaagttttaactatgccgtgtagtttctggtatcgttcgcttgttttaaaagggttcaaggactaacgaacgttttaaagcttacccttggtttgcacataaaacgtatagtcaatatggggcattaatattcttttaatattaaaaaaacac

SEQ ID NO: 86821 - DNA, 412 bp, Homo Sapiens
aactgattaaatgatttattttgatcttatttctgatgaaaaaaagaatcaggataagtacagttgaccactaccatcccttcccattttggagcacagctttcaacattgaacagatccgaacttgatcaacataatcaagcatcactcgaacaacctttccagagagatgttccagccatgacaaagttattacttcacagaactgagggaaacaaaatcagaattaggaaagtaaatgaaaaacacaaagtatctatggtttagcatagtagtcaaaggagatgtggtgtgatgaaaaccaagagagaaaaatgtctcaaaaatgggaagggatggtagtggtcaactgtacttatcctgattctttttttcatcagaaataagatcaaaataaatcatttaatcagtt

SEQ ID NO: 86822 - DNA, 563 bp, Homo Sapiens
ctttgtgatttgtgttttcatggctggaaaatctgtgccaaaatgggtacaacttactgatactggtctgggatctgatattccattttggaaccaaccttacatgaattccatgccataatctgatattgaagcagcagaaagtaggagtgttgtcagggttttaaaacctatagtattgtaccactcaaagactaagtaacatacatattctacaattgtgtttactactactgcttttagaaaggtaggtgatggtatatctgtcaagaatgtaagattttattaaaaatctttatttttaataagttttctttcaagtactgcaatcaacttaattgcgattttattttattatctgtggcagctgtctgtaatctggagtaataagataagtgatgtttccttcctcccccaatttcctaaatctcttaccttatctatccataggctttgatgtaatgttcatattagagcctgaatgctactgtattttactgatataaactatttgtattcctccccattttaataaaaaaaggctttgtaaattaataggtaaa

SEQ ID NO: 86823 - DNA, 653 bp, Homo Sapiens
gaaagaaatgagtattggaaattgattcattagagccgtctctattatgatacattttaacttgggcgaaaaatgattcatatacacaattatcttagtcaaattttctatttcttgctaataacattttaatttactctagaaaatgcattaattctattcaaatatattttcctaaaatataaataattaaattaaatgtttataaatgtagagaatgtagtttccattgacccccacacagatattaatcagcccaaagcttaagtgataaagaaatcatatttgtaattatgatcattttaatttgtctataaatatataatagaatcttggcaacttaattatgagcagttaactcatacttcatgtagaaccgagcaccttagattacatattgttgaatttaactattggcattaatatatgtattttaatatgttgttatacaagagaattataattgtgtattgtaattctcttgtataacaacactccagtgattttgaaaatatatagtgaaagagtgcaatataatttacaaatgcatcaaagcttttctatggtattcaaactgggacttgacttttcagcatttgaaaatagaaataaacaaaaagtcaatatcctaaagctgtgttttctaaagcatt

SEQ ID NO: 86824 - DNA, 715 bp, Homo Sapiens
cggaggttgggatagtactttgctattggtgatacagaaagcatactaggtagaataattagagtaacagatgaagttgccacatatagagattggatatcaaagcagtggggcttgaagaatagacctgagccttcatgcaatggtccagtgtcgtcctcttctgccacacagtccagctctagtgatgtagattccgatgcaacaccatgcaaaaccccgaaacagctgctttgccgtccgtccactgggaaccgagtagggtcgcaagatgtatccttggagtcctctcaggcagttgggaaaatgcaaagcacccaaaccactaacacatccaacagcaccaacaaatctcagcatggatcagcaaggctctttcgttcttccagcaaaggcttccaaggtacaactcaaacaagccatggttccttgatgacaaacaaacaacatcaaggcaaatccaataatcagtattaccatggcaaaaagaggaaacacaagagggacgcgcccctctcagacctctgtagatagtcagcgctgcgcggtggactgtcttctctgtgcaatgatctcatgctcaggacagttgcgcagggactcctgggagatattcaggagcctcacactgttcagacgttgacttagcaactgcgttttttcccagctcgccacagaatggatcatgaagactgacaactgcaaaaaaaacaaa

SEQ ID NO: 86825 - DNA, 456 bp, Homo Sapiens
atgtcagggctcccaaaccactagtgccaaagggtcatgttgaaaagttcagaatatttatttgtcagaatataataattgccccccaccttagtatttttgcactttacagaaatttagatactgtttttcagtggcttgagcgttttgccttttcaaaggataactattattttcttgaaaatggaatataatcatgagaggaagaagatgtaaaaaatgtcaaatgttgattggttgtgtaaaagttttgtcatagacatgtattggggagcttccaattagcatacatagacacatgtgtcagtggccaagacctgcttatattttgctttatagatgtagtcatagcatgttgttattgcctcatgtaaataaaaaggctattaagttttccagtaatatttattaatctgtatgtgttttaaaataaaataacttatttctagctgaaaa

SEQ ID NO: 86826 - DNA, 957 bp, Homo Sapiens
  misc_feature (746)..(878): n is a, c, g, or t
gcctactactactatacggctgcgagaagacgacagaaggggatactaaacagaagcgagtgtttgatcagcagaaccctggacaggctcaggatttggaggcaccaggcagaagaaaagaggattcttctctagagaaagtgaacagttcctgagaagtgatctctgcaggtccgtgtgaaaaaattcatgatgaaaatctacgaaaacagtatgagaagagctctcgtttcatgaaagttggctatgagagagattttttgcgatacttacagagcttacttgcagaagtagaacgtaggatcagacgaggccatgctcgtttggcattatctcaaaaccagcagtcttctggggccgctggcccaacaggcaaaaatgaagaaaaaattcaggttctaacagacaaaattgatgtacttctgcaacagattgaagaattagggtctgaaggaaaagtagaagaagcccaagggatgatgaaattagttgagcaattaaaagaagagagagaactgctaaggtccacaacgtcgacaattgaaagctttgctgcacaagaaaaacaaatggaagtttgtgaagtatgtggagcctttttaatagtaggagatgcccagtcccgggtagatgaccatttgatgggaaaacaacacatgggctatgccaaaattaaagctactgtagaagaattaaaagaaaagttaaggaaaagaaccgaagaacctgatcgtgatgagcgtctnnnnnnnnnnnnnnnnnnnnnnnnnnnnnnnnnnnnnnnnnnnnnnnnnnnnnnnnnnnnnnnnnnnnnnnnnnnnnnnnnnnnnnnnnnnnnnnnnnnnnnnnnnnnnnnnnnnnnnnnnnnnnnnnnnnnnagaagtcgttcacgaagtagacactcaagccgaacatcagacagaagatgcagcaggtctcgggaccacaaaaggtcac

SEQ ID NO: 86827 - DNA, 420 bp, Homo Sapiens
caagtaagctcctgtaagtatcgccaaaaaatcctcctctcatagccaactttccataaacgagagctcttctcaatactgttttcgtagattttcatcatgaattttttcacacggaccaagatcagaacgtgtatttgtgaacaattccgcaggacaaaaaccacagagataatatttacaaacgctctcgtggtcccaccgcacgttgctgcgcttctcgtccggggctaggtttcggtcccggcccattaactcatccaacaactgcgcggccgaaatcatggtgcttccttcgggcggctgttcccaccagcccaggcacccgccaacgaaaaaaccggcgacaccgtcgccaatctcctcggcccgctctcaggccgaaatccctcctacacacaggagccgacaagaaaaaat

SEQ ID NO: 86828 - DNA, 966 bp, Homo Sapiens
  misc_feature (83)..(117): n is a, c, g, or t
aaagagtgtatagatcactatagggcgcccgtcgttagagcgaacgacgagcgcagcgacgttgtgagcgaggaagcggccgnnnnnnnnnnnnnnnnnnnnnnnnnnnnnnnnnnncagtcgacggtaccggacatatgcccgggaattcggccattacggccgggggtcttgtcggctcctgtgtgtaggagggatttcggcctgagagcgggccgaggagattggcgacggtgtcgcccgtgttttcgttggcgggtgcctgggctggtgggaacagccgcccgaaggaagcaccatgatttcggccgcgcagttgttggatgagttaatgggccgggaccgaaacctagccccggacgagaagcgcagcaacgtgcggtgggaccacgagagcgtttgtaaatattatctctgtggtttttgtcctgcggaattgttcacaaatacacgttctgatcttggtccgtgtgaaaaaattcatgatgaaaatctacgaaaacagtatgagaagagctctcgtttcatgaaagttggctatgagagagattttttgcgatacttacagagcttacttgcagaagtagaacgtaggatcagacgaggccatgctcgtttggcattatctcaaaaccagcagtcttctggggccgctggcccaacaggcaaaaatgaagaaaaaattcaggttctaacagacaaaattgatgtacttctgcaacagattgaagaattagggtctgaaggaaaagtagaagaagcccaggggatgatgaaattagttgagcaattaaaagaagagagagaactgctaaggtccacaacgtcgacaattgaaagctttgctggacaagaaaaacaaatggaagtttgtggaagtatgtgggagcctttttatagtaggagatgccagtccggtagatgacattgattgggaaacacacatgggtatgcaaataagtctgt

SEQ ID NO: 86829 - DNA, 461 bp, Homo Sapiens
gcctactactactactactatacggctgcgagaagacgacagaaggggatactaaacagaagcgagtgtttgatcagcagaaccctggacaggctcaggatttggaggcaccaggtccgtgtgaaaaaattcatgatgaaaatctacgaaaacagtatgagaagagctctcgtttcatgaaagttggctatgagagagattttttgcgatacttacagagcttacttgcagaagtagaacgtaggatcagacgaggccatgctcgtttggcattatctcaaaaccagcagtcttctggggccgctggcccaacaggcaaaaatgaagaaaaaattcaggttctaacagacaaaattgatgtacttctgcaacagattgaagaattagggtctgaaggaaaagtagaagaagcccaggggatgatgaaattagttgagcaattaaaagaagagagagaactg

SEQ ID NO: 86830 - DNA, 884 bp, Homo Sapiens
  misc_feature (44)..(78): n is a, c, g, or t
tactgtaccgagcgcagcgagtcagttagcgaggaagcggccgnnnnnnnnnnnnnnnnnnnnnnnnnnnnnnnnnnncagtcgacggtaccggacatatgcccgggaattcggccattacggccgggcttgtcacaaacaccagtgcttagagaactactaaaagaagtgaaaatgtctggaacaattgtaaaaattgaaccacctgatttggcattaacagaaccattagaaataaaccttgagcctccaggccctcttactttagccatgagccagtttcttaatgagatgcaagagaccaaaaagggggttgtgacaccgaaagaactcttttctcaggtctgtaaaaaagcagtgcggtttaaaggctatcagcagcaagacagccaggagctgcttcgctacttattggatgggatgagagcagaagaacaccaaagagtgagtaaaggaatacttaaagcatttggtaattctactgaaaagttggatgaagaactaaaaaataaagttaaagattatgagaagaaaaaatcaatgccaagttttgttgaccgcatctttggtggtgaactaactagtatgatcatgtgtgatcaatgcagaactgtctccttggttcatgaatctttccttgatttgtccctcccagttttagatgatcagagtggtaagaaaagtgtaaatgataaaaatctgaaaaagacagtggaggatgaagatcaagatagtgaggaagaaaaagataacgacagttacataaaagagagaagtgatattccttctggaacaagtaagcacttacagaaaaaaagcaaagaaacaagccagcattacaactccaaagccagcagagaaagataatggaaatattgaacttg

SEQ ID NO: 86831 - DNA, 603 bp, Homo Sapiens
gacttgagcagccttggcttctttctctttccctcagcagcggggagtcagcttggccagtgcttgtgatgggcaagcttggggcatccccttctcatgggttgggtgaagcctctagtgctgaaggacaaagctcacacaactccccgcttttggctgtcagcaccagccagacaggagcaagaaccaggaacaactcccagcatctcagaatcaaatctccactcctggatgctctagtctttcctgattacaggcccacatggagcctgtttgaaggggtcgctgccatgggctgagtcagggcattgaggtctggatgtcagggctcagcagtgtccagtttccaggcctcattacagctgctcccatgaggggttcccccagcactgggcctggagagttatgagtctctcctgtactttctgctctggggacctggttccacaatcttccgggaaggtctttctggtgtatgtgctctgtttcagtttatattctggactcctatgaagatgtttcagcaaagtcttttgctcctttttgttttatgtttagttatgtctgttgtaaaaaatcaatgtaataagtttataattaatt

SEQ ID NO: 86832 - DNA, 1158 bp, Homo Sapiens
ggctggaccggtccggaattcccgggatggcctgcgactccggccttgtccgcgcccgctctcggcgcgacgtctccagccatgaaccggtttggtacccggttggtgggagccacggcgacttcttcgccgccgccgaaggcccgcagcaatgaaaacctcgacaaaatagatatgtctttggatgatatcatcaagttgaatcgaaaggaagggaagaagcagaattttccaagactaaatagaagactcctccagcaaagtggtgcccagcaattcaggatgagagtgcgatggggaatccaacagaattctggttttggtaagactagtctgaatcatagaggaagagtaatgcctggaaagagacgtcctaatggagttatcactggccttgcagctaggaaaacgactggaattcgaaaaggaattagtcctatgaatcgtccacctctaagtgacaagaatatagaacaatattttccagtgttaaaaaggaaggcaaaccttctgagacaaaatgaagggcagaggaaaccagtagcagttctcaagagacctagccagctaagcagaaaaaataacattccagctaattttaccaggagtggaaataaattaaatcatcagaaagatactcgtcaggcaacttttcttttcagaagagggcctgaaggtgcaggcccagttgaatacagaacaacggctagacgatgtagtagcaaagagaactcgtcaatggcggacttccaccacaaagggagggattttgactgtatctattggacaatcctggagcagtgcaatgcccagtaactcagaaaccacgattaactcgtactgctgtaccttcatttttaacaaagcgggagcaaagtgacgtcaagaaagttcctaaaggtgttcccctgcagtttgacataaacagtgtcggaaaacagacagggatgacgttgaatgagcggtttgggatcctgaaggaacaaagagccactctcacatacaacaaagggggaagccgctttgtcaccgtgggataggtcccatgtcaaaggaacttttgagtgatgactctgagaagttgaattgcttgaagagttcatcacggaaattcaagaaactttacttcaaaatattcacaaggctaaataactctta

SEQ ID NO: 86833 - DNA, 447 bp, Homo Sapiens
tttagttgggtacgagaatcgagatggagggggaacaaaacccaacaaaataacatcttcttagggaaaacctggctgtggccagcgggcacctcctgaagccctgcttgctgcagaggcgccgctcttcagtgatgcagggtgaggggctgagcggcgcctcctcccatctagtctgcttgggggccgccagggagcatcttcaacacccttacaggacaatgaaggacccgtgtgttccctctgccggctggactgggcgtcgatcctgctgcccggaacctctcactcgattttactcaatgaagtagagcacagcatggcctaaatgccccacacccgccctgtgtgcacacccaggggaatacggatcagtgtgaaaaaacagatctgtgcaacagagacacaaaacgcaacacaaagccacagcatctacaaagtgcatcg

SEQ ID NO: 86834 - DNA, 443 bp, Homo Sapiens
cactccagcccgggcgacagagcgagactccatctaccagatccttatgacgcagctgatgcctgccttggttcctaccactctggtgtagacagaggactttgtccaagtctcacactaaacatgcccgggcttcgatgtgcctggaggatttccccacagggacccacgcacctccctgtatctgcgcagcttgctcgtgtggctggaagcgctgtcgataagcttcacgcactggcttgccagttcttcagctctaggacttgtagctttaagcaaacggtgtggcatgggttgagtgtggccacctgcaggatgtgcagggctgcctcagaagctggctggggactctagcctctgtgttcataaagacattaagaagtggatggatgttgttccttttttgaagttgtcattaaagtaggtgcaacaaccaaaaaaaa

SEQ ID NO: 86835 - DNA, 855 bp, Homo Sapiens
cagtcgacggtaccggacatatgcccgggaattcggccattacggccgggggaacatcataaaagaacgaaaaggaaggaacttcagtcaacatattttcattgactccttagtacaagggaaccttaatgaccaacagatcctagaagacagtatgatattttctctggccagttgcataataactgcaaaattgtgtacctgggcaatctgttttttaaccacctctgaagaagttcaaaaaaaattatatgaagagataaaccaagtttttggaaatggtcctgttactccagagaaaattgagcagctcagatattgtcagcatgtgctttgtgaaactgttcgaactgccaaactgactccagtttctgcccagtttcaagatattgaaggaaaaattgaccgatttattattcctagagagaccctcgtcctttatgcccttggtgtggtacttcaggatcctaatacttggccatctccacacaagtttgatccagatcggtttgatgatgaattagtaatgaaaactttttcctcacttggattctcaggcacacaggagtgtccagagttgaggtttgcatatatggtgaccacagtacttcttagtgtattggtgaagagactgcacctactttctgtggagggacaggttattgaaacaaagtatgaactggtaacatcatcaaggggaagaagcttggatcactgtctcaaagagatattaaaattttatacatttaaaatcattgttaaattgattgaggaaaacaaccatttaaaaaaaatctatgttgaatccttttataaaccagtatcactttgtaatataaacacctatttgtactt

SEQ ID NO: 86836 - DNA, 1193 bp, Homo Sapiens
  misc_feature (80)..(114): n is a, c, g, or t
  misc_feature (1122)..(1140): n is a, c, g, or t
atcgataatcactatagggcgctagcgcttatcagtcgaacgacgagcgcagcgagtcattgagcgaggaagcggccggnnnnnnnnnnnnnnnnnnnnnnnnnnnnnnnnnnncagctcgacggtaccggacatatgcccgggaattcggccattacggccgggggctgctgctggagcggccgatccgagacgtggctccctgggcggcagaaccatgttggacttcgcgatcttcgccgttaccttcttgctggcgttggtgggagccgtgctctacctctatccggcttccagacaagctgcaggaattccagggattactccaactgaagaaaaagatggtaatcttccagatattgtgaatagtggaagtttgcatgagttcctggttaatttgcatgagagatatgggcctgtggtctccttctggtttggcaggcgcctcgtggttagtttgggcactgttgatgtactgaagcagcatatcaatcccaataagacattggacccttttgaaaccatgctgaagtcattattaaggtatcaatctggtggtggcagtgtgagtgaaaaccacatgaggaaaaaattgtatgaaaatggtgtgactgattctctgaagagtaactttgccctcctcctaaagctttcagaagaattattagataaatggctctcctacccagagacccagcacgtgcccctcagccagcatatgcttggttttgctatgaagtctgttacacagatggtaatgggtagtacatttgaagatgatcaggaagtcattcgcttccagaagaatcatggcacagtttggtctgagattggaaaaggctttctagatgggtcacttgataaaaacatgactcggaaaaaacaatatgaagatgcccctcatgcaactggagtctgtttttaaggaacatcataaaagaacgaaaaaggagggaacttcagtcaacatatttttcattgactcccttagtacaaggggaaccttaatggaccaacagaatcctaaaagacagtatggatattttcctctgggccagttgcataataaacttgcaaaattggggtaccgggggcaattctggttttttaaccaccctctgnnnnnnnnnnnnnnnnnnntttttattgaggagattaaccccagttttttgggaaaatgggccctggttacc

SEQ ID NO: 86837 - DNA, 452 bp, Homo Sapiens
aaatttcagcttcacacaaggaagggaaggagtgaaattagtgaacaggcagttacagcaaaagaaaaaacataaaaattgaatagctggctctggtgaaatgagcaaggactttagagtcaaactggcctggatttgaatcctgatcctcattgcttgcagctgtatgatctggacaaatgacagtaactgtttctaaccttgattttctcatctgtaagatgccaattgtaactcctaaggatactgaggattttttaaaatgcgtgtacagttcctgaccagtggtttgtgcctaataacttattacaaattattacccagtaaaaaccttgagacaagagtgaaaacgtaaagctaattaatccattacttgttagcaagcaaactacgtgcttgagaaaattactcaactttcatgttttacttccagacagtagtttgattaaaag

SEQ ID NO: 86838 - DNA, 649 bp, Homo Sapiens
  misc_feature (138)..(152): n is a, c, g, or t
ttctcctttcactatttttattttacactataaaaaacaagaacaacaacaacaaccagtaacatactgcttttcttcacattcacacgggtcttagaaaattattgccttttcccctggagaaataactaacagacnnnnnnnnnnnnnnngtagtaccacgttgcaaaatctgcaaatcccaaaagtccacagcttgaagacaacctccaggggcagggaggaaaacaattgtcacaagagacataagcacacagaaggacaggcagctgaggaaaccagtttgcaccgccactgacccaggatacctagcaagtacccttctcctcctggaatctactgctaccacctcgaaggtatgacttttttggtctatgatctgaagaactcttttcccaaaggaagagttgctctgagaagaggtggaatgagacaagttcaagtatgactaagaatcatgccaaagtccaaggtcagtgaagaacccatggcaaaaaaaatccagaaaagccaacatcttgctacttcaaccaactacctcattggacccaagagggtgtctacacaacatttcagggttcaaatcaggatgctgatcatgtccctacaaaccctgtagggttactttcccaactagacggtgatcagc

SEQ ID NO: 86839 - DNA, 611 bp, Homo Sapiens
ggtctttttttgctttgggagtataaacatttttatatctatgctttaggtacatgtctcatgaatttgtgctgaataattacttgagtgtgaaattgttatgttatgcgatatatagtagtcaaatatagaagataatgcaaaacaatttaaagtgattgtagcagtttgctgtattctacagcagcagattgtagcagattactgtattctacagcagcagcatgtgagattgccagttgctcaaattcgtgccaatacttggtattttttatcttttaattttagacattctggagagtgtgtagtaatttttcatcttggaaaattacattaaattagtatccatttctctaattttgataacattttcataagtttattgttattagatattttctttattttgaagtgcttattgtccattttacattgggtcatctgttattgaattgtaaacattccttgaatatttaaatatgagtgcttggtcagtttttgtcacaaatatcctcttttttcactttttgcccttttattattctgaaaatgccaattgattaaaattaattttactattgttcaatatatcatgctttgttttttaaaaa

SEQ ID NO: 86840 - DNA, 715 bp, Homo Sapiens
attaagcaatggtacttgatgtaggctctaacactcatcaataaataagtgttgtaaaataatttataacaggtaatcgatagtgtgtaatgaatggactattaataattgattatctagaaacgaactgctttcgtgggcttttaatattttaatgtgaagcatatgcagtgtgctttctgcatttatttttctaccaaataatacagataatgagaaattggtgaaaatgcctacgcaaagtgttgacagtgtgaaagcagtgcgagtgcggccttttagtcaggttagtgatggatgttacgctgccttgttgaaaatttcactgactttgattttattacttttttaatgatagttatcaaacttgtatttaagctgcttgtcatttatggaatattgaacttatttaaatgaacttgttaaatgaataaagagctaaacataattcagtaaacaattcctttgcgcaagtagcacaataaacatggatgcaacgtatgtcaagttaatacttttttaaaccaacgcaatttggtgaatatagatgtgtggtacctgtttttaataagtgtactttttttcccccctccgtgaatgtagatcataagcaaacaaattgcctgttctaaatgaactttacatatattttaaatgaatgtatgtacttacgtataaatgtctttatatagcttgaataaaaacactgctcatt

SEQ ID NO: 86841 - DNA, 1213 bp, Homo Sapiens
  misc_feature (582)..(590): n is a, c, g, or t
gtggtatatatgtctttgtatacattacgaccattgtgattatccattaaatccagtgtctgatgctattggttagtaatgatgtcccagcatttgatgttccctctctaatgataacaagtaaatatttaggtttatcccttttgaaagtttggttttacttttaacagtccatgaacagaaaattaaggcctctaaaatcagatcccctagttactcctctgttctgaatctggggaagtagtaaaccaaaaagacagggaaaaccagatatttagagtcgaagcagcatgcaaaaaataataatgtttttaactaatgaaggctactggagttactaagaatcacctaaaaatgtgctactgtaccttgctcattttgcagatttagaagctgaaacatgggttaggttacttactaaaagtccacctgtggcaacctgcaaataatgcttatttatactaaagatgagtttatctgatagagttaggaaatttcttcttttgagtaagagtattgctataacatatatttttttctgaaatgttttaaaatagaagtacacctaattgttattggttnnnnnnnnngccatatgtgaatgaggttggtttttgggttttttctttcctgaattgtattagtccaaaagaactaaattagggtacttgtgctgtaccaaaatggtaattataacagacagtattagaattactgaattaacaatgagaaagagagaagtgtatctgttacgtggatatatgggccagcctggatatacaacagagtagtaacctgtgaaacaaacatagaatatcctcttagacattgttcctcataatgcactgacagaattcacatagctcttaatgaaacaatttaagattgatgtacgtacgtttgacttggtctcgctgtcggttaactgtaaagttagggggaagaaagaaaaaaaattaaaagggtagacacagttgagagttttattttaaaaagctaagtcttataattatgaccattaacttgctttggctttattgcagtgactttccaagtttaattattcaaaactttttgaactgactgaattaacttggtatttttaagttgactttttacataaactttataaaccttttataaaaaggaaactataccattactataaatggaaaatcattttacacatcatacctagcaggtaataaaattt

SEQ ID NO: 86842 - DNA, 579 bp, Homo Sapiens
  misc_feature (482)..(482): n is a, c, g, or t
ctttgaatatgagattgctcagacgtggcagtttctgagcagtcgtgctggtatcatcttcattgtcctgcagaaggtggagaagaccctgctcaggcaacaggtggagctgtaccgccttctcagtaggaacacttacctggagtgggaggacagtgtcctggggcggcacatcttttggagacgactcagaaaagccctgctggatggtaaatcatggaatccagaaggaacagtgggtacaggatgcaattggcaggaagcaacatctatctgaagaggaaaaataaaaacctcctgaggcatttcttgaccagctgggtccaacacttgttcagttaataagtattaaatgctgccacatgtcaggccttatgctaagggtgagtaattccatggtgcactagatatgcagggctgctaatctcaaggagcttccagtgcagagggaataaatcctagactaaaatacagagtcttcncaggtgggcatttcaaccaactcagtcaaggaacccatgacaaagaaagtcatttcaactcttacctcatcaagttgaataaagacagagaaaacag

SEQ ID NO: 86843 - DNA, 837 bp, Homo Sapiens
catcgctgccttcattgtcaccttcattgccatcatcatcactgccctcattgtcaccttcgttgccatcattatcttcatcatcactggcctcatctgcttcattgtcactgtcgctgctgtcctggttgttgccatggctgccccagaagccacctttgaagaagttgttgccgtaagtgttctcgttgttgttagggttctcttcgttgtcatcagtgttcttgttattgtcttcaggattctcgttgttgtcatctgcactctcattgttgtcagtggtttcgtggtcatcagcactctcgttgttatcagtggtctcgttgttggggacctcattgtggtcaggattctcgctgtcgcagatgttctcattgatgtcagttatctcattgtcagtggtctcgaagtagtcggtggtctccatgaagtcagagatcttgatgtcatgaattgtctcatcaatgtctgagatctcgctgaaaatgtcttccactgcataatagtcaggggcgtcttccatgatcaccacctcacatctgcccctggttttacgtttcttcatttcttgcttctttctctttatcctggagcccctttctctcaggtagtagcgtagagggttaacccacagatcattcttgataatctcagcaatcctgtcagcctctgggaggctatggtttgagaaccagctgaaaaagctgtggctcgcatcctggttcccgtgacgacgggcctggggttcctggcaccggccccagcggattggggctgagtgagacaccagccggcctgagcggttgcgctggaactccgttaatcaacgttgtgact

SEQ ID NO: 86844 - DNA, 455 bp, Homo Sapiens
cttcatcaggcaccacaaaaccaactgcatcttgttctgtggcaggttctcttctccgtaaagaggagcaattgctgtacataccctcctttccttctacctatcttgccttaattaacattccctgtgacctagttggtgcagtggcttgaatgccaaaataaagcgtgtgcactggatagtgtgtgaaagtctttgctgaaagttccagagccattgagaataactgaggccgcagatgcatgaaatttgggcctggggaaggctatgctggttttggagtgtttggggtgcctgccattgcctctgccttcacctaagtctgtgcccattgtttcaggggatcttatggagcatctcagggcttcaggagccagccctcttccatccgcccggctctgcccaccaccactgccaggctgaacaggggactagtgcccaggtgaccctcgtgc

SEQ ID NO: 86845 - DNA, 632 bp, Homo Sapiens
aaagtgggagggtctacatgaactaaatgaaaagctctgaactgtcatgaattggagttttctagtaaaacacaatgttggcagtatagagcaggcactgatggtagtgaaaacaagtccacagaacagagtgttacaagaagagatggtttcttgctacggaggagttctccctttgttacaaagcttttctaggaagattctttcgattaaaaagaagttgcagaaacatggatttggtcacacaggtatgaagggaatcttgggctttaaattctctagtaatacatcaataccaggattcccaaacaattaatttcaattattaaatattaaatacaatgtggaggcagatgacattgaagcggatgctcattcttaaataccatgaacaaaatacatgatgaattgaaaagctccaagaaaaataatattttccagttcttctgaaccaatctgttaaactctaagatgctttcccaacaattggattttccttgctcccatattttgcactactggatcttttcttcctatatttttcatgaggttcatccagcttctcaattatgctttttatttgctgaattgtcttaaaggttgttacagaatcctccctcgtgccgaattct

SEQ ID NO: 86846 - DNA, 431 bp, Homo Sapiens
ttttcatcataatactgcactatcctggttcttctcttacctggctgatcactccttatttgctgttatttttgttctcttaaccatacatttcccaatgtttaaagggtggtattttgagaaagttaatgggttttgtaagtgccagctctttatataagcaggtagactagctttttcccagcagacgcttgtctgtttagacttccttaaaataattatcttcaaataaagcaaaatctccatacaccacatagtattgaattgttataactacgtgttaagaagaatgttgagtaaacaagatagcttccataagagggtgattaatatagtgagaattctagaaaccagatcataggaagaatgattgaaagaatagtaatagctaccttttattgagtgctatgtgcaagtcagtgtgctaggac

SEQ ID NO: 86847 - DNA, 647 bp, Homo Sapiens
agaattcggcacgaggcggactatgggacaacttttgttacagcatggaagaatactcacaactacagggtgtggaacagcaacaagcatccagcacttgcagaaataaatccaaaccatccatttcaaggccaatactcagtatcagacatgaagttaaggttctcacattctgttcagaatagtgaacgtggcaaaaaaattggaaacgtcatggtcacaactagccggaatgttgtacaaacaggaaaagctgttggccagtcagttggaggagctttttccagtgcaaagacagctatgtcttcatggctttccactttcaccacttccacctcccaaagtctcactgagccaccagatgagaagccttgagcaaggcgtcagaggctgctattgctttctgaggtttaagtgtcccctgtctgtctgctgctcccaggctgttactagccacagatccacagcaggggaccatatgtcgaactgtttacatggatgttgctctaagtgaatgtttcgggatgccgaaatgatgaaatcacagccatagcagggatggctttccaggttggggtttcaattgactacttttatttcagtctgagcctgattaaaacatacagtgaaccttctaatgaaaaaaa

SEQ ID NO: 86848 - DNA, 671 bp, Homo Sapiens
gcccttaattgacttgatctttggatgtttgaggttattagggatcatgtttcatttcccttgctttcaaatacagttcagaataaggattacatgaagtcactagcagttttactatgtctgaactagtcctgaaagtaaataaacatgcacatccggagcactaaaagagttgcagaattaatgatactccaatctctcaggccatgtgtcagttggaaactaacacaatggtgagaacattttaaatatttacagcctcatgatgtgaacaaacagcattctccctaaaagagtagactgtaactctacaccaagttgaaagaacagtctgtcaaacatcaggaaatagtcacaaaaaactggatgtacctcaggtgactcctaagacttgcattctccacatttaatgaaaattatatgaaatgtaaatagtaaacagaccttagaaataatctgacccaccttacctcatctttgttttctcagtttaacagtgtatcggtgagacattttacttttattataaaacagatatttcaggcagaattctaccaccctggaaatgtaaccaccctctccttcctaagcccagacatactccttagtatttaaataaacatctgttaagctccaggccatgttcaacgttggaattgttatgatcaatt

SEQ ID NO: 86849 - DNA, 1254 bp, Homo Sapiens
  misc_feature (43)..(83): n is a, c, g, or t
  misc_feature (87)..(121): n is a, c, g, or t
aaaagatgtatagactcactatagggcgctactcgtccgcagnnnnnnnnnnnnnnnnnnnnnnnnnnnnnnnnnnnnnnnnnccgnnnnnnnnnnnnnnnnnnnnnnnnnnnnnnnnnnncagtcgacggtaccggacatatgcccgggaattcggccattacggccggggttcaacctgaattgaaagcacttgcaatgggtttccagtcaatggttataagaacactaggaggaattctagctccaatatattttggggctctgattgataaaacatgtatgaagtggtccaccaacagttgtggagcacaaggagcttgtaggatatataattccgtattttttggaagggtctacttgggcttatctatagctttaagattcccagcacttgttttatatattgttttcatttttgctatgaagaaaaaatttcaaggaaaagataccaaggcatcggacaatgaaagaaaagtaatggatgaagcaaacttagaattcttaaataatggtgaacattttgtaccttctgctggaacagatagtaaaacatgtaatttggacatgcaagacaatgctgctgccaactaacattgcattgattcattaagatgttatttttgaggtgtacctggtctttcactgacaattccaacattctttacttacagtggaccaatggataagtctatgcatctataataaactataaaaaatgggagtacccatggttaggatatagctatgcctttatggttaagattagaatatatgatccataaaaatttaaagtgagaggcatggttagtgtgtgatacaataaaaagtaattgtttggtagttgtaactgctaataaaaccagtgactagaatataagggaggtaaaaaggacaagatagattaatagcctaaataaagagaaaagcctgatgcctttaaaaaaaatgaaacactttggatgtattacttaggccaaaatctggcctggatttatgctataatatatattttcatgttaagttgtatatttttcagaaattataaatattattaatttaaaatttgaatttgtgtttgactaacaacctcgatggatcttcttccaacctcccattaagatcctgcagaagaaatagaaatattcaaatattgcaaggtgtaattgtgagacaacttattataatacgtgttaagtttctactggacccatggaagtggattaagaaaaaccgactttagcttgagaaagc

SEQ ID NO: 86850 - DNA, 712 bp, Homo Sapiens
ggattcattagcaaaaactagtctggatttaggcatgatcccgaatgatgtccaaggtcctagcttgctcattgaccttcctgttgtggctcaaaggagggagcaagaagatttgcctttatatcaacaccaagcgacacgagttatttccaaggcctcagcatacacaggaatgttgtcttctagatatgccactgatacatgtgagttacctgagagagaagaaggcgaaggagaagaaactccaaattttagccactggggtccaccgagaattgttgagatttttagagaacccaatgtgtctcttgggatcagtattgttggtggacaaactgttataaaacgtctaaagaatggagaggagcttaaaggtatattcatcaaacaagttttagaagacagtccagcagggaagacgaacgcacttaaaactggagataaaatacttgaggtgtctggagtagatttgcagaatgcctcacacagcgaagcagttgaggccattaagaatgcaggaaaccctgtggtgttcattgttcagagtttgtcatccactccacgagtcattcctaacgtacataacaaggccaacaaaatcaccagtaaccagaaccaggacacccaagaaaagaaagaaaagaggcaaggaactgctccaccgccaatgaaattcctcctccttataaagctctgactgatgacagtgatg

SEQ ID NO: 86851 - DNA, 520 bp, Homo Sapiens
  misc_feature (176)..(208): n is a, c, g, or t
ttgctgctagtggacagaaatctcccttgactaaaacattctccctttcatggttctgccagtgagacattttcagaaagactgcagcagggaaatctgttagaaagagcactagaatcggagtcaagagacctggactctagttccaggtgggccacaaactaacagtggccttnnnnnnnnnnnnnnnnnnnnnnnnnnnnnnnnnactgggttggaatagatgaggggttctctaacaaggggtccacagattaagtctgagtgtctgtgaactccctaacactgcaggaaaatctactgtgtgtgtgcgtaggtgcacttctgtgcagggcgtccagagttctagtcagattttcacagggatcctggacttgcaaaaggctaagaaccaacagatcagaatgaagagtcttttctgccttaatattataatttcaacagaggtggagaacttaaatttcatgattttggaataggcaaaaattttctaaacaggacacaaaaaactgctaaacat

SEQ ID NO: 86852 - DNA, 643 bp, Homo Sapiens
ggagtaagagctcatcagtgtggttgttagtgagtgcggagagaaagattctaggtgaggagcaggtcggaagccaaacagatggacatggagtcacagggcggtgagctgttgaaggtgacccatggagaatatcctttcagaaagtttgatgtgaagacacagattgtatctcacccctggtcacgggaaggttattgaggaatgcattggcctgtttgcagattgaggagtgggtcagctggagggggagataactaatggtgcaggtgttgggggaagtgagttgagacaggtcaaggaaaaagaagagacatggagaggagcgtacaggtgacctttctatgtaaggaggagcagataaggggatagtgtagatatggagacattttgaggtggagaggaaaaatcaagggaccccttgtcagatgccctgattgctcctgtagaacaggcagttgtcaagcatggagtggaaggaattccagggtgaggcactgtggtggtctttgattgtggccattcttgcaatctactgcaaagaatcatagtgaagaaccaataaaaatagtgagatttttgaagtcttttgcttttagtataatctgtgttcgattggagtgcagggaagacactgtacctt

SEQ ID NO: 86853 - DNA, 513 bp, Homo Sapiens
  misc_feature (172)..(274): n is a, c, g, or t
  misc_feature (314)..(390): n is a, c, g, or t
aagacttgagaattgttttaagagaagatacaaactggaagggacgatggtcccatgaaccttgtctggtccctcaaggtcagagagcaggcaccattaggtccagggttgtggaggtaggaatagtgctgataacatacaaagagctcctcagcttcctaaaaggaggtgnnnnnnnnnnnnnnnnnnnnnnnnnnnnnnnnnnnnnnnnnnnnnnnnnnnnnnnnnnnnnnnnnnnnnnnnnnnnnnnnnnnnnnnnnnnnnnnnnnnnnnnttctaaagactcttaaatcaatgatggctcaagtacgagnnnnnnnnnnnnnnnnnnnnnnnnnnnnnnnnnnnnnnnnnnnnnnnnnnnnnnnnnnnnnnnnnnnnnnnnnnnnntgaagcttgcctaagtaacagtgaaatgccatggaagtgacaacagaggaaatgacaggacgacagccacacacaactcagagctgagtctcacaaatttgagagaaagaaacagacgcaaag

SEQ ID NO: 86854 - DNA, 1625 bp, Homo Sapiens
ccataagttgggaaggaggggtcctccccttcccatgagaatcctttatttgtcccaactgaggggtgggtgtggggtgttaaataagatttgaaataggtggggacgctgtacagggggtccgggaagggggctgggggcaggcagcaggtcagtgcacctgaggctgggggtgcccgtggcagagccctcctggtggctcagggggtgggcccagcttctctgcctcctgctccactgactggctcccgtacgcactgtcttccttcacctctgctgtgctgggcagcttgtctcgggtttctggacccctcagcagcctcactccctcctctaggcccatgtcagacagggcctccagtagacctgccaggtccccgccagccagctcgtagctgcgcaggaggctgccactgggtgaggttgtctgtcggtacgtgtctaccaggctgcgcagccccagacgctctgccagctctgcccagctgccctgggcttctggcccgtctagcagctgctccaggttctgcagagctgtatcaccaagtgacagtcccggccctgctgggctgggcggggtcaggggtggctccatggtgttctgagcagcatttagcagcaaggtcttcaccttggtgctgcaagtgaggtcaagaggcgtgtggccccggaagctgcttcgggtgtccttctcaggcccttcagagtccgagtcgctatcagaggtagggggtgaaggcagtgggcacaggggctcctcgttttcagcatggatgtcagcaccagccttcagaaggaggcgggtgagggtcgggtaccccagtccagctgccaggtgcaggggtgtgtttcccgcaaaggtgcgagcgttcacgttggcccggagcttggtgaccagatgggtgaccaaccccagctcctccatctctgtggctagatgcaaggctgttcgtcccccctgccgctctgtggcctccacttcagccccactgtccaccagcagatccaggcactcagggcttcgggctcggaccgccaggtgtactggatacagtccctcaaagtcaggcatatgcaacagctggggcacagcaggagctccactctgaagcagtgcacgcagcagctcaggagcaccagcgcctgcccgcagcgccagatgcatggctgagtctccatgccgatccagcagagctgggtctgcacctacccgcagcagaaagctcaccacactcgtctgccccgtgatcaccgccaggtgcaggggcgtctggtgcaggtggttggtgaggttgacaacgccgaggtcctgggcgtggtggatgacatagactatctgctcaatgacactggtctgcccgtggatgatggctaggtgcagtggtgtgtctccgttctcgtcctgcgccgtcagcaggtggcgctgtcccgccagcagcgcgcgcgcgtccgcggtgacgccgtagtcgagtagggctcgggcgctgcgctgcgccaggccgaacaggcgcgcgttgtactctcgagctcgctgcagcatctccggggcctgcggctcgcactggggggtcctggagggggcgctcggctccgcggcttcctccccggagtcctgctgggcaccg

SEQ ID NO: 86855 - DNA, 369 bp, Homo Sapiens
  misc_feature (179)..(206): n is a, c, g, or t
atgctgtgtgatggcggcatcatggttatgcaagaaaccctcttgttttcacagatggccactaaagcatttaacagtgaagttacttgccttatatagtttgccacgaagtttaggatgtcctttaagatctttggcaaagaagaatgctagtaattgttaaacctagtgatgtattnnnnnnnnnnnnnnnnnnnnnnnnnnnnggcatgcatattttttaagagtacccactggagtctaatatatagcctgggttacctgggatgaagaataaagagagcaaactaccacaagcaatggttgagcccctgtcaagtgccagtcatgatagtagtaataataataataaacatctattgggccagg

SEQ ID NO: 86856 - DNA, 495 bp, Homo Sapiens
cttccatctttcctttttatattttttactttgtatgtataacatacatgcctatatattttatacactgagggtagcccatttataaattaagagcacattatattcagaaggttctaacagggctggtcttaagtgaaccactgtgtatataaatatgttggaaaacagctgtatacatttttgggcaacggttatgcataatatttaccaggagaatttttttcttaacaagccaacatttaaaatttatgttttatgtcaataaaagaaaatatactttattgtgacttcaactatatttcttatcccttacatttttatttaattgtcttagcttaaaaaaagaagaaactgtggaatactacagtaaatattgttttcaaacacaagcaataattcaaatagttatttttcttttgaattaattttagacatattttggatcctattgaggggataagaggatgtcaaaaaagttaaatacctaagtag

SEQ ID NO: 86857 - DNA, 1072 bp, Homo Sapiens
  misc_feature (997)..(997): n is a, c, g, or t
gggtattgtattaggccattcttgcattgccataaagaaatgcctgagtatattagttttttgtcagatgtatgatttgcaaacattttctccaattttttgtgttatcttttcactttctttatagtgtcacttgatacacaattttgatgaagtccaatttatcagttgtttcatcacttgtacttttgatgttatatttaagaaaccgttgtcaaacccaaggtcatgaagatttttcagtatgttttcctctaagagttttatagcatttaatatttaagtgttttatagcattaaattttggtctttgatccattttcagttaatgtttgtacattgtgtaaaagtataggtccaacttcattcttttgcttgtggatatctagtttccccaacaccatttgttgaagagattgtccttttccccattgagtgatcctggaacccttgctgaaaattaattacccatagatgtgagtgttagttctggcctctcgattctattccattggtctatattgtctacctctgtgccaagtccatgctatttcaattattatagctatgtagtaaattttaatatcagaaaatgtgagtcctacaactttgttcctcttcagattattttggctattttgggttccttgaaattttatatgaattttagaataggtttttccatttctgccaaaagcgctgttgggattttattagcgtgattacattgactctacatatcattttgagtagcgttgtcattttaacaatattaagtcttccaacttatgaacacaggatctctttccatttatttaagtctactttaatttctttccagaatgctttgtagttttcagtgtacaagtcttctgccttcctggttaaattgatttctaaatattttattcttttgggtactactgtaaataaaaaattcttaatttccttttcagattttgtactgctagtgtgtagaaaccgactggatttttgngggttggattttgtattctgcagcctttgctaaatttggtttattagctttaaaagagggtattttttggggaat

SEQ ID NO: 86858 - DNA, 643 bp, Homo Sapiens
tagacacagtagctcaacacactcacaactctgtgacatcctttctctgatctgtaagatcagaatcaggcaaggtacttcatcccccctagacttactcctacaaatctggagtcacactgaccctgtgggattatggtcacacacatcagacgtgtgaccctgggactttcggttgaactcttggaacctcagctttccataacagatggttatgaggattaaatgaaagaccacattgatagaaaaagcttagcattgggcctgacatataatagatgtttaataaacacaagtttgttccttccctcccattccagatccggtgtttttgagaactgtgttacggtcaggtgatgataactggggcatgtctgctgccctgaataaataagagcttatctttctatctcgagtccactctaagtggtcagaacttgagtagcactaaacatatacctgttgactgactggctcatattgggtgttgtggaaggagcacatagcacctgggagcccagaggcctgggtggaagctctggctcctaccctagcttgttgaatggtcttgacctctctggccctcagatttctcatctgtaaaacaagcggaataaatcatacattctgattctaaaaaaaa

SEQ ID NO: 86859 - DNA, 544 bp, Homo Sapiens
acattgatgtaaaactctgacaggaataaaggatttattgatatcatctggttctcaaactttttttggtctcagggcctctttatactctaaaaaaattattgaggatccccagagagcttttgtttatatgggttataattatcaatactaacagtagaaattaaaacaaatttctaaaatgacttttctaaaaaagctgagaagagtagcattttacatttttacagatattcaacatgtgtcttaaggcaattttacttaaacacatttgattgctgtggcggatcattttggtggaggtatatgaagacaatccaaagtcacaaatagatgaaaaaagggggccttacacaaccccctcccaaaaaggactctggaatccccagtgaatccgtagaccacattttgagagccactggtttatattaagtactttctagcgcagggggtccaatcttttggcagccctgggccacattaggagaattgtcgagggctacacataaaatagacttaataccaaccatagctgatgagctaa

SEQ ID NO: 86860 - DNA, 340 bp, Homo Sapiens
gggtttgaatcaaatttctcattggggactcagtgggggaggaaagtccagccgaagggggccaaccgggatgagctggcagggagggggctgcaggatgaagagatgggcttcagctgggacccaggcacctgagggttgctcagacaccctccacagtccccagtgtctggcacggggcctcgctcccattgaggggagccggggcctgtggctcagggctgcagtcggcgggagggtttccaggcctgtcagctgaagtctggcggcctccgctaattcatttgactcggaaatctcaacttgaccaggttccccctcccttctttaaaacaaactc

SEQ ID NO: 86861 - DNA, 837 bp, Homo Sapiens
  misc_feature (43)..(43): n is a, c, g, or t
  misc_feature (98)..(98): n is a, c, g, or t
  misc_feature (120)..(120): n is a, c, g, or t
  misc_feature (157)..(157): n is a, c, g, or t
  misc_feature (161)..(161): n is a, c, g, or t
  misc_feature (186)..(186): n is a, c, g, or t
  misc_feature (281)..(281): n is a, c, g, or t
  misc_feature (314)..(314): n is a, c, g, or t
gactgacccaccaattatgtatgtaatcccatgtggagtggcntgtgcagtgatgacacgcagtagtctcatgatgatagcatgtcccctatgctgtntgtgtagagtctcatggattgntgcataaaagtgttgcacctccccttctctttcctcngctntagcctgtgagatacctctctgctntgcctttgccatgagtaaaagctccctgagacctccccagtcatacttcctgtacagcccatggaaccatgagccaattaaaccttttttcttantaagttacccagtctcaggcatttcttatagcnagtgtgagattgaaccgatacagacaacaataacaaaaagtagataaatatgaaggccagagaaatggcaacttcttcacgaagagaagctgcttatcctcaagcaagtcagttgaggactatcctgtgagctattttccgtaccttgttttccactcatacagggaagtatgccctggtgtctcacagttgcttcagttcttctttactgggaccctaaatataataacacactgaaccacccaacttctcagaccttcaatatccctggggctttttctcaaatggacacagcatagcttacagaaagctgaataatgtagacaaaagaagtctccctcaccctttgattatggaaaaccaaagatttattcagtgccaaggataagaaaggagggacttgatcaacaaccactgttaagattttgacccattcactacttcacgtgaactcccagggaaatggaaaatgaaagaaggtctccgcggtagagggataacaatgacataaatcaataatgat

SEQ ID NO: 86862 - DNA, 569 bp, Homo Sapiens
ctgtcactttccttgggataatgccatgttgctttagaaaagtgcctaaagtcagcctagtgcatacattttaagttggggttattcaattaaagcagagtgggtgttccactgcaagccccctccaccagcactcatttgcttttggctggaagaccgggtgtgtgctgtgcatggcccagtctcttctacaaaacacacctgtctcaagtgggttgggggtggggggcactcttgccgagaagtcgctgtcacagtcgtgagctgaggacatctgcactgtggacatccctccaccagagccgtaagagccttctagctgcagagtggttgtttccacatggccacaattctgattgggggtcctgggtcacttccttcaagttgagagcctgggtggtgcacagtgtgaagtacacgtgtgggcggggaggggaggttacagcatagatgtgtaaacttaatttttttaaaaaaggaaaaatacctaagtttaaaaaatgactttctttgaataataagattgggttaaaaattttggacgaataaagtcaatatttagtactatc

SEQ ID NO: 86863 - DNA, 563 bp, Homo Sapiens
ctgtgttatctttcttaacctcacgtatttctttatcctttttagtgggggcctgtaattgaggctaattcaatagcaacaatagacaacatgatatggctgctgtcactttgaaacccaaaaggtctttgggtaggaatagagtaatgaaagaggaccagtcaacttcagtatatatacaaaggaaagacaaagagatgataaaccaaggctgaggaaatttttctgatgctttcttcatttctctaatataccttttgcattctttttctgataattgtgctattaggcagaagacacaagttaccacgttgtgtattaaaagcagtaggtaggttgtgccagtattttttcagccagtaagcatatacagttaacttatataattaaaaattggtttaagatagtgattaaaaatacctgaatattatgttaaaagtatacaatcattgtttctgtaatgatgatgggtattctgcttcttgtttttcattgtaattacaggggaagattgtttttgaaaatgtatattgccatgctttttggggtaagccagtaatgtg

SEQ ID NO: 86864 - DNA, 645 bp, Homo Sapiens
  misc_feature (383)..(383): n is a, c, g, or t
  misc_feature (594)..(594): n is a, c, g, or t
agtgctggaattacaggcacgagctatgatgcctggctgcaaattcagtttgatcccaatgcagtgtgttggggaacagaagactcagagggactaatgaggagtccagtatgtaggatattggacccccaggccctttatgggccaccattccatgtgtgcataaaatgacaacttaccatgttgaaatgttttaccgttactgccaagtgaagtcttcacttttcaagatctcgagggaaagggaccggatgtatttatgtagcagggagttctgggaagcattggtcctgggagctatggcaggaccagcaatgacaccacgtggtgctctgtgaggccctgaggagaatcccctgctggtgggtgggggtgggggtcgnggggctgggtctcagctcaaggcctcccattatgcgcgttctccacacggaaacctggcctctgtggtgcagctcctctgcacagctcagatcttcggtgccacgtcacgggatccacaggtaccccggaaccctggccgcagctggacacctttaaccttgggtggtggaggcttcctgtggagtgggcaggtcatcacgctcagggaangcttccaccactggcagcagtctctggtcatgtctgagactgctatgtctc

SEQ ID NO: 86865 - DNA, 1182 bp, Homo Sapiens
  misc_feature (1129)..(1129): n is a, c, g, or t
  misc_feature (1156)..(1156): n is a, c, g, or t
  misc_feature (1160)..(1160): n is a, c, g, or t
ggagcgaggcctgggtggcgatttcggcacgaggggagcgcgaggcgccggtgggggcggagggggctgcgcggcggaggctcccgtggcctcggacgctcctcctagctagcggccgccgcccgccgccgcctgcgcctccagctccttcgccccggcgggcccggccgccgcttccggcagctcacctgggaagcgctcacctgggacgcgctcacctgggacgcgctacctgcctccgggcgcctgggcttcaggatgaaggaccgtctggagcagctgaaggccaagcagctgacacaggatgatgatactgatgcggttgagattgctatcgacaacacggcttttatggacgagttcttttctgagattgaggaaactcggcttaacattgacaagatctcagaacatgtagaggaggctaagaaactctacagtatcattctctctgcaccgattccagagccaaaaaccaaggatgacctagagcagctcacgactgagattaagaaaagggccaacaacgtccggaacaaactgaagagcatggagaagcatattgaagaagatgaggtcaggtcatcggcagaccttcggattcggaaatcccagcactctgtcctttctcggaagtttgtggaggtgatgaccaaatacaatgaagctcaagtggacttccgagaacgcagcaaagggcgaatccagcggcagctcgaaattactggcaaaaagacaaccgatgaggagctggaggagatgttggagagtggcaacccggccatcttcacttctgggatcattgactcacagatttccaagcaagccctcagtgagattgagggacgacacaaggacattgtgaggctggagagcagcatcaaggagcttcacgacatgtttatggacatcgccatgctggtggagaatcaggctgagatgtcagataacatagagttgaatgtcatgcacacagtggaccacgtggagaaggcacgagatgaaacgaaaaaagctgtgaaataccagagtcaggcccggaagaaattgataattatcattgtgctagtagttgtgttgctgggcattttagcattgattattggactttccgttgggctgaattaangagtggctaagaggctgctgcactganatanactgatttcactccagactggt

SEQ ID NO: 86866 - DNA, 622 bp, Homo Sapiens
ggaattgaaagtgaatttaatggggggtataagggagctgaatcatttgcttccatcttaagtctctcttcagatgaattctgagcagctgaaaactagctctggtactaagaccttcagcttcattcagagactcagagtgtgtaggaaagaaagcttcatagcacattcttttttgggggagacagaatgctaattgcaaggcaaatgggactcatacacagaatgggataggggattcagcatctggtggccggctcctcaagggcatggctgtggaccacattacttctgcttggtcttctgctgggctggtgctggagtgactattgaagggcagggctcaggcaccttggggtggcatggctctggaaccttgggctggcagggctcaggcactttggggtggcagggctcaggcaccttggggtggcagggctccttggttttggggatgcatggttcctgaggtggaggctggcaaggctgtttcacctgctgctgctgaagctgagggggtgggatgcaaggctgcttctgctgctgggaactcatgctgcaacagtgactggtcctggtgtgaagagaggaatactctgtatggtcccttagaactggtccc

SEQ ID NO: 86867 - DNA, 558 bp, Homo Sapiens
ctaccccaccccctcagcctcagcagcagcaggtgaaacaaccttgccagcctccaccccaggaaccatgcatccccaaaaccaaggagccctgccaccccaaggtgcctgagccctgccaccccaaagtgcctgagccctgccagcccaagattccagagccctgccagcccaaggtgcctgagccctgcccttcaacggtcactccagcaccagcccagcagaagaccaagcagaagtaatgtggtccacagccatgcccttgaggagctggccactggatactgaacaccctactccattctgcttatgaatcccatttgcctattgaccctgcagttagcatgctgtcaccctgaatcataatcgctcctttgcacctctaaaaagatgtcccttaccctcattctggagggctcctgagcctctgcataaggctgaacgtctcactgactgagctagtcttcttgttgctcgggtgcatttgaggatggatttggggagggatcaagtgaaccatccctagtcttccctcaataaataactttaaactccaaa

SEQ ID NO: 86868 - DNA, 851 bp, Homo Sapiens
  misc_feature (95)..(147): n is a, c, g, or t
  misc_feature (727)..(735): n is a, c, g, or t
acttattacttttagcatgttaaaaaacaatcacatcaaaaaagtatacagataaaaaatgtcataaatgacataagaaaatagtgcttgtgtgnnnnnnnnnnnnnnnnnnnnnnnnnnnnnnnnnnnnnnnnnnnnnnnnnnnnnaaaatctacagtatttaccactgttgatatatatattttggagcagctcagatactgctattataaactaaattgtacagcttggtttattacaagtcacagaattatggttatataatgggaattaatatcctcagctacatatttatatacatttatttctcagcttccacctgacctgcatcaacagcccagttatttcaccagaattttgtttgcgtttcaatgtagtgtttagctttaatacactgcacttgttttgctatttaataacatcattaccaagttgatcaaaattacattagactcattatatacataaaatatattgtcacattcactagctaaacaaacgttacttccattttaaaagacatacttttgtaccttgaaagtttaaagccccaccttgcaacaggaagaaacatcaatgtcgggttttctactattcaaatataagcaatgttgaaaacaagctccccaattaaacacgaagtcatactctcttggagtgcctaaatctttgtcagtgttttggtatctgtagtgtaacagaatattttttaaagacatcactaannnnnnnnnaagccaagaacttgaatttgtttcaatgaaaaaaagatgttcaaaagcatgaaatcacactgtattttttaaaagatcaaaatcctagactcctatgaaaaactaggatcattttt

SEQ ID NO: 86869 - DNA, 726 bp, Homo Sapiens
  misc_feature (115)..(115): n is a, c, g, or t
ataagtgaaattgaagtagcatctttagggttcagttcaattgctttctaaccaagaaatgagaaaaataaatcatatttgttttctaaacacccaataagtgctttactgtgtntgctgaagaagccatgatttttaaaaaaatgcaactgtgtgtttcagttctcccattataatatcaactttcttcctcctgattctttgattaaattcatttcaaaacactattaatgacttatactaatgttactattttgtatggttcagacatttatagtaagtgtctatcaagatgagaaaaaacatgaaatacataaatggattaattttgcaaattaatcttgcaaattaatctatagctcttaatgtttcttccaaattaaaggaaaaatggataaggaagtacttttttggcaaactgtagatgaatactgaataaaagtcattctttcctaaagaagaaaagtgcattttagttttttagaaaaaatgtaattttagaaagtctcttctatgcagattttagaaagtcttttctatttttagaaagtcttcttgtatgcagattttgttcaacttccccatctgtacttaccaaaggaaaaataaacagtttatagaatattaatagaataattatgtgcaatgtaaaatatgttgaatctccctaatttatatttactatgtgaatataaactacagaataaagaaactgttcctcctttt

SEQ ID NO: 86870 - DNA, 600 bp, Homo Sapiens
gcacgaggagaagaagaagaaagacaaagagcacaggcggccagctgaggccacctcctctcccacatctcctgagaggcccaggcaccaccaccatgactccgactccaactccccctgctgtaagaggaggaagcggggacacagtggggacaggaggagcccgtctcgcaggtggcatgacagaggctctgaggcctgatggctggaccctgctcactgctgttgtgggaccctgaaccctcccttcaccttgcttgcctcctgcctcggaagctccttgggtgtgggtgaagcccgaggctgctcctgtggaagtggctctgggcaccagcctgtggggctaaagacttgacagctagctctggagcagccggcttcctggaaaacctccaggtttcgcataccagggatggcccctggcttggcctgcgaaggtgaacctgcccagatttatcagtagaggctggactccctctgtgtcctgcccatggttgcagcagccatgggcctatgagcggtctaactgtggccaagtatggtgacctctatttttctttatattgactctttgtatttcaataaatatattttaaaagg

SEQ ID NO: 86871 - DNA, 874 bp, Homo Sapiens
aaaattaggctaggtacgaggctgggggttaatcggcacgaggctgggtccgacggtagtgggtagcgggtctcgggttgcgggttgcaggttgcaagccgcaggccccaggcaactgccttcccggcgccatgttcggctccagtcgtggaggcgtgcgcggcgggcaggaccagttcaactgggaggacgtgaagactgacaagcagcgggagaactacctgggcaactcgctgatggcgccggtaggccgctggcagaagggccgcgacctcacctggtacgccaagggccgggcgccatgcgcgggcccgagccgcgaggaggaactggcagccgtgcgggaggcggagcggcgaggcgctgctggacgaccttggctacaaggaacgtgaagaagcaggcccacgggcctgagcaagggaggacttcgcggaggtctgcaagcgggaaggcaggcgaccccgaggacgaagggccgtggaccggctgctggggcctggggagcgcaagtggctccgtgggccgcgtggcgatgtcccgagaggacaaggaggccgcaaactggggctgtctgtgttcacgcatcaccgcgtagagagcggcgggcccgggacctcggcagcctcggccaggaggaagccgcgggcggaggatcagacggaaagcagttgtgagagccacaggaaaagcaagaaggagaagaagacaaagaaaaagaggctctgaggcctgatggctgggacctgctcactgctgttgtgggacctgaaccctcccttcacttgcttgcctcctgcctcgggaagctcttgggtgttgggtgagcccgaggctgctcctgtggaagtggtctggcacagctgtggggcta

SEQ ID NO: 86872 - DNA, 429 bp, Homo Sapiens
actaaaaagtttttacccattatctctatccctgttttctttttgcaattctcagctgcagggagcaagaaaatacacagcagataggaaatgtttgtttgcatcctggctttctcaaccgcactttacgtccttgaatattctagatatttactccttcaagaagtcaggagtatatccaggcctacctatcatccttgccatccccattaaccctcatttttcagtatgtgttttacatttatggttatttttcagtctatagtatctgttcactcattgctctatcacatctgagtttctccgtctttctttccactagattgtaagctccttaagggcaaggtcggcatataagcaaagttctgtaaacaccgtgaaggtaccatgagttctatgggtactcaataaatgcttgtgataaagaaa

SEQ ID NO: 86873 - DNA, 1248 bp, Homo Sapiens
  misc_feature (42)..(80): n is a, c, g, or t
  misc_feature (83)..(117): n is a, c, g, or t
  misc_feature (1019)..(1028): n is a, c, g, or t
caagacgtatcgactcactatagggcgctagcgcgttttagnnnnnnnnnnnnnnnnnnnnnnnnnnnnnnnnnnnnnnncgnnnnnnnnnnnnnnnnnnnnnnnnnnnnnnnnnnncagtcgacggtaccggacatatgcccgggaattcggccattacggccgggggtgataaattctcaagccatgattattggcttccatgcactgcaatatttatccacaattctagacattttccatttttgtggaagagttgctgttaccttaattataaatgcaattgtgtggttaatgagagctaatgctagtagttaaccttttaaagtggattggctacagttgagggagaaatctcttttaatataaatcacatcattccttaactgcctctcttggaaagagattgaaaccttttttttaaagcacgatttagcatcctaagcttcctgagggtagagattgtatctttttgcgtctgcacaatggctagcacatgtcagcatttgacaattgttaaatgataacaagtgtgccccaattaaaacgtttttcctgggtagttatgttaaatttacaaagtaagccaagccttacggttaacattctcctctacaaccaagtattaaagccacatttacaaaagaccacatgaaatgctgattctaatcgtgtgtaggtcctgaggattaagcacacaaatttcacaaacttctgttcgagtaaacaaactcagccttctgtaaatatacatgcaagtttggaaaacagtaatactgtacctataaatatatgctgtctgtcatgtgtacagtatggtaaaaactccttttctgccacactaaaaatgcaagcaatctatgggacatcctaaaactagttattgaactaaaacttggctaatgatctttatcacagagatcgtccaacttttcacttaacctggggtctcttttcaattcactccttacactagtctgcttatttccagctgtttattttattgagtcctgaatttnnnnnnnnnntattttgattcattttgtaaatacaagctgtacaaaaaagagagatttaatgttgtcttttaaatactccaattttcattctaatatgaatgttgttatattgtacttagaaactgtacctttaatattacattacctttattaaaagtgcattgaacacatcaattttagatgtgctttatgtactgttatcctataataaaacttcagcttctaatgg

SEQ ID NO: 86874 - DNA, 496 bp, Homo Sapiens
gccgagcagtcgggccgctgggcgccgccgcgggcgccgggagcgagctgggagggagccgcgcgcctttgtgcgcgcgccgaggagaatgcagttgaaactaattttgtggatagagaaactgttggaactgctttacaaagtattttaacagcccacctgaggatattgaccataaggactcatatctcattacaagaagcatcatggccgagccagactacatagaagatgacaatcctgaactcattaggcctcagaaactgatcaatcctgtaaaaacctcccggaaccatcaagatcttcacagagaacttcttatgaatcaaaaaaggggtcttgctcctcagaacaaaccagaattgcagaaggtgatggaaaaaagaaaacgagaccaagtaataaagcagaaggaagaagaagcacagaagaagaaatctgacttggaaatagagctattaaaacggcagcagaagttggagcagcttgaacttga

SEQ ID NO: 86875 - DNA, 697 bp, Homo Sapiens
  misc_feature (45)..(72): n is a, c, g, or t
cacataatatctgcaaattctaatttatctatgtgtgtgtatatnnnnnnnnnnnnnnnnnnnnnnnnnnnnacgtccagacatctccctcataaaataaccatcagtttctatgaaaaccttaagtggaagccaatttcccatagtaaataatttaggagaaaattataatgcttaaaatgttgctcaaacccctgacctattactaaactataattggaacagtaaaatgcatatatgtaactatcatatcatgatttaaaattgcttaaaccattgctgcttaatactaatcaaacttaacggctgctaacaaaagttgtgaattattacacggcctctttgtaacgtgctgcatgttttttaaaacatctctgtgtttctgtttgttccactgctggtatttggaatgtaatttaacagttctcacacatggtttggttataaattctgtattgccttttagggatataaatatacatttttttctatgtaaaaattagctttagctgtctctttaacaaaattttatctttactacatcctaaatacttagaacctgagttggtggttagggaaacctcaggaacattttaatcacattgggattcagaagagcaacagaaccaaaggttgtttggtgtgttcatacaatccctggatttataggtggttttctataaaggaaaaatgatgt

SEQ ID NO: 86876 - DNA, 440 bp, Homo Sapiens
cttctatatctctactcctagctctcaacacctttcttaagcccacatcataacctgtcttgcataactttgtgagtgcccaacgtttcactgtacaagattgtagagctgcatgcttcttaagaataaatccacactttaggtaccagtaaatccatgcaatgcctcagacgttataaccaaataatgcctggaaaatcgacatgaatttatgtgaagcataagcctttaatttttttaaagaaaagtagattgctgtttttccacatcatttcagagccgttctctagttttgcatgccctttactgcagaaccatacagattttgttctccatttcatacatcatttgttgaaatgccctttaaaatgtaacggaatatagagctttatgggaaaaaatgctgtagaaaataaattatcttctctctttgtattggg

SEQ ID NO: 86877 - DNA, 1106 bp, Homo Sapiens
gtagagatgaggtctcaccatgttgccctggtgatctctggtcactcccaggaggcctgtggcctggcagtctaccaatagcaggtgaagggcggtgctcccaggatggtgctccaggaacaggccacggagggtatgcaggacttggggttccaggggccgattctgggggcccagcaggcaggagggggcatcatgggggcagaaagagatctcagcctgtggtcttgtaaaacatctattctcttcctcctcatcctcctcggcctcccaccatggggcctctggctctgggaagctttggctcggggatgttccctggacactgggcactcggggcaccagctcgcagtacgtcgggggacgttcagaggcatcaggcagttcgaaggagggtgtccgggggggcttcgttggtgccttggcttgaagctgcccatcggaggccctgagactgtcggcaacagttcccaggggagcaggggccttcagcaacaccgggtcactgctcgttcggggcaaggcagatatgggcatggtggaggcttccatcccagcggggtcttctcttgaccgccccatatgtgccaaatctgcaggctgactgttgctccacttccttgccctgagaggctctatccgagctgggccatccatcagggtgtcctcgctaaagctgcgtcgcagaggcccctgccaagtcacaggcctggagaccacagcccctgtggcctgggacagtgggcgcctgcctgtcatataactgtgaaccagagccggtatgctggggaattgctcatcctccagttgaaagagggctgtgggtcggcctggccggggacgcagggccacacggaacacctcaaaatggagggctgagccccgccagcggcaggagatcacggggttgcccccacagggacccagaggcagcagaaccaggaagtcgccattttgctgaagaagagcttcagccttcaaggttggccagcaaggtcttctccatcctgtggcacctgcatggagctcttgggaacagagggtgccagggctgagctctgcactttcaacaggcctcagtcttccacatctgggcaggacccgcg

SEQ ID NO: 86878 - DNA, 702 bp, Homo Sapiens
gcacgaggtgattttaataatgagataggtcacttaaaataacagtgcctttgaccttaaaacatggcactggcccatgtgacctttgccatttcccagtacttccctttacagtctgcagcctataaacagtggtgtctcaaagcaaaggaaacctccacaagtgctgcaacagtgcattagtttttatgtagcaatttgtttataaaaattcccatcccataatgcatgaccttcctaaaaatatccacagcctccataggcaaggtgagctttctgtgctacccacttgttagattccagccacctcagggattctgatccatgtcattaacgaccatcccagggtgtggagggcctgattaaagcttatcgaactagacatttgtttattagatgagctcggcattattattttctcaataactggtagaagggaaattttaaacataacactcaacccaaacaaaactacttcgtgaggctttcagcaaaaaggctgcttaaaagcatgaacccgggatgcagagcagcttttgtgcacggttccacttactgtaattgtttctggttctttcctctaacaccttccatgtatgtcaactttttatcaccgtcaggcatagactcgtggagattagtcattatagctcagacctaagctaattatttaaaataaatacatgtaaaggccaaaaaaaa

SEQ ID NO: 86879 - DNA, 495 bp, Homo Sapiens
  misc_feature (128)..(152): n is a, c, g, or t
attttccaaaaatttattggtggatcagaagataactggattttttggatgtgtgcttctcaaccagcaatgtaagttcaataggtctttgggttacagcagtgtcaactcttaaagtaaactacgannnnnnnnnnnnnnnnnnnnnnnnngaggaagtcgtcttctgctttgccaggccactggttatacatgattaggggacacagtgtaataatgagtctccttgataactagtaataatgaatcctaataccaaaatgccaataccaaaaacaaaacacctcacagtagaatgattacttggggaagcagactgaagagcataggaactagttactactctcttttgtatattgaaacttgaaattgatgcaaaagcaataaaaatattctttaaagctaaaaatgtagttgctggggataacagaaataaagtcatacagctagtgtgaaataactgagacaatttatctatttaaatataatgggctg

SEQ ID NO: 86880 - DNA, 1213 bp, Homo Sapiens
aacatgttggaaagtcgtactcaggatgaatgcatcctccactttttgtgacttcccattgaggacccataccttgagaattcagatgcttcccttgggcctttggcctaccagcctgtccccttcagtcagtcaggaaatccagttatgagtactgttgcttttttggcatctgtggtggaccctcgcgtggcatctgctgcagcaaaagcggctttggaggagttttctcgggtccgggaggaggtaccactggaattggttgaagctcatgtcaagaaagtacaagaagcagcacgagcctctgggaaagtggatcccacctacggtctggagagcagctgcattgcaggcacagggcccgatgagccagagaagcttgaaggagctgaagaggaaaaaatggaagccgaccctgatggtcagcagcctgaaaaggcagaaaataaagtggaaaatgaaacggatgaaggtgataaagcacaagatggagaaaatgaaaaaaatagtgaaaaggaacaggatagtgaagtgagtgaggataccaaatcagaagaaaaggagactgaagagaacaaagaactcactgatacatgtaaagaaagagaaagtgatactgggaagaagaaagtagaacatgaaatttccgaaggaaatgttgccacagccgcagcagctgctcttgcctcagcggctaccaaagccaagcacctggctgcagtggaagaaagaaagatcaagtccctggtagctctcttggttgagacacaaatgaagaaactagagatcaaacttcgacattttgaagagctggaaactatcatggacagagagaaagaagctctagaacaacagaggcagcagttgcttactgaacgccaaaacttccacatggaacagctgaagtatgctgaattacgagcacgacagcaaatggaacagcagcagcatggccagaaaccctcaaacaggcacacccagcactcaggagagacctggcctggccccactttggagcagcagggcacccctggcatgatgcctcatccaaaagccccctccctaccctctgatgccacacaagatgcacaacttatcaccccagacaggtcagataccagcgccaggttccatgatgccggcagaaattgccaggcagatgattccattgtgagcaaattcaccttgggaattgctaacccctggtgcacat

SEQ ID NO: 86881 - DNA, 376 bp, Homo Sapiens
  misc_feature (62)..(62): n is a, c, g, or t
tttttaaatgaatttaatctctctctagaaacagtgcactgattttacaaatgtccacattntggttttcagtttaccaagatgatgccagtatagctagtgagatgcagcaccccatcctcagccccctcgcctctggaagagacaccagactgcaaagggcaccgcgtacagaagctaacggaacttgaatgacaagacaaaaagagcagaatcagttagtgtgacacaacattctaacatgcctgattcttacatcaaatatggtaactttggggttggtagggggagacaaacaaggagaatccacttgggaacaatttgatgaagtttgcaaatcagcactttacccccaaattaacaacagcttgtatgg

SEQ ID NO: 86882 - DNA, 366 bp, Homo Sapiens
aagcatagggattacaggcaccccacaacaaagaattacctggccccaaatgtctgttgtgttgaggtcaagaaatggacagaaacacaaactggcttatatttagacaacttacattaaatataacttctgccaaagtataggtagtctaagaattgaaaatatcaagacctttacaagtggttggcacctggcaggtatacagaaccactgggtcacataatccccagaggcaacattcacacagcgatagcagtagcactactaaaaggaaatggtgtgaccatcaatttggtgcttaaaaaccattctttttactgcaataaaacccaacaataaatgttagttcatgtcttttattaactc

SEQ ID NO: 86883 - DNA, 727 bp, Homo Sapiens
  misc_feature (28)..(28): n is a, c, g, or t
  misc_feature (92)..(92): n is a, c, g, or t
atcggcacgaggcaaagattagattccntactataaacaagcataaaacttgtgaaaatatataaagccactgttttatgtatgtcaggttntgactaatactcatgtaagactgagatccttgagagaagggaaaaccccactgtcactgtctctacccagggcacttcccaaactgtgttatggagaggcagagcctaagctggaaacagtggtctcagtgatctgaagaagcagagaatttggggcttctgagatggctggagtttgtggggcagaataagggggagaagaaaaaaagagctccagaaatctgcaaaaggttccccttaagtctttgatcaaatactaagcttgtagataacagcttacaaggcatagtagaaaagagctgcaaaggagaggtgaactggagattttatagattactaggagataaaagttctggacaagcgagtggaaaccttactgaactccttggacactccattgacatctcagaaagaccacagcttaggggtagggccaaagccatagagtaaaagctactctagacccaaactaataagcttaaaaacaagcctcaaaaggatcaaggtgatttgccagtattttgactgcttgtggaaacaaaactcaatatattctctaaagataataaaatctctatgtccagttatgtagcaactataatgttcagcatgcaatgagaactttctagatacac

SEQ ID NO: 86884 - DNA, 623 bp, Homo Sapiens
gttaacacgatgttaggaagaaggatcaagtgaaggagaaaggtgaaaatgctggaaggtggggcttagtgatgaaacaaaccttggggacaggtgggcgtggtactgagagtcccagtgaggggagtgccctcaggcaggcgccggtggcttctgtcacaggagggaacagcgctgacattcagctggttcgcactgatacggctcaaccagtttgttaaaacatgtctgttccagtgtcagtaatatacgagtaactgcaatatgcagtaaaaattataaattctaatacaaactcagttcaagctaattaagagatcgcaacagccgttggtaaatggacttcccgctgcatttgagaagctttgcagcgccatctgccggtgtcgtagcatcactgcaggctgagaggctgctttgcgccttcatcttgaagcactctgaaattgcctgtttaaattaccttggaatcatggagttgctactgcttctgaatagtttagcttctactttgattttattgttagtgcattgtcgttcttgtgtcagtagcaagtttcagtgttttaatatttacaaatacaaaaatttttaataaaatattaaagccaaacttgaaaacc

SEQ ID NO: 86885 - DNA, 764 bp, Homo Sapiens
  misc_feature (461)..(469): n is a, c, g, or t
ggaactgaggaagtgaaagaagaaaatcttaaaaatgtattatctgaaaccccagctatatgtcctcctcaaaacactgaaaaccaaaggccaaagaccgggttccagatgtggttagaagaaaatagaagtaatattctgtctgacaatcctgacttttcagatgaagcagacataataaaagaaggaatgattcgatttagagtattgtcaactgaagaaagaaaggtgtgggctaacaaagccaaaggagaaacggcaagtgaaggaactgaagcaaagaagcgaaaacgtgtggttgatgaaagtgatgaaacagaaaaccaggaagaaaaagcaaaagagaacttgaatttgtctaaaaagcagaaacctttagatttttctacaaatcagaaactatcagcttttgcatttaagcaggagtaaaggaagaaagtgaccctagggaagtaatggannnnnnnnnactcatctttgaatatagactcgagtctttgggaaactcattatatatatatttttttaaagagtttgaagcaactgtttgtctttataagataatgtagtaattatattggtgtaggtaacaggacatatggaaaaactatcatctttgcagattactctgccctccaaatgcagggcctttcaaagatgcaatgggaattgtaattacggaattgaagctccaacccaatttgaatttggtttcttaaccttgaaaaatcattaaagccaaggtattaaaacctttgtgcatt

SEQ ID NO: 86886 - DNA, 531 bp, Homo Sapiens
  misc_feature (15)..(15): n is a, c, g, or t
gatggtcgcggtgcntgggcccacagtcgcgccgcgctcgaccgcctggagaagctgctgcgctgctcgcgttgtactacattctgagagagcctgtgtgtttaggaggatgtgagcacatcttctgtagtaattgtgtaagtgactgcattggaactggatgtccagtgtgttacaccccggcctggatacaagacttgaagataaatagacaactggacagcatgattcaactttgtagtaagcttcgaaatttgctacatgacaatgagctgtcagatttgaaagaagataaacctaggaaaagtttgtttaatgatgcaggaaacaagaagaattcaattaaaatgtggtttagccctcgaagtaagaaagtcagatatgttgtgagtaaagcttcagtgcaaacccagcctgcaataaaaaaagatgcaagtgctcagcaagactcatatgaatttgtttccccaagtcctcctgcagatgtttctgagagggctaaaaaggcttctgcaagatctggaaaaaagc

SEQ ID NO: 86887 - DNA, 371 bp, Homo Sapiens
  misc_feature (237)..(249): n is a, c, g, or t
acattttttgggcagcaatttaaatgttatgactatgtaaactacttctcttgttaggtaatttttttcacctagatttttttcccaattgagaaaaatatatactaaacaaaatagcaataaaacataatcactctatttgaagaaaatatcttgttttctgccaatagattttttaaaatgtagtcagcaaaatgggggtggggaagcagagcatgtcctagttcaatgttgacnnnnnnnnnnnnnaaagaaaagcattaagacataaaattctttcactttggcagaagcatttgttttcttgatgaaattatttttccatctgaggaaaaaaatactaggaaaataaatcaaggtgatgctgaaaa

SEQ ID NO: 86888 - DNA, 999 bp, Homo Sapiens
gctgagactttctatttttagtttgtttcaaatgcgttcttaattgcttaatgaagcatataatggtggctttcaatttttttacagataattctaacatctttgtcatcagtgttgacatctcttgattgtatcctgtcattccatttgagatcttcctggttctggctggcatcctctgacatcactccagcagaagaaagggaaggaacacgctgcattactgcgtggtcacaaggtccccgtctgatctgccttcactccacctttcagagtcttatgtttgttttgtgtatattatcaaggggttttaggtcacttagtcggaagaatagggaaaagtatgtctactccagcttaatggaagtggaattctcctgagaacctttttttgatacaaaatatgtacttgtgcatattttgtatcaaaatatataatgtacatgtcccttttgtacatgtatataaattgtatataaatatttagggttataaaaataaccaaagacaccaaaaactgccacaggtggatttgagaagatgtggaaatgcctcactgctaagacatgctcattcttgacaggctgggaaccctgaatgctgtagtgtcaccactgccctgtcctgtacctacctatcttttcactcatttcctccaagctcaggttttcagtttggggtatgtgccacctaacagtgagctgtggaactgcagcacaatcatcaaattcaaaaaaggcaaggacatcttgctcagtttttaagatacgccatagatggagtaaaccataacctttgattccagatccttaaccctgattaaaaacaacacaacccttcatgttgatttaaaacatcccttgcaaaagatggtttgaatattccaagttggaaatacccagtcttttaaagttacagcaccctttttgatacaaaaaatgtgcatgacagaaattgtacagtgagtagtgttataaaaataaccaaacacaaaaaaaa

SEQ ID NO: 86889 - DNA, 349 bp, Homo Sapiens
cctaaaatagatattaagctgctgttgtaaagtattgtttgcagctctttccaatatctagagacatttttatttatgaatatttatacaaaaaggaattctgtcaagatgactgctctatatcacttgagaatggcattatttaattaaagaacaaatagcattttttggtagtgcctgtccatacctattgtcattgtttgccttgtaatctgtttttttgaattcattttgggctgatagttttgtttaaggttttggataaggagcactttaaaacaaactggtgtgttgtttttaagttaatcatatgtttaataaatgcgtggtttttgcattcaaacacaaa

SEQ ID NO: 86890 - DNA, 616 bp, Homo Sapiens
  misc_feature (602)..(610): n is a, c, g, or t
gtcagtcgttactcccagaaactgacaaagaagatacaagttcagcacccagacatgatcaaagtgtataaccagttcatgggaggcgtagacagagctgatgaaaacattgataagtatcgggcatccaatccgtggaaagaaatggtattcaagccctcttttgttctgtttcgaattggtcttacaaaatgcttggcaattgcataaaacatatgatgagaaaccagtggattttctggagtttcgtcgacgtgtggtatgccattatctggagacccatggtcatcctccagaacctggccaaaaaggaagacctcagaagcgtaacattgactcacgttatgatggcataaatcatgtgatagtcaaacagggaaagcaaacgcgatgcgctgaatgtcataagaacacaacttttcgatgtgaaaaatgtgatgttgccttacatgtgaagtgttccgttgaatatcacactgaatagcaggtgtcaccacctcctgagataagaaacatagttttatacattatgtacagtgtagcagtggttttgcctagtgttccaattttggaacgtcacataacaatggaacataataaannnnnnnnnctcttc

SEQ ID NO: 86891 - DNA, 902 bp, Homo Sapiens
  misc_feature (638)..(638): n is a, c, g, or t
  misc_feature (702)..(710): n is a, c, g, or t
cagtcgacggtaccggacatatgcccgggaattcggccattacggccggggaccacttctctgggacacattgccttctgttttctccagcatgcgcttgctccagctcctgttcagggccagccctgccaccctgctcctggttctctgcctgcagttgggggccaacaaagctcaggacaacactcggaagatcataataaagaattttgacattcccaagtcagtacgtccaaatgacgaagtcactgcagtgcttgcagttcaaacagaattgaaagaatgcatggtggttaaaacttacctcattagcagcatccctctacaaggtgcatttaactataagtatactgcctgcctatgtgacgacaatccaaaaaccttctactgggacttttacaccaacagaactgtgcaaattgcagccgtcgttgatgttattcgggaattaggcatctgccctgatgatgctgctgtaatccccatcaaaaacaaccggttttatactattgaaatcctaaaggtagaataatggaagccctgtctgtttgccacacccaggtgatttcctctaaagaaacttggctggaatttctgctgtggtctataaaataaacttcttaacatgcttctcccgngaaaacaagcgacgccgcgctaacacataggcacgagaccccgaacaccccaagcgacacaatnnnnnnnnnacgcatacgagaagcaaacagaaaactttggtcggacccctctcggcccccaaaaaaactttctttaaaaccaattccgttttgggccgccccggcccccacctaaggaaaggggaaacagggcccattaacggtgttccacaagaaaaaaccctgggctaatgaaccaagggcgtttgaatttctcccccc

SEQ ID NO: 86892 - DNA, 566 bp, Homo Sapiens
gcacgaggagttctgccacaagtacccgtggtgtctgttcccacaacaatggccctttcacaagctcttgcctcacaacccctgcagaagtccttcaacaaaactaataatagactagtgaaacctactcctcacatgggtaagagttgcagtgggcaggtgaccctcctccctgcccccatcctttgcttcctcaagctccctgccaacctctggatacatcaatgggaaggaaaccagggaagcatagacctatagtacaacaggggtgtagtgaccactggacctgatgaagcgaatctgcctgaaatttaatacgcctttttatttcccttctgtgttaaatcaaatgatctgttctgcactgagccaagcaagttacttttaaaactggtggcaccactcatttgggacttggagactgcttttatccagaacctgttaagagaacaggggatttaaatacaaaggaatatgaaggtggtgtgccttaaagacagtctaaaattaggttttagtttgttacattattttgaaatattaaacatgaaaatgttaaatcagaa

SEQ ID NO: 86893 - DNA, 1077 bp, Homo Sapiens
tcatgaaatcctaattttcattacccacaaacccttaaaaacctccgtcatggactggtcttttcttttttgtaaaacagggtgtgggagccacttggttgggggtcatcaagtggcctgatggatccagggcatgggaaggtggaatgagggaggaagaggcagtggcaagaggagagcaggttgggcaggtggtcggggtttgatcctgaatgcagaggcgacatggaagggctttgtgcaggggctgctgtgctctgattcacacattagaaagaccattctggaggcagcatggaggctggtcagttgaagaggaggcagagtcctgtgaccaggttgttgtgacgccttctgagggtccacccctcaatggctggtcctcagtgcccccatagccgggagccctggggcagggggactggcagtccctgcagtccttgccatgcaagaatgggaacaggcaggcctgggcagtactactcgtcctcctggaagtagaatttggtgaccatgacgccttcgtcaggcatattggtgaggctgacgggctggtcagcttccatcgctgtgcagaggaaccaaccggggcaggcggcagactcaaaactggtggtggggccactgtctgagcggatgaaggcgaagcgcttgtcctgctttctgttctcgctcaggtcagtgatgttaactgcctccagctggagtctggtctcatcaccagacttgacacaggacaggcacatcttccctccatggattcccaagaacagagcatgaggctcaatgggtaccacatctatcttttcttctaaattgacatttggtccttgcaagtatccagcaactagttggttgttcctcagatagaaggtcttctggttaacatcccagattctgaaggcttgcatcttgctggattttctcccagagggtcggcagatcgtctctgaatggaacaggaagaggaggagagtgattaggtgactgcggaggcctctgcagatttccattctgtgactgcagcaaggcagtggactgccattgcgggcccagagttgtggtttataaagaaat

SEQ ID NO: 86894 - DNA, 1628 bp, Homo Sapiens
  misc_feature (11)..(11): n is a, c, g, or t
cttcccaccangcaaacaggtaatgcaaatacggatttcatctgggtgggtccagataacagactgctagagccggataaagagatggaagacttttacgtgtttcacaatggaagtctggttatagaaagccctcgttttgaggatgctggagtgtattcttgtatcgcaatgaataagcaacgcctgttaaatgaaactgtggacgtcacaataaatgtgagcaatttcactgtaagcagatcccatgctcatgaggcatttaacacagcttttaccactcttgctgcttgcgtggccagtatcgttttggtacttttgtacctctatctgactccatgcccctgcaagtgtaaaaccaagagacagaaaaatatgctacaccaaagcaatgcccattcatcgattctcagtcctggccctgctagtgatgcctccgctgatgaacggaaggcaggtgcaggtaaaagagtggtgtttttggaacccctcaaggatactgcagaagggcagaacgggaaagtcaggctctttcccagcgaggcagtgatagctgagggcatcctaaagtccacgagggggaaatctgactcagattcagtcaattcagtgttttctgacacaccttttgtggcgtccacttaatttgtgcctatatttgtatgatgtcataatttaatctgttcatatttaactttgtgtgtggtctgcaaaataaacagcaggacagaaattgtgttgtttgttctttgaaatacaaccaaattctcttaaaatgattggtaggaaatgaggtaaagtacttcagttcctcaatgtgccagagaaagatggggttgttttccaaagtttaagttctagatcacaatatcttagcttttagcactagtggtaatttcagagtaggcccaaaggtgatatgactcccattgtccctttatttaggatattgaaagaaaaaataaactttatgtattagtgtcctttaaaaatagactttgctaacttactagtaccagagttattttaaagaaaaacactagtgtccaatttcatttttaacaagatgtagaaagaagaatcaagcatcaattaattataaagcctaaagcaaagttagattggggggttattcagccaaaattaccgttttagaccagaatgaatagactacactgataaaatgtactggataatgccacatcctatatggtgttatagaaatagtgcaaggaaagtacatttgtttgcctgtcttttcattttgtacattcttcccattctgtattcttgtacaaaagatctcattgaaaatttaaagtcatcataatttgttgccataaatatgtaagtgtcaataccaaaatgtctgagtaacttcttaaatccctgttctagcaaactaatattggttcatgtgcttgtgtatatgtaaatcttaaattatgtgaactattaaatagaccctactgtactgtgctttggacatttgaattaatgtaaatatatgtaatctgtgacttgatattttgttttatttggctatttaaaaacataaatctaaaatgtcttatgttatcagattatgctattttgtataaagcaccactgatagcaaatctctctcc

SEQ ID NO: 86895 - DNA, 664 bp, Homo Sapiens
  misc_feature (199)..(223): n is a, c, g, or t
tccttccaatcatttgcttcagagactcctttctggcctaacagcgcattcctttgattggtccttgagtgaccagagacttagtgcccttgtaagtctgtcttctgttgctacttgtttttttcagtgctctgaaatagagtaactaaatggttatttgtctgaatataataatgtaaaacttcttgtggtcatcttnnnnnnnnnnnnnnnnnnnnnnnnnctgcaaaccagagagctagagaacttggcctctgatgctggcacacaggggacccttcagccacctgacggcagggggacagtctgcagcccccacacctgactggcttcagtagccaggtggaggggctgccaaacacagtcagggtggcacacagtgtccaggcccagggatactgtcaccatcgctcacctcattctaaaccttgtcaggtccctgatggcaaaagcattgggccagtaggactggaggctactctttaaacatggctttcctgcaaagctgaagctggtgtcccccagcaccaagctgcggctcacacagatcagccacggaacgtgtgatccgcttacctcactgcctacagaagccctactgccaaactgggcctggaaaattcccagttttaggtgttttgagtccacagtgatgaacgttaag

SEQ ID NO: 86896 - DNA, 617 bp, Homo Sapiens
  misc_feature (68)..(384): n is a, c, g, or t
cacgaggtaatttaaactctgccccaaattctcaactgtagtgtggtttagtgtatctgttcacttcnnnnnnnnnnnnnnnnnnnnnnnnnnnnnnnnnnnnnnnnnnnnnnnnnnnnnnnnnnnnnnnnnnnnnnnnnnnnnnnnnnnnnnnnnnnnnnnnnnnnnnnnnnnnnnnnnnnnnnnnnnnnnnnnnnnnnnnnnnnnnnnnnnnnnnnnnnnnnnnnnnnnnnnnnnnnnnnnnnnnnnnnnnnnnnnnnnnnnnnnnnnnnnnnnnnnnnnnnnnnnnnnnnnnnnnnnnnnnnnnnnnnnnnnnnnnnnnnnnnnnnnnnnnnnnnnnnnnnnnnnnnnnnnnnnnnnnnnnnnnnnnnnnnnnnnnnnnnngcttcctagatttcttaaatatgctgtgtatttgggtagcttagagcagtgctcagcatatgtttaacttccacttgctaccttagtttataataactgtaattttataattttgtttggaatgaccggaactgttattcatatatatgttggtgtgtatacatttgtgtatatatgtacatgtgtgtaacatggattttttcacaaataaaaagtgtgtaagtattgtgtac

SEQ ID NO: 86897 - DNA, 470 bp, Homo Sapiens
tcctgatgctcctttgcagataatactaatgcctcaggttcagccaggcccaccaccatgtccggtattctacccagaaaaacaagaaatcacccttccacctgatggcctttgggttttgagatttccttatgcatatgtgactgagagaggaccttgtttcccccctaaggaaaatgtgcagttaatgagctacaaggtgctccgtggggttcttaaggcagtaacacaataagtgttttccagccagttcaatcctatacttgagctggtttttgtttttggtatttgtggctgtgtttttggtatgtgtttactgtgttttcccaaatccaaaatgtgttttggttacaggagttcagtatttggaaactaatttgttctactttttcattatattgttgatatttattgtaaacgtgactacaactttctaataaagattggttgttctaaaaaagaatataaaa

SEQ ID NO: 86898 - DNA, 1080 bp, Homo Sapiens
  misc_feature (868)..(920): n is a, c, g, or t
ggtaatccagaagttcatggtcaagtagaagtgaaaactgagaagaggccaaacttcgttgatcgacaggcatccacagttgagtatctcccaggcatgctacattcaaattgccctaaaggtctcctacccaaattctccagctggtctttggttaaactaggccctgctaagtcttataactttcatacaggtttggaccaacagggctttattccaggaacaaattatcttatgccttgggacattgtcatcaggactagagctgaagatgaaggagacttagacacaaactcttggcctgctccaaataaagctattcctggaaagagaagtgcggttgtaatgggaagaggaagacggcgagatgacatagctcgagcttttgtgggctttgaatatgaagactctcgaggtcggagattcatgtgctctggccctgacaaagaaatgaaagtaatgggaagtggcccaaaggaatcagccttaaaagccctaaatagtgacatgcccttatatattctgtcatcctctcaaggtagagggctgaaacctcattatgctcaacttatgaggctttttgttgtggttcctgatgctcctttgcagataatactaatgcctcaggttcagccaggcccaccaccatgtccgggtattctacccagaaaaacaagaaatcacccttccacctgatgggcctttgggtttttggagatttcccttatgcatatgtgactgagagaggaccttgtttcccccctaaggaaaatgtgcagttaatgagctacaaggtgctccgtggggttcttaaggcagtaacacaataagtgttttccagccagttcaatcctatacttgagctggnnnnnnnnnnnnnnnnnnnnnnnnnnnnnnnnnnnnnnnnnnnnnnnnnnnnncccaaatccaaaatgtgttttggttacaggagttcagtatttggaaactaatttgttctactttttcattatattgttgatatttattgtaaacgtgactacaactttctaataaagattggttgttctagaaaagaatataaaatacatggatgataaa

SEQ ID NO: 86899 - DNA, 551 bp, Homo Sapiens
  misc_feature (270)..(312): n is a, c, g, or t
cctgctgctgctgcagatgtaccgccattgtaagccgccatcatttttgcgttggctcttgcgccacaaagagacattcaaaataaatgccctttgattggaaagcaaactgggtcaagctgtcatttggccatttaaaaatgaagaaaaaccactcactccacctcaaaaaacatagagctttatgtcttcatcagtcaatccaaacaagttagaggatcttggtgtttaattttggggtgagcgtgtgtggaagggtgtgggttgccnnnnnnnnnnnnnnnnnnnnnnnnnnnnnnnnnnnnnnnnnnngaccccttccccccaggattcctgccacaagtgggtactaaaactccattcttaatttgggggaggttccaactttgaatgtgggaataaaggccaaacctcccgaccccctgaactccacacacgaaaaggatcaggtaacacaccacccttggaatcttgaaagagggttgactcatctaccccttccattcccacatccttttctaaacacctaccacctcctcaaaaacaggatt

SEQ ID NO: 86900 - DNA, 206 bp, Homo Sapiens
ttgaaattatagcccagtgtgagtcaccatgctcagccagaaaaataaatcatttaaaaatcatgatttgcttctgaattgaatattgttttaagaactttttgatgattccagttgctactgctggtctccagcagtttcttagaatagtcaatggacacaagttatgttaaaatctctattaggccaggtgcagtggcacactc

SEQ ID NO: 86901 - DNA, 545 bp, Homo Sapiens
  misc_feature (123)..(123): n is a, c, g, or t
  misc_feature (125)..(125): n is a, c, g, or t
aaattgtgtactcctgtccttcatcgtcaaagtttgatgcagaaatgccacaccttcatttcaagctaccaagtgcacaagaaaaaagaatgcaagatttaaaaaatgattgttttgaccccntntacacaaaatgtcttactcctggctttaattaagctgcttgagggctgatagctctgccttaccctggtaatcagcaaaatggtcctgtggctggggaggccctggcagcaggaagccttcaaggagccatgggtctgtgctgactctggccttacaaccttccagcctcctttgctggcattgatggggttccatttttgaatgaactagtttaatgtggatccaaatttattgtgcatattctttcgttttggttttcaaaagatggcttattcacatggaaatgtacaccagtttagccctgggccctccctttaccttcacatgtgtaaaagcttacacaggtttcagaaaataaatggtttcattttctctaaaataactagtacaaaataaaacagatgtcagttgttgaaaaa

SEQ ID NO: 86902 - DNA, 910 bp, Homo Sapiens
ggccaacatcagggaatccatcccagatttctaccggtcgttagcgacagaacatcccccgctggaggatttgagtcaggctccaggtcaaaagctttcaaattccaggataatctctgacatcttgggcgcaaagacaatataagtgcatccaaggctgttgggatatttttcagggaatccgggggactttatcactccactaggtgttgtgtagttctgggaacattcaggacctctcttgaaaatttcataacgtatggaaaatcctgcaccatgtgtttcgtagtcagagacaaatttgataaaaagaaatggccctgaagacacaacaggaggaggggctatctttccacagaactttcccctaaaatgtccattttcattttctccatcgaagacttccacgtagtcatacttgcagtctctgtcctccaaatcgaagtgagggttgaagttgatcataattctctggtatgggtccggagcctgaatcagccattcgcatttttcacttgggtgataagaatgaggataaccaggagatgtaaggtacccggggctttcaatttttatagtatcgccacatttatcgttgcgaaaagcgccggccggggcgaggacgagggcgagcacggcgcagaggagcggcagccccctctccattctcccttctccgggtccgcaggcagacgcgggagaacgaggacgtggggggaaatgcagcaaagaggagaatctaagcgatccgaagagccccaactccgcctagagctgtacaatcctcagcccgtcttggagaaaagaaagcagcgaggcaatgcctggatccgagaggaacgcttctctttttgtgtctgcaagtcgcctgcatcctgtcatttagctccggcttcctctcccttttccc

SEQ ID NO: 86903 - DNA, 1597 bp, Homo Sapiens
ctatgcaggcagacattagtcaagctgcacagattcttagctcagatcctagtcgtacccaccaagcgcttgggattctgagcaaaacatatgatgcagcctcatatatttgtgaagctgcatttgatgaagtgaagatggctgcccataccatgggaaatgccactgtaggtcgtcgatacctctggctgaaggattgcaaaattaatttagcttctaagaataagctggcttccactccctttaaaggtggaacattatttggaggagaagtatgcaaagtaattaaaaagcgtggaaataaacactagtaaaattaaggacaaaaagacatctatcttatctttcaggtactttatgccaacattttcttttctgttaagggtgttttagtttccagatagggctaattacaaaatgttaagcttctacccatcaaattacagtataaaagtaattgcctgtgtagaactacttgtcttttctaaagatttgcgtagataggaagcctggtacaaacaatttaacgctttctagatcacatattagtctctaagttgttttctgtttcctgctttacttatgtttttacaattctccaaaactaagaaaattctaattaggatataaggagtatttactgttcaatagaataatatgcatcctcctttatacctaggacagaattaaacatttgttacacattcagaacagtgatgttgttctttttgatacttttatctcagtatcttttcacgttccataacttgtccatatttttgctcatattttcttacttttcctttggtatttattcatgtctgcaacatcaatcatagtagtctagatcaatgcaactcaaagcaccagtctacaaactgttacttatccacaggcaagataagcatgcacaagaatttaaatctagagatactttttaggtcaatgacaggatttgattttttagcaaaattttattaatagctaaagcaatgtattgatttacactctgatgcaagtaatttatctcttcattgactggtagcaaccaattcatggaccagtaccatggaccacactttgagaaacacttctttggataataatagatatcctgggatagtgcatgttcaccatctattttgtcagataatggggccttttaaaaaataatactttgctttcatgatatattgtattttgtggaaagttaagtttagcaatatagactctaaaagcaaattaaatttttttaagccataagaaattatactatatcccagtatctgtatgtctgtataaagcagtgtattatcatgttttcatttctgtgattgtaagttaagagtcttaactgcagaggtattgtggaaagtagtagccttaagcataataaaatatggtctcttgggtactccctctggccattaccacattcttagattatatgtgtccatctttgcagctttctgagagtaattttatttgttgtcttctgaaatgtacatgtatacatgtacctactgagtgctatgtgatttttaaaaatgtattactgtagaatgcttctgcaaattcaataaagttgttaaatttg

SEQ ID NO: 86904 - DNA, 678 bp, Homo Sapiens
atactgcacagtggcacaaaaaaatagtgcttgtctgatatttttttgtgccactgtgcagtataaaaaaatatcagacaagcactattttatatttaaaaattgtttcttgacaagctgacttggcacttaagtgcacttttttatgaagaaaaagtacaatgaactgcttttcctcaagcaataattgtttccaacttgtctgggaattgtgtgtctggtaactggaaggccttccactgtggcaaatggaggcttttcactgcctgtagagacaatacagtaagcatagttaaggggtgggtcagaacatgttaagataacttactgtatatgtattcccttgtattttgttaaagctggaacatttgatatttttccatttatttatgaaaaaatatgaacctattttcatttgtacaaggtaattgttttttaaagcaagtcaccttagggtggctttaattgtataagtcaagcacatgtaataaattcaaaacctgcagttaacaggatattagacatcaatcctggtaaccaaatattaaagattctctttaaaaaagactgaacatgtttacaggtttgaattaggctaaaaggtcttgcagtggcttttcatggcccttcaaattggaatggaactactgtactttgccatttttctataaatcagta

SEQ ID NO: 86905 - DNA, 432 bp, Homo Sapiens
  misc_feature (42)..(71): n is a, c, g, or t
actgaactccagcccgtatgacagagtgagaccctgtttctnnnnnnnnnnnnnnnnnnnnnnnnnnnnnngtatcttactgactaaactggaatggaaatcttataattagtgttgtatttttctgcaaaatagtgaattggtacttgggagacttctgttctttgttgaaaaaaattgcctttgttttgaaattatatcacctgtgttctgaactaaaatgatgggagttcattttgtatttactttgcagtaagtatcatgtaaatatgcaaatgttgaatgtaatatagattgtgtcctcattgagtttttgggtgatacagtttataaatataacaattatacaccctcatacattcgtctgattttgagcttgtaagatgagaactgctttttacacatttaataaaaaaaggtctctgaattaaa

SEQ ID NO: 86906 - DNA, 659 bp, Homo Sapiens
ggagacagagtcttgctctgtttcccaggctggaagttgcagggagtcagagccattatctacagaggtggggacactgaatgaccctggaatcctttgacccccttccctcagccccttcagcggggcaggaagcagatctggtatgttgggggtattttgcccacaccacactcctggggtgtcagatcgatgtcttcaggagccacggggctggccacggagaagttctggaggatggtggtgaagaagaggaacaattccgcacgggcaatgccttcaccaagacaaatccgcttccctaaggagaaggggataaaagcttcattctttttcagtgccccattggcatccagaaagtggtcaggattgaaggcgtctggtttttcaaagtagtgtgggtcacggagagcagtgctcaggatgagaaatacttccgtgtccttggggatggtgtaccctcagaagctggtgtgttgggtgacaatgtggggcacacccatggggagaaggtcagcaaatctctgaatctcacggatgactgcctctgtgtatggcattttggctcggtcatcaagcgctggagggcgatgtgggccaaccacctgttcaatctccttgtagactctctctgcacagagaagaagatgaatgaatct

SEQ ID NO: 86907 - DNA, 416 bp, Homo Sapiens
tgagccggccccagctttcgatcgcggagaaatccaacccacacagtgaattcagccaccagaacctcatcatcaacacgctctcgctcttctttgctggcactgagaccaccagcaccactctccgctacggcttcctgctcatgctcaaataccctcatgtcgcagagagagtctacaaggagattgaacaggtggttggcccacatcgccctccagcgcttgatgaccgagccaaaatgccatacacagaggcagtcatccgtgagattcagagatttgctgaccttctccccatgggtgtgccccacattgtcacccaacacaccagcttctgagggtacaccatccccaaggacacggaagtatttctcatcctgagcactgctctccgagacccacactacttagaaaaa

SEQ ID NO: 86908 - DNA, 1341 bp, Homo Sapiens
  misc_feature (727)..(760): n is a, c, g, or t
  misc_feature (911)..(911): n is a, c, g, or t
tgtttccaagaattccagttgcagttcaaaagaatattgatcaacagattaaaacccgacctagaaaaatcaagaaagatgggaaggaaggtgctgaggaaatagacagacatgttgaacgcagacgttcaaggtctccaaggagatctctgagtccacggaggtccccaagaaggtcaagaagtagaagtcatcatcgggagggccatgggtcttctagttttgacagagaattagaaagagagaaagaacgctagcgactagagcgtgaagccaaagaaagggagagagaacggcgaagatcccgaagtattgaccgggggttagaacgcaggcgcagcagaagtagggaaaggcatagaagtcgcagtcgaagtcgtgataggaaaggggatagaagggacagggatcgagaaagagagaaagaaaatgagagaggtagaagacgagatcgtgactatgataaggaaagaggaaatgaacgagaaaaagagagagagcgatcaagagaaaggtccaaggaacagagaagtaggggagaggtagaagagaagaaacataaagaagacaaagatgataggcggcacagagatgacaaaagagattccaagaaagagaaaaaacacagtagaagcagaagcagagaaaggaaacacagaagtaggagtcgaagtagaaatgcagggaaacgaagtagaagtagaagcaaagagaaatcaagtaaacnnnnnnnnnnnnnnnnnnnnnnnnnnnnnnnnnnaagtcgaagtggcagtcaaggaagaactgacagtgttgaaaaatcaaaaaaacgggaacatagtcccagcaaagaaaatctagaaagcgtagtagaagcaaagaacgttcccacaaacgagatcacagtgatagtaaggaccagtcagacnaacatgatcgtcgaaggagccaaagtatagaacaagagagccaagaaaaacagcataaaaacaaagatgagactgtgtgaaaatattttgtaaaagtggatcacattgaatcctataaatgattaaatctgcttttttcccccacgttgagattgtgcagtagttcgcactcctcaagctctccctgtaggctgcattttcatttcctctttcgtgtagggaagtgcctttgtaattccatttattgcattggtgttttcacccaattgttaagtttgatacatgatgcacagattgttcttgcatttttattgtttgtttttgaaatgtacagtctgtacatatgtcctgaaaatgttttaattcctttggcatggttgccatgttggttaaatttgtataaggcaataaactgccactaatctaaaaa

SEQ ID NO: 86909 - DNA, 606 bp, Homo Sapiens
agaattcgccacgaggcggagaagaggaaggaaagaaaaacaaaggacagtatatcagttatgttcctttccttcctcttcaccgcctgtgatgattttaaattagaaatctacctgcctctaatctctttaattttctcatttatttactgctgcctattttccaaaacactgcttctcgaatattcctggctcaaaaatcatctatgtcttcatgacatatgaaacccctagaatccagcctttccccagcttttaatatctcctaattgatttctcaattccagtgaaatgattccatttatttttttcccaaacacatcacaaatattcctaactcttgtgagcaattttctctcattcttctcaacttatctaaatcctaacttttcaaaagatctagctcaagttctgtcttatcatattttgagttcctttctttggcattgtattattttgtatctttccatgtacacatgtgtgcattatctccctgataaaactaactggctagaggataggagtaaagactcaattctaatatccttgttacctaataatacacaaacgtgaaacatgtttgaataaatcactgttaaatatttt

SEQ ID NO: 86910 - DNA, 539 bp, Homo Sapiens
ataattcatgaataatgttgtcaaaattacttttaatcacaagattaacctgcaacaactatgtatattatttttatgtgttggcttattatgttcaaaaactttgtttataaaaactgattttgctatttaatttttaatttactttagaaaataatgtagcacaatgttagatttattacatatgtaacaatactatttaatgctgcaaaatcatagcacatgtttgtaactatcacattttattaactgtctttgtacttttaaagaaagaaatatgatcataatctttagttttatttaaatcaaggatcatggatttattttgacatactttctaataattataattttttcctttgtaagcatatgtgcctaaattctcattgagggctttctgtactgtgtaaatagcacagaaaatgtctatataggaatgtttaaaaaatattttctgttgcatgtaactgaaaagatacatctaatatgcaattaaattgaataaaatagtacttagtgaattaaaaagttaagtattg

SEQ ID NO: 86911 - DNA, 501 bp, Homo Sapiens
ccaataatctgctttattagggccatcacaataaaagtttggggcaagaagccatgcataaagtgtttctaaagtagtgaatgttttctgttctgtatctttttttcttcttataatttctttacaaatgtcagatatttctcttcatatttttgttctaggcttctgtgcgacgatagtccatttttttaatttgttttaactgacaaaaattatatatatttatcatgtataacagggttttggaatatgtaagttgtggaatagttaaattgagctaattacacattatttcatatgcttatcattagatattccattttaatggcacttgtttttaaaaatgaaacagagttttaggcacaatagtcagttacttctggctctgctttgtggagaaaggtgtatggactgaaatctctgcactctccagataataactttctaatgctttaagataactagattgtttttaactgtctggaaattaaaagagacctt

SEQ ID NO: 86912 - DNA, 629 bp, Homo Sapiens
agaattcggcacgaggagaaaaaggatcgaaagggaccaagcagctcactacgatatcaagttacactaagacttggaacactaacattctttcctgataatgcatcagtgaaggatccaatctcctgcagtgataactagaaaggataactcgagagtttcactggattttttccagtccccttaactcatagtaacataccaatcatatgttggtgtttccaaaactgatttcgtctggtggcatgcccatgcacccatatgcccaccctcaactcataccctgttaattttgttggtagacaacacttgaaactcagacattattttggccttcattcttatccagatttatttatttaaggctgccatggtttctcttccggttgaagtattttggggtaggtaaacaatgtacctgcaataatgagtattctaatcagtattgttctcaacaacatatgactagcaattagtcatgctaaaatctgaaccaattctacatttggtagatgttcccgtgcttgtcattctttccagtagccccaaaattctgtgcatactatgttacttctgaaaacctcatttgttttaaaagtggttctattaaagaatgagtgatccatttc

SEQ ID NO: 86913 - DNA, 733 bp, Homo Sapiens
catcaaagatgccatccgtgcagctcgagctcagcacacaggtaataacgtgaaggaactcttccggctagacagccctgccaccccggagaagatccgcaatgcctgcgtggacaagttcaccaccctgtgtgtcactggtgtcccagaaaactgcaaaccctggtctgtgagggtctaaagagagagtcctcagcagagtcttcttgtgctgcctttgggcttccatggagcaggaggaacataccacagaacatggatctattaaagtcacagaatgacagacctgtgatttgtcaagatgggatttggaagacaagtgaatgcaatggaagattttgatcaaaaatgtaatttgtaaacacaatgataagcaaattcaaaactgttatgcctaaatggtgaatatgcaattaggatcattttctgtctgttttaatcatgtatctggaatagggtcgggaagggtttgtcctattccccacttactggacagcctgtataacctcaagttctgatggtgtctgtcctttgaagaggattcccacaaacctgtagaagcttaaaccgaagttactttaaatcgtgtgccttcctgtgaaagcctggccttcaaaccaatgaacagcaaagcataaccttgaatctatactcaaattttgcaatgaggcagtggggtaaggttaaatcctctaaccgtctttgaatcattggaaagaataaagaatgaaac

SEQ ID NO: 86914 - DNA, 1317 bp, Homo Sapiens
cagtcgacggtaccggacatatgcccgggaattcggccattacggccgggataaactgttgggttagaatctatattagaatctttcaaactaattgaaaacaggaagactatcatctaagtagccagataatctgggtttcaaaaagttattccatggtactggtttaaaaaatacttttcaagtgttttaatttttaaagtgtaactaattcttcaaatatgttatgctgttaaaatatgtattccataagtactttttgtatatgtattcttaaattttaaaaagtcaactgaatgcgcaaagatgatataattttggatgtagacatttaaactagattcccagtcctctccttcaaaagcttggtctctgttttctcctatagggaaaaaagtcaaaataagttccaaaaactatcctcaaagtagtattgtgcttgtagtaaatgaaggttggatggatggatactgacaatggtggcaggcatttcaagccttttaaattagtactttttgtcgtcttgcttattaaaattttgttaattttagcaaagaccaattgttgtgataaactggtgttttttggatgcttcaagcacacgttaaccaattttttaattccccttttggttcctcccattgttctaaaataggactttcatattattaaaacctcaaaagatgatccacccaggatgaacaaagatcaccaaggggaaagaaaacattttttatctttacagaaaacatgttaagattatatatagatgtattctttacattggatattgtattagagtcctcctcacaagaaatgaaatagtttttagcactcttagcattagagttcctagattggtgttgatagctacagttttaaaatgtataacctgaaaatgaaggttaattttgcattgtaagagcacatttgatctatgtaaaaagtgtccatttggtgtatttttttaaaaaagagaaagcactttcatattaagtagcatgtgtatgaatttagattttcatatttgttgtgtctgtattcagtgaagtaaattgagcatttaaatgtttgttgatggcaacattaactattaaattaaagcaccttaaactctgctgcttaacttgcttgtaattgcacctttgttacctgcacattttcaaataaaatattgttgtaacattgcttcatgtgggtctggatggaaaattagtgggcctacaggatcatttatttatattgtttatattacaataatatattgtaaatcagttgtaagttcatttctttacaaataaaaccctcttccatttg

SEQ ID NO: 86915 - DNA, 1329 bp, Homo Sapiens
  misc_feature (80)..(114): n is a, c, g, or t
  misc_feature (163)..(467): n is a, c, g, or t
  misc_feature (484)..(683): n is a, c, g, or t
agtgtataatcactatagggcgctagctctccgcagccgaacgacgagcgcagcgaagtagtgagcgaggaagcggccgnnnnnnnnnnnnnnnnnnnnnnnnnnnnnnnnnnncagtcgacggtaccggacatatgcccgggaattcggccattacggccgnnnnnnnnnnnnnnnnnnnnnnnnnnnnnnnnnnnnnnnnnnnnnnnnnnnnnnnnnnnnnnnnnnnnnnnnnnnnnnnnnnnnnnnnnnnnnnnnnnnnnnnnnnnnnnnnnnnnnnnnnnnnnnnnnnnnnnnnnnnnnnnnnnnnnnnnnnnnnnnnnnnnnnnnnnnnnnnnnnnnnnnnnnnnnnnnnnnnnnnnnnnnnnnnnnnnnnnnnnnnnnnnnnnnnnnnnnnnnnnnnnnnnnnnnnnnnnnnnnnnnnnnnnnnnnnnnnnnnnnnnnnnnnnnnnnnnnnnnnnnnnnnngatcattgcccactgcnnnnnnnnnnnnnnnnnnnnnnnnnnnnnnnnnnnnnnnnnnnnnnnnnnnnnnnnnnnnnnnnnnnnnnnnnnnnnnnnnnnnnnnnnnnnnnnnnnnnnnnnnnnnnnnnnnnnnnnnnnnnnnnnnnnnnnnnnnnnnnnnnnnnnnnnnnnnnnnnnnnnnnnnnnnnnnnnnnnnnnnnnnnnnnnnnnnnnnnnatgtcccaccatgcccagactaatatttacttttaatcagactaagatagggttactacttgagttgctatggctccagctgaaagaaagcccgtgcagtcatatcacgcgtaaacatttgctttatgctaaaaatatggtggacctggcattacagctattacaaatctcctaagatgtctcgggtagtgtattagttacttttcatactgctatgaagaaatactggaaactgggtaatttataaagaaaaagaggtttaatgtactcacagttccacaaggctggagaggcctcagaatcatggtggaaggcaaagaaggagcaaaaaggtatgtcttccatggcagcaggcaagagagcacgtgcagggaaactgccctttataaaaccatcagatttagtgagatgtattcactatcacgagaacagtatgggaaaaacctgcccccatgattcgattacctcctaccgggtccctcccacgacacatggggattatgggaactacaattcaagatgaaatttgggtggggacgcagccaaaccatatcgggtagcaacaacctagggtcacttttgcagggtggtaacagccatttaccaagatagtgtaacgtaaagaagggcagatttattcggagaa

SEQ ID NO: 86916 - DNA, 831 bp, Homo Sapiens
  misc_feature (19)..(19): n is a, c, g, or t
tgctgtttgtggaaaatanagcattctataggcggagctagtgaacgcctcttttaaaacacgagtctccacacttccctgttcactttggttccagcatcctgtccagcaaagaagcaatcagccaaaatgatacctggaggcttatctgaggccaaacccgccactccagaaatccaggagattgttgataaggttaaaccacagcttgaagaaaaaacaaatgagacttatggaaaattggaagctgtgcagtataaaactcaagttgttgctggaacaaattactacattaaggtacgagcaggtgataataaatatatgcacttgaaagtattcaaaagtcttcccggacaaaatgaggacttggtacttactggataccaggttgacaaaaacaaggatgacgagctgacgggcttttagcagcatgtacccaaagtgttctgattccttcaactggctactgagtcatgatccttgctgataaatataaccatcaataaagaagcattcttttccaaagaaattatttcttcaattatttctcatttattgtattaagcagaaattaccttttctttctcaaaatcagtgttattgctttagagtataaactccatataaattgatggcaattggaaatcttataaaaactagtcaagcctaatgcaactggctaaaggatagtaccaccctcacccccaccataggcaggctggatcgtggactatcaattcaccagcctccttgttccctgtggctgctgataacccaacattccatctctaccctcatacttcaaaattaaatcaagtattttacaaagtg

SEQ ID NO: 86917 - DNA, 1018 bp, Homo Sapiens
  misc_feature (25)..(25): n is a, c, g, or t
  misc_feature (208)..(208): n is a, c, g, or t
  misc_feature (471)..(490): n is a, c, g, or t
ccccattccccaacggtcatggctnttaagttatcctaggctgttcttagtaatccagcccatcagaaccactaaattccctccctgttcacatgggttaaatacaggcttctgatttagctttacttcctagtaaagaggccagactacagagaatattaaacagctccttttaactatgctgcatccagactgcctcattccaccntaagagaaggtgcccacatgataatatgcactagagatctaccaatctaagtttctgaggtcttctttttggataagttccagcactggaatattcagaatttcaaaggaaaattacatgttgactactgacattttagactgcatattcaaagttaaggagcaagattaagactagagtgccaaccaagatgctgttaaacatggcaaaaaggtgacagcacaaagggaccaaagaggctgattctttagaggccctttgcnnnnnnnnnnnnnnnnnnnngcaacaagtgtagaatttcccctgatcaaaatctgaatattggttaatgcatgttttctcattctccgtgtatgaacccactcctaacctctctcattgcctttttaagcttaagagagagaaataaaagaaaatggatatagaccatgtatttttatttatgaaaagagaggcatattctaatagtcataaggcaatgtgtttaagagctgcacctgaactggtattctcaaaactgaaaatagttatcaactctattcaacttgtaagatgtatctatgtgcttcccaagtcactggttgtcacccaaatggaccacggtgactccatcatgccttaaggaggcattatatactgtgtgtagtatgcacatgtatttttaaagaaatgacattaagagagaaaagaacagcctttcaaacatcagttcctcaaataaggggtgacagtgctatatggctcccttttaatctcctcacctactcagttatcaaatacctccaaaattagacaaataaggcctcgtgc

SEQ ID NO: 86918 - DNA, 623 bp, Homo Sapiens
  misc_feature (75)..(95): n is a, c, g, or t
gcacgaggtttttataagttttgtaagggccctgcttagtcagtgtacagggtggagtcagaggcagttttcagnnnnnnnnnnnnnnnnnnnnncaatttcaccaagcggtagtaattgttgttttactagttatacatttagaatataaaggaggcatcagaaaacacactctctaaagccacttccttgtgcacagagtctgcacagggagagcacaggcatctccctggaaaagcacctgccaatgacgaatttcatggaagaacctaggcaagaaaggaagcctctttctgagacacagtctctgagaggtgagcctagctttgctcttcctacagggtatgcttgggccatacacaatgctcgccttactttaaagctattttgccacagtcctgttaaatagtgtggacgtccttttgcagtctggtgtgcatgccatatgatcaggacagcttttccactttactcggtttcctacaagcaagtaggaaatacagtgaatttaccctaaaatgtccaatctgtatttatgtaccttgtcagtgttttgctgttggttttctaaaacaatctgatcaataaatcttatccaaatcaatttggttcaagttcaaaaa

SEQ ID NO: 86919 - DNA, 1332 bp, Homo Sapiens
aaggagattgtgaccctcgtggaagattttcacagagcatccaagaaaccaaagcagtgggtggccgtttgtatgcaggggcaaaaggtgctcttggagaaaactggatctcagcttggagaacaggaactgccagactttcaaccgcagactcctaggagagatctcagggagagctctccagcagagccttcccaggcaggagcttatgaccggctgagcccccatcattgggagaaatccccactcctccaagaaccaacccccaaattggctgggacagaggcccccagaatgagaagtgacaacaaggaaaatccacaacaggaaggggctaaaggagcaaagccatgtgcagtgtcagctggcagatccaaagggaatggtctgcagaatcctgaaccaagaggggcaaatatgagtgaacctcggttgtcacggaggcaggtcagctccccaaatgctcaaaagccatttgctcactaccagagacattgcagggtggaatacatcagcagccccctaaaaagccacccactgagagagctaaagaaaagcaaaggaggtaaacggagtctgagcaaccgtttgcaacatctgggtcaccagccaacccgctcagcaaaagaaccctacaaatgtgatgactgtggaaaagcttcacgtggaattcagagctgaagagacacaagagagtccacacaggagagagaccctacacgtgcggagagtgtggaaactgctttgggcggcagtcaaccctgaagctgcaccagaggatccacactggagagaagccataccagtgtggccagtgtgggaaaagctttcgccagagctcaaaccttcaccagcatcaccgacttcaccatggggactaaaaggagcactccatgctttagattcacacggaaggtgtttgtgtttctcctcccccttacttgcatgtaaatcacaaaaactgtgtgacttacaaggaaagcacgaggcccttgaggaatgatgatgcacattctgctgtgaggaggcccagaaaaggccaaccagggcccaaccgtgcatgatgacagggtgaagagaaggcaggtctgggcactggggcaaagagaacttaagtctctgcagagagcaaggagtaactactgagagagaatcaggacaatcctgcaggtggcccgcttactgttaaatcgtccctctgttgctttatcctctaaaatatgttaagggataaattctatatatatagttatgcatttgctgtcataccagacaattttttatcatgagcacacttctttaataaagatgagtgatctaccagaaaaaaaa

SEQ ID NO: 86920 - DNA, 385 bp, Homo Sapiens
gcacgagggcttcatccatggacttgctttgtacagctgacagagacttctcttcaggagagactgccacatatcgtcgttgtcaccctgaggcagtaacagtgcggacttcaactactcctagaaaaaaggaggcaagatactcagatggaagtatagccttggatatctttggccctaagaaaatggatccaatatatcacactcgagaatcgcccacctcctaagaaatatcaagtgctttggaccgaatccgagagaaacaaaagaaacttcaggttctgagggaacccatgaatgtagaaggttagtaattctgtgcatgtttgagaaagaattgaagtattttaaatatttttttgaaataaagaagggttattaaatt

SEQ ID NO: 86921 - DNA, 939 bp, Homo Sapiens
agaatttctgtgaaataagagtatcttcaacttagtgctcacactcacataccatgagggttctctgcaggggtttaggggtttcctgaatttgaaagttttttcaaggcctctttttgggtaaaacaattgaaaaggcagacaccaacaaagtctgcaaaattaactgtccagattaagaatattaaggagctgtaaaattagcttgtagaaatggacttatccttaagttttaaaaagttaggaaatcctaaaaatgttaggcttcctgcacaagtggctatgttcatttaatggctagtgaacatgggaatgtatttttatcctcctagctggtggttctgtttggtaaaccagactagaatgatgtgagaggggcaaagagaataggcaggaccttccttctatagctttacatatttagaatgttaatacttaatgacattgaagttaccttgcaatgattgataagaggattattaatatcagttaggggaatagggaggataggattttggtgccttcttcagcagacttgctccaagacaaagattctattttgatagtgcaagacaaaaggactcggaagaaaattggccatatgcctacagagcatacaactctgtggaactaaattgtttttactttgtgaaagctgctattttacggaaagattttgattatacagtttgtttttaagttgtcttttatatttatttgtatttggtaagaatcggttgttacacaagctgttctttcccagttacaaaatcctgtgttcggttgtaacctgaactcattaaaagacttgttttcaggtttatcaactgtttattttcactgacatttgagcatgttattttataaatgacgagattccagggtaggaagtgctgtttattccccttttgttttttcttttaaaaaattacgtcagtt

SEQ ID NO: 86922 - DNA, 993 bp, Homo Sapiens
actgacttgtctgacgtctgtgtgcagtcagccgtcggcaggttgatgggtccagagtctgtggtgacagataatttgtaaacaccaggtgtttccatcagaactgacatgcgggtccttcagtgaagcttctagtgcctctgtcagtggaagagacagcaagaccaagttcttccagcgtctgtggccttctcctctaggtttcacctgcatgtcaggtatcatttccaattttcctttgtttcagttctggagcttctgagccaggcctttctcaaccacctctcctgctgctgaaacggggatggcgttttccctctccctgtcctggactggggtcagactgtgccccgaggagaagcagcagagaataggactacgtcatgggcatttcgtccacttatttgggtattttgggggccacagaacaatcctgactatcctagactcctcagagacctcagaggcagctgtgaatgtccctatgttgccgggagttcctgtttgaaatatttgaagcatagaggatgccacaagctgactttcttcatctaccttggtgatcttgaagcaaagaacagaactgatgctcaggccaggctcacctgtagccttacgccgcaagcatacgtgaggcgccagctctgtcgctgaaggagcgcttactcagaggagcggtcggccccctcttggtgttaaggtctcttagttaacctggctttttggtgcaggtgtgatctttgaagctcaggcaggtccctgatgccatcctaaggtgaggacaggaacctcacccaccatcttcttagcgtgtccctgatgactctgtccctctgttagatggtcgttgtgcttctgagtaaaagtacaacccgactccgttctctccccttcctgcagcagagctgggtccttccctggtgggcgagtctctcttgccttagcttctttggtccaagttggggaaaagctcctgctattagtgctgttaca

SEQ ID NO: 86923 - DNA, 996 bp, Homo Sapiens
ggaaccaagcagcagatgatgatgtaaaatgtcttacaagagatttggaccaggcaagcatggaagcagtagtttcacttctagctggtctccctctgcagcctgaagaaggagatggtgtggaattgatggaagccaaatcacagttatttcttaaatacttcacattatttatgaaccttttgaatgactgcagtgaagttgaagatgaaagtgcgcaaacaggtggcaggaaacgtggcatgtctcggaggctggcatcactgaggcactgtacggtccttgcaatgtcaaacttactcaatgccaacgtagacagtggtctcatgcactccataggcttaggttaccacaaggatctccagacaagagctacatttatggaagttctgacaaaaatccttcaacaaggcacagaatttgacacacttgcagaaacagtattggctgatcggtttgagagattggtggaactggtcacaatgatgggtgatcaaggagaactccctataacgatggctctggccaatgtggttccttgttctcagtgggatgaactagctcgagttctggttactctgtttgattctcggcatttactctaccaactgctctggaacatgttttctaaagaagtagaattggcagactccacgcagactctcttccgaggcaacagcttggccagtaaaataatgacattctgtttcaaggtatatggtgctacctatctacaaaaactcctggatcctttattacgaattgtgatcacatcctctgattggcaacatgttagctttgaagtggatcctaccaggttagaaccatcagagagccttgaggaaaaccagcggaacctccttcagatgactgaaaagttcttccatgccatcatcagttcctccgtcagaattccccccgtcaacttcgaaagtgtgtgccactgtttataccaggcaacttgccactccctactgaataaagctacagtaaaag

SEQ ID NO: 86924 - DNA, 515 bp, Homo Sapiens
tctttcttttctttttttaggctcagtgctgtccgggctggtttgcccggtccctgactaacggctttctgccccttctctcgccacccctgcccaaggtcgcccctctgccttcgcccctgtcccgggagggtgggaagctttgaccccgccctgcccactcgcgtctccgcagccgtagccgcgcctgtcccaatatgaatagggtcaacgacccacttatttttataagagatattaagcccggactgaaaaacttaaatgtcgtctttattgtcctggagataggacgcgtgaccaaaaccaaagacggccatgaagtgagatcgtgcaaagtagcagattaaaacgggcagcatcactattttccgtgtggggatgagatccggaggtcttattacagccaggggatattattcggttgaccagagggtatgcatccatgtggaaaggatgtctgacactttatactggaaggggtggtgaacttcacaaaattggggaattttgtatgg

SEQ ID NO: 86925 - DNA, 179 bp, Homo Sapiens
gcctactactactatacggctgcgagaagacgacagaagggcagggcggggtcaaagcttcccaccctcccgggacaggggcgaaggcagaggggcgaccttgggcaggggtggcgagagaaggggcagaaagccgttagtcagggaccgggcaaaccagcccggacagcactgagcct

SEQ ID NO: 86926 - DNA, 1054 bp, Homo Sapiens
ttttaatgccttttcctattttattcaaattcaaaaataacatgttgtggtttaagctgatttcgcagctcactcactcatcagcgacagccagctgtatgaagactgtgagatagagaacttggctagctgcactcaggcatttgcttgaggtgatccaacttatagaataaagtatctagaaaaggaagaaccacttcatctcccaccccccatcaaatgatgcctgtgagactaagtccgaaggggactgatataaaatgcttctgcccagcatggttgtgcagtttgttcactgcacaagggcacttggccaaggggatgagtgggaatgaacatcctgcccctgctccatgctgagccacatacaaagtccccccagtatattgtggggcccttctggacagacatggagagcttctgaaagtcccacatgcatggaattattttcaagaccccaggtatgtggtctgtggtggtgcttctccctgtgattatggactgagatactcatttagtcctaataagaccagagaagtacattgtgagatacgtgggaaacggctgcatcactcactgtcttgtgcatgtgtctccccaggggcattttcagatttctgccacggaggggatgctcttcgcgaagggagagtcaggtacattggaggattcattgctgtggccagggaaagcagaggacatgcaaaattaatatttccctttctatcttctaggatggactttcctcatttggacagccgctttggtttaaagatatgtacaaacctctcagtgccacaagaataaataatcatgcgtggaagctgcacaagaagtcatctaatgaggacaagatcctcaacagggaccctggggacagcgaagccccaacggaggaggaggagagtgaagccctgccataggaggagaacacagcccacctcaggcctcctgcaaaaatacatagaataaacaacaacagttactaaataaatgaaaattgtgattccgatgaagcctgccagagaaataaagcattttttaaaagaggaaa

SEQ ID NO: 86927 - DNA, 379 bp, Homo Sapiens
cccaccatatttctaaaaactcccaaagaaagattctactttgcccagtttgtcctcaattgagcagttttgtctaagcccagagtttctgctgggcaagagtatgaatgacctgtctctccctggctggtgcccatgcctgcctgtagcctgggagggggagtggcgcccagggtcaggtggaacaaaacatgactgcctagggctgcctctgtctccatctcactgatcgcaaatcacagctcagacagccagctcttaagtgagacctgagtgccagagaggggtggatacaaggccaacagttactaaatgaatgaaaattgtgattccgatgaagcctgccagagaaataaagcattttttaaaagatggaaaa

SEQ ID NO: 86928 - DNA, 473 bp, Homo Sapiens
gaagcccagagtgaacagaaagagaagtcgcttgagttcacaaaagaacttccaggatatggctataccaaaaaactcatcttggcgttaattgtgactggaatactaacgattttgattatacttctctgcctcattgagatctgttgtcaccgaaggtcattacaagaagatgaagaaggattctcaagggacagcgaagccccaacggaggaggagagtgaagccctgccataggaggagaacccagcccacctcaggcctcctgcaaaaatacatagcgtaaacaacggccatcaaaaaagcaggactgaagccagcggcccacacatccacagaggcagcgggcagagcaagcacagggccatcgttcctgcccttgtttcccagtctaattagtcacccagacctgaaaacatatgctcagggggtggagattttacaattaaataacattgtttttggaaaaaaaa

SEQ ID NO: 86929 - DNA, 253 bp, Homo Sapiens
ccagcctcatcaacacttggtcttcctggtgtcttaattccctcagacaagtttatgcacttttttaaggaaatatttttcaggacactagtaagaagctcagttcacagtttggatatttcttcccacattacagaattatggaaaggaactcaaaatcagcctaggaaagtgagtcctgcttgacccatgtgactgtgtacctgaccttctgggatcttttcagctattaaaacattttactgttcccaca

SEQ ID NO: 86930 - DNA, 543 bp, Homo Sapiens
gcacgaggagatttcaaattttattaatattttaagcacttttgtgaacttcccaaccttgtttgaagctgttatttgcagtcctattagttttgagccattgcatttaagttccctaggagggggttggttgggggatgtactgaaagagatgaagcaaacccacaccctaagatggtaactgtgtgatttagaaacctgagtttactcctcaaatcgaattattttctttttaaattttggaaagagtaaattgacgtacttgcagtttatgaagctgccccccacccctcagttaattgcagtctaatgtcaagaggcacttctttattaattaccaaatagtctttgtgaccaaggactaacatttttaagttactcagctctatcctcatgggcctatatatttaatacctccaaagatattttcaggataggctttgtatacttttattggttatttagaatccagtggtatgtttgtggtataggaatgtcatggtaaattgtttttcaataaatattttgaaacatgaaaaaaaa

SEQ ID NO: 86931 - DNA, 657 bp, Homo Sapiens
  misc_feature (188)..(188): n is a, c, g, or t
acaagcatgatgtctgtacaagaaaatattcatatgttgtctgaagaaaaacagcggataatgctgttagaacgaacattgcaattgaaagaagaagaaaataaacggttaaatcaaagactgatgtctcagagcatgtcttcagtatcttcaaggcattctgaaaagatagctattagagattttcnaggtgggagatttggtactcatcatcctagacgaacgccatgacaattatgtgttatttactgttagtcctactttatattttctacattcagagtctctacctgccctggatctcaaaccagcttcaggtgcatctagaagaccctgggtacttggaaaagtaatggaaaaagaatactgtcaagccaaaaaggcacaaaacagatttaaagttcctttggggacaaagttttacagagtgaaagccgtatcatggaataagaaagtataacttatggacaaaattaatacattctatgacatttttttctgatttgtcctgcagtgctcattcatcactccaaaaacagcaggccatctttttatgcaaaagtcagcgtgacaatatacttcactggtgtacatcgtttactttttaactggcttcattttaggaataataaattcatcagaatccttggctgaatt

SEQ ID NO: 86932 - DNA, 749 bp, Homo Sapiens
  misc_feature (506)..(514): n is a, c, g, or t
caagaattcggcacgaggccacataaataaggctataataaggaatttggatcttactttaaatatgataagaatcgatgagaagatctaagcaaaggaatgacatgatcagatttggttttagaaacatcactatctccttagtgtgtaaaatctcaccaggctggagatagggaagccagtccaattaggagcctgatgcagtgatccagacaaaaaaataatagtgattctaactagagtccaggtaatagtagtggagatatgtggagagacatgataggtatatacttaatagtcttatcagacgataaattgatattttcctggtgtgtagtcacttaattcaaatacttttttcagtaagttctgggttttctaggaaaaacttcagtatcatcagtgaataatgatagtgtttcttctgatagttttatttcacttttattgcatgttttgttatctgaaatgtttaggacaatgttaacaataatgatgttagacannnnnnnnncttattttaatgggaatgtccatagttttaagtttgctgttgggagttagatagtctttatctgaaagacagtgtctctcttttagtttttaaagagtttgaattagaaatggctctggaactttaaacagtataccatttgggcatctattaaagcattcatataattgttctcatttgatgttttgatgaggtatattaatagattttcccacattaaatcatcaaagcaaaa

SEQ ID NO: 86933 - DNA, 623 bp, Homo Sapiens
  misc_feature (112)..(112): n is a, c, g, or t
  misc_feature (144)..(178): n is a, c, g, or t
tctcagtttgtcatctcacctcctgctgtaaggagcagacaaaaaaacacatccaataagaacaagcttgaagatgaactgaaagatgatgcacaatcagtagaaactctgngaaagccaaaagcgaaacgaatcaggacgtcnnnnnnnnnnnnnnnnnnnnnnnnnnnnnnnnnnntgcttggtcacctcctcccatagaaattcggctgatttcccccttggctagcccagctgacggagtcaagagcaaaccaagaaaaactacagaagtgacaggaacaggtcttggaaggaacagaaagaaactgtcttcctatccaaagcaaattttacgcagaaaaatgctgtaatttcttgggaagattttaatgtacacctatttgtaaagtcatcagaatagtgtggattattaaatatctagtttgggagaaaataatttatataaattattgtaaatttttatgtaaacagaaggtcttcaataagtaaagtaactccatatggagtgattgtttcagtccaggcaatttttctattttatattaagacttcatacatttatatatgtaaatatggcttattaatggaatgttaaataaaatgtatacttcacagtcaaa

SEQ ID NO: 86934 - DNA, 450 bp, Homo Sapiens
gcaagactagatttgagtaatcgcacactattctgatgactttacaaataggtgtacattaaaatcttcccaagaaattacagcatcttgctgcgtaaaattggcttcggataggaagacagtttctttctgtgccttccaagacctgtgcctgtcacttctgtagtttttcttggtttgctctggactccgtcagatgggctagccaagggggaaatcagccgaatttctatgggaggaggcgaccaagcactttcttatatctgtgctacttgcttgcttgtctagttatggacgtcctgattcgtttcgctttaggctttcccagagttcctactgatagtgcatcatctttattatgctattcctaggaacttctgacgctggagaaaataaaggctcatagtttggtgcagaaaggtccggcaacaagatggccttgctagaacg

SEQ ID NO: 86935 - DNA, 533 bp, Homo Sapiens
atctgttatacaactgattttacatatctgtttggattatagctaggatttggagaataagtgtgtacagatcacaaaacatgtatatacattatttagaaaagatctcaagtctttaattagaatgtctcacttattttgtaaacattttgtgggtacatagtacatgtatatatttacggggtatgtgagatgttttgacacaggcatgcaatgtgaaatacgtgtatcatggagaatgaggtatccatcccctcaagcatttttcctttgaattacagataatccaattacattctttagatcatttaaaaatatacaagtaagttattattgattatagtcactctattgtgctatcagatagtagatcattctttttatcttatttgtttttgtacccattaaccatccccacctccccctgcaaccgtcagtacccttaccagccactggtaaccattcttctactctgtatgcccatgaggtcaattgattttatttttagatcccataaataaatgagaacatgc

SEQ ID NO: 86936 - DNA, 343 bp, Homo Sapiens
aatgttaagcaggttacccccagtggggcttctactagacatctctccatttggtctcttcttacactccaacccagcaggaacagttaataattggatgtttataaaatgggggtaaaagggtttactgtgatggatcctggctatccctctaggaggagacctttgcttcagcaatggtgtcttcatcctcgcagcctgaagctgcttcatttccttaggtctgttgtgttttctgtaaagtgttaggaattctggatatttttgtaaaagaatcaagatttgtataaaatgttgtttacagatcttttaatgaataaatacataaaccccccacagaaaa

SEQ ID NO: 86937 - DNA, 592 bp, Homo Sapiens
  misc_feature (24)..(24): n is a, c, g, or t
ttctcaggtccattcttaaccttntaagatgtaaaccttgaagactcaccaagcaaagaggtaccctaaaattgaagtcaggataaggaggacgactcagcttagagtcattgattgatctgcattgtgaaaattaggaaaccagatgctcccatgttctcaaggacagcctttcttaaggaagtcagtacgtgggcaacagtgatgagaggaagagaggagagactcaaccaactagagcagggataaggtttcccttgttcagcttttcagtgtctgctggaatgtgatgattacctcattgtcaggtaggaagtgaaacgtatgatattcttcctggcctttgccttgagagtcttctggagcctgaagagggtggggcagacaaccatggactgctagagaataaactttctttgaagcttcctaaatggattagaaagaaggggttctgtcaaagggaaagggtctatacagatgtgaccagcagtttgattagtttagatgtatgatttagtagccaatataagaaacttgtaatttttagtaattagaatttattataaataataaacccagggtattaattttt

SEQ ID NO: 86938 - DNA, 346 bp, Homo Sapiens
ctccggaagtatatttagatacttgaaagcagtccttttctaaaatggccttacctatgtggcctgaacgattaaaagaaagaactcagagttacaagggaaaaagaaaaagagttacaagggaattgtagtctttttctgaatagaatattagtactgtggtattgcatttcatgggaatggaaatgtattggtaaagctacctgatggaagctttctcttggtaacaaaaatggagggtgtattatgtgcagttatttaaatatatgtattccattgttgcgtggtttttttcccccctcaagacagagatttgctcttgttgcccagggtggagtacaatggt

SEQ ID NO: 86939 - DNA, 172 bp, Homo Sapiens
gctgtgttacctctgaagggaattgaggtagaggggagagttagaaggaatattcggcttttctattttatatcctcctaggtgaaatttttacaacaaacatgtactggtgtattttgaaatgtttttaaatttttgtatttcaaaataataaaatataaattcaaactgc

SEQ ID NO: 86940 - DNA, 450 bp, Homo Sapiens
tgtgcagctgcatgaggcctcagcaggagagagattttaggtccaagaagctataccagtaggacaaggcaggaaaatactacactttcaggatcaagcccctctgactctcatttggaaactggatgtttgctaagcacctgcttcttaaggatgccgagggatttaatgatactcccagaaacctggagagattaatggggcctatggagaagtgctctgaactcagtgttgggacttgaataaaattaaccattgtcatgttttcagaacaactaagctgttttatatttcatgtgcatgaaagccctagaactaagttgtgttatttccagaaatgaaatagatcccacagttagatgatgtggccattaggaagtaccaaatttataaaaatcactggaggtctgtctgagcagtacctaataaaatatagtatactgaaagtga

SEQ ID NO: 86941 - DNA, 563 bp, Homo Sapiens
atcacatgaaaatcagcgactcttccttcttacaaaactcggagcttctcaggataacttggtgaaacgtcccccgctgtgaacctcagtgagcccacctgtaatatacaggtgagggagaagaccagaaaagctcagtcagagtgacactgacccctgaaatgatgggcacaatggagtgtgtggcttttcctgtaggacagggaggtatttagttgtaatttgaactttaaaggattccagtcctccgaaaaacaggattagactcaaatcaccttgaaccttatcatctcacggctttgacccacctacatggctccgtgtcccctgcaggcctcgccccggagctctacaatcctgtgtgcagttgtctccgcagctctctgctgggacatcaaacaggcatctccaccttcatgtgtctataagtgacttcctaaacccccaaacacattcccttacagtcctacacctctcagatgagggtgacagtgtacttctgggtgcttagctgaggttgacaccatgtattttaaatatggaaaataaattacattatttgt

SEQ ID NO: 86942 - DNA, 496 bp, Homo Sapiens
agtgtgtggcttttcctgtaggagagggtgatgctcaggtgtgatttgaattttaaatggattcctgtcctccaaaaatgtaaaaaaacccacaaataccggaatggaaaaacgggattagactcaaatcatcttgaacttattcttgtctctgtccacacccactgcttttccttatctcatctcacagctttaacccacctacccatgtcccctgcaggcctctccactgagctctacaatcctgtgtgcagttgtctcctcagctctttgctgggacatcaaacaggcatttccaccttcacgtgtccataagtgacttcctaaacccccaaacacattcccttgcagtcctacacgtttcagatgagggtgactgtggacttttggggacttagccaaacttgacagcatgtatttgaaatatgggagataaattcctttatttgtaaatgttgtaatttataatataaaaagaaagttacacgtatacatg

SEQ ID NO: 86943 - DNA, 771 bp, Homo Sapiens
  misc_feature (353)..(389): n is a, c, g, or t
  misc_feature (589)..(608): n is a, c, g, or t
gcacgaggtggagccaccgcgcctggcctaatactgctttattacaacgttatctgtgggtcggatccttttatattggttaacagatgaccctgactcagaataatctttttcaatggctttttgagggaagcttgtgaagttctggtgaatcttctttttcacttcactttcagtgagctgaaagtaaccaaactaaatacatgtattgtgtaaagggacaggacaagacagccttaaaaaattgaatatagttggtgagacaactcagaagtacaggtttgagcatcccttattcaaaatgcttgagaagtgttttgggttctggaatatttgcattaatgcttgccagnnnnnnnnnnnnnnnnnnnnnnnnnnnnnnnnnnnnntgagcctttcccctgagtgtcacgtctgtattggcactcaaaaagtttcatattttggagcatttcagatttcagatttgggatgcttcatctatattgacagctgcaagaacagaaaggaagaagagattatttttgtgggagaacagtttctcccatagtgtttcctgtggaatgctagtgtctcataaagtcttctnnnnnnnnnnnnnnnnnnnntcaaatgtttggaagccattttgtgttactgtgtgactttcttttactcaaaaacagcaccataaaatttctgacaagtactataggtaaagaaatccctttatacttaacctagtattttctacctttccccatctaaaataaaatttttataccactttct

SEQ ID NO: 86944 - DNA, 341 bp, Homo Sapiens
ttacagcagcagcggaccccagaccctgtcctgagtgggcagtccacgtttgccgtgccacccatgcagaacttcatggcagggacagcaggggtgtaccagacccaaggactggtgggcagtagcaatggttccagtcacaaaaagagcgggaacctatcttgttacaactgcggggccactggtcaccgcgcccaggactgcaaacagccgtccatggacttcaacccggcacaggtaagagagcgccatggccgcgcccaccagactcccgcaggaccagtgcacacaaatgcttggtttttatgaagagtaaacttctttctttgtaaagcaaaaaa

SEQ ID NO: 86945 - DNA, 156 bp, Homo Sapiens
cttgctgctgaacagaagtaggtgaatggataggaaaaggtaactagaagttgtacgaagtagaaggctgtcttctaatgtgttttcttatcctagtttgctatccttattatttgtttgagaaaactcaaaaatggatattggctactccctttt

SEQ ID NO: 86946 - DNA, 738 bp, Homo Sapiens
acttgaaaactgaagcacatcccagagctctcctgacgccttagcttcatctcagggtgtttgggatcaggcataagggtgtgtctaaggctgtttaaatgcaagggccctgtgccactgagacctggagagctggtcttccagtcgcgatgtgcattctggaaaaggtgaccccagctgtacttctaagatgtcactgggttgggacaaagccagtgtggtatctggtgggtgtaccccattctgagcctttgagacagcactggccttactccctggggagaagcaggccatctggaacattctgccttctggccaccctaagcccactcttggggtctggtggctcccatgaagtgtatgctagggccttgcccagactttgagccatgaggctattgtgcaagttagagctgagcagagtgcagggaggaaggcccccatctccaaattgttcttcaagctgaggcggaagttacctgtcatggcagcttctcacggggagctgacccacgggcaaagctcccagagccacggcacggatcagggttgtccaacacaaaggcatcaggctcctgacaaaggcagcccagaccagaggtccccacaagaggaagtttggggagaggaaatgggggtgtgctggggacactgagccaggcgccctgtgatggcccctcaaccttgcagagcagctgagacgtacacaactctgacacctatggacactctcacagt

SEQ ID NO: 86947 - DNA, 1133 bp, Homo Sapiens; identical to SEQ ID NO: 14920
  misc_feature (102)..(158): n is a, c, g, or t
  misc_feature (370)..(416): n is a, c, g, or t
  misc_feature (657)..(657): n is a, c, g, or t

SEQ ID NO: 86948 - DNA, 1520 bp, Homo Sapiens
taggtagcgaggcctgggtggcgatttcggcacgagggcagtttgggctgtctctgtggctggttctgcggcgtgcggccagccatggagcgctctgggcccagcgaagtgacaggctcagacgcatcgggaccggacccgcagcttgcggtcaccatgggcttcacggggttcggtaaaaaagctcgcacatttgacttggaagcaatgtttgaacaaactcgaagaacagctgtggaaagaagttgcaaaacactggttcaacccaatggaaatggattgaaagagtgaaagtcactggtctcaaagaatctacggaatttagcattttgaaaatcacatagcaattttgggtaggtattcacctgcactaaaaaaccaggcaaacatccgactcccaggataaagtgactgagagcagtagaagacttgttgagccttaaggaataagaggaaaattacgttatgaagtgcaggaacagcacagacccagacgaggggacgcagcccggagccagtaacccggcgccacctcctccccagggcgcagcgctggctgatccccagataccgtgatcacacgtcccgggtcctgagagcgccacataggtagacagttctttgggacttctgggatgcagcacttgaagagaggtttacctaaactttcctcctgggagcctgtcatcatttgaaagtaacagaagaaagctgtcaggctgaggaaagtttcaacaggcacttggtgagaatgggaagcatccattcattgggaaatcacggggacagaggaggaattcacgggatcagagcactgagaaactccagaggcttctggttcaccgccctgattccacagatgtgggtcagaggcagagatggaagttggaatggacaagcctgccctctcctcagctctccatggctctgtcctcaggctgtttctgcaatttgacatgaggcctggccccagggaaaccagtggggcctcatctcctccctgtgctgctctgaggtggagccttctcagggtcagtccagctctggagcccctctccagctcggtcaccaaagctgtctggtcccagggcggtgtggagtgacaggcacgccagccaatccaatcggccatttcatacccaatgcatgtgactgataaagagataacaccctgtctccaagacacaggctttacataaacagctttaatgacttcttcacttagggacaagactccttagtggtggaacctcaggcatccatgcaggatgtaagaaacctcccgtatatacatgaactgagaagtgtgtagaagagtaaatactgtaataggtaataaaatgtatgtatttttatttatgcgctactttggcctttctccctctctggggatatacccatacataccaaaatggatttccttctatgggaaacctggaaagatgtaatattcctttacatatgaaaatttaaattaaatgaattttttttccggatcctattgaaccccccaaattata

SEQ ID NO: 86949 - DNA, 874 bp, Homo Sapiens
gggaccagccagcgctgcgtcctggggaggaggaggcgcccgggttactggctccgggctgcatccccttgtctgggtctgtgctgttcctgcacttcagtacatgattttcctcttattccttaaggctcaacagtcttctactgctctcagtcactttatcctgggagtcagatgtttgcctggttttttagtgcatgtgaatacctacccaaaattgctctgtgattttcaaaatgctaaattccgtagattctttgagaccagtgactttcactctttcaatccatttccattgggttgaaaggatattgagggggacatgcagcctggaagagccggaagctgacctgccttgccgctctgcttgccgctctgccgctctgccttgatggactcctatggacacaagcaatgccacacagcaccaacactggacagggacacactgtgatggtgggggcgggggcaaggcaaatcaatacccctcatgtaatctggtcttgtataagccaaaccctccaagtctttcccaaggccctctcactgctgctgctgagctgctgctgggtcccagtggtgcacagccttccttgttgtgatagagccagtcgatggcctcaactttgctgggctacaggtgtgttcctggtggcccagtgttttgtgacttctttccacagctgttctttgagtttgttcaaacattgcttccaagtcaaatgtgtgagcttttttaccgaaccccgaaccccgtgaagcccatggtgaccacaagctgcgggtccggtcccgatgcgtctgagcctgtcacttcgctgggcccagagcgctccatggctggccgcacaccgcagaaccagccacagcgaca

SEQ ID NO: 86950 - DNA, 949 bp, Homo Sapiens
cctgtgcctggcatgtgataagccctaagtacttgttgactgaattaacatatgagatctgtgagtctgaaaaaagaagtacatcattccttcacatgtcattttgagccactgttaacagattacataactgttattggaagtgcctcactactccatttggaaagtattcctggaatacacgatgaatgactcagtagaagttctggctatgggggagtgccatcaataaataaaaataataccattgtctgttggttataagttgctgtcacagactatgaaggtatttgaattgtattttcaggaagagaaacagatatgcaaccaatctgatttggttccacaccctgccacagaagtcccaaaggagaagcaaatgccacttgtagactcaaactctggacttcattctcagcaccatctcttaacctactgagtaaatcctatgaacctgactagggtggcaactgaagttgtagtactttctgtcttcaaaggagggtgaacctggagtatgttggaagaagtgttaggttcattagagacacctctttcataactgctgtcacctagaatgtctattctctaagcaccttcttgaaagaagcacattcccccaggaggaggaaatggtttgttttctttagtgacagttggcccaggatcctaaggtaaaggagtatgggcactagacaaaatgagttttataatagtcgattggaaggaatggaagtttttgaatcacaggcttctgccttgaaagggcaagtccgtggtggtcatgaaccacccagagtgtgtacaaggctcctgccagaagaaatgcctgtaggattaaaagcaaaacagcagaatcaaaaaggaagggcacgatgatgcccaggtgcagcctatattattaacagacaaggaaagaatccaaataaaagttctgaaaccaaaaaaa

SEQ ID NO: 86951 - DNA, 694 bp, Homo Sapiens
  misc_feature (432)..(440): n is a, c, g, or t
aatacaataaacagctgtaggcctaaaaattagataacctcgaaccaagggacaaattccttgaaacctcaaatgtccattgcagcattatccacaaaagccagccacagagctggaaacaatccaagtgtccatcaactgaggaatgcataaacataaatggcatatatttgcaatagagtagtatgtatttgcaatattcagtcatacaaaggaatgaaattcttttcctacaacatggaccttggaaatattatgcctagtggataagctaggcacagaaggttaaatatttcataatttcacttaactgagctacctagaatagataaatttacagacacaacataaaatcgaggttaccagggcctggggagaggttgggaaagtgagttattgattaatgggcacagaattttattgggaatgatnnnnnnnnngttttgagtatagatagtggtcatggttgcaaaacattgtaaacgtatttaatgtctctgaattgaacatttatgagtggttaaaatgataaatattaggtatattttatcacaatagaaataaacaaaccaaaagcaagccaggcaagtacttgaaaaaatatgagtaaactctgttataacaaaggagaagtttgttttaacggttatttaaagacctggaagtgattattaaaaagattgacacattttac

SEQ ID NO: 86952 - DNA, 1061 bp, Homo Sapiens
  misc_feature (973)..(1002): n is a, c, g, or t
tggcggcagtgagcggcgggactgtgtgagcgtggcgcggagccgaccgagcctgagccgagccgagccgagccggagcgtacggcgaattgccggtcgcggtgatgcagcaaccatgtcggatgtcgggaagctgttcggggctggagggggtaaggccggcaagggcggcccgacccccaggaggccatccagcggctgcgggacacggaagagatgtaaagcaagaaacaggagttcctggagaagaaaatcgagcaggagctgacggccgccaagaagcacggcaccaaaaacaagcgcgcggccctccaggcactgaagcgtaagaagaggtatgagaagcagctggcgcagatcgacggcacattatcaaccatcgagttccagcgggaggccctggagaatgccaacaccaacaccgaggtgctcaagaacatgggctatgccgccaaggccatgaaggcggcccatgacaacatggacatcgataaagttgatgagttaatgcaggacattgctgaccagcaagaacttgcagaggagatttcaacagcaatttcgaaacctgtagggtttggagaagagtttgacgaggatgagctcatggcggaattagaagaactagaacaggaggaactagacaagaatttgctggaaatcagtggacccgaaacagtccctctaccaaatgttccctctatagccctaccatcaaaacccgccaagaagaaagaagaggaggacgacgacatgaaggaattggagaactgggctggatccatgtaatggggtccagcgctggctgggcccagacagactgtggtggcctgcgcagcgagcaggcgtgtgcgtgtgtggggcaggcaggatgtggtgcaggcaggttccatcgctttcgactctcactccaaagcagtagggccgcgttgctgctcactctctgcatagcatggtctgcacctgggagatnnnnnnnnnnnnnnnnnnnnnnnnnnnnnnaagtgcctgctgtttataatgttgaatttctgtaaaataaactgtatttgcaaatccaa

SEQ ID NO: 86953 - DNA, 905 bp, Homo Sapiens
caccttaaccttcccaccctttttaaccctctttatttttacggcaacctaattcttaaccgtatttaaaaatatcctctaaaagaatctttgtccatattcctactgtatctgtaccaaccatctgaacttttaaaaatcctagctttttattcgaaatgaattggacatgtcagtcacttttgtccccacgattctttcagagacatactaaaaattataatgctttaaggtattacttcatttttagtcagtactacactgataatcgaaagctcaaaagatgtgactcttgcataaaactgactaatccttttccccaaattaccttaaatttcatggcaccacagaatcacctagaatgagtgttgtcttacaacttgcctcgtattaaataaactgaggtgtgaaaagcaggcctccctcataaagaggcaggcaaattttgatacaaatgcacgagccaagtgctgtaagcatcaaaatttcagttcttttacactaggcacacacacacaaaacctactttgaaacaatttacttacttaacagcagtaagaaaactaagcaatattatggtcaacaacgctccttaaactttagaataactacataagaatattcctttttccttaaaattatttttgccatcaacgacctgctcaaattttaaggtgagtttttgtgttttctatgttccaaatcttcataggaaccagaaaaaaagcagtgaaggctccatgtttcagtcaaaaactcaatttcccagctggcatcattccccaagacagtggggttaacaaaagaactaatccacactgcatcaaaaataattatcattggcctagacatccgcccggccgtaatggccgaattcccgggcatatgtccggtaccgtcgactg

SEQ ID NO: 86954 - DNA, 1060 bp, Homo Sapiens
  misc_feature (122)..(122): n is a, c, g, or t
aggagaacgaatagacctgccactggcagggctggagaaagtgaaaggctccttgtccttttctttactgtcatgcttatgcttgtgtttgtgcttatgtttatgcttcttcttctttttcntgtgctcatggtgatggtggtgatggtggtcactgtgtttggaggctgtagattccttagtaaagactgagagtggagcgcttgccgctggatgcatactcatctccaaaggtgcttgttctttacctgttcccttccgtgcaagttccaaactccactggggttttgtggtgggtgtgctgtcacagcctgctgagtgctggggtattaaagcagatcgggagctagctgcccgatatttcgagagccctggagttgacgccctttcaagcatgtttaaatgatgggaaatgaagggcctggctatcatgaacagtatccatatcaatctcctcctcatcctgagaactggaaaaagggttctgaaatccaactagctgtgggtgactgcttggattatttgcagcttcttggttgcctgctactgactctggaattatggtaggattcaagacagcttttttctcctttagattaagaaccaacccaagctctggcaagggtaaacaggaaggtctactgaggccaaaaagtgtgaagtacaagtccacagcaccacaccgtaacctccagtcatgtgaagtaccagaattcataagtttccaaagttgatctaccagggcttcattgcataagggagactccatgttcttagtaaatggtgggttcttagtcaacatgttgagaatcttatgccttacatagggtacagggtcattctgaatcatattaagtagccattgcagttcttcataacttctgtccactttagtataatcaacaactgcttccaaagctgctatcctaatgtccacaaagtggccatattcagcataagatttaaaaagagctggatcacttggcacatgtccgttcttctgaagtacccgtatggctctcaaacaactgactaacatggtgaaaccccgtctctactg

SEQ ID NO: 86955 - DNA, 418 bp, Homo Sapiens
tcataattgtgatgcatttcctgctaaatttacaatgaaggtgatacataaattatatagatcacaagttttcttttatactatttaaaacccaattatattgataaatatgtccagaggacaacatgggttcttaatggatggctgagtccaaatatgcaaaatatagcttctggttttgaccatggtgctttaaaattctcaaacatgcattaatatattctagttttagggaaaatcttacacatggccttatcttgcaatttaggggaaagcccaagatgaatttcacatacagtattcctttcttctaaattaatctcaaactggactagaaaacaagagacagacgcttttgggttagtactccccaggaatgaagaaaatacacaatcaacaatgaagcaaacaaacaaac

SEQ ID NO: 86956 - DNA, 702 bp, Homo Sapiens
gaagagattcatttaaagaggacaagtgattattttacatctcaggagacagttccttaaggtgatgagcacaaaaggatccatcttatacagtgcttgccagcttccataatattactcaccacgatgttgaaatcacctgttccagaaccagtcctgtcctttgacaagaaggatttaattatcagtagtggtggggactggctggagagaggaaaaacacttcaaggactctgccacctttcgtagatggagagtgcaaagtttgtaccatggaactccttctctaacagttactctgtggcagtgcctatttcaaacctcccttaacttctgattgtatagatgtttgtttcatttgttcatctgtttgttcacttagtcagagatgttttaagccttaagagaaatagtggactagaaaatgccttggaaaagtacaaagttcaatccaagtaaactgtttttaaactaggaatttatgaagcctaaaatataaaatgtatatacatggatatgctctgaagtgaggtagaggggtagaaatcaacattgtgatattgtactatagttttgcaagatgttaccattgggggaaaatgtttgaagggtatacgggatatctctgccttatttcttacaactgcatgtgaatctacagttatctcaaaataaaaatttaattaacaattgattacaaaa

SEQ ID NO: 86957 - DNA, 1626 bp, Homo Sapiens
  misc_feature (1613)..(1613): n is a, c, g, or t
cagtcgacggtaccggacatatgcccgggaattcggccattacggccggggaggggcagcgcggcgcggggccaccgacgggacgcggctccgggaacatggctcgcttcgctctgactgttgtccggcatggagaaacaagatttaacaaggagaaaataatccaaggacaaggagtagatgaacctctttcagaaacgtggatttaaacaagcagcagctgctggtatatttctgaataatgtgaagtttactcatgctttctccagtgatctcatgaggacaaagcagaccatgcatggaattttggagagaagcaaatttggcaaagatatgacggtaaagtatgactcaagacttcgggaaaggaaatacggggttgtagaaggcaaagcgctaagtgagctgagggccatggccaaagcagccagggaagagtgccctgtgtttacaccgcccggaggagagacgctggaccaggtgaaaatgcgtggaatagacttttctggaatttcttgggtcaactaatcctgaaagaagcggatcaaaaagaacagttttcccaaggatctccaagcaactgtctggaaacttctttggcagagatatttcctttaggaaaaaatcacagctctaaagttaattcagacagcggtattccaggattagcagccagtgtcttagttgtgagtcacggtgcttacatgagaagtctgtctgattattcttctgactgaccttaagtgttccttaccagccactctgagcagatctgaacttatgtcagtcactcccaatacagggatgagtctctttatcataaacctttgaggaaggaaggagaagttaaaccaacggttcagcgtattggtatgaacctacaggatcatctaaatggactgactgaaactcgctaaggttaaatctgcatcaaaatctaaccattttgagcctctgaagggagtgccattggctttatttacttctctcctctgctagttctgatttggaaacagttaaaagccaatttttagctccagtggaaccatagccacataaaactttaatggacaaccatatagaattaacttattttgtccaagtacagttggcattttccagaataattttaccaccctgctagatgtcatctctggattgcacatggatgatgaaggaactcagcattgaaagttgggggattagtaaccttgttacaacggtttctttttcattttagcctattttaatggctattggtaagatactgtatgtttttagtatctcatccagtgcttagaagaaagaatggtttataattcccagtacatgtttatattgactgtgttatatttttaaatcctttaaataaaaaatccttataagtttatgtaaagcaaaataacactaacatgttttacgtataaatcaactattggaattttttattctagagggcttgaaatgtggatgaatacagattatgattgcagaatggtctgggggaagaagttaaaacatttgatttaaatacagtaaagaaagaatcttggagcagaagatcaaagaacagccttttataaataatgccttgccaaagtcaagtcattagncccaggaaagcca

SEQ ID NO: 86958 - DNA, 881 bp, Homo Sapiens
agattgcacaggaggaggcggaagcggaaccttgctcctccgcctcgttctcgcttccacccgggcccagttggggacggacgcactagaggcgacctaaacatggagacagcgggcgctgcaactgggcagccggcctctgggctggaggctccggggtccacgaatgaccggcttttcctggttaaaggtggaattttccttggtaccgttgctgcagcgggaatgctagctggatttattacaacattatcattggctaaaaagaaaagccctgaatggttcaataagggaagtatggccacggctgcattaccggaaagcgggtcttcccttgccttgcgagctctgggctggggctccctgtatgcatggtgtggggttggtgtgattagcttcgcagtctggaaagctttaggagttcacagtatgaacgactttcgaagtaaaatgcaatcaatatttccaacaattcccaagaactccgaatcggctgttgagtgggaggaaacattgaaatccaaatgagatgagcatggatgaatttcaaaatgcttgttacagaaaggggtggctctggagacaccatgacagcaaaaggactgggactgatttctcccaggaacatgggcagattgctgactgaaccagtgcactggatagcattcagcctcatcacaggagagtatgtgtgtgcgtgctgggggagggtaaagttttcccacagttaagaagactatttaaaaaatagtaattacaggaataacttccttatgtggaggggaccccataggaaatgattctgtttgtaacagttgaagcaaatttcatactaaaaaagtttataataaaagtatgataagaaaatatttataaaacag

SEQ ID NO: 86959 - DNA, 402 bp, Homo Sapiens
  misc_feature (359)..(359): n is a, c, g, or t
gcacgaggcacaaatcttcaaaatgaaaatagttttaataagatatataaaataggctgggcatgatggctcatgcctgtaatctcaactcttattgtttactctgtcagaatgtgaacatgaaggtatttttagaaatagtctttatttcacaatctattcactgaaacttgtgggtatttgaatttttaaaaaaatcaaggataagctgtttggagaaaggtattataaagtctgaacaaagcaaaagtagtagtttaacaagaatgcatgtagaaaattcttagactgtacatgcttatcacattttacttactttgttaaaccattggaagtttttgttacttatgctagtaacnaatgtgtgtgtttctattgaattaaatttaatttatttaaatt

SEQ ID NO: 86960 - DNA, 611 bp, Homo Sapiens
  misc_feature (424)..(455): n is a, c, g, or t
  misc_feature (565)..(565): n is a, c, g, or t
aacttcctgccagtgcctccccgtaccccaaaacaatgtcaccatggttaccacctacccagaagactgttccctcctcccaagacccttgtctgcagtggtgctcctgcaggctgcccgttaagatggtggcggcacacgctccctcccgcagcaccacgccagctggtgcggcccccactctctgtcttccttcaacttcagacaaaggatttctcaacctttggtcagttaacttgaaaactcttgattttcagtgcaaatgacttttaaaagacactatattggagtctctttctcagacttcctcagcgcaggatgtaaatagcactaacgatcgactggaacaaagtgaccgctgtgtaaaactactgccttgccactcactgttgtatacatttcttatttacgattttcatttgtnnnnnnnnnnnnnnnnnnnnnnnnnnnnnnnngcaacattttatatttttcatggatatgtttttatcatttcaaaaaatgtgtatttcacatttcttggactttttttagctgttattcagtgatgcattttgtatactcnacgtggtatttagtaataaaaatctatctatgtattacgtcacatt

SEQ ID NO: 86961 - DNA, 344 bp, Homo Sapiens
gcacgaggcttcatgagggttgcgacggtcagaccagaaaaacagcagtctatcaaatgtgggttcaatgtcagcaaactgggctttgtcttctagagcctttgatccagcaataccccacttcacctacaatattgttaactatttgttaacttgtgaatacgaataaatgggataaagaaaaatatctaacaggtgaaaaaggtgtgagggttgaactcaataaaccttcagattcggtcggtaaagacgtcttctagagcctttgatccagcaataccccacttcacctacaatattgttaactatttgttaacttgtgaatacgaataaatgggataaag

SEQ ID NO: 86962 - DNA, 132 bp, Homo Sapiens
aatttgtagagacagcctgactaacatggtgaaaccctgtctctactaaaaatacaaaaattagtcgggcatgatggtgggtacctgtaaacccagcaactcaggaggctgaggtggaagaatcacttgaac

SEQ ID NO: 86963 - DNA, 492 bp, Homo Sapiens
acgatttaaagaaaattatattcaagtggcaaatttggaggcaacaggctacttcggagtccatgatatgagatggcgttttaaatacatgttttatcttcaaggttttcagctcttttctctggaccatctggatataagttgatagctgtcacaggtatgacgtccactttatccaactgaagaattcctttgtattcagaaactgggaaaaacacctttaagatggttattaccacagctgctcctgtaattccaaccaccatgatgttcaaaaactgaaagaatactgggaaaacgttgctccagaacctacacagatcttttctaaacttttccatccactgacacattaccttatatgaagatggcggctctgctctgagaggagtttcaggtaacttgccaggtaaaacatcttcatctacagtggtttccacattcctgataagatactggctagtggtttgcagtgaactaacaccctcgtgc

SEQ ID NO: 86964 - DNA, 581 bp, Homo Sapiens
ttgatacggatcctttgcaagacacgttgtctagtaccaaggaatctgaagaaggtcagttgaagtctgctttggaagctggccaggtctcatctgcactgacttgccactcctttggggatggatccggggctgcaggcttggagttgaactgcccatcaatgggagaaaacacgatgaaaacagaaccgacttctccccttgtggaattacaagagatctcgactgtggaagtaacaaatacttttaagaaaacagatgattttgggtcatctaatgcaccagctgtcgacctagaccataagtttagatgcaaagttgtggactgtttaaaatttttccgcaaagccaaactgttgcactatcacatgaagtatttccatggaatggagaagtcactggagccagaagagagcccgggaaagaggcatgtccaaaccaggggcccttcagcttcagacaagcccagccaggagaccctgaccaggaagcgggtctctgccagttccccaaatacaaaagacaaggaaaagaataaagagaagaaattcaaggagtttgtgagagtgaagccaaagaag

SEQ ID NO: 86965 - DNA, 441 bp, Homo Sapiens
cgagggttgcccatcagtttataaaggatgttaatccagatgaacccaaagaggagaataattcttcaaaggaaaccagtaaaattcaacataaacccaaagctgtacttccccagaggagcacctctgaggtagaaatcacaacgatgaaaagagcccaacgtacaaaaccaagaaagagtcttttgtgtgaagggtcattcgatgaagaagcttttgcacagtcctttcaggaagtgttaagtcaatggagaaccggaaatcatgatgacaacaagaaacagaatttacatgcaccagtaaaagactcattggaagaatgcgaagtacagactaatctgaaaatttggagagaaccacttaatattgaacttaaagaagacattctatcctatatggaaaaattatggcttaaaaaacacaggagaactccccaagggc

SEQ ID NO: 86966 - DNA, 617 bp, Homo Sapiens
gaacgaggagaatattaaccctgagaaggatgccagttttaaaatatgcatgaagatgtgcttactgcagataactggttataaacagctgtatctggatgtagaaagtgtgaggaaaaggccatatgattctgataacctacagcatgaagagctactcatgaagctttggaatcttctaatgcccacgaagaagttaaacgctagaatctccaagcagtgggctgaaattggttttcagggtgatgatcccaagacagacttcagaggcatgggcatacttgggttaatcaatcttgtgtatttcagtgaaaattacactagtgaagctcatcagattctttcccgttcaaatcatccaaaattagggtattcttatgcaatagttggaatcaatcttacagagatggcttatagcttactgaagagtgaagctttgaagtttcatctctataaccttgttcctggtataccaacaatggaacactttcatcagttttactgttatcttgtctatgaatttgacaagttttggtttgaagaagaaccagaaagcattatgtatttcaatttgtatagagagaagtttcatgaaaagattaaaggacttttactgg

SEQ ID NO: 86967 - DNA, 643 bp, Homo Sapiens
  misc_feature (386)..(399): n is a, c, g, or t
  misc_feature (525)..(562): n is a, c, g, or t
cttgaaggctttggagttaggcccacatggcaaattttagcgttttgtctttgttccattcggctgttagcaaacttgcaaatccctagacctgagtgattaatgtgatggggtgggaaggagtgtaactgatagtaaagacacaggtggccttgtaaactcatatgattagcaactatgttaaggtttgctgtgttttgtttgttgttgttttatttaaagacactgtgacgaattcaaccacagaatttttaacatcaaaactgaataggatttgatacatgagtgttgtagtcagacaaaatctccaatccagaccctccatcatgctgtgtgactttgggcaggttacataactgctgtgagcctcagttgctctactcttnnnnnnnnnnnnnngtattgagattgaatgaatggataaaagctaccatatactgtaatatcctaatgtatataaaacatgtggcacataggaagtgctcagtaaatgtctattctccttgccttctattaggataccannnnnnnnnnnnnnnnnnnnnnnnnnnnnnnnnnnnnnttacaatagaggaaatttggaaattcctccatgcctgtatgtatgtatatacactatatctgtataaatacccaaattaac

SEQ ID NO: 86968 - DNA, 449 bp, Homo Sapiens
gcacgagggcagttccccatgaagtttctcaatcaaagggatggcaaaggagaatgtcttcccagttcctgtccgtgcctgtgcaattaagtccttcccgctgtaaacatgatggaatgtctttgcttgtataggaaataggaaggtcactcctcggcctttgagaagtttaatagtttcttcagatatgggaaaattagagaaagcgccttctttttgttccacaggtatttcctgctctatctcactgttactttcttcactggcagcttcactggggttacagtccggttcaggatgaggaaatccattcttcagtttggggcttttctctctagtttctccattcatttccttttctttcttcatcttcttgggcttaggagcatctatttcttcctcagaaggctcctcattttttgtcacttttttggttttagaagaaacca

SEQ ID NO: 86969 - DNA, 438 bp, Homo Sapiens
acctgtaaacacttcctatgcacaatgaagtagatacatgaacttttgcagattatcatgttttgtttgccttttttgtgtgtgttttggtacaaatccattgtctttttggaaagacgaggtgagccagtctgtaaagttagaaataccaaatggcttatcgggtaatacacagtgtatttaagctgttgttgcttaattgcctcagactactcaaataacatcaacaacatttcttaagtaaaatttaaatattttagatgtaattttaaaaactgatccaaattttttattatacaactcactcatatatttgaaagtcttcactagcatagtagcatcaccttcatctaaatgtcatttaaattactgtccccctttttcctcccaaaaagacaatggatttgtaccaaaacacacacaaaaaaggcctcgtgc

SEQ ID NO: 86970 - DNA, 1024 bp, Homo Sapiens
  misc_feature (242)..(259): n is a, c, g, or t
tgctgacgagatgagtggttgaggaatgaggggtgggtgagatgtggtggattagactagttagtgagtgttggctgggtgcgggtgagagtgttggcgtgagggatgggtgctgtggagggaaagggggagtgtgagggattaaggtatgggtagtagaatgatggattgaactggaagttgatgatgatggtgtgactggtggatttgagttatgtgagcgactggagatgtctgtgaannnnnnnnnnnnnnnnnntgtgtttggtaccattggaggctgggctgtgtgagtgtggtgcaaagtgtaggagattagtctgttgatgctttcataatacaaaggattcactgttaaatactatagatatagttaaggcataatttccagccctcaggaaacttatttggtcaagacaaatttgattaagagacaagctttacaaacaggtaaacagtttgaaataatgcacagtgttacaagtagaaaaatatttattaaagaaaaataagaattatggttatgaagcatgcacatttagccttgtctggaaaaagtttatgcgaaggtggtgcctgaggtcttttacattagataacttcttagtcctctgtcaggttctccacctggaatgccacagctagtttttcttctccaagggtcaaaatgctgctcttccaacaacaagcttaaacactaaacgtaaagcattaaacattcattgttatttgtacttgtcatttatacttgtgtatcttatagacaaaacggtaagcccttaagagcagaaactgcttaaaagtcatttctgtatcactggtgactagtgaggtgtcttgcacagtgaaatgggtgaatgataggaactggagagagggtaagggatctagtctaggctatagggtttgtatgagcaaattccaagatagaaaagatagactaggttagtgcagcatgtgccaaatgttttgaagaatacatagtggacaccatcatcagtctttctgtgtcagaaagacaaac

SEQ ID NO: 86971 - DNA, 382 bp, Homo Sapiens
aataatggaacaggacataagtgcttcccagagcaaccgggagatttattgataaatacagagacatcgccgggcagccacgctccgacaacccgcactgggcccccgtcccgagctcaggccacgtccccacctcctcgaagcctccaagctgctgttaatgtcagttcttttcaccaggcaaacggaaggggcattcttgctgctgttaggaaacggttaccacttctccgtgtctgtttaaaataggatctttgcataaattgggataaatcacctggaggaattacacgtaaacaaggctgtaaatcaccattgcatgcatggcctgcagagttgtaaagtgcagattttcgttataaaaacacttctagtatgaatg

SEQ ID NO: 86972 - DNA, 1653 bp, Homo Sapiens
  misc_feature (1167)..(1175): n is a, c, g, or t
  misc_feature (1294)..(1349): n is a, c, g, or t
aattcccaagccatctaggttcattgaaccagggatttttccttggggaaacacacctagggaaccatggtttcactttaccctaccggggcccgcggcgcccaaacagaatggttgttagaaagcttcttggaggggccgaaggcggccggacaggtgtttttattatttgacggggggggttgtcggggttattaaataatttgtttattgtacggcatttacaaagaaaacagacaatgccctcagtagaaagaataaaaatgtatttagggctttatttttaactgacagcaaatagaaatcctttagtgagatcgtggcaatttgacagtattataattaagctcaataaaggtacatggggtacctggaagatcaagatctacagctgcctatttccacatctttcaatccatctggctccttaaataggggaaaaagcccttatttggtggagaagcatttccaaaatgaagttacaggttctattaaaacttactgtcacatcaactgttaaaatagggccttttgtgttttgttatttcaccttaatatcaccagaattcctgtaattccacaattgtgattttactatgtagaagataattcagttctagtctattgctttagatgtaaaaacagctgaaaacccaaagtggattagaattgctgaaggatttccctgccgttgtttgatacaatctattctcttgattcttgataggtgcatagaaagcctaacttaaaattctttctacaggaacatgtctgatttcaggagtacccaatgaaggatccgatgaatggctggccagttactcagagtaatatgtttatgagttaaatggattgcataacggcaccacttttcctttgtcactgtggtggataaatgacaaagtagattccaatctcctgtatagaaaggtggttacccaatagcctcactggtggcttgctagcagagcctcaagttgcacctctgtggctttctgtaaattcgagtcctacagccacttcgagaacgctgcaatccccaaggcccacttggtccatgctgaagaagcggctgtgaccccaatcctgcctctcttttgctcttcagtattacttactggaggaatatgtaatattctaggtcaagtctaggagaggctcatcctnnnnnnnnnttgcaaagtcttttctcaattaaaacaaaaaagcctcaagtacatctcaatcatgtcaaaattatggttaaaaattgacattatgtagggaaatagcagcagagaatggctaatcttannnnnnnnnnnnnnnnnnnnnnnnnnnnnnnnnnnnnnnnnnnnnnnnnnnnnnnngtgccatcccacccctccccttggttctttcatttggggttatattaaagactcgagcctctgagaaaatcagaaaggcaaagccatagaggaaaactgcttcaaggccagaattttgggtaaggtaaagaaaaagctgtacatgaaagcaggggactgtttggaaaagaatcagaatctcaagatctatttttcttaaatgggaaagctctgaaacccagatctccgttctaccatcatcctgatcctttagttatggggcaataaactcaagtgcaatgagtaaagtgccagccatggatac

SEQ ID NO: 86973 - DNA, 662 bp, Homo Sapiens
  misc_feature (194)..(202): n is a, c, g, or t
gcctcgctgccctcttgtctctgctgacttcagcctggtcatgcttgctctgccacttgcgatttcatccctaatttcttcctccaccatgcctgcagacttttccctgggcttgttttttctcgcacatctctgaagagtttttaatcttcagctcatcatgtcccaggaagtggcatcataaaaggaaatannnnnnnnncctaggagcagtgttaaaatctgggtcacattcctgaccaaggacagcatcctgccttctgcccatccccttcagttcacaaaagctgacattttaaacaaatcatgactcacacgtattaattggttataaatatgttgtgtacactggttagataaaacttaaggccacaaggagggcccaggtaggcgatgtcagtgtgtgaaggggctggattgggcgtggtgaggatgttggcaaaccagtgcatgcacctggttggaagatgctcagcctcacaaaagctccaagccctttgggagccaaagtgtctgagagtgtgaccctctcctgtaaagtatttatcccacccattaatataatttctgtataataaacttgacctgaaattatttcattctttatattaaacttttaaaaatgtctttctattttcaccttagatatgggaagcagttta

SEQ ID NO: 86974 - DNA, 900 bp, Homo Sapiens
atcaaaatacccagagttttttacttcctcacgcgattgtaggttcctctcctccctccctctgggccactgccaggaaacagagagaccgcttaatcagcagcttgacaaagaagacctcaagtcttgggaagaaacagtttaatcactcccaagtcctgggcaacagatgaccttcaagtcacctccgctctccggggagatgggaaggctctcctctcggtcccaaagtcctcctgttcttcccaggaggccccacaagtgtttggctaagcacaggctctcgggaatttaacacttttggggaaggaataggccctttgtgctgagagagagtttttattcacatcttttttaggggatttgctgcagatatttataaaaagtaactccctctgtaccactgacccatttatacataaaaaagatgtgttgaattttgcttggggtttgtcatttctgtttaggagatgggagttctgtgaataagagactttgcacaccttccaagtgaatatccactacattccacccctgttcctgcacttaaatcactggcctggaaagctgaagatggcatttgctgtcatctctgatcatctctgagtgtgcctgtctcccatctccatgttgtggaaggagcgtcaacagaaagttccccttgagatccgtcctctggatgtagaccgcagtgtttgtgataaacagtggcccaagacagcagggtttggggtggtcccgcacttggaggaagcccatcaaggaacgttggtttattttcacagctgtttggtggtaggactttcatagaaaaatcttgagattctatagagctccagccattagcttattctcagccaagaatcattgtataattgggttggattttagcctcgtgcc

SEQ ID NO: 86975 - DNA, 688 bp, Homo Sapiens
  misc_feature (44)..(44): n is a, c, g, or t
  misc_feature (64)..(64): n is a, c, g, or t
  misc_feature (258)..(258): n is a, c, g, or t
  misc_feature (274)..(274): n is a, c, g, or t
  misc_feature (305)..(307): n is a, c, g, or t
gcgaagatacctgtgtgtaagtcctgagaaaagtgtttcttccncaggcctcagttcctgcttntgaaaggaagagggggagtctgtgacccctgaggcctccttgcaactctgttttccaagctttgcacatcttccgaatttcttcttcaaagtctaccctaatgaaatatcagacaattttccaagtgtgcttcatgaacttctgggaggtgcttcacagtttctgcaaatgattgattgaattttcactttganaaaaataatactttanaggtaatttttatataatttaagaaaacccnnncacacccaaatgtgttatgcatcattatgatcctgccttccagtaactgtgctgacagatggcttctcctctcatctttgtttaattgaggagtattctgagattgcaaagtgagctgttaaaagctgtttcctgctgcaactacttacagatgtttatcaggattttcaatactctgctaccaaaataatatatagaaattgattgggtgctaaaataagattattcctgtctccccttacatccaattttgaatgtttgcattaataatcgtattatccttcttgttttcattgattaactttttaaacaattttatatatttgaccatatgttagatttatatcaataaattacaaattgtgtctatttcatacaaaa

SEQ ID NO: 86976 - DNA, 751 bp, Homo Sapiens
ctcatcataggactatagaacacctcccataccctgacaccataccaccacatcagcaagctccctgtgtagtaacagaggaataaaatggaaagaactgagcatctcagaccttatttaagaaggctgtagagaaactcaaagataacaggggagacaaaaacatggacaccagagaaaattttagcttcggaaaacactctagcaaacaataaagacggcccatcattaaagtcgccaggtcaaccagatgtagcctctgtaggtgttggccttggcgaccagcttgggatcagtatggttcgccagatggcccccactggcaccagtcttggttgggttcaccagatgttgcctgtgggctactgttttattttatttttctatttccatctttggacagagagctactattcttttaatggacgtgaaatggtgaaggcacacaagcatattgctgtcattgttttcttgctttcctaaattacttttaccagtggtatatctttttttaaaagctatctacttggagatggtgtgtcttgattgacatctcatggagaagtggatggggaaaatactggttctgtggaaagactctctccgttagtggcttgctcatccagctctgatctttctgttccaggactctccctgtttcaacaacagcaacaacatgataataacaaacctcacatatgttgttccactggataattgtaattttttaaaataaatcgttgtaaaaccc

SEQ ID NO: 86977 - DNA, 790 bp, Homo Sapiens
  misc_feature (29)..(29): n is a, c, g, or t
  misc_feature (236)..(284): n is a, c, g, or t
  misc_feature (462)..(494): n is a, c, g, or t
  misc_feature (613)..(625): n is a, c, g, or t
tgtcccccagcatcgggggcctgcaaatntagtgccgaatgactatgtccagattggtgacgatgggtgttgctgtttttcttgtcgtttgtgaacgctgtgatgctgtgtgcccaagtgggcagtcaccacccagcccttccttgggcgtctcccccagagtgctgtcgggaccacatctgtcctcaccctgtgggaccgcctggccctccctccctagcccttccagcctgggnnnnnnnnnnnnnnnnnnnnnnnnnnnnnnnnnnnnnnnnnnnnnnnnntcttacctctcatgcgtgttttaccttttgatgttcagagtggctcactggctgggagtccttacctcggggagagggggaggttggttccttggggggccaaagaaggcagggaatgcctggagggtaactggggggccaccatgaccccttctctctccagaaacagctgcttctnnnnnnnnnnnnnnnnnnnnnnnnnnnnnnnnngaggtggcccttgtttacagtgaggactcggccactgtgtctctgtttcctgaaatataaactgtagcgaccccagactgtagagatttttatgtgtttggatacatctgctgtgtggnnnnnnnnnnnnnctacaaaaaccctaattttgtacatactgtatttttactattgaactgtattctagtggctgttcatgctccaagactttagttaccgagacatgaatactatccatgtaataagcacttgcctggaataaaatataaaactgaaataaacctgcactgaaacct

SEQ ID NO: 86978 - DNA, 402 bp, Homo Sapiens
  misc_feature (24)..(24): n is a, c, g, or t
  misc_feature (53)..(53): n is a, c, g, or t
  misc_feature (62)..(64): n is a, c, g, or t
  misc_feature (222)..(234): n is a, c, g, or t
agggcacccgggcctgggaggganaggggggaaggcaggaaagcatggtgganggggaagannngggtctccccccatcccagggtcccacccccaacccccagaggtggcccttgtttacagtgaggactcggccactgtgtctctgtttcctgaaatataaactgtagcgaccccagactgtagagatttttatgtgtttggatacatctgctgtgtggnnnnnnnnnnnnnctacaaaaaccctaattttgtacatactgtatttttactattgaactgtattctagtggctgttcatgctccaagactttagttaccgagacatgaatactatccatgtaataagcacttgcctggaataaaatataaaactgaaataaacctgcactgaaacctgaa

SEQ ID NO: 86979 - DNA, 688 bp, Homo Sapiens
gtaaaaattgtcttaattgatggtacatttgccaagacaaaggttcagaattactaattttagatattatgatattctgaaataactatttttatcctgtagttctatgattatatgatctgtaaataagaagcctaaccaatttaaaattcctgactttagtctcatatatcttgtcagactgtctcggttcaaattccaaacctaccatcttcagttgtgcgaccttgggcatgctacctaatctctttgtgcctcaatttcctccttttaaaatggggatgatgatgataacaataatacctacctcacaaggttgttgtgagcatcaaatgagataacacaagtaaaatgcatagaacagttccaagcacagagtaattcaataaatattaactagtaatagtagtggtagtaactcgtgaatctttttaataacataataggctttgattttattatctctttaagttgttaacttttttcccttgttataagttttatgtcaagtaaggtagtttgtttaagttagttacccatgtccccaatcaagggaacctaaatgaagatatatcattaaataattaacctttttttattgtgtcaagcaatactaatttgtgtcataaaatttgttttgcatcattcaacaatttatgcccagaaataaacaatattctacaacagg

SEQ ID NO: 86980 - DNA, 255 bp, Homo Sapiens
cacatctgcatagaactgcaatgaacttctccgtcatccattaccatcttcagcaaggtatggatcttagcctggtggtagaatgtgaagatgaggacctcatccaggtttcttccttccttgggtgctctgcctcagccctagaggctgccccttatatctgctgtaattgtattctttagagttttcttttccctttactaggtaatcccctcttacaacatagtatttttttatattaaaatatccttgtcc

SEQ ID NO: 86981 - DNA, 472 bp, Homo Sapiens
ttgtcctttggttgccttagttaccagagttgaatgaatgtacacatttcggtagtgggggggcagagcggataaccccttccttgtctgtttcctttgagaaaggacactccaccttttcaaaggtacttaaagccatctttacagattgcttgtaatgtaaggaaagagtcatgtcctttggattgattgaggttaaatcatcaaccactagccccctttcaaaatcagcgagatatttgatgattaagtgattcattgggtatgttctggctactgatgttactgaaatctgcaatcgtgtatgttttttaatttgttgcttttgtatttgtaattttatgacatttcgaagtttctgtgtcttaactctttttaattaattttctgcacgttgcttttttctctttgtttttaattccatacagagtattcaattcttgaaacacattaaaataatttgcttgctaaa

SEQ ID NO: 86982 - DNA, 443 bp, Homo Sapiens
ccgcaccctcaccccaccatcacttacgcgactttaatccagttccttcaaagtgatacccccacaggtaagccctcagcatcctgaatacatcatccgcagcctgggaaccttctccctcgtacagcacaggaacctgtacacatagtaggcacacagtaaacgtttgtgaatgaatgggagtcatccagtcctgactcttctgtctcttgaggtcccttgaatcttccgcttcctccccaccgatttcagcgtgtccacatcacagctccctccagaagctgcaagagcttcttagcagttcctggtctgaaccctctcccagtcctcatcttccaccctaaaactagagtgatcttcctaaaacttcacttaacccctcagctatgaaaaggcttccaggagtttccatgaaataacaaaacaaaatacaagcgcctcac

SEQ ID NO: 86983 - DNA, 443 bp, Homo Sapiens
gcccctctcgtggagctactgcccatgatgctttcctagtgcctggttactctgcgagacttgagtctacctttggactgccttccttgggggtctgagatgaggccttatggcccagaggggaacttgattcaaaaatttgggattcatgtagcagagacagagctagactgtaaaggtcacaaactagctgtgtcaaggcctgtgatagccagaaagcggcagtttcagtccatatcaattgtgtgaccagggctagtcactttttacttctcagtgccatctataaaatggggataatagcactaccaaccaagtgctgtcaggctcaaatgagccaaaggttataaacttgccttaaaactatagtcctatacaaaaattagctgggcgtggtggtgcatgcctgtaatcacagctactagggaggctatcagcgcgtt

SEQ ID NO: 86984 - DNA, 1031 bp, Homo Sapiens
  misc_feature (590)..(699): n is a, c, g, or t
  misc_feature (730)..(790): n is a, c, g, or t
tgcggccgccaacttttttaggacaaactcttggactaaccacattctaatgataaacttaaatgagagttcaaggtatttaaactctcattaatttagacattaatcaaattaatcaatctgactaatctgattcagacctataccttgatccaagggctgcacagatatctgtcaatctatgctgaggagcaagagacaggatttggaaggcaggcaggctgatggtcaaactgtaggccagctactttgttaactatgggatcatgaggcaattaatcagctctaatccatagttgtttatttaataaacagtaggttataggaacacagatgttatgatggctttatgagatgataaatgcatagaacatattaggatgtctagcccagaatacaacactcaacagatactaatttcttccatctatattttcttagttaacataattttttaaatctataaaatcttacctgactgcagattcatcaggaattccaacatctattaaagaaaaaggtaaaatgcattttaaatcaataataaatgtacagaatattaaaatcataagaatgcacagtgatgcatnnnnnnnnnnnnnnnnnnnnnnnnnnnnnnnnnnnnnnnnnnnnnnnnnnnnnnnnnnnnnnnnnnnnnnnnnnnnnnnnnnnnnnnnnnnnnnnnnnnnnnnnnnnnnntgtgcacacttgtgtgtatgctttagatccnnnnnnnnnnnnnnnnnnnnnnnnnnnnnnnnnnnnnnnnnnnnnnnnnnnnnnnnnnnnnaaagcataagactgacgctttgttacaaagcattcctttgggagcatgcctgcgaccttattagaattaacattcattatacgtattggtaggtaattaatgcagtaagaactcttccctctgtatttattagatgcaaagaagaataaatttattaaaatttggtatctacaagtgaactgcagtatacaagtcatcctagccaaagcctatgagattgagtaaaaatggtattgttagc

SEQ ID NO: 86985 - DNA, 537 bp, Homo Sapiens
  misc_feature (173)..(282): n is a, c, g, or t
  misc_feature (313)..(361): n is a, c, g, or t
tttcttccatctatattttcttagttaacataattttttaaatctatgaaatcttacctgactgcagattcatcagaaattccaacatctattaaagaaaaaggtaaaatgcattttaaatcaataataaatgtacagaatattaaaatcataagaatgcacagtgatgcatnnnnnnnnnnnnnnnnnnnnnnnnnnnnnnnnnnnnnnnnnnnnnnnnnnnnnnnnnnnnnnnnnnnnnnnnnnnnnnnnnnnnnnnnnnnnnnnnnnnnnnnnnnnnnntgtgcacacttgtgtgtatgctttagatccnnnnnnnnnnnnnnnnnnnnnnnnnnnnnnnnnnnnnnnnnnnnnnnnnaaagcataagactgacgctttgttacaaagcattcctttgggagcatgcctgggacgttattagaattaacattcattatatgtattggtaggtaattaatgcagtaagaactcttccctctgtatttattagatgcaaagaagaatacatttattaaaatttggtatctacaagt

SEQ ID NO: 86986 - DNA, 775 bp, Homo Sapiens
accatggccatgccaggcatgctcttcccaggcccagagacagggcatccttgatccatcgggcgcttctttgccggtgacaggggtgcgcccaagcggggttctggcaggtgagctctgaggagtagaggagtttagtttaaatggaaaaagcaaaggagaaatcagtaggtgaactcagccattagagaaagaactggcacgtagcctcttgctgtctaaggtctcgttccgtgctggagaatgcatatgagcccaagagtgtgggcctgagtggctgcttaggacgttttcgtttaactcaccccctcttttcctcacaagggatggtggccggggtgtggctcaggaatgtaaggacatgctgaattctggatctctaagggtgcctggacaagggcgttgcagaaagagagccacattctcagggtctctggtggtgtgtgcttgcggacttgatgactgatgttgcctctgcagcccacacgctggggttcaacactgggttatgctcgttttttcctggagtcagtgctgctagcttcatgttgctctgcgacaatcataggattgaggtcgaggaagacttttgaacaaactcctcaatttaaatccgccttgagcaaacgttctctgtggtctgagaagtggaaggggggagggataaatgagtgtctatgaatcaaagctttattatcttgtgattccattaatttgcatacagagtcttagaagtttctttattcaaaagcaaatgtggataaaaatgtattac

SEQ ID NO: 86987 - DNA, 632 bp, Homo Sapiens
atatgtgagacaaaaatcatcttccagagatttcagtatctctgatactgacaatatctctgatatgacaatatcatcttccagagatttctactctgcataccaacattgtttctttgtgtcttaccaaatgcaacttgttactagaatatgacttattaaaaatgcatttccacactgcaaacattttttagggctatcttctgccctttggaagcagtcttggcagcaacctctttagtaatcaatataaggcacacttcatgtgtttgtgtagcctggaatctattctaccttcacaggttagaacatcttgatttcctcttaacgaaacattccctaacggtgtatgtagtcatgagggaaccaccattcaagatgccctgctcaggacttggcatgagcactatggtcagctcaggctcagaactgtacattgttaatgggtttttcaagttcacaaaagcaacatgagcttttgttctatggtagcatgttgatgtaataagtagctatttcaatagaggttcccagaacagcttttgttactgtcatttgcttaactttgttcacttgtcttttattttgagctattgggtgtgcttttaatacattccttgtttgattgcatt

SEQ ID NO: 86988 - DNA, 660 bp, Homo Sapiens
  misc_feature (56)..(56): n is a, c, g, or t
gtctgaatctgaatttctcctatttaatctatgcaattatgcttgttttatattantaagcacttgactcactgggtgtggtctttttactgtgttttatttcaaaacgttgttttaagtgatagtgtccttaaattttagtgtcatttggtcaacttactggtaacaccagaacaagaaagcaaaaaagtaataaattctgctggcacagaactaacatatcatttggtaactgtaaaacctatttgcagttaaaggttgatttattggataagggactaaaagaagcatatattacctttgcctttatattttttcttcttttaagaaggagcattatggaaaaataaatataaagtcttagtgaatttttgttatggttctcaattcagcaatctactggctgcttgcgaaactgtgaaatcaaattgttcttaacctttattcagtttagtttatagcattactgttttatgaaatgtgacattttaggagccaatataatagagctctaaaaggatagtatatctttaaattctgactggggagtaagaagagaagatattcttaccctactaaataaaccaacttttgagtagtatgcaatattatgaaatgttacaacactatattaaaaataataaaatattttaaaattgc

SEQ ID NO: 86989 - DNA, 908 bp, Homo Sapiens
ggggcagacgcggctcctagcggatgggtgctattgtgaggcggttgtggaagttaataaaggtatccatggagaacactgaaaactcagtggattcaaaatccattaaaaatttggaaccaaagatcatacatggaagcgaatcaatggactctggaatatccctggacaacagttataaaatggattatcctgagatgggtttatgtataataattaataataagaattttcataaaagcactggaatgacatctcggtctggtacagatgtcgatgcagcaaacctcagggaaacattcagaaacttgaaatatgaagtcaggaataaaaatgatcttacacgtgaagaaattgtggaattgatgcgtgatgtttctaaagaagatcacagcaaaaggagcagttttgtttgtgtgcttctgagccatggtgaagaaggaataatttttggaacaaatggacctgttgacctgaaaaaaataacaaactttttcagaggggatcgttgtagaagtctaactggaaaacccaaacttttcattattcaggcctgccgtggtacagaaatggactgtggcattgagacagacagtgggtgttgatgatgacatggcgtgtcataaaaataacaatgggagggccgacttcttgaatgcatacccccacagcacccgggttattattcttgggcgaaattcaaaggatggctcccgggttcatccagtccctttgggccatgctgaaacagtatgccgacaagcttgaatttatgcacattcttacccgggttaaccgaaaggtggcaacagaatttgagtccttttcctttgacgctacttttcatgcaaagaaacagattccatgtattgtttccatgctcacaaaagaactctatttttatcact

SEQ ID NO: 86990 - DNA, 1134 bp, Homo Sapiens
  misc_feature (93)..(93): n is a, c, g, or t
  misc_feature (118)..(118): n is a, c, g, or t
  misc_feature (128)..(128): n is a, c, g, or t
  misc_feature (151)..(151): n is a, c, g, or t
  misc_feature (916)..(916): n is a, c, g, or t
  misc_feature (1083)..(1083): n is a, c, g, or t
tttcaccattaccctgggctaaataatccaacagtttgggggtttttatataataagctctttcagatatattgctggtatatgaagctccanctgatatgcatagggacaaatcagnaagatattantgctggtagatccagggggcatngtagcaccttacagttaaactcccaccccctctatgaatgttaagttttagccttaaaagtcaagttagtttgctcacactttctctcacataaaatattagtttctttctcaatattaaacattattattatttttttacaacaaaagtgttcaggacaaacatcacaaaaccataatcccagataaatggtctaaaaatgcagttaagtcatccgtgtatatcaattctaaaataaaggtttgagcctttgaccatgcccacagatgcctaagttcttccacatcatcatttctacagtttgacaaaactagaatacacagtcttaagtggggggaatatcataaaaattcattacttcaatgtttaactttttcacaattacttgaaaattcatagcacagcatcactgtaacttgctaatcatgaaagctgtaaattaacaatcattgcctctcataatgactgcaccagtatccatttttatttattcctaatttaattcaattgcaactacctgactggaagtttgaggtagcttcatagtggttctatttgatggaaggagtatgtcttaaagtaccctctgcagcatgagagtaggtcaaaatgagagggaaatacagtaccaaatataccatcttctcacttggcatacaaactaaaaaaaaccaccaaccaaccatttctttagtgattaaaaatagagttcttttgtgagcatggaaacaatacatggaatctgtttctttgcatgaaaagtancgtcaaaggaaaaggacttaaattctgttgcccacctttcggttaacccgggtaagaatgtgcataaattcaagcttgtcggcatactgtttcagcatggcacaaagcgactggatgaaccaggagccatcctttgaatttcgccaagaataataacctgaataatnaaaagtttgggttttccagttagacttctacaacgatcccctctgaaaaag

SEQ ID NO: 86991 - DNA, 400 bp, Homo Sapiens
tgctcatgacattacagtctctacagatgagaatctttttagttgaagatcctgagttaacaaagcccaccatctgaagtatcggtcacaaggtcttcatggccaaatgtgattttcgtttttggaataagatccgtgagttcttctttttcctttcgcaggacaagcaggaggacatgaagactattttggagggcatagatccggccaagcatcaggtgagggtggcctttgatgcttgtaagctactacgtaaagaatagatgttgtaggtaaccagaactctggatatctgaattccagccaagaagttccaggaccctgctgggtgacaaaggaaatcctcttcaattaaaaaaaaccatgaactcccaataaaaagagatttgtaatgttggta

SEQ ID NO: 86992 - DNA, 804 bp, Homo Sapiens
tgtttatcgatgccacctctgcatggatggacatgtagagggtggcacgtttgcttttggatagtggtgctcaagtgaacatgcctgcagattcatttgaatctccattgacgctagctgcctgtggaggacatgttgaattggcagctctacttattgataggggagcaaatcttgaagaagttaatgatgaaggatacactcccttgatggaagctgcccgggaaggacatgaagaaatggtggcactactcttagcacaaggagcaaatataaatgcccagacagaagaaactcaagaaactgctcttactttggcttgctgtggaggattttctgaagttgcagactttcttattaaggcaggggctgatatagaacttggctgctccacacctctgatggaggcatctcaggagggacacctggaattggttaaatatttgctggcttctggcgataatgtgcatgctacaacagcaacaggagacacagccttaacctatgcttgtgaaaatggacatacggatgttgcagatgttttacttcaagcaggggctgatttagacaagcaggaggacatgaagactattttggagggcatagatccggccaagcatcaggtgagggtggcctttgatgcttgtaagctactacgtaaagaatagatgttgtaggtaaccagaactctggatatctgaattccagccaagaagttccaggaccctgctgggtgacaaaggaaatcctcttcaattgaaaaagattatgaagtcccaataaaaagagatttgtattgctggt

SEQ ID NO: 86993 - DNA, 807 bp, Homo Sapiens
agatcatctcacccccttcttaccaattgatagaatgatctgatgaaaacagtaaaataacaacagatctgaacactgtcaaccatcttgacaaatacttatgcctagtgttccattattggaacactaaacatgtggaatgatttatatcctactgctcaaggtcatcaccaaggtctaattgtaaaatttcaaaaaattgcaacctcaggcataaatgggttaatcgacatttatagcacacacatgcaacatgtaccagagattccttcttttctatgaacatggtacttccaccaagatagaccacattgtgaactataaaacaaatctaaaaacatttgaaatgaaggaaattatataaaatatgttctctgatctcaatgaaattaaattaataactatatctagaaaaactcccaatatgtgaatattaagcaacatacttataaaaaattcatagttcatggatgaaatcaaaagagaattcaaaatatttcaaaataaattatgatgattatataaaatgtagaaatgtgtgggatgccactacaccagttcttagagtgaaatgcacagctttcaaggcttctgttaaaagagttgggaattacaaaacaaggagcagcgactgccaatgggtgtggagtcttttttggggtgatgatgaaaatgttcaaaaattgattttattgatggttacacacgtctataaatatatttaaacggaagaattatatgatatatatgtgatatatgaagtatatctctgtaaaattcctaaggattaaaagaagaatggtatca

SEQ ID NO: 86994 - DNA, 1125 bp, Homo Sapiens
gcggccgctgcaggcgccgggccctgccggccacactatgcgcgagccggccccgggctgctgaggcgcggggacgcggaagcggaggccgagcgcgccgggctcccgcgctcgcgagcgagttttgtccgcccggcggcggtggcggggggatggagcccgcgaccgcgccccggcccgacatggcgccggagctgaccccggaggaggagcaggctaccaagcagtttctcgaagagattaacaagtggacagttcagtacaatgtttccccgctgtcttggaatgtggctgtcaagttcctcatggcaaggaagtttgatgtgctccgtgccatagaattgttccactcctacagagaaactcgaaggaaggaaggcattgtaaagctgaaacctcatgaggaacctcttcgttctgagatcctcagtggaaaattcaccatcttaaatgttcgggacccaacaggagcctccattgccctctttactgccaggttgcatcatccccacaagtcagtccaacatgtggtacttcaggctctgttttacttgctagacagagctgtggatagctttgaaactcagaggaatggactggtgtttatctatgacatgtgtggttctaattatgccaactttgagctggatcttggcaagaaagtcctaaacctgctgaagggagcatttccagctcgtttgaagaaggtgctgattgtgggggcacccatatggttccgagtgccctattccatcatcagtctcctcctgaaggacaaagtccgggagaggattcaaatattaaagacatctgaggtcacgcagcatctgcccagggagtgtcttccagaaacctgggtgggtacgtcaaaattgatctcgccacttgggatttccagttcctaccccaggtgaacggccacccagatcccttcgatgagatcatcctgttctccctccctcctgcctttaaactgggactcagtacatgttcccaggtccccctgcttatgacatcccaagagttggggggactatgtttaatgcccggccaaaagcaaggaatctttgagggaatttgaagaaattctctcctggagaaaccctgttgggacctttcccctgg

SEQ ID NO: 86995 - DNA, 951 bp, Homo Sapiens
cttgttagccccctgttatatgggagaacgaaaattgttatattttgaaagtacttattacattatttttattttagtatcttgatgctcctgtcaaaagggaaatgaggcttttaaaaataaagtaccttaattctttattgactttttgccctaaattgctaggtgtgacccagcaatcttttaggaagagattttacagtggtgctttatttatatcaataatccagtatagttaggctgttcattcctcataatagagtacataacagaaaagtgggactttcacattttcatatttaggcacgttccaatttaattccaaaaatactctgtaattctacatctaaaaaaaccgattccctaattcgaatttattggtaccaaagctctctttggctatagacaattaagagttgaccttttaagttaatgtatatgcttaaaaacagttttaggaatatttggtagacaaagagtttcaactttaaatgttcactatgtcatttagtgtccaactttacggataggttgactatctaaataggcatttttagtcattaaaaaaaatctagtcaccaggaggatccctataactcaaaataacttgtttgtaaaagaaaatttgtttacttacccattagtaagttcctgcatattcattataagatggcaaatcaaacttttctaggatgaagacagcttatttttaagttgtatagtcttagttggtttagggtctcaattttaattaataaaatacttggtttttatttgcttgtccttttgaattcctgttttaataattttaaaatgagcacaaagaacgttgaagttcagattaatctcttctgaatgatgtttttttcctctgtgatgagttgtttctgacttttttccttttgtatttgtaatgttgattaagatgtaaaataaaaagtgtgcctgatt

SEQ ID NO: 86996 - DNA, 654 bp, Homo Sapiens
ggtgagaagttcaaaaacttgggctttctaatcagaatttccaggaggaggaaagtgtgtgctgaatattttaaacatttcccactgatcatacaaagtctgatttttaaatttacacttataatgcctttgtattaaaattatttttaacatgtgcttttccaaattaaaaatgaagtagagtataccaaatgcataaactttcattagctaaggaactcatgtctgaattttgttgtagttttgaatgttgtgctctttcatacagaacgggaaacataatcctcaggtatcccagcatctcttgttgaattgaagattattcattgctttggcctcacaaagttttgatttcaactatcataagtgaaaatatcttcctttaatgttctaagtagtgataatattactagaatgaaagaataaaaagaaattgttcttttaaaatatgtgtaacttctaaaaataaaacttaaaatttatatgtattaaggtcatgcttttgtgaattggggaaagtaattgactaaattgatcctccatgaatcgtgacctaaatacatcacacaggtgactcttcaacccctagtttgtcatcaatgcagctatcactgaatgaagttccagaaaataataaaggcttacttggatctt

SEQ ID NO: 86997 - DNA, 582 bp, Homo Sapiens
gcggccgctccaacatcagaatgggatactccacaactgtctcaccaactcagtgccagtacacatgctctagaggacttctggactcgcagctacaactgtacaagtgcacacaagtgaatctaccctgttatcctccacccactgattgaggatcgaattgcacatttctcttaaccatgacaggagaaagcaaacagtgaaacagaatcatgggtgatctttctcactttccctcttgttttcattggtttgtccataccattctaattaacatgaaagggctctgcatatagagagattgtctcactgacttcctggatcaccgaaaaccatcagggttgaaatttcatctgagtctttcctgacgcccagcaaatattccccctcggattattttacaccttgagggcattttggtcttcagttcaacactcttgctctgttcccaaatggggcgctatttaggggaatttaaagagaaagctgagaagaataaacatttaccgagttctcttggcattcaatctctgaaaaaccacagtataaactattcatgctgcttcttacatctcctcgtgc

SEQ ID NO: 86998 - DNA, 586 bp, Homo Sapiens
atctgaatgggcttttttgggagtcccctcctccacatgaatattctggttgtgtcagattccctagaatagaggcttccaatctccttcctggaggggtctgtccaggaaggagattgtctaggggtctgtcagacagcagctttcagatacttccttgatctttttcactaatgattatatagtcatctaactactgtcaacaagtaatagatatcctatccttcacttgtttagattatttgctgagataacctctcaaaagaacctctcaaaataaaaggttaacaagagcctatatcttatatttttcttctctttatcttgttagaagatagctattaaaacctgttctttttctgtcttgataaacacacttcaatcttggtagaatggtagatgggacagtatattttaggacctaaagctctgcaaatgtatgatcagcttgtaagtacaggtgctcaaaaacatgtaaacaatcatgctttttactctgtaggaatatctttaaaattcttgtgaatttttccccagaagtaaagcaaatcttccccccagaaataaaattaaatgtgcataatct

SEQ ID NO: 86999 - DNA, 823 bp, Homo Sapiens
  misc_feature (611)..(699): n is a, c, g, or t
ccaatgtaagaataacaagtttaatattgaaaatctgaaaaaggcaggaagataggaagaagaaaaatatcaaccatagtcctaccacctaaagaacactcactgacagtgtggccatgctcattctttaagccttaatttaggtcccatttctggtgtggtgccttccttgaacttcctcccccagatcttccatgtcatatctgtaccactcagttgtacatatcatacacttttgtgtataatgtgatgtatgtcttatgtttccaacgagattgttacatcttcgaaggctgcaaacatgagttgtacttgtaagcttaccccaaaataatacctggtataccggacccaatatctgctgattgatctaacctaaatgaatacaaaccatttcagaaaaagatatacaatagaccacatatccaggtcatgaaaattaaagctttcaggtcacctagcttagtgactattgcttttctgaccctagactcttgaaagcctatttaaactggcctctttctccacaccaaaactgataaaaaggagcactgattatgagccaggatttacacagagcattctctatataaggcataaaggtgagggtnnnnnnnnnnnnnnnnnnnnnnnnnnnnnnnnnnnnnnnnnnnnnnnnnnnnnnnnnnnnnnnnnnnnnnnnnnnnnnnnnnnnnnnnnagggtatacagtctggtgctcaatcgagtatgtgattgtgctccagcagcgtgtacaggatcccatccacttgttctagagtcatacccgatctcacgaaactccaagtgagagaggacaaaag

SEQ ID NO: 87000 - DNA, 693 bp, Homo Sapiens
  misc_feature (25)..(25): n is a, c, g, or t
aatacttttatttatgctctggttntgtgaggtgtattgggacagcatcctgacaaggctttataatgtgcagtgaacatttcaaattcagaagtggaaaattgagatgggatttatcaggttgcctatgcagttgggacaatgttttaaattgtatattagacagagttagtgactttctgaatggagaatagggggattatgtaagaaagtagggattgtcacacatgggcagtcagatgtgatattttgccagaggaaaaaaaatgatgctggtcctgaaagttgtcatgcttcaaactcacaattgaggaaaggaatctgatagattcactgaaatcataataactcaaaagattagtacaattctaggctcatcaggaagttttagggatgttatgtatgatcttttatataaaatacggttttgtgtctacatgaaatgtcacatatgaatgttaaaaacgtagaagagtagggaatctttagggaaaggagagtaatggagggcctgggatgtggttttgtacactaatacactaaaaagagtatttcttagggtggagagatgaaaactgttaggaaatactattatgggccaagaattttgatgggaatggaacatgtgaatgtcactctgatcacttttatgtaaaaattataatttaattaataaaaaatttcttaagaagt

SEQ ID NO: 87001 - DNA, 698 bp, Homo Sapiens
  misc_feature (571)..(571): n is a, c, g, or t
gcagcgtaattcacaaaatacaaataatgatgataacctctaacatatagctcttgtgtctcagacactattctaagtgctttgaaaatgttaactcatttagacctcaaagcaatcctaagatgttgtcactatcactactcttttatgggatgggaactgaggcacagagatattaagtagcatgccccatgctggaatcggggcccaggcagcaggagcccagagtccacacccttaactatgccatgttgcttctatgaggaagaaaaagttggtgaagaacatttaggactctcacactaaatacaaatgcagatagctctgctccctgctcacacatcaacagtaagatacataatatttcttacattgcactatttgttttcattgtggagattgtaataaatactactgtttttagctgtttaaaaacagctcaggcttttgctatatataaatgtgtccctaatgcaaaacttgactgacatttgaaaattttacaaaaacattttaacttatttttgaaggattagttattaccactgtctatatccatttacaaacacanaaaaggataaaaagatgccttataatttaaaaggaatattacacttacaatacaaatattaacaaccagagtcactactgagacttaatgtgcagcatcttcatacacataatagttactgacctcg

SEQ ID NO: 87002 - DNA, 567 bp, Homo Sapiens
aaagaaacattccctccttcctttccttccggggtttgggggaaccctcgtaaaaatcctagttagggttaagtccaagcagtgaggcctgacctgggctctgctctccttgttgggaccctaacaggcagttgggaggaaaatctgcatttgactccaccctctttggggcaaaggagaaacaggtgacccgagggggggcaggccagaggagggcgactcgtgcacagggacccccacccttggacccccctgtccttttctagttgtttacttggtggtggcagccagtctgaccttgtctgtggtctgactgttcctaagtgtgtaactttcagtattatctgtgacagatggttctgtggtgaaaaaggtttattatattccttatggctgccttgtacaaaatccgttagaaacgctaatgtaagatatcagatttctaacaagacaaaaacagcattatggagttaaaagatttttacaactgggtcttgattttgatgtgagctggtttttagctctcaaatgttgtcacttaaataaaaaccttctttgcctttaaaa

SEQ ID NO: 87003 - DNA, 622 bp, Homo Sapiens
ggtatcactgcattatatagcacttccagtacaatgctgaaaagcagtggtgtggtgttccttgccatgttcctgatcttagtaggaaagtgtctagttggaaacatcaaggataatgttagctgtagggttttttgtagtatgttctttaccaacttgagtaagttctcctgtattccttctgtgttgagaggttttaacatgaatggatattggattttgtcaaatgctttttctgtacctattgatatgatcgtatttcatctttgagctgctaatgcatgcaatggattacactgaatatcaaatgttgaacaagccttgcattcctgatttgctaatattttgaaggatttctgcatctgtgttcaatggaaatattgatctgtagttttcctttcttgtaatatctttgcctggctttgctattagggtaatactggcctcacaaaatgagttgggaagtgttatctctgcttttattttctgaaagagatggtagagacttggtatcatttctaccttaagtatctcaaaaacacatcagtgaacccagctggtcctggcactttgttttggaaagtttcattattattttttgagatgcagtctcattctgtca

SEQ ID NO: 87004 - DNA, 704 bp, Homo Sapiens
  misc_feature (128)..(128): n is a, c, g, or t
aaaattcccctgagagaaaccttctttccagccagaggagcaggaaaaaatgaccctatggtctgaagaatgtggaaataatccatctttttttctctctctgctttctgcctgaggggcgttccttntggcaaaatgagcaggcagtgtaggcaggtaatcatcagagagaaagcccatctttctaagccagaggatgaggaaaaggggccccctgggtgccagggagtctggggggaaatcctgaagagcaaagacctgaaaagaggattctctaattctgtacatgagctgaattccgtgctcagcccagagctgcacatacaagagacagagcccaggcaacacagccacactttgaactgacactcggaccaccaccaccaaacagaaggcaacgcaggacctgcagactaaggctaacgaggctgattgcctgacaaaacagaaaaaaaagaaacattcttcagggaattttagcagaacacagagtctcccaacataaaacagacagtcctcactgcacagcagttcagaactgtaaaaatgaccttccaacctgaaactgccatgtgctgttcataatcattaatgggtaaaattgtgatttttttcctgtcttttgaaaattgtcaaaacattgataatcttgtactgttagaaatgtataaggaaacaataaagtaaatatttttgtacactgt

SEQ ID NO: 87005 - DNA, 864 bp, Homo Sapiens
agaaccttgtccatttagctttcataagaaatcccatggcaaagagtaataaaaaggacctaatcttaaaaatacaatttctaagcacttgtaagaacccagtgggttggagcctcccactttgtccctcctttgaagtggatgggaactcaagatgcaaagaacctgttttggaagaaagcttggggccatttcagccccctgtattctcatgattttctctcaggaagcacacactgtgaatggcagacttttcatttagccccaggtgacttactaaaaatagttgaaaattattcacctaagaatagaatctcagcattgtgttaaataaaaatgaaagctttagaaggcatgagatgttcctatcttaaataaagcatgtttcttttctatagagaaatgtatagtttgactctccagaatgtactatccatcttgatgagaaaactcttaaatagtaccaaacattttgaactttaaattatgtatttaaagtgagtgtttaagaaactgtagctgcttcttttacaagtggtgcctattaaagtcagtaatggccattattgttccattgtggaaattaaattatgtaaagcttcctaatatcataaacatattaaaattcttctaaaatattgcttttctttttaagtgacaatttgactattcttatgataagcacatgagagggtctttactttttccaaaagcaggcttttaaattgcatagttgaagtctagggaaaaaataaatggttaaaaagtgaattattgcccaccataatttaccttaatttatggttaggaataggaaacctaaccgaattatttttaccctggaaaaggaaaaataattgggaa

SEQ ID NO: 87006 - DNA, 839 bp, Homo Sapiens
  misc_feature (50)..(51): n is a, c, g, or t
  misc_feature (87)..(88): n is a, c, g, or t
  misc_feature (102)..(108): n is a, c, g, or t
  misc_feature (110)..(122): n is a, c, g, or t
ccatgttccactttaccctactggggccccgcggcgcccaaaccgaatgnngttctagaaaagctttcttcgaaggggccgaggcgnngccgacccatgttnnnnnnncnnnnnnnnnnnnnagggtcttacaactctattgtaaactatactagactatagagggacttctacatctttcaagatgtgtttaataaaggtctgtttataataacttttgaggcatgaatctagcaaatagtactttatacaatgtcccttgtcattaccaactcataaatattaagtgtttttcagtgacttatgtttggatgtggtagtgctgatcagggccatgtgctgatgtcctggagagcaaaatcaatccaaagtggtgctgctatttgtgacagaacatgtttatttactcagccccggagacaaaaggaaaattgatatgggggagcgggaaataggagaactattaaatgtagtgaagaaatttcacaggtctaaaggaactattaaaaggaaggataaagtagattctatactataaaacagaatcctacctctgataaaagacaaatcagcctgaatttttgaataatcaataggattcaaaatgactattttcaattgcaatctcattcttaatgttcttccagaacccttaaccctgagagaagcagggcaaaatgtggccaaaggattcagaacctttctttccaacattatcccatcagctatgagaaggtaaagatttagccacggcaaggtccgaggtccaaaatcaactcttttcattctctgtcttgctctccatttttagttgatctgatacaactttttgacatcac

SEQ ID NO: 87007 - DNA, 315 bp, Homo Sapiens
aataagctataaagcgttaacagccagggagataaaaaatcttaagctggagaactcatcattacaggaaaaagcggccaaggctgggaaaaatgcaaaggatgttcaccatcaaattttggcaactgagagcccaaatcaaaaatatgtaagggatatagagcaaataatggccttaaaaccattaaaacaatttaatggtgaaagccagctagtaactggcccttggcttgcttttggccatcttatactgcaaattaagaatttactcagttaaaaaatgacacttcttgaagagttccttgaggtttaaag

SEQ ID NO: 87008 - DNA, 896 bp, Homo Sapiens
gggggaagtgggttgacgtagcccggaaggggaatacttccaagttgtagtgttgttgttttcagcctgctgctgctgctgctgttgcggctaggggaaccgtcgtggggaaggatggtgtgcgaaaaatgtgaaaagaaacttggtactgttatcactccagatacatggaaagatggtgctaggaataccacagaaagtggtggaagaaagctgaatgaaaataaagctttgacttcaaaaaaagcaagatttgatccatatggaaagaataagttctccacttgtagaatttgtaaaagttctgtgcaccaaccaggttctcattactgccagggctgtgcctacaaaaaaggcatctgtgcgatgtgtggaaaaaaggttttggataccaaaaactacaagcaaacatctgtctagatgtattgatggaatttctggctttctaaatgattttactttctgccttgaattttcaaggcatagatgtcaacttacagaataacatgttttaagataattaagtttaaaccagagaatttgattgttactcattttgctctcatgttctaaacagcaacagtgtaactagtcttttgttgtaaatggttattttccttataagaattttaagaactaagtggcaaattccatgaaaatatttctcagttctgtatgcacttttatttaacattattcatataattctccccccaccactttatttatagatactgcaaaagtgagaaggagataatagatactttgctctgaatttggcatccagagttaacatttctcccctcactcccttgctggtgtcatagttattagaatcagcagcctcttaactaattgcggtttcataggatatataaatgtttcaagccattaaa

SEQ ID NO: 87009 - DNA, 924 bp, Homo Sapiens
  misc_feature (297)..(297): n is a, c, g, or t
  misc_feature (316)..(383): n is a, c, g, or t
ggggtgggtgttcggctacgtcactggggccctacggtgcctggagctgggcagtcttctcgtcagagtggggactggtaagagcgacctccccgccaggtcctgtgtgttgccagccgaagaagggtagctgaaaaattcagacccagcacagtgtttatgttggtcaaaaatagaaaactatgtctggcgccgccgaggcgggaggacccttcaggccaagagcagcctagcaacatggcgcaaccccatctctgtagtcctacctcagctcccccaaggctgaggggggctcanccccccagccctcaagtannnnnnnnnnnnnnnnnnnnnnnnnnnnnnnnnnnnnnnnnnnnnnnnnnnnnnnnnnnnnnnnnnnngacacaaagaccaacgagccaccacagccaccagtcccagaacccgctaatgctggggaacggaaaatgagggagttcaactctggcaagttctcagcgaaatccacgaccttttcctttatcttctggactctcaatgtgactgatgaaagttaccacatgctctgcagggggaaatggtttagcatgtattactacatcttaatcacatctttgtaaaagccaggagcattttgaaagtcacgttacagacattcaaacattgtttaaacatagtctgtatataccaaagaataagacgttgtatcatctccatataaattagttagttggctcaaaattagtgctaatgacttagtaattcagtgatttctgttagctttaaaacctttatttcagaactatttcacctcttggttttcatttttgctgtgtgtcactgcctgccagctgctaatttattaactcccagtgaatcacgtgtcctgtgaagggactgaatattagtggcaaattatgttgatgatttatattttgaata

SEQ ID NO: 87010 - DNA, 692 bp, Homo Sapiens
tgggttcaagcgattccagaagagagaattcttagagtcagagggaggagtagaaggaaaaagatatttaaaaagctatgcttcaagaggacatttcatgctgtcaaaatgagactgtgaatcagaaagttctcggggaactgcaaggtgctctcaactaggggtcggttccttctcagtcatggcactgactcatctccacagggttctcacctgcgggaggaaaatggaggagttgcgcctgtcagaaactgtctgtgtgattcggggaagaatatggagtatcttagtagcattccattattacttgcccctaaatacatgatgccagccccctgcacagataacctcctgcttttatagcttgaaatatatttgatctaaaccacgatttgacatcttcagagagagagaagtagataaaagtctccattccaggttggcagtagggatcctgcagaagtggctgaaatgaaatttggcctacagagaataagttctacagtcattttgtttctgcctatttcctccagattcaaaggcagattgggtcatctcggaactcatgtctcctccaggacacagcaacaacacattttcaaggaacagcctcattatttgtaaaatctgtagagtataaaacataactgctccactgacaggaggttggatttggacttaatattgtatcc

SEQ ID NO: 87011 - DNA, 942 bp, Homo Sapiens
  misc_feature (152)..(175): n is a, c, g, or t
agaggaagtgaaggctagccaactttcagttcagcagaacaaattgtctgtccagtccaatccttcccctcagctgcggagcgttatgaaagtagaaagttccgaaaatgttcctagccccacgcatccaccagttgtaattaatgctgcannnnnnnnnnnnnnnnnnnnnnnncagttttctgaggaaggtgatgaaaccaaaatcacctaccctgcaaccaactcctgaagttcacaatggattacgagtgacttctgtccggaaacctgcagtcaatataaagcaaggtgaatgtttgaattttggaataaaaactcttgaggaaattaagtcaaagaaaatgaacggaaaaatctaatgaagcataggtgagggttcttcaggagtttccagtcttttactccaccctgagcccgttccaggtcctgaaaaagaaaatgtcaggactgtggtgaggacagtaactctctccaccaaacaaggagaagaacccttggttagattgagtcttactgagagactggggaaacgaaaattttcagcaggcggtgacagtgatcctccattaaagcgtagcctggcacagaggctagggaagaaagttgaagctccagaaactaacattgacaaaacaccaaagaaagctcaagtttccaagtctcttaaggagcgattaggcatgtcagctgatccagataatgaggatgcaacagataaagttaataaagttggtgagatccatgtgaagacattagaagaaattcttcttgaaagagccagtcagaaacgtggagaattgcaaactaaactcaagacagaaggaccttcaaaaactgatgattctacttcaggagcaagaagctcctccactatccgtatcaaaaccttctctgaggtcctggctgaaaaaaaacatcggcagcaggaagcagagagac

SEQ ID NO: 87012 - DNA, 630 bp, Homo Sapiens
agacccatgagacgttactatttttataaccactagacaacgcaggttgccgcatacttctttatttgtgtagacctcgctcttgccctgtttgaagagcctgagttgcttcccctgcctttcttggccacctcaatagcagaagtactctgcctgactgcatactttggcagactggtacattttgcaaaagtcactcctcaaatggttttctggaaggatacaaaagacatctgcaccatggtaaccacagtggcgagtgttcattgtagtacctgtaagagtttatgaccgaaggcaggagccatgaagaaaaaagactcaatagatttgcttttgatgaaacaacaacacttccatacagtgaacgccataagcacaactgcaagcaaaccccaaactgaagaacaaatagggcaaaatgtggcagtgcagacatttcagcatatcaagagcacttccaaattacaggaaaaaaaagatatctcaatagataattttgctgaagataagtgaaggcaactcataaggaaaaaatatgtaaaatggccgataggaaagatgtttaacgtcactaattaaaaattatagaataaaacgacaataaaataccatgtgtttgcctataaa

SEQ ID NO: 87013 - DNA, 893 bp, Homo Sapiens
caaggttcatgcatgtgtatttttaattccttaaactagacagcaaggtataagtcaccattctcctctaatttttgaaataatcttaaactgtgcaatccagattctcgctctccatttttccacaaaataatgagatgatcagcggagcacgtcactagtccatgatcttcaaagtatagaaacatctccacagatgatgagtgtccaatcaaatctccaataagctccagtgaacatgaagtagcattttcttgctgctttttaacaggttggctggcttgtttgctgactcttccaaatccccacatgttaaaaaaacctgttggtacaggctcagctgcaagctgctgtttttctcttaactcccaaatgcgtacactgccatcttctgagcatgagattaactgcctgtttggaagtctggcaatgtgcaggacattggagtcatgtgcagttatctggcaggcaatcacacgcttcatttgaaggctatacacgtataaaccccttccaactgcagcaaatacattctcttcatcacatgtgaaatgatgaatagaaatgtcatttgatttttgacagagttttatttcttgttgggtgtccagttgtggagatgggtcccagaagttgcgttcataggcctgcatggtccagtccagggcatcccagatgatcagctctccgacgtgggagccggtgacaaaactcaaatcattgacattaatcaatgagagaatattatcctggtgatcaaggaggcgcttaacttcaagaatatcccattctagtgatccttctgtgggtgctaccaacctgaaaattatcagttctttgccaactgctgccacaacacagttcttaggtatttcaaccaaagcactaatacc

SEQ ID NO: 87014 - DNA, 455 bp, Homo Sapiens
gcgagagagtgaggaaaaggctcgtttgctaaaagataaactagatgaaacaaataatacactcagatgccttaagttggagctggaaaggaaggatcaggcggagaaagggtattctcaacaactcagagagcttggtaggcaattgaatcaaaccacaggtaaagctgaagaagccatgcaagaagctagtgatctcaagaaaataaagcgcaattatcagttagaattagaatctcttaatcatgaaaaagggaaactacaaagagaagtagacagaatcacaagggcacatgctgtagctgagaagaatattcagcatttaaattcacaaattcattcttttcgagatgagaaagaattagaaagactacaaatctgccagagaaaatcagatcatctaaaagaacaatttgagaaaagccatgagcagttgcttcaaaatatcaaagctg

SEQ ID NO: 87015 - DNA, 893 bp, Homo Sapiens
gggaggtagaactgagagatcctctaccgcagtcgtttgaggaggcggaactgaagttttttcttaattatcatgtgacgggttctggatttaatggggggaaaagggcggaaaaggacaaggatccaaactggcgaatttgctgatcttcgcgtccctctccgctttccggccggcagcgctgccagggtatatttccttttttccgatcctgcaacagcctctttaaactgtttaaatgagaatgtccttggctcagagagtactactcacctggcttttcacactactcttcttgatcatgttggtgttgaaactggatgagaaagcaccttggaactggttcctcatatttattccagtctggatatttgatactatccttcttgtcctgctgattgtgaaaatggctgggcggtgtaagtctggctttgaccctcgacatggatcacacaatattaaaagaaaagcctggtacctcattgcaatgttacttaaattagccttctgcctcgcactctgtgctaaactggaacagtttactaccatgaatctatcctatgtcttcattcctttatgggccttgctggctggggctttaacagaactcggatataatgtcttttttgtgagagactgacttctaagtacatcatctcctttctattgctgttcaacaagttaccattaaagtgttctgaatctgtcaagcttcaagaataccagagaactgagggaaaataccaaatgtagttttatactacttccataaaacaggattggtgaatcacggacttctagtcaacctacagcttaattattcagcatttgagttattgagatccttattatctctatgtaaataaagtttgttttggacctcattaaaaaaa

SEQ ID NO: 87016 - DNA, 427 bp, Homo Sapiens
aatccctcatttcccgacccctgtactctgcgctggttttgcccacagctgcttgcgaatggcaggctttttcctccattcctttgcggaacatagaagagtttgtctcagttctcttagaattgatgttactaactgaagtcaaagccaaaagcatgaataattcaggaacgagcactttccttgccccaccccactgtgctcacccaatgcccaaaagcttcttcatttttaaacgggtgtgtacgttttgctactaggctatgtggtggagactggaggggaccaggaactagatggactgttacattccgaaatttatatcaagtacaccatgctttattgagtgttatcacacctgtattgaaaatagcattaatatttaaaatcttttttaataaaagaagtttccgaacaaacagttaaa

SEQ ID NO: 87017 - DNA, 665 bp, Homo Sapiens
gagaactatgagtcttattttattactgtttttcactacctactcccacaatggacaatcaattgaggcaacctacaagaaaacatttacaaccagatggttacaaataaagtagaagggaagatcagaaaacctaagaaatgatcatagctcctggttactgtggacttgatagatttgaagtacctagttcagaactccctagtcaccatctccaagcctgtcaacatcactgcatattggaggagatgactgtggtaggacccaaggaagagatgtgtgcctgaatagtcgtcaccatatctccaagcttcctggcaaccagtgggaaaagaaacatgcgaggctgtaggaagagggaagctcttccttggcacctagaggaattagccattctcttccttatgcaaagattgaggaatgcaacaatataaagaagagaagtccccagatggtagagagcagtcatatcttacccctagatgttcatcccagcagaagaaagaagaaggtgttggggtaggattcttcagaggttagcctggtactttctcatcagacactagcttgaagtaagaggagaattatgcttttctttgctttttctacaaacccttaaaaatcacttgttttaaaaagaaagtaaaagcccttttcattcaaaa

SEQ ID NO: 87018 - DNA, 1419 bp, Homo Sapiens
  misc_feature (966)..(974): n is a, c, g, or t
cagtcgacggtaccggacatatgcccgggaattcggccattacggccgggggggtcccagcgctgccgcaccatggcggaccagctttatctggaaaatatagacgagttcgtcacggaccaaaacaagatcgtgacatacaaatggctgagctatacactaggggttcatgttaaccaggccaaacagatgctgtatgattatgttgaaaggaaacgaaaagaaaattcaggagcccaactgcatgttacctacttggtgtctggcagtctcattcagaatggacattcctgccacaaggttgcagtagtgagagaagataaattggaagcagtgaagtccaagctagctgtgactgccagcatccatgtgtacagcatccagaaagccatgctaaaggacagtgggcctctgttcaatactgactatgacatccttaaaagcaacttgcagaactgcagcaaatttagtgctatacaatgtgcagctgccgtccctagagctcctgctgaatcctcttcgtcttccaaaaagtttgagcagtcacatcttcacatgtcaagtgagacacaagccaacaatgagctgaccaccaatggtcatggcccacctgcatccaagcaggtttcccagcagcccaaaggaattatgggaatgtttgcctccaaagctgctgctaaaacccaagaaaccaacaaggaaaacgaaaacagaggctaaagaagtaacaaatgcatctgcagcaggcaacaaggcaccagggaaaagggaatatgatgagcaacctttttttggaaaagctgctatgaataaatttaaagtcaatttggactcagaacaagccgtgaaagaagaaaaaatagtggagcagcctacagtgtctgtcacggaaccaaagctggcaactcctgcaggcctgaaaaaatccagcaaaaaagcagagcctgttaaggtgctgcagaaggnnnnnnnnngggggaagcgagtagcattatctgatgatgagacaaaggaaactgaaaacatgaggaaaaagaggagaagaatcaaacttcctgaatctgatagcagtgaagatgaagtctttccagactctcctggggcttatgaagctgagtcaccatccccacctcctcctccgtctccacctcttgaaccagtgccaaagactgagcctgaacctccttctgtcaagagctcaagtggagaaaacaaaagaaaacgaaaacgcgtactaaaatctaaaacttacctggatggggaaggctgcatagtggtgctggacatgcagtcccactcactagacattttggagcattacgtggaaatgcccatccagcggttggagaggtagggtaggatctgaagatctcaagcctcggaagcacagatttaggagtcactgacttagaggtggta

SEQ ID NO: 87019 - DNA, 535 bp, Homo Sapiens
  misc_feature (417)..(426): n is a, c, g, or t
ctaaagtcctgagaacttttcttgtaatgcagctttttctcttcctgagaaacagtgtgttctaatgggattcccaggcagttcctacacctacggtgtgtgttccagcagggaggagttatgggctgggctgccttttcccatgggtcttcattcccaatggaaagttcactctgcttagtttggaattatttttctttcagttgttctggaacctttgctttttattgatttatacaatacaattggtgggagggtggacttgggatgggagtgggaaaagcatgtaagagctccctttgtgatggtccatctacccaaaagagatctgctttagtgaacgatactctttcatttttctaaattagatcaagttgttattgattttagatgacttgtatgcaaatttgaaaaacnnnnnnnnnnaaagctgattgggaactacaaacaatgaatggaatctactgacacacctaattggaaaacagatgtcttcttctgtcctattgatgctggtgtttaaaaaacatcactt

SEQ ID NO: 87020 - DNA, 363 bp, Homo Sapiens
gccttcaactaaaaacaaaggagataaatctagtatacattgtctctaaattgtgggtctatttctagttattacccagagtttttatgtagcagggaaaatatatatctaaatttagaaatcatttgggttaatatggctcttcataattctaagactaatgctctctagaaacctaaccacctaccttacagtgagggctatacatggtagccagttgaatttatggaatctaccaactgtttagggccctgatttgctgggcagtttttctgtattttataagtatcttcatgtatccctgttactgatagggatacatgctcttagaaaattcactattggctgggagtggtggctcat

SEQ ID NO: 87021 - DNA, 530 bp, Homo Sapiens
gtgaatgggccagagaagagctgccagacaagattgactacataatcattaggcccagaacacagtgaaaatgcagcatcccttgttcaaaaaaattattaagaatttcaagacacggcagcagagcattaaaccaagagtggggtccttctgaacatggggtcctatgtgatggcacaggtcacaaaaccatggagccaaccagctctgtgcccagaccttctccagcaccttccagataaaagcttaactaagagctacatactttccaaaggcaccattgcttcttcactgggtgacatttgcaaaataattgcccataatgccaccatctaggacaatgagatcctttcagaattttctccaagcttgtatgtgtatatggatgtgtgtttgtgtatgtgtctctttgacacaggtggattgttcttaacaattgttgtactattgtgtcacttaaaattatagcaggagtatttctctgtattaataaatagtatttaagaataaaatttaaatatttaaaaaaa

SEQ ID NO: 87022 - DNA, 715 bp, Homo Sapiens
gcactcccgaaggtggacctggaaacagttcccaaggtgagcatagtagcatccccggaggcgagcctggaagcacccccggaagtgagtctggaagcactgccagaggtgagcgtggaagcagccccagaggggagcctggaagcacctcccaaggggagcgcagaagtagcccccaaggagagtgtgaaagggtcacccaaggagagcatggaggcatctcctgaggcgatggtgaaagcatcccccaagacatcccttgaagcaagcatggaagcatctcccaaggcaaaagcgagagacgctccaaagaaatcagaaatggacaaacaggccttaatccctattgccaagaagcgtctatcatcatacactgagtgttataaatggtcatcatctcctgaaaatgcttgtggtctgccgtctcccatcagcactaacaggcaaatccaaaagaactgccctccatcaccattaccacttatttcaaaacagtcaccacagacttcttttccttataaaataatgcctattcaacacaccctgtctgtgcaaagtgcatcaagtactgtcaaaaagaaaaaagaaacagtttctaaaaccactaacagatgtgaggctttgagccaaaggcatatgatctatgaagagtctggtaataagagtactgcaggtattatgacatccgaggcggcaacaaaaattttgacagaat

SEQ ID NO: 87023 - DNA, 934 bp, Homo Sapiens
  misc_feature (41)..(75): n is a, c, g, or t
acgaccgagcgcagcgagtatgtgagcgaggaagcggccgnnnnnnnnnnnnnnnnnnnnnnnnnnnnnnnnnnncagtcgacggtaccggacatatgcccgggaattcggccattacggccgggaagaacaaaacacattgaacatccttccagaaagtctttgagggaggacctatacccataatagaattatggcactcatttctgacagtgatcaagaaatcagttatttccttactgttggaaggacattgtaaagtatgtggttatatgcagtgaaactgcagaaaatactcctggttgaggagttttcactttactacagtgatataaaaaccagcagtttttacactaaattttttaaagaaatattagacaaaaatatagaattaaaacctttggttccaaaatgggaaaggttccacgatacataaatcatttctcatttgctttaaaaaatttaaaagtgtaaaaattatgagagactttattcgttaacaatgggggtaaagagctatatacatgaaaatgagtcttataaaattaagtgaagtgcaaataaaagcactgctactataagacattctggaatggttgtttaataagggtattatccatttgatctatagcaatgtgattttatttttaaaaagaaaagcagtgtgttttcttttttggttgttttcttttgcttaagcacttcatcaattgctttattctgtatctgcgaagtaatctgcaatctcttttgttctttttaaaatttgatttgttataaaattgccaaatagaagtgtttcagatacatagtttgtacctgtatttttattttattgcctcatgttcttgtaagtcattcttaattgaccaatgattgtagaccttgcttgagtattttttctaataaaacaaagcaaatcacatttaaaaaa

SEQ ID NO: 87024 - DNA, 844 bp, Homo Sapiens
ggccatgaaatccaccacccccctcctttttcagagcatttcatgaagttcacatttcaaataatacattttgaaaaacatttatcttgtctaattgaagctcaaagagatagagtcaatgacttttcaaagtcaggtagcagatagtttaaaagctgcaagtactgataagtgtgagccattagttaattcgcatttataaagaagtggtctgtcacttttggcaaatgtcttgacatctgttgctctacagttgtcaactagaaaattaggcatagagtttcacattattataagcatgttttcacacaaaaacatgtacattgatgtttattgcaattttatgtgtaataaccaaaaacaacccagattttcttcattgggtaaatgattaaacaaaccatagtacattcataccgtgagtgctactcagcaataaaaaagaacaaactatgggtacaggcagcaacttataattccagagaattatgctgaatgaaaaaggccaatttaaaaaggttttgtaccaaaagattccatttatataacgttcttgaagtgacataattatagaaatggagaacagattagtggtggctgtgttaaggagggggtgaggatgggagagaattgggcgtggctgtgagaaacatgagggatccttgtgatgatggaaatgttctatatcacagctatcgatgtcagtatcccagttgtgatattgtgctatagttttgcaagatgttaccactgggggaaattgggtgaagggcacatggaatctctgtattatttcaactgcatgtaaatctacaattatctcaaaataaaaataaaagttaaa

SEQ ID NO: 87025 - DNA, 578 bp, Homo Sapiens
cttattctgtctctaccgacatttctcttctaagagaagtagtaaaaccagctgcagtgttatcaaagggtgaaatagtggtgaaaaataacccaaatgaatctgtaactgctaatgccgctaccaattctccttcatgtacaagagagttatcttggacaccaatgggttatgttgttcgacagacattatctacagaactgtcagcagcccctaaaaatgttacttctatgataaacttaaagaccattgcttcatcagcagatcctaaaaatgttagtataccatcttctgaagctttatcttcggatccttcctacaacaaagaaaaacacattattcatcctacccaaaagtctaaagcatcacaaggtagtgaccttgaacaaaatgaagcctcaagaaagaataacaaaaagaaagaaaaatctacatcaaaatatgaagtcctgacagttcaagagcctccaatgattgaagatgccgaggaatttcccaacctggcagttgcatctgaaagaagagacagaatatagacaccgaaatttcaatctaagcagcagccacaggataatttt

SEQ ID NO: 87026 - DNA, 982 bp, Homo Sapiens
  misc_feature (66)..(66): n is a, c, g, or t
  misc_feature (224)..(224): n is a, c, g, or t
  misc_feature (703)..(703): n is a, c, g, or t
  misc_feature (947)..(947): n is a, c, g, or t
  misc_feature (964)..(964): n is a, c, g, or t
ggaccggtccggaattcccgggatatcgtcgacccacgcgtccgcggacgcgtgggggaactatantcatctgagataaaatcagctagaggttcacatcatttgtccatttacgctgagaatagtttgaaatcagatggttaccataagcgaacagacaggaaatccagaatcattgcaaaaaatgtatctacctccaaacctgagtttgaatttaccacacntggacttttcctgaactgcaaggtgcagagaacaatatgtcagagatacagaagcaacccaagtggggacctgtccactctgtctctaccgaaatttcctcttctaagagaagtagtaaaaccagctgcagtgttaatcaaagggtgaaatagtggggaaaaataacccaaaggaatctggaactgctaatgccgctaccaattctccttcatgtacaagagcagatcctaaaaatgttagtataccatcttctgaagctttatcttcggatccttcctacaacaaagaaaaacacattattcatcctacccaaaagtctaaagcatcacaaggtagtgaccttgaacaaaatgaagcctcaagaaagaataagaaaaagaaagaaaaatctacatcaaaatatgaagtcctgacagttcaagagcctccaaggattgaagatgccgaggaatttcccaacctggcagttgcatctganagaagagacagaatagagacaccgaaatttcaatctaagcagcagccacaggataattttaaaaataatgtaaagaagagccagccttcagtgcagttgggactttggggggcatgctgacagccctggagaagagcagcactctcagcatgcaaagcagtcctccaaaacagtggtagtctccagttggagcagtgccagtccttttcaaggaatgggcattccagggaaaagaagccgcccncatgagtccaaatgaangaccccgcacaatccctc

SEQ ID NO: 87027 - DNA, 977 bp, Homo Sapiens
aaaattggtgggtattacactcagtatgtaaatgcctggtcttcacagagagacacttatcattaatcagaccatcagttatgtaacaagagaaccaataccaacatttctcctgtggagcacagtgataagcacattttttatggatgtgtttaggatagaaaggggtgggtagaaaggagaggaggcagggaggtgaatgtattatgtacaaagagaaatgacagagaccatcccctcctttagctctttgctgtttctttctctttgttttccgcatcctcaggatatgcatgccatgtcagtctctcttcataaaatgctatcacaatttgtggacatttcacattagcttcttttgcaagaaccaggtcagcttcatctgtgtctttccatttcattaggaacattaaatcaccacaggaatctgttgccccaatgatcttttctggttccagtcctctctcaaagccccgagcgatatcattgctctgctctctcttttttttagatttgatgtcatcggcactgtttgagaaattggatttcctcttgttactttctgacttctccctgggtttattattttcaccctccttcatctccttatacttattcataaattcagaaattagctcagggcaatccaacgttttctcaggttcccaagtattgtgctcctcagaaaagcctttccacttcagtagatattccacttgtcccttaaccacgcgcctgtctagcaccttctccacaacatactcctcctcatcctctgaagaagaactgtcagctgtccgcttggttttctttcccatgtcgcacaccgttccacctgaaagactaaggccaccaggtccccgggattgagagtgatcactcacgctaacgtctgccctgttcctgtatggtgaggccgcaccacaagccaccaccgccgccgccttctgcgcaacgccaaccgcccgccaaaaccc

SEQ ID NO: 87028 - DNA, 817 bp, Homo Sapiens
cagtcgacggtaccggacatatgcccgggaattcggccattacggccgggggacatactagttttagggattttcagatgggaagctgcatttttaggagtgcccatcgttaagagatcttgcaggaagagatcgtattagatattatatttatttcatttaagataattttcaaagttaattttctaaataagataattctcatttgtgtttgtcttttaaaaggccaataaaatatctttcagtatcattgtaataattttttagagtttaatttgtaaagcttagcaaataaaatcttgtactatgaatagcttcttgctttatgactttaaggaattaactgtgtaaagaaaacatatcctgaactgagatatgcaaaatactcattttcaagttatggaaatgtgtttgtggcatataggactgtggggtctgtgtgtgtagtgagagtgtgtagccactattataactggaatttaatttacattcataaactactatatttcccatcttgcaaatcattttatgtctcatctgtttttcctttcggttatatctttggttttgaataccaacatttaaaatgatggtattttatcttttaaacttaaaaattatttaatacagctatatggaccttataaaattgatttcttatttattattagacattactactaaaaggtacatctaactattcagggacatttttccatttccaaaaaataaaatttattatgctttataacctcttctgtattttctaattttttcattgtctttgataaataaaacagttttgttttgctaatat

SEQ ID NO: 87029 - DNA, 1064 bp, Homo Sapiens
  misc_feature (146)..(166): n is a, c, g, or t
  misc_feature (286)..(305): n is a, c, g, or t
tttggagggggaggctggattttcttttcacttaactgcaggttatatccctgctcggcaccaattttaagtgtacgttggagagaagagacctgaataaaggatgccaactgtgattccagacctttacaaactgctggtaagannnnnnnnnnnnnnnnnnnnnaaattagcaaatctgttgttaaattacttaaagaaaatttaacaatggcataggcaccttgtcaactaaatgattttcataaacaccaaaaagtagttaaaacttttgtatacataaccnnnnnnnnnnnnnnnnnnnnctgtacatttacagtatttgctgctgttcattccccaaaatacaattaggacataattggctattaaaaattaataaaagttaagtaaaaaactttgctatggaatgtagtgttacccacttttgcattaaattcaccttcataaatcaaaacatcatgactctcattcttaaattaaatgacccaaaattagaagttccaaaaaagttctgagaacaattatggtttaaaacaacaaacctaaatttttaaaatggacggcaatttttcctgtttcctcctttggcattcttgtattgggacaagcaaatacgccaatgctgaattatctgttaaacataagggccacaattactacaaaattatttcttctaaattccaaatatacccattatgaacagtcacctaattagagaaaactgtacgtattaattttagtttaattcttcacaatatgctcggtctaataattgacatttgctaccttaaagtgtaaaattttaaacaaaattccaatttcctataagtttcagaacaggcatttggctatactcagcaaaactctaaatgttttaaagttgctttccttccattcagcaggcagttcacaaagcctcttcggatggggacagatcctacgaaatgctcttgaaagcactccactgtaacataatactgtatgcctttctgtactccatttcctactatccccggccgtaatggccgaattcccgggcatatgtccggtaccgtcgactg

SEQ ID NO: 87030 - DNA, 258 bp, Homo Sapiens
atctgtatgatgatttggcctggagttgtagacatcacagatcaaaagtggcctggtgctagctgtttgggtatatccctgaaaagggcaactttgtcatttcctagagtaacctagagagagatttccaagcatttccccatgaacagaagtggtaaatgctgatttattgtgccatatgtgtgtttgggaggaggggagatagcgtcttgttttgaaaaaagttctcatttcataaaataaactgcaccccactcc

SEQ ID NO: 87031 - DNA, 730 bp, Homo Sapiens
atacagatgcgctcagtaaccagtgcgcctcgccatggatgcacaggccacccacctggccaggctggaggagtcctgtcgtgcggccatgatgtgtgccatggccaacgccaacaaagcgcaggcagctgtgcaggctgggcgtcagcgctgtgagcgtcagcgtgaacagaaggccaaccttgcggagatccagcaccagagcacgagtgacctactgactgaaaacccccaggtcgcccaacaccctatggctccctaccgggtcctgccctattgctggaagggcatgactccagagcagcaagctgccatcaggaaagagcaggaagtacaacgctctaagaagcaagcacaccgtcaggctgagaaaacactggatactgaatggaaaagccagaccatgagctcagcccaggcagtgctggagctagaagagcaggagagggaattgtgtgctgtatttcaaaggggtctaggatccttcaaccagcagctggctaatgagcaaaaagcccagcaggattacctgaattcagtaatctacaccaatcaacctacagcccagtatcaccagcagtttaacaccagcagccgctaagttcaggatgtctatctctctctcccttctcctccatcaagctcacaggtggttaggagtcaaagagaaaaatgctgcatactcccaccttctaacctaggtaataaagttctgcactcaaaatcaaaa

SEQ ID NO: 87032 - DNA, 502 bp, Homo Sapiens
agcaagcacaccgtcaggctgagaaaacactggatactgaatggaaaagccagaccatgagctcagcccaggcagtgctggagctagaagagcaggagagggaattgtgtgctgtatttcaaaggggtctaggatccttcaaccagcagctggctaatgagcaaaaagcccagtgagttctaggtggtagtggtggagataaatgccaagggagggagaggagggatggtgaggaaccatggagagagggaaagcatgtcagctgagacctctggacttctttcacaggcaggattacctgaattcagtaatctacaccaatcaacctacagcccagtatcaccagcagtttaacaccagcagccgctaagttcaggatgtctatctctctctcccatctcctccatcaagctcacaggcaggtaggagtcaaagagaaaaatgctgcatactcccaccttctaacctaggtaataaagttctgcactcaaaatcaagtcca

SEQ ID NO: 87033 - DNA, 637 bp, Homo Sapiens
tttttgggggggaaggagactactgacactccatatttattgcttacattacaagaattaaacaaaaaaagcagactagaaaatcactttctgtaatttcacaatcaccaatttgcaacagaaactgaagcataatatttatgctaacaaatatgttggatgaattatcacctcagcacataactgcagatggatactcctggattttcacttaatccattactcaatgatgaacactataaaatgaaaggtgacatacttatgaactaaaatcacaagaagaaactctccaagatcaatcttaaatgagctcctattccaataagccataaagagcagtaaaaggcaatattcatttaacagtacaagaatctcgatgacaagaaatcaggtatttatattcctctagagacatttcttctccacctaacaaaggcacttgacatgtactgaaatggacagttaattcaggtactgccctgggcaactgttaccttgctaaaattagatgaagtggggattaagttcaaattagttctcccaaataagcctgaaacacacatgaatagatcataagttctctatttttggcagatgatataaccaagaagaaaagctaatgttgggacccatgctg

SEQ ID NO: 87034 - DNA, 604 bp, Homo Sapiens
acaggaggactgcgaaaggatgctgcgatgaagaagcagcgagacctggaggacaaggttctgaacgggcttcagacaagctgtttctcctagaccagtgtgagaagatcggcgctgcaagcaatgccagaggcgcacctccaacgtgggcgagagcaacctgtggcccctgaacaagttcctgcctggctcccggttgcttgtgtaaaactcaaagtttggctcttcgtttcctggggaaagtttttatcttttacatgtttgggggtgattgtgaaactgcgtatttttacctcagagaaaaaaatcattgtttaggtttggtgctttcattagattgcttgttaagcccttattgaattcactcctgctttcctcccacccccaattatttcctatactagtttctgatggcagtgaaggtgtctgaatggtcctgagggctagaacctgctgcacaggggctgggaatgggatccagcttcattatggctgctggggtgctgctgacccagccctgctgctgctccatgactttgtgtacaaaacttttttcatctgtaatgaatagtggcaataataaatattttttaagcgccaaaaa

SEQ ID NO: 87035 - DNA, 1035 bp, Homo Sapiens
cctccctttttttctgtatagggagagaagacatattgactctgactggacaccctgattcctccaaatatatataccactgtgtattaatctttctctcagtgttttataggagtactaacatttattgctctgtcaataatgaaaggctcgatgtaatatagctgtaatttactttccatatgaatacagtggctaggttcataaaagagaattgtgtgagtctgggattaccacatctaaaacattattctttaatgggataatacaattcattgagcagctaccacttaaaaaacttgcaggacagttagagcctgcatttctagttaagatggatcttgtaaatttaaaattggattaacattggagtgctggggtggctgcaataatttgggggctaactccatttggtttccaagatctcacttctgcattatctttatggctctttaaaccagccacctagccaatcaagggcaattcccatctcatccatcactcaggtctttgtaaagggtgcagccaagctctgcagacttttgcaggattgtctagcctgagtaccgggctacttcttaaatgccgtcactcctgctgagataaatgcgtctttaaaaatagtctctgtggcaggtcactgggggacaatgtacagcattctggccatccacttctttttcacttcatgttctaccccaagagactcccgatgtcggctgtggagggttaaagggatgaggctttcctttgtttagcaaatctgttcacagttcttgatgatgtattttatgatgcccagcttggaaatagttgctttccatagtctcaactgtattgtgtcatctcctgatgctgatttttgatcttttgttttattaaaaataattagtgaaagaggtgtgcctatctgtgaagtttgtagtacatcatcctgaggtcatgtaacaagtaaaccccaacccagcgttccctcctacgttgtgttagttcattaaaactaaataataaaaataactgtaagaaaaccttaaa

SEQ ID NO: 87036 - DNA, 447 bp, Homo Sapiens
  misc_feature (200)..(200): n is a, c, g, or t
gcacgaggctgcagtgcatcactgaaggaaaaaagaactgagcattggcaaaaagctgaggatgacaagcttaggggatgaaaggctgccttttcccccccttctgagcgtttctgacagctcccagctgggagaaaccaacatgacgaaaagacaaagaatactggaaaagagagagggtgggcagagccacaaacccntcatcctcccagtggttcctcttgagtttgatttgacaagatgccttcccacccaggtaaccccgtgggaacgtgccagtacctcaccgcacgacctcactgagtcctcacaacaaatccaggctgcagatttttttccccacttggagatgacaaattgaaatgcaggaaggttaaagagtttgcctgaggttgcttagataataaaagaatctggattagaacccagacctacccagctaaaaaa

SEQ ID NO: 87037 - DNA, 743 bp, Homo Sapiens
taagggaacatccttctgtatcagaaattcccatgtttccatatccagatttcttcaccaaggcagataaagagttggcaaaaatcattgaccatcactggcaggaagagctaaagatccgagaaaaagaagatgcaatatgcaaggcccaagaacttaaagataaaaagttagcagagaaaaatcactttcaagaagttatgaagaaaagagaagagaaactacataagcaaaccaagccctatgaacttccttataggaaggaagtaatttaattagaaaagaaaatgtcacctcccaaaattgaggactacatggcagaaatacataggatgaaaaataccaagatagctacatagtaagagaactttcttgtcattaaatggaggtattgtttagaaagaatttgttttcctgatacaagctgtttgtttaatagttatttcttagttctaaattaatgaccaacttttaatcacacttgaatgaagtgatttcactagtcaaaaatttccaagactacatctagtatttttctcaattgacctttatctcatgattgtacagcatacttgataactgattctcagaacattgatattcatcaaacaaacagtttgatggaaattcattacaaattaattaatgggtcaccagataagaattatttcttgaaaacagaatgaacataaactaacaatcctgtaattactattattcaaataaaaacagtatggcatctt

SEQ ID NO: 87038 - DNA, 837 bp, Homo Sapiens
ttttttttgaaaggcaagacttagaattttactaggaggtcaatcatagatccatgaagataaacatctagaagttgctaacaaaataaagtggcaaggaatacaagacgaaagaaaactaatggaaacaaaaggacaaagggtaaggaaagaaggataagcagaaaggaatgctaaaaagactcacgttctttaatgaaaataaattgattgtaattttttaatattataatctgagaaatataagacaaatactctgcctctgctctgtcaaagtgcaaatgaagtcatggagacagggtttaaaataagacaataaaataagtgaaatcacattgctgacaaagaagctatccatctctgctagcctgggacgacagaaaagcctcttcataaaggaactgcagcgttgcctatcttgattaaacaaattgtggtccttcaattataaaattcatattttagagaaaaaccaattaagatctatgagctaaactgcaaaattctgacttatggcaaactgttccctaggatacaatttttaaaaccttttttttctaccactgaaaatgtacagaaatatgatttgatcacagaaagggcaataaaaatggcatcacaccaagaaactcactagatttctaagtcatcctgcaggaggcagggaacgctgctgctaacaccgaggatggatgccaagggtgagccatggaaacatgtcatgggtgaacggttccgaatgtgtcaaagaaaccctttaacccctgtctagatatgtcgagaacaatttatttacaacgctttagatcaattaaaagatataatcttgtctcagtt

SEQ ID NO: 87039 - DNA, 934 bp, Homo Sapiens
  misc_feature (457)..(474): n is a, c, g, or t
  misc_feature (670)..(820): n is a, c, g, or t
ttttagtgttataaaaaaaatttactgagatgatggactaaggcatttacgagcattatctgacacctgggagagggtgaggctcatataagcgcacaataaattacaagtattattattgtccccttctgtggtcaaccacctgttgtttctgccattacatcatcttctggagaaagctccctagttttccttgagaacaccttttcctccattgcatataatccctgtgaaactacctattactggccaaggaatggtagcaggacctcagatagcccaacagatacttgctcctcagaatctgaaccttgagcagagtcatccaaaactgaggggaaaacacggagaaattaacaacaacaaaacggctgtagttcatgtgtcgccatcaaagaactcagacaagattggccattagctcctgtagctagttcctgtcttttccaaaacctgnnnnnnnnnnnnnnnnnnggtagatgctgtggctctcttatggcctccaataaacataagtgaggcagagttggtttctattgtttgcaaccaacgaacttaatggattctgtattagaaagaactggtatatttctttaagcaagactaggactctatggggctcaacaactctgtaatcgcctttccactcccctggacaaaataaatatannnnnnnnnnnnnnnnnnnnnnnnnnnnnnnnnnnnnnnnnnnnnnnnnnnnnnnnnnnnnnnnnnnnnnnnnnnnnnnnnnnnnnnnnnnnnnnnnnnnnnnnnnnnnnnnnnnnnnnnnnnnnnnnnnnnnnnnnnnnnnnnnnnnnnncagctaggattgcggtcatgtgaatgcttggctggaattgaaggaccagctttcaagattggcacactcccatggctattggtgggagcctcccctcgtgccgattaacaccgg

SEQ ID NO: 87040 - DNA, 732 bp, Homo Sapiens
aaggctggagtttgtttatggctcacatgctccccatgcttttctccatctgcctttctatgctgtgtattctctgcaaactcatcaccaccgtgtgttttagtccaccagtctccctgggacaggaattggtattttcctcaaagccgatccttgtctttcatatgtctcctgatgtgaagtcattctgacttttcttcctaccctataggtgtttttattctcaaccttgtgtgccgagacttggggctaaaagactcagtgctggctgggctcaaggcagtgttccccctcctatatgtccggcgaattgagggtgaagtgaatgagatcctgttctgtcagctgcaccctgagcaaaaacttgccacaccagagctcctagaaacagcccaggctttggagcggaccctgaggaagcctgggaggggttgggatgacacgtatgtcttgtcagatatgctcaagacggtgaaaattgtgtgactgcttaggccaagcagccctcctgcctagactgaccttggactcccagcctgccagagaatgaagaaatacaacgcacagtacttttgaagcttcgtatttttcttggtttcacactcagctacatgtgacctccagcttggtgaggttgcctgaagattagggaaaataaaaatgtccttcccatcttgtcctcttcagtaccacttgggttggtttgtctttgcttcctaaacacgtccttga

SEQ ID NO: 87041 - DNA, 1015 bp, Homo Sapiens
  misc_feature (64)..(80): n is a, c, g, or t
ctagggctggagagggatctggagggacacacaggagacacctggcataaccaaaaaatgattnnnnnnnnnnnnnnnnngaaacatctatggagcatgggacacggggagtggaggcagctaaaagccatctcatctttcaccgtattcaacaagcccattataacaagtctttcacgctcaaccattcaaacaatcccaacaatcccagcctaagaatttcctggcatttgatgaaaatggctgtgggttttgctatctttaagctccctgggaagcaggatataagcccagggctggcaggctctttctagctacctgctcttgcacatagagtttgcctcatggttgcaagaaggctgccatagctccagatggcacatagacattccaggcagcaggaaaaaggaaggagcacttaaccgaaggaggtcagggagttggttagtctccacctgaagaagagagccatgaaccagcttcagttgactaacgggctcctgtgagtgcatctttggacttttctggaggttgaaatctagatgtggtatgtgtcttaaagcagccaccaactcctcccattaccttccaagtgagcccaactacacgatggagcctcttccctgcccttggatctgggctgagcctctgacttgcgttgaccaacagaatgcagtgaaagtgatgccgatactaccctccctgccctagacttgggatacctggcagctatattcttccattcctcaggacttgcaaaaacgggtctcagcatgccttcccagagccatgaggtgtttctttgcccattcattgatctgagaagtgagtgtaaggagtttaaatcaacctctgttctgtgctagttaaggtaataaagttgctgcagtccagggggtaggtacctgtggacggctctgcgaataggacagttgcatttcttgggaatcaagtgcatccctaggctggcagtgcagcagaaatactgaataaaatgtgacaaatctccctgaaa

SEQ ID NO: 87042 - DNA, 404 bp, Homo Sapiens
aatgcccaaaacaatagggcatgattcaaaattatcctccgagctgcctctctggttctttctgggaaaaacacttaggcaagttgagaaaggaaggaaagttggaataatggcaaaactgttagaagcattcctctttcctccattgcctgtcctcccaacattatacccaaactagttacaaagccattctgtaaagagatcgggtacctacaatttcttcagatttacacaatatccactagaatttaatttctacaagggcagggatctttgttgagtggcacatggtagacactcaataaatacttattgaatagatgggttaagtgaaagtggcagggatcaactagagtgtcctgtgcttagggtcttttaataaagatggaaagaatgatgttaaa

SEQ ID NO: 87043 - DNA, 608 bp, Homo Sapiens
aatgagtaaaatgttcatttaataactttctaactgtatacagtatatgcttgatagttcaaaattctccaaatgtagatattatacaataattattttaaattattaaatgagtatttaatccttttaaattacattttgaaaatttaatggcaattacacacaaattttaatttaaaataatattaaggacttaatctgatttacagaaatgaaatgcaatgaagagattaagggctaacctccattactataaaattctctggctaccatctagcacaggagcaactggattgctttcagcagtcttgaagcactaaaatatcttaaaattcatatggagaaatagtatgtatctctacattaaatttagatttgatatttattctctgacagatcagacccagaatattaatttttatgtaattgaaccaaaaacatttagcaatccttcatttagtaatcttttgtataaatataaaaatctctgataagtgaaatgttttttcaaattatacttctatttttcacagctttataggtaattataattttcaaactttaaatatttcatgtgatttgatatatcggtacagaaagagtaagat

SEQ ID NO: 87044 - DNA, 629 bp, Homo Sapiens
  misc_feature (287)..(299): n is a, c, g, or t
attcggcacgaggtgggacaaaatatcagtaccagtataacaaaagttagtaatttagaaaggaggaacatgaagtaatatttttattccactttttcttctgcctttgtttttatgaagaactctggtttgtagatacaacgataggccaagagctgaggaagaactccatatgctatgtttaatgctaaaaaaaggatttttgcttcttcagggactctgtagacataagcagttctagcatgaagagatgcaccaatgtgagaaaactgagcctgttgcatttnnnnnnnnnnnnnttgagtaagcatgaaacgtgttcagttggatgcatgatgagttctgaatggttcattcaggctacgtttctgtgccctcaaaaccagtctcacctgcaggcaaaataccttcaaacaatccagagtctttaatgtcagagtctttcattaaatttagtccttgattaaatttagggccattcttgatatgactgttcaaataaagtagatattatttagtgtagttttatcatgccagttgtgttttttaaccatcaagtgccccttaccgaacattagtggctcaatctaatagaaaaatctgaataaaatctcaaatttttttctaaa

SEQ ID NO: 87045 - DNA, 1180 bp, Homo Sapiens
  misc_feature (1071)..(1105): n is a, c, g, or t
acttataattattttatatgtcaaacaatattgagatggatgatcaagtttattcacaaatgattttgaatatatttctttaaacaaactgtttctcaagaatttccattttccttcaaaaaaaatttacacaataccatatagctcacacatacagtgcagagcaagaatgtacatattcttaagtactcacgtatgagaagagagtgaaatgggacaaaatatcagtaccagtataacaaaagttagtaatttagaaaggaggaacatgaagtaatatttttattccactttttcttctgcctttgtttttatgaagaactctggtttgtagatacaacgataggccaagagctgaggaagaactccatatgctatgtttaatgctaaaaaaaggatttttgcttcttcagggactctgtagacataagcagttctagcatgaagagatgcaccaatgtgagaaaactgagcctgagccagacctccagcatgtatcaatgtgatgtcaggcatccaggaacatccaggaaccactaagccatacagtgcagtcacaaagtaaggaacagaatagaacatatatgccagcatctgaattttaggataagcagcaggatcctttagatagggctcttgaaattgcgtatataatcggcagagctcagatgggcaatccaaagcaatcaaacctctgaacaggcaaatccagttgccaggaggagacacacaaccaacattaaatcaaatggtcttctcagcaggtctttcgcttgggcttcttgaataacctttgaggggtaattataattttctgatggctgattatagattctgaaaccagcccagacaggaagacaagtatatggtatgcttaagaaaaaagcagggcaaattcgtgttccatacttccctacaatgtttcctggcacaaaaacaacaacactcataataatagatccaacccaatataggccaatggttctataagtttcctcccatgctatggctgccaccatccccggccgtaatggccgaattcccgggcatatgtccggtaccgtcgactgnnnnnnnnnnnnnnnnnnnnnnnnnnnnnnnnnnncggccgcttcctcgctcactgacttcgctgcgctcgtcgttcgtaacgccgagtagcgccctatagtgatctata

SEQ ID NO: 87046 - DNA, 658 bp, Homo Sapiens
caaatattcattgagcaccccattaggtgctaagcattttcagtacttcagaaagtcctctctatgtccccatgagatagatgatattgtactattttcttcattgtatatttgagaaaaataagcctcagtaaagttaaatgacaacctcaagtgtacatagctggttgatgatgaagcctggtttctaattgaggtctgtcctgtctttggagtgagacataatattcctgcaaagaactaagcagccttacaaaggcccctgagaggttaacataaggtctgtacctagacactcctgtttctgcctgtaggccaggccttagttacggtgagttccagggcaggcaggtaggcaggagtgattatatgactgagaataaaggacagcagtgagagaagttgtattcaatgcagcacagtaaccagggacttgtaatagcttctttcacctcattcttttgtggcttggatttcctaggaacacggaagtggagctgcagatgcaaaccaggcagaaggccatgaatcgaatttcattgcccacttggcctcccagaagcacaccaggaaaaacacacaggtttctatcactcctcagctaaacttaggtgaaggcagcatgtagaaaaagatgttccaaacgtagtgctttaaa

SEQ ID NO: 87047 - DNA, 768 bp, Homo Sapiens
cttagcagaagcccagtcttcgaaggaagcattgttaattatagctaatgattatgtgcagtcagcctgacatctagccacagtaaactcctgttttcttgggatccaaacaccctgtgttttaccattagttttgttagtattgttaactttctttacacaagtaaaccatttccactaccaaaggtttagaaactatggatgaacaaaatgaatctccctgttcattttgagcctacatagacatagagaccaaatatgtcaaaaccttattcaaataaactctcttcagagtgaatacccagggtcaggacagactcagcaaaccttctatatcacttaattctgcccagtgaaaatcagtgaccctgaggcactgccagattctaaagtgcctttgggatcatcagagactgtctataaataatgcaaaatcttgatctggatgtcagtgtatcaaatcttatcaaatccattgacaaatcagtggtgctatactggaaatggctactcctttggatgaaggacctcatttcccagttgcttggaacaaaagagaatttacatattgctgtaagaagggagagacggcagttgttggtagacacacagataagggtgcccaagaataattctgtctggattaaaggtcccagggaagtgacggtgccatttctgtaccaagaggtgaatataatttgcatgttgagtgcataattaagaacaaacgactcgactccacaaattaaaccgtcctgttttctcttc

SEQ ID NO: 87048 - DNA, 371 bp, Homo Sapiens
  misc_feature (51)..(52): n is a, c, g, or t
  misc_feature (67)..(67): n is a, c, g, or t
caggttgtggtgcaagtgaatgacagtgggcagccttcccagtccaccacnnactctgggcacgtgnttgtcaatgaaagtgtttataatgcaactgcggattgactcccagatagctagaagtttgcacatccccactcacccaggatatagatggtgacccaagctatgaaattagcaaacagagactcagtattgtcattggcgtggttgctggcattatgacggtgattctaatcatcttaattgtagtgatggcaaggtactgcaggtcccaaaaatagaaaatggctatgaagccggcaaaaaagatcacgaagacttttttacaccccaacagcatgacaaatctaaaaagcctaaaaaggaca

SEQ ID NO: 87049 - DNA, 1529 bp, Homo Sapiens
ttttcaaatgatggttatacaatttaatgacctgaaattcaaacaaggagataacaggagtttttaatagctgaaatggtggttgacacatatatttatcatgtcaccagagcactgtttctcacttcccttgtgtctatgggctcacaattattaattcaatcaagctacgaacctactcattagaaaactggacacagaagcacaagtttacaatttcaggagagtcaccaaataatacccccaaaatcttaaggattcctaaattaaagcctgttactgtagtatcttgtatcatgaggaaatctaatattcttgggctctctttctatgtaagcatgagtgtggcaactaagtactagttttttctcttcatcaatacattgatgtcctcctatttagaaatgcattttttgagagcttgtcacaaagcctttattaacaggctgttaaggaaagttgcagtgtttcctttaaaaaggtgctttattgactttaaatttataaaaggttaacatgtcttgatctagttgaaattatgatttatatcaacatgataattatgtgtacagttcatattccactcatactgtacaccagtaaaagcaaatattcaaagggttctctaagtttcaagattaaaaaccataatgccttgactgaatatcatgattacaaaacaggtattaagaactgtgaaggtatatgctcacaacatatcccttctcccattctcactttattccaaaatctcatttatttcactgacaatttgtttatactttcaaaaatccttttataatttttatagatataactcaaaatgactgcttgggtctttaaaaaattaacagattaaaaagcaatacaagtgcacttaacactgatcaaagtctgaaatgccaaaaagcaaaataaaaatcctctgaaatatatatgtatttttaaatatagaaaaactccaccaatagtagaaacaaagtatgtttaatggttgctttggaaaggggaagtgggcacctcatgccagggagatttaaaaatgagacttttcaagcaagcactgcctatagcatagtctcatattttgaaaatttaaacctaattttaattatatataaagaactattttaaaaaatcacacccacaagtaaaaaactggtaatctgtttacaaagtgcagcgtcagtacagcaaactcatctcaacaaaagattatgtgtggtttctcgggctttaaaactcccctggtttccatttaaatgctttaacattgagtcatcctgcatacatgaaaagcctgtgtaatgaagcctgggtcctttaacacctgctattaattaattccaacataagtgagtatgagacctgggaagtaaattgtcatcatctgattgatgaggtacagattatctgaataaaatttctgacctggttatgagtcagtaatcccaacacaaactactgctttgtaatgaattctgtatgctttgcatggtcttcaatactgaaagattttttctcctttt

SEQ ID NO: 87050 - DNA, 942 bp, Homo Sapiens
caagaggctggaacggtccggaattcccgggatatcgtcgacccacgcgtccggacctgagcatggcggccaccaggtgcctgcgctggggcctgagccgagccggagtctggctgctcccaccgcccgcacggtgcccacgccgggcgctgcacaagcagaaagacggcactgagttcaagagcatctacagcctggacaagctctaccccgaatctcagggctcggacaccgcctggagggtcccgaatggtgcaaagcaagccgacagtgacatccctctagatcgcttgacaatatcttattgtcggagtagtggtcctggggggcagaatgtgaacaaagtgaattccaaggcagaagtcaggttccatttggcaactgccgagtggatcgcggagcccgtgcggcagaagatagccatcacgcataaaaacaagatcaacaggttaggagagttgatcctcacctctgagagcagccgctatcagttccggaatctggcagattgcctgcagaaaattcgagacatgatcactgaggccagccagacaccgaaggagccaacaaaagaagatgttaaacttcatagaatcaggatagaaaacatgaatcgggaaaggctgagacaaaagagaattcattctgctgtaaagacaagcaggagggtcgacatggactgaaatcaccctctgcagctgggagggctcttctgggcgtccgggcagctgcagctgagaggactttcacaccataaggagatttctgtttttctttttggctgttaatgcttgtctataacattggagccatcacaagaatgttcatttggaatgaaggctgcaggcactggttgcagacgtctttataggcagtcaccatgttgtcaaaccttaataatgcacctcatgtattagtcacaataaaaatcagaactcaaaa

SEQ ID NO: 87051 - DNA, 607 bp, Homo Sapiens
atacttatctggttacccagtggtacagttcatataggaagggcaggataaatgcttgattctttgctcttgtacactaagtttttaagataatgcattagttgtctgtcaaggaaggtgagtggtgaagggtttttacatatatacaagaattcatgggctgggattacaggtgtgagccaccaaagccggccccaccttgctttttaaaacagctctgttgaggtgtaactgacaggtaatgaactgcacatacgtgaagtgaccgatgcatttgcctgtgaagctgtcgccagaacatgtccatcaccaccaacagcagtttcacaccccggtctaaaccgtccctcgtgtcctccatgttcaggcaaccactggtctgctccctctcactaaaggttaatttatatattctagaattttatctgagtggaatcgcagagcaagtactgtggggggaggtgcttctactcagcataattattttggcattcacccattttgtgtacatcaataatccacattttgtattgcatggatataccacagtttatttatttacctgttgaccgatatttcgattatttccaatttcctaaataaaaac

SEQ ID NO: 87052 - DNA, 711 bp, Homo Sapiens
gttcttacacactgtgaacagagaaggatatatttggcacccaggtgatccatttgaatgtctcctaataattccctgcccaatttttatggtaaatggacacatgcaatttccacagtctgagaagggcacggggaccatgggctcagaaacaatcctcagggataaaggtctgttactcgaccagccaggtcactgagaacggcagacatggtggctgagactgagggtactctagaatggatagtagatgaagaagaccatgagcatcagttgtggcttcaaagccagctgcagtcatgcaggccatacaccgtcccactaccctgcctcatgttcacctccctagggaaaagggccaagccaaaccctggagaagttattcccaaatgaggggagcatcctgtgtgaagcaagcccatctgaggcctgcaaggcatgggctgtagtcgatgctgtggtcgttccacagcccagcccaatggcggaggtcatcattccactgcctgccaaaggtgttgcttgatgatggcacataactaagtctctctccaaatatcagtcaaggggtcaatgaagggtggagagtaccaacacctggactccagcctctacttgcaacatctctatagaatcttcccaaccatagagctccctcagggactgactgagacgtctgattcaactgtcataaaacaactccactttcct

SEQ ID NO: 87053 - DNA, 482 bp, Homo Sapiens
cgtttgttttagtgactaattcaggatgaaagtttttttgttcttgtatttaacccttttttataagcagctgaagacaccatatttaacactatatctcagtgatagggaaatagctgcattgatcttacatgagcataatcatccttatacttcatgaggggattattagtacaatccccattttactgtgtttgagttaaaaaccaaacatccctgtaatttaatttgaagattctttaacagattgcagcaaagttcattataaaactgttatggtgtcttcaaagacttgataaaataacactgagagagaattggtccatttgtatgctgtatttctattacttgccaaaaggaatggggttaagattaaacttgtttccattctcttcacatggatatacatccccatgtttaactgacacactgggggctcagttgtgtgctgtaatgtcttattaaagaagatattaaagaaa

SEQ ID NO: 87054 - DNA, 732 bp, Homo Sapiens
  misc_feature (68)..(90): n is a, c, g, or t
ggcctgcctgtgttctatttactctctcttctagtgtctgtaaccattagctattgctgcacttaaannnnnnnnnnnnnnnnnnnnnnnatcataaaaaacctgtggtatccaaaaacattaatttctcatgcagctgccgggttcctctgatctcagctaggttgcctggggtgacttgggtgtctcttatcctcttcctgagggctggccctggcatgtctgctaacatcccattggtcaagacaagtcacatgctcaaccccgggtatgggaaattatgctttgccctcggtgggaggacatcacaaagttagactgcaaagggcacacaggtcaggagaacggagaagggcatttaaactaaggatgctgcttttttacagtcttcagagacgatgaacctcctgtcacaggaggtatgcaaacagagaggtgtaggcttggtggtaaaaagggatcaagcgtggatatagagttgggataaattaatgattcccaaatatcaatcatttctataacatagtcataattttccccatgaacgtttattcatttaatatagttccttaaatcatctaagtattctttttttataagctatatttttattattaaatgacttgcttgtaaactacacttgagaccactactttatctagaaaactgtatcatttgccataaagagaaggctttattactctaaaaataaaatgaaattaaaatgttaaa

SEQ ID NO: 87055 - DNA, 514 bp, Homo Sapiens
gctgaagccgccgcaaggcctaggggcgggcccgcgtgcacgcgcttggctctttcctgtgtgtgccgccgccgacaggcagaagtgagccctcacctgtgcgcgggaggcggacgcgctgctcacctgtctttttggcttctcccatgactgccggccagtttcctgcacttgtttctctcgctttattgctggacggtgggagaagggcaagtgcaagacggaatcgagggcacctctgggtgttctgtacctcttttcttcttgcaccttgggaagtggaggacgtgggatggaagaagggcctggacctccctccttcctcctccccaccttctcctaaggagcttgccctgcagtaagccccaactttcccttcctcttttccctctatcagagtcgtcgcccacccccctttcccaccgctcccctacccccgccttcctgccaagccgagggcgacggtgatccccagcttagtaagaaaagtaaataggccgggcgcggtagctca

SEQ ID NO: 87056 - DNA, 1125 bp, Homo Sapiens
  misc_feature (31)..(31): n is a, c, g, or t
  misc_feature (904)..(904): n is a, c, g, or t
aaacagttaagtttggaagactctgcagacnacgttgagggggagttaccaagcccaggcagcaaaaacatcctggcacattcctggggagtcctcagctgccagcatctgattagaaccatatctctcgccgggagtggccgcgcggctccgaagctcccggccggcggctatttaagcgaggcccgccgcatccgctgcgctgtagcctggaggctccgggcgcggggaagtcatgctcgcttcacggaggcaatagctagccggtgtctgtgggaggttatgtttatttgagagttctccatcgggatcgcctggtgtcaccaagtgtccactggtactgaggtttgctgcctgccttcttgccatgtctaacgaagtagaaacaagtgcaaccaatggtcagcccgaccaacaggccgcaccaaaagcaccctcaaagaaggaaaaaaagaaaggccctgaaaagacagatgaatatctcttagcaaggttcaaaggcgatggtgtaaaatataaggccaagctgattggcattgatgatgtgccagatgcaagaggggataaaatgagccaagactctatgatgaaactaaagggaatggcggcagctggtcggtctcagggacaacacaaacaaaggatctgggtcaacatttccctttctgggataaaaataattgatgagaaaactggggtaatagagcatgaacatccagtaaataagatttctttcattgcccgtgatgtgacagacaaccgggcatttggttacgtgtgtggaggagaaggccagcatcagttttttgccataaaaaaccgggcaacaggctgaaccattagttgttgatcttaaagacctttttcaagttatctataatgtaaagaaaaaggaagaagaaanagaaaaagatagaggaagccagcaaagcagttggagaatgggagtgaagcccctaatgattctagatgaccaaaactaacaaactgaaatcgggtgtgacagatggattgtttgggactgtctaccctctgactaatagtcaacagaagcaagatatctgtattgatctaacctgaatcgaccatcagaatcttagaaaatcatcctaaaacgctccctct

SEQ ID NO: 87057 - DNA, 899 bp, Homo Sapiens
  misc_feature (420)..(420): n is a, c, g, or t
  misc_feature (517)..(545): n is a, c, g, or t
  misc_feature (727)..(727): n is a, c, g, or t
cggtccaaggtagcgaggcctgggtggcgattccggcacgaggcaacaggccgcaccaaaagcaccctcaaagaaggaaaaaaagaaaggccctgaaaagacagatgaatatctcttagcaaggttcaaaggcgatggtgtaaaatataaggccaagctgattggcattgatgatgtgccagatgcaagaggggataaaatgagccaagactctatgatgaaactaaagggaatggcggcagctggtcggtctcagggacaacacaaacaaaggatctgggtcaacatttccctttctgggataaaaataattgatgagaaaactggggtaatagagcatgaacatccagtaaataagatttctttcattgcccgtgatgtgacagacaaccgggcatttggttacgtgtgtggaggagnaaggccagcaatcagttttttgcccataaaaaccgggcaacaggctgaaccattagttgttgatcttaaagacctttttcaagttatctataatgtnnnnnnnnnnnnnnnnnnnnnnnnnnnnntagaggaagccagcaaagcagttgagaatgggagtgaggccctaatgattctagatgaccaaactaacaaactgaaatcgggtgttgaccagatggatttgtttggggacatgtctacacctcctgacctaaatagtccaacagaaagcaaagatatccctgttagtggatctaaactctgnaaatcgacaccaatccagaaattctttaaagaagaaaatccatttctttaacaaaacgccattcaccctcctgtttctcctttccttcgaccaaacgcccttcaaggaatcctttccttggccctgaaaaaatgcccttttttcttgccaaatcctccaaacttttcctttt

SEQ ID NO: 87058 - DNA, 640 bp, Homo Sapiens
  misc_feature (122)..(142): n is a, c, g, or t
  misc_feature (596)..(597): n is a, c, g, or t
aagaagcctttccctcgctcctcctgcctggtgaagactgccctgggtatcccagaactgaacctgcagcagccagcacagctgaccttggggcgataagcagccagggaaaggctttcttnnnnnnnnnnnnnnnnnnnnnccaataactcagtaagcagattaaacaaaggtagagacggagccctccacccctctcacacactcatcctcacacccagatataccacaccccacaaatgttgcttatgtttccttggtcattctgtccatcctcctgtctgtccaaagccaaggacactgctctactctaaattttttgtcccgaagcccccaaatactgcaaccctgacccaatgcacgaagccaccccaaaatacagcagaggacaccaggactttcattttccctcagtatggcccatcctttgggtatgccaactccatgtccaccaagcactgcatgtaggacagggcacagtttggaggccttggtccagccactgccccagacccaccttggctctctcctcactaacacccgagaagcccagacttcccagtgtttagcaacagattaaactctaagccaacaanncaacagaaccagggtggagtgagtggaaagcaaatgaaatgtt

SEQ ID NO: 87059 - DNA, 915 bp, Homo Sapiens
  misc_feature (817)..(832): n is a, c, g, or t
agtgatctagaggagctgtgctccatggtgccaggtcttcatggcagattcccctggactgcactgggagaaattggtgagtgaagaccgtgggcaacactagcatccagctgcggcagggggaagtgactgtggagcttgtggcagaacagaagaaccagactcttcgagagggagaaaaaatgcagttgcctgctggtgagtaccataaggtgtatacgacatcacctagcccttctggctacatgtacgtctatgtcaacactacagagcttgcactggagcaagacctggcatatctgcaagaattaaaggaaaaggtggagaatggaagtgaaacagggcctctacccccagagctgcagcctctgttggaaggggaagtaaaagggggccctgagccaacacctctggttcagacctttcttagacgccaacaaaggctccaggagattgaacgccggcgaaatactcctttccatgagcgattcttccgcttcttgttgcgaaagctctatgtctttcgccgcagcttcctgatgacttgtatctcacttcgaaatctgatattaggccgtccttccctggagcagctggcccaggaggtgacttatgcaaacttgagaccctttgaggcagttggagaactgaatccctcaaacacggattcttcacattctaatcctcctgagtcaaatcctgatcctgtccactcagagttctgaagggggccagatgttgggtgcagatgtagaagcaaccagtcacagacccattttatgcaatggacatttatttgaaaaaaattctcaaaagnnnnnnnnnnnnnnnngggggggcggggttctaaagctgtttttaactccgagattacaacttagaggaaccaaggaaataaagcaaataagatttaac

SEQ ID NO: 87060 - DNA, 604 bp, Homo Sapiens
  misc_feature (1)..(1): n is a, c, g, or t
  misc_feature (518)..(518): n is a, c, g, or t
  misc_feature (590)..(590): n is a, c, g, or t
naatgtcgtgaaataagcacttgaaaataacaacttcaacattgctgtgatttgctctgtgaggcttatatgggtgggcttccatatgaatatgggctctgaggtccccaagaagctgaatcttccagtggttttcaagatagcagcaagcaacctcctgcctgaatatgtctagacaggcagacctgtttgaaacgagtatgaccagggaggactgttaggctacttctgtggccttcttagtttttgtcgatggaaataaagtctcaagtgctactaagcattgggaaagtaacagcatttaaataccaatgtcgagtcagaacccttcatggccggcccgaatgggttataaatgtggcttgaccctgacttatgggaccagttattaatttaaccagttacttcagaagaggttactacaatgcagtgttggtttggacgtctagtgaaatatattttactgtgagacttctgcctgcccagcctaaaatcaaagtgccacttttgagctctcncaagccccactcacgaatgtgctcccactgtccatctaacttctagaacaacttccacatcacttcctttanaaagtgtcaatcag

SEQ ID NO: 87061 - DNA, 348 bp, Homo Sapiens
aactttctactgtaattatttcagttccccgaagttgtatctcaaatgttggggaaatgctgccttgactattttactttggaaggttttactagatatcagtttagtagattaatgacgttgttaatctgtctgctcaaaagacaccagcaagggggtatactttgctgaactgataaattattctattaaggactaacccagtacttggcaaaattaggaataacttttcccctccttctttactaataaattttccaagttgcatactgttgttgcaagtttctgtaatttttttctgtatacctttctattgtctgaatttaaataaaaatgtttctaataaaa

SEQ ID NO: 87062 - DNA, 655 bp, Homo Sapiens
  misc_feature (175)..(175): n is a, c, g, or t
cccattttacttaaatatcaaattcaaatcttcagtgttctacttattttgggtgttaattccattatacaccgtcttatttcattaatttccatattgtgccagacaagatataaaaataattcaactccagtcaataataccatctgtcttcatgtgaccaggatgaaaagcnttctgctcccaacatggaagccacagtaagaaaagaatctgtctaatccactagcaacaagcagttaatactgtagttcggaataatactaggacattaacattctaattccagcaaacaaggactgactcttttcaaaattcaactttggttaagaaatgctgagtacaactttggttaagaaacactgaggtcatggataaagagtcacagatgccgatgccaagggtacagacactgacaaaagtagccccaataagatggcaggatttgggggtggtgttctttccttcaataaccaaatgcgttcagaaggttcaggagcatgatttagtttttcccaaaaatgtcatgacatcctgctgaatcttctcccactaggcctgctggggaccagagaaaccgatcgcatttttcaagcatgctttgtatcaagccctctgccttttctcagcaatcctcaggatatcgcaggttctg

SEQ ID NO: 87063 - DNA, 696 bp, Homo Sapiens
  misc_feature (91)..(91): n is a, c, g, or t
  misc_feature (610)..(610): n is a, c, g, or t
gaaatcaaacacctcaaaaagaaaatagaagaggacagatttgccttcacagggacagccggtgtagccggagacgtggtcgccaccaaanattgtggagctatcaaaaaagaaccggctgttgatggcagaatcagagggtgcaaaaaccagggtgaagcagctgaccaatcgcatccaggagctggagcgggaactgcagacagccctgaccaggctgtcagccaagggggccaccgacgcaggagccaagccaccgagggcccagatgggagacagagcattgctggagaccccagaggtgaaggccctgcaggacaggctggtggccaccaacttgaagatgagtgacctccgaaaccagatccagtctgtgaagcaggagctgcggatggcacagaaggttttggccagagaggttggggaagacatcaacgttcagcagctcctatcctcgccagggacctggaggggtcgggctcaacaaattcttgttttgcagagcaaggtgagtgagtcatcagacttctcctggcctgaacaaaggatttaaaacaccccagaaagagctgccctgacccccttagagacctaagcacacagtacccanaaaaggcctttaggtctcacagtgcactcgtgcggggttgttgttttaccttctcgcccaacagcctgattttaatttgttattta

SEQ ID NO: 87064 - DNA, 401 bp, Homo Sapiens
tgtcaccttgatttaaatgaatgcagctttcttggtgtcttgatgtttgtgaatttctgtggagtttgatactgatccttttgctgcttgtttttccagagtccccttatcacttgacgtgctgttatattatgtttgatttattacagataccccatcagcctgagtctcttaaaggcctttatacacatatgtctacacatagggatttggatgatctcgggatcccacatcctcgctgtcccctgtccccccgcaacatcccccaccaatacctttctgaagttttctagtccctcctttttgtttgtgctccttaaagcccagccccatgcctgactttggttcccagtgagcattgtacatttgtggatattaaatctttggcaaagtaaaaaaaa

SEQ ID NO: 87065 - DNA, 662 bp, Homo Sapiens
gcacgaggccgcgtaagaaaactacactgaataggaatggcagcttttaaaagtgggggaactacagtatagggtataggataaacgatgggacaaaactggaaaagacaacaaaagctttggaatgttccacaacttccttttattcgagttcctccctccatctatgacacttccttactaaaggccctcaaccaagggcaacagcgctacttttacagcattatgaggatttacaactccaggccccagtgggaggccctgcagacccgctacattcacagccttcagcaccaacagctgcttggctatattactcaacgggaagccttgtcttatgctcttgtacttagagattcaaccaagagagcctcagccaaggtagctcctcaaagaaccattccccggaaaacttcagccatgacaagaagatgtccatcagtactacctgtatctgtggttctacctagggcccaaagtaaaaggcgccaagtgctcaggaactgagacttggcagcattttcagaaacaggaagtttgcccatgtatccctggtatctagtgggtgctttgtgcatatttgttgaatgacagtgaataatttctaatataaaccccagacctaaaaataatctctgattcatataaattttgccagcaag

SEQ ID NO: 87066 - DNA, 606 bp, Homo Sapiens
  misc_feature (379)..(422): n is a, c, g, or t
aattcaagtttagaaacaggtaatcagctatttgatcttaaaaggcaatgaattgttgggatatcagtgaactatgttgtatacttttgaatttttacattttataaatggaattgaaagttggataactgctttttttaaattttccaacagaagtaacaccacagttgctttgtttctttttatagcttacctgaggttcagttcttctttgtgaacctgtgagtactccacagtttactgggggaaaaggcttcagtaaagcagaggctagaattacagtatttatacatagcaacttttcataaagtagaaaaattcaaaggaagctgtctcaatttgagaataccagctgggcacggtggctcacgcctgtaannnnnnnnnnnnnnnnnnnnnnnnnnnnnnnnnnnnnnnnnnnntggatatgtagggtttaaagcatttaagaaaatattttccgtcaccaaattgtcttccagaaaagtattgccaatctgatacaggaagaatggcatatcaacggagtttcagtttgtatttcctggagtgtatttgagctgatgttcctctgcatgttaataaacaagtgttttcgttcttgtg

SEQ ID NO: 87067 - DNA, 758 bp, Homo Sapiens
  misc_feature (26)..(26): n is a, c, g, or t
  misc_feature (54)..(54): n is a, c, g, or t
caggattccttagaatccatgaaatntgagattccaacacagtcatgcggtttntgaatgagcagaagaacttgcacagtgaaatatctggcaaacgagacaaatcagaggaagtacaaaaaattgctgaactttgcgccaattcaattaaggattatgagctccagctggcctcatacacctcaggactggaaactctgctgaacatacctatcaagaggaccatgattcagtccccttctggggtgattctgcaagaggctgcagatgttcatgctcggtacattgaactacttacaagatctggagactattacaggttcttaagtgagatgctgaagagtttggaagatctgaagctgaaaaataccaagatcgaagttttggaagaggagctcagactggcccgagatgccaactcggaaaactgtaataagaacaaattcctggatcagaacctgcagaaataccaggcagagtgttcccagttcaaagcgaagcttgcgagcctggaggagctgaagagacaggctgagctggatgggaagtcggctaagcaaaatctagacaagtgctacggccaaataaaagaactcaatgatgaagatggccaccgctgttatccgctggaggaccacctgtgctgtcactcctgccacgtgaagaggctggagaagagaccctcatctacagccctgcgaccagcaccacttctagccagagccacttgcagacatcacggcaggggatgaggaccc

SEQ ID NO: 87068 - DNA, 251 bp, Homo Sapiens
acataattttattgctctttattttaacaaaaacttttttcactgatttgtagactccatccattaacgtatgaaagtgaaatccatctctcaggaagatacagttatggttgaatgtatctgatgctgagagtacagcataattaagaaaaatccttgcatgtcatttggttcttgttgcagtcttctgtgttcacccctcagaaagcaaaagaatccatctgactttcaataaataccaaattattaaa

SEQ ID NO: 87069 - DNA, 474 bp, Homo Sapiens
cctttttttaaactttattccactctgtacctatttttgaggaccttgaaaatcttaatctctccagaagggatactgcattggttcttctccatcagctggcttagacatcaaacatcttaaatgatacactgttttaatatctaaaaatctgtcattctacttaattaacttagtcataaggacaaagccttagtatatttttgccacatacatgttatgtataaattttactgttgaataatacaagtattcattgctgactgaattcttaaaactttgggaatagaaaaaacacatttattaatggatgctaaagtgattcctgagaaaaataatgtgtatggctaatatggaaaacctttggtaatgtgatttgggtataagaatactaaaaccagagtacagggtgtgaatcatgtaccaggagggattttatttttaaatatctttattgaggtataattgaaatac

SEQ ID NO: 87070 - DNA, 658 bp, Homo Sapiens
tcaggaatttaataaaagtacagtgatgagcatgcctaaatccatgttctctagaatgtaagcttggtgaaagaagggactttgttcattgctagtctacaaaactaggacatttcataacgcaatgtaggtgctcagtactttttgctaaataactaaaagtatgtaaaggtaaaaggtttgaaatttttaagcgcattttttaaaacttaaaatgtatttggaggagaaatcctgcaagtaatcttaataaaatcatttcaagtaaatatttgaaatgtagaacaataagcattatgatgatctgaaataacattaatttgattgtaaccctattggggttagttcccaccctttgttccatcttgagcagagatgtgctgcatttcttaacgtttggtctctatacattataccatctgctgaagtttagctttgtgtgtgtgtatatgtacccatgtgtgcactttaaatatcagtacaaactgataaacaatgtttctggttaatgttgcaaaaatggaacactgtattttacataattgattttctactcctgccctgtgaattaaggcagagttttactgtaatatttgcaagtatccaaaatggttactgatgacaaatactttttaataaatgtcaaaatcacaataaa

SEQ ID NO: 87071 - DNA, 637 bp, Homo Sapiens
aaagacctgagaagcagaggcaattctaaggtggctatgcaggaaggaaccaaagaggggttgcccccaccatccaggccctggagagactagccatggacatacctggggacaagagttctacccaccccagtttagaactgcaggagctccctgctgcctccaggccaaagctagagcttttgcctgttgtgtgggacctgcactgccctttccagcctgacatcccatgatgcccctctacttcactgttgacatccagttaggccaggccctgtcaacaccacactgtgctcagctctccagcctcaggacaacctctttttttcccttcttcaaatcctcccacccttcaatgtctccttgtgactccttcttatgggaggtcgacccagactgccactgcccctgtcactgcacccagcttggcatttaccatccatcctgctcaaccttgtgcctgtctgttcacattggcctggaggcctagggcaggttgtgacatggagcaaacttttggtagtttgggatcttctctcccacccacacttatctcccccagggccactccaaagtctatacacaggggtggtctcttcaataaagaagtgttgattagacttgaatttctccacct

SEQ ID NO: 87072 - DNA, 1386 bp, Homo Sapiens
  misc_feature (912)..(963): n is a, c, g, or t
cagtcgacggtaccggacatatgcccgggaattcggccattacggccgggacccaaagatgcagacaatctctttgaacatgaattgggggctctcaatatggctgcattactacgaaaagaagaaagagcaagtcttcttagtaatcttggcccatgttgtaaggcgttgtgcttcagacgggattctgcaattcgaaagcagcttgttaaaaatgagaagggcaccataaaacaagcttacacgagtgctccaatggtagacaatgaattacttcgattgagtcttcggttatttaagcggaagactacttgccatgctccaggacatgaaaagactgaagataataaactttcacagtccagtatccaacaggaactgtgtgtgtcttaagaccgaagttcaatatggtatttttggtactgtcttccttcagcagtgcatattcttttgcaaagttctttggtttgacaagcattagtgacaaaggcagaaaagatttatcagccatgctaaaagagtgaagaattttgatctttagagacactagttttggccaacttaagattttacgttaatttttacatagtatttgacactcatgcaaaataatgtgaaaacatctagatttagtagtttattctgcgcctttgtgttaaaactgaagattctggaaaatggttgtcactgctcttccagcctatgaatatttctgtgaaatggaaccatggcatttatgtccggatcatccatacaggaaccaacaattttattcaaaacacaatgtgttcatcaaagtaattgctcacatcgtgcagtcactatgttgtacagaccacgtgaaagggaatgctggtctagctggcgtggtatgtttataggcgaatttcagcagaaggaagccaaaatagnnnnnnnnnnnnnnnnnnnnnnnnnnnnnnnnnnnnnnnnnnnnnnnnnnnnttaatatgtgtgcattgttacaatgtatgttggatgtcttttgaccctaaatgctttttttgttatcagagattgtgtactatttttatttttaataaatgtatcttccctttccttgttttaaatttactttgctcttcgttaatcttattcctgatgatctaaaacataagtcatcaacattacatgtttcatgcttcagatattttactgcttgtgtccttattgttggacagctttaaacagagttgatgtacttcaaatatagctcattgatacttaaggcatcttcttggaatgtggcttttgaagaaaaaaattactcaaagcaaatcaagagttaacaaacctaacgtaacctgaggtttaatattctactatcatattttttagagctataacttttgattatattaaactgcc

SEQ ID NO: 87073 - DNA, 910 bp, Homo Sapiens
ctcctgttctgcattcctgcccacacccccacccctccatttccttctgctctggaggcatcctccttcattggacaccacacagtttatttcacttctgacttcaaggttgtgaattcttcccatggcttaagtcctgggatacttctgcagtgaaaggaggtcttgtacctcttcctcagagtcagaagttctgagtacctttgccctattctgaaaagggctaggggctcctgctcccagctgccctcttcctttggcttccaattcagttccctctgccccgcatcctgcagacaggcgctcccgcagggggcccttgtggacctgcactggagtctgttgccttcactgagctgcctgtgctggccttgcatggtgcctgtagggggatttgctttgctgtgccattggggtacagctgctgctcttactctagaccaaaaagtcgggttgagtgactggtggcagggccacagatagagacagcggggagggtggctgaccctggcggccctggactgagcgtctggaggagtcgtggaggctctttcccttctttctcctctgagagctcgttcttcaggctcttccagcttgtcatgtcgagtgcctggccactgctcagggttggaggctcagtccctttgccctgtctgttccagctctggagctaactcagggatccctgatcagggttacataggtttggtaaaatgagtgctggaaattaactttctcccagtagtcttaggtcatgctcagtgaacttaaactttatccagatatggttttccttcagcctttctattccctttctagccagtgaaagacccgctgccctttgacctcagcccctccaagcccccaagtttaaaacgccaccccctgccaccagaaaaaacagaaa

SEQ ID NO: 87074 - DNA, 688 bp, Homo Sapiens
  misc_feature (591)..(621): n is a, c, g, or t
tgagaaaccatccaaatgtgacgaatgtgggaaagcatatacacagtcctcacacctcagtgaacacaggaggattcacaccggagagaaaccctaccaatgtgaagaatgtgggaaggtattcagaacttgctcaagcctttctaaccataagagaactcattctgaagaaaaaccctacacgtgtgaagaatgtggcaacatctttaagcagttatcagacctcactaagcataagaaaacccatactggagagaagccctacaaatgtgacgaatgtggaaaaaactttacccagtcctccaaccttattgtacataagagaattcatactggagagaaaccctacaagtgtgaagaatgtggcagagtcttcatgtggttctcagacattaccaaacataagaaaacccatactggagagaaaccctacaaatgtgacgaatgtggaaaaaactttacccagtcctcaaaccttattgtacataagagaattcatactggagagaaaccctacaagtgtgaaaagtgtggcaaagccttcacccagttctcacacctgactgtacatgaaagcattcatacttgagnnnnnnnnnnnnnnnnnnnnnnnnnnnnnnngccgttagtatctgctcgcatcccactttacatcagagttcagacttaataaagttatcataaatgt

SEQ ID NO: 87075 - DNA, 419 bp, Homo Sapiens
caagtgaaacaatttattaaaattaataaatttagaaagttggccagatacataaacactcatctacataccagtcacaaaatataagaaaatataatggttaaatcccaaaaagagtattttaatgaagcatgaacagtttatgttaaattttatctcaaagataatgcaattatattcaagaaaattttgaaaaggaaaaatgaagagggacttgtcctatgaattactagaaaacgtaatatcaaagcagattggtatttttaaaggaagagacaaaaagatcaaagcaacagatgagtctaaagaaaagatgcatgtacacttgagaatttacgatattaaggaggtatttctagtcagttgggagagaaatgatttcaacaaatgatttcaggaaaaaatggctgcctagtcat

SEQ ID NO: 87076 - DNA, 579 bp, Homo Sapiens
  misc_feature (120)..(378): n is a, c, g, or t
tatttttaaaaaagaaaaagaaccgacttctgaatcgcagctccactcatgactaatacctcattatttcagctgtctgcacctaattccccacttgcacggcagtgtagacaataaccnnnnnnnnnnnnnnnnnnnnnnnnnnnnnnnnnnnnnnnnnnnnnnnnnnnnnnnnnnnnnnnnnnnnnnnnnnnnnnnnnnnnnnnnnnnnnnnnnnnnnnnnnnnnnnnnnnnnnnnnnnnnnnnnnnnnnnnnnnnnnnnnnnnnnnnnnnnnnnnnnnnnnnnnnnnnnnnnnnnnnnnnnnnnnnnnnnnnnnnnnnnnnnnnnnnnnnnnnnnnnnnnnnnnnnnnnnnnnnnnnnnnnnnnnnnnnnnnnnnctagtcatggtccccaagaggggcttggagacccacttagcaggtgaaagcaatggcagccttccttatttgattatgcacctaagaataaatggtatttgggcatgtattcccaatatgtgtatatttatttataaatatatacagatactattatctgtatgttagtaataaagcttaaattattccattttaaaaaaa

SEQ ID NO: 87077 - DNA, 655 bp, Homo Sapiens
  misc_feature (24)..(24): n is a, c, g, or t
  misc_feature (57)..(57): n is a, c, g, or t
gaagacaatgaaacttgcatacantgttggtgagaatgcaaaatggtacaaccactntgggaaacagtttgggagtttcttataaagttaaatatatacttgccacatgactcaccaatctcactcctgtgtatttacccaagagacatgaaaacttatgtttacaaaacctttatatgaatctgtatagcagctttatttataatctcaaatgtctggaaacaaacattcttccattggtgaatgaataaacaaatcgtggaacatctttcaatgaaatattactcagcaataaaaaaggaatggagtatcgataggcacaacaaggaagaatttaaaatgcattgtgctaagagaaataagccagcctccaaggggtacatacaaattataaaattacattcatagaccttctaaaaatggcaaaactgtaggtctggagaacatcattggttgctagggaatggtgttggggaaaagaattgaccacaaagatatagcatgaggaaatttttgggagtgatgtatctgttttgtttcttagttgtggtgtgattacataactgtatgcatttatcaaaactcatataactgtacaccaaaagagtagattttactgtttataaattgaaaataaagtttttaaaagaaatat

SEQ ID NO: 87078 - DNA, 684 bp, Homo Sapiens
ctaggatgcaggaactatgaaaaatgatgacaaggcatttaaaagggtatgatcagttaaatagaagtagggtctgcaaattgtgcttaaggggaaataagcaaaagaaaggaaaatagtagaacctttcatactaattagaaatgtagttacctaccagagggcaattttgctccataccaggaagcagtaaatagcagtaaatgatcacctaggcacttctttcctgtgaatttggtgagcattcttccagaaaagaagactaaaagcaaacaacaacaacaacaaaaaataccacacctcagtaaccttgtatgctgcattatataataatgatagtaaaattatattgtttggagtgtactgtgtctgtttgcaaatatacatgcacattaaacttttttgtttttataatgtcttaatagcaattatgagtttatttttgttaagattaatttttctattgtgatgtttatatttattggcaatttgtatgcaacttttatattttgcttgtcggttttaaggtattttatttttatagatatttctagctttcctcattctttgtaatagcagcaaagattaagatggagtgttaatataccaaccaaactacgaattccataaactctagagtttggatttttaccaataaaccattagacactattttgtaggctt

SEQ ID NO: 87079 - DNA, 701 bp, Homo Sapiens
gctgatggagcaggtcatttataaaagccagctgccttttaaataagttattacagtacattgccagggtgagcccatgttgacctgagaagattagcacatccatcaaaggctggtgaaaagatttagtattgacatgtttctctctaagaacagttggcttcacattcagcccctgccctgagacaaatgcattattttcatcagccctgggtgcttatttttctaagctctcattttattactggagtcacaatttgtgtgtaggtgttgccgacaaaaatgataattaactttcccttgaggtgacacataactaaaatttcaaatctttagtatttctccctttcattttaaattcatatgcctaactataaaataactgtgactgagatacaagtacaaaccaaagcctggaattgcagcaggtgctgaggcatttgaaagtgaaatgtttctcttcgcaaaggactcttataccctcccctaaagaaatcaccatgccggtctcacccctactggctttgttacctaaggcttcacctctcagtgcttctggttccttccttatccttaaaatgagtgttaataattctctcgtggggtcattgtgcggaccacattgagtagtgcctgtaaaacagtgctggctacacggtaaatactcaataaatgttgacacgttcaaaacacaaaccaat

SEQ ID NO: 87080 - DNA, 589 bp, Homo Sapiens
gaacgaggagaaaaagaaaaaattcttcctagggctgagctgacatctccctcccaatggctttctacctctagctctcacagaaaagcaatactcaggccccagttgtgtctgacgtgttgcagtttgaagaatattccatccctaatggctggtaaatggtggggcctgcattcagctgcttgactctgggagagggtgcaggccttgcccgtttcacacatgacctgaccagctctgttttccttgttggagccacttcagaattgtaaaggcatctctcatttctctagagtcttctttctccaggacaaacactccgagtttttcagctgttccttgcaggacaggattctgggttctcaccatgtggaatctcttctctgtttgcttcttaccagctcaacaacgcccctctgaaagtaggactcttggaaatgaaccttgttgggagtaaagctgaaccttcacctctcctttccaggattctactccattcatacggcctcacactgaattaatgtttctagcagccacattactttgttacccaattgatctagtagtaaagtcttcccatctcttcatg

SEQ ID NO: 87081 - DNA, 568 bp, Homo Sapiens
tcgaaggaggagtttgtaatacacaccatatttcctcctaatggaatgaatctgtacaaaaacaatcacagtgaaagcagtagtaaccgaagctacagagacagtggtattccagactcagatcactcacactcatgatgctgaaggactcacagcagacttgtgttttgggttttttaaacctaagggaggtgatggtaggaaccctgttctactgcaaaacactggaaaaagagactgaaaaaaagcaatgtactgtacatttgccatataatttatatttaagaactttttattaaaagtttcaaatttcaggttactgctgcgattgatgtagtggagatgcctgaacacaattctatattttagtattttttagtaatttgtactgtattttccttgcaaatattggagttataaaccatttactttgtgttctactgagtaagatgacttgttgactgtgaaagtgaattttcttgctgtgtcgaacaatcaggactgcattcatatgagatccttgtagtataagcacaggccacttttcaccttggtattaataaaatgt

SEQ ID NO: 87082 - DNA, 601 bp, Homo Sapiens
gcacgagggagtaaagtatttatctgaaagaagtttctgggttaggagaagtaatgaatgtatccatttgtacatggtttacatgttgtggatgctttgtaaacattttcctgtatgtttaaattgtgtttcagcaggatgtaattgcccttgtgtgtagttaaaatgagtcatcatctggtcctttgtgaaatggaattcatggtattttctgtaacgttttcctgaagctgtttctggagagccacacatttaaatacagacagctttcctgatcatttgatttattgtgcacctgatttttggtctaaaaggaattattgccacaatatattttatttattctttagattttagccttgtaagttaaagtgctttacatgatgatgtgaaaagctgtttgtccctttactgggtttggggggttgttaaaagatagggaatgaagaatgcaaaatggtttatcgttcaaactgtccactctgatccaaccctgtactgatagtacttcccagtatgatattgtgatgtttcatacaatgcagtgaacataaccaacttgttacctaaataaagaattgataaaaacagtgaaaaaaaa

SEQ ID NO: 87083 - DNA, 1023 bp, Homo Sapiens
  misc_feature (495)..(668): n is a, c, g, or t
cgcacagcctggctgcttggagtcctcgcttctgctcatgcgtcttggccttacaaccgggagtctcggctccggcctgtgagctggtctatgactagatccccgctaccctttttcccccgacagcatgctgcctgctggccattggcccataggggcgtgtcacgcttgtggttcgtgggagctgacccgcgtggtttgccatcggcgacacagcccgacaaggtgggcacctaccagctggcctattggtcgccaagcaccatggcattccgttctacgtggctgcccccagctcttcatgtgacctccgtctggagaccggcaaggagatcattattgaagagcgaccgggccaggagctgaccgatgttaatggggtccggattgcagcacctgggattggagtttggaatcctgccttcgatgtcaccccccacgacctcatcactggtggcatcatcacagaactgggggtctttgcccctgaggagnnnnnnnnnnnnnnnnnnnnnnnnnnnnnnnnnnnnnnnnnnnnnnnnnnnnnnnnnnnnnnnnnnnnnnnnnnnnnnnnnnnnnnnnnnnnnnnnnnnnnnnnnnnnnnnnnnnnnnnnnnnnnnnnnnnnnnnnnnnnnnnnnnnnnnnnnnnnnnnnnnnnnnnnnnnnnntaaataaaattttgaagaggctagaaccccgcacttgtgccttgagcttactgacctcaacaccctggttccactaaaactttatttacaaaattatgctgccggtctgcaggatgtagtttaacaatttgattattttggatattaaaatattttttaagtcttgaaaatattgtttactattaccaaagtttttgaaccttcttaaattctgtaccagaggtgagtgccacaccctaacctagtctgagtttttatgtgtaaagatcataaaacgttgtaagttttctaaaacacataagctctcaataaacgttagcctcgtgccggcacgaggcctcgtgccgcctcgtgc

SEQ ID NO: 87084 - DNA, 1166 bp, Homo Sapiens
cggtggaaaaagcagctggtaccggtccggattcccgggtatcgtcgaccccgcgtccgggtttactaagtttgtgatgaaatacaatttgatgtccaaggataacctgattgtaccaattttagaagaggaagtacagaattcagtttctggggaaagtgaagcatgaagggaatcataggaaaaatgtactgatcatataattaacattatgtactgtatatatcattttagacacatcaatcatgtatccatattatagcttctttgtttagtataggtttttgtatgctgggtttgccttttaaaatgggaaatactttttaagttattcataagctgtatattcaccagtgtggcactcatggtttttaaataagattagtattatctgtttataatgcctgttaataaaagaatttacagtttggtaaaattgctgctaaacaatcattggatcacaatcctcatcagacaaacccatctgtaaaaaaaatgagggagagcttgaggtttcacacaagccatttactaaagaggtagaaatgttttctattggttttaccttgagtttagatatcctaaaaaattctgtagtacgtagttttgtcttacctgttaactttccccaattgagataaaagtgttttaaaattctgtttatagtttttgatatgcatatataattatgtgtatatctaaatacaaatgcaaatgaagcattagtaatacttaaataatttttactgtgctacataaagtataacatacttggaaaggatttaccgttctgcaacaacggactggtacatacagggatgatcacaatgggaaggcacataaataattttcccactggaaaactgccctgtcccacccccttctcatttccccttaacccttatctccaaactacttttagctgagaaagcttttcaccagactggagttagtggtgggcttataacctatttatatttggaattaattggcttacagaattataccctcttattaaccaatttaccttaccccttccagaaaaatggtattttccataagcccctctggctttaacctttgggttgggcaaaaatggtccctactttaaaaaaaggccccttaaaaaaagtttggacccctccccgggttaggaaaaatattta

SEQ ID NO: 87085 - DNA, 1003 bp, Homo Sapiens
gggagacgctggcactatggtcatggcggaggggacggcagtgctgaggcggaacaggccgggcaccaaggcgcaggatttctataattggcctgatgaatcctttgatgaaatggacagtacactagctgttcaacagtatattcaacagaacataagagcagattgctccaatattgacaaaattcttgaaccacctgaaggccaagatgaaggtgtgtggaagtatgaacatttaaggcagttctgccttgagctaaatggacttgctgtcaaacttcagagtgaatgccatccagatacttgcactcaaatgacagcaactgaacaatggatttttctttgtgcagctcataaaactccaaaagagtgtcctgctatagactatactagacacacacttgatggtgctgcatgtcttctgaatagcaataaatattttcccagcagggttagcataaaggaatcatctgtagcgaaactaggatcagtatgccgtaggatttacagaatattttcacatgcttattttcatcatcggcagatatttgatgaatatgaaaatgaaacatttttgtgtcatcggtttactaagtttgtgatgaaatacaatttgatgtccaaggataacctgattgtaccaattttagaagaggaagtacagaattcagtttctggggaaagtgaagcatgaagggaatcataggaaaaatgtactgatcatataattaacattatgtactgtatatatcattttagacacatcaatcatgtatccatattatagcttctttgtttagtataggtttttgtatgctgggtttgccttttaaaatgggaaatactttttaagttattcataagctgtatattcaccagtgtggcactcatggtttttaaataagattagtattatctgtttataatgcctgttaataaaagaattccagttgggtaaactggctgtcgacactcctcggatcacggcctcaccgacaaccca

SEQ ID NO: 87086 - DNA, 655 bp, Homo Sapiens
tgaagcaaggaaagcggctatagagattgcaagactggctgaaagagctcagcaaaagacgctaacaagtgctggtaaagacctacaagataattttctgacggccctggcaatgagagaagaagacaatcgcagtggaaaactgagttccgtgatctttattcgtgacagaaattctcatgggcaagagatatcaggatacatcgactatgcccacaggctaaagacggaagattttgaagtctactttactggaaaaaaaagacttcttccaaggcctacagatataagcttttacaactgggacgctgatattgctgttagtaattcaagtcccaactatcaagtgattgccgataatccagaaggcttacttttcagatacaaaagagacagaaaaattcttaatgtggacccaaaggcgcagccaggtgacaactctactagaatcactatcctgacagaactctacatacaagctgtcatttttgaccacatttccagaaggaagacttaagtaccaacatgttaatttcctaataatttgctaaatttaaataaattccgtagacagagcaaattagaataataaatgagccctgtagctggaaggcaaattagaacaataaagttaataaagaagttagaaagaaaa

SEQ ID NO: 87087 - DNA, 702 bp, Homo Sapiens
  misc_feature (13)..(13): n is a, c, g, or t
tgatcacgatggnaaaagaacctactctccagaaccatctctaggcaactatcaaaaagaagcagaagttcaagtggacaaatttatgtgaaaattcatttaacatataagctgaactctattatggggaatggatacaaaagcagagctcccatcttgactttcaattcctcatcagaagtactggcttctttagagagtagtaagcatggctgcctatgcttggagtcataagtgttatttggactataccctgagataagcttatagatcaagtttggctcccttgaaaagcatttctctcatgtgcgccctcagggcttccagcaggattgagtcaccctgacgatgaccggggagaagccgtgtgctcttcattattttcagctggaggacagagctcagtgcctgactgcctagggtctcatggactgtaggcagcctgccagtgaaggtcactggactctagcctacaacatgctgagctacagcccagaagccagacatgcctgtcttagctgacctgtttttggtccacttttgcccttccatgactaataaggaagatatgtgtgtatttcatacacacacaaggacctggattaaaaatccaaaaagtaattctcttctatgatttatttcaaactcatccatagataattcaagatttgtattcaaaataaacatagttttcacagttac

SEQ ID NO: 87088 - DNA, 664 bp, Homo Sapiens
ggggttgtttcggagcgggagctcttccgagacgcactgggggccggatgaatcctgcttatctgtgaaatgcagttaacacatcagctggacctatttcccgaatgcagggtaacccttctgttatttaaagatgtaaaaaatgcgggagacttgagaagaaaggccatggaaggcaccatcgatggatcactgataaatcctacagtgattgttgatccatttcagatacttgtggcagcaaacaaagcagttcacctctacaaactgggaaaaatgaagacaagaactctatctactgaaattattttcaacctttccccaaataacaatatttcagaggctttgaaaaaatttggtatctcagcaaatgacacttcaattctaattgtttacattgaagagggagaaaaacaaataaatcaagaatacctaatatctcaagtagaaggtcatcaggtttctctgaaaaatcttcctgaaataatgaatattacagaagtcaaaaagatatataaactctcttcacaagaagaaagtatcgggacattattggatgctatcatttgtagaatgtcaacaaaagatgttttatgaaatgtcagaaatattaacaaaaattctcagcattaaagaaaacattgattttcctttacctaactat

SEQ ID NO: 87089 - DNA, 581 bp, Homo Sapiens
ttttatttttttgtctggaggaatggggacaccaaaactcatttggcagcagaggtgaggtaaggccatttgtattgtctgttctgttagtagtcatacatgccacttatccctgccccagtccctgttaggagtgttatgtgggtatactgaacgtggaccttccccgaatccaaagaatccagatgctttgaataagatcatggaccttccgggttctacatcgccagatgttgttcatcttctatcttttgttttgcgaaaattggttttttatgtgtattggggttattctgtggaagaaataagctgtgggtcaagattaaagaactttaaacaacttctggcatgtggaataaacacgatctgaaggaacaaaattttcatttgactacatttttgatccaatttgcacccagtgtttaagttaatcacagtgcttggcagtttgtgttgctggatcaaggctttctcactgaaaaccatgtgcttcagaggttcataattcctctttcaccttccatttcacattagttaataaattatgagagaaaacattgtggatccaagttatgtttcag

SEQ ID NO: 87090 - DNA, 216 bp, Homo Sapiens
tgacgactgcgcccggcttttttaaacttttagattcatttaataggtaaattgcatgtcacgggtttgtagcttattctttcagaaactcttgcattatctgtagacgtggacgtaaatatccacctcatagggttttcataaaaaataattgagataatgtatgtaatgtttcacagtgctttgcagactatctaataaatagtagctattagt

SEQ ID NO: 87091 - DNA, 931 bp, Homo Sapiens
  misc_feature (877)..(877): n is a, c, g, or t
agctctcagtctggagcaggcacagttctccccgagccttgatacatggcagtatcggtgatattctgccaaaaactgaagaccggcagtgtaaagctttggattcagatgctgttgtggttgcagttttcagtggcttgcctgcggttgagaaaaggaggaaaatggtcaccttgggggctaatgctaaaggaggtcatctggaaggactgcagatgactgatttggaaaataattctgaaactggagagttacagcctgtactacctgaaggagcttcagctgcccctgaagaagatacacattccagttttcctgatggtgaacaaataggccctgaagatctcagcttcaatacagatgaaaatagtggaagataatttgatttgaaactgacactgcacctgatgggttaacaagatctaggcttcagaaggtgacagatatgagtgaggaccatgtgtggggcaaagcctcagaatgatgaaaaggttccggcactatagttggggccatgttgactccttttcaaccatttgtcacagacgtgagaagaagaaatgacttcaaaatcaagagaaaacaaatactgaaagtctctacttacatccaaattttaaaaaataaaatctgtagattaacaatctgatcattgctaaagtgaagctgtttttgtctatttgatatagctatactggtatccaaaatatgccagtcatctgtgtctttaaaattcagagattttagtcctctgttatgggcctggggaacgtgtactatcctattaacacatgattaggcgggggacacttcttagcgagagcactcacccttgttagtgagcactccagaggggccacccataggcattggccangctggtctgctgttgactaggggagggtaacactaagacattcgtgactcttag

SEQ ID NO: 87092 - DNA, 686 bp, Homo Sapiens
acttaggaaggtcttgccaccacttaatctgtctccagagacgggcagggtagcccaagctcgaccactggagtccactcctctgccaggcagggccatcctcaggccagcccatcctaccagccttctgccacgtcaggtggtggcatagcactgccctgcagtaccccaaggcatactcagcagcctagcccctgccccggaatgcagatggagcctctgagactcacagccccgtccgcagagaagcaaagcccgagcatccctactaggacatgtgtctaaaggtatccactgggcctgcttcccaccacttctgacctgtggcctgttcatttagttttctgaattcaggaatgaatatgattcctttcttcctgttttaggatttacttatttgatttcttaccgccttaggcaagtattcaaccacaatgattaactggccaataaaacatatttaacgtgggtcattacaagcaccattttgttttcagagggataagcttatttgttcaaggcattagactttgtcaagcccagatggtttctagctacctgtttgcatatttcaagtggcaacgggaaccaacctcttgggcaccccatggctggctgctgtggcgggtgctgaattccactctgttaatgatctcaataaacctctgcaacggttcattaaaaaa

SEQ ID NO: 87093 - DNA, 1105 bp, Homo Sapiens
  misc_feature (521)..(535): n is a, c, g, or t
  misc_feature (788)..(804): n is a, c, g, or t
tatttgaatagcccgagctttaactttgtgactgataacaggaccctcccaaatcagccagcattctcttccatagacaagcaggtttatgccaccatgcccatcaatagctttcgatcaggaatgaattctccactaagaacaactccagataagtcccactttggactaatagttggtgattcacagcactcatttcccttttcaggtgatgagacaaaccatgcttctgccacatcaacacaggactttctggatcaagtgacttctcagaagaaagctgaggcccagcctgtccaccaagcttaccaaatgagctcctttgaacagcccttccgtgctccctatcatggatcaagagctggaatagctactcaatttagcactgccaatggacaggtgaaccttcggggaccagggacaagtgctgaattttcagaatttcccttggtgaatgtaaatgataatagagctgggatgacatcttcacctgatgccacaactggccagacttttggctnnnnnnnnnnnnnnngtgtaaataatactggcactttagaacagattaatcaagagtggggttactctgtgtaaatggagtgctgtacagatttaagagcaatgcgtaataacaagttaagctgatatgaatagcaagataatccaataactgcatttcgtttggttagtcagcattctttgaactgccttacatgttgtcacctttatagaagcaatgcattacttgttttagatcagaaacttgctattccacccacaccaagttnnnnnnnnnnnnnnnnngactttcgcacaattgtttcctaactgataacattgtacattcttaggagattagtaattgtgtgaaatttactcatactgtttctaagtttttcagcatagtcattgcacttcagcagggaatctgagtatactttacagacagagtgaacttaaaagtttaatgtcaagagattatggcttaaataaattagtgtgtcctatagggggaaaaaaaccaagaaaccaccttttaaaaagaatgatatgccatatacccttgattttcattttgcattatattgacgtgtttttttgaagg

SEQ ID NO: 87094 - DNA, 543 bp, Homo Sapiens
  misc_feature (167)..(184): n is a, c, g, or t
  misc_feature (340)..(351): n is a, c, g, or t
agtgcacatatgtcataataaagtaatgcccagctaagtgctataggggaaggcaaagtatgctggctggctataggaagtgacaccatacactgacaatcacaccatacaacagcgccaaacgactattcaaccacttatcagacacatatgaaaatccaaaatgnnnnnnnnnnnnnnnnnnccttaaatagagataaccagtaaacaattttcagaacttggaagtttaaaaacgtgcatataaaaatgggcattatatactttttattgaatgtggattgactgcagtctgctaagaaaaatggggtgtgggagctgaagaaaaaggaagttgtcnnnnnnnnnnnnaaggcttgcttgtgaaaggaacagttgtaaaaacaaaattgcttgaagcagggtcagcttagtgcttcacagtttgactgcttctctaagaggagcccttcctgcgcacgtgcattcaaaaatcacaaaaaagtacaaagacaaacacctaaaacacactgcgtcaagtgcagcaccgacttttggtcaaat

SEQ ID NO: 87095 - DNA, 1125 bp, Homo Sapiens
  misc_feature (82)..(116): n is a, c, g, or t
aaaatgatagatcactatagggcgctagctcgttgaagccgaacgacgagcgcagagagtcagtgagcgaggaagcggccgnnnnnnnnnnnnnnnnnnnnnnnnnnnnnnnnnnncagtcgacggtaccggacatatgcccgggaattcggccattacggccgggtatactatacatatatatacgttctggttggcaagccctgctgatcagagaaagtctctgcatgttctagtgttagtaactaatttttatatagttaatgtaggataaagtagagtgcattaagacacaatattgtaatccctactctaggcacttgcctttaaactatgtttttcagcccttcagaagggttctactactgtcctatacaatcaagtaactgaaattcttgggaagacactttgctcctcatctttctccccgaaacaatgtagattagtaatagttattttttccttaatttgcacgaaaacaaaaattccatatcaatgtgccttgccctggatagcgatatatttgtggaattgtcgcacatgctcctctattgaaaggggtttttccctagtcaagcattgggagacacttttggtaaatgtgacttttatgtcagccatcgtcagtttcaacatctagaactaaatagaaagctagttgttccgcagataggagtagtctttattgtcctgtacggtcggtggcagtgctattctgagatctgtagatgcttagaatatcagtattttggatgttgctgcattttacaatttatttggagtcttcctttattttcccccagatatatgaaaatatgcaatacctgcttatatcatgtagacaagcttagcaataattaatttgactaaaatatatgaatttgacaaaagtcggggacggcattgaagcaaagagtaaagggaaggagaggacaccaaaggcgacaatagaatgcacgtgccaggaagcgctcccataagaaaaaagcagacaacgcgacggcaacgacgacccggttccagcacacgaggtacccacacgagaccctaacaagcaagctctacacaaacacacactcccaatcagaggcacgaagcacatagtcaaacagcgagcaccaataa

SEQ ID NO: 87096 - DNA, 414 bp, Homo Sapiens
  misc_feature (370)..(370): n is a, c, g, or t
ttcatcaggtactaaagagtgtacggtggaaagtaagtctttctcctacactcagatcatggatggatgtctcaggtcttcccaggcacatttgatgttatgtaccagccatatgcatgtgtgtgtcatttatttttcactctacacaagtagtacctaatatggtgaggttgttatgattacagactctggaggcaaagttcctgggtataaatctgaactctgtcactcccaagctaagtggctttgggcaagtgatttcacctccatgtgcctcagtttgctagtctgtacaatgggatggtaatagcacctacctcatggacttgagaagtcagcaacttcatacctctaaagcccttagagccangcagtgtgtggcactcaataaaatgttgactaatgatgattctc

SEQ ID NO: 87097 - DNA, 663 bp, Homo Sapiens
gagcaggtatggctgcaatccccaaataatgagaagggctggtcccacattatccatccagaaccttccatgctccaagccagaatgttggcaagatcgggttttgccttgagctatcctgggatgtgagacaaaccgatttctccatagatgggctgcagggagtgggaggcagtactccaggagagaagtgggtgaaggttcctgggatcttaggtaaagactagacgccgcctagtactggtctctactgtgctggctcaggagttctgagaactggaaggacttagcctcaacctgagttctgcacacaccccttccccttaaggaaggcagctctgagaggcagcaggacttgatccaaacccacagtcttgtcctggaggcagcaggggtgaaggtggagggtccagggccatgaggagcccccttgccatcagagcctggcctaaccaccctcttctctacttacacacacatgcattttataatagctctgacccaacctggccactctgcagagactgggacagacaggtgcaggcaatgggccctcccacacccagtcacctacaaggaattttcaaatccacttttaaaacagaaaccggtaaatgcgccgtattgtatattttatttaaataaaaaaaattccagcaaaaa

SEQ ID NO: 87098 - DNA, 691 bp, Homo Sapiens
tgggagaataataacttcaaatgtcacaggaaaaatatctaacaatatgctctatatgtgttcaggattaggcctcaatttactccaatcactgtatgataggcactgcaatccaacgcaacatttaattaggcatgaaatatccaatttatacatctaataggaagacacacagtcttgcacatttgaagaaacttcaagtgctcagaaattatccactgtattagccttttgcttcttctgtcttctttcatgctacttgccttttgacaagttcacttctggatagcacttctaccaaaaatgttctgaaacagagagagtgaagggtgggacagaaaaaaatgaaacaaaaattcaaatctacaggagcaattccatgcgtctgtaacacaggaataaacaggggaccttgtcatgatttatcttcaggcaatattttggtataactacatataatgtaataacacattatacaccattaaatactaaaacaatacaaaaaacctacaattataaatttcaacaagaaataacataactataatgacatatacccaaaacaaacccaggaaaacagtgtttcttaatttgctcagaaatctctatgaagctgaaattaactgtctgagaaacaactgaaagtagagttcttgatagtaaagacaatacatttcagtcttgacccttc

SEQ ID NO: 87099 - DNA, 341 bp, Homo Sapiens
aaacaagaatctctcaggcatactgaaatgttgaagaggaaattatattaatatctgggacttgtttccaaatttggaattggggcagggtgtaaattgttggcaatatcaaagaaacgaggagttggaatgataattgtagaagctgcatgatagatacacattctttatacttctgtatatgttgaaattttttatcaaattataattgtgtataatgactaattatgctttcattgtctattctgtgtggttatgttacttgctgaaattaatacataaagagtcttcaacttaaatgacttatcaagcataaatattaaaatactggatgttactac

SEQ ID NO: 87100 - DNA, 892 bp, Homo Sapiens
ctacgacagcggagcccctggggaagccaagatgccgtcgaagggaaaggacaaaaagaaaggcaagagcaaaggcaaagacacgaagaagttaataaaaacagatgaatctgtggtggacagagccaaggccaatgcctccctttgggaggccaggttggaagtcacagaactctctaggattaagtatcgtgatacttcacggatactggcaaaaagtaatgaggacttaaagaaaaagcaatgtaaaatggagaaagacataatgtcagtattaagttacctgaagaagcaggatcaggagaaagataatatgattgaaaaactgaaacagcaattaaatgaaacaaaggaaaaagcccaagaggagaaggataaattggaacaaaagtataccaggcaaattaatgaactagagggacagttccatcaaaaagccaaagaaattggcatgattcacacagagctgaaagcagtaagacaattccagaagagaaaaatccaagtggagagagagttagatgatctgaaagagaatttaagaaacacagagcggatacatcaggagactcttagaagactggaaagcagattttttgaagaaaagcaccgactagaacaagaggctgaaaagaagataataatgctagcagagagagcccaccatgaggctattgtgcaattgaacgatgctggaaagaaatgtttttaaagagaatgattatcttcagaaaagctctggcatatcacctgaaggaaactgacgctctacaaaaaaactcccagaagttgcaagagagtcatactttactttttacatcaaaaggagatcaatgatctgttggttaaggaaaagattatgcaacttgtccagcagagatcaccctcgtgc

SEQ ID NO: 87101 - DNA, 528 bp, Homo Sapiens
tgcggccgcggctgggcaactacgacagcggagcccctggggaagccaagatgccgtcgaagggaaaggacaaaaagaaaggcaagagcaaaggcaaagacacgaaattgaaaaactgaaacagcaattaaatgaaacaaaggaaaaagcccaagaggagaaggataaattggaacaaaagtataccaggcaaattaatgaactagagggacagttccatcaaaaagccaaagaaattggcatgattcacacagagctgaaagcagtaagacaattccagaagagaaaaatccaagtggagagagagttagatgatctgaaagagaatttaagaaacacagagcggatacatcaggagactcttagaagactggaaagcagattttttgaagaaaaggtacagattattagggttaatttaaaatgttttgtttactagaacataagtgtatttatatgcattctgaaacatcagccttccatttggtatcttaatagaagattagaagattgttaccaaattatagc

SEQ ID NO: 87102 - DNA, 414 bp, Homo Sapiens
ctctatagcaatactttaatattccaaagaaaaatatgaactgagaattgtattatctagccaaattgtttttactgtgtaaaggctacagataaacatatttgacatggcaaaaatttagggaaattgttccatgagtcttttttaaggaaactattaaatcattaatttcagctgaccaagagattaatgggaatgttttgagtttcaaatacatttaaactgtggaactaagaaatgtgaggatgacaacagaatgtaaatattatatgtcctcacaaggtaggaatgatacaacaaaaattgagagaaaaggaaaagaaagtggaagttcactgatacaataatagttgggcaccagagtgtatcagctaaagctaagctgacaagtcaaagagaagtataatcacattt

SEQ ID NO: 87103 - DNA, 494 bp, Homo Sapiens
attagaaatgaccaccgagtatattctgtttattgtttatgatttacacagaaaatgatgggctggggttatagaacaataaaccaaccattacatttagacctgggcttttgaaaaacttgcattccattttaacaattcgtatgtatctaacaaatacataaatccagatcacaaataatcttaagagttaaacaattaagaaacacaaagaataccacatagatctacctttaaatatcagcattcatattataagaaataagaaaatgttaaaaaaataaaattaggttaagtcacaacataaaatagagaaataagataaatgctattttattaatattcatacttatttctaattaaccttcatatagtcttaactttttcaaaaggatccaagatatgatcaaataatattttagtatctgaacttgccagccttagcttataccagagcttgttaccatgaaaatcctagaacctcaattttcttt

SEQ ID NO: 87104 - DNA, 1139 bp, Homo Sapiens
gagggtccataatagctttccatttttattttcttacttcctgagacacacacacttatgtgtacatacatttcatacacaattagaatacatctggaacacatgagtgaatacaccagtgtcatgaaatatttccagagcttaggattctagcaccttgtcccttgcccaatttaaaatccctgattatttttggccccaagacaatagtctcacaaagcatcactttctaacaatgagcagccagtttctaagactcagacatggaaacatattccataccgtcagccttttgcaaagcataacctcagatgactgtatcatcctggtccctccttgagtaaatatgagagactacaacacagagaaaaatcaaagttgccccccaagctgaacaactaagagcttaatttaaggctgaatttcaaacaagtcagctctttagaccaaaatgacatctgccagtccctcatgttttcaggacatacggacaacaaacaggattggcatcctgccaggtagaagactcagatccaagccttcttgttgccaaacttagaagaatcattctgctttgttaaagatactcccctaaaaaaatacattgcagtttctgggagaatactccatgaggtagaaaaatacagcaccttgggagagtctcacaagagctttcccaagtgcaaggcataatctgacacacaacagggaggaagaaagctgggtgggtccacacagtccaggagaaaaggtacttgagagctggtggggcaggaggaggctctggggagaactcagggtcgcatcaggtagatcacattcccccagggctagattgttagctgagtcaggtccaagggtggttgcaaggaaacaaaggaacgggtcgcactcgctctcaggaagcccattcagactccattctcatctgaagacaagggtggccacaccagtctggagtgaaatcagtttctaggaggcagggaatggaggagctgatcagtacacaggaagaaggcaaagggcaacagaaggagtcagccacaaacctggaaggtggggaggaaagaccagagatcactatgaaatagacaaacccaggacagaacttggagttaaatatcccactgtataagaac

SEQ ID NO: 87105 - DNA, 964 bp, Homo Sapiens
gtgctactcaatgccgaggacaaggggtttaatgagattcggaacgagcacttctccaatgtctttggcttcttgagccagaaggcccggaacttgcaggcccagtatgatcgccggagaggcatggacattaagcagatgaagaatttcgtgtcccaggagctcaagggcctgaaacaggagcaccgcctgctgagtctccatattggggcctgtgaatccatcatgaagaagaaaaccaagcaggatttccaggagctaatcaagactgagcatgcactgctagaggggttcaacatccgggagagcaccagctacattgaggaacacatagaccggcaggtgtcgcctatagaaagcctgcgcctcatgtgccttttgtccatcactgagaatggtttgatccccaaggattaccgatctctgaaaacacagtatctgcagtgactttgcattcacagatatgactaaggaagacaaggcttccagtgagtccctgcgcctcatcttggtggtgttcttgggtggttgtacattctctgagatctcagccctccggttcctgggcagagagaaaggctacaggttcattttcctgacgacagcagtcacaaacagcgctcgccttatggaggccatgagtgaggtgaaagcctgatgtttttcccggccagtgttgacatcttccctgaacacattcctcagtgagatgcaggcatctggcacccagctgctataaccaagtgtccaccaactacctgctaagagccgggagcatggaacgtgttgggatttagagaacattatctgagaaaagagttcacttcctgctcccaggatatttctcttttctgtttatgaagtacaacccatgctgctaagatgcgagcaggaagaggcatcctttgctaaatcctgtttgaatgtcattgtaaataaagcctctgctctcagatgtaaaaaa

SEQ ID NO: 87106 - DNA, 689 bp, Homo Sapiens
tacggccgaagagaactcccttctgaggaaaaaaacaatacccagcgaagttgtccggccaaggaatttttttctactggcctcagaatacaattgcccatagcttaagctctgggcggccacagcagggagcccagttataccagtcatagaaagcagtggtgcccaagagcatggcactcacgtctctgtctataaactggtgctgtgatcccgtggggactgtggaactggagaggctctatgggttgccgttggggcctaagatctgtgctgtctcttctgctgctgcatttgactccttaggctacaggttcattttcctgacgacagcagtcacaaacagcgctcgccttatggaggccatgagtgaggtgaaagcctgatgtttttcccggccagtgttgacatcttccctgaacacattcctcagtgagatgcaggcatctggcacccagctgctataaccaagtgtccaccaactacctgctaagagccgggagcatggaacgtgttgggatttagagaacattatctgagaaaagagttcacttcctgctcccaggatatttctcttttctgtttatgaagtacaacccatgctgctaagatgcgagcaggaagaggcatcctttgctaaatcctgtttgaatgtcattgtaaataaagcctctgctctcagatgtaaa

SEQ ID NO: 87107 - DNA, 477 bp, Homo Sapiens
ttgaacagttggatagacttctgcgtaagaaagctggattgactgttgttccttcatataatgccttgagaaattctgaatatcaaaggcagtttgtgtggaagacttctaaagaaactgctccagcttttgcagccaatcaggtagcttaatggatgtaatacatttctgagtaccattatcttatctagtaatgtagatttacatagaattaagagttgaaagaaattaagtacttaagtagcctggaggtaggttctagaaaaccaaaatgagagttttgctaaaatcatcctattacttatgatttatggtagtaatattatactgtcctaggcttctgatgatcattgttgccagatgcagcacatatactaaatatgagacagggtaatgaaaacttggggaactggtaagtttttgcatgctacaagatttttttacttattaaaaaattattaaattgattttattcta

SEQ ID NO: 87108 - DNA, 640 bp, Homo Sapiens
tttttttcaatgtgaaaacacttggaagatggtttaatgatgttttacaacagaaatgaactgtacagttacagtaagtttaatatatatataaaaaattacagcagacaaatgcatctacacaaaatctaccacttcattctgattcactgtcacctacacaatctttcccaagcctacagcccctgcaggcagccctaggagggggaatcatctaaagggcacttttgagagagacagcaccgctcatattccccgccacctcctcaggcttcaggaggcatcagctaattccccaaaatgtaaagttgcctgtgtttcaggttttcaaaaccaagaaaacgtgtgtctcccaggggcacagataacaaggtccagcacgcaagttatcagctgattcttagaaaatattcctatcagaggggaaatatttggctaacaggcactctggggcagtaaggctacacaatagccacccagagtgcagagttatctaagagaaatgtagaaggactcccaataaaccacctcagaattgtcactgcctcattcaagctgctggacaattttggaaagaatcatttacaccacatcttaagtttccacaaagaagaactcaaactcacattttaaagtacat

SEQ ID NO: 87109 - DNA, 698 bp, Homo Sapiens
gaatctgtagattccatcaaaataagtaggaactcatactaaaattgttggatttaaagaggcaacttttgtttatgattcaaatatgagaatttgagaaatatttcatgtgtccactggatgtcactattttactaaaaggcagctattagtgtgggactgtgactgaggtcttaaagactgaaagagttggggttcattttctgttacaacctacaggaacattggtactttaagaaaaatttaagtgacaaatgttagaagatgatggattgaaaaatataagtaatttggcatattgaccctatataaaaaagtgggcattttgtaacattccttcaggaagaatagaattgtatgcttttttctgcatgtttgtgatcactgtgagtctcagatgattattccagttttcaatcatctttcaaaataaaagtcaatcagcaatgatatttatcattaaggtattgaacactggattgcatggttgaatgtgtctttaatccactacaaaatgtgcttgttattgataggatcatgttgttaaattgtaaattttcaaaattaattgatgttttaaaaatgttgagaccaaagtagtatagaagtatggacctaatttaattgtaaaattattagaggtatttgttgtagagctttatatattaaagagaggtattggtgcatataaaaacagt

SEQ ID NO: 87110 - DNA, 653 bp, Homo Sapiens
attcggcacgaggattaatgttattctgggtacaactgcttacatacatagcacatatagatgacatttttacaggccgtcttgttagactgacatacatggaggatagtgccacccgcctcacaagaacatcaggtaagctcaggcacagagtgcccaggaatctgtaaggcttcgcccacgcacaagtcagggctgccagtcacctgggttgtcttcactttatttggctgcgtctaatgacaccttccaacttttgaccccacccctggactgttgtgtaaacattgtatttctccatctgtaatgaaaaagctaacacatctctaactccagagacattttccagaacatgctgttctcaggcactagtgaggcggtaccattattcctcatttgttatccaaatgttggccatgtgaccacaccaaaagctcatcctgggccactgagactggtaattgaatcagaatatagtgaaatattcattctcatatatacccagccatcttacatctttggcttttttcagcagatccttgtggcactcagaacatccattttgcactgtgtatttttttcccttctgtgtatcctgctttgtaaagagtcacgagtggttttacaaataaagcctgttcttactcagaaaa

SEQ ID NO: 87111 - DNA, 858 bp, Homo Sapiens
actttaacagcggtaaaaagcaggcggacggtcggaattcccgggatatcgtcgacccacgcgtccgaagaaaacttgtgatataaatgaaaaaaacacctgttttcctagagtcattggttacaaatatgcttcgtctaagagctatttgtccattctcctggagagtgtttcaagtttcgagccatcagttgtgaaccactaattattcagatgaataagtgtcacagatgaggagcaaatgtgttggttttattgaaagaaacaaagccagtactttcagaaaagcaagtgggatgtgcatttgatatgctttggaagcttcaaaagcagaagaccagcctgttaaaaaatgctgagtatgtcagagaccatcctcaatttcttactcttcataatttagctacaaataaattcaaattaatgaatgacgataccctggtgaatgtgttatacgtcacacaacagtttgatattaaactgctctcagaattttcctcttgcctagcagatcagcatttgtattttagtccattaatgggaaaaatagctgatattgttcataggaacttggaaaccacacaggacttaagttccttgtctgtcttgatggtcaacatatcttctttaatatcacgacattttcaacaacaactggtgaacaaaacagaacttctttttgacaccatagattcttctgaggtcaacgttgcaaaaagcatagcaaagtttcttcgaaatgttagatatcgttatcaaccactattagaaagatgtaataacgtatttttaagtaatgtggaccaccttgatttggattccatcagtaaaatacttagtgtatacaaatttctacaa

SEQ ID NO: 87112 - DNA, 391 bp, Homo Sapiens
tggaactgcaatttctaactcatacatcattgctataaaccttatttgtttactgtttctcttccaaggacggtcagtcatcctttaaaattcatttgaagttatgaaaagatagtttttgttacatgggcaatttacttttagtacagtaaaatgttatgtgaatttctacagaatgtttgctagaatgaattatatctaggatatgcttaacaatatattctggaggcagctttcatttgaaattaggttcatcttctgagagtattaaaaagttaatgggtttttgtgcctgaagattttgatgttgcatttggctacatttaatccactttcacccataaggtttagcatctaaaaaaattaaatcactgctaatgcaattaaaatg

SEQ ID NO: 87113 - DNA, 785 bp, Homo Sapiens
ctaaaattaatacatgtgcagtcaagccatgtataaatgaaaagtccccttctcttcaaaagcaaaacttaatactttctgatgttattcttcaagaaattttccaatcatatacaagcatgtatatatatatttccttttctaaactcaaatggaactcaccttttaaatgtgaaaaattgtctgtatttaagagaatattataaatgtattgtaaagaggacatcaactccaaattaaaattctttggattttttattggattcacataaagcaaagaacttactcacttggaccgagaatatattgtaatgttccataagtcataacttaaggaccgagaatatattgcaatgttccataagtcataatttaatgtgcagtaagaacccatgaagttgtctgaccaaaagtaacactcttctgttgggaaagattttacatccttttattctggatgaatcctgaattctagatgttgggtttaatgcttcacacaatggcacatttacaagaggtacaaaacacttattgagctttcagggccactgtaaggggcttgcagaatagcctctttgcaacccagagaattaatctgattcctctttcctcagcccacgcctaccttcaacttcaattttacaggagtagtttcccaagagtccccaccccctccatttgcagaattaaggaagtggaaggactggagagttcagtgtggaaaaacgtgtggagtaatctgcttgagacaactgtgttttagaaaaattcaggctgaagtgtgg

SEQ ID NO: 87114 - DNA, 661 bp, Homo Sapiens
  misc_feature (200)..(229): n is a, c, g, or t
  misc_feature (438)..(500): n is a, c, g, or t
actttttgagacacagtacaacagtctttaatgtatatataaatatgcctacataacagagtttgataagagaagttttggctatatacaactctgcatgtaatcaaactctagaacatcaaatgcaactccactgcatagctgttttgacagagcaacagttaagcataaaatagctttgcaccttattattttggggnnnnnnnnnnnnnnnnnnnnnnnnnnnnnntctctacaataatttaaactaaaaatgttgttgaggatagggtaaacaacaaaaaagaaaataatttgttccaaatgtgatatttggctgaagattaacagtgttaagtctaaccaacagcgagataattttaatttccaaagcatcttctaccgtttattagcaatatttggatattaagggaagacatttgccttaacaaaaactannnnnnnnnnnnnnnnnnnnnnnnnnnnnnnnnnnnnnnnnnnnnnnnnnnnnnnnnnnnnnnttggttaagttggaaagcctatcaaattaccttccaaattgcttttttaaagcaatttggtaagtttgaaaacctagcccaaaacaaattaatgacaagtgggtttctccagacgattaatgaagaaaacatacttatgtgaatcaataaatatgttattt

SEQ ID NO: 87115 - DNA, 792 bp, Homo Sapiens
  misc_feature (98)..(152): n is a, c, g, or t
  misc_feature (677)..(711): n is a, c, g, or t
tcaaactctagaacatcaatggcaactccactgcatagctgttttgacagagcaacagttaagcataaaatagctttgcaccttattattttggagcnnnnnnnnnnnnnnnnnnnnnnnnnnnnnnnnnnnnnnnnnnnnnnnnnnnnnnntgttgttgaggatagggtaaacaacaaaaaagaaaataatttgatccatatgtgatatttggctgaagattaacagtgttaagtctaaccaacagcgagataattttaatttccaaagcatcttctaccgtttattagcaatatttggatattaagggaagacatttgccttaacaaaaactatactgaaaaagacaaatgaattgaaaaagacaaaaatactatccaagaattacaataaaaaatttggttaagttggaaagcctatcaaattaccttccaaattgcttttttaaagcaatttggtaagtttgaaaacctagcccaaaacaaattaatgacaagtgggtttctccagacgattaatgaagaaaaacatacttatgtgaatcaataaatatgttatttctctcaacctctttttatgctttgaaaacttgttctaaaaaagaaccattgatacatcattttgaccccggccgtaatggccgaattcccgggcatatgtccggtaccgtcgactgnnnnnnnnnnnnnnnnnnnnnnnnnnnnnnnnnnncggccgcttcctcgctcactgacttcgctgcgctcgtcgttcgttgtgaagagtaggcctatagttgatctattacatctt

SEQ ID NO: 87116 - DNA, 1421 bp, Homo Sapiens
  misc_feature (743)..(807): n is a, c, g, or t
  misc_feature (1297)..(1297): n is a, c, g, or t
caagaattcggcacgaggattattcctgaatcatagcgaatctttctagaatgtgtttataatttccttgtacagtttctttggaaatacgttaaagatagtggcaatttcatatatttcatggatacttgagtttgtgcttttaaggtgtttgtttagggatacaatgaccactagatgtcgctgtttatccagtagactaagattgagtgttctttttgttcagcaactcttctaaaatgtttcaagcaaagatagtaatgacctcagtttctgaaataagggcatcttcatcagattattcttctgttttaaaaaaaagcttgaggcaaatgtgagtgatttccagtgctttgaaagggattacagtatcacacaatgtcaagctagagttaaacacagtattagctaaataggcacttatgtgtattttctttttcatgattatcggtgactggtcagtgtactcatcaatttccaaaatttgtataaatatcacaattagaaaaatgcctgaggtactaaagttatgttggctttttgtgtcttaacacacataaatactattgttattgcagcagatgccttttgaatccattttccataattgcggatagtcataaattgcttgctcaatttttagtaattattgctgttgacaccagcgttgtagatttttggtgttgttgaatgcagtagagagaccaagacactattctgtaagatcaataaaagtaattggnnnnnnnnnnnnnnnnnnnnnnnnnnnnnnnnnnnnnnnnnnnnnnnnnnnnnnnnnnnnnnnnncggacacagacaacagacgcgcaactgacacctataccacgaacatcagcgcatgctccccccagagacaaacccgccgagacccggtccgcggagtacagtgcgacccaccggacccgccaggcaggggtaggcccagcgcccgaataccgcagccccgacgccacgcatacaaggcaaaacgcgtgcgctgggctcccgccccctcccccctcccacgaaggccctcaaaagacacgccatgttgggccgcgtgccccgcacaagacaagaggaggcccaccagccgctcctccttctgttctcgtgcacaatacatcgcccgtgtagcgacgcctgttaggtcgcttcccctccccgcaccaaaataaaccaccccgtgggccggccaaccaccagtggcgctagacaaccaaccgatccgcggacgtcagccgcggcggcgattccgtcggccggcgtccgtgcgcccgcgctggccgcgctccgnagaccgtcgactccgtgtaaatacacatgcccccgccgcctcgctctgctgcctagtttcgcgcccgagggtgtgtgggggagtacgtgacactcactcgtactgcgcttgctgaccctgcgca

SEQ ID NO: 87117 - DNA, 592 bp, Homo Sapiens
tccctttgcattcagagcactgcgtgttttgaaatatacaaatagtgggaaacgaaatctttgttctggatgcagttataatttggaaagcgaggaaataaattataacaagcggaaaaaacagacacagagggattgaaatgcataacaatagagatgaaacacgaagagtgataaatgaagattgagtgtgcacaccttctggaggagccctgattgagtattttaaaatactactaaagtcatgccgtgtgacttctgaagctagctcctaagaagtccttgcagcttctgcctgcgactcttagaacacttgctttgaaggatgccagatgctgtcttaaaagtctgagcactctgaaaccatcatgctgtgaggaagcccaagctaaccacatgggcaaaaaagatgccctctgactgccaccatttgagacactctaattaagaactgcctcattgagcccatgaggccctgtgaatgataataataaattgtttttaaccactatgtttttggatttgttataagtttatagataacaagaaaaagttatattagcatggtaataaaattatggatatgtgtaaa

SEQ ID NO: 87118 - DNA, 573 bp, Homo Sapiens
ctttgatgctgaaaagtatttatacactcattggccatttgcattcattaacataaaagatgtgcaggttacactgcattttaaaaaggcggagatgactaatcaacaaagttcctaaccaacagcagcagacagttaatattaatatctcagtccagcatatctcatagaatccaatttacctcacaaattttaacagttctcatgttaaattcacaaatatttcagaaaagttctacataaaaatgttaacaatggttaactggggtgatgagatggaggggattggattttttccttcttaatctgtagttttccattttcagacgtcatcccgcccctccgcgtatgtgctatctgtgtgaggaaatcctacacacggttccattaccatttctcgctggacgtcctcatacactgacacaccccatagtacaggggcggctccttagacgcagtcgctccagctctgtaggtgtcggtgtcactagggggcaccgagcaggtcttggctgtcacagcttcctcctctggaggattcaggcccacactgtaaccaaaatctctgtcttc

SEQ ID NO: 87119 - DNA, 745 bp, Homo Sapiens
tgcggccgccgcccccgcctcaggtgaaacgacaatggatgctctgttggctcgattgaaacttctgaatccagatgaccttagagaagaaatcgtcaaagccggattgaaatgtggacccattacatcaactacaaggttcatttttgagaaaaaattggctcaggctttactggagcaaggaggaaggctgtcttctttctaccaccatgaggcaggtgtcacagctctcagccaggacccacaaaggattttgaagccagctgaagggaacccaactgatcaggctggtttttctgaagacagagattttggttacagtgtgggcctgaatcctccagaggaggaagctgtgacatccaagacctgctcggtgccccctagtgacaccgacacctacagagctggagcgactgcgtctaaggagccgcccctgtactatggggtgtgtccagtgtatgaggacgtcccagcgagaaatgaaaggatctatgtttatgaaaataaaaaggaagcattgcaagctgtcaagatgatcaaagggtcccgatttaaagctgtgtctaccagagaagacgctgagaaatttgctagaggaatatgtgattatgtcccttctgcaagcaaaacgtccttaccactgtctgctgtgatgtcagctccactctgttacaatgacaagatgaaagatcgtgtgtgcttgtcggaatcacacgcagatcacacatagcgagcgaacagttac

SEQ ID NO: 87120 - DNA, 1170 bp, Homo Sapiens
  misc_feature (477)..(479): n is a, c, g, or t
  misc_feature (481)..(494): n is a, c, g, or t
  misc_feature (496)..(519): n is a, c, g, or t
  misc_feature (522)..(522): n is a, c, g, or t
  misc_feature (524)..(526): n is a, c, g, or t
  misc_feature (529)..(576): n is a, c, g, or t
  misc_feature (580)..(581): n is a, c, g, or t
  misc_feature (586)..(588): n is a, c, g, or t
  misc_feature (590)..(595): n is a, c, g, or t
  misc_feature (597)..(639): n is a, c, g, or t
  misc_feature (647)..(661): n is a, c, g, or t
  misc_feature (668)..(688): n is a, c, g, or t
  misc_feature (709)..(721): n is a, c, g, or t
  misc_feature (793)..(804): n is a, c, g, or t
  misc_feature (827)..(919): n is a, c, g, or t
  misc_feature (940)..(953): n is a, c, g, or t
gtcaaactactaacatctttattttgtcaagatatttaacaatattaaaaagttcaggccctctgtggttaaagactgtatccatgctgtgctcaaggaggaactggcaaatgctgaatattctccagaagaaatgcctcagcttacaaaacatttatcagaaaacattaaagataaattaaaagaaatgggatttgaccgatacaaaatggtggtgcaagtagtgattggagaacaaagaggtgaaggagtattcatggcttctcgctgtttctgggatgctgacactgacaactatactcatgatgttttcatgaatgacagtttattctgcgttgtagcagcatttggctgtttctactactgaatgaatctttgaaaagctggtaaaagacatgaccatgaagaaatctgaactttttaatattgttaaatatcttgacaaaataaagatgttagtagtttgacaactgaaannnannnnnnnnnnnnnnannnnnnnnnnnnnnnnnnnnnnnnaanannnaannnnnnnnnnnnnnnnnnnnnnnnnnnnnnnnnnnnnnnnnnnnnnnnaaannaaaannnannnnnnannnnnnnnnnnnnnnnnnnnnnnnnnnnnnnnnnnnnnnnnnntttggggnnnnnnnnnnnnnnnaaaaaannnnnnnnnnnnnnnnnnnnngggcgcgggcccccccaaggnnnnnnnnnnnnngtgggttaatatttttttcttcaaaagaaacaccggcccaacaaaaagaggggtggtgttttcccccccacnnnnnnnnnnnncccccggggggaaaacaacagtnnnnnnnnnnnnnnnnnnnnnnnnnnnnnnnnnnnnnnnnnnnnnnnnnnnnnnnnnnnnnnnnnnnnnnnnnnnnnnnnnnnnnnnnnnnnnctcatttataattaatattannnnnnnnnnnnnngggggctttttttatggggaagagagggtgtgggtaatatcttatataaaacattctctccgccggcgaggggggaagacccccctccccaacacgcgggggtgttggaaaacccgtataatcgcccccgcggggggatatacacacacccgttggggggcgcccggtggaaaataaatattttttcccccgcgggggagaacacaagggggggcag

SEQ ID NO: 87121 - DNA, 334 bp, Homo Sapiens
ctgtgaaaggtttggaagtacagatctatgagaatgtattaaggaacactgtttctcgtggcagatatgtgtcgtttaggtccttgttagattgttgataattcttcaatcttggattttttagcatggcttctcgctgtttctgggatgctgacactgacaactatactcatgatgttttcatgaatgacagtttattctgcgttgtaacagcatttggctgtttctactactgaatgaatctttgaaaagctggtaaaagacatgaccatgaagaaatctgaactttttaatattgttaaatatcttgacaaaataaagatgttagtagttt

SEQ ID NO: 87122 - DNA, 611 bp, Homo Sapiens
agcatgagaaaatacaaagctttctttgtatctggctgatactcatttggatgattctgtgactcatagaacatgatgttaaatgagaccagactcaactgccaccagtccccagctgcagaccttcatccccttcatctcccactaggggctcgtggtctggaagaaacatgtatcaagcaacacagccccttatcccagatagaaaagtgtctcaaatgcattctactgcgggacagtcagtaggatcattttcataaagcaaggacatcatatgtttctagaaattacaagcatataactttagcctacaatctcttattaaaaatttttaacaaaattgtattacaaatgcatttcatcagaactcaaatttaaatggtgtttgttttgggtttttatttataatgctgaagttattccatataagtatcaagttaaacacaattcattttgattataaactatttgactttttaaaatcttctgacacagtaaatatatatatcaagattgatgtatcaaaatttattgcacactttaaagtgtaaaatcattttttaaaatcttgaatccacaaataaagttctattctgattttaaaaaacaaa

SEQ ID NO: 87123 - DNA, 533 bp, Homo Sapiens
gatagtaatttctggtaaaactgtagtttatttatcaaaaaatgtgaatttttattttagaaatgtaggtcaagcattgtcatagttgtagtacttaattgagaataatggcttcaatttggaagattcaatatacacattaaacaaaattaaacagtttaaattataattcatataattataattctcatttttagatggccaaaatatattgttttcttactataaagtgttatttattcatcgtctatttttactaattatattcaattcacagtagtgacatcaaagggacaagtcatcataggtctgagaccaggaaaacctggtctgttttaacagaggcgtgtctaaaataagagtacatatttcaattaggcccacagagatagaaaagagccaggataatctttgtattgaggccttgatttcagttttaaatgcaattcttttctgccagctgaaataatttaaagatgtgcacaataggtctgtgctatttaaacatctgtcttaaacaaaaactgtcataa

SEQ ID NO: 87124 - DNA, 617 bp, Homo Sapiens
atagaagcaggtgaaacccagagccagaaaattcagaagtggaaggaagctgaaggaaaagagttccgtgtgagatcagcaaagaaagcttctgctctttcagatgcgtctagaaagtggtttttaaagcaagagataaatgcggctgtagaacatgctgaaaatccatgtcataaagaagaacccaggttccaaaatgaacaggactcaagctgtttgcctagaacctcacaattaaatgactcttctgaaatggatccctcaacacagatttctttaaatagaagagcagtagaatgggacaccacgggacagaatcttattaagaaagtgagaaatcttcgccagagactcactgcccgggctcgtcacagatgtcaaacccctcatcttttggctgcatagaatgcatgtcaccttgagacggtcgagagagagacctattttgcaatcagtgacattgatttttagattatttatttaaaattcctataaagatcagccctttgtacagaaaaatgtgtctataaaaattatgtgttatttaattctgatactttttggcttgtaaatggcttcttgaactttgtacaataaaaatgttttagaaactgtta

SEQ ID NO: 87125 - DNA, 1025 bp, Homo Sapiens
  misc_feature (694)..(694): n is a, c, g, or t
  misc_feature (696)..(832): n is a, c, g, or t
  misc_feature (847)..(888): n is a, c, g, or t
  misc_feature (934)..(935): n is a, c, g, or t
  misc_feature (962)..(985): n is a, c, g, or t
cagtgatctttactacagtctcagtcaacagtgtgaatgtatcatgttttactttaaatgtgtgtgtgatacttcttcattatgtcctgcgctgcagtgagacctgggtgaaaatcaggaaccgcacacagccacatcttcctagacctaagagtaaattatggaggattttatttatgtctatttatatgtaaatgtcattgaagacaaaggtcaaatatttgtctgtttgtagatcacaggcaccagttggtcttcagggacctcatagcccctcggtggtgccttctcaaggcagtgttcctggaggctcccgtcagggtcagcccatgcacctgccctgggtgaggaagtagcattgctgctggatgagaaacgcctgcgctgctctgttagactggtgctgaaacaaaaggttaaggctaggttgaagtctagaatgaaagaaatctgaatccatgtcattcataaccccttgatctgtagtgtcatgggtgctgccgcaggcagggagtgagctgggggtgcctgcagccttccactcctgccccgcctcaccccacatgctccctgtttctcatgctttctctaacttcctcaccccttaaccaaaaaggtgtgttttcttttgtgcatatagccattcttaaatatcagtgatgtaaacctcactttattaaaaaattatccagcngnnnnnnnnnnnnnnnnnnnnnnnnnnnnnnnnnnnnnnnnnnnnnnnnnnnnnnnnnnnnnnnnnnnnnnnnnnnnnnnnnnnnnnnnnnnnnnnnnnnnnnnnnnnnnnnnnnnnnnnnnnnnnnnnnnnnnnnnntatgcaattgtgtgnnnnnnnnnnnnnnnnnnnnnnnnnnnnnnnnnnnnnnnnnncattttccgtgggggggcggcggggcccccccatgagggggagganncaaagcgggggcgcagaaccgcggctnnnnnnnnnnnnnnnnnnnnnnnntagaaataaaaaacagcgtgggtaattttcctacccccag

SEQ ID NO: 87126 - DNA, 696 bp, Homo Sapiens
  misc_feature (50)..(77): n is a, c, g, or t
aagaatgaaaatgctgtttaatgcaccatgttcagcacctcactgacctnnnnnnnnnnnnnnnnnnnnnnnnnnnncaaccaccccagcttcctgaaggtataattgacaaaactgtatatatatttaccacctacagtgcgatgctttgccacactgcaaaatgattaaatcaagctgacacacacgtccgtcatctcacatacttatgcttttgtagtgagaacatggaagatctaatcttagcaattttccagtatacaatacagtttttaactgtagactccatgttgtacgatacatctccagagttcattcttatagatttcactcaaaggccagtagcttcctcctgagcggtgagtgcatcatgtcatggcttctgacaggcccccggtcctctcccagcccagcatccccgaccctctcccaacatctcgcgaccctgtgctttggtgttgagggagcagtggcagtcaggagggactgagcacctgtgctgggcggccagggccaggctcttttgctggtgctgccaaagacgcctcaggtcacccaagagtctcaggttcctctccttcctccagaggcggggctggaaatgctgctggctctgctcacactccagggctgggttgaggttggtgttgggagataatgcatgtcagtgttgttttcttcatctgtgaaaaagca

SEQ ID NO: 87127 - DNA, 897 bp, Homo Sapiens
  misc_feature (227)..(323): n is a, c, g, or t
ggggaggccatgggggaaaaagtctaactggcggaactcctgggaactggggcgatgggctcttagtatcggaggattggagccatctgatttttacctgaaattccttagtctctcctgtgttggggaaatggtcaccttgccttcagggacctgggctttcagctgtccatacctggccctggttgatggcggcatgctgggcagtgcacgtgaagacgcacatnnnnnnnnnnnnnnnnnnnnnnnnnnnnnnnnnnnnnnnnnnnnnnnnnnnnnnnnnnnnnnnnnnnnnnnnnnnnnnnnnnnnnnnnnnnnnnnnntgaaccaccacacccagctcttaaaaccacagtatttctaggtcagtataacacacctgccccagggacttacaggtgtggcagaagcttggacttctggcttttctctctcttgcacccaggcacgctgcagctaccatttcctcccttcactacgttttagattctttccttttcattcctgtcattaccatgctaacgtacatctctatccaccttgctgttgggcaggtatgagcggcttgctggctgttcttccttgccttttggtctgtttctacttagctgactcctcaattgggtagaaacattcttcatcaatactatactgttataggctgtcccttgtgatttcaaactctagtaccagatactgttctctggttggttcttatgggcatcacttgtttttctggctaaatactagatctaaggtaggaatatggcttttgttttactagcagtgttcaagccctactgtgagcgcactgctagactgtcagatctctgagaatttcagaggattcctatataatgttaagtgactaaacttaataaacttaattaaaatcaa

SEQ ID NO: 87128 - DNA, 842 bp, Homo Sapiens
agtctgtattgccattaataagaaaaccttagaaaaatttgtacttcatagttctttctgctcaattagctgttagcattagtgtaaaatatagtttttaataatttctgtacaaagcctttgtacagaaaggcttcatccttaaagtgatgagaatggagtcaaaaaggattcaggtgtttagaggagctgcttttcattaggaccttggagagtcccctcagttttgacacccttgtttcaccacaagaaagcacccgacaccctgggttgcatacttactactcaggggctttccccccagctttttcagagcactgaatttattgtgagctggtgactctgcaggcctgagtggtattagggttgtggaatgttgttgcatacacgtttatgagttaaccactatttaaatgatgctgctttttaaagtttttttcaaagtacaatagatttttgaagtttcaggtaactggaaaaatctttaacttttgctttaagtgtttggggcaggataaaacaacatagaaaatataaaacaatttttgctttgaaaaatacagtgcaggtgaccatttactgcttattctgtaatccttactgtctataattaacttcagtaacactgaaacttgatgaaaagttttaaaaaattatttactgtagggacaaagttatatggaatgtttgttattttctatactatctgaatgcactgccagtgaagactgtaaagacagaacacactattttggagggaggatactaattgtttaaaatttttcatcatttgtgagtgataaaaagtttgtatagtttttataataaatccctattttgaa

SEQ ID NO: 87129 - DNA, 1400 bp, Homo Sapiens
  misc_feature (1059)..(1080): n is a, c, g, or t
gctggaccggtccggaattcccgggatatcgtcgacccacgcgtccgattaggttgtttctttgtttttagtttcaattctatgtgcatagcaggaatgctccacaggaatggcttctgacaataatctgtcctgttgattttgttttccttgcccatgacttgaacaactgtgttttaaagtactgtagtctagtaggtaactttgtggcaaaaattttcaatataatacattctgaaacaatagttgctgccttgcaaaggtaatctctcattttaaaattggacagtattaatgaaggggaaatatacaatttatttctattgagtggtagaactatatgtctggtcccttgctgctcttgtttaggccactatcatagatatatttcaaatattgtactactcagtgttaagtattgaatgactgtttccctttccttcaaggcctagagtatattctgaaaatttaggaatgaggaagaaatcttaatacttccttccttaacatacaacatgagtcccgagaataattgatagtagcaagagaaaactatgtcagtaacatgttgctttgtataaaaatcttatttataaatgtgaagctttttgatgccatcaaaacttattaaaaaataggatttacttttttctaattctgacctaagaaaaataatgagaacaagctgttgcaagctcttttgtagtctattgaatattttatagatattcaaaatttcctacaaactataattttttccatgatttagcagtgagtgattttctagctttggctcttattaggtattgtaaatagtagggttatatcgatatcagcttttgtgatggcattgtggtcatcagcttcatgacattttacccatttgcagtgatcctgtgtaaaactgccaaggaaagtaattacctgtaggagtttgctgagcttgaagagtgaaaactgttgtgaatgagcctgatcataaaacggaccaggccattcattattcctcaagtgttaatatactgacttatgcagtattcaaaccatctagggcaatgnnnnnnnnnnnnnnnnnnnnnngggtaacacaggtgcagtgtattatagaaaaaataaaaactacaatcattagcagtttaatactgctgtgtcagtttggtcaaaaatgtacattatgtctttggacatgtggaattttaaactagggaaatgacttgtgtaaatcatagtagcctcttttaatttaatatgaaaaatgccactatattgaaagtacttaaggtatggtatatatgctctacttgggttctagctatttatatgatggacatgttatttaaaagataagtgcttgaacctttgggagactgtgtactgtaaataaagaaatcttacaatac

SEQ ID NO: 87130 - DNA, 1046 bp, Homo Sapiens
  misc_feature (1014)..(1014): n is a, c, g, or t
  misc_feature (1029)..(1029): n is a, c, g, or t
ctgattctgtgaagaatgttattggtagtttgataggaatagcattgaatctataaattgctttgggtagtatggccattttaacaatattgattcttcctatccataagtatggaatgtttttccatttgtgtcatctctgatttctttcagcagtgttttgtaatttttgttgtagagatctttcatctccctggttagctgtattcctaggtattttattctttttgtggcaattgtgaataggattgcattcttgatttggctctcagcttggatgtcgttggtgtataaaaatgctaccatattttgtatattgattttgtctcctgaaagttagctgaagttgtttatcagatctaggagcttttgggccaagatcatggggttttctagatatagaatcatatcgtctgcaaacagagatacttcgacttcctttctttttggttgccttttatttctttctcttgcctgattgctgtggcgaggacttccagtactatgttgaataggactgaagtgccttgttctacttctcaagagtaatgctccagcttttgctcattcagtatgatgttggctgtggttttgtcatagatggctcttattattttgaggtatgttccttcgacgcctggtttgttgagggtttttaacatgaagtcaagttgaattttatcaaaagccttttctgtatctattgagatgatacgtgagttttgtttttagttctgccaaaccttttcttttaaagcccaacgaataaaacccatcacctttcacaagaccaccacagcaagtaggcaggaatgccagtgttaaaagtgaaatcttttgaatttgtagtacctttccttttccaaatctagctgaaatttctcacttgttttccttttgatgaagctaaccaccggcatttctcctgatgttgatttaggatcggcaggggaagcaggatgccacactgagaacatctcctcagaatgtcataggctgctttatctcctctangggagctggtcctgngcttgggctctgacatc

SEQ ID NO: 87131 - DNA, 1870 bp, Homo Sapiens
  misc_feature (62)..(101): n is a, c, g, or t
caatgacatcccaaagccccacccctaagatttgattcaggttgtctgaaaccaggcgccannnnnnnnnnnnnnnnnnnnnnnnnnnnnnnnnnnnnnnnatatccccttaatacataacaaaacattgtttactgtttatgacttcatggtaaagttttaagctgaataaaacattcaaacaattattagaacacaaataggtacattaaataaggatataagccattacgcaattgcattttccttttaaaagtggcatcatagacacaatgacttacataaaaattttaaaatcaattttgttttaatccaaggcacctgtaaaacacttgctggtgtgagagaagtgaacaaattcaattatacaaaatagtacagaaatcaaagaatcctggcagtgattggatttttccacagagcaaacctttttgttcaggaaatgagctccttaaagtcaaggattttgagaaaaaccacacttcaaatatgatacacatcatgtgaactactttgctgagtgattttcaagcaaagtatatcactaagtataaaagataaaaggctcatgctcatgctgtttcataatagccatctccatttgtagtaagaataatcagaatgattccccttgaatttcagcctgaaaaatgtatactgcatagatctggtattcctttaatgcacaggcacatatgaccatggactttataatactggatttggcagccttttatctcaagaggatttctcaagtttcatagtttacaacttaaatattcctctgaaggtatttaattttttttcatggagcaagagtaaattctgtgatgatgaagcctctgaaacatgaatttcaaaatgttaacactacaaaagaaaaatgctagagaagcattttctgtgttgaaatgactgaagtaaagtgagttatcactggcatattctctttcagtgttctaggataaatatcaacataaaaagcaacgccagactgtttgcacacacagcactcgtttggtattgctataatacagagttcttcagaaagtctttatatatagattttaggtcgttagcccaatctgtaaatgacatttgagagcaaacctagggaggcttggaataattcaacagtactattttataagatagtattgtttggaattctatggcaaatgaaagacaaccattttagctaaaagaagtaaaagagtattttgaaggcagcaaaaatcagtataaatcagctgtgaacagaattaaatttgcatcttaaaatgtcatttacagactgtttctgtaatacctagaagtatgcacaaagactataaaaactccttccagtctgacatttcaaggttaagtttactaacaagtgcttcacaatgtccttagttctggcactaaaaggaaacaattagaagtattcactgtttttcaaattttgccttcaagaatcttaaaactgcttctactacagcctccttgatttaaaagagtatgcaaatggtcactaaccccagccagcatgaagtaactaatgtaaaccagaatgtagtggcaggttttgtgaatttaaatcctcagatcatgcaatttgagctgaatttacatgctgtagtaaagggagaaataaattccttaagttacaaatataaagtataaaaattattttcataatagttgacctgaccccattggaatgaagacattcaagaatatgggcaatcatgaatgaatacattaccaggcaaatacctataaaagcccattctcagaggaattgtttccaccccggacgcgtgggtcgacgatatcccggaattccgaccgtaccagcctcttttttaacacgggttatatctac

SEQ ID NO: 87132 - DNA, 1138 bp, Homo Sapiens
  misc_feature (12)..(12): n is a, c, g, or t
  misc_feature (75)..(92): n is a, c, g, or t
  misc_feature (106)..(120): n is a, c, g, or t
agagatgaagtnacggcgcgccgattcggcacgagggttaccattctgatgttggagcggccgcgataaggccannnnnnnnnnnnnnnnnngagaccccatctcnnnnnnnnnnnnnnnttgaatctatctcaatagagaacaggtgaactagccctcctaaccggaccatgcacaagacaagaaattctagcctttttttccccttccaaggtgcaagtgaggacataagccacactgtattctgcctccaaatgattacacacttttgcccctgctcatctatcttgaggagttacggttcttttccactactgtatgccacatgttctagtaaaaggatctttcaaaggtgtccaacaccttatgaatctggtctatcagattaatatctgaagatctacagtgtttttacatttaatttaaatgccattcttagaaggatcttgtcacaaagaagcctttacatagccccaccttgtctcagaagctagagttcattatcaaaacttaatttccatttcatatagctcaaaatcttaaaatctagggcatggccaactaaattactttgattctgtttaccttctctgatgacaattccatcaagccttaaataggaaaatgtcgaatctagggtaatttatcacttttgtgtgcatcttatctgagtccagccatctggtactgctgtgcattttgaacaccgtgggcataaacaatttgttgaattactaagtgaaaacaataataaagaagaaaatggtcaggagtgtggtttcagcactactaacagatgactgtttctacctcatttgaccataactgtacttgtgagcttctttccttccattcatgactgaagatctgctcaaatgcaccaacactgccaagtgactaaggtagaaaagaaaaatgacaggtatcgtcatctgaaggacagatgaatctttttctgccccttcttcacaatggaatataaggaacaattatgggatgtcatcagaatggatgccataggacctacagctccctttctctttattgtgattatactttaaatatgacgttgtcttttatgtgtatgttcctatattttcaatgtatctttttccttcagtaaacctgatattccaat

SEQ ID NO: 87133 - DNA, 1018 bp, Homo Sapiens
ttctcgtttggatcctcctcgtgctattcggtagaacatcccggcggcccttattatcgatactgcctgaggcagtattctaagggtcctgtagcgccaacaccgggctgcgtgtccctccgggtgagcaagtgccagctgcacccggagccgatgctgccaaacacgatgggtggaatgtgatcttcctggggaagggactgcatccgctactactaacagagctgccggtggaaaaggccggctgtacaagaacttacagctcgtgtatggcagaacaaggacccccgggacgacctcttcgacaggctgaccacgaccagcctgaacaagcacctccaggagctgatggacgggctgacggccaaggtgttccggacctacaacgcctccatcactctgcaggagcagctgcgggccctgacgcgcgccgaggacagcatagcagctaagatcttatcctacaaccgagccaaccgagtcgtggccattctctgcaaccatcagcgagcaacccccagtacgttcgagaagtcgatgcagaatctccagacgaagatccaggcaaagaaggagcaggtggctgaggccagggcagagctgaggagggcgagggctgagcacaaagcccaaggggatggcaagtccaggagtgtcctggagaagaagaggtggctcctggagaagctgcaggagcagctggcgcagctgagtgtgcaggccacggacaaggaggagaacaagcaggtggccctgggcacgtccaagctcaactacctggaccccaggatcagcattgcctggtgcaagcggttcagggtgccagtggagaagatctacagcaaaacacagcgggagaggttcgcctgggctctcgccatggcaggagaagactttgaattctaacgacgagccgtgttgaaacttcttttgtatgtgtgtgtgtttttttcactattaaagcagtactggggaattttgtacaataaaatgtgtgcaagtgcttgtacatcactag

SEQ ID NO: 87134 - DNA, 1397 bp, Homo Sapiens
cggcgcaccctccctctcgcgccgcgggcatccccggcgccgtgcacgatctcgtcccgcgcctccgcccctcgctcgttcggtccttcccggcctccccgagcgccggcgagccggttcccctcaggctctcatgaagtatagagcgtgcccttgtggtatttcccgagctccattgcggaagctgaggctcgccatattgtgcggcggcgccggcgtccgcggcagctgataccagagtcttgctccggccgcggccagcggagccctgggctggggcaggagccgcaatgtctcaggctgtgcagacaaacggaactcaaccattaagcaaaacatgggaactcagtttatatgagttacaacgaacacctcaggaggcaataacagatggcttagaaattgtggtttcacctcgaagtctacacagtgaattaatgtgcccaatttgtttggatatgttgaagaacaccatgactacaaaggagtgtttacatcgtttttgtgcagactgcatcatcacagcccttagaagtggcaacaaagaatgtcctacctgtcggaaaaaactagtttccaaaagatcactaaggccagacccaaactttgatgcactcatcagcaaaatttatccaagtcgtgatgagtatgaagctcatcaagagagagtattagccaggatcaacaagcacaataatcagcaagcactcagtcacagcattgaggaaggactgaagatacaggccatgaacagactgcagcgaggcaagaaacaacagattgaaaatggtagtggagcagaagataatggtgacagttcacactgcagtaatgcatccacacatagcaatcaggaagcaggccctagtaacaaacggaccaaaacatctgatgattctgggctagagcttgataataacaatgcagcaatggcaattgatccagtaatggatgggtgctagtgaaattgaacttagtattcaggcctcatcccacacttatggcaaaaagatgacagtgcacagacggagatacattaaagacttcctggtaacgccactggtgatcacttatccaagtatctggctgtgaggttagctttagaagaacttcgaagcaaaggtgaatcaaaccagatgaaccttgatacagccagtgagaagcagtataccatttatatagcaacagccagtggccagttcactgtattaaatggctctttttctttggaattggtcagtgagaaatactggaaagtgaacaaacccatggaactttattacgcacctacaaaggagcacaaatgagcctttaaaaaccaattctgagactgaacttttttatagcctatttctttaatattaaagatgtactggcattacttttatggacagaaa

SEQ ID NO: 87135 - DNA, 748 bp, Homo Sapiens
  misc_feature (40)..(40): n is a, c, g, or t
  misc_feature (97)..(97): n is a, c, g, or t
  misc_feature (120)..(120): n is a, c, g, or t
tctaaccatacgatgatctccgtatagctgtctttccacntactcatccttcatctaggaagtatgaatgcactaggacatgtcgagggccagatgnagaactccatgccagcctgactntagcctgctggatgtgctggatgttcccgagggcatcttgcctgacaagcagagcactgagcaagccatacagttgttggaaaagatgagaacgtcatccagtcctttcttcctggccgttgggtatcataagccacacatccccttcagataccccaaggaatttcagaagttgtatcccttggagaacatcaccctggcccccgatcccgaggtccctgatggcctaccccctgtggcctacaacccctggatggacatcaggcaacgggaagacgtccaagccttaaacatcagtgtgccgtatggtccaattcctgtggactttcagcggaaaatccgccagagctactttgcctctgtgtcatatttggatacacaggtcggcgccttctgagtgctttgacgatcttcagctggccaacagcaccatcattgcatttacctcggatcatggtttcctcatgaggacaaatacctgattttgaataaagcagcattcagttgaaataaccctttctgtggtaattccaagtgaatatttttcttctaggtgatgagtttctacttcctctggtttttacaacaggaaatgaaatggtatctaaaataaacaagctgtggtatg

SEQ ID NO: 87136 - DNA, 1483 bp, Homo Sapiens
cagtcgacggtaccggacatatgcccgggaattcggccattacggtccgggggccccggaggggagggacgcagggaagagtcgcacggacgcactcgcgctgcggccagcgcccgggcctgcgggcccgggcggcggctgtgttgcgcagtcttcatgggttcccgaccgaggaggtctctgtggctgcggcggcggctgctaactgcgccacctgctgcagcctgtccccgccgctctgaagcggccgcgtcgaagccgaaatgccgccaccccggaccggccgaggccttctctggctgggtctggttctgagctccgtctgcgtcgccctcggatccgaaacgcaggccaactcgaccacagatgctctgaacgttcttctcatcatcgtggatgacctgcgcccctccctgggctgttatggggataagctggtgaggtccccaaatattgaccaactggcatcccacagcctcctcttccagaatgcctttgcgcagcaagcagtgtgcgccccgagccgcgtttctttcctcactggcaggagacctgacaccacccgcctgtacgacttcaactcctactggagggtgcacgctggaaacttctccaccatcccccagtacttcaaggagaatggctatgtgaccatgtcggtgggaaaagtctttcaccctgggatatcttctaaccataccgatgattctccgtatagctggtcttttccaccttatcatccttcctctgagaagtatgaaaacactaagacatgtcgagggccagatggagaactccatgccaacctgctttgccctgtggatgtgctggatgttcccgagggcaccttgcctgacaaacagagcactgagcaagccatacagttgttggaaaagatgaaaacgtcagccagtcctttcttcctggccgttggtatcataagccacacatccccttcagataccccaaggaatttcagaagttgtatcccttggagaacatcaccctggcccccgatcccgaggtccctgatggcctaccccctgtggcctacaacccctggatggacatcaggcaacgggaagacgtccaagccttaaacatcagtgtgccgtatggtccaattcctgtggactttcagcggaaaatccgccagagctactttgcctctgtgtcatatttggatacacaggtcggccgcctcttgagtgctttggacgatcttcagctggccaacagcaccatcattgcatttacctcggatcatgggtggggctctaggtgaacatggagaatgggccaaatacagcaattttgatgttgctacacatgttcccctgatattctatgttccctggaaggacggcttcacttccggaggcaggcgagaagcttttcccttacccctcgaccttttgatttccgcctcacagttgatgggagccaggcaggcatccatgaactttggtggaacttgtgtctc

SEQ ID NO: 87137 - DNA, 728 bp, Homo Sapiens
tgacaggtaccctgcagggagagggtggggccctgagctggactccacccaacactgccacctccccagcctgtgtcctccctaccacccgaggagctgaaggacccaacagcacaccctcagtggtttctgaaaggaagcaaagttctttctaccctttttcactttgggtgaaaacatgtggctgggttgacaagtcggttttttagaaaggaagcactgactagcgaaggactcgcccagccagaagagggctctgcaaagacagccccatccccaggatgggaatgctggattcagacaccacaaaccaagagaacccagactctggacatggagcagtaccagggtgaaagacttttcccaccgacatggtcacatagccattctccttgaagtactgggggatggtggagaagtttccagcgtgcaccctccagtaggagttgaagtcgtacaggcgggtggtgtcaggtctcctgccagtgaggaaagaaacgcggctcggggcgcacactgcttgctgcgcaaaggcattctggaagaggaggctgtgggatgccagttggtcaatatttggggacctcaccagcttatccccataacagcccagggaggggcgcaggtcatccacgatgatgagaagaacgttcagagcatctgtggtcgagttggcctgcgtttcggatccgagggcgacgcagacggagctcagaaccagacccagc

SEQ ID NO: 87138 - DNA, 1156 bp, Homo Sapiens
ctatttctggaagtaattccacaggtaatttgctccactgaaaatattcctctgccttgggatgccggcatgcatggatctgagtgttcggtctttgtgagatgatgaaggatctcaggcatgttcctaaacatgtctagcttattcacatgaacctggactcctaattcttcactaaggttggtgaacagatattcatagccataagccgctttgcagttcagccacacaacatggtacgggctccgagtgatccagcttcggaccagctctaagactccacttaaacactcctcccgacttggaatttggtaaaatcttggatcacagaacgtagtatccaaatatacactttggatgtctttgactctgcccccggagtgcagaagctccattctagcagcttctccttgcgccaatctgaagtctcctgtgtacaggacagttccattattgccctgaaataaaaacctctcctgatgcttcatccactaaagatatctgggtaggagtctcgatttcaatagatatctgcactccaaccttcttttcaaggtaggggctcttaatcctttcatgtgatctttgtggcagtgggacaggaagtaggcgcgggccctcaggttctccctatcgaagcggtctatggagatagttggatactcggccatctgcccctcgaaagaactcatagcgccgccgatcccagagtccgggaccccaaaaccgcagctgaagccaaggccagccctgaccgcgccgccacttccgggaagccgcgcgctgcctcgccattgggcggccgaacgcagccacgtccaatcagaggagtccggagaccgggggcaaagtcaaggagcatccggtcgggttctaggcgcccgctgcttgggtttaaatcacccgcgcttcgctgcacgcgatgggccctgagccctgcccagtgcaaggctcattcccgcccaacaaacacaggtgttgctctggtaaggcgttgcccatgtctgtggaggtgcagtcgcgggaagggaaatcgaaactcccagagcaggtggccccagccgacgaggtgagtgggctgcggaactgcgcttagaaatcattcttcgttccgccctcgtgccgaattcgccacccaggcctcgctaccttggac

SEQ ID NO: 87139 - DNA, 651 bp, Homo Sapiens
gcaaaaatgcagctctaaaaaaaagtgaaatcaaatgttcaagtgtaaattgtactgtagcagtgttaaattttctaaaattaactaggtcaacctagttctaaaattaactaggtcaactaagtcaagtcctaaactttatggattatcctaaatggttatcttctccccctaaatctccaacctctacagtctaagttcaaaacttgttttcaagaaaggagaaaatcaacaccatggttgctttgaactccaagagatttttctgctcttgttcaataaactagggacattacattctcaatctgatgcacctggctgaaactcaatactgtggctagtttcctggttcccaacctctcttcccacccctcccacttttgactccatagagacaaaagatctctctggcaaaagggaaaatactatacttccctcagattccaaaagaagcaaagcattattctattacagggacagccctgtattagggccagggtactaaatgagtaccatctctgtataatagtcatctgtgtcataaatgaactgaatgagagtcataactgtatttaaaatttggtgaaattgctttgggatcataaaaattgttgccctgtgaaagaagaataaacacaaacattaaaaaag

SEQ ID NO: 87140 - DNA, 1206 bp, Homo Sapiens
  misc_feature (89)..(123): n is a, c, g, or t
  misc_feature (295)..(303): n is a, c, g, or t
aaagatgtatagactcacctatagggcgctagctccggttttagccgaacgaccgagcgcagcgaagtagtgagcgaggaagcggccgnnnnnnnnnnnnnnnnnnnnnnnnnnnnnnnnnnncagtcgacggtaccggacatatgcccgggaattcggccattacggccggggggcacggaaaaggccaggcgacaggtgtcgcttgaaaagactgggcttgtccttgctggtgcatgcgtcgtcggcctctgggcagcaggtttacaaaggaggaaaacgacttcttctagannnnnnnnncagtttcttctataaatcaaaacatctcaaaatggagacctaaaatccttaaagggacttagtctaatctcgggaggtagttttgtgcatgggtaaacaaattaagtattaactggtgttttactatccaaagaatgctaattttataaacatgatcgagttatataaggtataccataatgagtttgattttgaatttgatttgtggaaataaaggaaaagtgattctagctggggcatattgttaaagcatttttttcagagttggccaggcagtctcctactggcacattctcccattatgtagaatagaaatagtacctgtgtttgggaaagattttaaaatgagtgacagttatttggaacaaagagctaataatcaatccactgcaaattaaagaaacatgcagatgaaagttttgacacattaaaatacttctacagtgacaaagaaaaatcaagaacaaagcttttgatatgtgcaacaaatttagaggaagtaaaaagataacatgtgatgattggtcaagaaattatccagttatttacaaggccactgatattttaaacgtccaaaagtttgtttaaatgggctgttaccgctgagaatgatgaggatgaaaaatgatggttgaaggttacattttaggaaatgaagaaactcagaaaattaatataaagacagtgatgaatacaaagaagatttttataacaatgtgtaaaatttttggccagggaaaggaatattgaagttagatacaattacttacctttgagggaaataattgttggtaatgagatgtgatgtttctcctgccacctggaaacaaagcattgaagtctgcagttgaaaagcccaacgtctgtgagatccaggaaaccatgcttgcaaaccactggtaa

SEQ ID NO: 87141 - DNA, 986 bp, Homo Sapiens
  misc_feature (954)..(954): n is a, c, g, or t
cagtcgacggtaccggacatatgcccgggaattcggccattacggccggggactgggaggagtgcggaacgcctggtacagataggggtggggatttgggtgacgcatttaaaagacagcgtgagactcgcgccctccggcacggaaaaggccaggcgacaggtgtcgcttgaaaagactgggcttgtccttgctggtgcatgcgtcgtcggcctctgggcagcaggtttacaaaggaggaaaacgacttcttctagatttttatttcagtttcttctataaatcaaaacatctcaaaatggagacctaaaatccttaaagggacttagtctaatctcgggaggtagttttgtgcatgggtaaacaaattaagtattaactggtgttttactatccaaagaatgctaattttataaacatgatcgagttatataaggtataccataatgagtttgattttgaatttgatttgtggaaataaaggaaaagtgattctagctggggcatattgttaaagcatttttttcagagttggccaggcagtctcctactggcacattctcccattatgtagaatagaaatagtacctgtgtttgggaaagattttaaaatgagtgacagttatttggaacaaagagctaataatcaatccactgcaaattaaagaaacatgcagatgaaagttttgacacattaaaatacttctacagtgacaaagaaaaatcaagaacaaagctttttgatatgtgcaacaaatttagaggaagtaaaaagataaatgtgatgattggtcaagaaattatccagttatttacaaggccactgatattttaaacgtcccaaaagtttgttttaaatggggctgttaccccctggaaaaaggatgaaggatggaaaatggatgggtttgaaagggttaccattttttaaggaaaatgggaagaaaacttctntaaaaaattttatttattcaaggaacacgggc

SEQ ID NO: 87142 - DNA, 551 bp, Homo Sapiens
tcctactctagggcacctgggaaccaaccagtggtgcctttggaaatcttggtttatgcttcctctctgacagtaggaaaaagctattgtgggagtttctcctgcaatgtagagtgatggaagagcagaattgtggaggagcagagttgctttgttttgtctttgttgtactcagctggaaagctgtttaaggaaagaatctggtcatatgacctcctttctgcaattggaaatgaacgccacagggaaaagaagatataagacacagaatgctccttgcctggctaaaatggaagaggacaaaggaagcagaatactttctgggcttttggcttttgctaccctcctctggcagacccctgtccaagacgctggctgtgttgtgtgccaggctagagcttgtacctactgtaaaatctgtgtgtgatgtctgttgagttttttggaaaacaaaaaacttatattttaaaatacaaggtattagataataccaagggcagataattccacccttggaaataaaaaagattttcttttcttcagcttgaaaa

SEQ ID NO: 87143 - DNA, 755 bp, Homo Sapiens
cagtcgacggtaccggacatatgcccgggaattcggccattacggccggggggccagtcccaaaatggaacataaggaagtggttcttctacttcctttatttctgaaatcaggtcaaggagagcccctggatgactatgtgaatacccagggccttcactgttcagtgtcactaagaagcagctgggggcaggaagcagagaagaatgtgcagcaaaatgtgaagaggacaaagaattcacctgcagggcattccaatatcacagtaaagagcaacagtgtgtgataatggctgaaaacaggaagtcctccataatcattaggatgagagatgcagttttatttgaaaagtaaaggtgaccatggtccttgggccctaacatctggacgaagccttgtaaaacagaaatactgaggtgttttaatcctcagaaacatttagattgggacacaaatcttattttttactcttaaatttttcacattttgggggacatggtctatatttttctcagatttctgatatgttgtcttttaaaaatgtgtaaaagttacagttccttttctatagtttattttaaaatgtgggtcaatagtcccactgcttagaataagaggcacacaggatttcaatagaaattgcatgccttttttagatgtgcgaatgtttcattaagcgtatgaatatttgaagagatgtttgacactttaaaaactgtttcctctactgtgttggtggccaggtattaagacct

SEQ ID NO: 87144 - DNA, 1021 bp, Homo Sapiens
  misc_feature (404)..(475): n is a, c, g, or t
  misc_feature (909)..(943): n is a, c, g, or t
aactaggcattcttctatgttctaggtcttcaagaaacctccatacccaagaaaaaatagaaagcaaccatgttctactatggtgccaaaaatagttgaacatcgacatcaaaaagattctttctgtctgcttattcacatattctggtttgaattaaaagtgatgaaattatcctaaatacagttggccctctgtatccatgggttccacatccacaaattcaaccaactgtggatggaaaagacttgaaaaagatgagagaaaataacaatatgacaataaaacataatacaaataaaaacaatacagtataacaacgattacatagcatttacattatattagggattgcacaagagaaggtatgtaggttatatgcaaatactgcaccattttacataannnnnnnnnnnnnnnnnnnnnnnnnnnnnnnnnnnnnnnnnnnnnnnnnnnnnnnnnnnnnnnnnnnnnnnnctttacagtagatgaacacaaagatgaaaggaaaagtctgacctaggtctgcggggagaagtggaactccatttttgacaggtgatgccattttttgttttggacatcgtccctctgtagttctttccattcccagtcttgcactctgaaagatacatttacttttcaaataaaactgcatctctcatcctaatgattatggaggacttcctgcccccagctgcttcttagtgacactgaacagtgaaggccctgggtattcacatagtcatccaggggctctccttgacctgatttcagaaataaaagaagtagaagaaccacttccttatgttccattttgggactggccagcagtgcccagaaagtgtgtcccaatcccccccggccgtaatggccgaattcccgggcatatgtccggtaccgtcgactgnnnnnnnnnnnnnnnnnnnnnnnnnnnnnnnnnnncgccgcttcctcgctcactgacttcgctgcgctcgtcgttcggtataacgaggagcgcctatatgaatctatacattc

SEQ ID NO: 87145 - DNA, 310 bp, Homo Sapiens
  misc_feature (52)..(127): n is a, c, g, or t
gtattgtttttattggtattatgttttattgtcatattgttattttctctcnnnnnnnnnnnnnnnnnnnnnnnnnnnnnnnnnnnnnnnnnnnnnnnnnnnnnnnnnnnnnnnnnnnnnnnnnnnntatttaggataatttcatcacttttaattcaaaccagaatatgtgaataagcagacagaaagaatctttttgatgtcgatgttcaactatttttggcaccatagtagaacatggttgctttctattttttcttgggtatggaggtttcttgaagacctagaacatagaagaatgcctagttaa

SEQ ID NO: 87146 - DNA, 295 bp, Homo Sapiens
aagagtaaaaaccaaataactaattctaattggcaaaaaaaggtaaataaataaacatcctaagtagctgctgaaatttccgttgtgtcttatagtttctttaggtctgtgttcctaagatgcttaaaatttttatcatgaaaaatcctattttctctatacccttcctgtactgttctattttggaaccagagaatcaataactggcttggtaatgagctcattgtccttaacttttgctttattgattcacaatacacttactgaaatgtaataaactattcataaacttgca

SEQ ID NO: 87147 - DNA, 813 bp, Homo Sapiens
gtgcactgaacagaatagccaaaggcttaggagcagcctggcagtaatgtcattgttctcgtttcttttgagccagattgctctcctggctagggaaatatgcggtcactttatttaccagtgttcagatcaagcattcctttcatcactgtcaccttcacagagggcagtctgtggatgttactttcctgtctttatctgtccacctatctctggagaaaaaaattaagcagccatgcccttcaggctgaatcaaacaattgaaaagaagaaaatatgtcagtttctttttgcctccatccaatacttaaccacagccaaacttgcattttcatttctagagagggtagacaccttcattcctaaaacagttatcccacaagggtcccaccattgcagagagcagcaggccagtgttgtctttgtttctctgttcctgaggcttcctagaagtcatcacaatctccaatttatccaggctgagctcactttctccttgtgtctcctttgagttaggcatggaaatagacatgacagtgcatatacataatcatccttctgtgacaaattgcattgctctctgcttatctgagctctcaaaatgcaattggtagaccttgtcatgaaccaataacaagcagtttgcagatcaaactcatccatggaccacactttgctagaccactttctagatgaaggtttccaaactttttgctgggccgggtgatatttttaaaacagggaatccaacagtgagccaaacggacaaagatgcttgctctcatggacttccatcatggccaggagagtggg

SEQ ID NO: 87148 - DNA, 865 bp, Homo Sapiens
cactcaagcccagaaaataaactccagataatgatactgagaaatttattggttggaaaactgctatctacaggccttccactacctatttcttagtagattttacatttttaaagggttgtagaacaccaaaacaatatatgacagatactgtgtttgggccttaaagcctaccctttatataaaaagtttgttgactcctaggctctcatttgcaagtagacaaatgagaaacagcaaatatttaaggaaaagagcaacatgaaaaatacacagcaaacttaacaagcagaaagaattcctggggaaacaattcagggggaaaaaatgaccaagtataattagtattatatggaataataattactactacttataatagtttcatatgtaatcctcatcatattatatgtcataatcttcaaatattttagaggttattgtactaattttaaaaatgcaagttgctataaagaagtatcttggaaataaacagttgtgaaaataaactctgttttaggctgattagttgaataaacatggctgagaatcaaattactgagctagaattttgagctgaagatacttccagagcttacaagaaaagataaaaaagatggaagttacagtaaaagacatagatgtatctcttaaagacatagaaaacccagaacaccatctgtttaaaaattaaacttcatgagattaagagccatatgtatagagaattcaccattgaataccctgcatatatcacagtgccaggtaaatactatgcaataaatatttttgaatgtatgtatgtatgttacagtataaatatatagaggagttccagaaagtgaaaaaagaagtgaagaatagg

SEQ ID NO: 87149 - DNA, 890 bp, Homo Sapiens
aatttcagaatatcgtcgacccacgcgtccgaaatgatgtccgtgaggttgttgaagattggaaattcatagcccaggttcttgatcggatgtttctgtggacttttcttttcgtttcaattgttggatctcttgggctttttgttcctgttatttataaatgggcaaatatattaataccagttcatattggaaatgcaaataagtgaagcctcccaagggactgaagtatacatttagttaacacacatatatctgatggcacctataaaattatgaaaatgtaagttatgtgttaaatttagtgcaagctttaacagactaagttgctaacctcaatttatgttaacagatgatccatttgaacagttggctgtatgactgaagtaataactgatgacatacatttgatcttgtaaaaatagcaaaatattatctgaactggactagtgaaaaatctagtatttgtatcctggcaaataatactaatttataatcccacagtaaagttcatcctttgactgggctggaaaattccagttgtattttgaagactgattttaaaacttttctgcatttggtaaaggtatgtaaacttttcctgcactcactgaataacaactaatcttttaatataatattaaactggcatatttaacaacgtgaactaacttgatataattacttaatggggatgcttggatataaaaatcaccttaatgtggcccgggcaacggggggctcaccacctgtaaatccccaccactttttggaagatctaaggggggcctattcacccggagggtggggaatctcaaaaaaccgcccctgaacaaacatcggaaaaaaacccccttctcctaactaaaaaaggggaaaaataaccccag

SEQ ID NO: 87150 - DNA, 813 bp, Homo Sapiens
  misc_feature (703)..(703): n is a, c, g, or t
gcacgagggctaacagaacaggagctcagctggtcacacacagcaacgaatacagactttataaagttcagaaaagttaccaaacagtggtaaccataacaagtaccaacaatgaactatggggagggaggagaatctgatttccagagttaccacattataatactattcaaaatgtcacatttttagcaaagattacatgacaaggaaaaaccagaaaagtatggcccatacacaggtaaaaaaagaaattaatagaaactacccctgaagaagcacagacttcggatgtacaaaacaaagacttttcatcaactcttttagatatgctagaagagctaaaggaaaccatggacagagaacaaaaaaattaggaaagcaatgtctcatccaatacagaatatcaataaagagattgaaattgtagaaaagaaccaaatagaaattctggagttgaaaagtattataactaaaactgaaaattcactagaggtattcagcagcaaactggagaagtcagaagaaagaatcaacaggcttcaagataggtcaattaagattatacagtctgaggagcagaaaggaaaaagaatgaagaaaaatgaacagagcataaaagacctctgggactctatcaagcataccagtatatgcatgaggggagtcccagaaggagaagaaagagagaaagggacataatatntgaagaaataatggtagaaaatgtcccagctttgatgaaatacatgaatctagatattcaagaggctcaaagaaccctaaatagggtaaactcaaaaagacccacaccgg

SEQ ID NO: 87151 - DNA, 951 bp, Homo Sapiens
ggctaggtagcgaggccgggtgtgttgaatcggcaccgaggggacgtacagaagctgctttcccaatgtcccaggtgtggccgtccctatcctgggacatcggggacgtacagaagctgctttccggagtagaaagactcaggaaccccgacctgatccaagcaggctactactcctttggcctcgctaacgagaagagagccaaggagttggaggccacttttggctgccggatgtcaccggacatcaaacaggaattgctgcgatgcgacataagttgtaagggtggacattcaacggtgacagacctgcaggagctcctcggctgtctgtacgagtctcaggaggaggagctggtgaaggaggtgatggctcagttcaaagaaatatccctgcacttaaatgcagtagacgttgtgccatcttcattctgcgtcaagcactgtcgaaacctgcagaaaatgtcactgcaggtaataaaggagaatctcccggagaatgtcactgcgtctgaatcagacgccgaggttgagagatcccaggatgatcagcacatgcttcctttctggacggacctttgttccatatttggatcaaataaggatctgatgggtctagcaatcaatgatagctttctcagtgcctccctagtaaggatcctgtgtgaacaaatagcctctgacacctggtcatctccagagcagtgggtgttcaaaaacatttccccagctgatgctcatcggaacctctgcctagctctttcgaggtcacaagactgtaacgtatctgacccttcaagggcaatgaccaggatgatatgttttccggcatgtggtgagggtcttgcgaacatccagaatgttaactgcgaaattccgggttgggggcttggtccggctaaccactcagagggggcggatctctcttggcctgaagtcaacagccgacggg

SEQ ID NO: 87152 - DNA, 386 bp, Homo Sapiens
gcacgaggatgagaactccctaagagttctcataataaatcatctcatcacaaatcaatacggtatacagagttaaagtggaatgaggtaagaagatacagctacagaaaatagttgcgtgtatgggagaacagtcattgtaattgggtagttttgttaataaatatttttaaatcttgcttttcagaaattaccgaatgtgtataaacaaataaagaaaaataatttagctgtgttttagacagcattagaatatattgttcagcacagtaaaatatatttgaaatttgataagccaaaaatgtggttttgaatgaatattttgtgaatctttcttaaaagctcaaatttgtagaattctaaatagaataaacacttgcagcaga

SEQ ID NO: 87153 - DNA, 683 bp, Homo Sapiens
aaatagagatgaggtttcactatgttgcccaggctgatctcgaactcctaggctcaagcaatcctcccaatatgctgggattacaggcatgagccaccacctggcccaagcaagaaattgacactatatagttatttaaggtagtcaggcagtagaaacattgccagaaggatagaaaggaatttggattatatataaggaaaataacaaatcggtgtttttaagactatcactgtcatatattagatccttgtattagtccatccattaatattagttctattcgtggtgctaggtagcttgacaggtatgatatgcataagtcatagctctattcttagtgtcataaagtgtagctaatttataagctctaagtaatcagctttatctaatttgagggcattaaaattactgcctagaactttgagaagagaaaaattcagggataagttgaaaggcactggaactgttcatgtccataccagaccggtaaattataagatccagatgttagtgtctagaattagctgtttagaattcagaggggacatatgttttaactttgtcatatattagcaagaattggtctactgtgatgtttggggaggaggagggggggataatttttttaatgcacttgtatgtgaagacagtttgtatgacataatacaaaacttttaaac

SEQ ID NO: 87154 - DNA, 1189 bp, Homo Sapiens
tggcttgtaatatgaacagctggtaaaaaaagcaggctggtaccggtccggatttcccgggatatcgtcgacccacgcgtccgcggggagtcggcctcggggctctgctctcctacctcagtctgccctaccctggaatggggaaaatgcggacatgccactcagtccggccgcgaacagtgctccagaactcagagagttttccagacgggtggagatcgcgttccctgcccgccgaggtcccatcgcttccctgctgggaagacaaatgaggcgctttagccgtctccacggccagcccctccctcataacccgagattctttgtgggctcttagtccatagctgcctttgaggtggtgtagaccttgctaaccaggacggcccagtaggcagagctcatttttattcctgtctgcaatcgtgcaaaaacgcctcttatggaaaagccagagcgccaggagtcagcaaaacacactaaagattgggcagtcactggggagaacgtgagtaaaagcacaggaacagcaaagcgttcaggaacgttcgaggctgacgcaaccggcgcaggaaggtggtgtgtggtgggagagtgggaggagacagtggaaagtttagacttgcttctgtaagtgataagaagtcatcagatattttcaagcaggagaggaaaataatctctctgtttcgcaaagttaactctcatggcaacagagcagagtagcggggggatgggggctgggagatgttgggaagctattgttaccactctggtgaagagtcatgggacctcaaaagctgggatagtcacggtgggaatggaaaggaagggcacaagctgagaggcatttgggaggagaatcaatagcactttattgactggatgtgtgagatgagtgaggacagcaatcagaaaaggactttgaggtttctagcctgagtggctggaaggacaccatttcccctacctgaaataggtagcaaaaaggagagagaaagagagaagcagagggattttgcaaagggaataggagttcagtttttgacatgtggcatttgaattgcaagaagtacatccctgtggatgtaatacccagtagacagttgggaattaggatctggtgtcgagaagaaaagtagagatgagatccaaagggtttatagtggatcgggagagaaattgatgacct

SEQ ID NO: 87155 - DNA, 857 bp, Homo Sapiens
aaggaaacacaaataactttaatgatttgtggtaaaaaagaaggaagcttgaatctatgattgaaaaataaaaaataattacatgtatatctacacagaaagtacaatcacaagtttcaagagcttaacacaaactaactgctgtcaaatatttaacaaaagcaaagatgaaactgcttaacagtcagggaaaaacaacaaaaagaagggaggggtgataaaccaagaaaatgaatgacaaaaactaagagacctcataggtgtctttacaatcaggaattcagatgcaaggaacagacacaaacctgtctaaaatgtgacctatgaggcaacagaaagtgacttaaagtctgttataaataaaaaatgacaaccaaaatcctagagagtcttaaattatttaatccagacattatctaacgcctcggatttttgtttggtgctatggtgttcattttctatcagaatgaaatgtaggacaaatgcattactggttgtagagagtgtttcagagctaattcacccagcaaggtcagggtcaaaaggttattattttgttcatatatttcttgatatgaaaaaacaacatgtcaaagaaagaattaaagcacaatgtgtattcaagtgatacacagaatctcaaactttcaagtaagtgcatcttaagatgttgatgaacttcagagattctcactattttaaaactagggatattctattctggtagttatcaaactgtcctcttttgttcatgaggaaccaaactggcaagtctctcagtgtctccttccccaagtctttaattttataagtatattcaatgtctaggaaggaattattaaagaattctgcttctt

SEQ ID NO: 87156 - DNA, 577 bp, Homo Sapiens
aatcaatatccattagtaagattagcaaagatactgttgctatttttatatttgtcctttaaaaaggtaggcccttctccacttacttccatatccctagagaaatagatatatgtactgttgtcaaaaaaaatcaaacacacaaatactggaatattaaaagacaggctcctcatttcttctcttcctcatcctggtacacagtgcccaaaagctttagaaatgccattatgaacaatagcttttgctagttgttaggaaagcaatttatgagttgggaattattgtggaagacttgatggatgattatagctctgggtcactaacttctttttatgaaaacatgaataatactagttataactcaaagccaaaatagtgtaaaagctgtggagtgcttttgtagggggtatattaaattgccagaatattgcagaggctcatcttggaacaagaagtagaatgctgtttcagttaagaggactgggctgtttcaggcaacagactgatcatttcgcatcacagtggtggctgggttttccatcagtcattactaatggcgatgagaaaaagtcag

SEQ ID NO: 87157 - DNA, 640 bp, Homo Sapiens
  misc_feature (538)..(588): n is a, c, g, or t
tttcctgggtcaactcttttaatttatatacaaagcaaagaacaacattaatggagatgcacaatgattattcaaacaagctatatatatgtacaaaggcaaacagacacataacagtctctgcagactgattgtatatagtaagaaaagatcaaaagactttaaaacctaaatgacttttgacatacaaactcttcttgagaatgtttgttgtaaatggtttcaaaaatacaaattatagccaatcaaaacattgctttggttggtgcatttaagtatccaactcaaaaagcatatcaaatattttgggtactaggcagtttccaaagtagcatggtagtattacttgttaaaagggttctgttttcattaacagtactaagtggaagggatctgcagattccaaactggaataagctctatcatattctgaaacaagaattagaatgacttgagaacgggcaaataacaaagcaaaccaatataattatatggtcattctgaccccagctcttatacaaattatacatgtattttnnnnnnnnnnnnnnnnnnnnnnnnnnnnnnnnnnnnnnnnnnnnnnnnnnncacatacacatatatactggaacctatagtagaaaaggaaactagtagggcc

SEQ ID NO: 87158 - DNA, 971 bp, Homo Sapiens
attcgccttgctggaggcagcagtgtgcatgaaggccggggtggagctctaccatgctggccagtggggaaccgtttgtgatgaccaatgggatgatgccgatgcagaagtgatctgcaggcagctgggcctcagtggcattgccaaagcatggcatcaggcatattttggggaagggtctggcccagttatgttggatgaagtacgctgcactgggaatgagctttcaattgagcagtgtccaaagagctcctggggagagcataactgtggccataaagaagatgctggagtgtcctgtacccctctaacagatggggtcatcagacttgcaggtgggaaaggcagccatgagggtcgcttggaggtatattacagaggccagtggggaactgtctgtgatgatggctggactgagctgaatacatacgtggtttgtcgacaattgggatttaaatatggtaaacaagcatctgccaaccattttgaagaaagcacagggcccatatggttggatgacgtcagctgctcaggaaaggaaaccagatttcttcagtgttccaggcgacagtggggaaggcatgactgcagccaccgcgaagatgttagcattgcctgctaccctggcggcgagggacacaggctctctctgggttttcctgtcagactgatggatggagaaaataagaaagaaggacgagtggaggtttttatcaatggccagtggggaacaatctgtgatgatggatggactgataaggatgcagctgtgatctgtcgtcagcttggctacaagggtcctgccagagcaagaaccatggcttactttggagaaggaaaaggacccatccatgtggataatgtgaagtgcacaggaaatgagaggtccttggctgactgtatcaagcaagatattggaagacacaactgccgccacagtgaagatgcaggagttatttgtgattattttg

SEQ ID NO: 87159 - DNA, 656 bp, Homo Sapiens
  misc_feature (139)..(230): n is a, c, g, or t
ctccagtcaaaactttgtttcatgtgtaaacgtatataaaatatgtataaaatactctcaggctctatgtatatggtggatatgaaacataaaagggttttgtgtttagacttgagtcctgtccccaagatatctcatnnnnnnnnnnnnnnnnnnnnnnnnnnnnnnnnnnnnnnnnnnnnnnnnnnnnnnnnnnnnnnnnnnnnnnnnnnnnnnnnnnnnnnnnnnnnttataaactttttaaaaaatggcatcatcatagattacatctagattggcatatatatacctgttttctctgggaatttggatttccattattacatgtgaactcgagttcttttcactttggggctcttgttgacttactttagaagtccaagtagaacttttgaaagatggcctttcacacatatgtaaggtcttttcaggactgttagaagaccaaatctcttcctttcttttttcccctgttgtttcttttgggtttgatataaatattttcctcaggaaaaaaaatgtattgctgcaatttgagtaattacttcttttaaaaatttttcatatttgaaattctctttcagattagtttgcatttttttgtgtgtatgactactgagttctggtaaataaagggaatcttctatattataaa

SEQ ID NO: 87160 - DNA, 1228 bp, Homo Sapiens
  misc_feature (653)..(778): n is a, c, g, or t
  misc_feature (790)..(800): n is a, c, g, or t
  misc_feature (825)..(834): n is a, c, g, or t
  misc_feature (858)..(1004): n is a, c, g, or t
  misc_feature (1020)..(1028): n is a, c, g, or t
  misc_feature (1144)..(1186): n is a, c, g, or t
ggaaaactagttttattatattcagatagccttgttttttaaaaaggcctttgcatacacctttatgagatagtgtaaaattgactatttatagtactatggatttaatgaaattatatgtcatttcacattgtatgccagaaattaggctaccaattatgaattaaagtcagtagttaaattaatactagatagaattagaaattttgattagagagattatgctatattatggaaaaacttgttaatgtagaattatactgcttcatattattttacctattagtacactcatagttagctttgtaataaatttatgttttctttaataattttagttcttcaaagaatggctgatgctggcctgtaatttttctttcaaggatgataatttgtgtgttgtttgatttgtttatattttacatctctgtagttttatttttagaagttgtgagatattggatgtgtggctatttttcctttctctgtattctttatgaaacataacttttgaaaaacctatgtattattcatacagctttggtttgtatattctgtatagcctaactacacacatcaaaatgtatgtcaaccaagtgtttagaatgaaattataagtgtttaagtccaaataaagcatgtgatgtggaatnnnnnnnnnnnnnnnnnnnnnnnnnnnnnnnnnnnnnnnnnnnnnnnnnnnnnnnnnnnnnnnnnnnnnnnnnnnnnnnnnnnnnnnnnnnnnnnnnnnnnnnnnnnnnnnnnnnnnnnnnnnnnntttgggggcccnnnnnnnnnnnaaaaattttttaaaacctttttttnnnnnnnnnnccccaaaaggaaaagaaaaggggnnnnnnnnnnnnnnnnnnnnnnnnnnnnnnnnnnnnnnnnnnnnnnnnnnnnnnnnnnnnnnnnnnnnnnnnnnnnnnnnnnnnnnnnnnnnnnnnnnnnnnnnnnnnnnnnnnnnnnnnnnnnnnnnnnnnnnnnnnnnnnnnnnnctttatttaaattttnnnnnnnnntgggaatttttgggaataggggggtaatttttttaaaccttcggccgacggggaacccccccaaaagggggtggaaaaacctaaatccccaggggaataaacccttgtggcccctnnnnnnnnnnnnnnnnnnnnnnnnnnnnnnnnnnnnnnnnnnnttttcccttatgggccccgttttaaatcaaaaggggggaaaa

SEQ ID NO: 87161 - DNA, 932 bp, Homo Sapiens
  misc_feature (863)..(863): n is a, c, g, or t
gtggtaccggtccggaattcccgggatatcgtcgacccacgcgtccgggctcgccgcggcgcggagtcccggctgcgggatagaccgagggccatggccgcctctcccggacccgccggcgttggcggcgccggagcagtctacggctccggctcttcgggcttcgccctcgactcgggactggagatcaaaactcgctcggtggagcagacgctactcccgctggtttctcagatcaccacgcttattaatcataaagataataccaaaaagtctgataaaactctgcaagcaattcagcgtgtaggacaagctgtcaacttggcagttggaagatttgttaaagtaggagaagctatagccaatgaaaactgggatttgaaagaagaaataaatattgcttgtattgaagctaaacaagcaggagaaacaattgcagcacttacagacataaccaacttgaaccatctggaatctgatgggcagatcacaatttttacagacaaaacaggagtgataaaggctgcaagattacttctttcttcagtgacaaaagtgttgttgctggcagaccgagtagtcattaaacagataataacatcaagaaataaggttctcgcaactatggaaagactagagaaagtgaatagctttcaagagtttgtccaaatattcagtcaatttggaaatgaaatggtggagtttgcacatctgagtggagatagacaaaatgatttgaaagatgaaaagaaaaaggcaaaaatggcagcagctagggcagttcttgaaaagtgtacaatgatgccttctcacagcttcaaagacatgtgctgagggcatccctaactggcgaatcagccccntaaaaacccaaagaagggagtattttggaccggaatggaaaagtgggcatttgtggaataaagggccac

SEQ ID NO: 87162 - DNA, 1130 bp, Homo Sapiens
tcccagtcatttgcagtatctgttggctttcaatttggtcctcttgtttaaacaaagaaaaatagtaaaattaatctatgtaaaacatgccatatatattcaactgctactaaatataaaaagctataaaactgtgtgttcaattttggtgactgtatctacttcataaatttatcattatctttttataactattagaaccagagttagaaagaagcagtttggctaatataaaaattatgtggattctgttagaatagttaagcttccttaaaataagcatatatcaactaacaaactaaatataaaagctaaacaagtgaaactgaagcagatttattgtaagatttggaagagtacaggatgtttatcatagcacattattaatatttattactcttcctatgtagataagtaatgtcctagatttacaacatagaaaaacaggtagagacgtttagctgtgagtgtacaagtataaatcaattaagtgccagattttgataatcaccagccgctcattcaactcctatgttgcaaagttactcttatgcttttcttacattacttgataaaggcaatgtttaattacatatttcctattaactagctggtagagttcatacctaaagtcagtaaatgttaagaattttttccagctgagcaaatgagtatgtatctagttgtaagaaatcaagaagaggatataaaatgtaatcaggatgtggactttaaaacggaataacctctatgtcctgtaacttttatcactcgtaataatacagcattctcaccctattaaatagaaatttaaagcacccttaaattccagaataaaattgctatttggatagaaaaaacccttaggcaacatttattgaatattaggaaataacttttataggattagaatccattttttatagaaaccaaatttaaaagtatacatattttaatataagtgttgtgataatacagtaaccaaaattgaacacacagttttatagctttttatatttagtagcagttgaatatatatggcatgttttacatagattaattttactatttttctttgtttaaacaagaggaccaaattgaaagccgacagatactgcaaatgactggga

SEQ ID NO: 87163 - DNA, 708 bp, Homo Sapiens
accgctgaattctttcttaagtacgcagccatctcctcttcggagcagcgccagagctacaagaacgacttcaatgccgagtacagcgagtaccgcgacctgcacgcccgcattgagcgcatcacgcggcggttcacccagctcgacgcccagctccggcagctctcccagggctccgaggagtatgagactactcgagggcagattttgcaggaatatcgaaaaatcaaaaagaccaacaccaactacagccaggagaagcaccgctgcgagtacctgcacagcaagctggcccacatcaagaggctcatcgccgagtacgaccagcggcagctgcaggcttggccctagccgccctccccgatggcggggatctgggagggtcgggggagcaaaaggcggtgagagaggatttatttaaaaaaataaacccgaggaagatgctcatttgagccagcaccgccggctttcagggcagcccctgcagacgtctggccctggcgggtggctgcaagcccacctcggccctccctgcgcttcctgagcagtccctgcttatgatgggctccccaggaagcccactgcctcctccctggctgcagcctccggggttcagcctcctgtctcgccagaagactcctaggcccttggggtggcgcgcctgccttttctagttttatacaaagacagccacttttagctactgct

SEQ ID NO: 87164 - DNA, 712 bp, Homo Sapiens
  misc_feature (59)..(105): n is a, c, g, or t
aaatctctgagaaatgagattctgagtttatttcttcttctgttttggtctgtagtgannnnnnnnnnnnnnnnnnnnnnnnnnnnnnnnnnnnnnnnnnnnnnnaccaaatgctgttgagcttttgtcttccaatttcacttttttttctgttttcgatattcctgctgctgctggagctcctcttccatcagctattgctttggaagaaggatttggaagcatctgtgtatcctctttttctgccctgggacattcattacggtaagaggaatctgaggctaccggtgctgtaacttctgaaccacgacttaagtcaagagggagacagggtcccagcttctcaagtggcaaatgtgcaacatcaggcacctctggtactgaagattcttgctgattttgagaactgatggagaatactttcccatcagtggctggagagggagaagaaaccttttctacagaatcatcaggcatgggtaaggtggctaaacgctgagatcttcttctccgctcactatgcttgaaaggtctagggggattcacaggctgtggaggactagttttatttatcactgaagaagaaagctgagatacaagcgtcaaatcctcgacttgtattaattctggggaaagtggtgatttagggggttttatacacccagaagatctccagattcatgtttgcatttcttgctgcgagccttcctga

SEQ ID NO: 87165 - DNA, 564 bp, Homo Sapiens
  misc_feature (487)..(495): n is a, c, g, or t
agaattcggcacgagggagtggtttatcatcaggactatcttgggttaaggcttcatccatgctcactggatgtgtgacagtatttaaagtctgtcattttgactctgtaggtctggacctgaaaaatagaaataaagtctgttgtgtaattcaggtcactaggaaatggctcacaatattaaatgcatcacagataaataattacattatgaatccttttatcaaattgaaagcagtgtttcccagtgattcttagcctaatcattaacaacatttaaaagttcttgaagtcagagtgactaggaaggcatcatcttgaaatggaaagagcactagacttggtaatcagagctcacctattctgatgcttgaccctcttggttagagcaactcagtcctgaaacctttctcaactataaaacaagttgttgacatgatttctgaggtcctttcggcacctcatattctgagtctgtgaatgcttannnnnnnnnggtttcagttagaactgtcaaatcttttaaagtttaataatatttctcaggccaggcacagtagctaat

SEQ ID NO: 87166 - DNA, 826 bp, Homo Sapiens
  misc_feature (310)..(310): n is a, c, g, or t
agaccctgagacctggatgatgtctttgagccaccaaaccaagcagccttgtagccactcctcctttggactgtttcttttgtgagagactaaacttatttttaagccagttgatttaggatgctctattactaataactgaagacattctaattggtacagactgaaacctttataggagttatgcagttcagaagtggactttaggtaagtcatttattttaagctgttgatatagagatttattttctgtaaattttgacgtaaatagtttgagcattagaaatcaacttgaaaccaataaaatgtnatgcttccttggaactgtcatatcgttgacctgcaaaatttcacctttggaacgtgacacaatgttaggcatacctccttttttctaatacatggaatacattttgttggaggtaatttatgtgattcatataccactgctacagtgttagctgacaacatatagtatgaggtaaggatctaattctgtttcctctcacatgattacttgatagctaagcatctgattggtttactgctttaccactgagctgaaatgccgtgttttccatttattaaaatcacacatggctcctgtttttgtcactcagcactttttctccatattcttcaagacgattgtgagtatggtacgtaacaggaattacatctggtaagttgtatagttttgtgtaggaactctatattcatagcatatttgtggaaatgatacctatggaggtttctcacactggtgtgtcattatacattaattgtacaatatgcattttcagtaaaatatttgaaaactgtaaaa

SEQ ID NO: 87167 - DNA, 465 bp, Homo Sapiens
gttggtttaggcatccgatggtgagttgttatggggttggggatgtgagcagtgttgtgaaattcctgagccccctgagggccactaccttctggggataggtgaagtggaaacaaagttctctaactctggaggggtgccctggtctcggggagggggagcactggctcctttaaggccttgagggaatatatcttcccctcccttagagccgtgtcccaaaatcaaagtggaatgcgaagtggaagaaatagaccagtgtaccaaacccagagattgcccagaaaacatgaagtgttgcccgttcagccgtggaaagaaatgtttagacttcagaaaggtgaactggataaaacatgtacctgaatgcttgaagccatgcttgatgtctgcagttctgttacaggtttgtgtcctagaaacacaggaattttaataaattatcttttgtacaactctattaaa

SEQ ID NO: 87168 - DNA, 606 bp, Homo Sapiens
ctagtatctattttcaaaacagtagtcagatgatccttttaaaatgtaagctggattgcgtcattgcctggtccacaatgcccaggtggctctccatttcgctcagaggaaatgcttgagtttcaacaatggcctccagggccctatatcatctgaccccactctttgaacactccttcacttcctccagctccagtcattccttgaaacacccacgaccttctgcctcagggcgtttatatctgctgttacttctctgtagaatgttcttctctaagatatccacacagcccattaattcctataccttttccaagtttctgctcaaatgccaccttccattgacacctttcttgaaatggtctcattgaaaatagcagtccctcttcctgcctgaccatccttatacccttccctgctttgtgtatctacattgcagttactgccatttgacccatatatagatttttttgtcttctctcactagaatatgaggtttaggaaggcaggtatcttcaaccatttggttcactgctgcatctgcagcaccaaagcaggacctgaccacacaaaccacgtcctcaataaatatatattgaataaatg

SEQ ID NO: 87169 - DNA, 899 bp, Homo Sapiens
cagtcgacggtaccggacatatgcccgggaattcggccattacggccggggtcttttctgccgggtaatggctgcttccaagacccaggggctgtcgcccgaatgcaggaagaccgtgatgggagctgcagcacagtcgggggtgtaggttatggggacagtaaggattgtatcctggagccgctttccctgccagaaagtccaggtggcaccaccactttagaaggttctccatctgtgccttgtattttctgtgaagaacattttcctgtggctgaacaagacaaacttctgaagcacatgattattgagcataagattgtcatagctgatgtcaagttggttgctgatttccaaaggtacattttatattggaggaaaaggttcactgaacagcccatcacagatttttgtagtgtaataagaattaattccactgctccatttgaagaacaagagaattattttttgttatgtgacgttttaccagaagatagaattcttagagaagagcttcagaaacagagactgagagaaattctggaacaacagcagcaagaacgaaatgataccaattttcatggcgtttgtatgttttgcaatgaagaattccttggaaacagatctgttattttgaaccacatggccagagaacatgctttcaacattggattgccagacaacattgtaaactgcaatgaatttttgtgtacattacagaaaaagcttgacaatttgcagtgcttgtacttgtgagaagaaccttcagtggacaaaaatacacttaaagatcacatgaggaaaaaaacagcatcgtaagatttaatcctaagaacaagagaatatgacagatgttaatgtccatcaattagttggaactgggaaaatcgtgggaaaga

SEQ ID NO: 87170 - DNA, 1002 bp, Homo Sapiens
  misc_feature (547)..(555): n is a, c, g, or t
cagtcgacggtaccggacatatgcccgggaattcggccattacggccggggggaggggtgaaggaaggggaagaagattgctttagaacaagtggcatgaaattaccatctttgtagaaaccgcagctaacagtgggagttatctaagcaatcagatgttacagggccagcccttcagctgctgtggtgtattctgttgggtagtgaggtagtaggtactttatagacttttaattttggaaattgatgacatccctcaggcatgtattctggaaatggaattcctgtaacttcctgtgtctgcagtatgccctacaattagtaggcagcgtgtaaaaacactagtgtagattataaagatatacattaaaagaggaccagaaatacttggtattcagtggcacagaaagcaggttaaacaaacaaaaagcacagtgttacgcttgcaagtttccatttgttttaataccacgcaatctttcacactcgtgcgtgtgcgcgcacacagagcttacctgacttgctctgcttgagtcatgcagttacnnnnnnnnngacatcttgacacccacacaatattctaatcacaaccttttcagtttcaatctggatatttaaaaacattggcagaagcttctgtgagtttagttcccctaagatgtttcccctgccttatcaagaccctttctcgtctactttttttaagctaccgtatccttaaattattgaaaattttattaattggctggaaaactatactaacccttttgctttgaatggaaaccgaacaatggggtttaaaagcccaacattttaaaagaattgaccaatgggaacctggaaacagtttttttaatggcccacagccaatttcctggctcccttgggggaaatggcactttgtccaaccctttaaaatttacacgggggcggaaaaagaaaggggtttaacacttttattttttccccccctaaacccccttttggtgttctggggagggc

SEQ ID NO: 87171 - DNA, 782 bp, Homo Sapiens
tggaatgtggttgggctgggctcctagcagccctctggccagatccatctgaagtaaaggtaataggcatgagtataagcgggactccagtctctaagtgtaatgcccttagtttgtgtctttgtgtttaatggtggttttcgtatttctgttgggggggtgggaggagctgtcacaaagaaggggagattcaggaatggctccaggacacgtccctttactctgccaagatcaactcaaaagaccacaactgtttcatgatgctggtgaatacacaattctgtatggcactcactgatactgtcacctgagaggaagacgggggaagagacagagtatgggcttaaagaaacaagactgtataataaatacagattaaaaaagaaaaatcgccaccatctcccctgttggcctgattaccccgatcctgctatgtaacacagcaatccctcccctggagaccagaggggcttggcactgtggtggaagccagagcgagcaggcccttaggaaagaaggcaggaacaggaactggcttcaccagaaaagctagaccctcggactcctcctggaaactctcagaagggagggttatggccctctttgtcccttcatatttctggacaaagaccaccaacccaatatcaagccccataaagagcttttagaaaaacagcataagcttgggatgacaggcgtttctggactccctgtgatctcttccagtttattgtctgcctcgccctcgtgccgaattaaacagccaggcctcgtactaacta

SEQ ID NO: 87172 - DNA, 680 bp, Homo Sapiens
ggggccgcaaacgtcagtgtcgggcgcagacggcggcagtgcggcttgctcttggaagttcaggctcggttgtcttttgggagccatggagagtgacttttatctgcgttactacgtggggcacaagggcaagttcggccacgagttcctggagtttgagtttcgaccggacgggaagttaagatatgccaacaacagcaattacaagaatgatgtcatgatcagaaaagaggcttatgtacataaaagcgtgatggaggaactgaagagaataattgacgacagtgaaattaccaaagaggatgatgcattgtggcctcctcctgaccgagtgggccggcaggagcttgaaatcgtcattggagatgaacacatttcttttacaacatcaaaaattggttcccttattgatgtcaatcaatccaaggatccagaaggcttacgagtattttattatcttgtccaggacctgaagtgtttggtcttcagtcttattggattacacttcaagattaaaccaatctagactgaatattggtgtggacatggggggtgggtgggagtagaaaattttgtgtatatcagggcagtatttttttatgaactataaatgattgtctttaataaatatgtgataaaatccaattttttattatttttataaagaacctgaaacattt

SEQ ID NO: 87173 - DNA, 943 bp, Homo Sapiens
  misc_feature (545)..(638): n is a, c, g, or t
  misc_feature (705)..(777): n is a, c, g, or t
  misc_feature (813)..(813): n is a, c, g, or t
  misc_feature (908)..(908): n is a, c, g, or t
ggggtcagtgtcgggcgcagacggcggcagtgcggcttgctcttggaagttcaggctcggttgtcttttgggagccatggagagtgacttttatctgcgttactacgtggggcacaagggcaagttcggccacgagttcctggagtttgagtttcgaccggacgggaagttaagatatgccaacaacagcaattacaagaatgatgtcatgatcagaaaagaggagcttgaaatcgtcattggagatgaacacatttcttttacaacatcaaaaattggctccccttattgatgccaatcaatccaaggatccagaaggcttacgagtattttattatcttgtccaggacctgaagtgtctggcctccagtcctattggattacacttcaagattaaaccaatctagactgaaccattggtgtggacatggccgcgtggcgcggcgagaacaacaatttcgcgcacatcacgggcccgccttcttctttacggaaccacaaccgcgattggcctctaaattaaattatcgtcgcataaaacctcnnnnnnnnnnnnnnnnnnnnnnnnnnnnnnnnnnnnnnnnnnnnnnnnnnnnnnnnnnnnnnnnnnnnnnnnnnnnnnnnnnnnnnnnnnnnnngacataatataccccactttccgggtactcgtcgccccgttttttccttctttccctacccccctcnnnnnnnnnnnnnnnnnnnnnnnnnnnnnnnnnnnnnnnnnnnnnnnnnnnnnnnnnnnnnnnnnnnnnnnnnagttctctttaccattatcgctttccccctttgttntccccgcgtttcccattccgttatgcccgcctccctcccacccgattcactcaaccggtttcacccgcttcccgccgctcatgcatctctttctncacgcgcgccccgcttcctcgcctcgcttctctcg

SEQ ID NO: 87174 - DNA, 640 bp, Homo Sapiens
gaggctgtgctcccatggcggcatacccatccttgcacatatacacatacccgtaggtgagcctgggctgtgccacacaagcacttcatcgggggttttgagattagacacattttataatgggggagatgtatgactgggaactgcatttacttgtggtatactgtgttgtgcactcatgcactgaccttacactttgtacttacactgtgggcatgtggtcaagatgcatacctcatgaattcaactattttttcataaaatgaaattttattatgatgtgtaaaaatgctttatcagaaactgaagtgtgttctcatggcacactttcatggcagcacagatatacctcattttaaccaatagatattctctctaaaattatgtgcaaatcaatttttaaaaatcaaactctatgttaaacacattttggcagtgtgctataataaaaaaaagtgttgtgtcaaagctttctagtgacggtcagtcctactgctgtatgtcaggtttgctcacaatgaggtattcccacatagaaataacaatgcatgtattacccagaatttaatgttgcgtaccttatgttcaatgaggttttgtaatttttttaggctgatgattaaaattctttctctctaaa

SEQ ID NO: 87175 - DNA, 781 bp, Homo Sapiens
  misc_feature (220)..(279): n is a, c, g, or t
gacaagttttaaactggacatattaggaaaaatatttttttagctcagcatgctgagtccggtactgtgtatttcaccagtacatgcctctagctcagcatctggggctcatgttgcccagtggctgggttagaggtgccttgccatgatctcagaatacagtctgttgaattatcctagatgaaaataaaggcaaaccaacacattcatccatgaggannnnnnnnnnnnnnnnnnnnnnnnnnnnnnnnnnnnnnnnnnnnnnnnnnnnnnnnnnnncactgtttgtttgagcttagggaagacaactaccaagaaaggccaggaacagttgactacacaatgaagattccatgcaaaatgttcaatattggatctaaaggggttcaaaatgtttcatactaaactgtttgggaatttatttgttaactctgtgtacacctaataaaattcaatgttttcttctcagaagagttcattgagaccaaactgaacctcatttattgaaaattatatgtgggatcaatgtactggcctcttgttattctttctatgtgggaggatgacccagtcatcattttccccatctgcactgtatttattgggaaattattttgtcactgctttcataaatcttcttcatgacagcccttgcccagcattaaaaaattctggcctgcttagctgattaaaggtttagtagaaatttaactgtttgtttatgcttatttcattttcatattggattctacttgaataaataaaaagttagcagaaaaaa

SEQ ID NO: 87176 - DNA, 798 bp, Homo Sapiens
taccggctggtaccggtccggaattcccgggatatcgtcgacccacgcgtccgcagggtgacacattttgggactctgctggtagcccagtgctgaaggacttgcttttccatgaagaagacgaaaacagcaaacaagggcaagaaggtctgagagggaaggagaatgacatttacacattttacagatttttgtttggtttacctccagatttctcttgatatatctctgtgcttttgagacctggagatctaattctgtttagacattttttgtcccagaaatacagaagcttgaaatgctatgaaggcagagcttctattctttatgggatgaaatatttcaaaagaggataaatcctctgtggtaagccatttggaaaatcctaccaagaattggcttatttaattttccagaaccaggaatgagtatctaatagcttttgtagaaccttccagaatatgtggggaaaaagggctattgctaagtgagctttatctaatatcctcctaagagttttactagtgcttttttgaggaattacagggaagctcctggaattgtacatggatatctttatccctagggggaaatcaaggagctgggcacccctaattctttatggaagtgtttaaaactattttaattttattacaagtattactagagtggtggttctactctaagatttcaaaagtgcatttaaaatcatacatgttcccgcctgcaaatatattgttattttggtggagaaaaaaatagtatattctacataaaaaattaaagatattaactaag

SEQ ID NO: 87177 - DNA, 458 bp, Homo Sapiens
gacctccccgcttaatgagcttccagttcctgtttttgctattgtttcctaaatttgacctacatattacatgggtgtagtgtgttgaggcttttcaaagaagggtctagtgagctaagtttcatcttctggtactcattgatcaaactgacctttctattctcataagcgtttctacccaaagttgtgtgtggaaggagtgtatagcagagaggaaatccctttcaacagagtcagctgctaactgatttcctataagcacactggattaagggcagccacagtggtttctactgtatgtatgaaccgaatggaggaatgttttcaaagattgatttggtgtggattgcaattgtaatggaaggcataacttgggatcccgggctgtaacttgctcttttgtttcccacccccctgacatgtatgtgtgctttaataaagctttctcacttgtcaaa

SEQ ID NO: 87178 - DNA, 787 bp, Homo Sapiens
agagaacttctcgccatggatccagcagcacggtggatgggaaaaaatacttgggatatcacatgaagaagtagactgaaatatcagatttgtcatcaggaatactctttgtctactgtggtcctgtgcacgttggcctcagatggactacaggagattacaacgtacaaggcagatggagcattgacgttttcaaaaccattattcctgtgactggagaggcatcaggagaggtctcgttcgtctccagctcataaaatgtagcagcatcatccttgacagtgatgtttttcaggccctccattgagaacctgaggaaatctgtaaagataagtggtgatgttgtttcaaacgttcagaacagataccatcatcctgcctttgttagctgctgtagggaaagtgcgttacagatgtctgctgacctcacaagagtgaaaagataaactgtgcatgtgtttccacttccgtttctagtactatttatttttaaactacacttggggtggcctaatacctaggaagatgttgctattcacgttagtaaacagcctaaagaaactcttaggtttactgctacatccatttgtttggagaggtaactgttgtctgtgcctttttgaaaaacttccatttggtacaaaatttttactccaacaccccctcaacccttttctcagggaccacacctcttcttcccaaggtccctgggacttcctcattctttgtggtagtacaatgattggtagcaggtaaaataaatacatagaaagactactgtcaaaaa

SEQ ID NO: 87179 - DNA, 602 bp, Homo Sapiens
  misc_feature (17)..(17): n is a, c, g, or t
ctcccctcatatgtttntggccaagtgactaaaacagttttccacaactgtaaacaaactgctaagccccacctcaaacttgttcactggggactttgcttaccgttctgtgggtgaccttttccgggatttcttgttcttatcaagcaagaattaagcacatgctaaacgtcttccatttgacttctctactcggtgtctcagacagtgtcttcccagaaaaccaccaccctctacccaaagatgaaacatgctcatgtcatttttctcatggtcacatttaacagttttgacatgttatacttgcgcatagatccaagcgtttcttgggaacctgacttttgagtgtttaataaagccggaagtggtgttgccctgaaccagcagattttcacctgggttctggctccggtgtttaacactggatacatctttgatgtgcgaaagtgagttcatcttcagacacatttggtacatccagaaatagatccaagaaatggggtggttgagtgggtccgcacgaaatgcttgattatgtcagcaacacccaacactgtctgttttccatttgttggttttaatcataaaattgtcaagtgaaa

SEQ ID NO: 87180 - DNA, 1340 bp, Homo Sapiens
  misc_feature (1276)..(1298): n is a, c, g, or t
ggggtgcgagcagcccgggctacagggttgcctgaggtgtgggtcccaggatggaggagccccaggccggcggtgaggatgctgctcggttctcttgtccccccaactttaccgcgaagcccccagcctcagagtcccctcgtttctccttggaggcgctgacgggtccagatacggagctgtggcttattcaggcccctgcagactttgccccagaatgcttcaatgggcggcatgtgcctctctctggctcccagatcgtcaagggcaaattggcaggcaagcggcaccgctatcgagtcctcagcagctgtccccaagctggagaagcgaccctgctggccccctcaacggaggcaggaggtggactcacctgtgcctcagccccccagggcaccctaaggatccttgagggtccccagcaatccctgtcagggagccctctgcagcccatcccagcaagtcccccaccacagatccctcctggcctgaggcctcggttctgtgcctttgggggcaacccaccagtcacagggcctaggtcagccttggcccccaacctgctcacctcagggaagaagaaaaaggagatgcaggtgacagaggccccagtcactcaggaggcagtgaatgggcacggggccctggaggtggacatggctttggggtcgccagaaatggatgtgcggaagaagaagaagaaaaaaaatcagcagctgaaagaaccagaggcagcagggcctgtggggacagagcccacagtggagacactggagcctctgggagtgctgttcccgtccaccaccaagaagaggaagaagcccaaagggaaagaaaccttcgagccagaagacaagacagtgaagcaggaacagattaacactgagcctctagaagacacagtcctgtccccgaccaaaaagagaaagaggcaaaaggggacggaagggatggagccagaggagggggtgacagttgagtctcagccacaggtgaaggtggagccactggaggaagccatccctctgccccctacgaagaagaggaaacaacgaaaagggacagatggcaatgatggagccagggacggaggcgatggagccagtggagccggagatgaagcctctggagtccccagggggaccagggcctcaacagcagaagagcgaagctcggccagcagctctggcgctcccaaaagaagacgaagaagaaacggaagatgccaggggcaaacgagggggccgagcggccgatactacctggggccccaccnnnnnnnnnnnnnnnnnnnnnnnccgtctcttgggggagaaggctttccactagagagccttata

SEQ ID NO: 87181 - DNA, 260 bp, Homo Sapiens
cccaaaagaaatactattattaccatttttgtcttatttggaactttctgtttttctatagctcataccactcagtttactcaacctggctggtattacctgaagacagttggccatttagagaaaggaggaagctacgtagctctgactgatggcttagggaacctcaccatcatcattgaaaccatggtaaacttttgttgttgctattggattaactcacttccttactattggaaaaataaaatataaaactgaaa

SEQ ID NO: 87182 - DNA, 805 bp, Homo Sapiens
ctacttctgtgatggctcttctttctgaggttctgccaacttgtctactacatagggttgatcatcctgttcaggaaatatttctttcatttgctctgagcttaatattgtaatttgtatttgatctgctgggtctttggagtcagaactggttttatcagcagtttgatcttctgaggtctggtatgtagtttgctggcccacagaaccttcacgtgtattcacagcctcaatgccataaggaaactcttttagaagttctgacagctggtcatgtaggtataagacaggtgccttatcactgtggatttcatttcttgcaggatcttggggagtatagttgctggatgcatctatttcctgagggtaaatatcctcctgaatagcagctgacgagcacgtatcgttagctgtgcttttttcagtggcatgctccaaactacttttctctagaataactctgtttgtttcaagattgttaaaagatgactctaagggtggctctgactttgactgatcacatattttatgtgaaacatctgtgcactgtacaggtttatctttttgaaaaccaacagttgtaaacaaggagagagaacttctgatagagatatcactgttgttcaatttaagagccttgtaaataatccaaagactcctccagatgggaaaagtcattttcctgaactacaagacgacagtagaaaagatacacccaaaacaaaacataaaagcttaccaaggacagaacaagaattagttgctggtcagttttcatctaaatgtgataaactaaatcccttgc

SEQ ID NO: 87183 - DNA, 613 bp, Homo Sapiens
  misc_feature (108)..(108): n is a, c, g, or t
tgctgggtgtctagaggatccttactgtcccaaacacaaacaagcacttctccagtatggtgccaggacaggtgtcccttcagtcctcctggttatgacctcaagtcntacttgggccctgcagcccagcctgtgttgtaacctctgcgtactcaagaccacacctgggaagattctttctatccctttgacaggagaatcatcattgttgctttatcacttctaagacatttttgtacggcacggacaagttaaacagaatgtgcttccctccctggggtctcacacgctcccacgagaatgccacaggggccgtgcactgggcaggcttctctgtagaaccccaggggcttcggcccagaccacagcgtcttgccctgagcctagagcagggagtcccgaacttctgcattcacagaccacctccacaattgttataaccaaaggcctcctgttctgttatttcacttaaatcaacatgctattttgttttcactcacttctgactttagcctcgtgctgagccgtgtatccatgcagtcatgttcacgtgctagttacgtttttcttcttacacatgaaaataaatgcataagtgttagaagctcaaaaa

SEQ ID NO: 87184 - DNA, 517 bp, Homo Sapiens
  misc_feature (356)..(455): n is a, c, g, or t
  misc_feature (457)..(468): n is a, c, g, or t
cctagattatttaaagaggattgtagccacaattcagatgaatgtttacaagccaaataatgatttaagagtgtgctcaataaaaaggccataggtttaagaattaaatggaataatataaattactaggtcaacaagaatatttcatgtatagtacactgtctaaggaatgcagagaaattttacaagaaacccaagactaaatacttcattaagaacactggttactaagtaaatagatggctcatgtagcaaaaagctaatatatgtagatgtaatgtcaactaagtgcatgtgacagaaatgaagaactaggaataagaatccagattttctggccaggcacggtggctcannnnnnnnnnnnnnnnnnnnnnnnnnnnnnnnnnnnnnnnnnnnnnnnnnnnnnnnnnnnnnnnnnnnnnnnnnnnnnnnnnnnnnnnnnnnnnnnnnnncnnnnnnnnnnnngtttattttgttttagagtcatttaatgtgtttttatgcacaataatag

SEQ ID NO: 87185 - DNA, 880 bp, Homo Sapiens
  misc_feature (1)..(1): n is a, c, g, or t
  misc_feature (13)..(26): n is a, c, g, or t
ncagccttgtacnnnnnnnnnnnnnnattgtagctctgtatagcacttggataatgtctgggtgtctccttaaccatcaaactgttctttatttaaaatgtttaattaccgtttagaaattctagtcctcaataagtgggtggctcatgctattgttgttcctaaagctaagctttgctgggaaggaaatgacctatagtttcttaaagaatcattaatccttataggattcctgagttactgttttgttcctccccactgcttcccattcctgagttttgtaattcctaatccttctataatttctattaccttcaccatagtcattctttccttacgcaaagcccaaggaatgagctgctgctactttaaagtgtggtcattatgatgaatgtgaaaagagttttggcttgttctaaataatttttacaagttatggtacagacagttgttacatatcaaaaaaaacctgttttttgaaacaggaaataaaaaagggatcttttacattatagaattaaaactaattttttcttgtatataaactaattggtttgattttaaatatttctggcttttattaatatgtcttaattttgagtttgaaaatgttaagtgcaataaaaacatactagtacagattttgttttgttccaattggcatactctgggggatgatcacttaaaaaaacagattttacataatgcctacttctggtagatgtcttatgagattgttctgctttttctaagttacttagatgttggatatgtacatagctgtttcttgttctgtatacatttctcaaatgtacacttgtattataataacctcccagttctaggggatatttgtgcaataaatacacatgtcaacttg

SEQ ID NO: 87186 - DNA, 502 bp, Homo Sapiens
cttttcagatgcctaaagaagtttatgaagatcctgaagttactggaaagaatcgctataaatactttgaaaggccttttctcccattttttcagcagatgccattcaatgttgtttatgccgtatccaaggcagaaccatacacttttcctcctacttctactaagcacctatccatcccttcaaagtctactgtgggcactcagactgattatcgggatgctgacgttcaaacagatccatactctccagaatatgtagtatgtcaggactcaatccctgagctcttgaccctggctacgcttacttggggtgagttggtaaatctcctgactattggcagatgacgatgctgataaccacgcatgctgttcaaatggcccatgtacaggcaattgtggtttacagtgttgctatataaagtgtcttagtacagcaacttcatagactcataatttttctgatacttctggtcaaataaagatactatctttttattgtg

SEQ ID NO: 87187 - DNA, 455 bp, Homo Sapiens
  misc_feature (380)..(397): n is a, c, g, or t
cagggtgagccgctgtgcctggctggccctgtgatatttctgtgaaataaattgggccagggtgggagcagggaaagaaaaggaaaatagtagcaagagctgcaaagcaggcaggaagggaggaggagagccaggtgagcagtggagagaaggggggccctgcacaaggaaacagggaagagccatcgaagtttcagtcggtgagccttgggcacctcacccatgtcacatcctgtctcctgcaattggaattccaccttgtccagccctccccagttaaagtggggaagacagactttaggatcacgtgtgtgactaatacagaaaggaaacatggcgtcggggagagggataaaacctgaatgccatattttaagttnnnnnnnnnnnnnnnnnngaccgcgtatgcggccgcaagcttattccctttagtgagggtaattttagcttggcac

SEQ ID NO: 87188 - DNA, 508 bp, Homo Sapiens
gcacgaggcatccctgtaagccatggttttcatgcggaggaaggagagggctagttgtctgagagggtaactgcttaaggctgcagactaggaaatgggattccaggtttaagatagctcctttctggacctcagtccttcacctagtcacctagtcacagggtggattgcctctaaggatacttaggggaaaaggaaccaaatttgggatggttctccttgctttaagccttgataggagacggggaggccaacccttctctgcagaccgtgatcctcactagacagaggagctccaaacctgcccatctcatcccatgcaccgacggtgcctggcctggctccaaactcccgaaaggaactattttacaggtgccaaaaaggggacagtgttgataataataataaaatgaaacaatctgattggggcattgctggatcagaaaatgtgtgacctttttaaagttaaattgttaaaaaattttaactattaaacattttaaatatt

SEQ ID NO: 87189 - DNA, 506 bp, Homo Sapiens
cgcctccaggtcctcctggttcactgcagccacatccacaggactaagctccatgccccatcaaccccagactcctgggttcactaaaagcagcaaagtcccagcaacccaggctctacctgacttacctagcccaccggtatgagctccacccgccacgtcctcgtaggcgccagatccggcaggactttggtcagcaggaactgagggcagcagaccccccacgggtcagctccggaagccccagggagtcccaagaccccacccctagcggggacgcttccccggaggcccgaaggggagagccgagggcgccgggcgggagaaggcacacaccccggacgtggcctccagcctttgggcgcggccaagacaagtattgccaggaaccctgcccctggaccgcgactgcgaccgccagggggcgcttccggggcgcggccagggacgcctggacatcagcgtaggggcgtggccaggctagcggctggggtccccgcggccgc

SEQ ID NO: 87190 - DNA, 950 bp, Homo Sapiens
ccgacgctgatgtccaggcgtccctggccacgccccggaagcgccccctggcggtcgcagtcgcggtccaggggcagggttcctggcaatacttgtcttggccgcgcccaaaggctggaggccacgtccggggtgtgtgccttctcccgcccggcgccctcggctctccccttcgggcctccggggaagcgtccccgctaggggtggggtcttgggactccctggggcttccggagctgacccgtggggggtctgctgccctcagttcctgctgaccaaagtcctgccggatctggcgcctacgaggacgtggcgggtggagctcagaccggtgggctaggttccaacctgcgcattgggaggccaaagggtccccgggaaccgctgctgagtggacccgggtgtctctggacctctgactgacactcgtgcctgcccaggtccctgtatgcactgccacagtgccctgggccccatgtcacccctgtcctgcccttctctgggatagggctggcttcctctgcctctgctggctgcatccatggtcgatctcaagtgccttggatgaactccactctcctgcagccttcaatcaaggaatgatggggatgtgtacataccccagcccagccttggaggggttgatgctgaggtgtggatttttaaccagttcccagactttcccagggagggctcgggttgggtgcccacaggtgggagctggtgtgatatcatacttcgcggccgctttcttctgtactctgtacctactccaatcttgagctgcccgtctctgttcgtgaaagaggcgaactgtgtggctcatctcccaggcctgtcactctgtagctgtgtgtcagctcggctcgccctgtgcgggaggcccctttcgaggaaaggggccacagcggagaccaagtcggtggccgtgtgccagtcgcgtcacaccc

SEQ ID NO: 87191 - DNA, 1128 bp, Homo Sapiens
  misc_feature (42)..(55): n is a, c, g, or t
  misc_feature (113)..(167): n is a, c, g, or t
ggtccggaattcccgggatatcgtcgacccacgcgtccgaannnnnnnnnnnnnnaagaaatgagtttttgccatgttgcccagactggtcttgaactcccaacctcaagcannnnnnnnnnnnnnnnnnnnnnnnnnnnnnnnnnnnnnnnnnnnnnnnnnnnnnntcagccccctaagatttgaaacactttaaatggcccatggtagggttcctgctaggataaaacattaagcggctgttaaaagaaataaaaggaggacacgtctctgtgcactggtgtggacaaatctccaagtcactgcaaaatggaaaaagtataagatgctctttccctgaacctcaagggtcccgcccctctcactttcaggtctctggacctctgactgacactgtgcctgcccaggtccctgtatgcactgccacagtgccctgggccccatgtccacccctgtcctgcccttctctgggatagggctggccttcctctgcctctgcctggctgcatccatggtcgatctcaagtgccttggcatgaactccactctcctgcagccttcaatcaaggaatgatggggatgtgtacataccccaccccaccccttggcagggtgatgctgaggtgtggatttttaacagttcccagactttcccaggaggcttgggtttgggtgcccacagtgggagctggtgtgatatcataccttcgccggccgcctttccttcctgttctctgtgcccctactcccactctagagctgccccgtttctctgttttcgtgaaagagctgaccctgtgctgcctcccactctcccaatgcccctgccactcctgtgagcctgctgctggtgaggtcggtgctgacctctgtgttgctggataatgagtcatctatctctggaggagaagaaaggcaggtcctccacagccctgataaaatctccaagtctcccagtttcgggtccctctcctgggatgcagacccactgcctgcccagctggtacgatccacatgccctcttcttgggaataggggcatgggaaagtgactaaagatactgttctggctgctgtgttcactgtgagtaataaactgtccatttctccgcgatcgaagactcggtag

SEQ ID NO: 87192 - DNA, 457 bp, Homo Sapiens
gcacgaggcggcacgaggtttgaaataggcttctgtacatatgcatttatataaaaacatttattaaacatgattttaaaacaaaatgtatgtacaaaagatcagcattcctataaataaaaacattaagtggcaaaaaggcacttgtaagtaaaaatctacagtagtttttacaaaacagaaacacattttaccttagatactgtacaataaacattaattcctataccaataatgaaaatgctaggttactaatgttaatgatgtaactttaaaaaacaaatttacatatatctgaagttcatttaataaaagcaccgtgattttctcctaaattcatcttgatgcaaagtaaaaacacaattcccaaaaaaccagtgttcgccatttttcgagtttaaaagtttttgtatttctaaattgaaaactgtttgtctgaaattagcatagtgtaaaa

SEQ ID NO: 87193 - DNA, 700 bp, Homo Sapiens
catacaattagagtgtgggatgttgagtctgccagtcttaagtcaactttgacaggaaataaagtgtttaattgtatttcctattctccactgtgtaaacgtttagcatctggaagcacagataggcatatcagactgtgggatccccgaactaaagatggttctttggtgtcgctgtccctaacgtcacatactggttgggtgacatcagtaaaatggtctcctacccatgaacagcagctgatttcaggatctttagataacattgttaagctgtgggatacaagaagttgtaaggctcctctctatgatctggctgctcatgaagacaaagttctgagtgtagactggacagacacagggctacttctgagtggaggagcagacaataaattgtattcctacagatattcacctaccacttcccatgttggggcatgaaagtgaacaataatttgactatagagattatttctgtaaatgaaattggtagagaaccatgaaattacatagatgcagatgcagaaagcagccttttgaagtttatataatgttttcacccttcataacagctaacgtatcactttttcttattttgtatttataataagataggttgtgtttataaaatacaaactgtggcatacattctctatacaaacttgaaattaaactgagttttacatttctctttaaaaaa

SEQ ID NO: 87194 - DNA, 629 bp, Homo Sapiens
gagtaattgaactatactaggatgagaatgttgcgcatgttctactggaaggactacatcatcaaagacccaaacgttatttcaccatagtgattatttcaagtaaattgctacttggacttattgtacttctgttgatctcatatgctatgtggaaggtaagcatttaacaattaccaatattagtctactaaaaatgacattttctcaaagccaatttgacttccaagttattagatttaaatatttcactatttgaatgttaactttttatgttgctcagtactgatctcacatttctcttcaacaccaaagtctttctagaaaaatatgcattcttaatttgttttgaaagacagacgttccttttaaaaaaccatttggaaaagattgcaaattacacggaatgtcaattttggagagaatgtggtgtgtatcactgagaatttctgcattaaaaacaaaaatgtttctttaacccggtatgtccccactaatttttactgattacctctgttaaacctttatgactgatgttacaagggatgcagtttaagaaatattggtgttaactgattagatattagaaatgagtatagtagataagagagtgttcataactatacact

SEQ ID NO: 87195 - DNA, 1032 bp, Homo Sapiens
  misc_feature (367)..(367): n is a, c, g, or t
  misc_feature (1012)..(1012): n is a, c, g, or t
gccggtataattctggtgatttacatctttcccgcatttttgctaacctgagccagaatgtggagcgtgggggtttcgttccatgactgatggcaggtgtcagtatagtcttccagctcaggatcctggaaatccctcttattatattattattgttttcttctgtttgaggagcagctggataagctcattctgggttagctgtgcataggcaaaagcagaatctgaggggttttcttgatcgtggtcttgtgatcaagttctcactgatgatggtggcagttcccaagctagagatagcagtcttggtggccattgtgttcattggcttcacaggatgaagtcaaggtttgacagctctggtttntggagccatcacagagagaattggtgattctgttcagacttggattctgggtcagtttttggttctgtgatctgcacatcttcaaaggggttcagggagttaccccttctggagacaatagctgcaatatctttctccaatcttctcgtaaggtctttaacaggccctgaagcatgctacccggcttgacctccataagcatgccttccttcttctccaggatggtaagagggttttcaccttcactgttcttagccatgtccttcttccccgtcacccgagaaagcaaagaagactctcgttatgctgcttctggcgtctctttggtttcttttgcagcttccaagtttgctggagccatgtgttctctaatgtccccacagaacagtggttggtaggatggcggagacatggacttcaaagagttcttggtagaagactcaaagagccacctgtcatgagacatcccacttccttccccaggttacttccaagactgagcagccaggtttttggtagatgagaacaaatgtttcttcctgaagccctggggcttcaggtaggaagaaggactgctatacttgttctcacccttggcttctggctgctccagttaaacatggttcccattgatacagacattanagtgggaaaggacttcgttc

SEQ ID NO: 87196 - DNA, 1896 bp, Homo Sapiens
gtctgacttcctcccagcacattcctgcactctgccgtgtccacactgccccacagacccagtcctccaagcctgctgccagctccctgcaagcccctcaggttgggccttgccacggtgccagcaggcagccctgggctgggggtaggggactccctacaggcacgcagccctgagacctcagagggccaccccttgagggtggccaggcccccagtggccaacctgagtgctgcctctgccaccagccctgctggcccctggttccgctggccccccagatgcctggctgagacacgccagtggcctcagctgcccacacctcttcccggcccctgaagttggcactgcagcagacagctccctgggcaccaggcagctaacagacacagccgccagcccaaacagcagcggcatgggcagcgccagcccgggtctgagcagcgtatcccccagccacctcctgctgccccccgacacggtgtcgcggacaggcttggagaaggcggcagcgggggcagtgggtctcgagagacgggactggagtcccagtccacccgccacgcccgagcagggcctgtccgccttctacctctcctactttgacatgctgtaccctgaggacagcagctgggcagccaaggcccctggggccagcagtcgggaggagccacctgaggagcctgagcagtgcccggtcattgacagccaagccccagcgggcagcctggacttggtgcccggcgggctgaccttggaggagcactcgctggagcaggtgcagtccatggtggtgggcgaagtgctcaaggacatcgagacggcctgcaagctgctcaacatcaccgcagatcccatggactggagccccagcaatgtgcagaagtggctcctgtggacagagcaccaataccggctgccccccatgggcaaggccttccaggagctggcgggcaaggagctgtgcgccatgtcggaggagcagttccgccagcgctcgcccctgggtggggatgtgctgcacgcccacctggacatctggaagtcagcggcctggatgaaagagcggacttcacctggggcgattcactactgtgcctcgaccagtgaggagagctggaccgacagcgaggtggactcatcatgctccgggcagcccatccacctgtggcagttcctcaaggagttgctactcaggccccacagctatggccgcttcattaggtggctcaacaaggagaagggcatcttcaaaattgaggactcagcccaggtggcccggctgtggggcatccgcaagaaccgtcccgccatgaactacgacaagctgagccgctccatccgccagtattacaagaagggcatcatccggaagccagacatctcccagcgcctcgtctaccagttcgtgcaccccatctgagtgcctggcccagggcctgaaacccgccctcaggggcctctctcctgcctgccctgcctcagccaggccctgagatggggggaaaacgggcagtctgctctgctgctctgaccttccagagcccaagggtcagggaggggcaaccaactgccccagggggatatgggtcctctggggccttcgggaccctggggcaggggtgcttcctcctcaggcccagctgctcccctggaggacagagggagacagggctgctccccaacacctgcctctgaccccagcatttccagagcagagcctacagaagggcagtgactcgacaaaggccacaggcagtccaggcctctctctgctccatccccctgcctcccattctgcaccacacctggcatggtgcagggagacatctgcacccctgagttgggcagccaggagtgcccccgggaatggataataaagatactagagaactg

SEQ ID NO: 87197 - DNA, 212 bp, Homo Sapiens
gcggccgcctactactactatacggctgcgagaagacgacagaagggcagtgactcgacaaaggccacaggcagtccaggcctctctctgctccatccccctgcctcccattctgcaccacacctggcatggtgcagggagacatctgcacccctgagttgggcagccaggagtgcccccgggaatggataataaagatactagagaactgc

SEQ ID NO: 87198 - DNA, 798 bp, Homo Sapiens
atctatcatttttgctgtatgctactggtaaaaataactcattaggttacctactggctctcaggggaagagattatacaaaggcatgaatttctggaggagggaatgaggcaaagaactctgaaaagtttctcttccacaatctgaagaacttctagaaagtagaaggaagcaatattgcttagggatggacaacttggcactggttatgtgttccaagtgaggtaaccttgttcccaagaataaagagaaccagacgactgtaaacatttccctaaactgaaatgcagactgttgtatgttcacctgaaatgaatggtgtaagctgaatataagatttttgacaaaaattttgctgtgttctcagatctggcaggcccctgcccttgtgcaaacaatgttcctggcagctattcatctccttaggtaaataagaattggagaaaagctgtgctaagataggatgcatttgctcttgccttggaaggttgttttctgataaggttctatatcctctgcaaatcaaatcaggcacttacagtgtgagtatgcattctcttcctgccagtctggagatgatcaaaaagcctataacaggcttggcctattttcctattgggttgctgggcttttttttcgtctttatttacttgtagagagttttagacctctgtgtatgtatggtgtacaagtgacaatattcagatctgtaaactgtaacacagtctgggagcaaagaagatatagaaaaatgattttacttcctgcttgagtagtaaaattgagattcaaattttg

SEQ ID NO: 87199 - DNA, 801 bp, Homo Sapiens
aagagcgtcatatagatatttatatatataaattattagtgtggggaaggggcaaggggcatacattgcagagggggcgcgcacacagggatcggggaggggcaggggtggcacacgatgctacgcaaaacagccacatctaacagatgaaataatcacaccaacggggcaggggaggggcggcggccacaggggttgggcatgggggaggagaaaagcaggggggacaaggaagagagacctggtccaagattctgtgcgctttctgtccccatcctcgccacctccccacctctgcacaccacatcgggccttggccttctgtctgtccctccctcccccactctctgtccagctgcggaggccctgcaactgagcagcaccctcttggctctgggtggcaggccaagggcacggtggggggagggtgggggtgctccaaggtccaatgtaggagccatggtgctctcttgatcgcaggttctacagtggcttgtcgctttccttcttcaggtgactgtagtagtcctcctgggcaggcagcggcacactgtgcagcgggtgatgggcatgcagccactgctgctgttccagcgccaagcgctgcagctcagctgactgtgcgtgcatggcctgcagctgatgagctgctgacatcggggcagaaagggaggccggcaggtcccggtaaggggcagcaaagagctggtgacgaagaacttcgttctcgtgcagagggtgaggaagcaggggttagcctcgtgccgattcaccacccagcctcgcacctagcctagtttt

SEQ ID NO: 87200 - DNA, 1770 bp, Homo Sapiens
  misc_feature (941)..(999): n is a, c, g, or t
  misc_feature (1692)..(1692): n is a, c, g, or t
  misc_feature (1743)..(1743): n is a, c, g, or t
agaaggcaggttcgtcgacaggcagaggctagcttagaagcccagccttctgtgacacccactggatatcatgctcccatggagccccccacatctcgaatgttccaggctcctcctggggcccctccccctcacccacagctctatcctgggggtcactggtggagttgagtctggaaccccaatggggtcccaaggaggggaggggctgcctcatcagtggggggccctaagtgggagtaagcagcaccccacacccactactcccatttcagtatcaagctctggggctagtggtgctcccccaacaaagccgcctaccactccagtgggtggtgggaacctaccttctgctccaccaccagccaacttcccccatgtgacaccgaacctgcctcccccacctgccctgagacccctcaacaatgcatcagcctctccccctggcctgggggcccaaccactacctggtcatctgccctctccccacgccatgggacagggtatgggtggacttcctcctggcccagagaagggcccaactctggctccttcaccccactctctgcctcctgcttcctcttctgctccagcgccccccatgaggtttccttattcatcctctagtagtagctctgcagcagcctcctcttccagttcttcctcctcttcctctgcctcccccttcccagcttcccaggcattgcccagctacccccactctttccctcccccaacaagcctctctgtctccaatcagccccccaagtatactcagccttctctcccatcccaggctgtgtggagccagggtcccccaccacctcctccctatggccgcctcttagccaacagcaatgcccatccaggccccttccctccctctactggggcccagtccaccgcccacccaccagtctcaacacatcaccatcaccacnnnnnnnnnnnnnnnnnnnnnnnnnnnnnnnnnnnnnnnnnnnnnnnnnnnnnnnnnnntcacggaaactctgggccccctcctcctggagcatttccccacccactggagggcggtagctcccaccacgcacacccttacgccatgtctccctccctggggtctctgaggccctacccaccagggccagcacacctacccccacctcacagccaggtgtcctacagccaagcaggccccaatggccctccagtctcttcctcttccaactcttcctcttccacttctcaagggtcctacccatgttcacacccctccccttcccagggccctcaaggggcgccctaccctttcccaccggtgcctacggtcaccacctcttcggctaccctttccacggtcattgccaccgtggcttcctcgccagcaggctacaaaacggcctccccacctgggcccccaccgtacggaaagagagccccgtccccgggggcctacaagacagccaccccacccggatacaaacccgggtcgcctccctccttccgaacggggaccccaccgggctatcgaggaacctcgccacctgcaggcccagggaccttcaagccgggctcgcccaccgtgggacctgggcccctggcacctgcgggggccctcaggcctgccatcgctgccaccaccacctgcgggcccctgcctcagggccgcccctggagccgccacgcagattaaaaagggacccgggctgnagggaggtttgagaccccccgagaagcccggtggccccccaggcccggaanccccttggtcccccttccaaggaggga

SEQ ID NO: 87201 - DNA, 1062 bp, Homo Sapiens
  misc_feature (78)..(160): n is a, c, g, or t
cgcgcgcagcgacctgtacttcgtgccactggagggctccaggctggccaagaagcgggccgacctggtggagaaggnnnnnnnnnnnnnnnnnnnnnnnnnnnnnnnnnnnnnnnnnnnnnnnnnnnnnnnnnnnnnnnnnnnnnnnnnnnnnnnnnnnaaggagcgcgagcttgaacgcagcgtgaagttggctcaggagggccgtgctccggtggaatgcccatctctgggcccagtgccccatcgccctccatttgaaccgggcagtgcggtggctacagtgcccccctacctgggtcctgacactccagccttgcgcactctcagtgaatatgcccggcctcatgtcatgtctcctggcaatcgcaaccatccattctacgtgcccctgggggcagtggacccggggctcctgggttacaatgtcccggccctgtacagcagtgatccagctgcccgggagagggaacgggaagcccgtgaacgagacctccgtgaccgcctcaagcctggctttgaggtgaagcctagtgagctggaacccctacatggggtccctgggccgggcttggatccctttccccgacatgggggcctggctctgcagcctggcccacctggcctgcaccctttcccctttcatccgagcctggggcccctggagcgagaacgtctagcgctggcagctgggccagccctgcggcctgacatgtcctatgctgagcggctggcagctgagaggcagcacgcagaaagggtggcggccctgggcaatgacccactggcccggctgcagatgctcaatgtgactccccatcaccaccagcactcccacatccactcgcacctgcacctgcaccagcaagatgctatccatgcagcctctgcctcggtgcaccctctcattgaccccctggcctcagggtctcaccttacccggatcccctacccagctggaactctccctaacccctctgcttcctcaccctctgcacgagaacgaagttcttcgtcaccagaccctttgctgccccttaccgggacctgccgcttgctcag

SEQ ID NO: 87202 - DNA, 1164 bp, Homo Sapiens
  misc_feature (86)..(120): n is a, c, g, or t
  misc_feature (624)..(669): n is a, c, g, or t
agaatctatagattcacctatagggcgctactcggtccgcaccgaacgacgagcgcagcgaggtcagtgagcgaggaagcggccgnnnnnnnnnnnnnnnnnnnnnnnnnnnnnnnnnnncagtcgacggtaccggacatatgcccgggaattcggccattacggccgggagaaggattttatcgctttctgctcttccacaccagataatgtttcttggagacatcccacaatgggctctgtttttattggaagactcattgaacatatgcaagaatatgcctgttcctgtgatgtggaggaaattttccgcaaggttcgattttcatttgagcagccagatggtagagcgcagatgcccaccactgaaagagtgactttgacaagatgtttctacctcttcccaggacattaaaataaggaaactgtatgaatgtctgtgggcaggtacatgtgtatggtcgggagtgtgggaaggttgaggaaagggtactgaaagtccatttgagtcaagaactctaggtttacaggctgagaatccttaatccaaaaattcgaattttgaaatgctctaaaatccaacactgtgtgagcgcccacatgatattcaaaggaaatgtttannnnnnnnnnnnnnnnnnnnnnnnnnnnnnnnnnnnnnnnnnnnnnagtaagtatacagctgaattccaatatacaaaaatatctgaaatttgaaatacttctggtagcatgcattttggataagggataatcaagccatatacagaaaatactgaagtaatgtctttcttctggtcagtgcagagcacgttgctcttctcccaaagtttttcatttagaccccttttgagattcatctgatattgacctagaagtgcccgtaagactacaaaccctcacttttggatgtttctctccttcacctcagcagggtatatttaaacatagcatgtggtctttccttttaaaattgtgtatgttcccattggtggtataactttataacttgcatgtctttaacaaaattctttcctatgtttgtttttttaattatttctttttctcataggaagtgaagagatccttctgtaaaggtttttggaattatgtctgctgaataataaacttttttgaaataataaatctggtagaaaaatgaaa

SEQ ID NO: 87203 - DNA, 850 bp, Homo Sapiens
gtcaagccgcacacgtcttgctctcattatctgcaatgaagaatttgacagtattcctagaagaactggagctgaggttgacatcacaggcatgacaatgctgctacaaaatctggggtacagcgtagatgtgaaaaaaaatctcactgcttcggacatgactacagagctggaggcatttgcacaccgcccagagcacaagacctctgacagcacgttcctggtgttcatgtctcatggtattcgggaaggcatttgtgggaagaaacactctgagcaagtcccagatatactacaactcaatgcaatctttaacatgttgaataccaagaactgcccaagtttgaaggacaaaccgaaggtgatcatcatccaggcctgccgtggtgacagccctggtgtggtgtggtttaaagattcagtaggagtttctggaaacctatctttaccaactacagaagagtttgaggatgatgctattaagaaagcccacatagagaaggattttatcgctttctgctcttccacaccagataatgtttcttggagacatcccacaatgggctctgtttttattggaagactcattgaacatatgcaagaatatgcctgttcctgtgatgtggaggaaattttccgcaaggttcgattttcatttgagcagccagatggtagagcgcagatgcccaccactgaaagagtgactttgacaagatgtttctacctcttcccaggacattaaaataggaaactgtatgaatgtctgtgggcaggaagtgaagagatccttctgtaaggtttggaacttatgtctgctgaaataataaactttttgaacataataaatctg

SEQ ID NO: 87204 - DNA, 706 bp, Homo Sapiens
cactactttcaagtgataacgcttacttttatttatgattttttgcccttctcagagtgttcttatcagctgtacaacctgccatagtgaatttccatctcggaataaactttttgaccatctaaaggccacaggtcatgcaagagcaccttcatcatcgtctttaaacagcgcaacaagtagtcaaagcaagaaagagaaacgtaaaaacagatagagattctgcctgtgcttttgtttgactgtctctagattttgaaaccaaaaaactgaactgaaatcatctaaagagttaaaatttcagtgatctgcaattaattacattgtggaagattattttttatcttgtaaaaacacttttttggtttaatatatatttttaaaacatttcactagtgattgaattctacttttgccatctgaattgacttgaatgtcttaaaacaggtaaatactgtaaagtgtgtattcttgatgtttattggctcatgtggacagaaatgtacagggagaattacattattttaacacacagaagtgcaactttctgctttattttctgaatttcacattacttttacttaatgcttttgtgttttgttaatacttcataatatgtgaaaaactcggatcttttaaaaagcatcatagatcatttttccatatgacactggttccgattttaaaaattatttttaaataaccg

SEQ ID NO: 87205 - DNA, 671 bp, Homo Sapiens
cagccccagttgtgttggagtataggtcaggagctgtggaaggaggcagtctgtgagggactcatgctttaggagtcctcacccctcagactgctgcaggacattgccaggcctctctccacttcattcctcagcatacagacttcatgctatcttccaattccggggagtcttagctattagggcagtttctgcttctccattttggggacaaaggccttgcccagtacaaatctagccccttgtcccacagacttctggatggtataaacctagtggcaatgtagcaaccataggctagaaccaaacccaagatttgggtcagtgccctgttaagggttttaggattggtaaggacaccacagctaaatctgacatgtaaaaggatacccttcccctgtcccactacgggtggaggctaaggacctcctcagatcccacagattgcctggtgacattgggcacagggctggatggtgtgctgtttgagaggacagcatgctcaggagatttcagtgggaatgatctctaggctgatgtgtatttggggaagtgggggtggggaagaggtaggtgcctgctgcctcaaaccaccttgtgtaaaatctgcaatacggcttcttccatgtacctgtgcctgaactgtctgcaataaagaagaatttgtaaaa

SEQ ID NO: 87206 - DNA, 638 bp, Homo Sapiens
ctttctcaggacagctaattgccaccatgaaagaagcatgtcgctatgcactgcaagtgaaacctcagcgcctgatggcagctatgtacacatgtgacatcatggccactggtgatgttctcggtcgagtctatgctgtcttgtcaaagagagaaggtcgggtacttcaagaagaaatgaaagaagggacagacatgttcatcatcaaggctgtgctgcctgttgctgaaagctttggttttgctgatgaaatcaggaagaggacaagtggcctggccagcccacaactagtattcagccattgggagatcattcccagtgaccccttctgggtgccaactactgaggaggaatacttgcactttggggagaaggctgactctgagaaccaagcccggaagtacatgaacgcagtacgaaagcggaaggggctttatgtggaagaaaagattgtggagcatgcagaaaagcagaggacactcagcaaaaataagtagctacctactactggtggattcttttccttatagtgaatttaaaagtatcatcaagggtttaatattgggaaaatttctttttgccacattatctctgtttattcactttcaataaagttgatccatataaatattttaaaa

SEQ ID NO: 87207 - DNA, 572 bp, Homo Sapiens
  misc_feature (49)..(49): n is a, c, g, or t
ccggtgagatgtaacttggtgctgctgctgttgaagacagtttgtggtntcctcaaaaagttaaacagaattattatacaatccagcaagtctactgctaggtatatacccaggagatttagaaacgtacgttgatataaaaacttgtacacaaatgctcatagcagcatcattcataataggcaagaaatagagacaacccaaatgtccatcagttgaatgaataaacaaaatggcgtatccatagaaaggagtattatttagccataaaaatgaaatactgatggatgctataacaggaatgaaccttgaaaacattacgctaactgaaagaagccagacagaaatggccacacattatatgattccactgatataaaatccataaaggcaaatccatagagatagaagattagtggttgtcaggggagagttggaggtactgggctgttttggggaaggtaatggaaatgttctggaattagtggtaatggtttcacaacattgcgaacacactaaacattactggattgtactgtttaaagtggttaaggctgggcgcagtggcccaa

SEQ ID NO: 87208 - DNA, 288 bp, Homo Sapiens
cgtaggttagggctaccatgaactgatgctgcaatgagcattgtgtacaagttttatatcaacgtacgtttctaaatctcctgggtatatacctagcagtagacttgctggattgtataataattctgtttaactttttgaggaaacaacaaaactgtcttcaacagcagcagcaccaagttacatctcaccggcaatacatgagggttcaagcccaccattttcgagatccacgctttggaatgaaagcattgccttctttggtttcgttcgtcagtctgttctgag

SEQ ID NO: 87209 - DNA, 318 bp, Homo Sapiens
atttgtaatattttaaccctttatctgtttgtttttatacagtgttacgttctaaatctatgaggtttagggttcaaaatgatggaaggccgaagagcaaggcttatatggtggtagggagcttatagcttgtgctaatactgtagcatcaagcccaagcaaattagtcagagcccgcctttagagttaaatataatagaaaaaccaaaatgatatttttattttaggagggtttaaatagggttcagagatcataggaatattaggagttacctctctgtggaggtattgacttgtaatctcattttcctttcaaaa

SEQ ID NO: 87210 - DNA, 749 bp, Homo Sapiens
  misc_feature (39)..(39): n is a, c, g, or t
cacctcacaatgtcagcttgcattgcccaaataaacacncaggccaggcagcaaggagacagcccagcctgcaagcctcggagttctgctgtggctacaccagcaggaagactgctgatgaaggagatttcagtttgccttaaatgagtttctaatgtccccccacactccaatctccttactcccaagccaagctaagaaaaagtgggtgtcactgcaaagcgaaaggatttctatcccctcaccaaaataattctttttgtctttagctgctgaggaaatggcatgttactgagccttgatggcattactggcactttgagttttaccgtttccttaaaatcacagtactggaatcaggtgaaatttgctttctaagctgcagccactcgtcatgtgcagaattctgctgcccacccaagtcctgcttaaacagccgcattttataagctggtacgggagctctgcaacaaccttcacagagaaaggatctgctgctttatttgtatacaaaaagaaaaagacagtccaaacttttcagaatcccttattgtcatctgctgaaagggcaagttgtagttagcatgttaatccttgtaaaaaatgcattaacttttcatttagggtgaaatgcttccagctaaaagacctaaagtgactcaattatgattcttcgtcaaagaaaacataaaagctgtttgcattacagtgtaaagtgaaatacaaaaataaaattattctgaaggaaa

SEQ ID NO: 87211 - DNA, 673 bp, Homo Sapiens
gcacgaggagagcttaagataagattttaaagagtcccaagttatttaagttgagtgtaattgtcatttaaggaaggcaaatgagtttatcatccttcttaaagagcatctcttttaactgttggacaaaaccataactttgtcattttacaaggaagaacctcttaagaagtcctcagaaccagaagcaatgtgaactctcagcgctggtcctggtgggtttgctgaccatgactgggcaagccgttctttttgctgccatcttcctcatcataaagtgtggaacataggcaattgctttgagattcttggatagaagaggacaacattctgcacctgcccccttttttaaatctttggggaaagatgagtaactttccccactactctgccttcctgttcagtaactcttacttttgcctgaagtaacagcatcttctacttctccatctagagatttttgtgtgtgtgccatcaaggttagcaaactttatacgtagcctaacacttaaaaaatgcactcattatcttaaacctaataaattccagagtttattttggttctcctctgttgcccttcctaaaaaatgagctgaagatgacagtatttttctttacatgcttggttatgacttttaaagttttatttaaataaatgttgaagctcaagttt

SEQ ID NO: 87212 - DNA, 775 bp, Homo Sapiens
gcagctgagtcccttgtcagactgttccaaaaagcaagtaaacccacttcaagcacacaaatcatgttgaagaccaacatgtatcataatgaaaaggtgaactttcatgttgaatgtaaagactatgtaaaaaaggcaaaggtaaagatcaacccagtgcaacagagccggcccttgttgagccagattcacacagatgcagcaaaggagaacacctgctactgtggtgcagtggcaaagagacaagagaaaaaagggatggagcctcttcaaggtcatgccactcccgctttgccttttaaagaaacccaggaactattactaagtcccctgccccaggaaggtcctgggtcacttgcagcaggagagagcagcagtctttctgccagtacatcagtctcagattcatcccagaaaaaagaagagcacaattattctctttttgtctccgacaacttgggtgaacagccaactaaatgcagtcctgaagaagatgaggaggacgaggaggatgttgatgatgaggaccatgatgaaggattcggcagtgagcatgaactgtctgaaaatgaggaggaggaagaagaggaagaggattatgaagatgacaaggatgatgatattagtgatactttctctgaaccaggtattataatgcttgcaagcttaccagactgacctttgtattactattttgaaatagaaaggtttttgtttctgttttgtttggataatttctttattttagtttgggaattaaatgacttaaaccttg

SEQ ID NO: 87213 - DNA, 556 bp, Homo Sapiens
acagacacacatatttctgaaatgtaaatattctctttttaaaaaaattattatcacagctaaacaaattaccagtaattcttttatcctcatatacccggtgttcagattttctagattggctcctaatttttttacagattatttgaatctgattcaattcatgtactgtaatgtttgataacttaagtaccctttataggttctcttttacctcttctttattaaattccttgtaatttgttgtactaaatagattgtcttctagaatttcctgtagtctgaattatgtagtattgtttcacatgttccagtgtcctcttatttcctgtgagttggtagttagatctagaagcttgattaaattcagattttctctctttagatcatcaactttagatcatcaacttggatcatttgtttcattttgcttttgatatgttgttttttagaattacctcttaaaattttgatttaattttataatcatgtaaaatgtttataaatttccaaattcagatcagcaaaacacaataaaatctattcagagaaggca

SEQ ID NO: 87214 - DNA, 406 bp, Homo Sapiens
caccctggctacacatccaatcacttggaggacattttaaaattttttccattcctgggactgcaccccaaaccaatgaaatcagaatctctgaggccctaggaaatgggtattttctaaagactgaacaggtaattcatacgtgcagatagggtgggaaaccatctgtctgcacaaggtccctgtgatgttttgaagaaaaaagaagactagttgaaatattccttgattaaatttaaattaagggtgaattgattttatccatctctccatagataaggaatatcttctgatcgtcattcagaatccatgtgaatagacctgcgatggccaaggctgtttaagcgacactgggttggaaacacttggctctctcatgagtattaaaattctatttcaatctaaa

SEQ ID NO: 87215 - DNA, 1088 bp, Homo Sapiens
  misc_feature (607)..(664): n is a, c, g, or t
  misc_feature (710)..(728): n is a, c, g, or t
aaccctcctgggcccaagtgatccttccacctcagtctcccagctaattgagaccacaggcttgttaccaccatgctcggcttttgcattaatctaagaaaaggggagagaagttaatccacatctttactcaggcaaggggcatttcacagtgcccaagagtggggttttcttgaacatacttggtttcctatttccccttatctttctaaaactgcctttctggtggctttttttaaaattattactaatgatgcttttatagctgcttggattctctgagaaatgatggggagtgagtgatcactggtattaactttatacacttggatttcatttgtaactttaggatgtaaaggtatattgtgaaccctagctgtgtcagaatctccatccctgaaatttctcattagtggtactggggtgggatcttggatggtgacattgaaactacactaaatcccctcactatgaatgggttgttaaaggcaatggtttgtgtcaaaactggtttaggattacttagattgtgttcctgaagaaaagagtccaggtaaatggtatgatcaataaaggacaggctggtgctaacataaaatccaatatnnnnnnnnnnnnnnnnnnnnnnnnnnnnnnnnnnnnnnnnnnnnnnnnnnnnnnnnnnaccatctttgccaacatggtgaaactccatctctactgaaaatacnnnnnnnnnnnnnnnnnnngaatccaatactgcccaaggataggtattttatagatgggcaactggctgaaaggttaattctctagggctagtagaactggatcccaacaccaaactcttaattagacctaggcctcagctgcactgcccgaaaagcatttgggcagaccctgagcagaatactggtctcaggccaagcccaatatagccattaaagatgacctacagtgctgtgtaccctggggcaatagggttaaatggtagttagcaactagggctagtcttcccttacctcaaaggctctcactaccgtggaccacctagtctgtaactctttctgaggagctgttactgaatattaaaaagatagacttcaact

SEQ ID NO: 87216 - DNA, 1037 bp, Homo Sapiens
  misc_feature (123)..(159): n is a, c, g, or t
  misc_feature (217)..(247): n is a, c, g, or t
  misc_feature (369)..(369): n is a, c, g, or t
  misc_feature (957)..(957): n is a, c, g, or t
tggaaatttgttttaaatatctaacagcttattggctgcacttccaaatcagagcagaataaaatagaaagggagaaataaaataaattatacataacttactaatctgggaacagctgaccnnnnnnnnnnnnnnnnnnnnnnnnnnnnnnnnnnnnncatcatcatcattacaacactagcaaaaagaggcagttcaaatgtaaataaagtcatnnnnnnnnnnnnnnnnnnnnnnnnnnnnnnntgaaatctctgacatgcaggatatgatcagctcctccaagcaaaaccccagagcaagtcttctgagagagagaaaaataaaagggattctttttttatttatatgtaaaaatccaactttangggtggtgtttcggggggtgagataggaaaatgatgactggagtgaaaactatagcacatcaagctactagttgcagtatttactatctatctgatacttcaatacaaataatggcaattgacttgaaatgattttgcatttatttgtacaggccctacaactgccttggcatttggctggcaaaatctacataagcagtcccatcacattcagttgttgctctttgcaaatactctgcttgaaccaaagttggacttcagtggattaatctgacagcaagggaagagcagtggcaaggatccctgggtgcagccaggctccattttattgggctgcaatgacttttaattaaatcctactttttatggcatgaactacatgtggcccacacttctgaaatgctaaaggcctccacctcacttcatggaggggtgaaaaataccttataaaatcatcagtttcatttcctgatcgggaaaggatggaatgttgaagaaataagctaattctatttgtctgaaaaaatggccaaatatattcaatgaaaacaatgattgttttgctcaaaatatcaacaggaaaaacanaaatcactaagtagcaaacgttaatggaaccaactgaccagggagaaaggacatctgggagcagtttgctcctcgtgccg

SEQ ID NO: 87217 - DNA, 1192 bp, Homo Sapiens
ctcaaatcttaaggctgcctttgaaaagaatatcaacactgaaagaacccttaaaacacaggctgttaacaaattggcagaaataatgaatcgaaaagattttaaaattgatagaaagaaagctaatacacaagatttgagaaagaaagaaaaggaaaatcgaaagctgcaactggaactcaaccaagaaagagagaaattcaaccagatggtagtgaaacatcagaaggaactgaatgacatgcaagcgcaattggtagaagaatgtgcacataggaatgagcttcagatgcagttggccagcaaagagagtgatattgagcaattgcgtgctaaacttttggacctctcggattctacaagtgttgctagttttcctagtgctgatgaaactgatggtaacctcccagagtcaagaattgaaggttggctttcagtaccaaatagaggaaatatcaaacgatatggctggaagaaacagtatgttgtggtaagcagcaaaaaaattttgttctataatgacgaacaagataaggagcaatccaatccatctatggtattggacatagataaactgtttcacgttagacctgtaacccaaggagatgtgtatagagctgaaactgaagaaattcctaaaatattccagatactatatgcaaatgaaggtgaatgtagaaaagatgtagagatgaaaccagtacaagaagctgaaaaaactaatttccaaaatcacaaagcccatgagtttattcctacactctaccactttcctgccaattgtgatgcctgtgccaaacctctctggcatgtttttaagccaccccctgccctagagtgtcaaagacgccatgttaagtgccacagagatcacttagataagaaagaggacttaatttgtccatgtaaagtaagttatgatgtaacatcagcaagagatatgctgctgttagcatgttctcaggatgaacaaaaaaaatgggtaactcatttagtaaagaaaatccctaagaatccaccatctggttttgttcgtgcttccccttgaacgctttctacaagatccactgcaaatcagtctttccggaaagtggtcaaaaatacatctggaaaaactagttaaccatgtgaccgagtgccttgtggaatcgtgtgggatgctacctgataaaccaggcttctttaacaaaaa

SEQ ID NO: 87218 - DNA, 549 bp, Homo Sapiens
  misc_feature (146)..(162): n is a, c, g, or t
  misc_feature (436)..(445): n is a, c, g, or t
ggtcaattgggtctctgtgaggattggagaaaaaaatctgtgattgtgaggatgaacaaacaagctctagaaagatctaagacttggtgcgttacagaaaatataaaatactgctaaaatgtaagacgtgacaaaacgctagagtnnnnnnnnnnnnnnnnnagctgagcttatagagagttttccggaagattccgccaccctgtgagtgcgtcttgtgctgttagtagtctggacaggagcgtggtgctacccgctctcaaggcaagcagcaaagagttattgcacaaacgcaaagaactaggtctcttattcaatgcaaagggatgtggggaaaaccaccttctttttacccccacttttattttataacaagctattctccaatgttttaagaattttgggtgaattctcacatctccagaatacacgggannnnnnnnnnccaagaggtctcagatgggggtacgtgagatgcccgttttctcaagggaagaggcagaagatggtttgagagagagaaatgcatagactaattagagaaaaatg

SEQ ID NO: 87219 - DNA, 613 bp, Homo Sapiens
acagcccagaaaatgaatagagacaagtcctggctgggtctgggttcagaaacataatagaaggattcatctaaactgtcggccactgtggaggaagtgaaccttctagatcctgctgactcatacaatgagttttgtgtggaccatcagacaaaagggctggctggtgaaggtggctgttgtctggaaattcctcccagctctcctctaattatgtcataaggactggaggccccttagcctgcttgtgataacacgcaaggaaatatgggccaactcttcacatgaacacaagatatttccatgctagccttttgcaagtaacaacagagagagctctgtgcagttttcactggaatgcctgtggattgcttgtgtcataactgtaatctaaagagttgtccatttgttgattcctttgtatttgtattggtagaattgccactatcaaaccaagatctttagctgcctttgtatcaacttctttggagcttatgtgattttccagaaaatttccaaggcatagttttgtccctaagtcccatgaatatgtaatattttgtgtctctctattaaaatagcactttttgtgcattccattaacaaataaaaa

SEQ ID NO: 87220 - DNA, 529 bp, Homo Sapiens
tccaatatttgaaatcaaatatctgcaggattataaaatattaacctggtctctggtgaaactcagggggatagtcaatccttggtttctttctgctgttatgaatatcataatcttctggtcgacgcctacacaaattagacacattagaaattaaaccaaaaactgctgggagaacaaagagtaaagcaagagtttctgacagagataagtacaaagaataacccattatttaacatcttaatttttttagtgagcaaattattttaaaattcctacattttgattctcaaattaattcctataaaccaaactttaaatgtactgctggaagtagatattctctgccaactcatgctatgatgagaaaattgcagactagtccaatcaaaacatgtaagtcacattttagtagtctaaacaaaagtaaacaaagtcattctcaaactaaatatcagttttaacaattaaaacactttcccaaataaagtctccattcagatgaaaaataaaaactagaaaaacctat

SEQ ID NO: 87221 - DNA, 573 bp, Homo Sapiens
gcacgagggttgaaattagttttagacaaaagtggtccatcaattcagacactctgcttggatgccttacccttttcattagtgcattctttgcttctgaaacttggcagaaactcgttagccagtccactgcctttctgacaatgtgtggagtcacgtatgcttggtatatgcctttactacttttaaagttctacagtttattacttgcccaagtgttactaaatccttttcttatgtgtactggatggagaaaaaattatagccagcactttgagaggaaagttttcagaaacaatattaactggcactactaactgaaggccacaggagatgctatcaatgttatttgtaatctgaagattgaacaaggctgtgaggctcatttcaaactattttgaggtgttaaaatatatatatgctgtttctcagctgttccactcaaaccgtgttaggactctcaaaggtaaaatgtcacaggggcttttcagttgttacagagctcagcagctgtggttgcccctgttctacaccaatttcagttcaataaaaatgttaactttgcaaaaaaaa

SEQ ID NO: 87222 - DNA, 1894 bp, Homo Sapiens
cagtcgacggtaccggacatatgcccgggaattcggccattacggccggggagaacggcggccaggacgccggacgtgcggtcagttgcaggcgagcaggcgaggaatcgccgtggcgtcttggtgttctccacgctggttcgcaggtgaagagatggcgtttgtgaagagtggctggttgctgcgacagagtactattttgaagcgctggaagaagaactggtttgatctgtggtcggatggtcacctgatctattatgatgaccagactcggcagaatatcgaggataaggtccacatgccaatggactgcatcaacatccgcacggggcaggaatgtcgggatactcagcccccggatggaaagtcaaaagactgcatgctccagattgtttgtcgagatgggaaaacaattagtctttgtgcagaaagcacagatgattgcttggcctggaaatttacactccaagattctaggacaaacacagcgtatgtgggctctgcagtcatgaccgatgagacatccgtggtttcctcacctccaccatacacggcctatgctgcaccggcccctgagcaggcttatggctatgggccatacggtggtgcgtacccgccaggaactcaagttgtctacgctgcgaatgggcaggcgtatgccgtgccctaccagtacccatatgcaggactttatggacagcagcctgctaaccaagtcatcattcgagagcgctatcgagacaacgacagcgacctggcactgggcatgctggcaggagcagccacgggcatggccttagggtctctattttgggtcttctaggggcctcaaggtcttgatgtgcatagcttctgataaccctgtgtgcaataatatgatttgcagggcatttctgtttgtgacaaaagtttttaataatagttttaatcattcctttgaaagtagtgatgtcataattgtactaatccacataagtaccacagaagaagggtttgaactgtgctattttgttcaaatgttgactctccgggggcactggctcattccaagactgttcttgtgcaactctcagaataccttatttgagcatacctgtttttgaaaggcattttctttttagagttaggtgtagtgcttaagggttaatttattttcatgttatgccagtaatatagtgttgtatgcctattgagtgattgtggcaagaaaagctacagcttctttgcgtttaactttttcaaaccacagaccagaactggttgcatgttactttaggagttgtgggttggtaagctcccaggtacttcccgaggctatggtgtgagagcccccgtcctgccctctggggctccacaggcccctggcaaggccgatggctcaggatgatggggcacagcccgcctttgaacaatcatgcttcagaaatctgcccgaccctagctgctgctgctgctcactttattcttgtatggctttggtaggcatacttggagaacatatcccacattaggaattgattttaagcctgaaaagtttgagggctttaaccccttaaaactttggaaaaacttgcttgggccccggtgggctcacgcccctgtaattccccccacctttgaacaaacccgagggcgggcgcgcacccccacggtcttgaaaatccaaaaccctcctggctttaaccccggggaaaacccccttctcctcctaaacactaccaaaaaatttcacctggggccatgggtgggccaaggtcccctggtgggtccccacgcatttctttatggaagcgtctaaggacaggaaacaaattagggggctaacccccccgcgaggccggaactcttttccctcgcaacccccaacaataatagcccccttggcacctctcac

SEQ ID NO: 87223 - DNA, 471 bp, Homo Sapiens
ttttttttcaattgtcacaaagcaataatcatttattttttaaagtcgtttacaggtatttataggcaaatggatttccactttaagacagataaagaatgtgagattaaaatagcatgcagacattccttttattgtttccttttgctttaactgtgtctgtggtatttttaagtgctgtatttaactactatactattacagtcaaatactgattatccatgtgtactgctgacaccatttacagtcattgcatctatttgtatcaggaactcttgctaccaagttaatactctgctcagctagagtgagaccacagccctgctctgtctctgataaaagtggttagactacccatacatttctactgtctatactcatgctgatcccctttttaaggacaaacgatcaagacctaaggtatatggaaaactggtgaaaaatacattaattctagttgtgtaagaggaa

SEQ ID NO: 87224 - DNA, 772 bp, Homo Sapiens
  misc_feature (128)..(357): n is a, c, g, or t
ccccccggaaattattagagggaccacaattgcgcaatccacctacgttttgttcttctgtgttttttccgagaccagagtttcacccctttttccccagggtggggtccagtgccccaaatcttcgnnnnnnnnnnnnnnnnnnnnnnnnnnnnnnnnnnnnnnnnnnnnnnnnnnnnnnnnnnnnnnnnnnnnnnnnnnnnnnnnnnnnnnnnnnnnnnnnnnnnnnnnnnnnnnnnnnnnnnnnnnnnnnnnnnnnnnnnnnnnnnnnnnnnnnnnnnnnnnnnnnnnnnnnnnnnnnnnnnnnnnnnnnnnnnnnnnnnnnnnnnnnnnnnnnnnnnnnnnnnnnnnnnnnnngcaatcacgtatgagtttttctaaaaaaaccgaaacactggaaacatggatgcatcttaaagactttatgctaagtgaaaccagtcacaaaaggacaaatactgtatgattccacttacatgagaaatatgagtagtgaagttgatgatagagacaaaaagtatggctgttgctaggggaaggggaggtggggagttattgttcaatgggcacagaatttgggaagatggaaaacttctggagatggatgatggtgatggctggacaacaatgagaatgtacttaatccactgaattgcatatttaaaaatgggtaagctggtcagttttatgttataaatattttacctcaataaaaacaaattgaacttaaaaattcactgaagaagccaatatggaaaaaggactaaatgtt

SEQ ID NO: 87225 - DNA, 664 bp, Homo Sapiens
caattgagacacactcacacattttattaaggctcttaaattgaaactcatcattttggatgtacattcaaattctaaacacaacagtcaaaatgcagtgactgtaatgaaatgtaataacctcctataaagaaacgattggggactatcatttttgtgatttaacaacagagaaaatccaggaagaatgaattgagttccttctaggagttgtttatccctgctcatgcttaagattgatgatttcgtgaaataaagaacattatttgagagaaaaaaactgattttttttaaagaaatcatcactctcatttgaaaggtttgctttcttatttcctgtaagtacatttcgtttttctaattcaactgtaacctcaggaccactgtacagcacttagtaaacctgtctttgtacatgcaatctagttcttaccaactgccttctcaaatggaatagaactataacacacaaataaaaggaagatgtacaagcacagggacaaaacaggaggaaaataaagactagaatgtgaatctcattttcaacaagtatcagcaaggaaaatgagaccctggtttcataattaattaaatctgcagaatgccaattccatttggtgttaaacagtaacccaatataaaccactgattctggaataagatt

SEQ ID NO: 87226 - DNA, 570 bp, Homo Sapiens
gcacgaggggtagtctgaagtctagataagcaggagtttacagtgcaagacagatgaagccatgagaaaatatactcaaaaagcaaccaacagacaatgtcatggaatgaatctcctacagatttttccttacacttttgaaaagtaacatgattttaaaacgttggaaaattcatcaaggtacaaatcattttctgacttcagcattgatacctaaattgatttccagtacacagttttatagaattgtgaatatgtagtaatctcagttaaccagaaccttaaccttcaggttaaggaaaatacctattccttaacctctaggtaaatgggagtttaccttacaaagctgattgagagcttatttaaaacgtaaacatacaagatgtcattgcttccttgtagtgaagtgaaaaggaggtattggattaagcatttaaagttaattaaagtagtggctcgtgcctgtaatcactggctactcagaagtcttgaggtatgaggatcatttcatgccaggatttctagaccagctaggcaacataatatgacccataattctttaaaaaa

SEQ ID NO: 87227 - DNA, 1256 bp, Homo Sapiens
  misc_feature (175)..(207): n is a, c, g, or t
cccggtcagggttctcaagctgtcgtccctatggggctgtgttttccttgtcccggggagtccgcgcctcccacgccggacctggaagagaaaagagcaaagcttgcagaggctgcagagagaagacaaaaagaggctgcatctcggggaattttagatgttcaatctgtgcaannnnnnnnnnnnnnnnnnnnnnnnnnnnnnnnncaaattgctacatccgggcccccaccagaaggtggacttaggtggacagtttcataaagcataacatgagtagaagaatctactgccaataactgtttattatctgcaatcaagtgggcttcatcaatttaatttcttctctttgagtaaatgaagattcagactttgtaatattattgcccttaagtgcaatgctaaaaaaacgttgattttcaagcttagagaatggctagacttttcattaaatactgattttcctacatttgctcttctgcagttagtgggtgatttgctatttttcttagtagttaaaaaatggaactaaatagtgaatatacatacactgcatgtaaacattctgcatatacctctaagattaaaattcgcagttgtcttttcatcctttataaaaatgatctaactacttatatttgtgctgcatcgcgttacatctgtttttatttcactatgaagatgtttgattaaacttatggacttagtgcctttaaactgatcatcagggagaatcttgaaaaaatcatgtgaagggctgatgtgaaggagcactgtaaattgtttataacttagtaatgagtattcttaggcagatgtaaaattgtttgtccaatttatttttatttatgtagcttataaaattaacataccctgttttactttatgataaaggattttttgtttgctgaatttaaaattatatattagtgataccatcagagggcagtgatgttctattgtatattaaattcagctctgtaaggatctttgtagtaattgaatgagttaaactaataatctggatgggttataatgagtagtaatatatttgtccatatttcataagtagtgttaatcttgtgtacttattagagaacgatcataagatttatacagatgtgaaactgcgaaggcaagtatgaatgtatgaaaaaaacatgtaggtactgtacttacaaaaggtctacttcagatataaaaatattaggtaattctatacaatgcatagtcataaaccttaacatttttgttca

SEQ ID NO: 87228 - DNA, 613 bp, Homo Sapiens
caagaattcggcacgaggggcaaacaatgaatgttattaggacaagaatatagcagtcaggaggccatgactacatcacagccaggcggcattccctgccacagtggcggcttgaatcatcaagaaatggataaatggggctttagtaaatcaggcttgcaggctcaaagctgcaatctgcccactctcaggtactgagactttgtgggcctcagacaccaggaagaaagttgggatacagtcatttgagttaaaaagggaatgacccctcagaaacccgcattagcagtgttactcttggaagtgcctttacttttaacgctctctgttctgaaaaagaggtgtttggttacgtgtgagccaacatcacgttttgttagctgtgatttacctttgtccgtttaaaagacttcacggagccattctgtatacaaggtgtgctctttccaatgtagaaggggttatggaaaagggtgcgatcctttgctgtaaactggagagaccagtcccaaacagaggggaattttaagcccttctcatcacccaattggatgtttttgcttatagcaaattcctgcaaaataaataaataaatatttgcaaaactaaaaaa

SEQ ID NO: 87229 - DNA, 450 bp, Homo Sapiens
aaagaaagaagcttcatcacagatactttccagtttctcttttatacttttttgaaagattactttttaggaacatttggtatgatatgcataaaattatttatccatttatgggcaaaatgatacaagtagcatcttgattgaacatcatttacctcagatattcaaccagcagtacgttttttatgcagtctcaacccatatcccatttgttacctctcagaatattggtaagcagttattttcgctttactctgtatttcttgtgttttgggcacaggttattgtactactgtcaaatcgtacttgctattttttctgcaagtatttaacagaaagcttaaaatccccataaaaccccaccttggataagtgattgttaaatattgtacaaataaaatgtatgctatccccattccatccccaagttaaataaaaaaatgaatacgg

SEQ ID NO: 87230 - DNA, 643 bp, Homo Sapiens
gccccccagccaaaacttaatggtcataaatgaattttatctacaaaatctctttaaatttggctggttgccttgtcatatgtaatttcactattttccaaggaaatatataggaagcaattatgaaactgagaatagttttatatagaattcttttatttactgataatgcattaacatttttattgaaatgcaatggaatatgtgccaaaacacgtgaaaagcttacataaagaaaggcatcagttgtcgtttggagaaaggtacacatttttctgatggtcctaagtgatatggtattactactagaatcacagatttcttcaactgacttattttggtatattcaactacagctttctaaggataggactactttcatgtctagtaatacactgtattccccgttaattatcccttaagtcagattgtagaatttgcaagaaactaggtatagaaaaaatgtacaggcaacttttgtggttagctttataaatttagggtgcttataaaatgataaaatgaattctttaaataacctataggaatcatctgaatctgtaacatcagagactaaaactaaaagttttctttaatctgttgtttcttaagcaataaactgaaagacctttacttccataaa

SEQ ID NO: 87231 - DNA, 548 bp, Homo Sapiens
gttgagctggatagggacacaggaaaggaaggatgagatgtagaccaatgtggggaagaggaacaaagacaggaactcctgaaagccatctcccacgttttttaacaccacacagaaacaagggagagttctgagcttagactttcctgagcctttcttatcaggaaaactcatctcacctaaaaataacagaaaagtatttgaagtgaaattgcatacagttgttatataagaaacaagaatatgcaaaataacctccctgcggacaatgagagcacattagaaagacatgcccacataaccgagccaagctgtaacctgctatttcaaatcaagccaggtgacattctaacaatacaaaacaagagagaatagtgtaaatcaactttttaaaaatcagaaataaggtgacagaactcaggaaagaattagaattaaaaatcatttcagaagtaaagaaagactaagacgaaatgcaagtgtcgatgaacacagcagatcctgcctgaaaaggataaacagtgtgaaaaaggaaacatttcaagagc

SEQ ID NO: 87232 - DNA, 476 bp, Homo Sapiens
tttaaaatggtattaacatttattaaatgtcaaaatataaagaaaggtagtaattccaaattattaacatctgtttttggttttatgtttcttctttttaggccaagacccatgttcttgacattgagcagcgactacaaggtgtaatcaagactcgaaatagagtgacaggactgccgttatctattgaaggacatgtgcattaccttatacaagaagctactgatgaaaacttactatgccagatgtatcttggttggactccatatatgtgaaatgaaattatgtaaaagaatatgttaataatctaaaagtaatgcatttggtatgaatctgtggttgtatctgttcaattctaaagtacaacataaatttacgttctcagcaactgttatttctctctgatcattaattatatgtaaaataatatacattcagttattaagaaataaactgctttcttaatacaaaaaaaa

SEQ ID NO: 87233 - DNA, 309 bp, Homo Sapiens
  misc_feature (143)..(157): n is a, c, g, or t
aaaaactgtattataaaaggacatatcctgtgaaatataacattttactgtttaatagaataattctataagaagaatgatttatctcacccacggaactgattacattccggatgcaatcaataggcactttgtaatttccnnnnnnnnnnnnnnnctttgctggggggttgaggggtaacaagataccatctgtataaagtgcagtttgtgtcactcaaaatatgcactgtatggctacacaaaagcagcttgatgaacaaatcaccccatggctcattaaagaacaaagcttccagaagcaaaaaa

SEQ ID NO: 87234 - DNA, 736 bp, Homo Sapiens
  misc_feature (594)..(606): n is a, c, g, or t
aagaaatatatataatttagatatgaggaaatactctgctattttcctatcaatgccacctttgtaaacaaaattattttctatgttcctttttgtataaatagaatactactagaatttgacaataaaatacttcattattcttaaataaagtgatagaatttccatgtttatcagttttggttactactttacagattggtatattccgctcaaatctataatacacattttcttacatgctttatatacatttagaaaaaatttctatcgttccaaattgttcttggcaattaaacctttagatttttcagcttctagtggttctacttgttcttctatttgtagaaaattatggtaaagagttaattttgtgggttagggaagagagtgcaaaatggtatatatatattttttatcatgtacagtcccctgggttgataattgtacctctcattacagtctctagaggaaatgtttatggtttgaatcctagaaaaagctgtcatatgaaatcagaacacccaaggaataacacaataccacagagttaatatgattgatgatatcatagctcatttttaacagatgtcnnnnnnnnnnnnntcaagctgccattccacatactaagcccttgttccctttacagaagacctttataagtaaatcattattaatggtaagtattcagtgggttaggagatgggcatttggattacttttagactttcaaaag

SEQ ID NO: 87235 - DNA, 497 bp, Homo Sapiens
gtgatatcagcagtcttcagctccttacaaattaccaaaagtgttctaatatgctagtttgtttgattttttcttttatattataaagcaattgcatcgataaaagcttggactccattttagtgtgacactcttcctcatgataccagtgaaatgtattgattgtgtccccagttgttacataatttgaaataaaaatataacttcttgatttattgttttttaagatgtgatatggtactgtggttatgttgttttaaaaaatgattatcttttagagaagtatactgaaaaatgtacaggtgaaatgatatgttactggtattcgcttcaaaatcatctgagtgtggggtaattgagtacatagatgaaacaagattggccataaattggtaattgctgaagctgtgtgatggatgtttgagagttcattatactattctctatacttttgtatatgtttgaaattttccataataaaaattgaaaaaagtaaa

SEQ ID NO: 87236 - DNA, 723 bp, Homo Sapiens
tttaaatgagaacattaatttacttacactcagataactctctaaagagccattgtccaattttacaagatgtgcaacaggcagagaaggacaaacattgcaaataagttcttgcccattcatggtgcaagttctcagaagttactcttgtccaaatccttctgtttcttctatggcaaacaacagcttttccttcagttgctcatagctcttgtatggtggcaggtccaggcgattaaaacaggtatgacttctgggtagccaattttctttcccaactttttcaatgcagaatttctgtggtccattgctccccatgagatcagcaaatcctcctactggcaatcggcaggttccagtaacaaactgcagaagtctcattctcttctcattatcaatttctttaacaaactgccaaaaccacatgatttgtttgctggtccttgcataatgacggtagatggcatgtctttgccagtcattcaaatcaatctcttgcattccacataaaaggacctctaattcctttgcatcaaagtattgcaaatattgctggggaagaatttcattaaagccttcaaagaaagcttgtgtctgttcttcaacacctcgagacaacctccactcagctaccattctggcaaacaaatatgaaaaaacctatcaggaagtttagatcttatctttaaattctgagtataaaaataaattttaaaaaattat

SEQ ID NO: 87237 - DNA, 543 bp, Homo Sapiens
gccaatgtccatctctagaattaatattctctccttcaggtttgttactgcctgcctcaaaagttcgttttcatttactttgttagtgaaattttcattggaagaaagtagttgatcacttttggctttgattaagaggtctttttccttaagtaacttttgcaaaacatcttgtttctcctttagctgcttgatttctgaatcggtttgttcgtgttcttttctttctagctctgaggtggcagcaatcgaatcagacaatctgtggtttatttttcctggagagttctaattgttgcatctttttcctgtagtgattttcttagctcttctaactcttgctgaagcaattcagaagattcactcaatacttcagacttacttgctctaagacactctgcagactggggagtaagcaatgatgcagaagacagctggggtgaaataatatcaagttttcctaaaagaagatccttggtattgcaaagctgcccaatgctgtgctgaacttgtgctaattcctgcccaaaatttttgagtttg

SEQ ID NO: 87238 - DNA, 646 bp, Homo Sapiens
  misc_feature (56)..(56): n is a, c, g, or t
  misc_feature (128)..(162): n is a, c, g, or t
gtttactgtttcttctgttcttctagcatctctcaaaaaattcacagtactccatnttggggtccaaactgtaatgctcaaaataataaatgcttacacgaaaattatttattgagaatattcatatnnnnnnnnnnnnnnnnnnnnnnnnnnnnnnnnnnncaaggtggtatatttgaagtgaatggtgattggaaatttttagctgtaacaaaaagaaagaaaacaactttttttaaagcctcattctcttttctttcaaaatgtaccttattcccacacactcttgggctgacctttattttatcaataagctcaatattactttgtttaaaataagatgcttcagcaaaagtcattctctctttaaccatataatttaaaaactcctcttcacgattgatagcaaaatcagaaacgttagggcaccagtgagttgaaaaaactggtcttaagttggaaaaactattattaataatattatcctatccatccatatctattgaaattgtacaggtccataatttcattttaattaattataggaaagaagaaaagataatacccatttgttctatcacccctctccctatcattaactatcaaataaataaataaaagcaatctgatttccaacgtggtacta

SEQ ID NO: 87239 - DNA, 577 bp, Homo Sapiens
  misc_feature (64)..(98): n is a, c, g, or t
caaactgtaatgctcaaaataataaatgcttacacgaaaattatttattgagaatattcatatnnnnnnnnnnnnnnnnnnnnnnnnnnnnnnnnnnnccaaggtggtatatttgaagtgaatggtgattggaaatttttagctgtaacaaaaagaaagaaaacaactttttttaaagcctcattctcttttctttcaaaatgtaccttattcccacacactcttgggctgacctttattttatcaataagctcaatattactttgtttaaaataagatgcttcagcaaaagtcattctctctttaaccatataatttaaaaactcctcttcacgattgatagcaaaatcagaaacgttagggcaccagtgagttgaaaaaactggtcttaagttggaaaaactattattaataatattatcctatccatccatatctattgaaattgtacaggtccataatttcattttaattaattataggaaagaagaaaagataatacccatttgttctatcacccctctccctatcattaactatcaaataaataaataaaagcaatctgatttccaacgtg

SEQ ID NO: 87240 - DNA, 585 bp, Homo Sapiens
  misc_feature (499)..(499): n is a, c, g, or t
aaaaactacccgagtctttatgagacattgcagattaaaatgaaaaccattcaataatattgaaatgctcaatacaaatcagtaccttagacaagacatacacacatcttgctacctggatggagggcattataaacatcagttagccatcacagctctcacagaagcatctgcaagtcaatggtgtggagagcctgatttcaagcgttcaaaatccagtcagagctggcttataagaagagcccaatcaagcagtcaaacgtgtttacaggtcagctctgctcctggccaagtggcgttggctggggcacgtcgtgagtgggtggtggcggaccaagctcctgtgtcagctgcaggtgctgagctggatctgaagtacttgtagctaaatggagctcctctgtttgctcttgatgggcatgaagatgttccagtgtttccttggacagagtgatcacgtgcactggctctgtttgtgagggccccatctggctttcantcatattgaggctctgaatgtgttctgtttgctcctgttgagctgaaagaattaaattctgcagttgctctggctgctgcgtgagc

SEQ ID NO: 87241 - DNA, 724 bp, Homo Sapiens
  misc_feature (49)..(60): n is a, c, g, or t
  misc_feature (610)..(660): n is a, c, g, or t
gagatggagtctcactccagcctgggcgacagagcgagactccgtctcnnnnnnnnnnnngaaagcaagtttcacatgaataatgctgtgttggaaggctttttgatttaaaatcttttcggatttataacatcctgttaagttttaggagaacccgttttcccagagcagattcaagcttctaaaaataaatgctttcagtagcaggaatggcattgtttaaaaagctgatggcagggtaagcatttgggttagtgttttattaacatatttgtaagtacttgttcattgtggaaatgtgtccttgactaaaaccatacgtggctatggaaaccatgtttgtagttctgaatacacaggttttgtgtgtatttactctatgtattaaattattattgcccttagtttaaagtaaggattacaattggatttaagtagatcactgaatgttattgtttatgaaacttaactttttgtatgctgcttataaacatgatctataaatcagtgcttgggaaaattttactttcttaatctactgatacaggaataaaatatgaacaattaaacaggttgatccttgaatctgactgatttgtgactttttttnnnnnnnnnnnnnnnnnnnnnnnnnnnnnnnnnnnnnnnnnnnnnnnnnnnccctctctctgacccctgccacagcacatcctgttcggcgaacgctgggccgtcggagcacatc

SEQ ID NO: 87242 - DNA, 551 bp, Homo Sapiens
  misc_feature (334)..(334): n is a, c, g, or t
  misc_feature (534)..(534): n is a, c, g, or t
cagtccagtttgtttgaagtcaatcttttcatcagaggcagcttaaagatgctttcagttagttttgtcttactttcagatttctctacataaatctagatactcattaagtagccttttgtcaaaagtatctcatacttataaacagtatgagataggaggattaaaatattattttaaagaaaccactgtttccccctaaaatgtcataagagcactgaagaacttgaaatatttttttcagagtttctcacacactttaaaagtctaacttttttgtgtgtaagcatttagcttgccagcatatttctttttggctccttaaattgcggtntgtgtttgcagtattgtcacttttgctctcactgttatgttgaataataattagcatataattgtctacagaagcaagagcaatctggaaggaacaaaaatgttttctgtgattaacagtgaagaccttgtaaatgcagatgtgtgataaagcatttagtcagtcccccaaacagtcatgccaactgtgaaggaatgtcncacaaaacacctcgtgc

SEQ ID NO: 87243 - DNA, 669 bp, Homo Sapiens
aactcggccgagtccttcagtctcttacagctcattgctaatgactgctacaagatgggccagttttactattctgccaaagcttttgatgtccttgagaggctggatcctaaccctgaatattgggaaggcaaacggggtgcctgtgtgggcattttccagatgatcatagctgggagagaacccaaagagacccttcgagaagtgctccatttactgagaagcacaggtaacacccaagtagaatacatgatccggatcatgaagaaatgggccaaagaaaacagagtgtccatctaaaatagcgccagcgtcctaggaaccagcttctactttgacataaaactggaaatcattttcactccagtttaatctgtgatacagggctctgttttattgacattttccttccttgctctttaagcctcaaggtcagagactgacttgctgagacttagtctcctggctgaacagagtgccatagtctgtgaccctgtatgatcctagtagcaataagattttggacttatctggtgcctttcttccaaaaatgctcagagtacttttatgcaatttactgactttaaggaaaacagtataacttttttttgttagcattttatggcattgtctcctggctgcaataacaaacatctttgatgttcaaaa

SEQ ID NO: 87244 - DNA, 755 bp, Homo Sapiens
  misc_feature (87)..(87): n is a, c, g, or t
  misc_feature (140)..(140): n is a, c, g, or t
  misc_feature (223)..(223): n is a, c, g, or t
  misc_feature (678)..(686): n is a, c, g, or t
acgaggagtgatgccagcagtcccttttcattattctatcttctgtcatatgaatgttgagcaaagcttaggccaacatgaattgtntgtgaagtgtggttgatggtgctttgtttttttctgactacttctatggaagnccagtgaagaagcaaaggaagacatgaaaattgacgctcattcttcttcctattgttccctgacatccagcaaattgtgaatntgaaaaatgatggccagttttcagaagtgctgacaaattcatattggtatgcaaaagctcatcacccattaaggtttgttgttgaatcaacagtactcagcatattaaaacagtacatcagaactcatgccaacagtctttatgatgggattaaggtggacaagatctcctaagatctgtgaatgggattaaggtggacaagatctcctaagatctgaaaagaaaccttaatacgctcatatggttggagtgttaagtgaacctctgattttgtcagggtttttctacgtgtaggcgtgaatagggggcaccccttcaaaactgtacaaagaagacgactgttttccatttccatttaaacatttttagccacttcatttctatttattgaacaggtcaaatttgtcttgttatttgtgagtacagtacatttaaaaaacatccttatcggttannnnnnnnncagtcggagtttgacgtataaattgtttatgcttttggtgtaatctcttaataaactggttcttcaaaa

SEQ ID NO: 87245 - DNA, 575 bp, Homo Sapiens
  misc_feature (545)..(546): n is a, c, g, or t
cccatatccaaatattttatgtttggtcaaaaatagaaaattctattataaaaaataaagttactatggcaacattttcccaacatagttcccagtatataaacttatttttcttaaaatgataacaaggtagctcaataacaatacaataccagtgataaccaaatataattgaatttttctaaaactacattcttacattccctatccactcaactcttgtaatggttttccacttttaaaaactatcaaaataggatttttaaaaatttatcaagaccacataatgcagttgaacactcaaagtgttccatgcaactgtggttgaactattcagattccagacttctaccaagaacaatccaaagagcaaactcccaaaatgacctcctgcgtggtacaaaacaagccaggctgaaatttcgggaaacctaagggatcttatccagaaccatattttggaaaactgtgatcaatcaattttttgacagtgaaagagagtactttccagagtatgtgttaattatatctctatcaagctttannaagttaacagatacttaactcttgttcat

SEQ ID NO: 87246 - DNA, 963 bp, Homo Sapiens
tttcattatatattgctctatattctaggtcgcccactttacacttccttctcatgcacttggtcaataccacgcccgctgaccacactggcgacttccctctctgtcgcccctccgtgaagtcagacccactctgcgggccaagaaaggtgaccgggcttccttccggcttgctaagcagaggccggaagcggtggtttttagcggattctcgtagctgtgccgggtgagtggcgctcgcgttcgggcgcgtgagacccatcccggggacccgtctccgcgggggcagctggagggcggcggggctcctggcgccggtagcgcacctgggcaggtgtgccagccaggtccccggttctgggatccgaggccatggcttggagtggcccagacccgaacttcgctcctgtgcccaaacttggaactctggaaatgtgcttcgctcactggcgccttgagcttgggcgactgccgggtccgcgaaacccgacccctgcagagctgactccgggactattttagtttctaacgtcaacttgcccgattcaagagggtttgcgcaaaaaacgtagcccgttgtcctcctgctgcagctgttgttgcagctgtgtggctgcgtttagtaggaataaccaactcaaattgggaagttcttcagctcagtatccgctcctgtaattagaactttttttctttaagcgatgaaattttggacagagagatctggagtttagtttgtgactcgaagaaaaactccaaaatgtaataccttgtcccatttggggggaaagtttgggctaattcaattcgccatggaagtgtcttctttttaaagtagtttagtaggtatatgaatgtatctgtcagttcttgagagacctatggatttagcagagattttaacttaagtgcaaaaagtttcatatttaaaggcgaataaagcgaatatttcttaaaattaaa

SEQ ID NO: 87247 - DNA, 711 bp, Homo Sapiens
  misc_feature (18)..(18): n is a, c, g, or t
taatattgataatgaaantaataacagcacaccagacccaacgtgggttcatgagatttttcagggaacattaactaatgaaaccagatgtcttacttgtgaaactataagcagcaaagatgaagattttttagacctttctgttgacgtggaacaaaatacatcaattactcactgcttaaggggtttcagcaacacagaaactctgtgcagtgaatacaagtattactgtgaagagtgtcgcagcaaacaggaagcacacaaacggtaattttagagctttatggatttttaagtgattttattttttgtaattgatgttggaggtgggcttagaaaaacaatctaggaaaatttacattgagtaaaaattcttaattctatcactaacagttaatgttcattaagtattactaggtaaatgatattctactcaatgtttattttacaaaaactgtgtaccctgaagtgatttcctatgtctagcgattatttaatcatcataaaccagtacagttaaaatatttggctttgaggctttcctgatgatgcaaacttttttcttggtgaagagggttgagggagatagcactccccattgcccatcccccacacccccagtttctgcttttcctacataggatgttgtacattctcttagcatgttattgtaagactggtttggtatcaataaatggaataataaacatc

SEQ ID NO: 87248 - DNA, 932 bp, Homo Sapiens
gggctgcacactggtcaaatcagtactgcccgtccagtccaagacacagattcacccaggcagactctcacggtcttgatcaaagacaatggggagccttcgctctccaccactgctaccctcactgtgtcagtaaccgaggactctcctgaagcccgagccgagttcccctctggctctgccccccgggagcagaaaaaaaatctcaccttttatctacttctttctctaatcctggtttctgtggggtttgtggtcacagtgttcggagtaatcatattcaaagtttacaagtggaagcagtctagagacctataccgagccccggtgagctcactgtaccgaacaccagggccctccttgcacgcggacgccgtgcggggaggcctgatgtcgccgcacctttaccatcaggtgtatctcaccacggactcccgccgcagcgacccgctgctgaagaaacctggtgcagccagtccactggccagccgccagaacacgctgcggagctgtgatccggtgttctataggcaggtgttgggtgcagagagcgccctcccggacagcaaccccgcccaacacggactggcgtttctctcaggcccagagacccggcaccagcggctcccaaaatggcgatgacaccggcacctggcccaacaaccagtttgacacagagatgctgcaagccatgatcttggcgtccgccagtgaagctgctgatgggagctccaccctgggagggggtgccggcaccatgggattgagcgcccgctacggaccccagttcaccctgcagcacgtgcccgactaccgccagaatgtctacatcccaggcagcaatgccacactgaccaacgcagctggcaagcgggatggcaaggccccagcaggtggcaatggcaacaagaagaagtcgggcaagaaggaga

SEQ ID NO: 87249 - DNA, 430 bp, Homo Sapiens
gtctttgatccccagcaaaagaagcaactggggatcaaagacaaagaagacaagaaaggagccaagctgctcgggaaagaggaccgtcccaacagcaagaagcacaaggcaaaggatgacaagaaagtcataaaatctgcaagtcaggacaggttttctttggaagaccctacccctgacatcatcctctcttctcaagaacccatagaccccctggtcatggggaaatacacccagagcctgcacagtgaggtccgtgggctgctggacaccctggtgaccgacctgatggtcctggctgatgagctcagccccataaagaatgtcgaggaggctttgcgcctctgcaggtgactctcgggcccaagcaaccttctggaaaacgggttaataaataaatcaataaagaaccttcaagtttctactaaaa

SEQ ID NO: 87250 - DNA, 903 bp, Homo Sapiens
  misc_feature (90)..(124): n is a, c, g, or t
ccccccaagactatatgacctcatatggcgcatcgctgcctatagccgaacgaccgagcgcagcgaagtagtgagcgaggaagcggccgnnnnnnnnnnnnnnnnnnnnnnnnnnnnnnnnnnncagtcgacggtaccggacatatgcccgggaattcggccattacggccggggagggacccgcagctcagctacagcacagatcagcaccatgaagcttctcacgggcctggttttctgctccttggtcctgagtgtcagcagccgaagcttcttttcgttccttggcgaggcttttgatggggctcgggacatgtggagagcctactctgacatgagagaagccaattacatcggctcagacaaatacttccatgctcgggggaactatgatgctgccaaaaggggacctgggggtgcctgggccgcagaagtgatcagcaatgccagagagaatatccagagactcacaggccatggtgcggaggactcgctggccgatcaggctgccaataaatggggcaggagtggcagagaccccaatcacttccgacctgctggcctgcctgagaaatactgagcttcctcttcactctgctctcaggagacctggctatgaggccctcggggcagggatacaaagttagtgaggtctatgtccagagaagctgagatatggcatataatagggcatctaataactgccttaagaggccaaaaaacaaccacacaacaccaaccacaaacacaccggtgtcggcgccgccccggccccccggaaagacgtcctccagacaacccaaccgcgaggggcgccgctggcccctcaagggtaccgcgaccgtggccaccaaccgggtccagaggggactccggaccaggaacaaggggcggaattcccc

SEQ ID NO: 87251 - DNA, 689 bp, Homo Sapiens
  misc_feature (79)..(113): n is a, c, g, or t
aagtgtatagattcactatagggcgctcgctcagagcgaacgacgagcgcagcgagtctgtgagcgaggaagcggccgnnnnnnnnnnnnnnnnnnnnnnnnnnnnnnnnnnncagtcgacggtaccggacatatgcccgggaattcggccattacggccggggagggacccgcagctcagctacagcacagatcagcaccatgaagcttctcacgggcctggttttctgctccttggtcctgggtgtcagcagccgaagcttcttttcgttccttggcgaggcttttgatggggctcgggacatgtggagagcctactctgacatgagagaagccaattacatcggctcagacaaatacttccatgctcgggggaactatgatgctgccaaaaggggacctgggggtgtctgggctgcagaagcgatcagcgatgccagagagaatatccagagattctttggccatggtgcggaggactcgctggccgatcaggctgccaatgaatggggcaggagtggcaaagaccccaatcacttccgacctgctggcctgcctgagaaatactgagcttcctcttcactctgctctcaggagatctggctgtgaggccctcagggcagggatacaaagcggggagagggtacacaatgggtatctaataaatacttaagaggtggaatttgtgg

SEQ ID NO: 87252 - DNA, 694 bp, Homo Sapiens
  misc_feature (609)..(623): n is a, c, g, or t
agatggtacgtcatgtgaatgcaaccaagcactgtagttgaaattgtgttatgccactactcatatgttgtcttaggtactacgcataatgttaatagctgagatgttaaagaatttgaagtctaaaatataaaagatgaatatacccatattaatcctatgttaagatgctctggaaataaaggccttattcccttacacatgcgatttttgtaagataatatatacacagtatattttaaatgtttgtgtgggtggtctgtgtagttactccccatacaacaaagctgacaaaatttttaatttacacaatgtattctgcattttcaaatgtttatgttgtgtatatagcaaagaaattatcttactgatatgcgttgaccaaatcccatggagaaaagacatctcatttgaggttccccttcctctcatgtgtttgattttttggaaggtgatacagtatgtgggtaaccatgcaaatgtttatgaataactttactgaagtgattccatccgtattctgttctaatacttggagaatgaccttcatatttatatattttatttctttgtttcaactatccagtgataattcaggaaatgtttccnnnnnnnnnnnnnnnacaaaaactttttatttgtaaaatgtttgtaataatgtaaaggtgaacatgttcaataaaaatcatatatt

SEQ ID NO: 87253 - DNA, 532 bp, Homo Sapiens
gcacgaggagcgcataagaccttcccgacaggctctgcgtgtgcagctctctgcgtccctcctgggccctccagcgtcagacactaatgggagttcccgagatgctcgggtttgagcagggagcaggcagagctgcagtcagagacattagaaaaccagtctgaattgggtctgtctttgagatgcccaggccagcagaaagcagctcagaagtattgttgctcatggtgtggcaatggactgaactgtaatgaaaatgttatttaatctttgtctctgtattttgatacttgaatgactttcccttttgttttactgtatataaaattgttaatctgtctgattttgtctgaattataaacactttgaggtaccaaacataaccaatctgtgcaacaacatagactgacctcagtacccaagagagtgtaaatatttctgggcttccagctttggttttgttattttcataactgtacacaacttagaacagactgaattaataaatgagaagcgacatgaacgcagcctt

SEQ ID NO: 87254 - DNA, 1048 bp, Homo Sapiens
cctcccctccgcactcaagctgctctctgctacaatgaggatcttagtaagagccctaagaccatgaaaaagctgctgcccaagcgcaaacctgaacggaagccttcagatgaggagttcgcgtcccggaaaagcacagctgctttggaagaagatgctcagattctgaaagtcattgaagcttactgcaccagcgccaaaacaaggcaaacactcaattcaagttcacgcaaagaatctgctccacaagttttgcttccagaagaagagaaaattatagtggaagaaactaaaagtaatggtcagacagtgatagaagaaaagagtcttgtggataccgtatatgcattaaaggatgaagttcaagaattaagacaggacaacaaaaagatgaagaaatctctagaggaagaacagagagcccgcaaagacctggagaagctggtgaggaaagtcctgaagaacatgaatgatcctgcctgggatgagaccaatctataagggacgtcctcagttctttctgttgaagaccagttctgaggtgaagctgggcacccctgacccaagtcggggtgcactcaggaccacagggcagggctgggtggggcgccaccttgactctctgtatatagaaaagctggagcttattctgcgaatggagacgatcaaaccatgactgatgaatccagacaggagggattgactctgaggacctgagctacatcaatccactctgtgaacatctcagttacctcattctgcaataagttcagtgactgactaaaagtcttgtaagaccagactttgaatggaatatatacaatattatatatacatgtatcttgtaaatatcccatttcgaatgcatacctgtggatggtacatgtccgggctaatccccatgctaagaatgtcctttccagctacgttgaataagagagtccatgccggcatccaccggcaagcagacgcctggtggatgctggataggaccgagaaccagggacctccacgtgctgtggacagaagaccccaaggtggacattac

SEQ ID NO: 87255 - DNA, 682 bp, Homo Sapiens
gaggcaaacagaaatattagtcatgcaaattgattataataagccagtgaatactgttgcactcaggtactatgatttttctcaaatagaatcatattattttatagtacagaaatattatatatgaattcctttcatgggtcttgcaacaatttcacatgatttttctcatggggagaggtgaagaaacaacattagccctcttctctcctctcttgattccctttataccccaccatcatttctgattataaataattctaccattctatggaagtatttgtgggtcacagattgtcaaactacttaatgaaagttgtatgaaattagtttttcaggtgaggcattcctagttgcaattcctgttagcaaaacttctaggagtggggaagttggaaaatgcaggattcttccagtgagccagcatttcccatagctaaccctattctcttagtctttcaaaatgtagaatgggtccaataatggctataagatgtaataaatcccatcttaatttgttttaaaagtttcataaatcactgaacacttatgaaacaaagtgttttttaatcagatatcaactgaaacttcataaaggatgcatagttttataatgttattgaatcaaattttaaggcttgtattgtttgattttaataaagtataaattcaatttacaaaa

SEQ ID NO: 87256 - DNA, 661 bp, Homo Sapiens
tttaggttgaaaatttaattcgtaatacataattattttattgaacaatatataccaatatagtgttttattgaacaatatataccaatatagtgttttattgaacaatatataccaacaggaaaatagtaagatttctttggagttctttttgttctcagatcaactcatcttgaaatctctacacaaaaattcatacgatgaaaattttaaattttgagttgatctataccatataccaccaagacccataaagcaggatattacataataatgtagaatttctagagctgaaaaggctagacaccatgtaacttgaagcagaatgggggctggaaaacatacaagtttcttgactgttcaatgctctcacagaaagttatataagaaaataaaatattttcattttttatagatcttagaaattacattactgaaataactgactttacagcttggaacagactgaactatgatactaactaaatatcttctgatcttgaaagactaattgcacctaaatttttaaaaatataaccatgtcagctttaattaagaattttactatctgtagtatttggcaaaataccagagcagtttgggacaccaagaacagaaataacctttttagttctcattaagaactcttctcacagactcg

SEQ ID NO: 87257 - DNA, 831 bp, Homo Sapiens
ttttttgcttttataaacattcaaccaacatgttctttaataatctcttctttaaagaacaaaataatcaagtacatggcattaagttaaatgtctctgcacatgaatttccaccttataaatctggtatattaaattgtgctgtaaatagatttgtatattttcttttttgagtactatgataggtgaaatggtatgactataaaaaggatttgtttctttttgtctcctggaatgacatgatgcctttctagagaaagaaaaattgcaggctacaggaaaatgataaaaactactggattcatttagactattcgatttaggaaggtacaaccacttctttaacatcaagctaaaagtgggggaaagtctcagtctcccaggtaggtctcctctcacactgtcctgggtggcaggcgctgtttatacatgcccgctatcgctctggctgcactgtagatcatctgccgacgggacatcccagtaaatgccatgtgccaatcagtccggctgacattcagtaaactcttttccaggacttcacccactgtcaccaaaaggcctgaccacctcagattatagtcctggggagttagactttgagcctgctgtacaaattccaaaggcactggtgtggcttgtgtaaatgtttctagatgaatgccatggacaggatcttcaaccaccaaacaaccaatgtcaaaccatttgtcaggcagcaattctgcaatgaagttttctactgacacagctgtctgtttttcatggatcaccccagttcgacgcaagctatctatccgttcctgagcacttttaatcagctgcatagcc

SEQ ID NO: 87258 - DNA, 633 bp, Homo Sapiens
tcaagagttcccacaatctggcagtgcaccggatgattcacactggcgagaagccattacaatgtgagatctgtggatttacttgtcgacaaaaggcatctcttaattggcacatgaagaaacatgatgcagactccttctaccagttttcttgcaatatctgtgcaaaaaaatttgagaagaaggacagcgtagtgcaacacaaggcaaaaagccaccctgaggtgctgattgcagaagctctggctgcaaatgcaggcgccctcatcaccagcacagatatcttgggcactaacccagagtccctgacgcagccttcagatggtcagggtcttcctcttcttcctgagcccttgggaaactcaacctctggagagtgcctactgttagaagctgaagggatgtcaaagtcatactgcagtgggacggaacgggtgagcctgatggctgatgggaagatctttgtgggaagcggcagcagtggaggcactgaagggctggttatgaactcagatatactcggtgctaccacagaggttctgattgaagattcagactctgccggaccttagtggacaggaagacttggggcatgggacagctcagactttgtatttaaaagttaaaaaggac

SEQ ID NO: 87259 - DNA, 172 bp, Homo Sapiens
gagatttaaagttctaagggattgtcaatagatatcaaaatattaatcattggacaaaggcttttccaaaaattgtgggtttttttcttctgttgtatccatttgagtcctgcatgctgtgaaatgctgagaacagaagcattaaattggtttttctcggaaaacctcgttc

SEQ ID NO: 87260 - DNA, 469 bp, Homo Sapiens
gcacgaggggaacagaagagagagcctgaaaacagatcaacgtttatatgatcacttgatttcgacaaaggtggcaaaacaattcaacagagaaggaaagtcttttcaacaaatggagccagaatagaatagctgaatatccatatagaaaaaagtgaacaatgaccccctacctcacaaaaatgactttgagatgaatcatagacctaaatgtaatattttaaaagtatgaagctttttaactgaaaacagatgatatttttgtgacttggggggttagccaaaggtttcttaggtcacagaaagcagtaaccataaaagatccaaaattagagctcatcagaattgtcattgaaagtgttaacaaaagtaatatcaaatgacatttgaaaaatatccttgtaaaatgactatattaataggtataaggatttttcttattaatctaataaaattccttaataggaaa

SEQ ID NO: 87261 - DNA, 807 bp, Homo Sapiens
  misc_feature (41)..(79): n is a, c, g, or t
  misc_feature (82)..(116): n is a, c, g, or t
aaagatgtatagatcactataggcgctactcgttcagcagnnnnnnnnnnnnnnnnnnnnnnnnnnnnnnnnnnnnnnncgnnnnnnnnnnnnnnnnnnnnnnnnnnnnnnnnnnncagtcgacggtaccggacatatgcccgggaattcggccattacggccgggccagagatactaaatattagttttaattatgcatctctttgaacatcataaacacactttggtgttggtaacagtattttaagcatttttgttcacttttaaggactatttgtttagtgcatcttacaaactataaatcttaattggtatattttgaaatggtcgtgtaaatttttgccttatatatcatgaaaatagtcataacttaatttcttttcgtgaaattcactgtaaaacattcaggggtcctaccatttctgttcaggaaatcttgtagtttattgttgttatttaacagtattaagtggatttttgtatatttcattttaactttatttgtgaatagtgattgtggcatgtttggggtgttattttaatatttcacgatactaaaattttaattttaaaaaattctggaagaaacagattcatgtgtaatggtgaatattggaccactactgcttttcacatttgtaaattggttttatgttaaaccttgtagcctaacaaactgctgttctttctaactgacagacatgtattaatattgtactttgaaggttataaatatgtggaaattccttcattttgttttgaaatttataataacaaaatctccatgttgtttacaaaaaccaagg

SEQ ID NO: 87262 - DNA, 754 bp, Homo Sapiens
  misc_feature (212)..(212): n is a, c, g, or t
gagtatccctcctggtccttgggatgctgacagaggagcagatatgcagcatctctgccatgatataagggctgctgcagtgcacaactgtctcccaagaaggtaccgcaggggtgtaaaacttctccctgcattgtcaacgctggtctccatggatgtctgctggctttttcaaaaattcttgtagaacagtgcttctcatatggtgattntgtcccccttgccccagggggacctttggccatgtcttgagatgtttttggttgccgtgattgaggaggtgctaccagcgtctgctgggcagagaccagggatgctgctccacatcccacaatgcacaggacaatcttctctacagcaatgaattatccagttcacaatctcaatagcaccaatattgagaaaccctgttgaagatggagactatccacggggcattgatcttggggtctcccccttcctgaatacttgaagtccctcggcagactcttggatacctccagcaatggggagctcaccacctgttttgaagccaggcaggtttgggctcttcttgtagctgtgtgactctggattttcccataggtgggagtggatccaccaccttgagcttcagtttcctccagtgccatgggattagcagcagccctgcctcacagattgcgtgaggatgaaatgagatgatgctcctgagttggctggtgcagtgcacggtacacagagagtgctcaataaatgttccctgctgtgaaaa

SEQ ID NO: 87263 - DNA, 669 bp, Homo Sapiens
ctcagtttcctctggtctaaaataagaacagtaatatccactacatagggtgcttgtgaaaatcaatatgataatgcatgtaaagcacgtaacaaagtgtctaagaagaatcagttctcagtaaacgccagctgattttaaattagaataatattcaccaagatcagtctattgcttacaaaatgtagacatttgaggtctactgggggacccatttccagcagccagagacatttctggcaccagcacgtgagagctgcctcattgttgagtgctgacacatgggtgcacggcctgctcagcagtggggttgggggggaattcccgggatgctctgaattgttgctttctcagcccacaccatggaccttcagatcttcagcagagcatagaataaggagacgttctggtaccagaagggagacgagactattccagcagccatgggactagtcccttcggatctgaccagcttggggcaacgcaactcagggttagtgaaagagtggctatattggggtttctacatggtgggtgggggtggggaaagccagtggaagggtgtcctgctctagagagctgcaaagtctgggtcagacacccagttatacaaccttctgggttccaaagcttgtcctgaagcaaagaaccagaatagccaagcataaa

SEQ ID NO: 87264 - DNA, 350 bp, Homo Sapiens
tttgctgttgttactgtggaacttcttgcatgagaatatttgcatatatgaatctccagtaccaagcatacaccaaaaatgtgtacatttcagatgaaggacataacagagccctaataaaatacagaattgagcttaatttaactgtcttgggcaaccatcatgcctggctaatatgccatattatttccgttgtacacagtacatgttttggtttactaaacattgatcaaaattgatcgaaatctctaagttttggttaccatgtacagagaacaattgctcagcatggcatttaaataaaacagtaatattttaaaaattcacaaatacaatgcacaatttatttt

SEQ ID NO: 87265 - DNA, 510 bp, Homo Sapiens
gcagaggaagccgccaagtgcaaggcaatttattcccagtggatgtacaagatgcccttctaacattccagacctgatctcagggtggggggggaaagccattctagaacctggcctttactcccctttctagaacactggcgctcacccaagaatgggtcaaaggaaaccggaatgagaagggcgggccgaggtgctcgggcagggagatctctgcctcagtgctccaggccctgccctgccagcctggtggaaaagtctttcatcaacctgggggatgaaggaaacccaccctcctgcatatctggccatccgggaggctggctggacctgagctgatggcttgggactttcccaggcccaacctgcacaagaactgagtctcaaggggaaaattcaacacctcaaatgatgtagtatttgatcatttgttgattacatgtccattcataggtttggggctataaacattcttgttaagagctgtggagatcagtgtttgtttaccat

SEQ ID NO: 87266 - DNA, 449 bp, Homo Sapiens
gcttaactagtaaaaacacatcttttctataagactttagaatactgtggtttctaatgggttcttgaataatgattttgcattgtgtttttctagttaatggtttttggtagtatttaatgatagcacagtttggggttttattgttcttgaagggggaggatattgaatttgtttttcttagagaaaacatcaggtttgctcaaatagactaacaacctgttgtccttaagcacatactaccatgaataaactcaggaaacaattttcaagaaaattcgaatgcagtgctggtgatggggattttttgtgggaaaaaacaatggtttcaagtcctttcacaaagatcaaacttcagcctattttgttagactcagcaatgtctaaaacattgttttttgtaatttattgtcattggtaattcaatataataaaacaattttgatagc

SEQ ID NO: 87267 - DNA, 972 bp, Homo Sapiens
  misc_feature (99)..(130): n is a, c, g, or t
gtgcggacctgacgacagatgccccgcacgctggccgggaccgggaagggcggtcaagtgtggaaagggtctggcggctgccaggcctggcagagtggnnnnnnnnnnnnnnnnnnnnnnnnnnnnnnnnctggagctgcacccgcttctgggtggacgcacttggcgagcggcgcgggatgcagacggctgcgaggcgctgggcacagttgctgtcccctttgacgatgatgacaagatcgttgggggctacaactgtgaggagaattctctcccctaccaggtgtccctgaattctggctaccacttctgcggtggctccctcatcagcgaacagtgggtggtatcagcagctcactgctacaagacccgcatccaggtgagactgggagagcacaacatcaaagtcctggaggggaatgagcagttcatcaatgcggccaagatcatccgccaccccaaatacaacagggagactctggacaatgacatcatgctgatcaagctctcctcacctgccgtcatcaatgcccgcgtgtccaccatctctctgcccaccgcccctccagctgctggcactgagtgcctcatctccggctggggcaacactctgagctctggtgccgactacccagacgagctgcagtgcctggatgctcctgtgctgagccaggctgagtgtgaagcctcctaccctggaaagattaccaacaacatgttctgtgtgggcttccttgagggaggcaaggattcctgccagggtgattctggtggccctgtggtctgcaatggacagctccaaggagttgtctcctggggccatggctgtgcccagaagaacaggcctggagtctacaccaaggtctacaactatgtggactggattaaggacaccatagctgccaacagctaaagcccccggtccctctgcagtctctataccaataaagtgaccctgctctcacaaaaaaa

SEQ ID NO: 87268 - DNA, 556 bp, Homo Sapiens
  misc_feature (415)..(415): n is a, c, g, or t
  misc_feature (426)..(438): n is a, c, g, or t
ttgaacgatgcgcatgtgtgccagataaccccaagatgcgcctcccttcctgagatcatcagcagcatcaaagaggagatggaccctggcttccggacgtctccttctactacagcgaggagaacaacctgcccgagccggaggagctggacctggagccagagaacatggagagcgtccccctggacccctcggcctcctcgtcctccctgccactgcccgacagacactcaggacaacaaggccgagaaccgccccggccctggggtgctggtcctccgcgccagcttagacgagagacagccttacgcccacatgaacgggggccgcaagaacgagccggccttcccgctgccccaatcttcgacctgctgatccttggatcctgaatctgtgcaaacagtaacgtgtgcgncacgcgcagcnnnnnnnnnnnnnagagagagttttaacaatccattcacaagcctcctgtacctcagtggatcttcagaactgcccttgctgcccgcgggagacagcttctctgcagtaaaacacatttgggatgttaaaa

SEQ ID NO: 87269 - DNA, 487 bp, Homo Sapiens
aagttatggaggaaacatttttgtaaaagtttaatgacccactttagatgctccaagaacaagcatcccttccatgtatgtcttgagaaagaaatcacagaagcatttctcaccaatactctttggcttaaaatgttcagcagaattgggcagtgggggtgacttttcttatattaataatatttacatccaatacactgaatcttcctttagaggtaagactttaatatctatactgtaaatatttggtttatttggcactactgtaagttttgtttttcacaaagctcttattatgaagcaaaataaaaattctagtttcttgtatgattttttgtactcattcattcctgttaagctgccaaaaattaaagtgcaatattgtatatttttaagaacaaatttaaaatagaattttgatgtttctcagatcacaagaaatacaaatctatatagtataataaaatcagcaaaaagatcaaaaaaa

SEQ ID NO: 87270 - DNA, 582 bp, Homo Sapiens
  misc_feature (78)..(78): n is a, c, g, or t
  misc_feature (521)..(521): n is a, c, g, or t
aaatagtatctgaataaacacttgacatagttatcaagtgtttattcagaaactatttaaaaaattacatgtgctggngatacatatgagactgtaacaacagtagccccatcttacagatatcctgtttgtcattatcatcattgcttgctgcccacagggataaagacattgtatagagacttgtacagtccatgatttggtcttctgaggtgccagtacacgtggatctgtacaaatgcaactgggtttggttaaacaatcgaaaatcggctacaatagtagtcaaatgaacatgtcattttggttcattaataaaaatactttcaaatattttctaataaaacccaaaacttgcaaacaattctctcggaatggcccaatcaattgccctattttttaaaatacattgggatacaatcagctctgttttcttaaaagaaaatgcagattcaattgggtgggttgcattggcttttacagatttagccattaaattctccacattttgaatgattganaatgccttcctgataccacgtcagttttagaaatgcagatcctaatacagtgtgacacctc

SEQ ID NO: 87271 - DNA, 891 bp, Homo Sapiens
  misc_feature (711)..(711): n is a, c, g, or t
  misc_feature (810)..(810): n is a, c, g, or t
  misc_feature (814)..(814): n is a, c, g, or t
atcagactacaaagaacaaaacacaaaacctaattttattcaatattccaccttaccatcatttaaataaaggtaaatgctggtaattaacatagacaaaatttaaatacatactgcacaataaaaaaaattcccaggctaccaaattagtgcaacattctgtatgttcctacatttattccattgcctgaacttccaatgtttaacaaaaaccagtatcagtggcttcttgaacacaggtggccacattctctcggttatctacgtgctcatacagttgaaaaatattgtccatctattttctaggtagactgtaaaacacaccattccaagtaattttctgtttggtcaaaacaatttccttcaaacaaaatgaacagaaaggcagttgggtagtattactgccatttagcgtaacttgcatttccttgtgtttctagtatttggcaaacaaaggaagcggaatcttggcactgcctgccttcacatgcatctcgccccagctaagctgtgctctggtggagtttcatccaaccaatacagacatttcctttttttctgagaagttactctacccacaatatagtacggataaggccacagcaaaaggagtcagaactgacaattgacaaagcagctggatttgagtgtttcttttttggtgttttaggtacaaacaagaactgaatggttgcttcagcagagcatggncagactatacaactaatctgcgcagtactgtcctggatctgcatggtcagtactcctgggtaatcttcagaacacatggcaagtcatattcatcaccanattnattctgtgacagagatgctaaattctgaaactataaaacgacgcaattatttccttagagtctaccacagtcgatca

SEQ ID NO: 87272 - DNA, 246 bp, Homo Sapiens
ttttcatggttgatcaaaaataaaagcaaacagctagatagaagtgaagaaatacttgggatatgaaaggaaacgaaagtaaacccgtggtagttaaatcactgaattgacactgagattttagcacaagacatccccttctgctgataggaaagaccagttaagaagctcaaagagcacatttacatgaagatctagggtcttaaattcatggaataaaaataattaaatgaggaaaactgaaag

SEQ ID NO: 87273 - DNA, 414 bp, Homo Sapiens
cccccttaaagaagaaagtctcaattccattgattttcaattcttagccactggctcattgctttgagcaatgcttgattgattctatttatattatatgatattgggttgataaaataccagttcaatgatgagttttcttaacagaatttggtttgtacttgcagtggctgaacaaagagcatggcttgagaatcaaagggatctgcatttagcaatgtgatgtcagtaaatggacataacaggattgttgtaaaggttgggcatgatgtatgcaaagtactggccagggtagactaataactgatggcatttatatgctgtgctggaatattgttaccaagctgatgtgccgttctcaccctgcagaatactggttttgtcatttcataaatgatatttttataaataaaa

SEQ ID NO: 87274 - DNA, 1364 bp, Homo Sapiens
cttcccggggcgggtgtcttgaacccctcttctccccgcccctctggctccgttctcctcccctcctccacccgtctcccggactcgggggtggcgcctgacaccccgacactctcggacactgtttgggtaaggggtggggggcgggcacggcggactacatttcccatcatgcctagcactgcggtcctcactaaacaaaaaaggaagtcaattccttcacctggatccccggcggccccgggggagggaggggccgggaccgccgactgcgttggagactttgcactaagttcctggtcagctgtggtgtttgtgtgtgtgcttctaagttgcactgccttggttcagccttcggttgcatttcatgaaaccagcattgttcgagcctgtgagaaccccgtcctgtgtcttcagctcgatagatttgtttaatttaaaagccttttgttgtaaaaaggtggggttcgtctgcagcccctctggttctctgccatcagcaccgtgtggactccaaaacgagttgccaatccttcctttctcggcccttttccctcattaccctgtatttttgtgcatactgaattgtatatcaccgggtaaaactgttcagattgtttaaatttataatcttaataaaaagtcgattacagaaagacggaacggaaagagggtggacacccagaacgcaacgggaggaaaagcgcacaagggaacgggggggcaaccgcataaaaacggcaagggaaaacggggcaaaacggcgaaaaggggcaaaagggcaccggctgcaactaacgccaataatcgacggcggggaaccaaaatcgccccggagaaaacccggcgccccttcgggggaacaccggtgtggagccccaaaaatggcggggccgtaaaaaccgcacgcgaaaaacggaaatagggaacgtcccctgccgtcgcctgttatcccctccatcccgcgtaccgccgccaataacgccaatcgcctacgcccattgtaagcgctatctaatgcggcgaccggcaacgccgatgctagaaccgggcgaatgacaaacagccgccgaccgcgaacccgggccaagcgctaacgctgggcgaacataacaaggcgcgggcaacaatatacaaaactccggcgcaacactccgccaatataacgcggcgcaacctataataaaataaacgcggcggatatgaataccggcgcacaaaaagggcaatatacacaataaatacggcgggtaagataccaggccggaaaacaacaaaatcaaaacgcgcgtctccccacaatccccgatgtccccacccacacccgaagacatcgcgagacagacggcggcgggggtgaaaaa

SEQ ID NO: 87275 - DNA, 705 bp, Homo Sapiens
gtttatttttcatcatcttgaatctggccctgtgactgcatcaccaagaagacactgcagaagtgatgctctgccagttctggttctagtcttttagaagactgttagcctctacttcctctttcttcaaatgagctctcttgggacaccctctctcagaaccaaaccaccatgcatggggcatgtgtggcctcttcactcaggagccccagcagagcaaccagccagtactgagcatcaagtgccagtcatgtgaatgagccatctaggatgttctttggtcaagtctatacaaaagaacttaccagctgagcccagccaacacatagaattatgaaatagtaaaatgattattgtttaaagtcatgaaattttgcagtttttttaatatagcaatagataaccaaaatcaagattaaataaaatatcagatgattaaaatggagcatgaaaatggagttaactttgtaagaagaaccacaaccccaatgatcatgacttagaggaaagttcagtaaataaaacagaaaatattgaaaaaggctgtttcattttaaacctgtgtcaagctcctagacctaaaatgacacttgaaattgtcctccattagaattcattgtgctacagattttctctcattctgttacatatatttatttaatgaagtagagaaattcttctctcataagctaatgctgcaaggtg

SEQ ID NO: 87276 - DNA, 622 bp, Homo Sapiens
caagaattcggcacgagggtaaaaatcagtggtagcaaaacaaaaataatgataggaattgcaagtttgggtgttttcagtggatttcagccttaaatatagaaacagcagaatttttgaaaagtaattattttgaaaaatgaatggcatgcagctagcctttgtataaaaataattttctagatttgaaccctaatagttaaaaattaaaaattaaacataaacatactgcttttaattgtcaggtatatatataagatagagctgaaactgtggtttaggtctttctgtggaatgccattacatctttatattagtcaagtccatgaaaataaatgtttagatcgtcttgaattgttagtctcaggcagtgttatcctgctctcaggccaacagggggagcaaaatagaaacattccagatatagctttcatttttgagaacttgagtaatcagaatttactgttctgtaaagaataaaggaaaggaaaattataaagagagaaatttctttttaaagccctcacagaatgtgctagaaatagaataaaatttaaaatacttttggcttcttttcctcagcttaagttcaaaataaaagcaatcctttacagttaaaaaa

SEQ ID NO: 87277 - DNA, 1343 bp, Homo Sapiens
  misc_feature (239)..(333): n is a, c, g, or t
  misc_feature (831)..(900): n is a, c, g, or t
ctatcacacaccgggtggtcgcactccgcggggcttttctcttgctcgggtacttggggggcattgcgcccccgcactcaatgaggaccgtccgcgtctagactttcttttttgttgccggccccgcgccccccctccagggcggctttttcttgtctctttccccgtggcttgtcttcttccctccttctctttttttggtgtcctcctgttccgtcttttttgggttttgcgcttcnnnnnnnnnnnnnnnnnnnnnnnnnnnnnnnnnnnnnnnnnnnnnnnnnnnnnnnnnnnnnnnnnnnnnnnnnnnnnnnnnnnnnnnnnnnnnnnatatttgcaacatatttattcaacaaaggaaaaattaactggaaaaagacagtcggattaatcaatatgcaaacatctgaagggatattacataaagaaagatatcctaacagctagcaagcatgtaaaaatgcccaacctcgttagctatcagggaaatgcaaattctgactggcatcattaagtgttgctgaagatgtgaaggaaatggaatattcacacattactggtaggcacgggcattggcacaattgctttggaaaaaatgtctgacaacatatcttaaaagctgagtatgtgcatcacctataatccaacaatcttatttcctaggtataagcaacagaaaagtgtacatgtgtgtcccaaaacccatgttcgagaatgtccagagcagcacaatttgtaatagttccaaactaaaaataaaagctatcggtctagaatggaatgactaaatagaatgtgtgtacttatagagcgtgacactctagagtnnnnnnnnnnnnnnnnnnnnnnnnnnnnnnnnnnnnnnnnnnnnnnnnnnnnnnnnnnnnnnnnnnnnnntgtctatctacacagaaccgaccttatatttccccgctcagctgcctttatcaaaattaaggatgtctgctgatcacctcttgaatgttctctcctctcccacatcagcaagagggaaaaaaagaggcaaaagaggcccggtttctcgctattaggacaaacccaaggatatctcttgtcaggtgagccctgtacccctggctttgctgagatgcttatgagcatttcctcacataaccctgacaatataatcagggcacaattatggtagccatccttatcaccattttatagaagaggaattgatcactggctggattaattgcaaagctctaaaattagacagtggggctggttgcacaactaatgtactaaagcccagcagtacacgatttttaaaaaattaatttatttttgagacagggtctctgtcacccaggccc

SEQ ID NO: 87278 - DNA, 721 bp, Homo Sapiens
ggtttgagacattgctgatactttttatgttttgttttccagagtcaagaaaattgtttttttcttttgagctgtacatagcttacagtaattagataaattacacttttgtgagaacaattgaaacactaacctttctctctacctgatgtctccagaatttggaaagtatttgtgagtattcttcacttttggcaatatagttatttgtacaaattcgataggaatctgttttcttttgtaacagaacacagttggatacactgattattttgccaaggctttcattggaatggcataattttttaatgaccagactgctttgaggatttgaagttgactttatagagcctataaaaagcctgttggaaaaattagcctgataccttgtctacacagtttccttacaaggttcctgaccttgcggtagtaaagaatgtcactctctggcaggcccaggagcctcaggatattttgggaaccttgacaagagaggagtgtatccaatttatacaggaattacaagtgcagtctgattgtgaatccttgtcttggcttcttagccttgagagtttttaaaagttgaatgtgaaattccttatgaaaaagttccaacaaagccaaactttaaaagagcctatatgtggtcaatcactatttttgctgtactttatgcaaataatcaggccaaatataataaaactaaaacttattttgcaaa

SEQ ID NO: 87279 - DNA, 542 bp, Homo Sapiens
cccagaaaaatctgtcctttgtggtaccaaaacctgaggtcttttggaagataatgtagaaaaccactacctattgaaggcctgttttggataatctgtgcaaactctgatgatacctgcttatgtggattcttttccacactgctttcatttttaagtataaagacttagaaaactagaataatgcttttacaaataattaaaagtatgtgattttctgggttttttccttctttttagaaccctgtatttaaacaagccttctttttaagtcttgtttgaaatttaagtctcagatcttctggataccaaatcaaaaacccaacgcgtaaaacagggcactatttgtgttcctaattttaaaaagctttatgtatactctataaatatagatgcataaacaacacttccccttgagttagcacatcaacatacagcattgtacattacaatgaaaatgtgtaacttaagggtattatatatataaatacatatatacctttgtaacctttatactgtaaataaaaaagttgctttagtcc

SEQ ID NO: 87280 - DNA, 1233 bp, Homo Sapiens
  misc_feature (707)..(798): n is a, c, g, or t
  misc_feature (1084)..(1098): n is a, c, g, or t
acatataaatatacgtaagttgcctctcatatgcgaccaagtgttaaaagttatcgatccaacagctacacgatagaccacgccacactaaacaatctcaaatagaatcatgatttcacataatccgtaattcatcagactccatacagggactctggccctgaagaccgtagatatcgcaccacggatatactcacacatgtccatacataaaacactcatgagttaagtcccatccttcccacaaacagcttcctggctggtacccatgataacaattgagctgaacctggggacccctggttggggaacaggtgagttctatttgagacttccagccctagaaagctgcctccgtccagaaatgcctctcacaccaggagctcggccctctctttgtagctgtgactgtcaccctctcaggctttgtctcatccttcattctgaataagatggcagtgttctcctctggggcctgatccacctctacaccagcccaggaagccccatctgtgcctgccctcaggtggtccaccagtctccccctttggttcccttccagtctcttccccctttctatcccaatcaccaatagaaatgctaacatccctgcctggtagccagactagcccactaaagctcccctgtaaatgggggctccattagttctgctgccgagactaataaagatttggttggctctagcnnnnnnnnnnnnnnnnnnnnnnnnnnnnnnnnnnnnnnnnnnnnnnnnnnnnnnnnnnnnnnnnnnnnnnnnnnnnnnnnnnnnnnnnnnnngagggggggccggcgcaatacccccgagcgcgggagggccaccgacagtaaatacgaccacccgcgattatttttttatcaaaaaagaggagcccatcccaatagagaagagcgcgcacttataaattaaaagttgcccggcgagcgagctgccgcccgctataaataatcgacgtctgtgcgggtgaagaaacacacacctgcaccttggtgatataattatcttgtgaaagaaggacccccaccaatctagccggggaggggagagcataaatactgggaccannnnnnnnnnnnnnnagtgactattataccgtctcggtggcggaacaataacacaacttgatcactatattgaggcaacaacaccccgtacttagtctatcttgccccgaacaaaatctgccccacgcaatattttctacacattttacg

SEQ ID NO: 87281 - DNA, 685 bp, Homo Sapiens
agagatcacagacgacagcatttgtgtaatctgtgtggaagaggattttatcagcggtgtcacttaagagaacactatactgttcatactaaggaaaaacagtttgtttgtcaaacatgtggaaagcagtttttaagagagcgtcagttgcgactgcacaatgatatgcacaaaggcatggccaggtatgtctgttccatttgtgatcaaggaaacttcagaaaacatgaccatgtacggcatatgatttctcatttatctgctggtgagactatatgccaggtctgctttcagatattcccaaataatgaacagttggagcagcacatggatgttcatctgtatacatgtggaatatgtggagcaaaatttaatttgaggaaagatatgagatcacattataatgccaagcatttgaaaagaacctgagtgattttctactgtactaatgtttagatgatagcagataaaacaccaaagcaaaggatatgagctatttaggaattgattatataagatgatttgttagaaacaaatttcaaggcccttttaactttaatatttttgtttaggattttaagtatctacatttaggtattaaatgtttatcatttttgttgtttcttaatagaattatttgtttttagtttttcttagctatgattaaaatttttaaatgtagact

SEQ ID NO: 87282 - DNA, 685 bp, Homo Sapiens
  misc_feature (111)..(111): n is a, c, g, or t
ggaaataccgcaagattatgttttctgtttccagggttatgtacttgtgtccagatgaataaagcagaaaaagaggggattgagtagcatttcccagattcttaagtactntgctattcgatttgcctttcagtgtagtgtacattgtaaaactcagatattgtcatgatgtttcacttggacataagacttattaatgtggtcacttaaggggtaaggaatttaagaactggatgaggttatttcttcctttactcttcaaaatgtatttttgatacatcagtatgagaggacgtcccatcaacaaagcatcgatgatggacagtctcacactatttttatcatatgtttctttgtcagccttctgcttctaatcccagtaagcaacttggacaggcattttaaaagctgaagaaaagtgacattattttagctagtggtttttaatttattttttgttaagatataatgggtgattatataagttagatttatttatgatatcaacttgggtccaagatgatagttttagctagcttatgaacattgggttcacaaggcattgggtaagttagataaaatagcatatactttctctgcagggtaggtaagataggtcagtcaagttggtaatgcctgtccattaaccatttatgcatactaataaaattataagaataaaatc

SEQ ID NO: 87283 - DNA, 1054 bp, Homo Sapiens
gcggccgcccggaggtagctaccacggcctgtgtcaacgactaaagctccagtacagcggcgccctcagacagctgggagggtggctctggccgggagcggcggccggtgagctaccgcgaggaggagcggcggaggcgacctcggcccggccctgcactggccgcccggcaggcgcgacatgagcctggtctggcatccgcgggatgctccttaagccccttctccggctgttaacctccggggaacggttgtgaccacaccgacacgtattttacagataaatcattcttgcggcggcgggtcgaacacgtttatttattttttattttctcaacaagcttttacccagcacctgtccagtgaaacaacttgataatcgtttcgaggggcgtccgccgggttaggaagccactgcctggcagcttgtggaagcctcatttgcaaagccacccctcagatgttttgaagatcgtgacgtcttgtaactagcagtgtgtgcacagaatcctactcaaggaacgtcttggcccagcgatgcaaagaactgaagtttcaagctggaagagcctgtattgtcctcacaatagtatagaagaattcaagagaggagagagagacagcaccgaatgaagactgtaaaagaaaagaaggaatgccagagattgagaaaatctgccaagactaggagggtaacccagaggaaaccatcttcagggcctgtttgctggctatgccttcgagaacctggggatcccgaaaaattaggggaatttcttcagaaagacaatatcagcgtgcattatttctgtcttatgcctagaagtggaattactagttgtatgctaattagatatttaactctatgtgaggttgccacatcactgtccaaagctgttgtaccagcttacactcctaccagcaatgtataagaagtccagttgcacggtattcttgccggactttgttttgtcagtggtcttaattttagccattctactgcgtgtcgtatggtatgtcatcgtcgttgtaatgtccatttttctgatgactaa

SEQ ID NO: 87284 - DNA, 496 bp, Homo Sapiens
gcacgagggtgcaaggaaaacagtggcaactctgtgggatggacatgcagccgtttggcatggtaagcaaggatactttcacctttgtgttgccattcatgtgtgctgcattggaactgtgttaccattccattttattgattgagaagatactgaaaaatataatagaagtgatatttactattccctgttacctgtttgcatgcattgtgcatatgtatgtgtctttcttaaaatgagttttcccatagacgttggtttccattaaacaaagaaccacgcagcactgtagactataagttgaaataagaaaatttatatttaaaacatctaaaagagtaagagactaaataaagctgtagaaaactgctttaaaaatgcttcaattatttagcatttacttctgttcaaaataagtttgactctacccagtgtggatttaaaaaaatgaaatattaaataatattacattaaatataatttgcaaacccaaaaa

SEQ ID NO: 87285 - DNA, 643 bp, Homo Sapiens
tccagtttcatgcatttatttcatatagtgggcacgatctttctgggtgaagaatgaattattgccaaacctagagaaagaaggtatgcagatttgccttcatgagagaaactttgttcctggcaagagcattgtggaaaatatcatcacctgcattgagaagagttacaagtccatctttgttttgtctcccaactttgtccagagtgaatggtgccattatgaactctactttgcccatcacaatctctttcatgaaggatctaatagcttaatcctgatcttgctggaacccattccgcagtactccattcctagcagttatcacaagctcaaaagtctcatggccaggaggacttatttggaatggcccaaggaaaagagcaaacgtggccttttttgggctaacttaagggcagccattaatattaagctgacagagcaagcaaagaaatagattacacatcaagtgaaaaatattcctcctgttgatattgctgcttttggaagttccaacaatgactttattttgcatcagcatagatgtaaacacaattgtgagtgtatgatgtaggtaaaaatatataccttcgggtcgcagttcaccatttatatgtggtattaaaaattaatgaaatgaaaa

SEQ ID NO: 87286 - DNA, 590 bp, Homo Sapiens
aaacacaggagcaaaattcgaggaactttctacaaaacacttgaccctactcaaaattgccaaggtctcgaaaacaaggaaagagatgccgtcacggacgagaggagactaagcagatacgatgactgaatgccatgtgggatcccgggtgggatcccgaaatggagaaaggatattagtgaaaaaactggcaaaatctgaatacaatttggagtttagttaaaagtaacataccaatgttggttccttagttttgggaaatgtccagtactacagtaatgtaagatggtaacattagggagagctgaaatcgggtgagggctatgtgacgaatttgtactatctttgcaactttactgtggatctaaaattattccagattaagaagtttacctatataaaaagcatatgtacatcataattacagttatgcaaaaatatggttagaaaaaatacataaggaaaacatacgtaaaaattagtgtggttctgttagaatggtggcattgtggagtattttttcctcttatctgcttactgaattagctgtaaatgagtcattttccataaattaaagagttaattttaaa

SEQ ID NO: 87287 - DNA, 1529 bp, Homo Sapiens
gtgatggatttagaaactaaaatggtatctgtgctccccatcttcagatctgaaaatgctgtggtagatggcccgttcctagtagaaaaacagaagacattacccaaactacctaaatctgctccaagcattaggctttcccccgtgactgcgtgtgctggccagactcttcagttcaaactcagattagacctcccatcaggatcaaagctaactgaaggagtatccagttgctggtttctaacagctgaaggcaatgaatggctacttcaaggacagatagcagctggagatatagagaacatttccagtcaaccaacaatttcactacaaattcctgatgattgcttatcacttgaagccattgtatctgtcagtgtgtttctttattactgtagtgcagacagcagtgcttgtatgatgaaggcaattttgttcagtcagcctttacaaataacggatacacagcaaggttgcatagctccagtagagctcaggtatgtattttagccagccagctagctagcaacccattgccaccacctactgtctcccatcctgactatcactgtaatttaaggaaagaaaacttcaagttctgcctctggataccaaggatgcccattgctcagttcagacaactgatattaaaataaagctatgctccttacttacttcttttatatataaacaaattcctttgctttggctgatactagctgagtcattgatcatcattggtaccatgatattgtaatctatgctgctatttggcacaagactgaagttcacactacagtagagaatactataagataatttgcaataaatactgataataataataccagatattttaactaactttttctacctttattaatagcaatcagcacacttgaatgtgtaaatttcacagtaactttaggcagaacttaagctccaggccacatttgtataagaacaccaagtattcaaggcataaagtctgtgtaagccaaaaaaaagtctttgcatcactgtagaagcttaaggagtacatcagtggtaaatacgatctttattctcttctgtggttttctcagttgagatatttttaaaagagagttttgatcgtattttattataaatgattgtgatttaagcataccattatgaatgccttaaaactttgtacagataaagttggacatagaatctctaaggactgatcctttaactgtatgtgagtgactacagttacagataatgaatgagtcccagaaatattatgaccttcaaggaaacagggcttaggacacataactaggtctgtgagtaataattatggggcgctaaactgatgtgctatctgttgggatgcattcattgtagctaaatggaatggagtaggtggggacggccctatgaattatagctaaggggtaaaccataacgaagaataggggggacgaaaaaaattaatagaaagcagggaagcataagggcaaaggagtggaaagttaatagaataattattaatattttgc

SEQ ID NO: 87288 - DNA, 695 bp, Homo Sapiens
  misc_feature (620)..(620): n is a, c, g, or t
aaaatggggaaataattttactctcctgcatttgtacagagaacatttgagtaacagttttcccaagcaaagtaaaccaaatatttatctggtggatttaggcagcagaacacaacacagagagtttacatgtttcaagaagttacatacctcctgcaagcgatataacctaatatccaaattatcttagtcaatttgagcttctataacaaagtactataaactgggtgacataaacaatagaaatttatttctcacagttctggagactgaagtctgagttcacggtgctagaacggtgagggactggtgagggtcctcttctggttgcagactgccagcttcccattgcaccctcatatggtggaaagacagctagctagctctctggtctcttcttttaagagcactaatcccattcatgagggctccactgtccaaaggcccttccatcaactactatcacattgggattatagtttcaacatacgaaatttgggaagcacacaagcattcactcaattgcacaaatcttctgacccatcctaaacttattaggatttttctcattccagttacagaaatctcatttgaaagtccataacattattaagtagcanaaaatgatgatatccatccataagattcattttccccactggcccttagtggtcctttaaatactaaacatttat

SEQ ID NO: 87289 - DNA, 745 bp, Homo Sapiens
  misc_feature (497)..(497): n is a, c, g, or t
caatgcatttttatttatgtcaagtttgtttcaattcccaagaaaaataaataaaaattaataatatcttgtaaattatctattttctccttcaatatcttaaggtacacaattatcaaagctgatattgaacacaaacaaattgatacaattcagtaatccgataatattcatagtcaaataagttactttaaattgcatgcaatacaactttatgttccatagcatctttaataaaaaccgtttaccaaaatggctcttcaaacttaaaaagtgcaattacagagtgcaaaataaaaagaaaatacattatattacatttaacatcatcaaatttgaataacagatatttaaatgaaattactctttttaaaaacattaaaatatacaccagaaatactgtttgtacaagtcattactcccccttctcccatatgaacaagaattttttaacggtcagaatatattgggcatcaaattaaaaacttttttttcanaagtctacagaatggatattggagcaaaaattacaagtgggtcagatacaggtttttaaaaactgcattactgaatttaacaaagtcagacactagaatcatatatttgctgcataaaagttgatttgatacctggtggtgattgaatttagtctcaaagactcataaataaaaatccggacgcgtggtcgacgatatcccgggattccggaccgtaccgcctgctttttgtaccactgtcatagtta

SEQ ID NO: 87290 - DNA, 519 bp, Homo Sapiens
gacacgatgtatggtgatctatgaaacctccagacacaagaaaacttctagcaaattcaggggaagtttgtctacactcaggctgcagtattttcagcaaacttgattggacaaacgggcctgtgccttatcttttggtggagtgaaaaaatttgagccagtgaagccaaatcgtaacttacagcaagcagcatgcagcatacctggctctttgctgattgcaaataggcatttaaaatgtgaatttggaatcagatgtctccattacttccagttaaagtggcatcataggcgtttcctaagttttaagtcttggataaaaactccaccagtgtctaccatctccaccatgaactctgttaaggaagcttcattttcgtatattcccgctcttttctcttcatttccctgtcttctgcataatcatgccttcttgctaagtaattcaagcataagatcttggaataataaaatcacaatcttaggagaaagaataaaattgttattttcccagtcaaa

SEQ ID NO: 87291 - DNA, 930 bp, Homo Sapiens
  misc_feature (583)..(634): n is a, c, g, or t
agaactgaagtcacttgttaatatgtaaatggtggcctctcagtctatccccaaataaaaatagatcttataaatgttaccaaacaaacatttaaaataatcataaaatagtttacatattcattatttggctcagagttctgatggtgaagcaaagtgcagctctttccctccctcgcattctaactggaacatggtccttatcagagcgtcgacaccgcaggagcactgaggctgacataaaacctgtctgacacattttctgataaggcaggaatgtacttttcagatctcttgaacatggcctttctcatctgtcaccactgtatttcttcactttgctggcctggggaaaaatactatattctaggacttttttcttacaggttcatatctcgttggctgttggttcaatgtcttcctcacccaatgagaaggccaaaacactgatgaaaggccttgctcactcagtgctctcagaaggcagaactcatcagctgacttgccagtcaccctcgccacagacactggcttaaaaggtacagaacaagatttcaaaactgtttgtaaggcttattggcgnnnnnnnnnnnnnnnnnnnnnnnnnnnnnnnnnnnnnnnnnnnnnnnnnnnngaatatatatctgttgcagggcatcagctcccaatttctcattggaggaggtaacttcatctcagcccccactaagcccagaaccagccttggttgtgacgcctacccagaggtactatcagcccttagagaaatttctgcaatgactgagcttctgggcagaattcagccaggcttgaacctgagaagagatgccctgtgaagtccttttttgggcagcaccaaaaatctgccagcaggtatattagttctcctttctctcgccagctggaaaggaaagaaccattgaaagttat

SEQ ID NO: 87292 - DNA, 1411 bp, Homo Sapiens
cggcaagtactacacggtttaaggtagcgaggcctgggtggcgaattcggcacgaggggtaggagtagcgttggtaagggcgatgagcctccggagcccgctccccacatctgcctgcggctggggagagtcaggccgaagggccgggcgggccgggctcctgcggtcctcggaccggactgagcgcgcgcgctgttctcctctccgccgcgctaggctggtttcctcggtgcacgccgtgctggccaccggctcggggatcgtcatcattcgctcctgcgacgacgtgatcaccggcaggcactggcttgcccgggaatatgtgtggtttctgattccatacatgatctatgactcgtacgccatgtacctctgtgaatggtgccgaaccagagaccagaaccgtgcgccctccctcactcttcgaaacttcctaagtcgaaaccgcctcatgatcacacatcatgcggtcattctctttgtccttgtgccagtcgcacagaggctccggggagaccttggggacttctttgtcggctgcatcttcacggcagaactgagcactccgtttgtgtcgctgggcagggttctgattcagctaaagcagcagcacacccttctgtacaaggtgaatggaatcctcacgctggccaccttcctttcctgccggatccttctcttccccttcatgtactggtcctatggccgccagcagggactaagcctgctccaagtacccttcagcatcccattctactgcaacgtggccaatgccttcctcgtagctcctcagatctactggttctgtctgctgtgcaggaaggcagtccggctctttgacactccccaagccaaaaaggatggctaaatgctcctgggagtcaggcgcagcctcacaccagctgcctcctccactcagcattccatggaccaaattgtgccctgggtagcctcagactttgggtattgataagccgatggatttgagtttttctaaagaatattcatattacctccttcttctaacttgccctattggcaaaagcacttatgtagtaacaactatagggtcctgtcagacctccacggacagcaaacgtggtttaaagtgcaagcccaaggatccttcttaaggtctgaatcacaagagctctgggagcgtgcaagcatgggggtggggatcggtggaccaggtggtaaagtgatctgaacatactgcctgtccctggaatcagacggataccagcttcaaacactcaggacagtaccgtggcacgggccggaaagccaaggatacacgagacctggacagaaaggcgacggtgacatgaccgagacaaccatgtgggaagaagacaggaaaggcgaaaaatacacaggaatagccaacacacacaggcaagaggcccaa

SEQ ID NO: 87293 - DNA, 810 bp, Homo Sapiens
  misc_feature (606)..(615): n is a, c, g, or t
acagatgacatttataatttgagaggaagggatattgttgctgaccaaatggctgaatgggtagcagaaagaacacatgtcagcgtcagaatcagacagcctacaaataaattatcatggtctcctcaagccagggatacttctggctctcattggtggacttgggtatttcttgaaatggaataggaaatctatttcttgcagaattttgtgcgaagttttaactctgtgctttgtgattgtgatgacgtctggtcaaatgtggacttatataagaggagaaccatatgtccaaagggaccctcacacaggacataaacattatatcagtaaatttagtcaggctcagtttgcagcagaaacattcattatttccctgtttaatatgtgtgttagcctgggaatggtgctgttagacaaggctgccacctctacgatgaacatcagaaagagaaagatgatgtgtctggctggtatgtgtcttgttgccatattcttcagtcggctgctttccctctttagatttaaagtacctgactatccatacagctttgtctgggattaaaaaggatcctacagacatagacaatgaagcaagaaatttgnnnnnnnnnntgtgaagcagaaaaatgcaaactcatagctttttaaagtaattgagatttcaccaaaagagaccataagtgctttaagtgctttcaaaatctgtcaagtattatggtatgtatcttctctgttcttaatttttctccccgagtgttatagattacctcaagtccaattattaaaatctttagagagtacaacttt

SEQ ID NO: 87294 - DNA, 617 bp, Homo Sapiens
  misc_feature (46)..(75): n is a, c, g, or t
  misc_feature (346)..(399): n is a, c, g, or t
caaactaataatttggggaaataaaaactattgtttaaaaaagaannnnnnnnnnnnnnnnnnnnnnnnnnnnnngtaaagttaaaattccataccttgtatgtcaggtttgctaagtgtaatgtagttttttttaaggctcaaataccatacctcagaaaatgaggtttactatggaaatactgaaacagtctttgcagctgtgtgacaagtcactctactacatactgatttggagacctccgctaaatagttttatcactgcagactaaaatgtgggacttgtatcttctttgtttttaatgcacacacatacatgttctgtgcatgtatgtggttactgtgnnnnnnnnnnnnnnnnnnnnnnnnnnnnnnnnnnnnnnnnnnnnnnnnnnnnnnacaactaaagaagctgcagaaactttgtaatactttgtgaaaaggattatattataaaggtttgtactgtctgagtgcacagctactggaataaatttagggaatctcaggaacaagcatataatttgtccaagatttatttcttctcagaagtgtaagtgcagtttttaattctgtatattatttaatattttaccaataaaataaacttctgacat

SEQ ID NO: 87295 - DNA, 591 bp, Homo Sapiens
gatcacacagctagtgcagttaccccctctcagtaattatgtttggcaaatatgaaatacaaggatctggcaaggttaggaagaggttaagaatatcagtgacagtactctgaggcatctgggcatgtcagatgaagatttattattcagaaaagttaagtcagctgttgcagggatcagttgttttattcctggaaaatgtttttcattttgctgcaaatctatatctgacctgctgaggaaatcgtttggtgaaatgaatccagaaagcagagaaaatgcttcattactttaaatagcagcattaagcccattatagcctctgaattgtcccttccttgagtttgctaatgcttccaacttagtcatttgaagcccaagagtctaattttatatgccctgccaatgtcctcatctattgcagaatgtataattatctatttgttttggactatatgttacaaaaatttaaaacataagatcctctctctatatttcattattggtgaacccacattgtgctgtgttttgtgatattttatcattttctagattcttatgtggatctaataaagaccacttgaacccaaa

SEQ ID NO: 87296 - DNA, 773 bp, Homo Sapiens
ggggcagccgcggtgggaggaggcaccggccgcgcggcgggaggaggtgccggccgagcaccgcagacagcgccgggaagatgagcacggaaggtggtggccgtcgctgccaggcacaagtgtcccgccgcatctccttcagcgcgagccaccgattgtacagtaaatttctaagtgatgaagaaaacttgaaactgtttgggaaatgcaacaatccaaatggccatgggcacaattataaagttgtggtgacagtacatggagagattgaccctgctacgggaatggttatgaatctggctgatctcaaaaaatatatggaggaggcgattatgcagccccttgatcataagaatctggatatggatgtgccatactttgcagatgtggtgagcacgactgaaaatgtagctgtttatatctgggacaacctccagaaagttcttcctgtaggagttctttataaagtaaaagtatacgaaactgacaataatattgtggtttataaaggagaatagctattggggttagcattgcacaaagcccagtttctttctgtgtttgaaaaagattttgatccccttggaatattaagaggtcaacacgtgattgttgtacgtacacattgtgctctggagtgcctatttattgaaatcattgtaagacctgttataaatttaagtctatttaaaactaaacttgtaatatacatcctgaaaatcatttagagagtcttttatttataaattaaaaatcacttcattttcaaaaaa

SEQ ID NO: 87297 - DNA, 722 bp, Homo Sapiens
gggagacagcgccgggaagatgagcacggaaggtgggggccgtcgctgccaggcacaagggtcccgccgaatctccttaagcgcaagccaccgatggtacagtaaatttctaagggatgaaaaaaactggaaacggttgggaaaaggcaacaatccaaatggccatgggcacaattataaagttgtgggagacagcacatggagagattgaccctgctacgggaatggttatgaatctggctgatctcaaaaaatatatggaggaggcgattatgcagccccttgatcataagaatctggatatggatgtgccatactttgcagatgtggtgagcacgactgaaaatgtagctgtatatatctgggacaacctccagaaagttcttcctgtaagagctctttataaagtaaaagtatacgaaactgacaataatattggggtttataaaggagaatagctagtggggttagcattgcacaaagcccagtctctctctgggtttgaaaagattgtgacccccttggaatattaagaggtcacacgtgattgttgtacgtacacattgtgctctggagtgcctatttattgaatccttgtaagacctgttataaatttaagtctatttaaaactaaactttgtaatatacctcctcgaaatccattttgaaaggtcttttatttataaaattaaaaaatcccttcattttccaaaaagaaagag

SEQ ID NO: 87298 - DNA, 792 bp, Homo Sapiens
  misc_feature (703)..(703): n is a, c, g, or t
gggagacagcggcgggaagatgagcacggaaggtggtggccgtcgctgccaggcacaagtgtcccgccgcatctccttcagcgcgagccaccgattgtacagtaaatttctaagtgatgaagaaaacttgaaactgtttgggaaatgcaacaatccaaatggccatgggcacaattataaagattgaccctgctacgggaatggttatgaatctggctgatctcaaaaaatatatggaggaggcgattatgcagccccttgatcataagaatctggatatggatgtgccatactttgcagatgtggtgagcacgactgaaaatgtagctgtttatatctgggacaacctccagaaagttcttcctgtaggagttctttataaagtaaaagtatacgaaactgacaataatattgtggtttataaaggagaatagctattggggttagcattgcacaaagcccagtttctttctgtgtttgaaaaagattttgatccccttggaatattaagaggtcaacacgtgattgttgtacgtacacattgtgctctggagtgcctatttattgaaatcattgtaagacctgttataaatttaagtctatttaaaactaaacttgtaatatacatcctgaaaatcatttagagagtcttttatttataaattaaaaatcacttcattttcaccaaatgttttggtgtggngattatttgaaagcaaaagaaatctaattttggttttctccattacctcattttagtatttaatttttacttggtataatatacatggg

SEQ ID NO: 87299 - DNA, 552 bp, Homo Sapiens
tttaactctagtacttaagaacatgtggaagaaacaattcaagttacagaccaggaatccccagtgtggggaacaggtcagagaacaccaaacatgtcaaatattaacttatttaccaaatatgggattgaaggaaggcaggttacatttttgtaaatcctggagattttgtacagaagcagagacccttccactccctcctccctagactcgaccaggtgactttccagtttgaagtattatgacacaccaaaatgggatatcagaataaccaccgagaaaaatgagcttgtactctgcctggggcttgggagagaaagggctttgcactgctcttcaaattctcgtgttctggtccctacagaaagaatagctgcttgagttacccagcttttcctgtgagatcctagttctttgttccagtggcccagaaagcttaatgttcagcactacgcagctttctttgccccaagactatccccagatcaaggtagggctggtctccttggtactgtttcccttttaaaaaatactcaaacaatcccctcgtgc

SEQ ID NO: 87300 - DNA, 522 bp, Homo Sapiens
taggagcaaaccaagaaaagatcacctacttcatcatctctggtcaaaaacaaaccaaaaaacttaacagctatcacttaagtttgcttcctagcaattatttagcttccagtctagattacaggatatataaaactttctttctttctttcttaactatgacactggcaccaatgagagtcctgtgactgactttcacatttccaccattactcaattactggtaccataccacctctaatcccctaaatcaaactgcaattcaacaataaagggcgtacagagatgactttgtcctgaaggaaaatgaatatccttgtaccctctatatagctaacttccaaatgtaagagaactatggggtaaccttttgtttctattcctatcaagatgagcctttaagagagggactttttttaagctcttgaccaagaagaatacacttgattcagagtttctgatgctcttaatcagaactatatgtattgtctcaatattaaataaagtcaaatgtttccatac

SEQ ID NO: 87301 - DNA, 544 bp, Homo Sapiens
cgagagagtatgaagtcgacggcgcgccgaattcggcacgagggtcaatttttcctttgttatcttaaaaggagccattgctaaggcagatctttttcatgttgatctttaaattttcccacaccataagagaggagcaaaggaaattaccagtttagactaagttacagtatgtgtttcataagtgattaaagctatatcattcccagttattagttaacacaaattcagccacattctgagtattgtttgttcacctttcagacttggtgatactggacatgtcagtgtaaataacactaaggttaggatcttctaagtgtataactgtctcctaagcccatcactgtggcacactgtagagtgagcttatagtttaattgagatatttatcttgtggaaatattaaaaagcctatgcttgtgtaagtgaaaaaaaatcacattcatttgtttaaaaatgtaaagctattttgtagaggctcagtacttttccaatgcactgttgtatgaatgcattaaaaattgtaaagtaccctgcttgg

SEQ ID NO: 87302 - DNA, 410 bp, Homo Sapiens
tgttcccaccctcctacccaagggacagatggcaatgtctggagatatctttgttgtcatggctgaggagggggtctactggaatctagtgggtagaggccagggctgcagctgaacatcctaagcacacaggacagcccccaacaacaatgaattatcaatcccaaaatgttaatagttccaaggttgatcctctggtttaaaggaacaaattcttattaacagagaacaacacaaaaaccttttaaggcctgtctaggtaatacagccctaatcttagagttagggaacatagaaaagttaaactccttggtagactaaaatcaaatttgctgtgaaaaactaaaatactggactgattccagagttttaccatcacttacaagaatagaaaaaagttggcggccgca

SEQ ID NO: 87303 - DNA, 829 bp, Homo Sapiens
  misc_feature (54)..(227): n is a, c, g, or t
ctgatgttggtataaaaagtacaactaagggagaatttgttcccaccctcctannnnnnnnnnnnnnnnnnnnnnnnnnnnnnnnnnnnnnnnnnnnnnnnnnnnnnnnnnnnnnnnnnnnnnnnnnnnnnnnnnnnnnnnnnnnnnnnnnnnnnnnnnnnnnnnnnnnnnnnnnnnnnnnnnnnnnnnnnnnnnnnnnnnnnnnnnnnnnnnnnnnnnnnnnnnnntcctctggtttaaaggaacaaattcttattaacagagaacaacacaaaaaccttttaaggcctgtctaggtaatacagccctaatcttagagttagggaacatagaaaagttaaactccttggtagactaaaatcaaattcgctgtgaaaaactaaaatactggactgattccagagttttaccatcacttacaagaatagaagaaatttggccaggcacggtggctcatgccttatactaccatatgtggaatgaatccagtagccataccaagttattgaccagttatcttaagcagacattcttctgatcacatccaaaattgatgtctacatcagctaactttcctacaagattatcaaattttacacagtatttttctgtatttaatgactgccatggtctgcaaaattatgtgattagacaatgaatgacgcttaaagaatgatgacctattttctaaagtacactcaaaatattaaactttagagacaaagcaaaatctatcataaagttggcttctgttgatagaaacagagaggtaggttaataatcactgtcctaagataagcaagaatgcttagaaataaaagttgagacc

SEQ ID NO: 87304 - DNA, 1278 bp, Homo Sapiens
  misc_feature (417)..(425): n is a, c, g, or t
catagtaaatcaaaagaaattaatcagaccagggacagacttgccgaattgaacaaggaactagcttcatctgagcagaataaaaatcatataaataatgaactaaaaagaaaggaagagcagttgtccagttacgaagacaagctgtttgatgtttgtggtagccggattctgaaagtgatttaagccagccttaaagaggaaattgaaaaatcatcaaaacagcgagccatgctggctggagccacagcagtttactcccagttcattactcagataacagacgaaaaccagtcatgttgccccgttggtcagagagtttttcagacagaggctgagttacaagaagtcatcagtgatttgcagtataaactgcgacttgctccagataaactcaagtcaacagaatcagagctnnnnnnnnnggaaaagcggcgtgatgaaatgctgggacttgtgcccatgaggcaaagcataattgatttgaaggagaaggaaataccagaattaagaaacaaactggcagaatgtcaatagagacatacagcgcctaaagaacgacatagaagaacaagaaacactcttgggtacaataatgcctgaagaagaaagtgccaaagtatgcctgacagatgttacaattatggagaggttccagatggaacttaaagatgttgaaacgaaaaattgcacaacaagcagctaagctacaaggaatagacttagatcgaactgtccaacaagtcaaccaggagaaacaagagaaacagcacaagttaggacacagtttctagtaagatggaactcgaatcgtaagcttatacaggacccagcagggaacagattcacattctaaacagtaccaccaaattgagctaaaaatctggaggaaaccttccagattatgccacttaattttggcaacgtcggtcagcaactgggaggacgcagacgtggggaattatcccactggagggttccagctccttggtacccgagaggaataaaggggttggctaacaggaagccaggtttagccccctggggaaaaccacccttgggaaaaggtttcccggcaaaaacaagacaacagacagaacaaaaaaacacatgtgttgtgcgcggctcggcgccctcagaaaaagttttttcaaacacaccaactgttgtgtgcgccggcgcgcccacatatagtatcatagtgcaccgcgtgcgcaagagctggttccccagcagacaacctgcgtacagacaacatcgatgcgtggtgactcaccc

SEQ ID NO: 87305 - DNA, 1000 bp, Homo Sapiens
aataattaaatataaataaaaataaagcaaaatctgttgggaaacgagaaaaaggagaggaatttttcaggaataatcataaaaagaaatgatcatcagactgaaagtccagagcctgagaaatgaaaacatatttttaagcattggtgttgaccatgcagacaaacttttgttaattcagagcgatacaaaaggcactttgaatctataaaacttgaaaaagttaaaaattgtatgtcggataaagctttaagtcatctgtcactattaacctcagtgcagcaattctgactcctgtgcctggattccttttatgataattttgccacctacaggacagattaggtgctggtcgcctgaattattttgtgttctgaattattttgagctctaaaatggtaaagtacaaatactcattgttttactgtgcctttggccttttataaaaaggtatttataattcgttgataaaaaccaatatttgaagctgttgattaccaacaaaaaagtttcactctctttatagtgcttcaggatacaactttttcagggccttattagagaaaaactgattcacatgttattcttctaaagctaaattattaaaatgtaggttgaaagattggattgattgtgaatctacactaaagatatggttccaggcagacctccttagagacctccaggcagacctccttactgtcttcagtgatgtttaatttcattactgttactgggtgccaagtgtctttcatttggaagtgaacttactccagttattgaatgtttatcatatcataatttgcatttttccaacattgaaggtattttaaaaagtcactaagagattcattcttttattattcaactacaaaaaaatagtgtaatgatcagaatttaaaatgtgtgattctttttcttctgtaagtatgtattgctatgataaataaaaaatggcaggaccattgtttttattaaaatatctactgtgtctattctt

SEQ ID NO: 87306 - DNA, 444 bp, Homo Sapiens
  misc_feature (66)..(240): n is a, c, g, or t
aggctggctggaatcggccgaggcgaatctcagcttcatgcaagctccgcgcctgggttcacgccnnnnnnnnnnnnnnnnnnnnnnnnnnnnnnnnnnnnnnnnnnnnnnnnnnnnnnnnnnnnnnnnnnnnnnnnnnnnnnnnnnnnnnnnnnnnnnnnnnnnnnnnnnnnnnnnnnnnnnnnnnnnnnnnnnnnnnnnnnnnnnnnnnnnnnnnnnnnnnnnnnnnnnnnnnnnnnntgagccactgcgcccggccggaaaatttttttaatgtagtgaaatatgtctaccatttcctacccaatttttttgaatccccaagcaaaatcttactgagaaagcatctattactttttattaaactgttccatgttaggtagagaggagaagatgcatgtatgtatttggaataaattctgcttctgaaaacaaaacacaaac

SEQ ID NO: 87307 - DNA, 640 bp, Homo Sapiens
aagtcctctcctaactgcctgtcctctggttaggcccctccctctccactagtggtgaatgcatgtgtctgtctgatcagcatcactgcacacggaggtctagtgagcctcttgctaagtgtcacacacactcttcccaaagacgtgatgagttaaagttgtattctgaaatcatgaagccagagcctgtgccagaccttctgctacctctcatagaattgctctgtaattctaaatttaaaattagaagtagagagagataagccatcgcccctttgcctctgagaattggctgctgtttctaatataattattttctaagatagccagatagttagaaaaagattttcattgatgacatatctttaaactttcttgcatcagtattctaaattgagcaaactgaaagattttcatcaggaaaggagcactgtgggaagagcccagtattcacattttttccccatttttcagaagcgacatttcatatataggtgccaaaagtgaatcggggtgcggagagtgggaaccttttgaatttatgattgtcacagagatggtagaaattatgatctgactggaaaacaatcctgtatcccctcccaaagaatcatgggcttttttttgaattaaaaagcag

SEQ ID NO: 87308 - DNA, 801 bp, Homo Sapiens
gagttactggtatgccttggaaaagattctaagtattataattacaccctgtctatcaatgggaaggcacggaagcatggtgaaaactatagtgtggactacctgacagatgttttggctaatgtctccttggactttctggactacaagtccaactttgagcccttcttcatgatgatcgccactccagcgcctcattcgccttggacagctgcacctcagtaccagaaggctttccagaatgtctttgcaccaagaaacaagaacttcaacatccatggaacgaacaagcactggttaattaggcaagccaagactccaatgactaattcttcaatacagtttttagataatgcatttaggaaaaggtggcaaactctcctctcagttgatgaccttgtggagaaactggtcaagaggctggagttcactggggagctcaacaacacttacatcttctatacctcagaccaatggctatcacacaggacagttttccttgccaatagacaagagacagctgtatgagtttgatatcaaagttccacctgttggttccgaggacctgggatcaaaccaaatcagacaagcaagatgctggttgccaacattgacttgggtcctactattttgacattctggctcgaccttatataaacacagatgaatggaatgtccttattcccattttgagaggtccagtaacttgacctgcgatcagattcctgtgataccaagagaagccgtacttactgacccacatgcctcctgagctgacgcttatggatcttagatcacttc

SEQ ID NO: 87309 - DNA, 629 bp, Homo Sapiens
  misc_feature (185)..(194): n is a, c, g, or t
tgtgcactatgaaccagtcgtgaaaaaagcaggctggtacggtccggaattcccgggatatcgtcgacccacgcgtcgatcaaatggttgcttatttgtctcacacagccatatagtttttcctggagggtttgtttgttgttgtgaaaagactttgcttacagctagatgaaactttctatagnnnnnnnnnntgttgaaaggtccagttctcagtaccatgtgagttaatgatactacaactaagttctttttaaaaagtgattaatgtattttataaattaccttttcacatatgcaaaatctgtttctactacaatgttatttttactaatgccttattgttgcactctttttgaaatatcctgcagtgaatatatgaatcaatttgggcttaaaactgaaagccagttggctgaaaggtttgaaatacgtaccccagtaaaaccattcaatcaataattggtaaataatattttaaaattgtttttaatctgtatagatgacattttgtagctttgtacatgttgttaattaagggcatataattttacactcaaagtataattgctgaactcaggggtgggtagacttcaaaaatatgtctgctatagaaataacttggacac

SEQ ID NO: 87310 - DNA, 630 bp, Homo Sapiens
ctgatatatattgatttatttgccaactgtttcactgttcacatccctcaggaagttaactaaatgatcagtatattgaaaagagattatttcttacatttcttttgaatttcacagcatatcgcaaaataaacaatacttcttgtttggtagctgaattctctattgacataatgccattttaattcagttctgagcacgtagagcattcctctctttaaaatctgaaatccatttcagtacataaatccatggaatgtcatcccatcaaaaaagtaacaactctaggtgagcggcttagtggtggtagaagcccacagctgaaacgctggaaacactgatgcaattcatttgggaatttatttttttctaaagcggaacaaaacctaattatgaataagaaacatttaaatggcaactcttaacctatagtgcaaacaccagattccacaaaactgaattcctttgtcagtaatccaatatttagcagtagctgctgcttttgtggttgttggttagttaaaattaagtaatgattccagtttagaagataaagtttcagtgtgaattttagtagaagtcataaaaatacctgagacatattagaaaataagattttccctcctattt

SEQ ID NO: 87311 - DNA, 953 bp, Homo Sapiens
ggtacgtgtcaataccctctcaatgaaacttttggcatatgcactggattactggtcaaaaggtcaactaaaagcattgtttctagaacatgagggttactttggagcagttggtgcacttcttgggctgccaaatttcagctaaagcatcaggtctctctctctgctaataaatgtcatccaagaggaactaaaaccagaggcattattactgcattgtttgtcactgggaaccaaaggataaaagagtagcataagctgctgaatgttgccatattaaaggagagaacttggtaacgtgaagtatttctcattgaaatgctttcccttttgtatatagccagtgttaaatccttaaatgcaatacagcctctgattattgagcttcctcttaaaaagatttttttattttatgtagccaacattgcagtactgtatgctcaaacacaaatcttaaagtatcggaactgtttagcttatgaaaataatcgactctgaatatttgttacaagtctgttttatgtgttttgattactagtgagcagaaaataacataccctgtattcaaaattactgaaatggcaatcaaagatgatcatttttatgtgattttagaaatgttaaggcaatactactaattattgtaggtttttttaacgtatcacccaaagcatgtatgtgatctttccccattagtatcttttttctcaaatgccataattaactgaaatactattattaaattttcatgagaattctaaaatgaatcctgggaaatgcacgtttggtgatgttgcactttctgtattttacaggaattagtcaatacatgttgaaatgtttaacattttaagattggaggcttaattactgggagtctgtctaatgaagtcctgggactattgtaatggaatatgatattcactgtgctctttttgtttgttttctttcgt

SEQ ID NO: 87312 - DNA, 626 bp, Homo Sapiens
  misc_feature (436)..(446): n is a, c, g, or t
  misc_feature (465)..(473): n is a, c, g, or t
agcagaagtattaattaaaggaaagcggcagacagagggcactttacacagtttgaggagacaagtagatgctttaggggaatggtcaccagcacctctgcagattcagcgtcatcacccagtctgtctcagctggagtcttccctcacagaggactctcaacttggacaaaatcaggaaaagaatgcctcagccagatgaggaatactgtcttgtgtaaatatattcaaggaaaacacctccactacctcactgacttcataattggaatgtcacatggtttttttaatcaagatgcagtgaactgagattctgaaactccactgtagtttactttgcctgtaccattaatgccaatgtttttataaatcacttgtacatagtacatatgggaatagttgcatatgggaatttaaaccaacatgtggctgagccnnnnnnnnnnnaatcttcgtaacatgtttnnnnnnnnncagtgattttaactgcatatttgaacctacaaactggtaaatcttattaacaaaaagaatgtacttaaggccctctttatttatagtgtcgagttatttttgaattttgcttaaaatctatttttcatatgaaaataaaagataacaatcaaa

SEQ ID NO: 87313 - DNA, 987 bp, Homo Sapiens
tgacgaacctctatatagcttctgtataggcctaacctttattcatatggcatctcagaagtatgtgtcacggagacatgctcttattgcacagggcttttcctttcttaatcgatacctcagtttacgtgggccctgccaggaatcattctacaatttgggccgtggccttcatcagttggggctgattcatcttgcaatccactattatcagaaggccctggagctccctccacttgtggtagagggtatagaacttgaccagttagacttacgaaaagatattgcccacaacttgtctctcatcaatcagagcagtgggaataccggaatggctcaaacgcttttgtatacctattgttctatataaagcaccgcaactgagaacagagcaatggcagctgctgtgtgaggaccagtgtcttctgtctcagggcttattatttgtaactccaaaatagaaatgacaatttcagaattacctaacaaacagtgtatttatttttaatatgtgataatgatcttgtggtatatatgcaaaattattcctacaaaaatttgtatattggtctgtcattttcctttcacattctatagtgaattgttcccaatgttgaaatggacgtgtaagcctttgagctagcttggagtcgaatacactatttttcactcacaccatttattcatctttgtatttaatactatagctctgtcaatatcacatgaggcagtttttcaaatacgtataaacagaggttgcttattattaaaggaaagacaaagtgggactctttatgatgtcatgaccatgataactaagcacctaagaaaattatttaaaatagttatgtggtaggcagaaagacaaataatttagttttttacttttcaccagcatgtatcttagctacctaaactgaaacatgggaggctgggcttaattcaaaatatattgctccaaggcaaataaaaaaatgctttatctat

SEQ ID NO: 87314 - DNA, 646 bp, Homo Sapiens
  misc_feature (12)..(12): n is a, c, g, or t
  misc_feature (45)..(45): n is a, c, g, or t
  misc_feature (50)..(50): n is a, c, g, or t
agctgttgcatnctggagtgcccccaccccgcccactgctgttcnggggngaaactgggctggttcccattaacagcagcagccggggagcctgagtggggctcctggggaaaagcagtagaagcaggtggattcaagggcttccccccatcctcaccaccagggccaggaaagccagggtccggaccaggaaagggacttgtgttaggcggcaggctggggagcccctgaccaggtctctggagaggagaagggccaaaaggaaaaatgaacacactacaaagagaaataggtcagtctaccaacataatgggcattttcaacatacccctctcagtaattaatagatcttgcagagactaaattatgaagattattaaggacatagaagatttaaatagtacagctaatcaatttgatctgacagatacataacacacacatacataaaacacattgtacccttcagtaggaaaataagtttttgcaaaccaagtctaacagtgtattcaaaatgtaacaaatgatgaccaaaatggattggtctcaggaatacaagattggctttttaatgtaattaagaaatgctgtttataataggacaagaaaaagtacctaagaataaattttaaaatgagaaaatgat

SEQ ID NO: 87315 - DNA, 552 bp, Homo Sapiens
  misc_feature (57)..(83): n is a, c, g, or t
catgatcctgtcactgcactgggtgacaccagcctgggtgacagagaccctgtctcnnnnnnnnnnnnnnnnnnnnnnnnnnnctattggatattacctgagttgcagaaacctgctgtggattaaaatgatgcaataataaccacaaatagatttaagtcctatcacatggaaatgggactaataccttggctataccactatttctcgtcctggggagattctgccctcagaagacaatgggcaatgtctagagatagttttcgttgacacgatgaggggtgagaaggaataggtaggggctgctactgagatctagtgggtaaaggccgaggatgtcgctaaacattttataatgaatgggacagaccccacaacaaagaattaaccaacccctaatgttaatagtgccaaagttgagaaaccctgggctagaacagccttctctcttacccattattaaggagaaatcccagagttcttatttgctgtgctgcctgtgagattgcccccatttattttacaatatgaataaacttagatttaggacag

SEQ ID NO: 87316 - DNA, 211 bp, Homo Sapiens
aaagatcacttgcacagcatgctaaatataggaataattgaatgtatatttcaatattgctaagagagtaaatttctaatgttctcataaaaaagttaaatatttgagatcatatgttaattagtgtaatcattccaccttatattcaaaaatcataaaaccgtattgtaccctataaaaatatacaataatttgtcaatatataatcaaa

SEQ ID NO: 87317 - DNA, 547 bp, Homo Sapiens
gcacgagggctcctgtgtctttataaaatctatttaactggagtagtccaccctccctcaggctcttacaggaatatgttggaggctgtaggaaggtgggaaaccgagaggaaaaggactgggccgctggagacttcactcattccctagcaagaaacaaaagcagtaaaaggtggcccgaggacaacctgaagctcactccttcagcacttttggctggaggtcacttgttggagccccactcagagctcagcacaccaccccaccagcagcctcctcctcccagctgaggctgcatttcatcccttcccccagcctgctttccctgagataggggagtgtttcccagggcccatgtgacttccactggcaagtgacgattaccaatggtttactagtcagtgaaactaccaaaggcttttgtgctgtagtaatccttttcctgtttaaaactctggggattttctaatgttgccaatagtttttcaagtcagcaattactgtgtggattatgtaatggctcggtattaaaaatagaaaagactgg

SEQ ID NO: 87318 - DNA, 654 bp, Homo Sapiens
  misc_feature (70)..(70): n is a, c, g, or t
cgtttgtgtcttccgcaggctaagatggtaaagtgtgtgtgattacttgtgccttcctttcttcagccanaatcattaacgtgaacgtaggagtccaggtgggtcttagccttgaaacaccaggtgtctagccagcagcaaggagtggagcaggaagctcggacaggcggctgactttggtcatgagggtgaagacagagggtcttggtttctctctgacgactggaggttgagcctggagcggctctttccagcgctgcagttgaaactcggagaaagactgcctgctgcccgtggggtcgcagccctgaggctgtgcgtcccctgtggaatggcttgctcagcctcccggcctcctgagcacatagcactcatcgtccgtcatctttcggggactgtatacaccaggggttctggggcctttcctcagcagcgttcgcggccacggaccccacatgtcctctgctgacccctgtgtgtcctctgtggccaccccatggcgctgaatcctgccgcctcctgcaagccgactttggacaaaagctgtgtccggtctcaccgtctgatttgtcttgttctctgttaatgtagtgtttcattcttctcacattcatacataaaagtgatgtcgtgccttctcatgagctttaaaaa

SEQ ID NO: 87319 - DNA, 991 bp, Homo Sapiens
gcaggtagcgaggctgggtgttaattcggcacgaggccggcccagccatggcggacgaggccccgcggaagggcagcttctcggcgctcgtgggccgcaccaacggcctcaccaagcccgcggccctggccgccgcgcccgccaagccggggggcgcgggcggctccaagaagctggtcatcaagaacttccgagacagacctcggctgcccgacaactacacgcaggacacgtggcggaagctgcacgaggcggtgcgggccgtgcagagcagcacctccatcaggtacaacctcgaggagctctaccaggctgtggaaaatctctgttctcacaaagtctccccaatgctctacaagcaactgcgtcaggcctgtgaagaccacgtccaggcacagatccttccgtttagagaagactcactagatagtgttttatttttaaagaagattaacacgtgctggcaggaccactgcagacaaatgatcatgatcagaagcatcttcctgttcttggaccgcacctatgtgctgcagaactccacgctgccctccatctgggatatgggattagaactgtttagaacccatattattagtgataaaatggttcagagtaaaaccattgatggaatcctactgctgatcgagcgcgagaggagcggcgaggccgtggaccggagcctgttgcggagcctcctgggcatgctgtctgacctgcaggtgtataaagattcatttgaactgaaatttttggaagagactaattgcttatatgctgccgaaggccaaaggttaatgcaggaaagagaggttccagaatatcttaaccatgtaagtaaacgcttagaggaagagggagacagagtaatcacttacttggaccacagcacacagtaagtaccgtttgttcgctgagcgttcgtatcttcaccatggctggaaggttctcctggctggttattgaaataaagggtgacaaatgtcaattc

SEQ ID NO: 87320 - DNA, 806 bp, Homo Sapiens
gggggcgtggcccgcaggcccttcggaccgcctgggagcgcggccacacgtgccagcaagtgagggcagcgacctgggaccgccgcgtctacttacaccgcgacgactccgcgatccacggacaccgcccggcccccacggcggccctgcaggggagaactcgggccgccttcccgagtcccggccgccgctgttcggctcgcgcggctgcccgccggggacccgaacggaaaaagggtggcgaggcgggaaaggaaaaggcctgagggtccaaggcaggaggggacacacggaacacgccgagggccaaccacgccgccgcgcgctccccggctaggacccacctgctgcagacagacctcggctgcccgacaactacacgcaggacacgtggcggaagctgcacgaggcggtgcgggccgtgcagagcagcacctccatcaggtacaacctcgaggagctctaccaggctgtggaaaatctctgttctcacaaagtctccccaatgctctacaagcaactgcgtcaggcctgtgaagaccacgtccaggcacagatccttccgtttagagaagactcactagatagtgttttatttttaaagaagattaacacgtgctggcaggaccactgcagacaaatgatcatgatcagaagcatcttcctggtcttggaccgcacctatgtgctgcagaactccacgctgccctccatctgggatatgggattaaaactgtttaaaacccatattattagtgataaaatggttcagagtacaaccattgatggaatcctactgctgatcg

SEQ ID NO: 87321 - DNA, 615 bp, Homo Sapiens
  misc_feature (541)..(552): n is a, c, g, or t
tgcagacaaatgatcatgatcagaagcatcttcctgttcttggaccgcacctatgtgctgcagaactccacgctgccctccatctgccaaaatcattaacgtgaacgtaggagtccaggtgggtcttagccttgaaacaccaggtgtctagccagcagcaaggagtggagcaggaagctcggacaggcggctgactttggtcatgagggtgaagacagagggtcttggtttctctctgacgactggaggttgagcctggagcggctctttccagcgctgcagttgaaactcggagaaagactgcctgctgcccgtggggtcgcagccctgaggctgtgcgtcccctgtggaatggcttgctcagcctcccggcctcctgagcacatagcactcatcgtccgtcatctttcggggactgtatacaccaggggttctggggcctttcctcagcagcgttcgcggccacggaccccacatgtcctctgctgacccctgtgtgtcctctgtggccaccccatggcgctgaatcctgccgccaacnnnnnnnnnnnnaatgtagtgtttcattcttctcacattcatacataaaagtgatgtcgtgccttctcaaaaaaa

SEQ ID NO: 87322 - DNA, 1013 bp, Homo Sapiens
  misc_feature (717)..(731): n is a, c, g, or t
atggagttggaataaagagctgtttgcctatccctgttaatgatggttgtgtttaagaatcttcctcgtcacgtttgtgttcagatctcttatgttataattagatcagagactggtagcatcgtttctctctctgaaagcaccagtgcccagagtctgctcggtaataaaattatggatccagattgttctgagagacgaagatacttgctgctgatagaggtgaaaacgagattgatccgtctggggttttacggtgtgcactgggtgctgcacagacttgtcaaggtttgctacgtcctctgggcatctgcaaaaggccctgctctctggagtgttgtatatagtgtagcaaaagagtatttatacatcccaccaatcaaaacacagctttattacctcatgcgaactcatacaaaccaatagaatgtcaacatgttctgtagcttagagtgctcacttactacctctgaacaatactcacgctgtagtttgtctctttcttatctttttgcatcttgtaattaactctttgtttcccttcataaaatgtaatgtacattgtaatcttttaaaagaaaaatcagggttgcacttgcaacttttaaaaaaccgagtgtggaaacattgggtcttaattcaacacaggatcggtaaaactgttgtaaatactgagaaacattttgaatgttcttcatcttattactaatccatgcnnnnnnnnnnnnnnngcagcgactaattgtgatgcattcagatttcagtattcagtactgtatatttcaccctgtgtaatggggccccctctcctttctctctttttgtattgtatgcgattctgaaactgattgagtcatgaaaataatttgtggcggtgattctaatgtattaaaaacgtttcgtgttcctttctaactggattacaccctggattgaaaaagtcttcctcgtggtagttatatgtagtttcaaacatgaataaactttttgctttcatgattaagagaaaaaaa

SEQ ID NO: 87323 - DNA, 683 bp, Homo Sapiens
  misc_feature (281)..(322): n is a, c, g, or t
ctcgcgaacgtgttatccagccaggttgtagtaataagcctcaaatccacagggtacacgacaatttcaaggtctttattttttctatcatacttaattcatgaataacccccatagtgtaggttagttagcactatcaaagtgactggtaaggacgcaggaaaataaaaagaggattcaattggattggtactgcaaaaagaatccattctgttcagcacatgaatttctgttctgaccttaagtttagatatatcaaagaaacaaaaagcatagaggcnnnnnnnnnnnnnnnnnnnnnnnnnnnnnnnnnnnnnnnnnncccggaatctacttttcaaagtctcctagataagtctggtttgcagccagagttagggggccaaagttctgtgagtgttcaagtagcactagcccaagtcaaccgcttccaaaaaactgcaacatacacagggtttgacatcacatgggtagggcaacagagagaaatggcatcagatcaccacaaaatgttctccgactggtacccggagtagcactgaccctgaggcccaacagtggaactggcactatcttaacctgcagtcaccaaacatgcaaggagtgggctgcagcgccccatgaagcagggtgcatagctccccacttaatagtgtgtgaccctggaagtgctgtgcctccta

SEQ ID NO: 87324 - DNA, 549 bp, Homo Sapiens
gcatcattttaattatgagtctgacaaaacttctccagagaatcaagcaagacctggatgtgaagaaggtttgggtaaactgcatgtaaaggctacaaatcacaatctgattcctcccaaatataaaggcatatggaacataatgtattaaccaaagtatgttataaatcaaaaatggtcaaggttcagcatattctatatgaagatcacaaggtggtatcgttttagatttctatgaaggctttcatttgtacatccctttgaaaaaatataacagatttaaaatgttttgaatttaacttgtttagaaaaactaatgcttaaaacaatatttgaactactgtatttataatttattacctctaattgctttatttcagtgtatgagacattactgttttaatgtttgctttgaacataatttaagaaccagatttattttctatagtgataaacccttttttctcagaactccatctttgtactcttcagatgaatatatagacactgtggcatacattttttttcattaaaaacttatggcttcat

SEQ ID NO: 87325 - DNA, 858 bp, Homo Sapiens
cagtcgacggtaccggacatatgcccgggaattcggccattacggccgagatcttccgtcagagaatcccggctcctgctgcaataagaggctgttctggaagctctggggttcgggtctttgtccctgcagctatgcttccagagtgctctgtgcattttcacgatcagcaaacaatgaataaatctctgttctggaagctgggaagtccaggatcaaggcactgtcatctggtacctgatgagagacttcttcctgcatccttacatggtggaagacaaaagagtggcagagaatgaatatactcccagtccattcgagagggaagagccctcacctcatcacttccctgaggcctcaccttctaatactatcaccttggtgataagatttcaacataggaattagaggggaatacatacatccagactattgcagatgggattatgtaatactttgttcctgtttggcttatttcttagcacaatatctttctggtatgtgcatgtttctgcaaatggcaagattttcttcctttttaaggctgagtaataattcattgcatgtatagaccacattttctttatgcattcattattagtgagagttcttattacaaatggcgaagtggtttttaatatgatttaattttgttattaaaaacatttttagatggttagattcctttttagaataaatatacttcattagttaaggcagttttaaacttcaacagcagaattaagaagtacatagatttcctatataccctaatgcacatatatatgtatccttcggcccttttcaacacctcccccaaccatgggtagtacctttgcttaaaattgaggacctaca

SEQ ID NO: 87326 - DNA, 685 bp, Homo Sapiens
  misc_feature (81)..(81): n is a, c, g, or t
  misc_feature (148)..(148): n is a, c, g, or t
gcaccctgactgtccctctatatctaacctctcaggaatgcagggagaaggaagacactggctaaacaaggaaaattctgngacccaaccctatagccccaaatttccacagatgttttctgttctacacggagagacaaacagaganccaaaatccctgagctgacccccacagcagtcttagttcccttttcacacccagcatttttctctcccggcctgggtacctgcaggtaggagaggtgatactccagcaaagcctgggcattgctgatgttctctcgggtgccaacaaaaatgaagggaaccattccctagagaacagagagcagaaacgatggatcagaaaggaaaatgaaatggaaggattaacgccgcccagtctcctaggggagcctgcccagtgggatcattctgggctctaaatctactagtgttaaacaactttccgtactccaccctctcaaagaacaatcccagccctcagaggacaatcccatttacttctggaaaccaatctctatgcccacttgccccgtacccatacctccgccctggggttcttcttgtcattatcaccttccactcgaaccctcaccacaccagatttatccacaatctcctggatcactttcccgttctttccaatcactttgcctggaataggtaaatgaggaattcagcc

SEQ ID NO: 87327 - DNA, 1056 bp, Homo Sapiens
  misc_feature (872)..(989): n is a, c, g, or t
taccccaccgccccccacacttcctaggtagcgaggcctgggtggcgaattcggcacgaggaaaagttacagctacaagtggaaagcatgctatcagaaatcaaaatggaacaggctaaaacagaggatgaaaagtccaaattaactgtgctacagatgacacacaacaagcttcttcaagaacataataatgcattgaaaacaattgaggaactaacaagaaaagagtcagaaaaagtggacagggcagtgctgaaggaactgagtgaaaaactggaactggcagagaaggctctggcttccaaacagctgcaaatggatgaaatgaagcaaaccattgccaagcaggaagaggacctggaaaccatgaccatcctcagggctcagatggaagtttactgttctgattttcatgctgaaagagcagcgagagagaaaattcatgaggaaaaggagcaactggcattgcagctggcagttctgctgaaagagaatgatgctttcgaagacggaggcaggcagtccttgatggagatgcagagtcgtcatggggcgagaacaagtgactctgaccagcaggcttaccttgttcaaagaggagctgaggacagggactggcggcaacagcggaatattccgattcattcctgccccaagtgtggagaggttctgcctgacatagacacgttacagattcacgtgatggattgcatcatttaagtgttgatgtatcacctccccaaaactgttggtaaatgtcagattttttcctccaagagttgtgcttttgtgttatttgttttcactcaaatattttgcctcattattcttgttttaaaagaaagaaaacaggccgggcacagtggctcatnnnnnnnnnnnnnnnnnnnnnnnnnnnnnnnnnnnnnnnnnnnnnnnnnnnnnnnnnnnnnnnnnnnnnnnnnnnnnnnnnnnnnnnnnnnnnnnnnnnnnnnnnnnnnnnnnnnnnngagcatggtggcgcatgcctgtagtcgcagctactcgcgaggttgaggcgggagaattgcttgaacc

SEQ ID NO: 87328 - DNA, 703 bp, Homo Sapiens
  misc_feature (46)..(46): n is a, c, g, or t
  misc_feature (144)..(144): n is a, c, g, or t
tcagtgagcttgcagtaatcttaaggctaaaaaatatactgagttngacagtacagtaactcatgttgttgttcctggtgatgcagttcaaagtaccttgaagtgtatgcttgggattctcaatggatgctggattctaaaatntgaatgggtaaaagcatgtctacgaagaaaagtatgtgaacaggaagaaaagtatgaaattcctgaaggtccacgcagaagcaggctcaacagagaacagctgttgccaaagctgtttgatggatgctacttctatttgtggggaaccttcaaacaccatccaaaggacaaccttattaagctcgtcactgcaggtgggggccagatcctcagtagaaagcccaagccagacagtgacgtgactcagaccatcaatacagtcgcataccatgcgagacccgattctgatcagcgcttctgcacacagtatatcatctatgaagatttgtgtaattatcacccagagagggttcggcagggcaaagtctggaaggctccttcgagctggtttatagactgtgtgatgtcctttgagttgcttcctcttgacagctgaatattataccagatgaacatttcaaattgaatttgcacggtttgtgagagcccagtcattgtactgtttttaatgttcacatttttacaaataggtagagtcattcatatttgtcattgaatc

SEQ ID NO: 87329 - DNA, 564 bp, Homo Sapiens
  misc_feature (77)..(412): n is a, c, g, or t
caatacctgaaatcattagctttggtcttggtgggatcaaacccaaaaaataaaagctattaatatgtgattgaatnnnnnnnnnnnnnnnnnnnnnnnnnnnnnnnnnnnnnnnnnnnnnnnnnnnnnnnnnnnnnnnnnnnnnnnnnnnnnnnnnnnnnnnnnnnnnnnnnnnnnnnnnnnnnnnnnnnnnnnnnnnnnnnnnnnnnnnnnnnnnnnnnnnnnnnnnnnnnnnnnnnnnnnnnnnnnnnnnnnnnnnnnnnnnnnnnnnnnnnnnnnnnnnnnnnnnnnnnnnnnnnnnnnnnnnnnnnnnnnnnnnnnnnnnnnnnnnnnnnnnnnnnnnnnnnnnnnnnnnnnnnnnnnnnnnnnnnnnnnnnnnnnnnnnnnnnnnnnnnnnnnnnnnnnnnnnnnnacacttttcgtcatctcacccaaatttaggttaagagttctggatacctgaattaatattgccattggaatgccacttttacttttggagaaaaattagaaataacattttataaaattaaaaaactgtaggctaggcacactggtttacac

SEQ ID NO: 87330 - DNA, 923 bp, Homo Sapiens
gcacgaggtggaaaagaaaaagcaagagaacaaaatgagaagagaccagttgaacgaccagtacttggagctgttagaaaagcagaggctatactttaagactgtgaaagagttcaaggaggagggccgcaagaacgagatgctgctgtccaaggtgaaagcgaaggcctcctgaacatccccagccgtggctgtatgtcattgattttacttttaagcaccgtatatcacctacaagatcatgaaatggttctgaaagcgacagtagagagatgcagttgtgatgatttcaacaacctggatgttttctttctcctctttgcttccattcatctctgttggctgctgttgatggagtcagacagtaaacacgtggcttggataacacccatcatcctatgaagaatatagggagtacttgttctctgttgattcaacttttatgtctccagtaacattgcgcttatgaaggtacctgtatttgtatggactctgaataaagaagaattcatttgtttagcaagtattagttcagcaaccactgagaaataagcactgaggaagattcagagacgtgtaaaacacagttcctactgcacaagtacccagcaggtggcccagggaggcagatacagcacacttgaccgcagaactgggctatccaagatgtttttcagtaaacagaaggcatttagctgaaatgatcagcccatgtagtgttggtcacttgggcctttcacctgccatggtaccttttgttcccagctcctccaggtgccagccagcaggcttggtggtgacagcaactggaacgaaagttcagtgttgttttaatttttatacgttactcaagttgatttctcagaaaattgaaaacagaccttgtgctgaggacacgtcaataaaaattataccttcaaaaa

SEQ ID NO: 87331 - DNA, 323 bp, Homo Sapiens
ttttgaattgtaaaaaactttatgaactgagaggtcctaactccaaaaagaacattaaagacgaagtgtaagagcattacaaatgatcgccaatacacacaaaggcagagttgcagtgaaaatcaacagccagctgaactgtgggtgaaattccctttatataaacatggccttataatcagatgacctcagatgggtctctggtgtgtacaaagaaagcaaaaccaattttcccatgagtgcctctggacactcatgtaagagttacagatgttgactacatttaaacatttatcatgcttccaaaaacatatttgtaagag

SEQ ID NO: 87332 - DNA, 665 bp, Homo Sapiens
  misc_feature (21)..(21): n is a, c, g, or t
  misc_feature (580)..(580): n is a, c, g, or t
tgaaactcccatgtctataanatgtaatgagtgtgaaagaagtttcactcagaatacaggcctcattgaacatcaaaaaatccacactggtgagaaaccctatcagtgtaatgcgtgtggaaaaggcttcacccgaatttcataccttgttcaacatcagagaagccatgtagggaaaaacatcctatcacagtgacccatgccatacatgccagagttggtgctcatttgtcactgatctgaagccactccccctggagtctcaactatagaaattgtgggctgggctttatttaccactacacattatcaggtgttagaaaatgtagactgggttagacaaattatcttctaagttctagaaggggtttgtaatcaaaacatatttgataggaggctacgggagagttgtctagaagaggtaagacctgaaactgtttgttctctcccactagaattaaatggatgtttagactggctacttgccctaaaccagcacttggtgatgtctactgggtggatggttgtgatttgggggctgcttctctgaccattctttttgactgtaatgaatcctccnacagttggtcagattcataaagtcttatatccccctctgtgccttttctgcaggtgctaataaatgtttattgaatgtaccagtg

SEQ ID NO: 87333 - DNA, 660 bp, Homo Sapiens
aaaaaatacaataaatttgtagagataggatgaccaaggacaacagttttaggcttccaaaggtggtaaactatgggatggtaaatatccgagaggaagctgatgcaacaggatttgtctgcagcagcctctggtaccacctctgagtcaagggttgtgtccagtgatggagagtttatatcgtgcctttaggcagaaaaggggagggaaacctgaacttttcctgcactttctgcttcttaattgccttcagctgaaaatcattttttatgtgaaaaaggcatagtctgagctgacgcctctgctttcctccacctgaagagaacctgcgtgctgctcctttgcttcggacctccgcctctgcccgggagaaagcccaggccagcctgctggacaagcagagaccatgagaaggagagttcaggggtcccaatccaggccatcctagaccagccagctccagctgatccgcacgcagccacttcggctaccttctactggccaaagggagtcccagggctcacccagattcagaggtggggaaactgagtccaccacttgagaagagtagctataaagacatatgagcgagaccagctgagcccagcactgcggccaagtcgaagactttaggagcaataaaagtgcttattgtgtttc

SEQ ID NO: 87334 - DNA, 862 bp, Homo Sapiens
tgcggccgccgtggccgagctgccggtgctggacgcccgcgggcagcgggtaccgttcggcgcgctgttccgggagcgccgcgccgtggtggtgttcgtgcggcatttcctgtgttacatctgcaaggaatacgtagaggatctggccaaaatccccaggagtttcttacaagaagcaaatgtcacccttatagtgattggacagtcatcctaccatcatattgagcctttttgcaagctgactggatattctcatgaaatctatgtcgatcctgagagagaaatttataaaagattgggaatgaaaagaggtgaagaaattgcttcctcaggacagagcccccacataaaatcaaatctactctcaggaagccttcagagcctgtggcgggcagtgactggccctctctttgattttcaaggagacccagctcagcaaggtggaaccctcattttaggtccaggtaacaacatccattttatacaccgcgataggaataggttggatcacaaacctatcaactctgttttacagcttgtaggagttcagcatgtgaactttacaaacagaccttcagttatccatgtgtgacttaaaatgcactcagtcactttcaactggaccttctggaatgtgaccttcaatgcctgggtgtaatatcctcgtgcagtgtctaacctgctgtcccttcccagcctttgaggagttagggaagcataaagggggcttgaacctgttgaattgcatgctgggaagcatcagttgtcaaaatatgttatatacttccattttataacttttaacattttatacaaaaaaaatgaatatacaaaatataactttaaaagctataaaatcaaa

SEQ ID NO: 87335 - DNA, 803 bp, Homo Sapiens
gtaccaataaggatactgaattagatgttaacaacagtgttttcagaaaaagatacagcaatgagtaaaaagcactatgctattacaaatgatttacagaaacaactaattaacctaacataaatccccttaaaatgcaaaccatacataatcttaacatgaattacagaataaaatattttcctagtaaattaggtgtaaaaatccaaacttgcttttttaaatataacacccagaaaataaagaaatactggtcccttttttaacatgtatttctcaaaataagattcaccatgaacattattttagatatttttacatcttctttagctaaccaagtgaaaaatccaatatacacaaataggtactttcatcagtacataaaacagcaataggtagcaaggttagaaatcagaatacaagttcaattgaataaatacaatactagtacagagacacccatttttaacccacaatgaaaaatctgagccatgaataggttttccattttgaatctaacttctagatgatctgtattttgaccttaaaggggccaaaatatttaatatgggtgaagctcatgttccattacctgtaaaggtttaatgcaacagaaaaatggtcattttacattggttagaatttttaactaggtctttcatattattttgtttagcacatgacagacttatacacatattttaaaaaatcaaacatggaatttttatatacatcaaacctttaacaatgtctgtctctgaattgctattatagtgttcaaaattatacaatcaaccaacaag

SEQ ID NO: 87336 - DNA, 513 bp, Homo Sapiens
ttacctatttaataactaaatgaatgaaaaagtgtgcaatgtttctgcaggtgtcgaccttggtaatgcaataggaccatctcagaagctctgcatgaatatcagtgcccaggccccaacccagagattcatagtcagttagctgggggtgaaactccagacatcggcatgtgtgaaacacaccccaaggtcattctagtgtgaatccagaagaataagcagccagcttagcccttagtgtcattgggttgacaggaaagttctaggctggggactttctgagccccccatgtctgcttgttttgagatctgatcttgagggcagcatggtgactcaaaacaggagcacagttgtgggtccagtcttggtccttccactaataagatgggagacgttgggtcagattccttgcctgtgccaagcctgggttttctcagctgtggaatgaggttaaccaggaagtgcctcagaggccaatatgcattcaaggaagaagatgccagctcagtaac

SEQ ID NO: 87337 - DNA, 1546 bp, Homo Sapiens
ggcattggtgactatagaacagttgtacaaaaagcaggctggtacggtccggaattcccgggatatgtcgacccacgcgtcgatggcgactcccgctcgtgccccggagtcaccgcgtccgcggatcggcgctagtagcggggcctgccgaggaagccgagtgcccgccgcccgccagcctcagcccgcgcagaatgtgctcgctgccccgcggcttcgagccccaagctcccgaggacttggcgcagcggatgttgggtggagctgcgggaaatgttgaagcgccaggagagacttttgcgcgaagcgaaaaattcatttgcaaattgcccgacaaaggtaaaaagatctttgactcttttgccaaactgaaagctgccattgcagaatgtgaagaagttagaagaaaaagtgaactgtttaaccctgttagtttagactgtaagctaaggcaaaaagcaattgcagaagttgatgtgggtacagataaggcccagaattctgacccgatacttgatacttcatcactagttcctggatgttcctctgtagataacatcaagtcatctcaaacctcacaaaaccagggacttggacgtcctactcttgaaggtgatgaagagacttcagaggttgagtacacagtgaataagggcccagcttccagcaatagagacagggtaccaccttcatctgaagctagtgagcatcacccgcggcatcgtgtttcaagtcaagcggaagatacttccagcagctttggacaacctgtttattgacaggttacagaggatcaccattgcggaccaaggtgaacaacagtcagaagaaaacgcaagtactaagaacttgacaaggcctttcacagtgggactgagaagaaacctcattacatggaagtgctagaaatgcgagccaaaaacccagtgccccagctgcgtaaatttaaaaccaatgtgttaccttttcgacaaaatgattcatctagtcattgccagaagagtgggtctcctatttcctcagaagagcggcggcgcagggataagcagcatcttgatgacatcacagcagctcggcttctaccacttcaccatatgcccacgcagctgctctccatagaagaatccttggcacttcagaaacagcagaaacagaattatgaggagatgcaagcaaagctcgcagcgcaaaaattagctgaaagactgaatattaaaatgcggagttataatccagaaggggagtcttcagggagataccgagaagtaagggatgaagatgacgattggtcctctgatgaattctgaagataatctcctaaatcactgacgttgagatgtcatcatcttacatcagactttctaactagtatcaagatcagtgtcagatattgttgagggaagtaattttataaagttacacaaaggtagttataaaaaaagcccagtttgtctttcagaaggtgactttcatgtgcttgaaaagtttaatatttgaatattgtgtttaaccacatggtattaaaattttgcaatatattgtgaaa

SEQ ID NO: 87338 - DNA, 534 bp, Homo Sapiens
gttctggactgcagttgagtggaaatgggcaacggcgggcggagcggcctgcagcaggggaaggggaacgtggatggggtggcagcgactcctactgctgcctcggcctcctgccagtacaggtgcatcgaatgcaaccaggaggccaaagagttgtaccgagactataaccacggtgtgctgaagataaccatctgtaaatcctgccagaaacctgtagacaaatatatcgagtatgatcctgttatcatcttgattaatgctatattgtgcaaagctcaggcctacagacatattcttttcaatactcaaataaatatccatggaaaactctgcatattttgtttgctttgtgaagcatacctgaggtggtggcagcttcaagattccaaccagaatactgcccctgatgacttgatcagatatgctaaggaatgggatttctatagaatgtttgcgattgctgctttagaacaaactgcctattttattggcatttttaccttcctgtgggtagaacggcccatgacggca

SEQ ID NO: 87339 - DNA, 528 bp, Homo Sapiens
aaaaagtgaagaaatgtaagtgaagtcatgttcttttaactctttagcaatgcctgggtgggactttttcccctgtgtagtaaaagtcctctttttagcattttaaatattcaaatacttaattatgtggatctcctgtattccttctttaaaacacgagtatgcagaccgtgatgttgtgccctattaaaagcattacagacatctttagtttttttccagagatttcggtttgcttgtatttgtccggaagtcactcaacagtattgaatttcgtgaatgtagagaagaaatcctaaagtttttatgtattttcttagaaaaaatgggccagaagatcgcaccttactctgttgaaattaagaacacttgtaccagtgtttatacaaaagatagagctgctaaatgtaaaattccagccctggaccttcttattaagttacttcagacttttagaagttctagactcatggatgaacttaaaattggagaattatttagtaaattctatggagaacttgcaaaaag

SEQ ID NO: 87340 - DNA, 699 bp, Homo Sapiens
cattaaaaggtagcttaataagtgctagctagcatcaaaacagtaacaggaggtttgagtcatgaagttacctaatcacaagagagttaccagacatttctcaaatactttatacagtaatattgagttataaccatgtaacattttatgaaactaattttcagataaatacaattgaaaagctgagaatgtaaatggaattatacgtgttccaaaaactatcattaccaaaaatttattatttttgagtctaaactttccttaactttgacattttccatgaaagtttcctgtagaatttaccatgggagcatggtaaattagcattccctgagaaagaatgatcatttctacaaatacattgtcttgcatttaaaaatgctaggggggcacatagcaattcaaatgaactagtttgctttggtttataaaaccaacagatattttgtaagttcactttaactaataaactcatttacacaacttattaaatgaatttctcttgaaaccagggccatatggtattttatcatatctttaaataaaatttcgaaatttctatttagctgagtgctaaagtgaaactttgttagattaaatagctttttcttaactcaccaaaaagtagtaaaaggcttgtaattcaattcaccttgtaagcatagttgtcttttgtaataaaaaactaaatctgaaaaa

SEQ ID NO: 87341 - DNA, 435 bp, Homo Sapiens
  misc_feature (76)..(76): n is a, c, g, or t
ttccactttagcaaggtaatagacctgggacccaccaggagcagcaaggccgaaggcggtttctgttcgacatgcntgaatggacaagatcctggatcaaggacatttaaagtttacagtggtaagtgatcctctggatgaagaaaagaaagaatgtgaagaagtgggatatgcatatcttcaactgtggcagatcctggagtcaggaagagatattctagagcaagagctagacattgttagccctgaagatctggctaccccaataggaaggctgaaggtttcccttcaagcagctgctgtcctccatgctatttacaaggagatgactgaagatttgttttcatgaaggaacaagtgctattccaatctaaaagtctctgagggaaccatagtaaaaagtctcttataaagttagcttgctataacaaaaaa

SEQ ID NO: 87342 - DNA, 1942 bp, Homo Sapiens
  misc_feature (161)..(161): n is a, c, g, or t
  misc_feature (1891)..(1891): n is a, c, g, or t
aaggtagcgaggcctgggtggcgatttccgcacgagggccgggtatacaattacttgactgccgttgagagagatttggcagccttaaggcagggaatgggactgagtagaaggtcctcgacttcctcagagccaactcctacagtaaaaaccctcatcanagtcctttgacagtgcatctcaagtaccaaaccctgctgcagctgcaattcctcgaacgcccctgagcccatagtcctatgaaaacccctactgcagcagctgtgtcccctatgcagagacattccataagtggaccaatctcaacatccaaacccctgacagccctgtcagataagagaccaaactatggggaaatccctgttcaagagcatctgttaagaacatcttcagccagccggcctgcttccctgccaagagtgcctgcgatggaaagtgccaagaccctctcagtgtctcgacgaagtagtgaagaaatgaaacgggacatttctgcacaggagggagcgtcgccagcctctctgatggctatgggaaccacgtctccacagctttccctgtcctcttctccaacggcatctgtgactcccaccaccccgaagccgaataagagaagaaaggaaagaccctctctcagcattggccagagaatatggaggatcaaagaagaaccccttgctgaagtggtgtcagaagaaaacagaaggctatcagaatattgacattacaaacttcagcagcagctggaatgatgggctggccttctgtgccctcctgcatacatatctccctgcccacattccatatcaagaactgaacagccaggataagagaaggaacttcatgctggctttccaggcagctgaaagtgtcggcatcaaatccacactggacattaatgaaatggtacggactgaacgacccgactggcagaacgtgatgctgtatgtgacggcgatctacaagtactttgagacctgagcatgccgggaggagccgccccaatagcgggggtacccctccacagcgaccgagcgacaccgacgccattagctacgcacccctgtaaagcttccagcaactctgggctgccccacagcgtgtgagcctccagctcggggcttccgtattggaagaactcagccgtgtggcccacagctcccaccagggcccctcccacatgacccgtccattcaggtcatgtgggctcagcacacatcctgcaggccggtggctgctggagttttccttctgaagagaatattgaactacactagtgctccagggcaccaaacaaaaagggctcatgcacagctgaatttgggaaaagggattcagttctgtgggaaactcactagggttgatgaaggctcggccgcggcacttcctgaatattggctggggtgggttccggtgctggtgagaacccagaaggagagtcagcgcctggcagttcccagcgccctgggcccttcaccgtcctagtttggaggagcatgttcaccacagacgtgggtcagctgccccacacctgacggggctgtcccggccgacacaatccaggcgtgttcagcctgagctaggagagtatctagagggcgtggtgcgggcacgccagggctggggtgctgctgctgcactcacgcggctgggctttctggcgggaagcagttacgggggccccttgcctggactcagcgacctgtcttccagcctggaaggggtttggagtcccagctctggctttagatttcttcatcataaggagtttttctagttaacatttttgttttgttacgagcaatgctggaaaaggtcgctcctgtctgtagtaccaagtacattgttcataacatagaatctaacacatctgtaatagcatgtgagacangataagcagaatagagaagtaacacttaggaccagcatgcataactatgat

SEQ ID NO: 87343 - DNA, 570 bp, Homo Sapiens
ataaaactcaaatgcttctaaaggagtctgagagtataagtgcaatgacaaggtcctgtgtggtcattttggggcagttgattattttgcagaaagcagtttccttaccttcttgatttacaactgatggatttgtcataaaatgattttcaaacactgttatatcagagcatcagtatgtgttcagaagcatgtcctactttggccctatatggcaaaactgatgactgaaatgtaatttctgaagcatctatgttagggcctaattgaagacagtctaatatatagattgtcaacaagaattagggggaaaagaatttctcagttgttttactttaccatgctcattacctgtgaataatccctgacatgcattgttgctctgagtacccaatctggaagatggtcttagcaaaagtgagctaattccctatatttcatttgctaaatgtttgtaactttaaggtactggaggaaagtttatggaaaacagaaatacagtcttcattataattctgataaggcaagtatattaaaaacgtaataaagaccttacctgaatatttcaaa

SEQ ID NO: 87344 - DNA, 561 bp, Homo Sapiens
gaaatgttccttcttgccctatgctgtgcgccacaccatccaggtgtaccgcctctccaagtacaacacggaagaattcatcacagtctaccccaccgacccacccaaggactggccagtggtaacgctcattgctgaggacgatcggcactataacatccccgtcagagtgtgtgaggagaccagtctatgagagacgcatgctcctgacagcctggcgacgtggcgaagatgcacaggtggctcctgggcttgggctgcaggtttgggggtctctaagaacaatctctgagaagaacccttgggcccctgggagccaagttggacaggatgtcctgaagactagcttttgataagagaaattaaccaagtctttcccctcatctatgatgcaatatatttcagtgggggccttcagagcacacctgttggacggtgcaaaccatatcttctccagaaggcaaatacttttgtatcagaggaaactcagttttggagaggaatatgttctttatatctcaaatcaaaactctctctaatggtaaactggcttctaatttt

SEQ ID NO: 87345 - DNA, 1148 bp, Homo Sapiens
  misc_feature (112)..(178): n is a, c, g, or t
gttgtatcgccaccgccggatacagaaaaaaacaaaagggtggggaaggttttagccaaattttttctgttgggggtttaaaaagcacccccctgttttggcgttatcagtnnnnnnnnnnnnnnnnnnnnnnnnnnnnnnnnnnnnnnnnnnnnnnnnnnnnnnnnnnnnnnnnnnnacttgtttgtttttgcgacccaccacttttgagggggtgaagggcttttaggtgtggatttttttacagggcgagggaagttggttgtttgtcttagtcccgggttggaccccgaataaaagtgttccgaggaccttgtgccccttttcgtccggtgaaaccgttgagttttaaaggtcccaaggggaaaacctggacgggggaaaattcttctgggaggggcttttgtttaaaaaatccttcctccatggaataaaacaaaatgaggagacggaaatgggcctttttctgcctttgagatacaattttacaaagatgtaaaactggaagttatagcagcagctcttgtgatcgagaggtggaatagcctaaggcaaaacaaaccaactgaggtcaaggcaaaaaaagtgtgtctgtaatgacacccctgaaccctgtgttatgtcaaacaatttcctaggttacttaggccaattatatttggacactgttacctctggccaaaagcatcctaacttgtattagctatacaacagagtacattagaaccacaaaaagttatgttacagaggtatatttatgaacagtagatgtgcagttaaaaagaatttacaaaacagtacgtttccatgtttttaaaaaaatcaaatatgtcaatatggattcatttgccaagaaaaaggtctgaaaagatactcaaggttttaagagtagttatctttgaaagatagcatttaaatgtttccttttgcttatgtgcattttctatttttttctacagttagcatgtatcactttaagattccgccatccttcctatcaattcaatgcaatttaggaaagaaagaggtaaacatgtattcggacgcgtgggcggacgcgtgggcggacgcgtgggtcgacgatatcccgggaatcccggaccgtccagcacgggaggacacgatttttggttaatgaaaatgaaaag

SEQ ID NO: 87346 - DNA, 561 bp, Homo Sapiens
  misc_feature (289)..(365): n is a, c, g, or t
  misc_feature (390)..(412): n is a, c, g, or t
cataatgaagtgattaaatgaataaaaacgtatgttacattctctagggaaagatcgggtttcaagcattacagtgcctggcatcataagtgttcaaaaacagaaatccaaatacattttaagcagaattaggaattagcagaacaaggaaatcgcccagctaatgtgcgggtcaagagggcctaggagttcactggtcaaatgagggcttctggtgaaagaatagagaagggaaaaggagtaaagacaggaaagtggcccctcgagggttttgttttgttgctgttgnnnnnnnnnnnnnnnnnnnnnnnnnnnnnnnnnnnnnnnnnnnnnnnnnnnnnnnnnnnnnnnnnnnnnnnnnnnnngggcgagagggtgagactctgtctnnnnnnnnnnnnnnnnnnnnnnncctttatacacaaaactaccttcataaaggaaaaataaaacattccaagataaacaaaagtagagagttcatcactgaaagacctaagagtccttcaggataaatgaaaggacactagacagtaactcaagcccacatgaatagagagc

SEQ ID NO: 87347 - DNA, 550 bp, Homo Sapiens
cttcttaatttttgatttgctcaggaaaaagtatttgagataattttttaaaattaaggttattacatccatgtatatttctgtaggtgctttgaaagtacctgtgacattaagttacaggcctttgactcctgggtctaacaaggacaccaaggtctgctaaatcttaagcactgacagcaattaaaacctcatcttcaggcctggtagaagatcccaatcaaaataaactgcattcctgagacataaggccagaagtaaaagctattcaactcctcaaggctcaggaactaccacagaagaggtaggcatgtgagattgtaagggctgattttgagagacaaaataagttcagtttctctgcaagttaataattgatgtcaaaggcacactgatgcaataccagcatacgggcccctgcatcagattaaaaaggttttcttgaagtgttaaccgaccccttaataaaggttataaaggttaaaaaaggcttatggaagctgtatcttatggtcaagattaaaattttaaagattgataataaaatttc

SEQ ID NO: 87348 - DNA, 646 bp, Homo Sapiens
  misc_feature (61)..(69): n is a, c, g, or t
  misc_feature (395)..(420): n is a, c, g, or t
acatagacacttcagacacaggaaaaataacgtggattttaaaaaatcaatcaatggtgcnnnnnnnnncttaaagcaaaatagtattgctgaactcttaggcacatcaattaattgattcctcgcgacatcttctcaaccttatcaaagattttcatgtggatgactcgaaactgacagtattaagggtaggatgttgcttctgaatcactgttgagttctgattgtgttgaagaagggttatcctttcattaggcaaagtacaaaattgcctataatacttgcaactaaggacaaattagcatgcaagcttggtcaaactttttccagcaaaatggaagcaaagacaaaagaaacttaccaattgatgttttacgtgcaaacaacctgaatcnnnnnnnnnnnnnnnnnnnnnnnnnncaaatagatttttgattcagctcattatgaaaaacatcccaaactttaaaatgcgaaattattggttggtgtgaagaaagccagacaacttctgtttcttctcttggtgaaataataaaatgcaaatgaatcattgttaaccacagctgtggctcgtttgagggattggggtggacctggggtttattttcagtaacccagctgcaatacaagtcagtaatatgag

SEQ ID NO: 87349 - DNA, 617 bp, Homo Sapiens
  misc_feature (544)..(567): n is a, c, g, or t
ccaccatactagcaagatgtttatttaaaaacatttaaaaactgttttttaaaaaacattctagttaagacgagataattcaatgttcaagctaataattctataccattttaagagtctgaatttacttttaagtaaaaaaaggcagagaaaaagagtgaaggatacagaattatcttgattatgcactgctgttactattcccatgctaaagaccccttttgtttcaataaaactatcaatatttactgagaatgacagctctgaatcaaaggcaagagaaagagacctgtaaatagtgctgttcatactagttgcccccagtagttcccaggcctcacttccaagctgccttaagtaatttttactttctgaatataaagccaactgtggaggggtcagacagctgaggactgaacttcttaaaaattggcttcagagaaaagcataacattacaactgaggcggccgagcacagtggctctatattttttaaatacaagaaaaaaaagtatgaaatattaatttttgagaccctgtctcnnnnnnnnnnnnnnnnnnnnnnnngcaaacaactagtcctccagatttcatcactaaaaatagggatatacttt

SEQ ID NO: 87350 - DNA, 181 bp, Homo Sapiens
acaaagttagtttgtgatcaacgattcactacaattgaagtgttactttgtcagaatatttattcctttgtgtgacatgctagattccctggatgtagctgatcatttttattttgtaaatattacctaactttacataaactatatcataataaactatttttgcatcaccctttgaaaa

SEQ ID NO: 87351 - DNA, 446 bp, Homo Sapiens
tattcatttatttttttaaaaaggaggtagaaaagggtaggaggaggcaggcattaagaaacatttaaggaccaatacacagtctaaggccaaatgaacttgtgaagcctactgattttggaaaaaatcttcattttggtgggtaacttgaattattaatataaaataaaattaaggcatacagagaaaaggcactactaaaaattaacaattggattgcttttcattaacatttaaccaatcttaaaattcaaataaatatgaacattacatttgtaaaacaaaggccaaacttagtaataaaacagtatgatctcaaggaactgtcctgatcttagtataaataacactgttgacagagttcaatttctatcaaatgttttgggtattttcacaatttagaccaaaataaagtatgttttctttaaaagagacactggggaaaa

SEQ ID NO: 87352 - DNA, 508 bp, Homo Sapiens
tttatgcagaaaaaaatggcaagtgtttatatgaagccagtggttaaaagtaatagggccttttgcttttccattcatttccaaagaggaagattatcttccaaagaccccagtggtgagtaagtggcaggcaacatgcaggaaatgacgcagctgaggagaggaaaattgcagcaacaaacaggtggattttctggggaaggatccctcaatgtccgtattaagcagccatagatgggtcatttttactgtaaaggctgatcaaggaagataccctgggtttggtagatctctttgaggacgagcaatactgtatcttcagactcccagtagcatagatggctttgtaaagcaaataaatactcattaaaactttcaataggcttctcctgtagcacatagtcaatgcgttggcctccattcagcatccccacattgataggcaggacttcttctttaactgccacagaggtcttttctgtgttaaaatcactaggcttctctgaag

SEQ ID NO: 87353 - DNA, 601 bp, Homo Sapiens
tttagtcatttaccggtttctcataagacatccagtcacttcttttcccttgccctttcctaacactgttcctaacatttgggtaccaccccttagctcctgcgacccatgtggttttggagaaagctgatcacactcacggtgacaggccatggttggaagtaacatgttccacttttcacgaaaagtaatagatctgaatatcattcatggttaacaatagatagtgtgacatttgggtatgacctgctggtagaaatagggcatgattccctggaagtaagtcacttacaccaacccaagttctaattctttaagatgtagtaaagacaaaattgttcttgctatattaaaatggaagaaaggatttgcagagttcaaggatgatatgctctagctctatatgcactccgctatcaatcattccttttactttctgccttgaaaaaatcattttaataaaatcaaaaattttcattctaaaatatagttcaatgatttcactaccctttatgaacaaaaacagcacgaatcctctaaagaagaaaattgagccaaattgttatgttttgcctagatattcacacaatatttcacacca

SEQ ID NO: 87354 - DNA, 363 bp, Homo Sapiens
  misc_feature (230)..(264): n is a, c, g, or t
aattcttacgggtatatagaaggtgtatatatttatggggtacatgagatgtcttgaaacaggcatgcaatgtgaaataaataagcacatcatggagaatggggtgtctacctcctcaagcatttatccattgagttgcaaacaatccagctacactcagttatttaaaaatgtacagttattattgcttatagtcaccctgtttgctatcatatagtaggtcttactcnnnnnnnnnnnnnnnnnnnnnnnnnnnnnnnnnnncctaggcttatagcatcatgctatcccccttgtaaaaggaggaatgcttggcatgagaaccttactgctgttaccatgaacaaactatggaatgttggc

SEQ ID NO: 87355 - DNA, 819 bp, Homo Sapiens
ggtgcctccaagcggccctgtgtgtttgacatgtgaagctatttgatatgcaccaggtctcaaggttctcatttctcaggtgacgtgattctaaggcaggaatttgagagttcacagaaggatcgtgtctgctgactgtttcattcactgtgcactttgctcaaaattttaaaaataccaatcacaaggataatagagtagcctaaaattactattcttggttcttatttaagtatggaatattcattttactcagaatagctgttttgtgtatattggtgtatattatataactctttgaccctttattggtaaattctggtatacattgaattcattataatttgggtgactagaacaacttgaagattgtagcaataagctggactagtgtcctaaaaatggctaactgatgaattagaagccatctgacagcaggccactagtgacagtttcttttgtgttcctatggaaacattttatactgtacatgctatgctgaagacattcaaaacgtgatgttttgaatgtggataaaactgtgtaaaccacataatttttgtacatcccaaaggatgagaatgtgacctttaagaaaaaatgaaaacttttgtaaattattgatgattttgtaattcttatgactaaattttcttttaagcatttgtatattaaaatagcatactgtgtatgttttatatcaaatgccttcatgaatctttcatacatatatatatttgtaacattgtaaagtatgtgagtagtgcttatgtaaagtatgtttctacattatgcaaataaaacccaatacttttgtcc

SEQ ID NO: 87356 - DNA, 616 bp, Homo Sapiens
catggcgctgcaggagcctctatacttaccttctgggatgctaggctgtacacaatggcagttggatttatgcttgctcatccttatggatttacacgagtaatgtcaagctaccgttggccaagatattttgaaaatggaaaagatgttaatgattgggttgggccaccaaataataatggagtaattaaagaagttactattaatccagacactacttgtggcaatgactgggtctgtgaacatcgatggcgccaaataaggaacatggttaatttccgcaatgtagtggatggccagccttttacaaactggtatgataatgggagcaaccaagtggcttttgggagaggaaacagaggattcattgttttcaacaatgatgactggacattttctttaactttgcaaactggtcttcctgctggcacatactgtgatgtcatttctggagataaaattaatggcaattgcacaggcattaaaatctacgtttctgacgatggcaaagctcatttttctattagtaactctgctgaggatccatttattgcaattcatgctgaatctaaattataaaatttaaaattaaatgcatatcctcaaaacaaaaaaa

SEQ ID NO: 87357 - DNA, 844 bp, Homo Sapiens
  misc_feature (426)..(426): n is a, c, g, or t
  misc_feature (700)..(782): n is a, c, g, or t
aattattcctgtgggctaagggggatgtttacaatatgtctgaaaaggcttgcatactctttgtcaatggaaaatatatattttactcctttaatataacctgcattactaaaatcgcagccctatatcaggtttctaatcaattatttgttgaatatataattaatagttgtcatattaagttagaacaagattgccttctgtttcttgagaaaaggatagtttgaacaatttcaaaacttacgtttccattttgaaactgtcttggccaacggtagcttgacattactcgtgtaaaaccataaggatgagcaagcataaatccaactgccattttatacagcctgaaagttacataattatattatcacagaatatcagaatatcattaccatcattaaaagatgtgttaaaaaaaatagagancttggttttctacctagcatcccagaaggtaagaatagaggctcctccagccccatgtcctcgttgattgtcatggttatccacaaagacaagtgctctgtcagaaggcatgaaaccccaaccttctccccagttcctatttttgaaaaataagatatatgttgatgtatcatttcacaatagtttgcgagtaacttaactgtgcatctctttctgcatggcatggcatctgaagattaaattctttctctaattaaatggttattctgtaagnnnnnnnnnnnnnnnnnnnnnnnnnnnnnnnnnnnnnnnnnnnnnnnnnnnnnnnnnnnnnnnnnnnnnnnnnnnnnnnnnnngtgtgtaatctacatatgtagtctatattcgtatatacaagtatggaatacttatattcata

SEQ ID NO: 87358 - DNA, 668 bp, Homo Sapiens
atatcaatattaatttaatagcagctctgtgttgtgattttaaagaacaagataaaatatgtcattcagcagtcatttaaaaaataaaagactacagatacaaggaaataaaaaacacttttaggagatgaaaacacaaagtagtaggatacccaacatgtacacatcccatcttcaaatttaaaatcatattgtcagttgtccaaagcagcttgaatttaaagtttgtgctataaaattgtgcaaatatgttaaggattgagacccaccaatgcactactgtaatatttcgcttcctaaatttcttccacctacagataatagacaacaagtctgagaaactaaggctaaccaaacttagatataaatcctaccaataaaatttttcagttttaagttttacagtttgatttaaaaacaaaacagaaacaaatttcaaaataaatcacatcttctcttaaaacttggcaaacccttccctaactgtccaagtatgagcatacactgccactggctgtagatactccaattaaatgcactactctttcactggtctgaatgaagaatggtgaaacaagtaccaattattagaaacatattgtcttctcagattgaagtggaagggtccagaatgccacacccagcattctctaaaggaaatcatagct

SEQ ID NO: 87359 - DNA, 1106 bp, Homo Sapiens
gcggccgctactgcctcagccaccacctgcctgagatccatggctgcggtgagagggctcgcgcccatgcccggcagagaatcagccgggaaggggtcctctatgccggcagcgggaccaagaacggatccctggacccagccaagagggcccagctgcagaggaggctggataagaagctgagtgagctcagcaaccagaggaccagccggaggaaggagagggggacgtgaccggccgcatccttgcacgccccgcggagctctctccatggtagcccagggcgctggcagaccatgctccgcctccaccagggccacagaggagcggaggggcctatgggggaggagcggagggccctgttggggaaggttgggtttttggaccccagggataagcttttccgatgtcacaatgtggaggaaagcacctgggggacaacagtgctcgtgcaggtggggcttgggaaatgcacgtcccttcccctcactccccgccaaaacccacatcccagcctctggatcctggggaaggttccagtccctggagaatacccagggcctcaaacttgaagtcactcctccaatgtctgggacttgccagctcagcccgttaggatgagggtgctgagaggaaacaggaaacaagactgcgaatggcgctcaggcagggagcagggagtggcgtttggcttgcacgttcccatgtggccagatgctggggccactttccttctgtctgctggtgactgcagtgttccccctcctcctcaccacggggctcctgtgagtctggggggcacctctttctggcctgtgcacctctctctggcttataaaggtgcctggcctgtgccagcccctccttgttgcgcctcaccgtggggaccaggtgagccggctctcccacgtggttgtcccgggaaagctgccccacagcctcagcatcttcagcacttaccgatccagagcctcccggccttctccggtgtcctgtaccaactcttctatttaagagaacctcagatgatgtacctgagcctcagggttttgtttcagagggatataaattatttaaaaattaaatgaaaacgttgcacactgaaa

SEQ ID NO: 87360 - DNA, 238 bp, Homo Sapiens
  misc_feature (145)..(182): n is a, c, g, or t
aacattcacatatttcttggaattataaagaaataaactttgtgcttctgaagtgggtttgccttaatataacactgatgtatttgtaaggggcatttttaaagctgtactttaaaaaataataattcttacattcatttgaagnnnnnnnnnnnnnnnnnnnnnnnnnnnnnnnnnnnnnnagctgagggcttgatccagcccgcggggcagtgagactccatttcaaaatagaaaa

SEQ ID NO: 87361 - DNA, 1457 bp, Homo Sapiens
  misc_feature (1078)..(1078): n is a, c, g, or t
  misc_feature (1153)..(1153): n is a, c, g, or t
  misc_feature (1161)..(1161): n is a, c, g, or t
  misc_feature (1189)..(1189): n is a, c, g, or t
  misc_feature (1425)..(1425): n is a, c, g, or t
gggaacgggccgtctccatcccagcagatctccagggttctaggaaagggtcacttagttctgtaacgccatctcccaccccagagaacgagaaacagccatggagtgattttgctgttctgaatgggggaaagattaatagtgacatttggaaggatttgcatgcagccactgttaacccggaccccagtttaaaagagtttgaaggagcaaccctacgctatgcatctttgaaactcagaaatgccccacaccctgatgatgatgattcttgtagtatcaacagtgacccagaagccaagtgttttgctgtgcgttctctgggatgggtagagatggcagaagaggacctcgcccccggtaaaagtagtgttgcggtcaacaactgcatcaggcaactttcctactgcaaaaatgacatccgagacacagtcgggatttggggagaggggaaagacatgtacctgatcctggagaatgacatgctcagcctggtggaccccatggaccgcagcgtgctgcactcgcagcccatcgtcagcatccgcgtgtggggcgtgggccgcgacaatggccgggattttgcttatgtagcaagagataaagatacaagaattttgaaatgtcatgtatttcgatgtgacacaccagcaaaagccattgccacaagtctccacgagatctgctccaagattatggctgaacggaagaatgccaaagcgctggcctgcagctccttacaggaaagggccaatgtgaacctcgatgtccctttgcaagtagattttccaacaccaaagactgagctggtccagaagttccacgtgcagtacttgggcatgttacctgtagacaaaccagtcggaatggatattttgaacagtgccatagaaaatcttatgacctcatccaacaaggaggactggctgtcagtgaacatgaacgtggctgatgccactgtgactgtcatcagtgaaaagaatgaagaggaagtcttagtggaatgtcgtgtgcgattcctgtccttcatgggtgttgggaaggacgtccacacatttgccttcatcatggacacggngaaccagcgctttgagtgccacgttttctggtgcgagcctaatgctggtaacgtgtctgaaggcgtgccaggcgnctgcatgntaccatatcagaagtgcttggtagccangcccgccttctcagaaagttcgaccaccttccacggcaacagattcagtaacccagaagagtcccaaccatggaaaaacgaggggtcttatcccttcatgacacctttgaaaacagaaaagcccctgtcaccgaaaatggcctagctgcacatggaaaagggactcgggctaatttacctgaaagatggactaaactaccctaaaagaaaaaggaacttcgggcatccgaacttcncattccagttggtggaaggcttttgccttcaa

SEQ ID NO: 87362 - DNA, 456 bp, Homo Sapiens
aggaaagtcaaacactgagagagttggcagcccaaagttgtgcaatcaggcaagtcaagagtcgagtgcataggcgtgggctacagagtgccttcctgaagatggctgtgtgatgagggttataataggatgacataggagggagagcaggaggcacacctggaggaggtgacattgaagctgaggcttcataggagttagccaggggaagagtggatatagggaggaaagaatgcagcggtggaagggggagggaagagcatgtgcaaagagagacctagaagtgagaaagcaggacattggaaagacagaaaaaaaaccccagatgttgctggatcctaagtgtgctaggggtgtttgcacagaatgaactagaaacactggcagagagtagaagtttgggttcattaaatctgttaaccaaaaatctactaattggctgggtgtagggctcat

SEQ ID NO: 87363 - DNA, 658 bp, Homo Sapiens
atcaatgacaacttgcctggtgaacacctgcaaagatgagtaactgctctgtgtctctgaaaattagccaaacaggaatggactcactccaataaacacacctgaatgcccactgatcaacaacagtcccacccaaataatcacattcttacagataatgtcaacccacttatagacatgaaactctgccacttcttgagctccacccttcctcaaaaccctatataagattagtggtctactatatttggggagactctagccttaccatagcaaagaataagaataaactttatgctttttgtttcagatattgagagggggtctcattctttgacaagataaatccagaaagcagagttctataaaacaactgactaggtttctatgaataaacagcaggggaaaaacagggatagataacagaagtttaagaagtacaaccaaatggaatgtgcagacttgatttggatccaactgtaaagacacagttttgaagaaaatctgaaaaacttagttaaggactgatgatacctaagcattattgctagttttatgtggatgtgtaagaaaacacccatatttttagcaaggcaaactgaattaagtagatatgtctggaatgcttataatacttcagtaaagaaaagaaaaaaag

SEQ ID NO: 87364 - DNA, 609 bp, Homo Sapiens
ttacattccttaactttaatgtcaattaagcagccttttcacttgatataaactcacatacccaggaacactgtgggctcagaacattatttcacaagcaggtagtgctggcacgttgtttgtgtcacatttagattccgattaaatgacatcattgtgttcctcagatcctgacatacacaatgaaagtatgtgaaagttacataaccagttgcacttaatgagtcatcctttgtcaatattagaatgagggaaccaggatatgactaggaagagactcaaggggtaaaatctgaagattctgtcccatacctctgcagaatcatggacccccacagaggacttaggggaggggctcagaagcaaagggctgttttgaaaatagtttgattttgacacaatgatttgcagacaagcccagccaccgtggagaaaagatagagaatgaagaagttccaaatggctaagatgaacatgaacttctaaacagaatgaaagctctaggattatgtccactttaagaagtctgctggtgatatctggctttagaggcaggtaatgtcttttgacaccctttcttcaaagaaaggggtaagggaaaacaagacc

SEQ ID NO: 87365 - DNA, 451 bp, Homo Sapiens
gcaccaaaagaatgagtgaactgttacctatagggaaagaacacttcttcttcctgctgtttgggaaccatctcagtgtggcgtaatggttaggagtacagattccagatcctgtttcttagatttaaatcttgactctgccacatactagctgtctgactgaaccttggtttttctgtgcttcagtttcctcatctgtaaaacggagataacagtacttacctcatagagctgttgtgaaaagtgatgactgaatatgtaaaagcacctagaacagtgcctggcacatgctaagtgctttgttcattattgttgttattatgtaattttctctcagactgagagcactgttagtgacccaagtaaatttatagtttttaagtacagaggaaaaataaagcctattttttgttaacagtcttaataaataataaaatggaataaagaaccc

SEQ ID NO: 87366 - DNA, 1263 bp, Homo Sapiens
cagtcgacggtaccggacatatgcccgggaattcggccattacggccggggattgcggagctgtctgcggtggcggcggcgcctctcgtctcccgcggcccagcgctcgcaccaccgcttctccctccctgtcgcagccgcgccgccgcgcagcgccccagccacacgccggcgggcagaagccgtcccgctctccggaaagtgataacagaattcattgaagtggagaatttttaaagaaggtaacaaaaagagaaagaaaatgccgaaaccaatcaacgtaagagtaactacaatggatgctgagctggaatttgccattcagcccaatacaactggcaaacaactttttgaccaggtggtgaaaacagttggtttgcgtgaggtctggttttttgggctgcagtatgtagacagcaaaggttattctacatggcttaaactaaataaaaaggtaacacagcaggatgttaaaaaagagaatcctttacagttcaagtttagagctaaattctttcctgaagatgtttctgaggaattaattcaagaaataacccagagactcttcttcttgcaagttaaagaagccatcttaaatgatgagatatattgcccgccagaaactgcagttcttttggcttcctatgctgtccaagccaagtatggagattacaataaagagattcataagccaggctacctggctaatgatagactcctaccccagcgtgtattggaacaacacaaactaacaaaagaacagtgggaagaaagaatacagaactggcatgaagaacatagaggaatgttaagggaggattctatgatggaatacctgaagattgcacaagatctagaaatgtatggagtcaactattttgaaataaaacaataaaaaggaactgaattgtggctaggtgttgatgctttgggtctgaatatttatgagcatgacgacaagttaacacctaaaattggttttccctggagtgaaatcagaaatatttcatttaatgacaaaaaatttgttataaagccaatcgacaaaaaggcacctgattttgtgttttatgcacctcgtctgagaatcaataagcggattttggccttatgtatgggaaaccatgaactatacatgcgaagaaggaagcctgatactattgaagtacaacagatgaaggctcaggctagggaggagaaacatcagaagcagttggaaagggcacaattagagaatgaaaagaagaaaagagaaatagcaga

SEQ ID NO: 87367 - DNA, 1033 bp, Homo Sapiens
  misc_feature (533)..(533): n is a, c, g, or t
  misc_feature (574)..(913): n is a, c, g, or t
tttggtgtaaagattcagttaaaaaatatcttccttcagacatctgctgactacaggaaattattgtcatagcccatgtgaaggtcataatgagactaagatgacgttttaaaactcctgaactctgtagggaaaagcaagtagaagctattattcttactcgctggtaacatactgtagatagctccaggactgagacccgaggcccggaggacacacttagtgttctccctatgtcacagtcctacaggccagcaaaagtgagtacaactgtcccagcatgtcagttacacatactggccctaaatgttcagcataatttaaaagggaaagaaaaaagttggcttttcagacaaaattttgtgtgaactgaacaacgtcagactatgcttctttgggtccaaataatttaaactttacagctctcagatgttctggcagctcattctttgttcatttcacctattatacaagtgtttctgggtccaagccacagagcaaaatagacacaaataaatcaaataataaatgtntcatataaaggagaaaatgctaatggtctgttatctatacnnnnnnnnnnnnnnnnnnnnnnnnnnnnnnnnnnnnnnnnnnnnnnnnnnnnnnnnnnnnnnnnnnnnnnnnnnnnnnnnnnnnnnnnnnnnnnnnnnnnnnnnnnnnnnnnnnnnnnnnnnnnnnnnnnnnnnnnnnnnnnnnnnnnnnnnnnnnnnnnnnnnnnnnnnnnnnnnnnnnnnnnnnnnnnnnnnnnnnnnnnnnnnnnnnnnnnnnnnnnnnnnnnnnnnnnnnnnnnnnnnnnnnnnnnnnnnnnnnnnnnnnnnnnnnnnnnnnnnnnnnnnnnnnnnnnnnnnnnnnnnnnnnnnnnnnnnnnnnnnnnnnnnnnnnnnnnnnnnnnatctacactactgcactgtaggctctaagggaacttaaaaacagaaaaataatggagagaaggtgtttgtagaacacagacatgtcagcaaaggcactgagtatctactcctgagtgccc

SEQ ID NO: 87368 - DNA, 930 bp, Homo Sapiens
  misc_feature (85)..(161): n is a, c, g, or t
  misc_feature (163)..(197): n is a, c, g, or t
  misc_feature (207)..(273): n is a, c, g, or t
acgcaagttagcaatttattatgataactctgcaatcttttcagccactctttaaggttcctggtcatccattctgggcacagtnnnnnnnnnnnnnnnnnnnnnnnnnnnnnnnnnnnnnnnnnnnnnnnnnnnnnnnnnnnnnnnnnnnnnnnnnnnnncnnnnnnnnnnnnnnnnnnnnnnnnnnnnnnnnnnntatatatatnnnnnnnnnnnnnnnnnnnnnnnnnnnnnnnnnnnnnnnnnnnnnnnnnnnnnnnnnnnnnnnnnnngaacacatggcaagagcaggaaatgggaagactaccttttttctggcagctatgtgttgttttgttcgaaagatggcaagtgtacaaccaaaccaatccacttgcttacagaaagaatgtttagtgtagttaagactaatttgacaacagataaaacagtctgtcagctattacaaagtaatcagctgaacactaatgctgttctgtctgctcacaagagataaagataccctctcatggaataaacaccttgcttagaattcatataacaaagaagtaaccttataactgctctctagtctgccttatttgtgtcatagagtaagatattccttgaaagcccattaagtggaatagactttctgaaaataagagttctttacctcagtcctcctctaatttggttgagaggaggtaatgaaaatggggacaggataaaaggtggcaactaaatttaaagcacagaagaaatgatttccttctagctatgagaatagtcaaattgagcttgccaggctgtctcattcctaacatgtaattcatgatttagccactaaatttctaaggagatcataagaaattaagaaaaacgtttaagtctagcctctgcgtggtagacaggtatggggagggagaatgcttttcccctcccagtaa

SEQ ID NO: 87369 - DNA, 960 bp, Homo Sapiens
  misc_feature (204)..(212): n is a, c, g, or t
  misc_feature (433)..(752): n is a, c, g, or t
  misc_feature (897)..(910): n is a, c, g, or t
tgtttgcctgcccgcccggcgcctttgcctttgccctgcggtccccgtctgcggacccagccttcgctggtgatccctccggggctctcctttgcgtggttatatcccgactggtcacaatggccgccgatttcggagcagttatcgcttcggcttccacagagggacccctccggttttgatctgggagaggacccgcggagnnnnnnnnntccctggggggcctgctccccagcactccgggccatatcccgaccttgcccgctcctgatgggatttcctttaaggtatttgggggccagaaataactctgatggtactggctttttgaaatcctatcggggtctcctgaaggcgaaccatttttcccgacgggtcctctttttgcctcccaaatgggctgttctctaagggtttgccacggcaaattccnnnnnnnnnnnnnnnnnnnnnnnnnnnnnnnnnnnnnnnnnnnnnnnnnnnnnnnnnnnnnnnnnnnnnnnnnnnnnnnnnnnnnnnnnnnnnnnnnnnnnnnnnnnnnnnnnnnnnnnnnnnnnnnnnnnnnnnnnnnnnnnnnnnnnnnnnnnnnnnnnnnnnnnnnnnnnnnnnnnnnnnnnnnnnnnnnnnnnnnnnnnnnnnnnnnnnnnnnnnnnnnnnnnnnnnnnnnnnnnnnnnnnnnnnnnnnnnnnnnnnnnnnnnnnnnnnnnnnnnnnnnnnnnnnnnnnnnnnnnnnnnnnnnnnnnnnnnnnnnngcaccaaatctccctcatcttctagtgccattctcctctctgttcaggtaaatgtcacactgtgcccagaatggatgaccaggaaccttaaagagtggctgaaaagattgcagagttatcataataaattgctaacctgccgttnnnnnnnnnnnnnntaactcgagcatctaatcggtgcgagaagagtagactccctgtcgttgat

SEQ ID NO: 87370 - DNA, 1065 bp, Homo Sapiens
gtgtgagccaccaagcccagcctaatgttctattttttaatataagtgcagtgttcatgttgtgaagatccatcaagctgaatgttcacaaaatatgcacatttttctatgtgtattttactttaataaaagcaaacaaagtggccagacactaatttttatgtataatcacaatattttatactcacctttattgactaaaaataattatgctacatgttgtcctgcatcagaagaattatttcttcttgccagtgttttgggatttgaagataatggttcactcaaagaacctattattttctctactgaggaacccaatgtagaacttgcactgatatttttattactgcctttatatgaatctataggtatctaaatgttaaggcatgtatgatctttgatcatttcttttttcaaattaaagttgtataaaagtttcaatatcttgccttaaattagttgcctattctttctaggattcaaatattgtgacatttaaaaaagaaaacattcacttttgaaacttagacttcagatcaaaaaggactgaacccccactatcataatccatacattcatttccatgttgtttgactagcagtgcatatatgaatgaatatggtaattaatcttacctataagaaccaaatactttaattatattaagatagtgaataaagatgtataatatttttattaataccttgaatatattcagtggattgaatgtgacttcataactgtactacgattgtattaaaatatttctggaataaaaacacaaacactcactaaccatcgacaacacaactttttggggcgccttgggcccttcgaaaaagttttttagacacactccgtgtgggcaccggggcccaataagtgtaagtgaacacgggccacaccgggtccccagaaggaacccgcggcacaaacaaaggcggggggtttcccacccaataaaaaccgccggggggcgcacgagcgctttcggaacaatcccaaggggagtccaagggcaacaccggcaggacaacacgggtccacgcagccaaataatcg

SEQ ID NO: 87371 - DNA, 618 bp, Homo Sapiens
  misc_feature (145)..(221): n is a, c, g, or t
atgcataaaagaattttatttagtggccagatcccaatgaataatgtcagtcattgcttggttctgctaaaatgtggtattagatatattcttaagaaagtgtacaattgcatcaccaaaagctgtttaatttggattgtgtagnnnnnnnnnnnnnnnnnnnnnnnnnnnnnnnnnnnnnnnnnnnnnnnnnnnnnnnnnnnnnnnnnnnnnnnnnnnnngcagtattcaaaactaacaaatgtcaccttggactatttacagtaagacgcctttttgacaggagaatcttgttctcagcttgttcttttcctcacattttacttacagggattctcactcccccatctgatccctattcataacttcttccattcctgtctcacatgaaacagccatcttccatgctctctcactcatctttgagtctctctctgacactcctttttcctactcttaaattattaataattctattcaacagacatttattgagcacctagtatgtgccaggcactgtgttaagaggtggggaacaatacagagatgaaaagacattgaccttttcctcaagaaattcagactttgggttgaattaaaaaacctcgtgccgaattc

SEQ ID NO: 87372 - DNA, 580 bp, Homo Sapiens
  misc_feature (229)..(271): n is a, c, g, or t
aaaaaggagtgtcagagagagactcaaagatgagtgagagagcatggaagatggctgtttcatgtgagacaggaatggaagaagttatgaatagggatcagatgggggagtgagaatccctgtaagtaaaatgtgaggaaaagaacaagctgagaacaagattctcctgtcaaaaaggcgtcttactgtaaatagtccaaggtgacatttgttagttttgaatactgcnnnnnnnnnnnnnnnnnnnnnnnnnnnnnnnnnnnnnnnnnnncaaagaacaaagacttatgtagttttcttttattctacacaatccaaattaaacagcttttggtgatgcaattgtacactttcttaagaatatatctaataccacattttagcagaaccaagcaatgactgacattattcattgggatctggccactaaataaaattcttttatgcataattgttatttctttgtctcttacaccaccatttcttctctaatattaaaacatctgaaaacccagtcagatattatgctaaaaatgaacttaagtgttatattggtagggtgttttccaacaccatcaac

SEQ ID NO: 87373 - DNA, 1043 bp, Homo Sapiens
ggaattcctgcgatcccgggagccgctttgcttaccgtcctgccggtcccagccgtcgctaggaggtccgcgggccctgcggcaaccctcgctacagacgctgggcgggcggcgacacctggctcatggcccccgcggcggctccgtcctccttggccgtcagggcctcaagccccgccgcgacacccacctcgtacggcgtcttctgcaaggggctctcccgcaccctgctcgccttcttcgagctggcctggcagctgcgcatgaacttcccgtacttctacgtcgcgggctcggtgatcctcaacatccgattgcaggtacatatttagagccatgactaagctaacggcctccggggccagcatgatggccgactcccagggtccgttgcggcgcggcggagcagccaatggcgagccccacagtctcgcgagagtgctcaggcgctcttcgtggctgccctcttagctgctagcggagctcctcagggggcggccgggagcctacaatccctagaaagaaaatacgccgttccggaaacagaactgcagttaagaccctcgaaaacatctaagaaagtgtgcatcctaaaacacctgacgaatttcagaatgtgacaaagcgcagaggatgcattatttcaaaacaaaacagaaggctaaaatttgcaggaaaaagaaaatcagtaaaccgggaatcctcggactggattgtaagcaagatttgaatgaataagaagctgaaggtattaaggctgtgatatagaaggtacatatttcatcccacaagagaaaacaataataatcagaaattttcggtgaaaaaaacgcaaaactgtacaggaaaatcatcctccaagtaccagacataaaatgctgcaagcttttgaactaatggcgagagtgtaagaaaatgggctctacttcagtgatcctgtggcaggacgtggatcaagacttggaaccgcagaaaacgaaatcccatagtagcacaaagcttggctgttcagtgaataacatttaaataatcgtaaaataaaa

SEQ ID NO: 87374 - DNA, 841 bp, Homo Sapiens
gggaaaactttttatttcattctttcctgtaggattttgctacaaataactttgggaatgaataaagtggaatggtaactttccagtggttcagaattgaattagacttcttgtgactgtgatgtttggtttccattgaaatatatgaagtgagatgtcatatcctgaatatagtttgtcttccccaattacttgatagcatgtctgtcagccagtaaagattaagaacagagtttctctaaattcctccgattattccactaaggcacattaaaatacttaattttgggaaaccagacatcacagatttctccatgaagtcctaaatcttctttaaagtcagaataggtatcttagttactgacagtattcaggtttttttctcccttggtgatatgtcattccatcagtgaaaaaatattttctcccagggataagaaaggtattctggtaatacattatcatcaatccttaaacagtaacagtcttggcacttatcacaaaaccgacccatttcttataaccagaaagattatcttagactgtccttcacattatactttacctactgccttgtaagaataagagttgctcactgtgtttacttgctgtcctccatattctccattgcaccattggtgtataacgttaagagtttcattgaatattattttaagtattacaaaaggcagcttgcttcttaatctatgcatctttggggtttttgaagaaatttaattctttgatgtaaaaagggaactgttaaaaaagttggaagctctgcacctgtgtatatatatattttagcaataaagcagcatgggctgagaatgcactgaaa

SEQ ID NO: 87375 - DNA, 1037 bp, Homo Sapiens
  misc_feature (295)..(304): n is a, c, g, or t
  misc_feature (308)..(361): n is a, c, g, or t
cagtcgacggtaccggacatatgcccgggaattcggccattacggccggggtagtaggtatattggcattgcattttatattcctctatatttaattttgaaaacctaaaagaaggattgtgcatcttgagagaaagttgagcaaatgtgatctagcggaatgttaatttgtgctgcttcttgtgcacgatagcagcagtagtatctctcttggaaataaacatcccatattatgatgtctatgaatataggtttccttttcttccttccctccctccttcccccacctttctcnnnnnnnnnnctcnnnnnnnnnnnnnnnnnnnnnnnnnnnnnnnnnnnnnnnnnnnnnnnnnnnnnnggaaatcacttattgtaaataagttgtaatccaaacctcatgtatcaatggggaattttcaaatataaatattaccaatgcattttctggttgttgtctgatttttgattgaagtataatgagaatgacatgtctgttgcttttggtttgaggacttcgctttagcttcataaatcttttggtattttagtatttcattgttttagcaggagagggcagcaaaagttcattttccctgttagtaatgctgtggttcatgatcggttttaaatttagctgtgtgtgtgtttttttaaacagcatctctttgtgagtagaggtaaaaatgaaacatttttgatatgaaaagttgcatatgaaaattatagactggttcaaccagacagtgaagacttctgatccacatcaaacttaaaatgccacaaaacaatcttccacctctggctaaaacatgctacttcatttcaaacaccacaaaatacaagctgagtcttaaacacttggaatttaaaatgtttttctttggaaatgatttgctttcttcaaagtggtaacagaaacaaaaatgaaggtgctccccaaaaagaaatgtaaccttcccctttcacagatgtgtgagaggttctgtactgtgggtgcatcataataaagaagcagtgaagagttttcaagtgaa

SEQ ID NO: 87376 - DNA, 547 bp, Homo Sapiens
ccctcctcttggccagggcactccaaagttaacctgaaaaaccggttcaggctgtgaagagaaggtggagtggacatgcctcatttatgtcctcctcccttttggaattcagcaaagctgaccagcatgaacattaacacagaccttaagtctgattagtggcatttacaatctatactctctgaagcgtgctacctggagtcttcctttgcatgataaaactttggtctccacaaccccttatcataacctagacactcctttctagtgataataactctttcaaccaattgccaataaaaaaattttgaatctacctataacctggaacctccccgctccaccttcgagttgtcctaccattctggacagaagcaatgtggatcttgcatgtatttgattgatgtctcatgtctccctaaaatgtatacaattaggctgtgcccagatcaccctgggcacatgttctcaggccctcctgaggtctctgtctcgggccattggtcactcagattcggctcagaataaatctcttcaaatattaaaa

SEQ ID NO: 87377 - DNA, 667 bp, Homo Sapiens
  misc_feature (170)..(186): n is a, c, g, or t
aaaagtccaattccccttccatatggcagctcttcaaataccatgtctccaaagtctcttctccaatccaaacaaaaggcaatttctgaaatagaaatgtaaggggaatgctagagaatacaaacaacacataaaagtctttcaaattctccaagttaatttatgtagcnnnnnnnnnnnnnnnnnacctttgcagcctgaggagtacaagcaatatgcacagtgctgggcttcaccccatttgccttaggtcttttaaacaaagcaaacctacttttcctccttcctctatcgccatttgggagagacccattatacctgatgggggaaaaaaagtataggtgatctcttgcaagaactgcacaattataaaacaaatgtttgactttgccttgcagaatcaattcccaattaattatctattaacaaattataattatttaaaattcatttgagcaactgttgatctccataccaggtgccagtgtgtgaaacaaaatgagattctttttctggcttcattccaagtcacagagaaccttttggattatacacagattcgtgttatctctatttttttccttccctcttttatggaagataattaagagctgattaatggcatgtctgactccttatgactcattctgtttttttaacgtgaact

SEQ ID NO: 87378 - DNA, 489 bp, Homo Sapiens
tatagagaaaagaggtttaatttggctcacagttctgcaggctgtacaggaagcatggctggggaggcctcagaacacttacaatcatgacaaaaggtgaaggggaggcaagcctgtcttacatggctggagcaggaggaaagtgggaggaggtggcacacacttttaaacaatcagatctcacaataactcactcactgtcatgagaacagcacccagggggatggtgttaaaacattgagaaaccacccccattatccaatcctcttccaccaggctcaacctccaaaatttaggattacaattgaacatgagattttggtggggatgcagatccaaatcatattattccacctctggtgtctcccaaatctcatgtccttctcatactgcaaaatacagttatatcttcccaacagtccctcaaagtcttaactcattccagcattaattcaaaagtccaaagtccagagtctcaacctgagacaa

SEQ ID NO: 87379 - DNA, 760 bp, Homo Sapiens
gggaataatttgatcaatgttactgaaatgctgtctcaacttttgttttatgataaaggaagtgtgtgatttccctccctctgagaaatatactgcgcttaatatttgctgtctttttcttgcttcattagagtaagtctgtcagaaagcttgaatatttttgacattcattttgattcaaagttgtcatttggttatatgtggaatctttgaaagtttggctgaaaatgcacacaaatgtgtacattctgaacattttctgaagtttctcttaattctgatttgtgtttctgttttgactttgaagttgtaacaatgatagttgtctccttcagtatttggtaaaagtgtaaagtattgataaatatgagaatgatggttttattttttaattgttacagtaagtaatccttaccacaaatgagtcatttttaaaatatgcatttttaaatgaatggcttttacagataggttaatggcaattgtactgctatattatcccagtcaaaaccaatactttcttttctttattttacaaagctttaaaaaccctggaaacaacttacttcttgcttgtgtctttccatttgatgactgggaattacttttctagataactttttttgaaactactcagtgaaatgaaaaataattacaattttaaatagctaattatatctttctaaaataaaaaagtagggctggttattagagtgccaatgaataaataacttaagcacaaaatacctagaaatgggaa

SEQ ID NO: 87380 - DNA, 632 bp, Homo Sapiens
ctgtcactattttaacattctccatcagctgtggccatgttggatttctggcacctgagcattcacatccatctgtttatagggcattatgcccactcatgaggtttattccagtttcaaaaagtcatgtgtaaaccaagattggaaatatatattccttgagaaatagagacacagacacacaagggagagtgccatatgaaaatggaggcagaatggagtgatgcatctacaagccaaggaacaccaaaaattgccagcaactactagaagctagaagaggcaagaaaggactttctagagcctttggaaagcatgattctgccacatcttgattttggacttccagcctctagaactgtgagagagtaagtttccattgttttaaaccacccaatttgtattaatttgttatagaagccctgggaaacaaataaactactttagatcagttaggaaggcttcttgaactatatgacatttaaacagagacataaatgatgagactgtcccagccaagttaaaaatatcactgggaatcaaactcactggtgttattccagctcagtggtaaatgttctactggtattttaaataattctaaaataaagtcattatttttctttgcaaaa

SEQ ID NO: 87381 - DNA, 2196 bp, Homo Sapiens
  misc_feature (1427)..(1445): n is a, c, g, or t
ggcagtaactataacggttttaaggtagcgaggcctgggtggcgaattcggcacgagggggctgggcagaggggagaggaagcacaagaagtgggagtgggagaggaagccacgtgctggagagtagacatccccctccttgccgctgggagagccaaggcctatgccacctgcagcgtctgagcggccgcctgtccttggtggccgggggtgggggcctgctgtgggtcagtgtgccaccctctgcagggcagcctgtgggagaagggacagcgggtaaaaagagaaggcaagctggcaggagggtggcacttcgtggatgacctccttagaaaagactgaccttgatgtcttgagagcgctggcctcttcctccctccctgcagggtagggggcctgagttgaggggcttccctctctgctccacagaaaccctgttttattgagttctgaaggttggaactgctgccatgattttggccactttgcagacctgggactttagggctaaccagttctctttgtaaggacttgtgcctcttgggagacgtccacccgtttccaagcctgggccaccggcatctctggagtgtgtgggggtctgggaggcgggtcccgagccccctgtccttcccacggcactgcagtcacccctgtctgccccgctgtgctgttgtctgccgtgagagcccaatcactgcctatacccctcatcacgtcacaatgtcccgaattcccagcctcaccaccccttctcagtaatgaccctggttggttgcaggaggtacctactccatactgagggtgaaattaagggaaggcaaagtccaggcaccagagtgggaccccagcctctcactctcagttccactcatccaactgggaccctcaccacgaatctcaacgatctgattcggttccctgtctcctcctcccgtcacagatgtgagccaggcactgctcagctgtgaccctaggtgtttctgccttgttgacatggagagagccctttcccctgagaaggcctggccccttcctgtgctgagcccacagcagcaggctgggtgtcttggttgtcagtggtggcaccaggatggaagggcaaggcacccaggccaggcccacagtcccgctgtcccccacttgcaccctagcttgtagctgccaaacctcccagacagcccagcccgctgctcagctccacatgcatagtatcagccctccacacccgacaaaggggaacacacccccttggaaatggttctttccccccagtcccagctggaagccatgctgtctgttctgctggagcagctgaacatatacatagatgttgccctgccctccccatctgcaccctgttgagttgtagttggatttgtctgtttatgcttggattcaccagagtgactatgatagtgaaaagnnnnnnnnnnnnnnnnnnngggacgcatgtatctggaaatggctggtaaagaggtttctaacccaccctcacgaggtgtctctcacccccacactgggactcgtgtgggcctgtgtggtgccaccctgctggggcctcccaagttttgaaaggctttcctcagcatctgggacccaacagagaccagcttctagcagctaaggaggccgttcagctgtgacgaaggcctgaagcacaggattaggactgaagcgatgatgtccccttccctacttccccttggggctccctgtgtcagggcacagactaggtcttgtggctggtctggcttgcggcgcgaggcatggtactctctggtcatagcccgaagtctcacagcagtcccaaaggaggcttacaactcctgcatcacaagaaaaaggaagccactgccagctggggggatcttgcagctcccagaagctccgtgagcctcagcctacccctcagactgggttcctctccaagctcgccctctggaggggcagcgcagactcccaccaagggccctgcgaccacagcagggattgggatgaattgcctgtcctggatctgctctaagaggccaaagctggctgccttggggaagggatgacttgacagtccgggagacacttgttcccaaagccttgacagagcactcagccgtgacttgcgaaactccatctgtggctggcaatggagcgcttggaaatttggtgctaagaatctgagctctgcattgcatttgg

SEQ ID NO: 87382 - DNA, 516 bp, Homo Sapiens
gcagttgggaaaagcagctgtgcatttaagggtagggctttctgaaggatttctgatacagtccagaaaagggaaaatgatgacacagcagttgccatcttgaaaaatgccctttcctgcggaaagggtgttttgaagtctaatacaactatcatcacaaggtccctggactaaggctggatcgtgtaatttagaatctcaaattgtattttaattaatatgctggcaacagaatcattgaaacaggcatctcattttgtcaagttcttagccgttcagtttgtcaggggctttaatattttagatatcaactaatacatagtttcaacttttaaaaatgtttgaagattgtatgtaatataggtgcctatctatagtgccttagtaatttaaatcagaaatattttataaaacttctggttgttttgcagtagccaatataggcttcatgccctcctgaagatagtttcctctgaaatgtaactttaaataaacattattccaagaaaactaaaa

SEQ ID NO: 87383 - DNA, 817 bp, Homo Sapiens
  misc_feature (620)..(658): n is a, c, g, or t
gggatcaacagaaagatccctcagttatacaaggcagtattgcctgtcacctgccacagagattccttcagtcgaatgagccttcgcaaaatggatctctaaactgaatgcacttgttttattcatctgcaaagagccatgtattcaacatcgagtgtgaaaagatctattggaaaacaacatggaatggaattctggaaattattattcattgaagaatgcagtggccaagaaaatatcaaatgtagattgttaacgcttgagaatcatggctatggtttctaatgttctggtaacaagctgttatcttttaagacattttaatgactcaaaggtacactatacatttaccattatttataccatagctaaggttaaaaatttattcactttaagttcgtattttttaatttatattaccatttatagattcattttggaaccattttaaatgtagtaatgcttattttaaaggtactattaaatatgtgaatgtttacactaattttaccgagtgggacttcaaaatttttattattgaccatgccagagaaacaattaaaggggttgactcaagaaactagttcccacacctaaccgaattaaaattcctggatagnnnnnnnnnnnnnnnnnnnnnnnnnnnnnnnnnnnnnnnttccagcagattattcccaaaaacataaaaaaaccttttggggcggccctcgggccctccaaaaagcttttctaagaacctttcccttttgggcggcgcgggggccccataagggtaaagtggaacctgggccaaaagcggtgttccccaaagggaaaa

SEQ ID NO: 87384 - DNA, 348 bp, Homo Sapiens
agggatgcaattcaacacgtaatattccctaacacaatatttccataacagtctgtagcgtcttcttcaggctaagggattggggcctcatctatcagagttgtaataaggaacaaaggttgttgaaggtatccaaagggcaatgtaacccaaaaatgtgaacaactggtatatatggagcatcaggaagagtagctaatggatgtggagcttaataccaaggcgatgggttgatttgtgcagcaaaccaccatggttcacgtttacctgtgtagcatacctgtacatcctgcacatatacccgagcttaaaagttgaaggaaaataaataaatttaatataaataaa

SEQ ID NO: 87385 - DNA, 488 bp, Homo Sapiens
gaatgctaaggaagctgtggcaactgcctaaaacgttgaaggagaatcaattcttcaactcaagatgtctgatttactgtgaatttgcccaatctttgatgacattgaaaacgttttggggcatacacactcaaaaagcaggatccaatacccaaaagaaatggaacttaatgttgtgccaaagttaaactactgcagttggtggaagttctgcaatgtaaatagaacactaattaaaaaacaacttgtaaaaatgcaatttaaattttaatacagtacatttttcttctaatatgatggagacattctgaatcttagactttctgagggggtttaatgaccactagagcttgtcctcatattcagtccagtttaatactgtatgtctagtaagatgggctatatattgcctctattctttgagatgtgattaagcttagaactttgaccaaaaattttacagtaaaaattgttagaaatgggtaaaa

SEQ ID NO: 87386 - DNA, 107 bp, Homo Sapiens
gagacagagtttaactcttgttgcccaggctggagtgagccgagatcgcgccaatggcactccattcagcttgagtgacagaggtgagaatcccatctcaaggtaaa

SEQ ID NO: 87387 - DNA, 700 bp, Homo Sapiens
  misc_feature (13)..(13): n is a, c, g, or t
  misc_feature (143)..(143): n is a, c, g, or t
atctaattagcantcacaaaccatttccagcttcagtctctgactcactaaggagctatgtgccacttgagaagtcacatcaggagactggtgtcatggtgtggtctggccaaaggtgtacatcccttcaagatcatccttgncccctaagcagcatgaaaggtctacagaattcaataagtactttgtagagggagacaaaacaaagctagttaactccagctggtggattttaaagctcaccatggtgtgtgtaaagggctcgggtgtttcaaaatttcagccagaaaggaattaacaccatcataaatcagatgaaactaggccatttggaaagcctgctagattctgcacaagccttaagaaggcagcactcaaatgcaccagcaatcaaatgcgccacctgtagacatctttagctgatgctttcagcaaggcatgctgaaacccaaaagacaggcgacctgcacagaggctcaagaagagacagagaacttcaatcctgtgagcctgaagactcaaggccagtgagggaaagagaaaggcaatctctgagacttcagttttacttaaaacaatctgttttaaatggaaatgggactgagatggcattcataggaagttaactgttttggaatataagctcatgaagatgattattagatcagttataaaaaataaaatgaagtcaacgtttaaa

SEQ ID NO: 87388 - DNA, 611 bp, Homo Sapiens
  misc_feature (129)..(189): n is a, c, g, or t
tttacctgttgactcactttctttattttttacatttgtttgaataaagaatggtcttaaatttgacttttcaaaattactctttctaggttcaggctcacatttgaaagagacatgcctggaagaaannnnnnnnnnnnnnnnnnnnnnnnnnnnnnnnnnnnnnnnnnnnnnnnnnnnnnnnnnnnntggaggaatgtgaagtcctagttatacagacttggatgttatgttaatgttgtcacagtaccaagtgtgaaacattggactgattaaataggagctgaaaatattagttttagtcgtttaaagtggagggggacagaaaactacttgctgctgtgatagcattgagggcactccaagaaacttattcacaagctgattaaccctttcagaaaaatatgctggaaataacttcagtgagacattgaggacattactggacctgaatcaaagtggtggaacatagagttagggaattcaggtactagaaaggatcacagcatttatttattgtaaagacaaattatcctcctctaaattacttaagctggctagtgatggtatattagaaaattaatagtattacataattgatactctttctg

SEQ ID NO: 87389 - DNA, 475 bp, Homo Sapiens
taaatttaaaaagatgtcctcactgcacaagtgactacgggctacaggcaaggatgggagacggaggcttcaacacaactcattgcacttagaaccgttactaaccgaaacaccatttgcttgtcaacaatgtacccttgacagcagggagaaacttctttatagtctctgcttcagacaagatttacagctttctccaaggccagaggccaatttgtgaccacaagtcttgtttcttgtccaccagacccaatcctctggcaccttgtaccccccgttcctcagcaatatgctcggcctaggttccagaggcagctggaaggaagcagctatgggctcattcagttctgtttgcccaaatccagaagccctaggaaagtcccgtctgagtcttgactcctgacccttgcagtggctggagtcggtactggtgcacacccccactcccacggtgtgggtagtgctgtgaattgga

SEQ ID NO: 87390 - DNA, 548 bp, Homo Sapiens
aataatcggggcatgggtacaacttatgaaaatttcctcatgctgaattgtaattttctcttacctgtaaagtaaaatttagatcaattccatgtctttgttaagtacagggatttaatatattttgaatataatgggtatgttctaaatttgaactttgagaggcaatactgttggaattatgtggattctaactcattttaacaaggtagcctgacctgcataagatcacttgaatgttaggtttcatagaactatactaatcttctcacaaaaggtctataaaatacagtcgttgaaaaaaattttgtatcaaaatgtttggaaaattagaagcttctccttaacctgtattgatactgacttgaattattttctaaaattaagagccgtatacctacctgtaagtcttttcacatatcatttaaacttttgtttgtattattactgatttacagcttagttattaatttttctttataagaatgccgtcgatgtgcatgcttttatgtttttcagaaaagggtgtgtttggatgaaagtaaaaa

SEQ ID NO: 87391 - DNA, 673 bp, Homo Sapiens
aaaataaacagtgtttccaaaaaacattgactacaagggggaaatgaggcaataaggttggaagaagggaaggactcaagaagaaatgctgaacctgcaaacacaatgatcagggagcatgcagagaggcccttgctgtgacactgtcctctcactgctactcctatgaagcccagtgactatgctgggacactggagctaaagggtcaaagagaagcatttcattcctaaaaggtgatgtcaatttgtacttagccccagcaatgtgaatccccctcttcacagtccaattctaagattccattcttaagaaattaccaaagatagagccaaagagatatatacaagaaactttatcacatcatcattgataataaaagtatctgaaacaaccaaaattttcaacagtgtggggatggataaggtagaaccactagaaatctattttcaaagatttaaaaacataggaagttactcgtgataccatgttaatcagtgagagggtaaagttaggataccaacctgtatctatgtatgaccttcaattttgtgtaaatatacaccttatatgcactttttaatactgaaaggaaattcataaacatatcagcaaagtttagctctgttttagatggagagaagatggctaatttttattctttgtttagattct

SEQ ID NO: 87392 - DNA, 1237 bp, Homo Sapiens
  misc_feature (23)..(24): n is a, c, g, or t
gctggtttcaaggactcaccggnnctagttctctttctgcacagtagcactggcattaactgtgacagctttacagcaggctccctccccgaggccgttcagaagcattcctcagcgggtcctacacgtttcctctcccatgtcaagtttagaagcagtgtcaagacccacagcagtcctgcgggagttttaagggatgcacggagtctatggggacagatttggaaaattgacattcatgtgacttagagtcctactacttgaaaatggattccagctctcaacgaatttagagctttggcaaaatttttaagatttctttgatgtccgatgtgctcatttcttggtttgttcttgagtattttgtggatttttatgaaatccacaaagtttttgttataatgaatgggacactttcccataaaatgttgtaattctgtattgctgttttagtaaacactgttgattgatgtatattgatgttacacttggtcacttgtaatagtttgtccgttcattattttgaactttttaggtaaacagtcatataattatgcaaataattatagttgtgtctctgcctttctaatatttatactttgtgtatattatcatgttggccaggactcaagcgtctttctcttgtttctgactaatgcgaatgattctaatgcaggggtttccaaactggtggccggggggccaaatccagccaatggtctcttcttgtaaataaagttttattggaacacagttacacacatttttctacatattgtctgatggctactgtcacgccacagcaatggtgttaaatagtccagacagaggcggtattgcccgaaaaacctagaatattcaccatctgagcttttacgggaaaatttgctaatatctgttctcatgcattaaatacaatgtttgttacaggttaaggaagtttctgactatttttagctttctgaatatcttgtggttgtgtgtgctttaaaattaggactaaatattaaatttaccagttgcttgttaggggcctatcttttgagatgcccaaagtttcccttttttagtctcttcatgtagtgagttgtactaacagattctctaatgttgaaccgtctttgctttccggagatagactttacttgctcctggtggattggattctgtttgttaatacttttatttttgggtaattacatccctattataaataatatgtcagcaaaaaataaaa

SEQ ID NO: 87393 - DNA, 475 bp, Homo Sapiens
cttcttcccccccatctatcttcctctactcgattctttctcttctgctgactaatgggtctgagcaaagtgttcacttatttcaagcttgaaagacttggaaaggtgactgtcaggactagaaagtaacattaacacttcaagatggcttatgagatttctgtggggaaatagattccttgaaactggcagtgtctgggtatacttttataggatggttcttagttccctcaaatgaatatgccttggacttagcctttggcatgcttcctttaaagctgctcaagccttaagctcaatcctgtgagaacacttctagaaacttcagtttcactttttgacaccctgagtatgtgctcagtgctctaccagaagaatccgtgcatgtctaatgggtattcaccagtacctccataagtaacttagcagatacagattaagatgctctatgaataaaacttgtgaaattttgaaa

SEQ ID NO: 87394 - DNA, 716 bp, Homo Sapiens
  misc_feature (384)..(420): n is a, c, g, or t
gcggccgccagccgcgctccatctgcaccttctgcctcagcaaccagcgcaaggggggtggccgtcgtgacctggggggcagctgcttgaaggtgaggggggtggccccccttcgagggccacggagatgagcctggaccctggagaaggaggccaggagccagccactggctggacagggaagaagaccccaggagccaagcccaccccttctttgtgtagggaccgggggaccatggcctgttccgggacactctgggcagggccctcgggacatctccacccgatcctggagagctgtgaggatccattcagcctgcccagctctggctggtcagagacaaggcagaacttttggaaaaacaaagactgttggtgacaggnnnnnnnnnnnnnnnnnnnnnnnnnnnnnnnnnnnnnagagagaattggtgagtttaaaataaaagctatttttaaataaaagacgtcgttctgagctgaggagagtcccgtggacatcggaggtcagaggtgggccctcccctggacctagagagaggcacagatgttctgggggctgccctgagccctggaagggtgggggtggggcgggggaaggcaggcagagccccctctccgggcgccataaccaaactttcctcagtctgctgtttatcagatgttcttaacaactgttaggtgtctgatatggttggtaaagaaatcttaatttt

SEQ ID NO: 87395 - DNA, 723 bp, Homo Sapiens
gggggtccaaggccacgcttggtgcacaggcaagacttgcttcagccccaggtgtggtgacttagacctaggaaaccaattatgagtggaaagtgaccctctagttcaactgtgccagaggaaacagccctccagtgcccacctgcctcactcctccctatcatgtaccgggaaaaccccctctgatggcctcaaggcagtgcctgcaggccgaggcccttctgggggtttctatctttcttccaccagactccaagcccactctcctccaagactgtgttgtcttttctcaccaagagtattaacactactaagtctttcaccttaacttatgactcaggatttattcacgtcctgcccactctaggctcacaggaataaaatcaagtgctagacacactggctgctactaaggcactagcctctgtagctggtggtggcagcgtggggtgccgcccagcgtgctgggtcctggcagtgcctctgctgtgctgcacattgagccctttctcagtcagtggagtatcaagttgggccatctgtctactgacctggccttcatgtaagcagctgtgggctgcgggcagacaggagctcagagatgcagcatgaggcgcttagaaaaacctggccatttgctgcctctaattcccttttgctttgccatattgggctatgtattacctccttgaaataataaaagaataacattttctaaaaaaa

SEQ ID NO: 87396 - DNA, 656 bp, Homo Sapiens
gtcgtttaaagaaagactttaacaggtgtcatgaagaacaaactggaatttcattctgaagcttgctttaatgaaatggatgtgcctaaaagctcccctcaaaaaactgcagattttgccttgcactttttgaatctctctttttatgtaaaatagcgtagatgcatctctgcgtattttcaagtttttttatcttgctgtgagagcatatgttgtgactgtcgttgacagttttatttactggtttctttgtgaagctgaaaaggaacattaagcgggacaaaaaatgccgattttatttataaaagtgggtacttaataaatgagtcgttatactatgcataaagaaaaatcctagcagtattgtcaggtggtggtgcgccggcattgattttagggcagataaaagaattctgtgtgagagctttatgtttctcttttaattcagagtttttccaaggtctacttttgagttgcaaacttgactttgaaatattcctgttggtcatgatcaaggatatttgaaatcactactgtgttttgctgcgtatctggggcgggggcaggttggggggcacaaagttaacatattcttggttaaccatggttaaatatgctattttaataaaatattgaaactcaccagtcatggacaa

SEQ ID NO: 87397 - DNA, 446 bp, Homo Sapiens
tgctctttggctccatactggcttcttggctcctgttctttacctgctacagtttttgtccacatagtagccagaatgattctgttgaaatgaaacagactatgtcatttaagctcaaaaacctcgaacaacttttcatctcactcagaatactatgattgtgtggaacccatattatatgacctctggctaacttgattgaatttatacctcaccattctttccttctcaaagttcactccatcagccctgactttttggtggtgaaaccaagtatgcttccattcactgcctctgcacctacatagcttctgcttgtgaagctcttcctggagacatttacttggctcacactctccaatcaagtctttgttagaatgtcccttatttgcgtgttgctccaacctaatctttataaaatggcaccctttgcatcactaaaaaaa

SEQ ID NO: 87398 - DNA, 708 bp, Homo Sapiens
gaagggtcagaccaccatccgggtactctaagtcctccctcccccttctccttcacccccaagtgtctcccacgactgccctccccgacctctagctgaccatggcatcagaggcagaaaaaacattccatcggtttgctgcgtttggagaatcatcaagcagtggcactgaaatgaacaacaagaacttctccaagctgtgcaaagactgtggcatcatggatggcaagacagtcacctccacggacgtggacatcgtgttcagcaaagtcaaggccaagaacgcccgaaccatcacgtttcaacagttcaaagaggcagtgaaggaactgggccagaagcgcttcaaagggaagagtccagatgaagtcctggagaacatttatggactcatggagggcaaagacccagccaccactggcgctactaaagcaacaacagtgggtgcagtggaccgtttgacagacaccagcaagtacaccggcacccacaaggagcgctttgatgagagtggcaagggcaagggcattgcgggacgggaagagatgactgacaacacaggctatgtgagtggttacaagggttctggcacctacgataagaagaccaagtagagaggagcttcatctcagcctgctagccccctgaccctgcatgtttaacaccagggagcttggaaaacaataaacatctgtgtgtgcagcaaaa

SEQ ID NO: 87399 - DNA, 496 bp, Homo Sapiens
  misc_feature (15)..(15): n is a, c, g, or t
aggtatatccagganagttggctggagaaccagggtcagtatccgtccttggagtttgtggctctgttgtatgccttgcatacctgtgaccaggtatccttgtttggttttggggaagacaattgcaaaaggtggtcccattactgggatgacaaatattggtttgagaacaccatgcaaaatttcccagcagaataccagatcatcttgaaactgcagtgtgagaggaagattgctgtctacggctgagatgtttccagtggagtccccaggaggcttgacaggtagccaaggggaccttgtggtgtcagagagggactagggcttcaagcagaccctggatggagattactctgctactgaataaaaccctagcttatttctctctctggatttctggtggcattaaagggctacattctattactgattctgtcttatcaccatgtgactctcttatgctgtatcttaccaaaaaataaaattaaatgagaaa

SEQ ID NO: 87400 - DNA, 650 bp, Homo Sapiens
  misc_feature (105)..(105): n is a, c, g, or t
  misc_feature (110)..(165): n is a, c, g, or t
cctacccagaaaggtggggatggtgagaccaagcccagccaaggtcccgctgatggttcccggcatgagcccaagcgccaacgaaaccgcccctacttccagcgnagacnnnnnnnnnnnnnnnnnnnnnnnnnnnnnnnnnnnnnnnnnnnnnnnnnnnnnnnngagacctcagcccctgtcaacagtggggaccccaccaccaccatcctggagtgattccaactcaactcaaaggacacccagagctgccatctggtatctgccagtttttccaaatgacctgtaccctacccagtaccctgctccccctttcccataattcatgacatcaaaacaccagcttttcaccttttccttgagactcaggaggaccaaagcagcagccttttgctttttcttttttcttccctccccttatcaagggttgaaggaagggagccatccttactgttcagagacagcaactccctcccgtaactcaggctgagaaggaaccagccagctcttacctcctcctggttgcttttcttgcccccaccccaagtttatttttgttttcccccggccccctacctctgaagccattttatgatctgtcatgtgccacctgagcctccagtaaaaacaaaaacaggctttcctgtggt

SEQ ID NO: 87401 - DNA, 305 bp, Homo Sapiens
tttccgcatcagcatccttgctgctgccgatgctggaatggctagtgatgctgttgaggcttgagatgctatctgaggagttttgtctcttgatccgaagttctttgggtgtggtttctgaggcattaagggctccctgaatgactgcctgggcctcagagttctttttcttcagaaagtctatggtttctcgcaaatccagcagctcagtgtccttctcctcggccgtctctgccaggtgtcgcaggcgggatgtcatattcaccaggctctgctcaaaagcagccaccagattagcattggca

SEQ ID NO: 87402 - DNA, 459 bp, Homo Sapiens
gtagcagtgaggacgaccagaggtcactctcgtcgccattttggttttggtgggttttggccagctcctttactgcaacctgttttatcagcaaggtctttaagacctgtattttgtgctgacctcctatctcatcctgtgacttagaatgccttaactgaccatctgggaatgcagcccaatagatttcaccctcattttgcccggctcctgtttaagatggagttgctctggttcacatgcctctaacaaatccttttagtttttcatgcttgtcacatgtttacttctaagggtataatcatgtggtttactatattattaccgattagattattttgaactacttcaattttatttattttacctcatttccattcacattttttgaaaagagcttttttatacaagagtgtaaatattttcacattgaataaatgaattgaaaacagtaaaaaa

SEQ ID NO: 87403 - DNA, 558 bp, Homo Sapiens
  misc_feature (97)..(346): n is a, c, g, or t
gtttagggctacctgaatgactgcttggcctcagagttctttttcttcagaaagtctatggtttctcgcaaatccagcagctcagtgtcctaagagnnnnnnnnnnnnnnnnnnnnnnnnnnnnnnnnnnnnnnnnnnnnnnnnnnnnnnnnnnnnnnnnnnnnnnnnnnnnnnnnnnnnnnnnnnnnnnnnnnnnnnnnnnnnnnnnnnnnnnnnnnnnnnnnnnnnnnnnnnnnnnnnnnnnnnnnnnnnnnnnnnnnnnnnnnnnnnnnnnnnnnnnnnnnnnnnnnnnnnnnnnnnnnnnnnnnnnnnnnnnnnnnnnnnnnnnnnnnnnnnnnnnnnnnnngaggtgtgtgacaccagagcaactccatcttaaataggagccgggaaaaatgaggctgaaactactgggctgcattccctgattggctaaggcattctaagtcacaggatgacatagaaggtcagcacaaaataccagtcataaagaccttgcttgataaaacaggttgcagtgaaggagctggccaaaacccaccaaaaccaaaatagaga

SEQ ID NO: 87404 - DNA, 808 bp, Homo Sapiens
  misc_feature (747)..(766): n is a, c, g, or t
gtaaatacattagctaaactgaaaagtataagtaacatgctttgttgcagccaaaaaaggtaatctgcttttttatgacagaattattatagctgagctgacttactagcttttctatactatgtatatagaagaacatgtatattgagaaagaaaacatacttatatagaggaatttatgtaaccatgactttgtaattttgagaattcctcccagtgatggtcagtattcttttggaatgtaaaccgatttaatgccaaaccaccttaacctttgtttctcagtgttccttaacagccctgccttttattaatctcaggcttttttatgaacactctcatttcagtagaatttggaaaactaagcgtggttggaatttctttgaattctgttagtaatgcccaaaagaaaagtctcaagcagtccccctatccagtcatttttatggagtttcatgttgtccactatagctggacactgaaccttttgcctaatttattataaaggcctgaccctctattgtcccatcttcacccccattccagagcagaggagtctctgtggaccatgaattgcactgtctccctcctcatttctaaatgaaaggtattagatataaatttttttgaaaggttagttgtttgagatgctaagcaggataataaatttagattttaaaatgttccctgtaaaagtcagcccatgacaaggaaatttacaaaatactagagtatctagaagggtgnnnnnnnnnnnnnnnnnnnngaaacacagacgcccaggtgtcagctctccgtttaaagaatg

SEQ ID NO: 87405 - DNA, 428 bp, Homo Sapiens
  misc_feature (231)..(231): n is a, c, g, or t
cctgactgtccccctcaccaggctctggggaggaaagggagcccatggcagaccagacccctggccggccagggtccccggggtctgcgaggaggacgttcatgggcgagtgtgtggtggtgggtgaactgcggcagaacccgagattaacagctggaaccctctcctcttgcagatgaggaaaccagggaaatcaagggtgtttgagtgactgaccgaaagtcacacagntaggaagtaaaggagccaggatacaggcccagagctctggttttatctgaaaccaaaaccagaagttcctcttccagctgccaccacctctctgagtatcagccctgctaatgacaatgataacatcagctccgcagcatcgttctaagcactgtacgttaatgcaatcagttaataaaagcatcttgccttaaaaa

SEQ ID NO: 87406 - DNA, 483 bp, Homo Sapiens
gcggccgcagcctcagcaccgcagagcggagagcggagcccggagcccgccgccccaggatggctgcagctcctccaagttactgttttgttgccttccctccacgtgctaaggatggtctggtggtatttgggaaaaattcagcccggcccagagatgaagtgcaagaggttgtgtatttctcggctgctgatcacgaaccggagagcaaggttgagtgcacttacatttcaatcgaccaagttccaaggacctatgccataatgataagcagacccgcctggctctggggagcagaaatgggagccaatgaacatgggagtgtgcatagccaatgaagccatcaacaccagagagccagctgccgagatagaagccttgctggggatggatctggtcaggcttggtttagaaagaggggaaacagctaaagaagccttagatgtcattgtcttcttgttggaagaacatggacaaggtggg

SEQ ID NO: 87407 - DNA, 458 bp, Homo Sapiens
  misc_feature (375)..(375): n is a, c, g, or t
tttaaacaagaaaactgaggcttgagagattaattggtcaagtttatacaaccagtaaatgactgggtttgtatttgactccaagaccatgcatctcaccgttatacacctctggtaccagccactgctctgttacccactaggaagttaacagaaggcccgtagtcatggatcttgggcatatcatggtagtgggcccttgatatttccttttaaaaatgattttctttttccaagctctactacaaatttgaattttccttgccgcaactatgcgccttcttcatttcctacgtctccgttcaagacccacctcttcttatgagcttgatgtggctactctctcaacacctgtgctgtttctatgccacagangctagtgtttcctttgtactgcctctcattatgtacagttgtttccgtggtccaaattttctctcatcaatgaggacagaatg

SEQ ID NO: 87408 - DNA, 580 bp, Homo Sapiens
ggccagttcaaaaattaatagccgctcattaacaatttttgggacgggagacaccctaaaagccatcacaatgactgctaatagtggttttgtcagagctgcaaacaaccagggtgttaaatttagtgtgtttatccatcagcccagagcacttactgagagtaaagaggctctagccacccccttaccaaaagactacacaactgacagtgaacactaaagataccctttaaatatttttgtggaagtaagttatttataccaaaggctgggtcttcccatctaaactggtgggaaaaaaggtctatagtaaaagtaaaactgagaactcttaaaccagtagagtttctttgtctctcatctaaagtatataacctcccaaagtagaaaaagcacaagagagaagcttatctatcaaactgtctgcattagtgcaattaagaaccgaaatacgtctatataaagctttcagctgtattgtaatactttgattcgatagggctacaactcccctactgctaaccacatttcatggaatatggctacattgcatcttgcattaaatatctggagaaaattc

SEQ ID NO: 87409 - DNA, 414 bp, Homo Sapiens
tacgcaccactttgtcccttagcgtttaaaggtttcttcccgaatctcaggccctcagctacctgcaggtaagactgggccgggcttgggttcccttattctcccagtctgtgatgaattgctttgacttctgacacctcgtatgaaaactgcacgtgcagtctgattatttagcaagactgaggcttgagggtgcgcactcctgacggggagctgagagtggaaacaggtgttgcccgaaacgaaggagtggggacttaatgtctgtattttggcgctgactttcaggtttcgtcgcgagccggctgcaagttttgaacctaagtaaacctcaatccggagggcctagcggtaaggtgggcgctgtgtctattgaggtgcttagcaataaagaaaggtagtgagttgaaaaaa

SEQ ID NO: 87410 - DNA, 275 bp, Homo Sapiens
ttgggacgaactgagccacgagcgtggctttgagggccgtccgaacgctgcaggccggccaggtccctgggcgtccaggcctggcctacgcaccactttgtcccttagcgtttaaaggtttcttcccgaatctcaggccctcagctacctgcaggtttcgtcgcgagccggctgcaagttttgaacctaagtaaacctcaatccggagggcctagcggtaaggtgggcgctgtgtctattgaggtgcttagcaataaagaaaggtagtgagttga

SEQ ID NO: 87411 - DNA, 420 bp, Homo Sapiens
ttaaccctagttattaaatgaagaaacttagttatggaaaggttatgagttgcctaaggtgacataactaacgaaaaaagcacaattcaaatctagacagtctatctccatagttcatgttcttaattattattccatactcaaaaagttctacaaaagtatgaatttttgcctcagtgataagaataccttacatttgcataaggcttacattttcacccaaggattttatggttcttaggttttaaaggcttatttttgtgtactttgtagaattagatagctgatagaaaataatcttataaatctaaataacggacatcttggtatcacctccattttgtattgttcagagcccagaaacttccaagaaccacaagttaagaacatttattgaagcctcaaataaaagtttttgat

SEQ ID NO: 87412 - DNA, 432 bp, Homo Sapiens
  misc_feature (96)..(96): n is a, c, g, or t
acaaagctcacgccctatgcagttctgagaaggtggaggcaccaggctcaaaagaggaaatttagaatttctcattgggagagtaaggtacccccnatcccagaatgataactgcacagtggcagaacaaactccaccctaatgtgggtggaccccatccagtctgttgaaggcctgaatgtaacaaaagggcttattcttcctcaagtaagggggaactcctgctttgggctgggacataagtttttctgctttcagacgcaaactgaaaaatggctcttcttgggtcttgagcttgctggcatatggactgaaagaaactatgctattggatctcctggatctccagcttgctgactgcagatcttgagatatgtcagcctctacagtcacaagagctaattcattctaataaaccaatctttctgtaaa

SEQ ID NO: 87413 - DNA, 426 bp, Homo Sapiens
  misc_feature (370)..(370): n is a, c, g, or t
tttaacattgtaagtttgtgaagcaggatgaagggagtccaggtttctatttctgtacttgtgctccctagaaggaacagagtttggaggactgtaaaagaaaagtggaggtaaaagtgtttcctccagattggaaggagatgcctgaggtgcaagggaggagcagcaggagtggtcagttggatcagatcgcagcaggtgcatttcactttcctgtagcctcatcgtcctagcaatggctcagcattccaaccatggaagctgcagaggagagtagagggacgctggatgggattccctgcatgcctttgactgatgtttctctccagggctctcacatcagcttcattatccgtgaacaccaacaaangcgcggtttcctccctcgcccttcttcctcgggatcgtgcacgcggttcacgtctc

SEQ ID NO: 87414 - DNA, 763 bp, Homo Sapiens
cttgttgaaggtcaagatgttctgcgtgagcgtgcccgtcttgtccgagaagatgtattccacctggcccaggtggtcgttgaggctggtgctgcgggccttggcaggcacgtcctgcggcttgtagtacatctgcacgtcccagtcgatgaagacgctgttccccaggtagatgaactcggacaggatgaacatggacatcgggatggtgacgctgagcaggatgaggaagctccagaagacgaagaaggactctgcggccacgctgctcccatgcacccccgagaggtagtagtggtggtctttgaattctttgactgagaaaccgaagccgaaggccaacaccaggcagacaagcaccacggagatgaagatcacaaccaccagcttgttcatcaggaggtccagcttggttctcttcaaatggatcttgccacagttcttcataatttttgtgtcaaaaccagcataaatgaccagtccatagcaggtgtctgtgttgcgaatcctgcagcctcggaggaagaggttgccaatgtccagggagtatttcttgtcattccattccaggcaccccacgaagtggtgcatccgactgttaggcgcctcacacgtcactgtgccttgaaaggacgccatcttctttatagtggccagttctttgggggtgaccatcagggcctgtcatgaacatcaagttcgtctccccagcaatgtccaccgtctccacataacacaagctgctgggctccgtgctggccag

SEQ ID NO: 87415 - DNA, 546 bp, Homo Sapiens
cctccacgctgttcacggtacagagcctcagtacccggacctcgttctgctgcccgatgcggtgactcggtcttgggcctgcagatcctgatgaggattccagtcgctgtcaaagatgaccactgtatcagctgcctgaagatttaagcccaggccaccagctcttgtgctcagcaagaaaatgaaatactgggatccaggttcattgaatttcttcagcaaagcagcacgatcttcagacttggtggtgccatcaaggcgtaggtaaaggaagttccgaaaagcaaaataatcctccatgatggtcatgagagatgtcatctggcagaaaagcagcactcggtgattagtcgctctcaattttggcagaatacgatcaagcagctcaaacttccctgaggcccgatacagttcagccccattgatgaccccatttgaatagcctaggtgttcagcaaaggattcctcaatgtgctgaaacatatatgggtggttgcagatttttctcaactgcataatagtcgtcataagtgtcttagcacctcc

SEQ ID NO: 87416 - DNA, 686 bp, Homo Sapiens
tcacagctgcagtgagctgaccccaactcaagatggaaccatcttagaacaagctcttaggataaaaagccaaagctctctaatgtgttctgtgataaagaagactatggaactgacagtccaaaccgagaaactggggagagagaggaggcattattgtcaactccaggtcatccaacctgttttaagctttttgtcagcaagaaccagccctattttattcagccctggagcggcctctccaccaggcacacagcttagcacaaagcaggcctcagatgcacgctggacaaatgtgctggtatcctctgcatccttatggccagcatgatccatccagaaacccagtggaactgagccgcgagctggattccagctcacagaacacaccaagaactctggtgaaacatcaagaactctggggggtccccccagaaaaatctggggggcactgcagagcttctgacacggctctgggggaaatcccacacggatgggcagctgcctgcatctggcactgtggaggtgggcgggcagccatggaggatggggagactcatctttctagacttctcctggggaccgcatttcctccagcctccaggtccagaccaaaatagaatgaggtaaattcagcccctttcctgcagcacactcaaggaataaacaagcaccacaaatacaaa

SEQ ID NO: 87417 - DNA, 604 bp, Homo Sapiens
atagagaagaatttagaagactactgtatttcatggctgttgcagcaaatccttctgagtttaaattacagaaagaaagtgacaaccgaatggttgtgaaaaggatattctcaaaagctattgttgacaataaaaatttatccaaaggcaaaacagatcttctggtactctttttaatggatcatcagaaagatgtttttaagattcctggaactctacataaaattgtaagtgttaagcttatggccatacagaacggaagagatccaaatagagatgcaggatatatttattgccagagaattgatcaacgtgactattccaacaatacagagaagacaaccaaagatgagctgttgaatttactaaaaactcttgatgaggattcaaaactttctgccaaagagaagaaaaaattgctaggtcaattctataagtgtcacccagacatctttattgagcattttggagactgagtttttaatatctgtatataagttgtgtattttaagaataaattatgtatcctaaatatccaatcacatttgtaagcgtggaagctctaaatttgaaactgtacttaataaaaatttttttgtataaa

SEQ ID NO: 87418 - DNA, 656 bp, Homo Sapiens
ggtgagccaccgcgcccggcctgctggggtttatttgtctagctggggcagggtagggagggtcccagtcccaacagcctgggccttgggacagggcgggggcagtgatggcccctggagccctactgggggtggtagatgtggtcttggtcttcctccggtcccaggagcacctggtgatttggcatcacccacaaccggggcctctcctcgccctggtcctcctcaggcggagggtggtacaggctgtcatggtcgggctcgggactcaggacacggcccagggtgtcctcggtctccatccaggccttggtgcctggaaggatggggcccctgccctgacctcgtggcttctcctcggtggtcaagagtttcggcttctggacagggaacagcaccaccagctggtcgtccttctccggaggctccaccacacgggcgccccaggccttctctgggtcctgctctgagggccagtgtttgacttgcatcttgatagggaccttgggtgctgggactgcacctgcctcccacagcagcacaaccaccatgctggtgaccaggaggagcctcctcatgtctggggtccgcgtctctgtagagagtgctcatggagctgcagtggctgatcccagtatctggcacccggcccagct

SEQ ID NO: 87419 - DNA, 847 bp, Homo Sapiens
caaagatgtgatgactaaagtctcgagagggccaaggctcgcccaaggttgctctgtggtgacagctttacctccttgctatgtattctcagatattgcaaacggacgagagaaaagtggagaatgaatcctggagaaaacaaggtcgttcgacgatttcgacacgtcgcatccctgagagtctctcgtgtcctgatcaactcgagaactggaggcggtgacattttagatgctgcagtgaaagccacagagccacggaaggccgagactccaccatgtttgtgatcttcacattcagcaaactcactcgcactctgcctcatcttatctctagaatgtattttaccacactgtgtcccttctttagtgggaatgtctttggccaaaaataatgaatagttctgacctgacttgctaatacccagtgataaaaggatggaatttgttgggaataaaagaaaactaagcttacaaacgagggccctgatgctccgttccgagcttggtcatctaatttccagccacaatgtggtcgagatgacatttggagaggccccaggtggacatcaatacactgtcaacctccatactcaactctaagctgtccctgggaatttcagccattcctaacctccagagggcgcccgctatgcccttactcccctaaaccaaggttccaggcagaaacacactgctggtctcttaccgggccatttccttggtctcctgccgtgcggtcgccatcttaattatgtccctcagaaggggcatccccccttctttgatcagcagagggcagtacttgtccgctgtgggataggagcagacagcagaggatcaggatggg

SEQ ID NO: 87420 - DNA, 484 bp, Homo Sapiens
agattttactgcctcacctaggatggaaataattgctttaaagtgaactggcattaaagtgaacacgtcaagactacctacttggaagctacaggagacagaaacagaaaacacgactcctgaatcatgttccattactttaatcgctaaacactgctccgtttaagctaaagagatataatggtacatttgacagatgccttcacatcaagatgagatagggccctgaaagtcgcatgttgaacctttcttaccttctacgaggatgtcactcaaaatcttttctcaattcctcttcattggctgattacacaatacagagtcattcctagtgcagcccaaccctctccccaggtgaaccttgctttacacaaaacacctgtgtataaataacctggtaatcattcaagttgtattctaaatgcaccacagagatctcactttttaaggaacactgaaataaatgctttagtgaagcaaaaaa

SEQ ID NO: 87421 - DNA, 419 bp, Homo Sapiens
caaaggccgatttaaagaccctcggccgccagctcggaagcggatggcaacttagtttccgagcgaatggcgtttattgtccaccctagtccgagggctgcagtcaactaaaccacgaggtttcacaacggcgcccgaccctgcccgcgcctcgcgcccacgcggacgcaccgaccccggccgctgcgcggtggccaacgagtcgctttcctctcgggcctttcggccgccgggctcctttccgcgagagaacactgcggcggagaaaagtcattgtcaccttcaacgtggatccctcaactccggcgactcctcaattatgcccaggctccactcacttccccgccccgagactttcggtttgcctcaaataccctccccaattaataaatacacactaaacacgagcgtaccaaaaa

SEQ ID NO: 87422 - DNA, 471 bp, Homo Sapiens
gcataagcctgcatggagcatagcgtcactgagcaagacaggtgtggaggatgagaagcgggccacaggatgggaagggaatctgtgtggaggcggtgccctaaacatgctgccttgaggagggacctctacatggggtggccgggcacagccagatgtccctggagacagcgccatctggtggaacttcctgtaacgatcgagatgttccgtctgtgccgtccaacatgggagccatgcaggacacatggtgactgagcactgggactgtgtgccgcgtgaccaagagcagctcagctctaaagtctcctccagctttatgatgtcacttcctgtatcttctctacacattctttccttcagcctgttgtttgtaagtttttatgtaggaaagtagaaaattcagaatatgtttcatcaggtttttgtttggcaaagtgtcaacatgtttataacagagttaaagataaa

SEQ ID NO: 87423 - DNA, 403 bp, Homo Sapiens
ccacctctgaaaaattattttacagcagcagttctccaagtgaggtccctggaccagcaacaatcagcattatccagaaaatgtgaattctcaggccctacccagatctgtggaagcagaaactcttggggtagagcttaacaatctgtgggttaagaagtcctctgggtaattcaaatgcatggaaatacattacagcccagtgcttcctacaggaactgaaaaaccagatggcctggatttgaattccagcttccacctcctacaggctctgtgagcttggcaagctccttaacctccctgtgcctcagtttcctcggctgtaagatggggacaatggtacctacctcacacaaatttttgagaattgatttggtgtaaataaagtacttataacaataaa

SEQ ID NO: 87424 - DNA, 411 bp, Homo Sapiens
ctggcaatgtgtatcaagaaacaacaacaaaaaattataccctttgaaccagtttggggcaggaatgtatacataagtctggaacatcttgccacaccagacacaaggatcatctgttagcgatgacaacagaaggatcatctcagaaggactcaggagccaaactaaatacactctccctgccaaaggaaatacattacagcccagtgcttcctacaggaactgaaaaaccagatggcctggatttgaattccagcttccacctcctacaggctctgtgagcttggcaagctccttaacctccctgtgcctcagtttcctcggctgtaagatggggacaatggtacctacctcacacaaatttttgagaattgatttggtgtaaataaagtacttataacaataaaaaaa

SEQ ID NO: 87425 - DNA, 451 bp, Homo Sapiens
aggcacaggtgagaagcagtgaagctgtcctcacagagttaacaagaagtctagacagaaatatagttataaataagcactaatcaggctgtactttgacccacttccttgtaacccaaagtcactagatcctgaccatttgtatccccattgttcctacagatgggatttttgacattagaattataagtcttttgtttaagagctgcttaagatgtttttcagatcccagattctaaggaaacagctaatgttaaccagtttgaagaacccatctccctgtccatgacttcacgctgcactctttgacccctcagtgatctccacactttggcccactctataatcctgaaaaacccagccgccaaatcctcagggagatggatttgaggtttcctgtcatctgttcatttggcagacctatgattaaacctttctctgctgcaaaaaa

SEQ ID NO: 87426 - DNA, 478 bp, Homo Sapiens
tttaaaatctctagggaagaagaatccagtcactcttggaaaatcaatccagtatactatataaatctatcttcttatacttcagaaccacatttccaactatctgctatacatttctacttgcatgccttatagataacacacatgcaacatgtacagagccaggtttgttacacagtggacaactgttactctttggctgaacattctactttgtttcggcaatagcaacctgatttccttctgcagaattaccttttcccctcaatatagtttgaagagagcattaataaagtccctgtttgcctctaatcaaaagagtaaaaatgaagggataggaggaagggagatccaatgcttcctccctagagaatggatgataagcaatacaacctaaacactaaagatagctggcattcgctcactctagcagcaatgccccggctggctgactgccactctgacacttcttagcctg

SEQ ID NO: 87427 - DNA, 463 bp, Homo Sapiens
ctttctcggggaagatgacacatctgaactgaggtaccctccaaagcctgttccgtaaaatcagcaaacaactgacaggataacttcaggaagtgggtattaattctcacggtataagtgaagacattaagcaccagagtttaagtagcttgatccactgaaagagattcaactgtgtggaacctatgccgcggagaattgctttctgccattgttatcgtccagcagttgccgaatagctctgacctgagcaaagcagtgaaacgcggtgctgttgagtgggttgccactgcacctttttcaactactctagtcttgtggagaaaacaccccttctaaattttttcttcattgaatactctccctcagctccagggtaccatatagagttttcttgtattttagagttactgttttatcaaagtttaccagtcttttgtattacatttctcctgtctaaatc

SEQ ID NO: 87428 - DNA, 456 bp, Homo Sapiens
tagtatattcttggaggcaaactgatgtattgaaagagaagaatttggccttctggtctatttcttgagacaggaagcctcgagagtaatatatgttttcaaatgatagcagacatctctcactcaagccatggcacagcattgccatatttattgttgatggttattactgcagaagtgcaaattaagtcaactgatagcacacgggcactcatactgcttccctaatcccaactcctatttttgaagtgttcgccaagttttaaaaacactttgtcgtgaacatgcatgtggtgtgctgaataaaaagaaaagataaatcagaagacagctgctgagatactctttaaaacaccaaaagatatttaacatcctattaaataaataacttagaaagaaatagaaagggatgaaggcagaatgcacaagcataccatactatttgtattgttagaa

SEQ ID NO: 87429 - DNA, 437 bp, Homo Sapiens
gcggtgtccctgattgagaagtgcacccggtttcacatccactgtgcccacttcatgtgtgaggagcccatgtcctcctttgatgccaagatcaaataatgagaacatgaccaagtgcctgcagagcctgaaggagatgtaccaggacctgagaaacaatggtgtcttctgtgccagcgaagcggagttccagggctacaatgttctgctcagtctcaacaagggagacatcctaagagaagtacaacagttccatcctgctgttagaaactcatctgaggtgaaatttgctgttcaggcttttgctgcattgaacagtaataattttgtgagatttttcaaactggtccagtcagcttcttacctgaacgcttgtcttttacactgttacttcagtcaggtgagtaaatgagctgtgcttgcagagttggaagaaa

SEQ ID NO: 87430 - DNA, 453 bp, Homo Sapiens
atcccacgcagggcacagatcccacgcagggcagggccagcccaaggccaggcccctcccctgtagatctccccccaggcaggaccagagccacagtcacttccacactatctccttccctagaaacctctgcagactcttcctcctctcctcgatacacaggggcccctgccacagcctgactctctgccacctcgtgagtctctggaaagcagggtcggcctctgaatacagaggacttgggtcctgccggaggatgcttggccagtgggtgctggcacgtgagcagcccccggggagtcagagtggggctgcagcgaaggccgtggtggtcgaggtgagggtggtggccaggtcttgttgccgcagtgaggattctggggttaccctaagagccaccacattcaggcactcaagaaaaagcacgtcaaaataaaatattttaacctgaaa

SEQ ID NO: 87431 - DNA, 808 bp, Homo Sapiens
  misc_feature (642)..(642): n is a, c, g, or t
  misc_feature (656)..(656): n is a, c, g, or t
cacaccaagagggtcttcctgcacaacctaagaaagaatgttgagtttctggcccagctgagcttcatggactacagtctgctggtgcgaattcatgatgtgcagagagctgaccagaagaaagtgaagtgtgagtagaccgatgggtaggagtagggcgagagcgatggcacccacccggtgtgaacccctccagatagccccgggaatacactgaacagctcaccacccatggctcccgaggagttcgatcggaacatcgacgtctatggaattaagtgccatgaaaactcgcctaggaaggaggtgtacttcatggcaattattgacatccttactcattatgatgcaaaaaagaaagctgcccatgctgcaaaaactgttaaacatggcgctggcgcggagatctccaccgtgaacccagaacagtattcaaagcgctttttggactttattggccacatcttgacgtaacctcctgcgcagcctcggacagacatgaacattggagggacagaggtggcttcggtgtagcaaaaatgaaaaccaaactcagtgaagtactcatcttgcaggaagcaaacctccttgtttacatcttcaggccaagatgactgatttgggggctactccctttacagnctacctgattttcnccagcatcgttctagcatatttctgaccttctgtgtatatcgtgtgtgtgtgtgcttggggggaggtgtagtggtcgtgccgcgctgtgtgcaatattacccagtccataaattaattttaaaacgagatccaaacttacaggtcagaaaaa

SEQ ID NO: 87432 - DNA, 563 bp, Homo Sapiens
  misc_feature (468)..(517): n is a, c, g, or t
gcgcatcactaggatgttacacaaattcttttttgtttgaaaaatgttccagagataaaagtgcaaaagaagataatgaagtgttctaatatgaaatattcaaaactgaagcatgattgtctgcttaagacacttcccaagtatacaggattaatatttcttttctcacagctggcgcggagatctccaccgtgaacccagaacagtattcaaagcgctttttggactttattggccacatcttgacgtaacctcctgcgcagcctcggacagacatgaacattggagggacagaggtggcttcggtgtaggaaaaatgaaaaccaaactcagtgaagtactcatcttgcaggaagcaaacctccttgtttacatcttcaggccaagatgactgatttgggggctactcgctttacagctacctgattttcccagcatcgttctagctatttctgactttgtgtatannnnnnnnnnnnnnnnnnnnnnnnnnnnnnnnnnnnnnnnnnnnnnnnnnattttaaaagtcataaattaattaaaacagatccactaaggtcaaa

SEQ ID NO: 87433 - DNA, 520 bp, Homo Sapiens
cctgtactctccagttctgtcgttgagtatacactcaggcttgagatacaaccaaaatttgcttgcctttctctagccactggctgccagtgagttcgtgtgatgggcacacagaaatgcacacagatgtacatacacgtatgtatgcacacacagtatatgattccataaaattcaaatgcagattaattctcctaatgagttttcagtgttgaatcgtaaatagtctgaagcaggccagtgttccttttggctgccagtcttggattagtaaaaggaggtaattctttcagattccctggttctttgccactcagagtattgtacttttgatatagaatagagaaggttacctttggtttaaaaactatttttatatactagctctttcatgtataaaacagagacaatcatcctaacaaaagagttcctgttatttttctgcacaaatgtcttgtgttgaaacactgttacagttccatataaatgtgtgctatataaaataaactttggaaataaa

SEQ ID NO: 87434 - DNA, 1399 bp, Homo Sapiens
ggcctgggtggcgaattcggcacgaggaaagaacagagccatcattcaagaagtctgcttcatgaaaaagctttccggccacccgaacattgtccagttttgttctgcagcgtctataggaaaagaggagtcagacacggggcaggctgagttcttcttgctcacagagctctgtaaagggcagctggtggaatttttgaagaaaatggaatctcgaggccccctttcgtgcgacacggttctgaagatcttctaccagacgtgccgcgccgtgcagcacatgcaccggcagaagccgcccatcatccacagggacctcaaggttgagaacttgttgcttagtaaccaagggaccattaagctgtgtgactttggcagtgccacgaccatctcgcactaccctgactacagctggagcgcccagaggcgagccctggtggaggaagagatcacgaggaatacaacaccaatgtatagaacaccagaaatcatagacttgtattccaacttcccgatcggcgagaagcaggatatctgggccctgggctgcatcttgtacctgctgtgcttccggcagcacccttttgaggatggagcgaaacttcgaatagtcaatgggaagtactcgatccccccgcacgacacgcagtacacggtcttccacagcctcatccgcgccatgctgcaggtgaacccggaggagcggctgtccatcgccgaggtggtgcaccagctgcaggagatcgcggccgcccgcaacgtgaaccccaagtctcccatcacagagctcctggagcagaatggaggctacgggagcgccacactgtcccgagggccaccccctcccgtgggccccgctggcagtggctacagtggaggcctggcgctggcggagtacgaccagccgtatggcggcttcctggacattctgcggggtgggacagagcggctcttcaccaacctcaaggacacctcctccaaggtcatccagtccgtcgctaattatgcaaagggtgacctggacatatcttacatcacatccagaattgcagtgatgtcattcccagcagaaggtgtggagtcagcgctcaaaaacaacatcgaagatgtgcggttgttcctggactccaagcacccagggcactatgccgtctacaacctgtccccgaggacctaccggccctccaggttccacaaccgggtctccgagtgtggctgggcagcacggcgggccccacacctgcacaccctgtacaacatctgcaggaacatgcacgcctggctgcggcaggaccacaagaacgtctgcgtcgtgcactgcatggacgggagagccgcgtctgctgtggccgtctgaaaatctgaataaagtatggacatgaaataatcataaaaaaaa

SEQ ID NO: 87435 - DNA, 216 bp, Homo Sapiens
gcaaaggtttcaagatgtttagccaaatataaatacataaatgtcaagttcaggtcttttaattccaaaagttggggacaaataaataactgtaaagggtggatgttcttttttcctctacaaaaacatggtcttcttaaataatgttcttacattttcttttacctgatcattacatgattctcagacttttagatttcaaggaaagtaatatcc

SEQ ID NO: 87436 - DNA, 373 bp, Homo Sapiens
aatgaatgacatacatttctacaaccatttagaaagaaatttgacaactgataataaaagacataaaatgttaatattgctagcagtgggcatccttcagcaattttttttctaaagaaataacttgaaatacaggaattccatgatcttatctgtgtggatcctaaccataacaattttaaaattataagcaaattaagtattcagtaacagcaaaatagacacatcttgaaatgttatataatatttaaaaatgaagcttataaagtctatagggcaatactgaaaaagctatgagactagtataaaaaaagtaacaagtaataatatacataacaaaaacaccagaagaaagcaaatcaaaagattaaca

SEQ ID NO: 87437 - DNA, 469 bp, Homo Sapiens
cgcagagcaacagacactcggttaccctcaggtccctgcgcccggagacagaagccacgcgggcgcgctcgaggtcctgggctctttgtcgagagcccagcgtggcgccgggccccattggttacgcgtccgctcggtgccatcctggtccctcgtccctcccccatcccggcgtccacgacccgggcgcaggccacatggtcctcggattgcccggtcccgggtccccgcaaggcgcgtctacaccacgccgctagacccacgcggcgaggggctgggcttccccgggggccacgggttccgaagtccgcccccgtccccgcctccggagctcaccgctttgagatccagaacgccgtccttggcctcctgcagcagcgacacgaacttggtagtgagcagccccaggctcttctcgtgcctgctgctgccgccccccgcgcccccgagctgcggcggcgggggcggc

SEQ ID NO: 87438 - DNA, 468 bp, Homo Sapiens
  misc_feature (396)..(396): n is a, c, g, or t
gccgcccccgccgccgcagctcgggggcgcggcgggcggcagcagcaggcacgagaagagcctggggctgctcactaccaagttcgtgtcgctgctgcaggaggccaaggacggcgttctggatctcaaagcggtgagctccggaggcggggacgggggcggacttccgaacccgtggcccccggggaagcccagcccctcgccgagtgggtctagcggcgtggtgtagacgcgccttgcggcgacccgggaccgggcaatccgaggaccatgtggcctgcgggtaaccgagtgtctgttgctctgcgtccacctgtggcagaggctcacggcgtaacgggcgctttgcccggagacaccgtggatatcgattttgctgttaagaatggatggttntaataggcgattccagttggaaccatgttcctgtagtttaaataaaaaggaggaaaaacaaaacccagtctg

SEQ ID NO: 87439 - DNA, 952 bp, Homo Sapiens
gcacccgcccccgccgccgcagctcgggggcgcggggggcggcagcagcaggcacgagaagagcctggggctgctcactaccaagttcgtgtcgctgctgcaggaggccaaggacggcgttctggatctcaaagcggctgctgatactttggctgtgaggcaaaaaaggagaatttatgatatcaccaatgtcttagagggaattgacttgattgaaaaaaagtcaaaaaacagtatccagtggaaaggtgtaggtgctggctgtaatactaaagaagtcatagatagattaagatatcttaaagctgaaattgaagatctagaactgaaggaaagagaacttgatcagcagaagttgtggctacagcaaagcatcaaaaatgtgatggacgattccattaataatagattttcctatgtaactcatgaagacatctgtaattgctttaatggtgatacacttttggccattcaggcaccttctggtacacaactggaggtacccattccagaaatgggtcagaatggacaaaagaaataccagatcaatctaaagagtcattcaggacctatccatgtgctgcttataaataaagagtcgagttcatctaagcccgtggtttttcctgttcccccacctgatgacctcacacagccttcctcccagtccttgactccagtgactccacagaaatccagcatggcaactcaaaatctgcctgagcaacatgtctctgaaagaagccaggctctgcagcagacatcagctacagatatatcttcagcaggatctattagtggagatatcatcgatgagttaatgtcttctgacgtgtttcctctcttaaggctttctcctaccccggcagatgaatacaactttaatttagatgataacgaaggagtttgtgatctgtttgatgtccagatactaaattattagattccatgg

SEQ ID NO: 87440 - DNA, 544 bp, Homo Sapiens
  misc_feature (529)..(529): n is a, c, g, or t
ctcacacaggttctgcaaagtgggcactcagttaatagtacttattacatatgagcctttcataaaatattgtgttaattataaatgtttctacttgcatcaaattatgtgagtccatggaaatgtcctaagtgtccgtcagcacataaatgaatacatgtgatatattaatataatttggcgaaaaagatgaactttttctatatgtgtgacatggctgacacttaagaaataaaacgaagtgaaataagccagacgcaaaaggacaaatgtggtatggtttcacttatatgagttacccagaataagcaactaactctataaaacaaaagtagaagagaggttacaagggggcagggcagagcctggggagttatttcttgatgggtacagaatttttgtttgaaatgatgaaaaagttttggacatcgatagtggtgatggtggcacaacattgagaatttacttaatgccactgaactttacacttaaagttaaaatgatttaacttcatgctatgtatatttancatgagtaaaaaaaa

SEQ ID NO: 87441 - DNA, 362 bp, Homo Sapiens
atggagaagaatgagactgggctggctgcacatgccaagaggctggctgcatcccctacaatatccagaactctcatcaatcctctttccatgcctcaaacggtaatctacactccaaccttccctggtaaacacatcagtacccactgaagtgtggtaccccagaagactttctgttaagctgtcagcacgattctaccgataacacggtatggcattttagcattattggatacacccatttatctttgattagagctctattaaaagactcttgtaaaaagcaaaatgtcaaaaccaagaacaaaagtgaattaaccctcctaccatacattaaaagcacatgaaataaaatcctcaaa

SEQ ID NO: 87442 - DNA, 520 bp, Homo Sapiens
tgtgggccactgtgagtccagcgccttcccttctcggtactctgtgctggtggccagtggttaccgacacaacatcacctccgtctctcagtgctgcaccatcagtggcctgaagaaggtcaaagtacagctgcagtgtgtggggagccggagggaggagctcgagatcttcacggccagggcctgccagtgtgacatgtgtcgcctctctcggtaatagcccatcctctcccctccttcctcccctgggtcacagggcttgacattctgttgggggaaacctgtgttcaagattcaaaaactggaaggagctccagccctgatggttacttgctatggaatttttttaaataaggggagggttgttccagctttgatcctttgtaagattttgtgactgtcacctgagaagaggggagtttttgctttttccctgcctttgcctggcccttttaaaccaatctttcatcattttacttccctctttgcccttacccctaaataaagcaagcagttcttg

SEQ ID NO: 87443 - DNA, 514 bp, Homo Sapiens
  misc_feature (308)..(335): n is a, c, g, or t
aggatgtcgtctctttatcgatattccagctgaactccggtgtgcaaaggcacaaagaagagtgtgcttattcagattttgaatctttttggtaccttttggttaatgacatagcctcctgaaattctggatgtcttcaaagtcagttttgcttctttatcctgaaaatcagatttacaatgctgaaggcatttcttgggcccagtgtagctcacgcaatctctgctacccataagccttgatgaagatgatacagtccggactgtgagcatggtgcttcatgtatatgtgctgccagtaacaagaannnnnnnnnnnnnnnnnnnnnnnnnnnnataaggcataaaagaaactcattccttgacatcaactgtaattccatcattccatgtctgcggatacagacaataaaaaaaatgttgtgtagtcagtactaattactgacattataagcattctcaaatgcaataaaaatgctggttgttcacgctggtagtaaaagttgccacagcct

SEQ ID NO: 87444 - DNA, 504 bp, Homo Sapiens
gcggccgccgcgcccctcccggaggccgtgagctcggcggcggtggcgtcctgcgcgggcaagctcttcgtgattgggggcgccaggcagggcggcgtcaacacggacaaggtgcagtgctttgaccccaaggaggaccggtggagcctgcggtcaccagcacccttctcacagcggtgtctcgaggctgtctcccttgaggacaccatctatgtcatggggggtctcatgagcaaaatcttcacctatgatccaggcacagatgtgtggggggaggcagctgtcctccccagccctgtggaaagctgtggagtcactgtgtgtgacgggaaggtccacatccttggcgggcgggatgatcgcggagaaagcaccgataaggtcttcacctttgaccccagcagtgggcaggtggaggtccagccatccctgcagcgctgcaccagctcccacggctgtgtcaccatcatccagagcttgggcaggtgattcagatttggacag

SEQ ID NO: 87445 - DNA, 549 bp, Homo Sapiens
ggctatgccacttcagagtctttcatgccagcgtttgagctcctctgggtaaaatcttccctttgttgactggccttcacagccatggctggtgacaacagaggatcgttgagattgagcagcgcttggtgatctctcagcaaacaacccctgcccgtgggccaatctacttgaagttactcggacaaagaccccaaagtggggcaacaactccagagaggctgtgggaatcttcagaagcccccctgtaagagacagacatgagagacaagcatcttctttcccccgcaagtccattttatttccttcttgtgctgctctggaagagaggcagtagcaaagagatgagctcctggatggcattttccagggcaggagaaagtatgagagcctcaggaaaccccatcaaggaccgagtatgtgtctggttccttgggtgggacgattcctgaccacactgtccagctcttgctctcattaaatgctctgtctcccgcgaaaaaagacaccgccaccacccgaaccaccccttgtctggccgccctcggc

SEQ ID NO: 87446 - DNA, 367 bp, Homo Sapiens
catgacgtggaaattcaggctgtgacatcaaaacgtcaccccccaggagagcgagtctattctgtgccattctgactccagtcagccttattggttccagccagtttcagccagtcagccagttttgttgcaagcagagagaattataacaagctgtttcttcgtctgtcttcttgcaaggcaagctcaaggattcttgttaaccccatggggcaaattttcactattaacattgtcttctttcggcttccacaatacgtagttactctctgcatctctgctgttgtctctctgcctactcattctcctcggttaaatcctggagttcctcaaaactcaaacccaaaaatatttgataacaaataaa

SEQ ID NO: 87447 - DNA, 507 bp, Homo Sapiens
aaaccttttgaatgtaaggaatgcgggaaggcctttagacttaattcattccttactgaacatcaacgggtcaccactggtgagaaacccttttaatgcaaaaaatgtgggaagacctttagatacagttcagcccttaaagtgcatctgagaaaacatatgagtgttataccctaagagtctgaggagtgtgggaagtgcttcgtgtgtggctcaaacattgttgaacatcggggaatttatgctggtaggaaactttcaaatgtgaagaatattggcaggtctattctcatcttataattcataatataactcagaaaacataagaatattcctttgtcatttataggtttgtaataccaatatttatactggtggaccattcagaaaaagtgggaaacgttattacttaatggttacagcactgacagcatgaacttttatatgatgcatttattctaatgtgattgtatgaacaagtgaataaaaaaccttggacctcctaaa

SEQ ID NO: 87448 - DNA, 424 bp, Homo Sapiens
  misc_feature (414)..(414): n is a, c, g, or t
gagggcaaactacgttcccattaaagccacaaggtttaaaaacctctaaccttggaaaagcacacttcaaccctctgcacaccaaacttctctactgtggtttcccctctgcccctttctccttggcgttccccatcactgcctctagggtctttacaagggacagcgaacgtaaggtttcggagctggcttcgcccccttctatttaccgggggctggtcatccttcgggccaggctgactgtctaggggtggccctcggatacctggtccccgcaggtgacccccctccctcccaccgaggaggagggcgcgtcccgctcgctccgtggagacgccgcggaggcgcacacgcctcacgcctcctcgcagaagccacaggggctgcggctctttgtcgcggccacaccggaancagcccggag

SEQ ID NO: 87449 - DNA, 564 bp, Homo Sapiens
ggggcccatgaggttttattatgtccagaagagactgaacacacagtccaatgaaaacaaacaaccaagaccacaatggggaatatccctaaacccgcttccaaagacttggcttcaaccaactcaggacatagcgattgctcagtttctatgggaaacctttctcctctggcctccccagccaacctcttacagcagactgaggaccaaattccttccaacctagaaggaccgtttgtgaacttactgcctcccctgctgcaagaggactatctcctgagcctcggggaggaggaaggcatcagcgatctcttcgatgcttacgatttggaaaagctcccactggtggaagacttcatgtgtagttgattatgcttcgtgtgaactctccttaaaaaccgatatttttttatcatggaaccagaacatctgtcatgcagtgttgtcccttcctaccttcttcctccaagagagtatcatgaagtaaactacaaacttcagaagaaagctgacattttaatgaattttttaaaaaattaataaacaaattgtctaaacaaaaaa

SEQ ID NO: 87450 - DNA, 969 bp, Homo Sapiens
  misc_feature (145)..(145): n is a, c, g, or t
  misc_feature (220)..(220): n is a, c, g, or t
  misc_feature (302)..(302): n is a, c, g, or t
gggttggagggatcatccccccggcaacccatggccagttggattttatcccccataaaagggatttggccctgagccaagatcgggcacagttttttccctttcaactgtttaaaacaaggctaaataggctgatagggctccntgcacaaaaaaacgaggggcgcttgtcacacgggggctttgagcacagttacagctggttatgctttttatcganaatgacccaagttccagcagaggaggggaagagccagacgtgaggagaggtgcagtgagggttctctacagctaagcctgtntgaatgatacgaagttccccaccaaaagcaggctttctgccctgagggacatcttccaactcccctgctccacatgagccatgcatgcttagccaatccaagtgcagagctctttgctccaggagtgaggagactgggaggtgaaatggggaaatggaagggtttggaggcagagctgaaaacagggttggaaggatttccttgaattagaagacaaacgttagcatacccagtaaggaaaatgagtgcaggggccaggggaacccgtgaggatcactctcaaatgagattaaaaacaaggaagcagagaatggtcagagaatgggattcagattgggaacttgtggggatgagagtgaccaggttgaactgggaagtggaaaaaggagtttgagtcactggcacctagaagcctgcccacgattcctaggaaggctggcagacaccctggaaccctggggagctactggcaaactctcctggattgggcctgatttttttggtgggaaaggctgccctggggatcaactttccttctgtgtgtggctcaggagttcttctgcagagatggcgctatctttcctcctcctgtgatgtcctgctcccaaccatttgtactcttcattacaaaagaaataaaaatattaacgttcactatgctgaaaaa

SEQ ID NO: 87451 - DNA, 497 bp, Homo Sapiens
acgtaaagcagtttaagtaactgaaggtgtctgctttcaatacgcataatatcagcaacacgcaggaccatccagacaccttttgtgttatgctcatgaatttgttccaataaatgtgttttctccctacccaggcagtatttcagcccctttgattcacacaccacctttgcatcgttggaaacacctttgaccagcaatggaaaataaagggaacatactgcagtttcaattgttgtgggactcaggttttctctcaacaccgcatacacacttggagacatgggaagaaggtctgatggagaatgtggctctgttgaatcacttcggcttaaagagataacaagagggcatgaagtcaggtggctgcaagtctgtgagtgacaactgtaggatattctacatgatggtgcccaaagatttagtgctatagatgaagatttttatggattgtatacactttcattaaagaaacagaatggtgaacgtaccttaaa

SEQ ID NO: 87452 - DNA, 635 bp, Homo Sapiens
cctaccaataaaggccggttgtcggctctgccattcgctgacatcctgcgagactacaaagttattatgggtgaaaacattcctgaaacccttctgaagtacctatatcctgacattcccaaagacaaagccttcggtaaacactacagctctcagccttgcgaagtttcaagaccaacagaaaggggtgacaaaggttatgttccttctgtttttatccccatctcaacaatccgaagtgattcaacagagccacattctccatcagaccttcttcccatgtctccaagtgtgtatgcggtgttgagagaaaacctgagtcccacaacaattgaaactgcaatgaagtctccttattctgctgaatgacaggataaactctgacgcaccaagaaaggaagcaaatgaaaaagtttaaagactgttctttgcccaataaccacattttatttcttcagctttgtaaataccaggttctaggaaatgtttgacatctgaagctctcttcacactcccgtggcactcctcaattgggagtgttgtgactgaaatgcttgaaaccaaagcttcagataaacttgcaagataagacaactttaagaaaccagtgttaataacaatattaacagaagaaa

SEQ ID NO: 87453 - DNA, 529 bp, Homo Sapiens
tgcggccgctcgtccgcccggcttgaggcccgcggggagcgcggcgcaattcgtcggcccgcgggggggcggcctcccggcatcttcgcggcgaccaaggactaccaggaaggggagcggctgggatggcgcgtccgcggccccgcgagtacaaagcgggcgacctggtcttcgccaagatgaagggctacccgcactggccggcccggattgatgaactcccagagggcgctgtgaagcctccagcaaacaagtatcctatcttcttttttggcacccatgaaactgcatttctaggtcccaaagacctttttccatataaggagtacaaagacaagtttggaaagtcaaacaaacggaaaggatttaacgaaggattgtgggaaatagaaaataacccaggagtaaagtttactggctaccaggcaattcagcaacagagctcttcagaaactgagggagaaggtggaaatactgcagatgcaagcagtgaggaagaaggtgatagagtagaagaagatggaaaagg

SEQ ID NO: 87454 - DNA, 558 bp, Homo Sapiens
agagggacctgttgagtcaacagctgcggggtgggcaagaactgggtggccacggcgtgcaagtggttgatcagctggacacaccgcggctccctgggtgtccagctctcaaaccgggagaggtattgcaagacttctttggcgcatgtttgaaatcccgagtggaacgcatccaagtcggactgaatgggcgatttcagagatcgctccccattctgtaaagcaattatcttctgatgctgttgctcggttaaggcggttaaagcttttaagtgtttcaaagttaattccaagactacagctttctccagatgtcccagagttgtcaatttcagatgttcaggcagtaaatctttcagctgagcaatgcattcattaattcggtctcttcttttcttttctattaatctgtgcggtaatttgtaggtatcccttggtgtcgtctcgtttcatgctcctttcgggtttacacatatacaaagaggaatagtccagtcctataaaatccctatgttccagtaactgtctctcttgcaaatgaggaattccttcgtccat

SEQ ID NO: 87455 - DNA, 494 bp, Homo Sapiens
  misc_feature (22)..(22): n is a, c, g, or t
atagaaaggcctggccacctgntctgcccacacccgggagaggacaggggcaccttggggtcttctgtgggcagatgccacatgaaagccattggagaggccactgcaggtcatatgggaggttcaggccaccagatgtggtctccacagggccaggatccaggtgctgcagagacaggggcggcttcctgcaggtcctagagctgggagctagagccacctccccagccatctgccagcccctcccaccactctgtctgccaagctgccccaaattttgcctgcagcaaagccctgcatttggtcccaggacagccctggacaagctccacccacagtggcctcagcacctcagcctcacccattgctgtggggcagcggcttcctccagaaatacacaaaggacagaaagccccgtggccctgagctgggcccgcctcctccacgagcgcccacttgtgcggctccacatccttcacccactgagcggccgc

SEQ ID NO: 87456 - DNA, 445 bp, Homo Sapiens
agcaaagtactgcatgagtaagtatctggggggcaagtgtccccactaggactcctgtcagatctggaaaaggcctgaggaatctgatacatgacttaatgcagcgtatacttgcagcctgaaaactaagtaatgacaaaatagacattcttgtcagtgtgagccattctctgagtccaaggggagtacataattcaaaccagaattggtcattttggagtttgcactcttagcagtatacagtggagtgaaatttaagaatcaatttaatttcttttcagtttttatgtacataaaacctgcttactacaagagacccagtttattattttgtgttggttaacattcataagtatatttcatcataataaggctccgtgaaattagtcattttatcatttgccaataaagacatatatctgaaaataaatgttcctgaacctga

SEQ ID NO: 87457 - DNA, 1122 bp, Homo Sapiens
  misc_feature (163)..(190): n is a, c, g, or t
  misc_feature (438)..(446): n is a, c, g, or t
atgtgggggggaattccccagcgccttagttcattggcccaggattctcccttaggaaaacaggctttgtacccatgtttcacttaccttattggggcccgcggcgcccaaacggaatgttttagaaaagcttttcgagggcccgaggccggcccgacagggnnnnnnnnnnnnnnnnnnnnnnnnnnnngatcaataccacagtttatttgtaaacatgttatatgtgtcaataatcaaattgacaacactttatagatttcattgtataatattaacatcctaacagaaaacgatccactgtactcagttacagtttggtattttaaaatccttaaatacaaattgtatttgaaacactgaacacaaaaaagaaacatgaatggcagagaaaactgaaaacaacaagtaaaagaaaccaatattccgctcccctgnnnnnnnnncataaaatcatctgattacataatttaaaaaagaaacaaaggaaatcagatgacattttttgatataaagttgcatttcttcaaatccattttagaggtgaaattgtatcaatattaaattctatgtcttttttgatatttgttctttctttcctcttggtttctaaagaatgtttgccagggtttaaattacattaaggaagcgggaaaaagaaaggaaggaacatggtaaaaagccaaatgaaattaactatttgcaaaataattggacgtaaatttttcatgaatcttctttggcaaataacaaagtctgcattttaaatttacctttttgttgaaatggatcaatgcttgtaagatttaagagattacatgagttaatgtataagtaaaacaaagccaaattcacaaagcaaggcgcaaacatcagcttttcacattttgctaaaagctctaaaaatgcactctccctccttaagaggaccagaggtcttcagctcggaatcagatgattacccttgcctcattcaacacaagaaaccagaggggaccccatggttcttcggtactttccctaaaattcatgatcactattaggttctatttcttcctcctttctctctcaaagaatagcgagcaaatcattcccatatttaagcttaatcaccaggactgc

SEQ ID NO: 87458 - DNA, 533 bp, Homo Sapiens
ggtggtgtcaacgcggaggcccacgcgcatcagcatggcccacaggacatcagacaactctgcaaaggagtgcagcctgcacaggtcatgctcgcttatgtacagtgggtccctctgtgagctacctggactgagtttccccctgacggccctgaactattatcccataaaataatagacacacatgtaacacagacccaactgtttctcatgtgaaagccagtcagctccgagacggtctcaaacactaaggaagacctggtgctccaaaaatatcagaggccacctcccaaagggaggtcttgccccagactaggtttgggttgtgacctcccaaagcgcactggaccaggcagccagaaacaggctcccaggcctggttctgccactgagggatcaactggatgaccatgagtaaagcaccgacactcagtggcttcagtcaccacctctgcaaaatggagatgaacgagacagggcccctccagccacaaaattccagacctttggctatgcttataaaaacataagca

SEQ ID NO: 87459 - DNA, 906 bp, Homo Sapiens
gcggccgccgccatgtcccaccagaccggcatctcaaggtaacagcgcccggcgcgactcgcagggaaggggcttccgggagagccgggagagccgggagggctgcaggaccggcagggctggagtcgggccgggagctccggaagtcggtctcgcggggcgagccgggcctcggcgcctctccgcgctcctgcttcccgggcgctgccggcctgcgtcctcctccagcccggtccctgctgccgtcacgttgcagattgatccgaaattcgggggagcgaaggaaattggctttcgaggcggcctggttgaagggggcgtgccttccaccgtccccgacagtcgcccaactttcccccttttggtcacgtagggaagagctgggacagtggaggcgactggggcttcagtacgctgtcgagaaccagcaagtgaagatgttaaagagatctttgccagagccagaaatggaaagtacagacttctgaaaatatctattgaaaatgtttctgcaccacagtccatttctaatgtcagtgcttccatctctggaatggaaatcactaaacagagcaacttgtgattggatcatatagtcagccttcagattcctgggataaggattatgattcctttgtttttcccctgtttggtgttacaaacaaccatgctatatattattcaggttagattctcagaatgcccagggatatgaatggatattcattgcattgtctccagatcattctcatgttcgtcaaaaaatgttgtatgcagcaacaagagcaactctgaagaaggaatttggaggtggccacattaaagatgaagtatttggaacagtaaaggaagatgtatcattacatggatataaaaaatacttgctgtcacaatcttccccctgcc

SEQ ID NO: 87460 - DNA, 441 bp, Homo Sapiens
gataatcacctgtttagtgatttccattccagagatggaagcactgacattagaaatggactgtggtgcagaaactgagacacaaaaagtaaaagaggaagaagtcacatcaaaaaacatctttctgtttccctgatagtcacataattcagaatgaaattaggggcccatagggacctgcacaaaatatgaggaatccaagttaccgtaagatttgaacttgcttcatattaattaatagttcaaatcactgacaacacacagtaagtttaaaaatacaacagccactaatccaggaacagaaaatattttaaaatatttaactaaccattttcaatagatattttcagaagtctgtactttccatttctggctctggcaaagatctctttaacatcttcacttgcttggatgccggtctggtgggacatggcggcggcc

SEQ ID NO: 87461 - DNA, 780 bp, Homo Sapiens
  misc_feature (703)..(703): n is a, c, g, or t
gggggagctagcggccgccgccatgtcccaccagaccggcatccaagcaagtgaagatgttaaagagatctttgccagagccagaaatggaaagtacagacttctgaaaatatctattgaaaatgagcaacttgtgattggatcatatagtcagccttcagattcctgggataaggattatgattcctttgttttacccctgttggaggacaaacaaccatgctatatattattcaggttagattctcagaatgcccagggatatgaatggatattcattgcatggtctccagatcattctcatgttcgtcaaaaaatgttgtatgcagcaacaagagcaactctgaagaaggaatttggaggtggccacattaaagatgaagtatttggaacagtaaaggaagatgtatcattacatggatataaaaaatacttgctgtcacaatcttcccctgccccactgactgcagctgaggaagaactacgacagattaaaatcaatgaggtacagactgacgtgggtgtggacactaagcatcaaacactacaaggagtagcatttcccatttctcgagaagcctttcaggctttggaaaaaattgaataatagacagctcaactatgtgcagttggaaatagatataacaaatgaaattataatttttggccaacacaacaaatacagaactgaaagatttgccanagaggattccccaaggattcagcctcgttacccatttcttttctggtataaaccattccccatggaaaggagacctt

SEQ ID NO: 87462 - DNA, 682 bp, Homo Sapiens
tctcccctgacaatgccaagatggctgaaggcaccaggagcttctgggctcatggaggactggcaaggcccccacccaaatgccatggacagggcccgagaattctgctgagtggcccaggaggaagtacaggggcaccgggaggtgtggggccacgatgatcttctttccacggagcacagaaaaagaaaggagcagagacagtggagcccacgtgccaaggaggcctcggcatggacaggtctcatctgtcccagcccagagctcggagcctgcacgaggacgaccttgcacgtgcccccaggcaatgtgcttcctcctcggcctccctgtccttggagcaggctgcatggcttcgttgtgggggtagcgtgtgggtcgatgtgaagcgtgtgctccatcaaagcagggggcagtgggcaaggaaggagcatttgcacgtcttgttgtcaaagttggggttggctcttctcaaaacttgccattccaaagcattatgggagggagggactttacttttctctaaaattaagatttcacttttttaaaaaatggtagaaatttccatgagcttccaccaaaggaacctgctataagtatttcccacagaggctacagacaaggcccaaggactgacagtggccacgtccaggaaggtccctgaacaggctgtgcataaggg

SEQ ID NO: 87463 - DNA, 599 bp, Homo Sapiens
aaagcagcacatgtccaacaggaaaatgaataaacaaatacagcatattcatacaatagaatcctatacagagcaactaaaataacagctagaggcaacaacacggatggatcttacaagcctgatgtggaacaagagaagcctgtccagagactaagtgaatggatttatgtggtatgcaaaaacaggcaaaaccaaatcatagtgttttgggaggtatgcttacatagtaaagctctgaaggaaaacaaagaaaaggcgactaaagagaatgacaacttacacaatgcagaatcctggattggatcctagatccaatcaacgtgtagggatgctgatcccactccaagtctagaacatcattcacatcttggacagcaaatttcacatactgatgaaggcgccgaatttcctataagaaaaaaattaaaagtcattctgcaaaatctacaagtggatagcgcaccaccactacctgggcccactgtgtccctgcaagaaagacaacgtgaaagaaggttcttgtatgcaaaggtgctttgctccttctgacagtttttcaaagtcaaacagaaagtacttctggtgaatcacaaaaa

SEQ ID NO: 87464 - DNA, 607 bp, Homo Sapiens
gggacaagacagaaaaagtcaccatctatcaacaccatcgacgtttgagtgaagaaacacacccagaagagagatgcactaacaactggggatagggatggggtcagggggagcccaagatggtgatctgcccgagactcccagagggtaatgccactcccacaatctcaggcctggtacccatcctctttccactgtgagcagagccagaaggtaggtctgttcagagtctgtgcccctggacctggggagtggatatcagatgggatatctccttccattccccggtccaggggagagtcactagttgtaccctactccattaggtcccaaatgggggccccatttcacctgtatcaggactctgagcatccccagctgccccacatcttgcctctggccctcagagaggggtgtttctgtgggtactcctcttaccccagcaaataaaaggaattgtctgaccctagaggcagatgctgcactgcactactccaatgtcttccatggagcctcaggtgctccccctctcacctggcagccccttcagctgctagtgatatcacttgttggacatttttccaataaaggttcttggacaaactga

SEQ ID NO: 87465 - DNA, 484 bp, Homo Sapiens
atccagctgtggaactacgcacagcccccagacgtgatccttgagcccaaacgtgacacctggcaaattgctgggcctttgagggtgaccgcggccaggtgaccatccaattggctcagaaggtttacctgtccaacctcacgctgcagcacatccccaagaccatctcattgtcaggcagcctggacaccgcccccaaggacttcgtcatctatggcatggagggctcccccaaggaggaggtgttcctgggggcatttcagtttcagccagaaaacatcatccagatgttcccactccagaaccagccggcccgggctttcagtgcggtcaaggtgaagatctcaagcaactgggggaacccaggcttcacttgcctgtaccgcgtgcgagtgcatggctctgtggccccgcccagagagcagcctcaccagaacccctaccctaagagagattaaaatttattctttacccccaaaaaaaa

SEQ ID NO: 87466 - DNA, 497 bp, Homo Sapiens
aaggatctaatagtttataatgcctgaatggaactcatttattggttaacagctcatatcaggagctgtgataagtaagtgtttacatacactgtctagtgcataaaaaccttagtgtttgctatcattcattctgtagccaatggcttacagtttctgtctggtcatctggaacttgaaaaatcctcaaatgccttcactcttttacctaactccctagtctttttgggaagtagttaagatatgcctgctatctttaactttggaggtagtatcaaaattttacttctttggttgtttagtgaattaatgttgaatattttctactgtcatcaaaacatattcccaaaaagtattaaaaaggaaccttagcacatttattttattaaaacaagaaaacccaaaatatataaaccttttcttattatgataataagcttatatatgtgaataagttataacctagtgtataaaaaattatttctaacaaactacaa

SEQ ID NO: 87467 - DNA, 502 bp, Homo Sapiens
  misc_feature (91)..(233): n is a, c, g, or t
gatcgtaattcctggggtcctaaaatacagctgttacagttacacaaccaccaacttttcatagaccttaatgattcccaaaatgctggcnnnnnnnnnnnnnnnnnnnnnnnnnnnnnnnnnnnnnnnnnnnnnnnnnnnnnnnnnnnnnnnnnnnnnnnnnnnnnnnnnnnnnnnnnnnnnnnnnnnnnnnnnnnnnnnnnnnnnnnnnnnnnnnnnnnnnnnnnnnnnnnagataagcccacctcccatgctcgttgtaaagtagtgctttccccgccttctcatgagatgtcttacaggggaaagtcattcttaagttaaaaacaacagcagcagcaaggcccgtacagcatgctcaggtagaaaatcacctcctagaaggagtccaacttcgggttccttcatgtagtggctcagtttgtttacctccttgcccacatttaccttcaaaaattaatcttgaaaacaaatgaaaaaaagcagaaagggatctttcaaa

SEQ ID NO: 87468 - DNA, 291 bp, Homo Sapiens
tatgaaattataaattccagagccacctttatcaccaaacataaaagcatcccactgcatacctcaacagaattgcctgcatatccttaatgtctttccaagcaattttatgcagtcagcaccctatacattagggaaggaatggatgtgtgctctatgggttcttataatagcaatgaaccttcataatcagactcattccttaattttgcttactttttcatgcagctgcattaatactacattgtcaaagacaaagacgaacatgagacatgagatatgtggagtttt

SEQ ID NO: 87469 - DNA, 828 bp, Homo Sapiens
actgcttatgacacatgaatatgcagagcttgtcaagctctttaattaagtttaaaatgctaattgagtgaatcaaaacttaaccattatggttaggctaaaaatgtcagcttgtgtttatatagtgcttacctcagtattggaaatgccatgagtttagtatcagaaggacattattactagtgcattttaaagtgataccagtcatagttgcaaaagaaagtacacaatgggaaatggaagagaaatgtagggaatcaaaacaactagttttttcctttataacggaagttttataattcatcttttatgtaagtgtaattctcattaaaaataccctaaagcttaaagtttgcaaggctgcccagcctaacccacaacagtttgatgctgccccctagcgtttgattcccttcaccttttgctaaaataaggtaatgtttaaattacaattagatttacttactgctgtaaatctggtctattttagtttcctctgggtagttagtgttgctaataagatggacgtaagtgtttttgaactggtgaattctgattgcttttagcccccagttttccaaataggggtgaattttgggtagagatagaacaatcaccaagttaccttgctccaaaaaagaaatttacgtatgggattgttttcaaagcgggaagttagctgtgtaaataacaacaattttatatatttaatctgggcttctccttatcttgaatgatataaaaatctactttctagattaatttagttccatataactttgtattgctttgactgtactgacaataaagtttgaaagtgttaaattt

SEQ ID NO: 87470 - DNA, 580 bp, Homo Sapiens
gctcacagaaaatcaagtgaagggaggattgaggccttggcttgctgtggggcatctgggcacctggacacctgggctggccacctgccaggcctggcagcgaggtcttagagcagtggctggcgcagtccccaacaggactgagaaatgttggcttaggctttcctagtctttggttgccgcttcaaggcactgactgggccctaccttcagatgaagcaccttctccatgactgctgcccttcacgtttgacctcttctaagaatccttccctaactctacctggcttcaatagcttctcttcgacattctcttgctactatgccaagagaagagaacagaaatgaaatctgataagtgtgtgcctcccacgaccatcccttatagacgcactctcgctctgctcgtagatgccgcggcccatctgtggggcctgcctgcccacgggccggaagtgttggactcaaaagcaatccatcaaatgcggagacacatttgcactgtgttctgaaatacatttttaacttttattgcattctcacagagcctaaaacaataaattcattaaaaaacagcaaa

SEQ ID NO: 87471 - DNA, 648 bp, Homo Sapiens
  misc_feature (315)..(315): n is a, c, g, or t
cacaaacctctctgcagaatgcttgggggaaatcagctgcggggggcacacaggacccactgatcagagtcatccccagagattgatgcttacagagatgaaaagccctcaaccattgtcaccaggatcagagtattgaggaaactcagggatacctgcaccctccagtgtgtcatgtggagactcacctgggaatgcaagtggccaacagtagtgaagaggatgagcttgtgtggtcaaaatgggatgtggatgtgaaatttatcctgtgctgtgcaaagtaccacagagtgagtcaccttcctcaccagtagntgttagaaagaggctgtgaaagttgtcagaatcaaaatagatccacttgtgttaaaaccctgacaaatggaactaggaatgaccatgaaggaggtttcccatgcacatactcctgataacaagaacgaccatgaatggattctgcttaaccacaacctttgatagaagccaccatgaccttataaaaatcacatctacaaggacatcttcccagcaaatcactgtttaaccctatattgatgccaaccttggtattgactctacaagcaaggaaaatactctcaaaacaatttatgtaacccacctcattttcactaataaacctatgaattg

SEQ ID NO: 87472 - DNA, 566 bp, Homo Sapiens
cgggcaaaaggtgaagagagccgccgtggcatcagtggacctgggttcccatgccagccatgtctgttacatggcaatctccccagcacttctgagcctcagggaattatcagaaacattggtgtgataataattcacctttcagggcgggagagaggacaacagcagcgttagtcaggaaagctgtggctttggaggccgactctcctttgaatcctggagcttcctccttttggctgtgtgactttgacaagacactcacccagtgcgtcttcatttcctcaagagcaaaatatttgagacaacatcacgtccatgaaacactttgcactgtgtgtgacacacgtaaatgctggtggtaccagtgtggtcatatttacacatggaagaaaggccggaaggaaaattccagatactgtggtggtgttatggcaagtttcacttaattgctttaacaatgatgctcaccataaatgtatacaaactctatttttcaattaaaaaaagatgtgaataaaatttttcccaaattttatataatgaataaatgaatataagtatgtaaa

SEQ ID NO: 87473 - DNA, 795 bp, Homo Sapiens
gatcagtataatatgtgtccagaccctgttagccttagtaaacctagtgttttacaaaataaacaagacacggaagctttcactttagaacattttttaagtaagccagaagaagagttgttcttgaatatggaaaacaatgaagaaacaagacctgttcttggttggattcctagagctggagtgaccaaacctcagaccaacctgctggagcttaagaactctttttcaaaaactggtgcacaaaagcgtttccataaatcaattctagaagaccataaagacctcagggataatgagcattcggggatgaagcaccaattctatggccataattcctattatttctataattgagatactcattcttcccttcaaaacccagcctcttgcaagaagctaaaaaatataacagaatttccttcgtattgctggattctgttttctagattaaaccacaaggaccttgttagtgaggtttacattttcaggaatttaagttagtatctggttggaggaacccagaaaaggtgatgttatgacttcttgaaaagtttaacaatttggcaataaaatattagaactagaaaaatttatagtctttaatctctcatcttcagattatacaaggaaattttccaaaatcacaaaaagcaatgtgtacaacaaagtttacatcattgtttcaccaaaaaaaattgaaaagctggaaagaactcaaatgatcaataattaatgaatgactatacaaattatagtatcttaataaaaatgagaacactgtccctttaaaaa

SEQ ID NO: 87474 - DNA, 361 bp, Homo Sapiens
caaattgacagtggggattgtggcaggccaggtttccattagcaaccagaacagtcagttttcactaatcctttactataactctggatgaatatataagttaaacatttaaagaactggaaaaactggtaactaaagtacaatggctggaatgcaaaaacaaacccattaagaccccagaccctaatgattagatacagattgaaagaaacactcctgcttgtaggtgcactcccacacataggcagagagcttaaaatgtgtatatgcactagaaaaaatattgtaactgcgttggtctgatgagttactctgaccttctccttgtaactggttgcaaaaataaactttctttttcccc

SEQ ID NO: 87475 - DNA, 482 bp, Homo Sapiens
  misc_feature (255)..(285): n is a, c, g, or t
tacaatagtgcctagtacacagtaaatgctcaataaacaactacaaggattttcaagaaatccttttagctaagtgacaaagatttacacaggcccatagatccaagaccagaaacaaagaagcctgggcctgagtaaatcaggaattaaggaaaatgtacacattaataaaaatctacctctcctcatttatattctgtgcaattagctgtctacccattgataatattgtaaacatagacaaattctgagatnnnnnnnnnnnnnnnnnnnnnnnnnnnnnnnccaaagctagttttagaaagtattttgaggattcccacttctgtaatattttttcctttaaatctctgttcaaatattaagttggcagagatcaaggagggctgatctgctacctttctatttaaccagagatttacaaattgaaggagttgagtgacctgtatatgtatctggagtaagagtgttactcaggaaaa

SEQ ID NO: 87476 - DNA, 525 bp, Homo Sapiens
caaccggtgcccttctctgccctctcctaagctctctgggtgccttcttgatccctgtgatccctgtccactggacagacatgaattcctctggcacagcactttgtgcaggatccccagccagcccttcctccacctcatttgagttgtttctttcgccgtctttcccagggtaccacaggccccttcaagatgggaccacatctacgtcagcttcgtgtccctgggtccccagcccatagaagcagtttaataaatgtttgctgaataatttaatattctgtgatctctcctacagctagctgggagctagttcagcgaaaacttgtaaggatggaattcagagaaactaaaaccccccactctgacttagctaccacggtgctatagagggaaacattaaaaagaaatgttttaatgatcagaatacacacgagtgctgatgtcagcaatcacggacctaatggcactggtactacgctactgcatatgtcctggtgtgtggttcctcttaattatggtggc

SEQ ID NO: 87477 - DNA, 341 bp, Homo Sapiens
ctcaagggggattgaacagacagcgtacagaatggaagaaaacattcacacgctatgcatacagcaaaggcctactatccagaatctataagagacttagacaaatcaacaagcaaaaaataaccccattaaaaaatgggcaaagaacatgaacagacagttttcaaaagaacacatatgtggccaacaaacatattaacacatgcataccatcactaatcattagagaatgcaaaacaaaacatcaatgagatactatctcacacgagttagaatgacttctgttaaaaataataaaaatatttccacattcaatattaaaatgttatatgagttgagat

SEQ ID NO: 87478 - DNA, 531 bp, Homo Sapiens
gcggccgcatcgggagcccggctgaaacatggcggcgcccggaggccggggccgcagcctctccggcctgctccccgcgcagacctcgctagagtacgccctgctcgacgccgttacccagcaggagaaggacagcctggtctaccagtatctgcagaaggtggacggctgggagcaggacttgtcagtacccgagtttccggaaggattagaatggctgaacacagaagaacctatttctgtctacaaggatctatgtggaaaaatagtcgtccttgatttcttcacctactgctgcataaactgtattcacctattgcctgatctccatgcattagaacacacatactctgataaaggtatctgctctttaattagtttctaacagactgtcctggcatagtcactggaagagtggctgactcattagctcataggagaatgaacatttggcaaggcttcagggattctaaaagtaatctcttatctatgaattaaagacttcatgtaccttttcataaaggattaagc

SEQ ID NO: 87479 - DNA, 378 bp, Homo Sapiens
catcattgctagggaggccctgggtcacatggcaatgcatgcttatgtagaatcctctcacatgtaggaaagtggatactggaaataataccattcatcacagccattgagcacgaaagcatccctttcagaaattatcctcattaagagactcagtagagaaaaccacctgatagatagtgattgaataaggtgaactggacccttgacctcctacacctcatggctggtggtatctcagcactcagtgattcaggcaggtgcgagatgtcctttctcttcctgccctccacagagcaaacaagcaaaaggaatcagaaagaagtctgaacatactttagattcatgttgatctctctaaagtcatatagtaaaaaa

SEQ ID NO: 87480 - DNA, 370 bp, Homo Sapiens
gaacggactccaattcttgatttgagccttgggaaccaatcaactttgtttccaagagtttatgtgaacttccctcctttaccagtaaaatctttccccccattcttcccttctccagacccgtggcttgccatagctgtacatcttggattataattctttttgttcactcccaaagaaactcagtatctttggagaattctttctttgttgtcttttagcttcccagagccaaacaagaaatattttaggttttgtgggtcatgctggcttggtcacagctattcaacttgtatcttaaaattagccatagacagtatgaatgggtgggtctctgttccaataaaaccttatcctaaacactgaaaaa

SEQ ID NO: 87481 - DNA, 387 bp, Homo Sapiens
tcatctgtaaaataaattccgggatagtcgttttgttcaaggaaatgttttgtaaattgagctcacactatataatctttattgtcctatcctgatgtataatacagcaggtataattacaccaagcgctatagttataaatatggcatgaagtgaactatggccttttatttccttccagtgtgaacacagcaggtgtgagatgtcatcttggaagacaggccttgcagaaataggcctacatccaaaatattatcttgtgactccatgaaccattcattaaccctttgtatctttgagtgaaaattttactcaaaagttgcatctggaagttcgaagaaattacttgaaataaaaataaagatttctatatagataaaacctaaa

SEQ ID NO: 87482 - DNA, 491 bp, Homo Sapiens
tcaaggggaatgagaaaaacatagccctaataagtcattaaggctatagtctgaattgtaagtcataacactatagcatgaatgcctctcccaggagcatttacttttgaaagagcttgacattgggtggacagatcaaaggaatgcatttttagtagcaaaatgttggagtccttggtaattatttggggaaataattgggtgtgatgtccttccagtccttcagataacgcacccggtgagtgaccgtgaggctcacgtaggcggccctcagtgcctgcacttaggcgggagctccgccccaggaagcttgtgatttcaggcagaaggaacaaccccaaccctgggaagaggcctgtcagtactaagatctggtatcccttctaggctgtgtgcagatttccacctttgagctaagataggatgaggcataagagtcctgcagatgggcctctttttgagggcaatgaaggggcaaagaggaagctgta

SEQ ID NO: 87483 - DNA, 404 bp, Homo Sapiens
ccagcaatatattgataatccctcatggaacccaatttctgtattttaaaaaccgacaccttcggcctcgtgtgggatggcagcttgcccaaggttaaacagcaagttaagcaggaagtggcagagttgaagttgaatttgacccttccagcttccagggaagtgctggattcattgtaatgacacatggatggtcggctgtgtccagatggaaagtctgcctcagtcttaaagcagatccgaaatgcttcatgcgtttgatgtctatagaattgtgatgtgcggatggctcctcacatctccagtgaataagttgcttttcagagaccttagaaattcatgcaacacacttcttactcggaatagggttctttgaaaaacttccttaattttcctttcagttg

SEQ ID NO: 87484 - DNA, 511 bp, Homo Sapiens
ggctgctggctttgaggagcacaagttcagaaacttcttcaatgctttttacagtgtggtggaactggtagagaaggatggctcagtgtccagcctgctgaaggtgttcaacgaccagagtgcctcggaccacatcgtgcagttcctgcgcctgctcacgtcggccttcatcaggaaccgagcagacttcttccggcacttcattgatgaggagatggacatcaaagacttctgcactcacgaagtagagcccatggccacggagtgtgaccacatccagatcacggcgttgtcgcaggccctgagcattgccctgcaagtggagtacgtggacgagatggataccgccctgaaccaccacgtgttccctgaggccgccaccccttccgtttacctgctctataaaacatcccactacaacatcctttatgcagccgataaacattgattaattttaggccatgcagtggaacctgtcacctaatgggactgcattctgaatggaaaaaaa

SEQ ID NO: 87485 - DNA, 461 bp, Homo Sapiens
tttgctgagccgccgaggggctgggtcttcgcctttatttctggtgcacgtctagaggggcccgggcagaggccacccacggtccctgaagtagggcctcagctcctccaggctgagcggagggaagtaggctccgatcctcttccgcacccaccacttgccctcggcggcgtgcctgcccccaggacggctgaacttgtacctgtagtgctctcctcggacccacctgggcgggggcctgcccgcgaaggggttgtgtgccagcagggacaaggcctcggcgtcgctggccaggagcttgccagccaggtggatgatccagtcgttgtgctcgtaggtctggaaggccgcgaaccacatcagccagtccaggcggtagtggtacggggtagatgaggcagggcccgtctgctggggtcacctggcttgcacttaacttcgtagtcctcccacatggcatc

SEQ ID NO: 87486 - DNA, 613 bp, Homo Sapiens
agccttccttacccgctgaaaagaagaatgcaaaatcctgtacgagtgcaacatatgtgcaagagcttttggcagctctcaattctcaaggtccaacctgcgtgtgcacagtgaagagcgtccattccagtgtgccttgtgccagaagagcttcactcaacttgcccacctgcagaagcaccacctggtgcacactggggagcggccccacaagtgctcggtgtgccacaagcgcttcagcagctccagtaacctcaagacccacctgcgcctgcactccggggcccggcccttccagtgcagtgtctgccggagtcgcttcacccagcacatccacctgaagctgcaccatcggctgcatgccccacagccctgtggcctggtgcacacccagctgcccctggcctctctggcctgccttgcccaatggcaccagggggcactagatcttatggcggtggcatctgagaaacacatgggctatgacatagatgaggtcaaagtgtcctcgacatcccaggggaaagcaagagcagtgagcctgagcagtgccgggactcccctggtgatggggcaggaccagaacaattaaaaatgtttcttctgtcaaaaa

SEQ ID NO: 87487 - DNA, 618 bp, Homo Sapiens
  misc_feature (546)..(546): n is a, c, g, or t
gcggccgccaaggtggctttaaccaagagagcagatccagctgagcttagaacaatatttttgaagtatgcaagcattgagaaaaacggtgaatttttcatgtcccccaatgactttgtcactcgatacttgaacatttttggagaaagccagcctaatccaaagactgtggaacttttaagtggagtggtggatcagaccaaagatggattaatatcttttcaagaatttgttgcctttgaatctgtcctgtgtgcccctgatgctttgtttatggtagcctttcagctgtttgacaaagctggcaaaggagaagtaacttttgaggatgttaagcaagtttttggacagaccacaattcatcaacatattccatttaactgggattcagaatttgtgcaactacattttggaaaagaaagaaaaagacacctgacatatgcggaatctactcagtttttattggaaatacaactggagcacgcaaagcaagcctttgtgcaacgggacaatgctaagactgggagagtcacagccatcgacttncgagacatcatggtcaccatccgcccccatgtcttgactccttttgtagaagaatgtctagtagctgctgct

SEQ ID NO: 87488 - DNA, 540 bp, Homo Sapiens
  misc_feature (33)..(33): n is a, c, g, or t
  misc_feature (239)..(239): n is a, c, g, or t
attctcaaggaaatgcttgcaaagaaacatttntcatatgcatggcccttttataatcctgttgacgttaatgctttgggactccataactactatgacgttgtcaaaaatccgatggatcttggaactattaaggagaaaatggataaccaagaatataaggatgcatacaaattttgcggcagatgttagattaatgttcatgaatttgctacaaggtacaatccctccagatcacngaaggtgtgacaatggcaagaatgcttcaggatgttttcgaaacgcatttttcaaagatccccgattgaacctgttgagagtatgcctttatgttacatcaaaacagatatcacagaaaccactggtagagagaacactaatgaagcctcctctgaagggaactcttctgatgattctgaagatgagcgagttaagcgtcttgcaaagcttcaggagcagcttaaagctgtacatcaacagctccaggtcttgtcccaagtacctttccgcaagctaaataaaaagaaagagaagtctaaa

SEQ ID NO: 87489 - DNA, 870 bp, Homo Sapiens
  misc_feature (32)..(32): n is a, c, g, or t
  misc_feature (796)..(830): n is a, c, g, or t
acaagttttgtatttgggaggggtgtttgttnttctttagagatcatacctactttcctgcctttttgataagtaaggcatgaaatgaaacaaaagttttgagctgtaaggtgcctataaaggatgtcactacagcattcacaatgctaggtgtgtaagatgacatggctgttaccatgtactaaagaaccccatcatgtgagagatcgctcaaagtcattaacacaaagcagtgaaaatcatccagcaaagcagtgcttatgagagactagaattcagagaaatgcaaggtacgaacttctctctaatccaagggtattctgctgtgatcttctaatcagtgatgattgtgcttatgcacacgacatcttcatgggagagaccaggctgattgcaaaataatgacaaccaaccagtttacctcaacatagctcactctgcaatgtcagacatgcagtgtagagcagtcacaaagtcaagccatgaatacagggatggaaaaacattccagtgagctggtctctacaatttttaagacacttcatcctcccaattatattctttgtcataaagaggaaaaacagcaagattattaaatccaaaaagtcacagatgtcacaaggggatgaaataatttcctcattttttttctttatcagtgtaggaaaagctgtctttccatagcccacactcataatagcacttcaactaggctcctttgaaaatgaaaagtgaacaagtttcccccggccgtaatggccgaattcccgggcatatgtccggtaccgtcgactgnnnnnnnnnnnnnnnnnnnnnnnnnnnnnnnnnnncggccgcttcctcgctcacctgactcgctgcgctcgtcgt

SEQ ID NO: 87490 - DNA, 354 bp, Homo Sapiens
ttttattgtttcactagtttatttttccaaatgattttttttgaaatctcaatatgagtactttcattacaagatactcacttcacatttcaccaaaatgcatgggttcacataattgttttggcagatatgttgacatatctgaatttataagacactgctacttaaactaccatctgagatcgctgcaatgtaaaatgtaaaaagtacagtgtgacacttccaaactggcttggagcataagtaaatattttttctaaaaatgtatagtgtgaccaaaggaacacatattttgaatttgaaaacacacagtgaaaagaagggaaaatgtctctccagaaaataactgctttc

SEQ ID NO: 87491 - DNA, 441 bp, Homo Sapiens
tcgggcccccaagaccggctgacgtgggcctcgcctcgggcgactcccgccgggctagtggctggccgtgtggtgaccttgggcgagttacttcgcacagccacccaggggcctcttctccaacacgatagcactgcacccggagggtaggccttcagacctgagctgaaatctacaccaccggctctctgactatcaggctttggaccatactttgggctttcctgggtctcttacctggcagacagcagattttggaacttttcagcctccataatcatttcccagaagaaccacaaagcataaatttccccaaaaggggaattttgttgatggctttagtctattccctcctaaaagaccagctacaaccaaatgaagtgaacataacctcaagggtgtattgtcttcataataaaagatgaagcttagaactggaaa

SEQ ID NO: 87492 - DNA, 680 bp, Homo Sapiens
  misc_feature (17)..(17): n is a, c, g, or t
  misc_feature (25)..(25): n is a, c, g, or t
gggaatttggccctcgnggccaagnaattcggcacgaggcgcctctcctcctcacgagctcaaagtgacaaggcagaggtgcctctcctcctccgatcgccacagcctgtctttctcagtcacaaaactgcagggatgctaaatcctgaagtccctaaatacctccccatccaactgatgccaacccactgactctccccagcagtgctctgttcagtcaagttaaatcatctttgccctgaaattgatattccaatggcttaagctaacccctcctccatagttccacccttcctaatgttaattcttttgattccatggaataaaaagcataaaatctcactcaggtagcccacaaagctcatcagcctccaaggcagagacctatgcacgaatgtgtcccatacagtgctgtatgctacaggctcatcagggccacatggcacccctcagggaagtcatagttccagtatagatggtcctgttcaatgctagcattaatgctaattataaaggactatacattattaataacactcatgtcttatctaataacaacaataaaagtaacttgccacttaccgaacatctattatatgccaagacataggcattttaataggcattttatttattcttcaagacccttggatgtttcaataaaggatttacataaatgt

SEQ ID NO: 87493 - DNA, 343 bp, Homo Sapiens; identical to SEQ ID NO: 60408

SEQ ID NO: 87494 - DNA, 305 bp, Homo Sapiens
  misc_feature (59)..(71): n is a, c, g, or t
  misc_feature (149)..(157): n is a, c, g, or t
tttagtttgaatctttatttttctggcacacttttaaaaggctgtattaaaatagtgannnnnnnnnnnnngcctcagggaacctcagtcaacaggaatacctctgtttctaacctagagaataatattgttaaaattgctttgttaannnnnnnnncctcaggaataattttctcttttggaaagcactttccccgtctcagtagaaaagtctagcagttgtaacttcttgtttcttatttgctttgggggaaatcaaagaaaacagacggtgaaggaaagggtgggaaaaattaagtctcatg

SEQ ID NO: 87495 - DNA, 797 bp, Homo Sapiens
gtattgtgtattatataacccaaacgtcacttagtagagacatatggcccccttggcagagaggacaggggtgggcttttgttcaaagggtctgccctttccctgcctgagttgctacttctgcacaacccctttatgaaccagttttggaaacaatattctcacattagatactaaatggtttatactgagcttttacttttgtatagcttgataggggcagggggcaatgggatgtagtttttacccaggttctatccaaatctatgtgggcatgagttgggttataactggatcctactatcattgtggctttggttcaaaaggaaacactacatttgctcacagatgattcttctgaatgctcccgaactactgactttgaagaggtagcctcctgcctgccattaagcaggaatgtcatgttccagttcattacaaaagaaaacaataaaacaatgtgaatttttataataaaatgtgaactgatgtagcaaattacgcaaatgtgaagcctcttctgataacacttgttaggcctcttactgatgtcagtttcagtttgtaaaatatgtttcatgctttcagttcagcattgtgactcagtaattacagaaaatggcacaaatgtgcatgaccaatgtatgtctatgaacactgcattgtttcaggtggacattttatcattttcaaatgtttctcacaatgtatgttatagtattattattatatattgtgttcaaatgcattctaaagagacttttatatgaggtgaataaagaaaagcatgattaaaa

SEQ ID NO: 87496 - DNA, 443 bp, Homo Sapiens
tctgtgagagctgctgtcagcttcccagatggtgccttattgctgcatcctttaaggtgttgaaccctgtgtcttcacatggccaaaagaagagaagggtaaaaagagccttgctagttccctctagcccttttataaggtcataggaaatgaaacagactgctgttttcatgagaagcatttacagagggaaataaggacactcaccaaatagggctaatttgaagaaggacacagctgacttagtaggaagaaggcagaagaattatctcctggtaatcaagactctgaaaataagacttaagataaaagactggatacatgcaagaacagagttcttaaagatcaccagctgaagattgtgatttttcattcttctatgccctaagacagccatattttaccatttgaaacataaataaaaatgacttccaggcttaaaa

SEQ ID NO: 87497 - DNA, 657 bp, Homo Sapiens
  misc_feature (146)..(146): n is a, c, g, or t
aattggcacgaggcggtgacgagtcgtgcccgacgtgcctcctgccggtcgctggcggcatagtactttcctcgcttttctgtccttcctccgctcgcacgatcccaccttttcacatggtgcccgtcccctaagtaagactgcanacggccaatactgccaatttttactttccgcaaccttggcaagatggggtggagaagtatgaactcggatacaatgctcttttccaaaagcaaactgaatttccaggtctcatggatgcagcacacaaccgtcctgcctgcctcctcaccgggcaccgcgtgttgcagacaattccagctggctgggggcagatatgacacagggtgcaccagcttgcggttctcagcacaaagcgtttccgcaaaaccggtctggctatatctattaggatcattccacgtcaaagtggctctccactaacatctcatggaagacggcaacaggtggccacacgggtttccactgggacccctgcaggaaaccagccagagccactgaggcagaaggctctctgctgctgtcattttaggagaatgtgaataattctccccgcccacactgccatgccccagtgatggtaaattgattaatatgcatacatcttaaaataaaaaagaaaggataaactgg

SEQ ID NO: 87498 - DNA, 766 bp, Homo Sapiens
  misc_feature (96)..(96): n is a, c, g, or t
cagccaccccggctcttgaatgggcttcggaacttggaccgaagggggagtttatctgggtggatggaagccatgtggactacagcactggggctncaggggagcccacaaccggaagccagggcgaggactgcgtgatgatgcggggctccggtcgctggaacgacgcctcttgcgaccgtaagctgggcgcctgggtgtgcgaccggctggccacatgcacgccgccagccagcgaaggttccgcggagtccatgggacctgattcaagagccagaccctgacggccgcctgcccaccccctctgcccctctccactcttgagcatggatacagccaggcccagagcaagaccctgaagacccccaaccacggcctaaaagcctctttgtggctgaaaggtccctgtgacattttctgccacccaaaacggaggcagctgacacatctcccgctcctctatcgccccttgccttcccaggagtacaccccaaacagcaccctctccagatgggagtgcccccaacagcatccctctccagatgagagtacaccccaacagcacccctctccagatgagagtacaccccaacagcaccctctccagatgagagtacaccccaacagcaccctctccagatgcagccccatctcctcagcaccccaggacctgagtatccccagctcaggtggtgagtcctcctgtccagcctgcatcaataaaatggggcagtgatggcctcccacatttgtccccttcttggaa

SEQ ID NO: 87499 - DNA, 573 bp, Homo Sapiens
gacctgatctcttgatttcagttccagggacgggtcagcttgggtcaggtgcccaccccttcaccaatcaacttgtctcaggtaacgcagtcacattatataatggctgctctggtcagtgatcatgtgaatagatacagcattttctcaaaaaaatggtcacaggggtgggggtggggcaaacaaaaatattggtgtttgatacaaggtactgaagctaagatgtgaaaccttccatatacactttaaggacttctttgtccctggaaagtgatttttctggggctccttaggtagagaggtgtattaatggtgccagtgttagaatccttggcagtctcttcttgaacctgcaactccagtggttaaatctcataggccatataaccattttctagagaattctgttcctactatctaatgcagtaactgacttaaaagtaagtattactgttagactctaacataagtggtggtatttgttttaatggaggtgggatcaggtatgtgttcacttaagctttacattaaaaaaggattggtatgtgtttataaataccaaagccttgtaga

SEQ ID NO: 87500 - DNA, 704 bp, Homo Sapiens
  misc_feature (528)..(552): n is a, c, g, or t
  misc_feature (567)..(626): n is a, c, g, or t
ataggctaggtacgaggcctgggtgtgtgaattcggcacgaggggtcgcgggcgttgtctgtgaccctgaccctggcacggagacctggacccgcccgtgggcttccagctgtacccggagatattccaggagtgtgggtgacggccttaaaagtgactatctagacattacgggaggcccgagatgggctcaggggcccgaacctctgcggcggctgcagggaggtcccagaatctagggcaagagctggccctggggtgcggacagtctgatcttgggcccttagcagcctcctctgccagcaccttgctccccactgcccagggctctccaaggccccctctactgaggcagggctgagttgagaacccccagacctacataaggggaaccaaaagctgtttctcagcccagaggtgctaagaggactgaggtagaggagaaccttgttttacccattgtctttttaaattttttatcattatttttattcttgtgaccctcccagaacacaatactcattgtcnnnnnnnnnnnnnnnnnnnnnnnnnctgagacagcttccnnnnnnnnnnnnnnnnnnnnnnnnnnnnnnnnnnnnnnnnnnnnnnnnnnnnnnnnnnnngcagtgctcaaggaatcctctcccatcagccttccaaatatctgagactacaggcgggcaacactacggccagctaat

SEQ ID NO: 87501 - DNA, 412 bp, Homo Sapiens
ttcaagggtaggatgcaaactttgtgattaaaaatataatgaaatttcaagttgcagtgagcagctctgaggtatgttcatgaacagcacacagatgcaaaacaataatctggagggttagcagtcttcccgagttcaggaggtacctttttaagaccagttcctcccgctccgacactgccaaatcagcgacactggtgcttgttcaactgaagcaaagaagggcgcagctaatcttggatccagcgtttccctaacaagggctaagagtgaagccgactttgccgcccggggcaatgtttaggaaagcaaccaaagccagcaggagggaagaaaaaggagagggatattcttggccccctgacactccgctgtgtagccggagcacgtctaaccccagcgtcttgagcaa

SEQ ID NO: 87502 - DNA, 602 bp, Homo Sapiens
  misc_feature (220)..(243): n is a, c, g, or t
tttgtgtgaacaagcacactttacttaaacataccaaatatgtgaatgtacaaatagtgtttaaaatattttgtacaatagattgtgatcactctgttaaaataccaatttgtagagaaaattgatttcagaaaaatatctaatcacagtgccccgtgaaagctgcattttttcagtatcatttaattttcaagccaagagatttggacggttgtctcannnnnnnnnnnnnnnnnnnnnnnnccattcatttgctgaacaatcatcttctgaaacattccacttctgctgtggtatcaactggcatgttaccaaaaagatgtaaatgatttaattgaattagtttaattaggtaaattaacagttaagcatatcacacacaagcttgttctgtttatactacgttatggagttaatttagtgccgaaggagaatgggcatgaccaaaattccaatgaaatgagccagattagctggcagaggggaaaaaaatacaaagataacagttgctggcattaaatctgagtaaataatttatgtgctggattcattatgtaatttgagtcatagacaaccagttgatagtcaatgagtgtgcaaaa

SEQ ID NO: 87503 - DNA, 536 bp, Homo Sapiens
actctacctctcaagcactgtgaaaaatcactttctcttgttgtattcttggagcccctgctaattcattattgaaaaatacctgctgcctgcatttggccttatgttgtcatttacttggtacttcctaagcgtggctactccaatgaagctttagtatatgtactgaaagaagatcctctcatactgccacagccaagagataaggttgtaaatctttattgggagaagccgtcaaggacagttctgtgaaatgaaaggatctctggatcaccacaaagtctggctcagtgactatggctttgcaaacactaaacattcctgtctcaagtcctgtagatggcttgaaatagtatacataagcatgccttataaacatcttcagtctttatcaactctttggagattcagccattcttttttgtactttagggaattaaatcattttataatgtataaatctaagcatggccgatggcagaagaaattttgtcatacgtttttaaagaaataaaaatgtattatgttttaaaaaa

SEQ ID NO: 87504 - DNA, 451 bp, Homo Sapiens
  misc_feature (63)..(73): n is a, c, g, or t
tttaattaaaggtcatttagtgctaggctgataaccaaggaatttaagatagtaacaaagctnnnnnnnnnnncaataaaacgagaccacagaaatgtcctcaagaagcccaatcacatctaaaatcagtttcccttctgtttgggtgaaaattctaatcgcacgattcacttaacagtaccatttaggacatttaaggatttgtggcatcatcagttctaggtagcacatgaaactgtgaagctggatgtcttatggagaaagaaaataaagattctattgaccatttaaattagacaatgaatgttgttttctaaattcatcttttataagtgtaatcacatcaccttataagcagctacttgttttctcttatttcatatttaaaaagtagctctgacaggtgagaggaagatttttccctgcatacccttttattatttttgaagtt

SEQ ID NO: 87505 - DNA, 340 bp, Homo Sapiens
tgtttcagcgcaagccggatctcccctcacacccaacagcaccaccttccgagactagcggctcattaccgcccagtccccgcggccggcgcaagaactcctcgccgggccccattccaggctgggtcgggtctttagaataaggaccagttgtgtgtctccctgtcgctggcagcggatcactttctggctgaagaaaagacaaaacgacgagggaaacaataggacctgtatgttttacacacagttctcattcgaaatgtatcatgatcatatttttaaagatgcgtgttacctttcataaatacctaaataaaacttactttctgttgaaaaaaaa

SEQ ID NO: 87506 - DNA, 1106 bp, Homo Sapiens
cactgacagcaagtcttccagtctctccagtataacttaagtgacatgccagcaagagatgcaatttggtccctcaacagtgttaaaaatctgttatttgaaagaataacttctaaaaatcaaagtttatctaaccactgaaacaaacattgacatcggccagattccactctcatatgacaatcaatgacagactttttcaatctgccaaaaactggactggaattgcaaacattcatttggccaccttggaggagaaactgaacaaatagcagcaaccccctcttccagaatgtgagagctccctccacctaagagctaaaagaagcaaatgcaaagtttttcactggttttagagaaataatgctttagatataagcaagcatcacctatataattaggtgagccctgtgcccatgaatctagtcctttctacctctgatcacttgttcagtacagtcttatctgctaacttccctaaagtaatttatttaccaattacaatggaaaaacccaagacaatattctcagaagacttcagaacccaagttctcctcctttacacgctcagctactaagaaggctttcgtttccattaatccagtatttaactgaacaaatttttaagcccttatcaccaacataaaggtgcagtagaaagaaaatgagtataacacagttcccattaccatcaagcttatggttatgaagtgtgtatgggagagatgggagaaccatatcatatggtacactatgataagagtcacaggaccgcctgttcaggctcttcatctaaggagaaacatacgtgcagacagagcgacctacagtctgtgctacaacgacatcttccacgcatcctgagctcggtgttacttaccctacagtggaaatccaaatagtccaaatatcaaccagctgtttcagtgggtatgaaaaatgggacagataatccaaagcagccttactagtaattaactattgcttctacaatgtattatgattcatcaaagcttttaatcatttatattttgcttacactattaataaaactacaatatgccctgagaacatagtaaattctagagaaatgcctatttaagaaa

SEQ ID NO: 87507 - DNA, 411 bp, Homo Sapiens
cttccttgtgtccttagccaaaatgatagctcataaaagctctggataatgtaacaaattcactttcaaaggagttcccagaagtcttcagaaagactaaaattctgtctcttcctgctttagacaggcacttaagatccccaactaattttaccgaacctaaaacccacaaagaggttgtttgtgttattgttcaatcttcagttgtaagagtaattctctatttttatattgaaacataattacttgatagctcagggtctacatttcattcaactttttacaccaaattctgcagagtggtcaaaatggaatattgggggctgttgtaaacagaggcttaattttattagaagtagccagttatttattaaagcatgatgttaataaaataggcatattctgaaaaaa

SEQ ID NO: 87508 - DNA, 538 bp, Homo Sapiens
  misc_feature (492)..(492): n is a, c, g, or t
gcggccgcgctgctggcgcgggctccggctccggaggtctgtgcggccctcaatgtcactgtgtccccggggcccgtggttgactacctggagggggagaatgccactctcctctgccacgtctcccagaaaaggcggaaggacagcttgctggccgtgcgctggttctttgcacactcctccgactcccaggaggccttgatggtgaagatgaccaagctccgggtggtgcagtactatgggaatttcagccgcagcgccaaacggcggaggctgcgcctgctggaggagcagcggggggcgctctacaggctctccgtcttgacactgcagccctccgatcaagggcattacgtctgcagagtccaggaaatcagcaggcacaggaacaagtggacggcctggtccaatggctcctcagccacggaaatgagagtcatttccctcaaagcttctgaagagtcatcctttgagaaaacaaaagagacttgngcattttttgaagatctctatgtgtatgctgtcctcgtgtgctgcg

SEQ ID NO: 87509 - DNA, 480 bp, Homo Sapiens
tatatatatatacatctgcactcatatgtttatcactgcactagtcgcagtaacaaagtcatggaatgaacctaagtttccatcaaaagatgattggataaagaaaatgtggaataccatgaaatactacacatccgtagaaaaaaattatgtcttctgcagcaacatggatgtaactggaggtcaaaatactcagaaacacaacatcaaataccacatgttctcacttataaatgggagacatgtacaaacagagaaaaatagtcaaggctggggactttaaaagaggggcttgggagggacttgagagttgaaaaattacctactggatacaatgttcattattcaggtaataggaacattagaagcccaaatctcagctttccacaatatatccatgtgacaaatctgcatatatacccactgaatctataaaaataaaatgaataaattttaaaaagcatgtttcaacacttaaaa

SEQ ID NO: 87510 - DNA, 974 bp, Homo Sapiens
cagtcgacggtaccggacatatgcccgggaattcggccattacggccggggcttttttactgcagatttactttaaggctcatattctccaagtctattctgctttaaaaagaagacaagaaaagctctcagacgatcaaaacaagtaggcaagcgtcagcctagaagcaatggcgattttctggcaagcggtctatggcccgctgaatcagacacttggaaaagaacaaaacagctcacaggacccaacctagtgatgcaatctactggagtgctcacagctacaagggaaagaaaagatgaagaaggaactgaaaaacttactaacaaacagataggttagtgaagaaaaatgcaaagtagcaatgagaaggcttatggagtaaaaatgaagtcagttggtatttaatcccaaagtgttgttctgattatctaaaatttgacatggtagaccttgcaatttagaatcaagcaggtgagacagggagaagtatgcctgcttaattatttaaactgtgtactttggttttgacactgaatattttaaaaagcaaataataaaataactaagcatttgaggaaaattttaaggataaattgaggaaactgattaatagagatagcaagggataattaaactaaatattccctatgtagcaacagtggttagatgatctttgtctgaatgtaattaaaatttgaatagttttagtgtgtccttaaagacaagtatatgctttaacattcaaatggaagtcaaattcctaatgcatagatagagagagctaaactgtgtaatttaatggtatcttctttgctggatgtggcagaatccacaccagcttatcaaccaacacagctaattttagaatagatcctttatctttccatatggcacacgtaagaaagtgtttttctactattaatattaaattaaaacctttacttttgtataataaattaaaactcagaat

SEQ ID NO: 87511 - DNA, 504 bp, Homo Sapiens
  misc_feature (62)..(62): n is a, c, g, or t
  misc_feature (68)..(68): n is a, c, g, or t
cattataaagtttagattcagacttgctctttgacatagaaagtgaagattcatctttattntgaganatatcttccttccctctttcaaaaccctggctatgaggacttgctggactaagagatggctgatgcaaatctttggttggcgttggataagcttcttttccttggcgctgactcatctttcctggtgtcagaagctgagattcgtcactgtttgcgaagttcgatcaggttctccatctgccaaacctccctccataatgaaagaagataggtttatgcttctctttccattaatgtgcagccattctgtaaatctgcaaatcccgtgcggagctcccagggaggcgggacgcaaggagccggttcctccgaggtcgccgcggcgccggggtccgaggccccgtaagcgtctagtcagaccccaacttctctcggccgctgtcgtcggcggcagctggggcgcgagcctggacgaagggcgctgcccagcggccgc

SEQ ID NO: 87512 - DNA, 516 bp, Homo Sapiens
cttcgtccaggctcgcgccccagctgccgccgacgacagcggccgagagaagttggggtctgactagacgcttacggggcctcggaccccggcgccgcggcgacctcggaggaaccggctccttgcgtcccgcctccctgggagctccgcacggcaatctccattggtgctactgcgtttaaagaactgtggctaacctccaagagactgaagctggtaattaaacattcctatccttgcctgaagcagtcttttgcaggaacatttgaagggatttgcagatttaccagaatggctgcacattaatgggaaagagaagcataaacctatcttctttcattatggagggaggtttggcagatggagaacctgatcgaacttcgcttcttggtgatagcaaagatgtccttgggccatcaactgttgtagcaaacagtgacgaatctcagcttctgacaccaggaaagatgagtcagcgccaaggaaaagaagcttatccaacgccaaccaaagatt

SEQ ID NO: 87513 - DNA, 418 bp, Homo Sapiens
ccccagctgccgccgacgacagcagccgagagaagttggggtctgactagacgcttacggggcctcggaccccggcgccgcggcgacctcggaggaaccggctccttgcgtcccgcctccctgggagctccgcacgggatttgcagatttacagaatggctgcacattaatggaaagagaagcataaacctatcttctttcattatggagggaggtttggcagatggagaacctgatcgaacttcgcttcttggtgatagcaaagatgtccttgggccatcaactgttgtagcaaacagtgacgaatctcagcttctgacaccaggaaagatgagtcagcgccaaggaaaagaagcttatccaacgccaaccaaagatttgcatcagccatctcttagtccagcaagtcctcatagcc

SEQ ID NO: 87514 - DNA, 731 bp, Homo Sapiens
ccccctgttttccatctgtgacagcttgtgagaataagcaggaatctttttatatcgagtccttaagaatcaggaatggattacaaacaaccaaaaacagtggcaaacagcaatttaagcatttactgagaagccagtaacatgtctgttacctacgtctgtttgctcaggattttataggatttccaccaacagctggaaatgtaatatttccattccaagctgtctgacagcttgactcttcttcctacactgggccatttagaaccttcaacctttatgaatttcacttaatttgcttcattattaagtaattggtagtttccagattcctgaaatatttgaatccttgagtttaatgccaaacacttttggggtggtttagatgaactctgactctattttatttcaagtaggtgctatatcccggccataaacccctatagaaaagccagaaagttgtgcttcctttgaggctattagggggctctgtggtgttttaggatgggtgtgggtaactcatctacctaaacttttaatttctttacaacattcagcaagagagggggtcagtagtctctatctgctaataaatgaagaaaggaagtaaactctgaaaaataataaacatgtttatactctcattttaggtattatttttatttctgaagctggatgctcaaaaattaaaacgtttataagtttctaaattaaacttaatttataaaaga

SEQ ID NO: 87515 - DNA, 1268 bp, Homo Sapiens
  misc_feature (81)..(115): n is a, c, g, or t
agacttatagactcactatgggcgccctcttagcagccgaacgacgagcgcagcgagtcatgtgagcgaggaagcggccgnnnnnnnnnnnnnnnnnnnnnnnnnnnnnnnnnnncagtcgacggtaccggacatatgcccgggaattcggccattacggccgggggaggcgaccggctccgcagcaagatggcggacgagaaggacagggaagggcctgggatacaacagtgatgagataaggcctcggactttactgatcgaacatctaatggaaggtggaagaagagaccatcacacaatgacggtgttatggggaacacaggagataatagtagcagaatttcacaaaaaaatcaaagaggcatttgaagtctttgaccatgagtcgaataatacagtggatgtgagagagattggaacaattatcaggtcattaggatgctgtcctacagaaggagagctgcatgatctgattgcagaggtagaggaagaagaacccactggatacattcgattcgaaaaatttcttccggtgatgacagaaatactactagaaagaaaatacagaccaattccagaagatgtccttcttcgagcttttgaggttttagattcagctaaacgtgggtttcttactaaggacgagctgatcaagtatatgactgaagaaggtgagcctttttctcaagaggaaatggaagaaatgttgtctgctgcaattgatccagaatcaaattcaattaattacaaggactatataacaatgatggtgatagatgaaaattaaatgttctaaagataatttctgattgaaagaacaattttagaaattgcttgttcttgttaatttcacatcttatcttaggattcctatatgtgatatttaataccttgtgacataactattttaagacactttgtttttaaagatgatcgtaacactttaaaccaaatttagtatgtctagccttacagaatgataaattactatttatttaaaaactattcttaaaacattttaacattagaatggattgttgtttattttctacaataaaactcaggtcaccttcgaattaattaagctgacaaaatgaaaatgacttaattacccaaggtttggcatgtaaagatcttaagagggggcagaacgaaccactcgaaaacgagtagcagtgtaatgaaggcttcttttttaaacaataacaaatgcttcatcaatctgagtgtggaaggtgatttatcaaaataaatattactaattg

SEQ ID NO: 87516 - DNA, 840 bp, Homo Sapiens
ggggttcccgcaaggtcgctttgcagagcgggagcgcgcttaagtaactagtccgtagttcgagggtgcgccgtgtccttttgcgttggtaccagcggcgacatgacggggtacactccggatgagaaactgcggctgcagcagctgcgagagctgagaaggcgatggctgaaggaccaggagctgagccctcgggagccggtgctgcccccacagaagatggggcctatggagaaattctggaataaatttttggagaataaatccccttggaggaaaatggtccatggggtatacaaaaagagtatctttgttttcactcatgtacttgtacctgtctggattattcattattacatgaagtatcatgtttctgaaaaaccatatggcatagttgaaaagaagtccagaatattccctggtgatacaattctggagactggagaagtaattccaccaatgaaagaatttcctgatcaacatcattaaagattatgtaaaaagttaaaaggcttatgagcctaagtttgttcctatattaccatatttactgaattttctggaaaagtaactttaataaagtttaatctcagaaattgtcatatctgttttcaagcattgtacaatttgagactgagtaatttaacaataagtaaaaagtggacatgctaaacaaatatgagagactacctactttttctggtcattcttgacttggaaaacggtatggaaaagtatttagttacatgtttgtttgtttttttcttacacagtacttacactaatttggtatcagggtatgcaacagtgaaatatcacaataaacaaatgtaagaacag

SEQ ID NO: 87517 - DNA, 641 bp, Homo Sapiens
ggagagcggaggcgcagccgggcggagggcccacgagggctcagccttcccggtcagcggtggtgacggtatcccagagtgccagagaaccgttgcttttccgagttgctcttcttccaggctccgttggtggtcggcatggcccgtggaaatcaacgagaacttgcccgccagaaaaacatgaagaaaacccaggaaattagcaagggaaagaggaaagaggatagcttgactgcctctcagagaaagcagagggactctgagatcatgcaagaaaagcagaaggcagctaatgagaagaagtctatgcagacaagagaaaagtgatgactggctatttggaaaacctgggtgctactgccaactgggtgtatcataagctctaagatcaagattttgtagagtggacagtcattacatatgttataacttatcctttaaaaactattttaaactttatcctttcagctttacttagtgcgatgttttagaagcagtcttcaaagaataaaacactaaccatgcatgtgacatattggtgaacattatttttattattgaacattcatatataatttattaggtaatatgatcagataataggatctcttatataataaagaatctttgtcatcaaaaaa

SEQ ID NO: 87518 - DNA, 844 bp, Homo Sapiens
  misc_feature (564)..(640): n is a, c, g, or t
  misc_feature (654)..(662): n is a, c, g, or t
  misc_feature (669)..(677): n is a, c, g, or t
  misc_feature (683)..(683): n is a, c, g, or t
  misc_feature (692)..(760): n is a, c, g, or t
  misc_feature (797)..(797): n is a, c, g, or t
  misc_feature (799)..(801): n is a, c, g, or t
  misc_feature (811)..(811): n is a, c, g, or t
  misc_feature (834)..(834): n is a, c, g, or t
ggggttgtgggtcggtgggcggggcggctggctggccgagcgaggcgtcgccacatcgagggcccttgtggggctcagccttcttcagcgcccggcggcaacggctgagcgtgcaaagccgccgtttgcttctccaggtcgctgtcttccagtctccggccggtggacagcatggcccgtggaaatcaaagagaaattgcccgacagaaaaacatgaaaaagacccaggaaattagcaaagggaaaagaaaagaggacagcttgactgcctctcagagaaagcagagggattcagagatcatgcaacaaaagcagaagatagccaatgagaagaaatctatgcagacaacagaaaaatgatgactggctttttggaaaacctgggtgctattgccagtgggtgcatcatacgctctaagattaaaatttcacagtgactaatcattatatgtgtcataacttgtccttataaaactattttaaactttactcttcagcctatcttaatgtgacgcttttccacccttttaagcaccctcccgaactcaaagatcttacccttgnnnnnnnnnnnnnnnnnnnnnnnnnnnnnnnnnnnnnnnnnnnnnnnnnnnnnnnnnnnnnnnnnnnnnnnnnnnnngcccgtaatctatnnnnnnnnngccaccnnnnnnnnnccgtanttcttttannnnnnnnnnnnnnnnnnnnnnnnnnnnnnnnnnnnnnnnnnnnnnnnnnnnnnnnnnnnnnnnnnnnngcgggtccatacctgatccgctcccgccgtcacccantnnncccctgcccnccccccccttgtcaaacccgtanagcccgcctt

SEQ ID NO: 87519 - DNA, 634 bp, Homo Sapiens
ccgccccggtctcgttgtacccgggggcgccctcgccccttcccctcccccttcccggcgcactcggggggctgggaacgagctgccatgtgatgcgcgtcccctccgcgagctttcggtgacccacgaactgcccacctcgccggctgccgggagggggctgcgagccgggaagacgcggggaagaggaggcggaaaaggacgcaaagttctccggcgagtgcagctgtctgcttcagaaagtgagggctccaggaatgaggagaatcttcaagaacttcctcgcactgtgacatgtctgatcccttgctcccatccctgcagcatgaacaaggtggacactcactgacctgtcacaaggttgccccacaaaactttggggtccatgtctgaatggattgccagagccttctcatctctcccttcgcccagttccctgcatcctaagactcgaaggcagcacaggacctggaaaaaatacatggtgtgaacggcatgtctgtggatgagaagcctgactcccccatgtatgtgtatgaagtccacagtccactgcaccaacatcctcctgggcctcaatgaccagcgggaaaaggatattctctgtgaccgtgacttgatcgtggagaggagg

SEQ ID NO: 87520 - DNA, 388 bp, Homo Sapiens
attctcctcattcctggagccctcacttcctgaagcagacagctgcaaatgatcagaaagcatgctttcatctggctttatcattcaacttcccaggcaaagatgatcaacagcaacactcttatctgctgtgcgtcaagggctcatcagcttggtcccaaatgatgtcttcagtaggtggcgaaatgttaaaactgggagctatgtgaacgaacgcgctcgccggagaactttgcgtccttttccgcctcctcttccccgcgtcttcccggctcgcagccccctcccggcagccggcgaggtgggcagttcgtgggtcaccgaaagctcgcggaggggacgcgcatcacatggcagctcgttcccagccccccgagtgcgccgggaa

SEQ ID NO: 87521 - DNA, 461 bp, Homo Sapiens
aaattaaaaagactgcccataccaaatgttgacaaggatgtgcagcacttgggactctcatacccagatgatgaaaatgtagaatggtgcaaccactttggaaaacagtttggtggtttcttagaaaggatcttcatgttgtagatgtatgtgaaattggccaaaattttcatccctgtttatataaacattctttgaaatgtgactttgcagctcctccaatcaacagctagaatctgtttcccgacctcttgaatcagacttgctttggccaatcaattgctgtggaagtggcagtatgccagtttcaagcctaggccttaaaaggacttgggcactttcactctcctggagccctccctgcaggatgagaggtttcaggataacctcgccttaataatcaaaatccccccctttaatgttaaaataaatacacatatcgtggtacgtaaattcccaaa

SEQ ID NO: 87522 - DNA, 204 bp, Homo Sapiens
ggcctaggatgttgtctatgaaggaaaatgttctatgagctattgataaaagtgtgtatcctaaggttattgatgggtgccctctatacctttgttaggaataattgttttatactgccttcaagttgtctgttttcttactaatattctgtcttgttttatttttattacagaaagtgcaatattaaagtatacaataattaa

SEQ ID NO: 87523 - DNA, 321 bp, Homo Sapiens
ctgttagtaccttctttcccggagtcctggtccacgagttggatttactgctgtcgcgggtgggcctcacgccattccctgtccctcggccccctgagggaaaatgcctaaaaaaaagactggtgcgaggaagaaggctgagaaccgccgagaacggtgaaaaacaactaaggagcatcaagaagcactatagatttagctaaacatccatgtaatgcctcaatggtatcagctttttttgatatcagttggtagttggaaaaactatatactattatatctcacgtatacctgaataaaatttttgttgaggccagaaaa

SEQ ID NO: 87524 - DNA, 394 bp, Homo Sapiens
atcggctgtcagcctccctggctgttagtaccttctttcccggagtcctggtccacgagttggatttactgctgtcgcgggtgggcctcacgccattccctgtccctcggccccctgagtgagtccggtctcccggcgaaagtgagcgaggtttgcccggagcgcgcacgaggggaaaatgcctaaaaaaaagactggtgcgaggaagaaggctgagaaccgccgagaacgtgaaaaacaactaagagcatcaagaagcactatagatttagctaaacatccatgtaatgcctcaatggtatcagctttttttgatatcagttggtagttggaaaaactatatactattttatctgacgtatacctgaataaaattttagtgaagacagtgaaa

SEQ ID NO: 87525 - DNA, 1024 bp, Homo Sapiens
gggaaggcgctgctgtcgtaaaaggacgtccggtccgtctcctagtgtccggaatcggctgtcagcctccctggctgttagtaccttctttcccggagtcctggtccacgagttggatttactgctgtcgcgggtgggcctcacgccattccctgtccctcggccccctgagtgagtccggtctcccggcgaaagtgagcgaggtttgcccggagcgcgcacgaggggaaaatgcctaaaaaaaagactggtgcgaggaagaaggctgagaaccgccgagaacgtgaaaaacaactaagagcatcaagaagcactatagatttagctaaacatccatgtaatgcctcaatggaatgtgacaagtgtcagaggcggcagaagaatagagcattttgctacttttgtaattctgtacagaagttaccaatttgtgcacagtgtgggaaaacaaagtgcatgatgaagtcttcagactgtgtcataaagcatgctggtgtatacagtactggccttgcaatggtgggtgcaatatgtgacttctgtgaagcttgggtttgccatggtaaggaaatgtctcagtacacatgcttgtgcctgccctcttaccgatgctgaggtgtgttgaatgtgaacgaggcgtgtgggaccatggaggcaaaatattcagttgttctttttgccataactttctctgtgaagatgatcaatttgagcatcaagccagctgccaggttttagaggcagaaacatttaaatgtgtttcatgcaatcggcttggtcagcactcatggtctcggttggtagggcttggtttctgggatgatcataccagggagcaaagtggtttaagcaagaaaaaaggaaaacagcctcctttgtcctaaatgggggcatgaaactccgggagactaaggaccttagcatggcaacacgctccctgaaatttggcagggcaaactgggaggtgaaaaagggaaatggaccttcctgggggatgaaggcttattgggaagaaacttttctc

SEQ ID NO: 87526 - DNA, 1083 bp, Homo Sapiens
ttttacaattttaaaagttacaagatttatattcatatgactaaattacatataataaaaatacaatagtgttaaatgtattgtttcattgccagcatcccattttgtaatatagccacacccaagaatatactaaagaattcttaaaatattaaccccaattgcattttcatcaacatttacatctgtacagataagacacttacttgtacatctcataaaagtacattatctacataaattcttagtgtatgtcttcagcaatatgaagtttcacagaaaaaatactgcctatatgtacaaagattacataacaatgaattaagcacttgtgtggttcaatatgctaaatatatccataccacttaaaacaaaattttccccatcttatctcatgccacaataaattacaaagtaactgaagacaggttactgcagcttttgtacagcttcaagcatccattaatgttgcagtggtagtgttctttctttctagagttaactgtcaaagcacaacaattctcagtaactgttttcatgacccgccaggatgtacaaattgctatttgctgtggggttatcagttggcctactttccaaaaccacgaccctgtcagatccaagcagcctgaaaattcttgtgctatctgaaatttcttgtgttacctcattagatctaaaacttctaccttgcattccatgtttccagaaagctagcacactgtcttgtaggcacactattgattcaatctggaaatcaaaggtgagttctgatgacaatttcctgctagattttaatcttccttggagatttactatttttatacaacagtccaagcatacaaagatggtatctctctccagttgggttacatgagtaacatttgtctgtggggtatctgattctgtaaaccatgaagaggtagaatttggattgaccgtctcaaacccacgcgtccgtgagaattgtattggtggctaccattcctttgctgattgttttcgtactacagttcaattttgacagtttgtgcaaggtattatttcatttccatacaaatgtgttgaacagaaaaagtaaaa

SEQ ID NO: 87527 - DNA, 391 bp, Homo Sapiens
acaaaaggaaatttacagagactgaaagcagaagtgaacaaaggacttgtcagaattgccagtactttctattctagctgcaaatcccgataaaaggttctctcactactgttaggctacttttccagtataatcttccatattcttcacttaccagttgaactttgtgcttattgaagttctgttgtatttttcaaacctgtgtattcgaattgtacttattattaatatataattaatattgtgtaaattgataaaatcttgtgaaaaaaataaaattttttatttggcaagctagattggatgctttggaaagacttcataaaagcaaatggctacatactggtttgaattaagtgtaggtaatttaagacattagagtgaaaatagt

SEQ ID NO: 87528 - DNA, 487 bp, Homo Sapiens
tttctgtgctttttctttgagttctctggagtagatattaatttgataccttcatggtaatgaaattatgatggagctgtgttataaattccttatgtcagaggccagtgcggtagcctttgtcccttcatgcctttcaattctgagtgggaggaaaagcaaacatcaaaacagtgcttcagccaaattccatatgtaatgccattgggagagtattgactaaaatatcattcgtcagggaaatatagttgtaatatttttacaggatattcctaggtaaatgaaggagccttcagttgtaaatttcaattaccccaaaatgtatttgctacattttgttgtttgaagtattacctcttaaccttctttgttaatttttttcattttgtcttatatagtccagttttccaagataagctcagtcctttttcaaatgtcacctttttaccaatactttttcattaaattatgaaaactgctaaaaaaa

SEQ ID NO: 87529 - DNA, 380 bp, Homo Sapiens
agcaccatagggattaccttgtcagaggaaatgtagtagtggaagtgttttggtaaatgggctgtttcctctggaaaatactcatatagtcattgctattgtggttgcttctgtgattttactgtttcttctctatgcctcatgtctatggaaacttcttcttagatataataatttttctgtttatcttgctctggtctaagagccaccatctgtttactatgtattgttttgtataaataaaccctcagaaaagcacagtattttgtttaattccaagttcttgccatgggaacagcttacttgtgaactgtgcctacttatgtcttccaccccaaccctcttttcttcctggggaaataccttgggatactgttaaa

SEQ ID NO: 87530 - DNA, 1697 bp, Homo Sapiens
  misc_feature (44)..(94): n is a, c, g, or t
  misc_feature (692)..(702): n is a, c, g, or t
  misc_feature (838)..(856): n is a, c, g, or t
  misc_feature (961)..(1020): n is a, c, g, or t
  misc_feature (1038)..(1038): n is a, c, g, or t
  misc_feature (1128)..(1128): n is a, c, g, or t
  misc_feature (1273)..(1273): n is a, c, g, or t
  misc_feature (1278)..(1336): n is a, c, g, or t
  misc_feature (1480)..(1480): n is a, c, g, or t
  misc_feature (1634)..(1634): n is a, c, g, or t
agtatgaagtcgacggcgcgccgaattcggcacgaggcctaggnnnnnnnnnnnnnnnnnnnnnnnnnnnnnnnnnnnnnnnnnnnnnnnnnnncgggcagtgaagctcatcctccacagtggctgcctcctcatttggctcctggggcctgcagtggaggttctcgcacctctgcagcccctagattcctggcaacctcccctcccctgacacatacacacttggacaaatggaatgtttatgtccacctttatgaaagttctggagtcctgggtctggggtttgctggtccccaaagaggaacacactgggtgtaagatctgggtgtagagggcggcttcagagagactcacgcttgcgcagttggaattgctgttaacggagactgggaagatcttttgtgccaagatgcagggaaatgaagaaagctctttccagctgtttttatggattcatggagtgggctcatgttgggaccagctgactctgggaggaagactgcctctccatcgctgtcagagagcctgaaaggaccaacaatgaggtgttcttgggacccgccatggggatgattgcttctctaggctcctggatgttgctgcattctaagcttaacctcctggtctcatggcagtgacttgagcttttgattcatagaagaaagccagaggttctgcttgtacaacaatannnnnnnnnnnactgccacaccctcctcccgccctcagaccaccacccctctcggcccaacccctccaataaccgacgctatatactctggcgcgcccccctccgccccctcaacaacctttcccaacccccactctccgtttcggnnnnnnnnnnnnnnnnnnnaaggaaaaaagagcaactgctggccctaaaaagattggttttcccacacgggcaacacccccccgggcacagatagcggtacacgcccggcctcccgcctctctnnnnnnnnnnnnnnnnnnnnnnnnnnnnnnnnnnnnnnnnnnnnnnnnnnnnnnnnnnnngcaggaccaccgcctccncagcacagacaacccaacatcacacctccacacgagtcacggcgcgcgcctcttcccgcgccgcagaagcggtccagcaccttatctccncccgggggccgccacacaccacctcctcacttcccgcccactacgacaacccgcgacaggaccgaacccctccccgcccccacgcccctagcggagccggggaacaggcctcttgccgcgcgtaaaacagtcctttcccatagtncaccnnnnnnnnnnnnnnnnnnnnnnnnnnnnnnnnnnnnnnnnnnnnnnnnnnnnnnnnnnngagcacaccatcccccctcacaaacagaccgacgactcaaaacaagcgccggcagtgtaaagggaaggcctatactcccgcagctcggtaatcggatgcgaggggggtggttgttgtggaccccccggcgagcgcagaaatatnctggtaaatacacatcccgctcctacgagaggtagggggagcgcgagcatggcaaagtttggggagactgctagcgtacccccagaggtatctaccagcggcccggagccgctgcaggcgtcagcatggatacacactcacccctcttctgctnccccccggactgtcggggtcgatatatttcgtgtacgtgttggtgacccgcacccagcttgag

SEQ ID NO: 87531 - DNA, 482 bp, Homo Sapiens
tacatgaaaatattactaaaagttggaggcatattagtcatgcctatagaggatcagttaacacagattatgcgaactggacagaacacttgggaaagtaaaaatatccttgctgtttcatttgctccacttgtgcaaccaagtaagaatgataatggcaaaccagattctgtgggactccctccctgtgctgtcaggaatctacaggacttggctcgtatttacattcgacgcacacttagaaatttcataaatgatgagatgcaggccaaggggattcctcaaagggctccacccaaaaggaaaagaaagagagttaaacagagaattaacacttacgtatttgtgggtaatcagcttattcctcagcctctagacagtgaagaggatgaaaaaatggaagaggataacaaagaagaggaggaaaaagatcacaaaaaagcaaagaagccagaggagccacctcaaaaattactgagaga

SEQ ID NO: 87532 - DNA, 684 bp, Homo Sapiens
tggagccagggcagcaagaaggtgtctgttggagccagcagaacagaaccaatttgaacaagaacctccagaggaacgacgaaccctgagaccacagctgctacagaccacaaacaccccatcagccaagagagacccttgcatccagcctctaccctgctgaacatctagatctaaggctcccaatcccatcctcatctctgccccttcttctcagaaggatggccgacacccagacacaggtggcccccacaccaaccatgaggatggcaactgcagaggacctgcccctccctccacccccagccctggaggacctgccactgccgccacccaaggaacccaccgagggtgacgttcagtgcatgcgctggatctttgagaactggagactggatgccattggagaacacgagaggccagctgccaaggagcccgtgctgtgtggtgacgtccaggccacctcccgcaagtttgaggaaggctcctttgccaacagcacagaccaggagccaaccaggccccagccaggtggaggagacgttcgtgcagcccgctggctatttgagacaaagccactggacgagctgacagggcaagccaaggaactggaggccactgtgagggagcctgcagccagcggagatgtgcagggtaccaggatgctctttgagacgcggccgc

SEQ ID NO: 87533 - DNA, 488 bp, Homo Sapiens
cagctccagggccacgacgtgcaggagatgctgtgccacatcgctaaccgcgagttcctcgccagcttagagggaaggctgcccgaatacaacacccgcatcgccctgccccttgccacttccaaggacaagttttttgacgaagagagtgaggaggaggacaacgaggtagtgacccgcgcatcactcaagatccgttcccagaaattaatcgaaagtcacaagaagcaccgtcgctctcggaggtcctagactcgtcctgacacccaccaggcggcccccttcggagcccccgatccctccgggtctagcgcaggccccacggggccccttcaggggctgaacgcggcccggaccgggaacggaggcggccagcggcgcccggaggggaggaaggggccgggccagacgttcccacagtaaatctccccagctgggtccgccccggcctcagagttgcgcaataaatgttaccgaccatgaaaaaa

SEQ ID NO: 87534 - DNA, 532 bp, Homo Sapiens
tctgaagtgtcatggatccacaataaacattactctgggatttatggtctgatgaagcttgtcctgaccaagactcttcctgccaacctggagagagtcatcgtccttgacacggatatcacctttgccactgacattgcagagctgtgggctgtgttccacaagttcaaagatgagaatggtggtcgtatgtactagactcccacattttcctttgggaataaaggccttattacgccagctggtgggagcagtccctgcagcgggggctctcagaaaagggcacaaggccctttttgcagttgcctctgttgaagtgagtggccatgcctgtggccacaccccttcgtgggacaccccacatcacggaatggctgatgaacatgaggtcctgcaggatcatctgccacactcggatactgcctcacaggctgattttcccctctgcctagtcctgctttctccccttccctttcatagatactgtccccaagagctctctctaataaacctaggttaggactgaaaaaaa

SEQ ID NO: 87535 - DNA, 556 bp, Homo Sapiens
aaagctgctcagtcccgagacttcacagtgaaagacattatctacctccatccttcaaccacaccatatcctggtggatttaaatgtttcacctgtgaaaaggcagcagacaattatgagtgcaaccgatgggctccagacatctactgccctcgagagaccagatactgctacactcagcacacaatggaagtcacaggaaacagtatctcagtcaccaaacgctgtgtcccactggaagagtgcttatccactggctgcagagactccgagcatgaaggccacaaggtctgggcaacagagcaagtgaccagtactacatagccagctgccttctcttcagacatctgccagtactcatgagcagattcttactcccccgtgaaggctgtcttttgattgtctttatgctctgtgaaaagacgcttcctttcctgtttactctaaaagaatacacatttataccagagcataggacaactgatataaattgtgtaaacacacatgaagagggtgttcagtgttattgtaataactttcttcactcagaggaaag

SEQ ID NO: 87536 - DNA, 579 bp, Homo Sapiens
  misc_feature (66)..(66): n is a, c, g, or t
gatgtcttgctttcacctgtgaacttaggagtgagaactacccctacatttggtggctaaacggtncagagcctccccgtcagtcccggggtaaagcgacccattgaaaacaggatactcattctacccagtgtcacgagaaatgaaacaggaccctatcaatgtgaaatacgggaccgatatggtggcatccgcagttacccagtcaccctgaatgtcctctatggtccagacctccccagaatttacccttcattcacctattaccgttcaggagaaaacctcgacttgtcctgcttcacggaatctaacccaccggcagagtatttttggacaattaatgggaagtttcagcaatcaggacaaaagctctttatcccccaaattactagaaatcatagcgggctctatgcttgctctgttcataactcagccactggcaaggaaatctccaaatccatgacagtcaaagtctctggtccctgccatggagacctgacagagtctcagtcatgactgcaacaactgagacactgagaaaaagaacaggctgataccttcatgaaattcaagacaaaa

SEQ ID NO: 87537 - DNA, 388 bp, Homo Sapiens
ccattgttaatcataatgcataattccctgtagggcttccttctccagttgaatccctttgttctgtgatacaactggggaaaacatctaggggagaaaaactcttcgtattgatactcagaagaattagtttgatgaccaagacaatcttgctaaataatatttgagtggaaagataagctaagggaattcttgaagtacaaatttacctaatggttgttttttaaaccttttattagggtaaaatttaagcacacacaaacatagagatggtataattgaaccccatgtcccattcacccagcaattatcaacacatggcaatcttttttcacctattacctacctctaccacctcctgctcttcaataaaatgatcttaaactgc

SEQ ID NO: 87538 - DNA, 474 bp, Homo Sapiens
caacctacaggtgttaggagctggaggctgagagagatgaagccgctacttgagcaattactaaaggctgccaaggacactaaagacaattattgcatcatttcttccagtgaagaaagtgaacttgataactagacatgtttttaaaaaaaatcatgtcagaactcttttggaaaagttggcacttacccagttgtctcttcaacctctgttattataatgactgaaaaaagaacttaaacctatgttatatgatacaagcacaacttgagctacagtaaactacatgacagtgttttgataattgttgtataaatcggtatagctcctctgtcactcgtctgttaaatgccagacctcgtttctatgatctgttgaatgaatcctagacacttctgtgagaaagcagggattgcatagttatgtacacggtcaattaaattttaacattaaagataatttagatttcgaaaa

SEQ ID NO: 87539 - DNA, 430 bp, Homo Sapiens
taagtatttggggagattctgcctggcccaactcaggcggtgactgcagcaggagagagaggtgcagtcggaagaaaggtcttgctgagcaaacgggacccaaagagggatgtgcaagatctggaaacaacaaatggttttcaaactcaatagtcccctccagcaatcagcaaacagcagggtggctgcagatcttcccatccacccactaaggcagccagcaatccctgtctctgcagtggcggaggaaacctctgtcttttgcaatccctgtgattcggaagctttccacccctctggaccggcccctcttcccctcccgcccctccgctccgatccgtgtggtttgctaagggaggaaagccagagcaggaaacagataacttagggagtggctgttcatgtgattaaaatgtctttgctttccaaa

SEQ ID NO: 87540 - DNA, 416 bp, Homo Sapiens
acacactcagcctggccgagcaggagccactgaccattttgcaagtgtcaggaccagctacagcgcggtgggcgcaaacatcccgctttccctttccgggatttagtctgggagacgacgacgagggaagaagaaaccagaggagtcctgtctgggggtcccatcattattccgggatacccgccgccagcggcctgccttcggttacccacatccccctggaacggatatctgtttggggcactacaatctatcctgtagaactatggccaaatctccatcaatgctttgctaatttctgggacttaactcgtagaatctacaaacagggctggaatttattcaaaatgcatctgaagaaatgacattttaaaccgttttaaaaaatatcttgataaaaaattctgtaaaacaaa

SEQ ID NO: 87541 - DNA, 361 bp, Homo Sapiens
agaggtttagcgtgtggagctgcgctgctccgcccgggctgtcagtccccgctccagccgccgcgagaccttcccggagacgcgcgcacacacagcgcaccccctgcacaccgcacaccctcgctcccttgctcacacacacgcacacactcagcctggccgagcaggagccactgaccattttgcaagtgtcaggaccagctatcagcgcggtgggcgcaaacatcccgcttgccctttccgggatttagtctgggagacgacgacgagggaagaaggtgggctcggacgcagcccaggcgccgggcactggtcgggccgttttcctggcagagccgctccccgggacgggcgcgggcct

SEQ ID NO: 87542 - DNA, 950 bp, Homo Sapiens
gggggggtgatatcatggaagctgttatgcttaggaatttgtttaaaaagacgtcctgccctgtgccccagtacatttcaacaccacccagccacacagccgccttctggcccaacactcttaaagacacagtgcttgggaaatgtcctcatgcccctttcctgaggcaggtttgccactgtttccccaggcctggcagtcacagatggcagtcactgacctgctgtgatttgagagatggagagaaaaccttccactcttcttattctccctaatagcctcagtctctgccttcagttccacatttccctttggcgtaagctatgattgtcgtccaaggcccctcctagataggcaaggactcatgataccaagagtgtgatcaggggatagagatgagatgtctgggttggatgcgggagtggggtattttctaactaatggggtgcaaggggtacctgagcatgctctcaaaatgtgttataccctaaaaaatgtttttaaggtagtgtgttgatataacagttgttaagaccatgatgctagaggcaagatcgtgagatccatagagaaggtagttgaaaggtagggcccttttattcacatatatgctgccttctccaccaactgatgtgatatccttttatattccgtgactccagtgaaacccacgccctctgaggaattaccacccttgtatttgcactcctcttgagtctgggctggcctgtgactttaatcagtgcaatgcagaagtggttcagtgccagttctaagactacaaagagaaagaaaagttcaaccttccaatatcccagcagacatcaggccccagctgtgtcaccagcttcacgcccacgagtgaccacaacaaacccagcagaaccaaccagcgcatcccagccctggttgcagaatcatgagtaaataaaatggatgatgttctaaaa

SEQ ID NO: 87543 - DNA, 658 bp, Homo Sapiens
  misc_feature (50)..(121): n is a, c, g, or t
tttgcaaaataatcagagaacttttattttggtttgttttttgagatagnnnnnnnnnnnnnnnnnnnnnnnnnnnnnnnnnnnnnnnnnnnnnnnnnnnnnnnnnnnnnnnnnnnnnnnntctggtgagatttttaatgtttgcagacatgatacatgacaactcacaggcagggtctaagtgcttccagcgcttccacacttcactcgaagtcacaaagcaggatctgcagaaactgtgaaaggcctaggttaagaatattggtaatctctaagcaatcacttagaaaagatatacagtaaaataaaactgaaaagagatttagccaaaaaagacaacagatacattaaaatggaaaatggtaaaatattaaaataagaaaagggagcagaagggacaatcaaaaccaaccgtaaggccagacctcaatgttacagttcacaacaatagcacatatgcatcataaccatcccaggacagaccacagtcgcgtatcaagagcggcaggacataagccaccaggagcaggaggaaggcagagaagccatggtgaagacatgaagagacagccaccttcacccctaaccctgtacctgtggggtcaagcatgacatctgagcctctgtccctggactagggtaaacaaggggatctctg

SEQ ID NO: 87544 - DNA, 829 bp, Homo Sapiens
  misc_feature (623)..(645): n is a, c, g, or t
aatagccacaattactaatgggttgtacagcttctcaaacttcagaatcagattggactccgtcccaccccaccccttgtttcctgttccatgttgatttcatgcagagcttgcttttttatcacagcagccactgcaaacagggctttattaggatgtgacgtcatcgggaagggtgtagctccatctgctgttggagcacgaaccccctcgagctgtggctcccttggtgtccagcagctgatgttctgctgtgcttcccttggctttaaaatgtctttcggtgtcctctgagatggctgcagtgtccctggcatcttgtttgttttgggagcttaggctttcatggcccacagtctgggctggactcatcactgtggtctggtgagtgggggtagtatgttcccatgagaaggggacccaccctctggaagtacctggacaagggtggaaggagggatctgtccctttttaagaatcaaaattaagtcttcggggtgctgcctgtcaccagaggggaggccataggatgcccaggaagaacccagggatgagggaccacaaaggggcctctccaacatgcagaatatggcttctatggtacaagtggaatttgtcattgnnnnnnnnnnnnnnnnnnnnnnncggacttttagaagacagtctgtgtttttcttgacagatgcgacagatgaactgaaaacaaatgacttgtcagaataacaagtgactgcctttattggatgttccatgattctggccatggccttctctcctgtttttgacatagtaggcagataaggcagtggggatattcatgaatgctttt

SEQ ID NO: 87545 - DNA, 555 bp, Homo Sapiens
cagcactattcacataaagcctggcctgccccttggtgacctccttcccttacgcctctagactctactaggtgatcagaaatccctgcaagctagttggggagggaagagtgaaagtgaaaaatggagaggaaacactgctacccgcccaatgcctgaagccaaatgcaagcctgggccaggcttgggggaggaatcaagaggaagcttaaacttaaaatgaaatagaaagtttagactcctacatgggattggacattttaaatgctgaacagagcctatttttatagctagaagttacaggacaaatttttggttaactgagaatgatccaaaaatcatgtgaattttgtgatccagaaagtcacagaacatgccctagattttatcccaggggcagggaggagtgacctgcagagcaagtttgaattggtaaatagaaaacaagaataaaatagtttgctgttgactttccataagcctggctctttcgacttcatgggtatattccttggttgaatttagtatgccactatgactccggaagtctgtagt

SEQ ID NO: 87546 - DNA, 754 bp, Homo Sapiens
ttttaagcaataaaatggggtttattaagaatcaatcatggaataaattattattcagctcttagtaaatcaacaagcatttttcctaatacatactgccaaaataaaagactcataaaatacatttgggtaaaattgaataaaattctaggcaatcaataagcgtatcaatctactgatttacagttttagtgaagtgatcagcatcttaaatttgaaactaaaatcaaaggacaatagtttttggactttttacccccacatactattattccatattacagaaatggtaggtctttaggaagtaatacaaaataagacccttcacttataataaagcccaaaataaggctgatgccttgcataatgtctgcagtttagaatgaatgcctactacctacttttaatctctctcagctgctctgccctagaagtaaatcttgttaaaccaagcttcagcaaaagtgaatggggttttgactcctcattctcttgggtgtcttccttgtatagttacaaagtaacagaagctggcaacaagcatcggcaatgtcaagtcttctaagcaagagaaggaaggttgagaagtgaaaagggatcacctataattttctgactttcagagagtcaagcataaaatattgtcaaatggagacaattgtattcgaccttccccagtagagatgtttaaagagagaaataaaatggagagaaatgtagaaaatccctggggtgtaaaaagttggcggccgca

SEQ ID NO: 87547 - DNA, 613 bp, Homo Sapiens
  misc_feature (73)..(83): n is a, c, g, or t
gacaggataatggaagtatgtaatctttgaacagaagataatgtgaaaatataatacattaggtttcttgcannnnnnnnnnnccccaatcagccaacacagaaggattacaaagttttcagacttgcactgggccaaaaaaaggctttgcatctaattcagaatctttttatgctttgagcaaacagtggctaaagcttttccctaagaaagctggtcttctaaggacaattgccattacctggcagaagtaaagctcacaaggaaagagtgtagcatttgttgggttttggactctaaatatgaaattgtcacctgatcaggaggaggacagtatacacatttatctagtcgaccaggcctaagcagggcagggtcaatcaagtcagggcgactagtagcagccaatacataaacacctagaggaaaaaagaacatttttttaccaaaatctgatgacatgatgacattttgttataacattctatttctgtatttataattattaccctgtaagccttctactccatccaactgagtcagcaactgggtaactactcggtctgtaactcctgtattatcatgacccccgccgaggagcaatggattcaaa

SEQ ID NO: 87548 - DNA, 851 bp, Homo Sapiens
  misc_feature (274)..(274): n is a, c, g, or t
gcataaacctagagacctgggttgggacaagattggtgggttacatgaagttaggcagatactcatggatactatccagttacctgccaagtatccagaattatttgcaaacttgcccatacgacaaagaacaggaatactgttgtatggtccgcctggaacaggaaaaaccttactagctggggtaattgcacgagagagtagaatgaattttataagtgtcaaggggccagagttactcagcaaatacattggagcaagtgaacaagctgtncgggatattttattagagcacaggctgcaaagccctgcattcttttctttgatgaatttgaatccattgctcctcggcggggtcatgataatacaggagttacagaccgagtagttaaccagttgctgactcagttggatggacgtagaaggcttacagggtgtttatgtattggctgctactagtcgccctgacttgattgaccctgccctgcttaggcctggtcgactagataaatgtgtatactgtcctcctcctgatcaggtgacaatttcatattgtagagtccaaaacccaacaaatgctacactctttccttgtgagctttacttctgccaggtaatggcaattgtccttagaagaccagctttcttagggaaaagctttagccactgtttgctcaaagcataaaaagattctgaatttagatgcaaagcctttttttggcccagtgcaagtctgaaaactttgtaatccttctgtgttggctgattggggaaaaaaaatgcaagaaacctaatgtattatattttcacattatcttctgttcaaagattacatacttccattatcctgt

SEQ ID NO: 87549 - DNA, 736 bp, Homo Sapiens
  misc_feature (17)..(17): n is a, c, g, or t
  misc_feature (119)..(119): n is a, c, g, or t
ccattgcacaacgcggnaggactagcctggggtcacagggatgccgcggctcctccgcttgtccctgctgtggcttggactcctgctggttcggttttctcgtgaactgagcgacatcnagcagtgcaaggaagctgtgcggcaggtacttggtgaaagaaatagaaaaactctgcggccatgccaactggagccagttccgtttcgaggaggaaacccctttctcacggttgattgcacaggcctcggagaaggtcgaagcctacagcccataccagttcgaaagcccgcaaaccgcttccccggcccggggaagaggcacaaacccagtgtctacttcttgggaagaagcagtaaacagttgggaaatgcagtcactacctgagtataaggataaaaagggatattcaccccttggtaagacaagagaattttcttcatcacataatatcaatgtatatattcatgagaatgcaaaatttcagaagaaacgtagaaacaaaattaaaaccttaagcaatttgttttgggggcatcatccccaaagaaaacgcagaggatattcagaaaagtgttgtcttacaggatgtacaaaagaagaacttagcattgcatgtcttccatatattgattttaaaaggctaaaggaaaaaagatcatcacttgtaactaagatatactaaccatcttagaattttttctaacctaataaaagcttaatacatttatttaaaaa

SEQ ID NO: 87550 - DNA, 634 bp, Homo Sapiens
cggccaggcctgagatgccgggagggtttgaccctggggctgcatggacagcttagcgctcggccgctggcgacagcggagggcggaggatctgcaggttccgggggacgtggtatgctggagtttgctggaggtccactccagaccctgtttgtctgggtatcaccagcagaggctgcagaacaccgaagattgctgcctgttccttcttctggaagcttcgtcccagaggggcacctgccagatgccagctggagctctcctctatgagaaacgggtatgcaggagattagaagccagtgggcatgagcgtggctgccaccaggtgaatgcctgtgccctggcatcctggggcccagaggaccgggagcttccatcaagaggctgcctcccagcaccaaggccagagagtggccaggggaggctaagtacagggatttctcagaatggtggaaggagctcagcccagccttgcccaagatgtattgcaggggaatctgtaagtgcattaaccttcttgctgtgacataaaagatagacttcttcttaaatattagatccataaaacaaagttaataaaaactgcaattatgtttctgaagaatgaggaacataaataaaaaggtgaaaattg

SEQ ID NO: 87551 - DNA, 554 bp, Homo Sapiens
ttgaatagaaattcttggtaataggagtaaaggttgttgttgacaaagaaacttgaaactgagttttaccttcttattgaaggactttgaaaaatgttgaagttgaatcttgagggtgaatcctgatggtgtatcaatttagaattcccttatgtcactcatacaagaaagctctggctggcatctagtgggtgcccctctgggatgaagcttccagaggaaggaacaggcagcaatctttgctgttctgcagcctctgctggtgatacccaggcaaacagggtctggagtggacctccagaaaacaccagcagacctgcaccacaggggcctgacagctggaaggaaaactaacaaacagaaaggaacagcttcatcaacatcaacaaaaaggacgtccacacaaaaaccccatccgaaggccaccaacatcaaagacaaaaggtagataaatccacaaagatgagaaaaaaacagcacaaaaaggctgaaaattccaaaaaccccggccgtaatggccgaattcccgggcatatgtccggtaccgtcgactg

SEQ ID NO: 87552 - DNA, 449 bp, Homo Sapiens
  misc_feature (248)..(374): n is a, c, g, or t
ttttcatggtaccacttttttttacctttattacttttataactgctttgcagtttgttgaatagaaattcctggtaataggagtaaaggttgttgttgacaaagaaacttgaaactgagttttaccttcttattgaaggactttgaaaaatgttgaagttgaatcttgagggtgaatcctgatggtgtatcaatttagaattcccttatgtcactcatacaggaaagctctggctggcatctagtgnnnnnnnnnnnnnnnnnnnnnnnnnnnnnnnnnnnnnnnnnnnnnnnnnnnnnnnnnnnnnnnnnnnnnnnnnnnnnnnnnnnnnnnnnnnnnnnnnnnnnnnnnnnnnnnnnnnnnnnnnnnnnnnaaggggtgaatatccctttttatccttatactcaggtagtgactgcatttcccaactggttactgcttccttcca

SEQ ID NO: 87553 - DNA, 537 bp, Homo Sapiens
cacctccaaagctataccgttactcaccacaaagctttttaccagattctaccattcaaaaacaaaactttataccacatacatcattgcaagttaaaaatagtcagcttccaaattctgtattaactttaccatcaaggcagacctcagctgtaccatcacagcagtatgccacgcaaactgacaaaagacctcctcctcctccttacaactgtagatatggaagccagcctttgcaaagtactcagcatattactaaacacttgtctatggaagttcctcagagtcgagaaatgctgtcatctgaaataaggaccagctttcaacagcagtggcaaaaccctaatgaaaatgtcagcacaattggaaatttcactaacttgaaagtaaataccaacaacaaacagccttttaacagtcccattagatcttctgtggatggtgttcagactcttgctcaaactaatgaagagaaaataatggattcttgcaatccaacttcaaatcaagtactggacacaagtgttgcaaaaaaaa

SEQ ID NO: 87554 - DNA, 562 bp, Homo Sapiens
  misc_feature (304)..(317): n is a, c, g, or t
cgagccctgcaatccctcccgagggctacagacctgagacgggctccaggaaaaggagggaaggctcgccccgacaccgacccgggcttccgcggtgtgagccagtttcagcgaggagctagttggttatgaccggaacgtgccgtaggtggggtgggggaaatagcaaaaggcgaggttggagggattgaaaaatgcagacggctgcgtggggcttgcttaggtgcctggagtttattctttaggcaacagggaacctttggagggctttaagcaggaagtgataactgatttgtgttatttnnnnnnnnnnnnnngtcactctggcaaccttgtggtcggaaatgaaaccagaagaaccctcaaggctgcaactttcatttttatggtgtcattttgatgctaaccacaagccaggaagcaggacagacaagcaccgaggccttttgaaaggtgaacaccctgaagcccagagaggtgacacacgtcattgcattaggagcttttataaaagtaaaaatgaagtaaaataaaaagcttttgcttatcaagattttaccat

SEQ ID NO: 87555 - DNA, 468 bp, Homo Sapiens
tttgagagatcaggtgggggtcaaaagctaaagagatgcattcaaaaaaacaaatatttactctttagcagtttctctcttttaataaagagagttaaaagagaaagataagccattcctaatatctatgacattcagtgggacatcttactttaaccgctttgtaggtttatttaagataaatattgctgaaatataaaatggatgtgtctatgtctttctttatcttgagtaagaaaaataggcttgaaaaaatcattgaagaaaatcgagacaaatggcaagcatgagaaaagaatggagcacaacaaagcctcggatattagacagtcaagaaagaaataagataagttacaaagaaaacatcattcgaaaaaaactacatttaaaagtaattggctctgatcaaaatacttgaaatactgtgaaaagaaaaataaaactactgtgagagtgaaaaacttttgt

SEQ ID NO: 87556 - DNA, 356 bp, Homo Sapiens
  misc_feature (17)..(17): n is a, c, g, or t
aaatgaaaactcatagnatatctttaaactaattggataccttataaagattatagcaaatgggtgtggtatttttatgtggcaacataagaattttagccatcaaactagcactattctacaggaatgttgaagggggaataaagtatattgaatgagtttatgttgcacagaatacaaaaagtggaaggctgaataaaaaacaagctcctgttcaagtgacctcactgctttctgatgacccccactggctatgccacatttctggtgctgaatggatgcacaacacgtccgtactcatctgggcttcgatgcagttgttcaatttgaaaagtaaaacagtactttaatggtcc

SEQ ID NO: 87557 - DNA, 545 bp, Homo Sapiens
aggggagctcagggtaatggagtatcctcaagaacctgcagatattacctccctccagaaccgtggtctcagccctggctgcatattccttcaacgggagggctttagaaatgctgtgccagagctgcaccccagaccaacaaaatcagactctccaggatgcggccaaggcatcagtatgtggaaagctttcaggaaaactgagcaaaatgaaagccaattcaaagaagaaggaattaagtacataattgtgcagatgatacatggaaatggtaagaatggtgacaatgggacgtaaagtgactgaaatttgggatacattggattagaagaaaataagcccccaagaaaccggaataagtctggagggcagcaagagtgactgtccagctaagaacctcatcagcaatacaaaacattgtcacagatgttgaaacagaccctgaggttaatgcattctttccaacattaggtcctaaaacttctcctgaaaagctaccttaaatccaacttttgaaagtgcacaataaaagtgaattaaataa

SEQ ID NO: 87558 - DNA, 295 bp, Homo Sapiens
aagcccccaagaaaccggtaagaaggatattgcaacagcacgagagattttaaactccttgatatcagaaagacttatcttctattaattttgttttcctctcaggaataagtctggagggcagcaagagtgactgtccagctaagaacctcatcagcaatacaaaacattgtcacagatgttgaaacagaccctgaggttaatgcattctttccaacattaggtcctaaaacttctcctgaaaagcaaccttaaatctaacttttgaaagtgcacaataaaggtgaattaaata

SEQ ID NO: 87559 - DNA, 929 bp, Homo Sapiens
  misc_feature (18)..(18): n is a, c, g, or t
taaggactatagacaagntggtgacaaaaagcaggctggtacggctccggaatcccgggatatcgtcgaccacgcgtcggaaagaatttccctttttactttctgagccctgaaactgattttatttttcctaactgagagatgcttctgtaagtacacaataacatgtatgttgagaacaaagaaactatgagacttaaggagaactggttgatcctagaaaccatataccagttccttcttccattgttaaaagtaggctaacaacagatcattagctagagaggaaatcagatgattattgaccttcttgagacaagagggtacatgagaaactaattactaaacagcttgacaaatggcctgagtagatacttactgctgtacacaggatgtcgtataatattttgtaaagcctgttgtttttggaagtatttatggtaagctttcttaaaaattattatggtaaatacttctgaaatccggcgtacttttctttaagctttgtcatttctgttatgatttttcatggtgaaattttggtactgagatgggcattctctgtacctttatagtaccactccaaaggcaaggaaccatgattgacaacagtcaagctgtggatgaaatgaccaggaacggagaatgaagtatgtaaatcccagcttcataggaactcctctcatactggcttttcagattaaaattgctgtttacctggtctccgaatgtaatgcctgactgtgtcattgcccggatcagttttccccctgccccatcaatatgttctcttgcatatattggcgtgctgccatataaagtaaaaatactggagatattctatattttatatataggtttatgtgttgttggggatgttttcattgtgctcttttggacataataaataattctctattgaggctaaa

SEQ ID NO: 87560 - DNA, 789 bp, Homo Sapiens
  misc_feature (80)..(80): n is a, c, g, or t
cctgttctcctgaactgtctttttacatacctggaggtagccgacccccccatagcccttgtgctatggagagcaggctntgatcatgaccaaaaagaatgccaaggccctctccaggtgtggacaggcatgtcttctcctgactgagtatcaaaaggcccggggattttctagttcgagcccagaaggagcaacccttcaatcatgacatcaataatgagctgaagaaactggctagctgttacagggactatgtggataaagagaaagaaatgtggcaccgcatgttcgcgccctgtggcgatggttctacagcaggagaaagttgaaggttcttcacctaccaacgaggggagagagctgtggttctccatcattgggggagtggaagggagctcccagcgcagccgtggcagccaccttccaggagcaggggctggaatgtcctgtggccgcatctctcatggacgcggctgaaacgtgttttcacaggtgctgttttctgttttccgtgttcgtaacagaagggaggggaaagcgcagctactgacaagtagaacactgctactttttttaaggcagtttcttgtttttttagacggaattagtccttggcttccctcccagtcccagccctgcttccggctgcgaatgtccctgagtcaacaccaatagagattgctttgtgtattttgtagggttctctgttttgaagacagaattatgttacaaatgtttttgttgtaaataaataaaacacttccttgtccttgcaagatccagtaaaaa

SEQ ID NO: 87561 - DNA, 344 bp, Homo Sapiens
gagaaaaacctgaaaacgctcaccaggtggagtcacaacttgcattcagctgtttcagaaacattgttgaccacctactcaatgtgaagatcacgaagatgaaagcctttatgatgatctacttccacttaataaatgtacttatccatgtgcctgaaatatattagttgatcagtaaatgttcgcagtaaatcaaggaggaatgcaaaggaacaaagaaacaaaaaaatgaatggcacgctatctggagggtacaaggaagatttaagccaaaagcataaccctgcaacaaaaatcaccacgtccagaattcaaccattaaagatttaattattcacattaaa

SEQ ID NO: 87562 - DNA, 405 bp, Homo Sapiens
gcggccgcggggttctgcgcagctaggactgtgagctgtcccctcccacgtctttgccctgactcgctttcccttgctgcgcagtgaggctcactgcaactgataaacaacagttaccgctcatcgggcggcgacttccagggggccccgccgctggccgcgacttcgtgcgtcccaattttaaattcgccaacagcccaggaggcagggtcctgttgggacttgtctttctgagtccagggacagacacacccccggagcgggctccggcttcagccactccgctgccctggccagatgaccttgggctagtcactgcgcctctctgaacctgtttccccaggtgtaaatggggggctctcagctgtcccttacaaaggatactgtgcgtggagtcctggcatg

SEQ ID NO: 87563 - DNA, 500 bp, Homo Sapiens
  misc_feature (361)..(383): n is a, c, g, or t
cccctgtccctctacctgcaccctcacatcctgccagcaccaatgagcctattgtcctggaggactgagcacctgtggggaagggaggtgggcttaaaggtaaagggtggatgcccagggcacccaaacctcccttccctttcgtgtcgaagggagtgaggagtgaattaaggaaaagagcaagtgagtgtgtgtccctggaggggttgggcgccctctggtgttaccacctcgaaacttgtctcatgcctccatgcttgccgatggaggacaaaatccaaggaactgggcccatgtgggaacctagcctgttttggggggtaggacccacaaatgtcttggacagttttggggggagggnnnnnnnnnnnnnnnnnnnnnnngcctccccctctgccttttgtacgccagttctcaaaaataaagatcttttgtccgtttttttaacctcggattctgtaattggttcttatagtaacaaataaaaagctgtttttttc

SEQ ID NO: 87564 - DNA, 984 bp, Homo Sapiens
atttcctatacttttatttcctgtttattcttaggtagattggaagggggaaacagtctgttctccctaattaaattttttctaataacgattagtagaatatggacattctatatgacagtgacattaaaagaggctctttggaagtatatacattattaacataatgtgtacaagtccttttgaaatgacaactttaatgggtttcagctcttttatctagagcttgagataattcaagctgagtttttcagggcatatcacaacggcaaagtgttcagcagtgggatatcaatgcttatttacattttcctactgctatttatataaaatgttattccattcagaggatgccttttatccccacattaaagcacagatcattaagcaataaaaaccaaattgtctgtcattcaaattataactgcagttatttttgcatggtaagagtgaggtgctaattttgtgtgagatgaactttgtaaactactttgggaaatgttctttggaagtaaggttttttctcctttagtcttatgcttccacttttgtctcagattcacaatccattaaaacatggggaaaaacagaaaaggtaaaattgagagacttttgttagaggagctatttggaatgaaccaacatttcagatttttccaaaatgtaagttaggaagtctccattgtctctgcatttaacaaaatacactgttactatcttaatctcaagagtgtcattacagtgagaatctcatttaaaagcataccagttgaaattaaatagcaggtgcttatcaaagaacactggaaatctgtggagaaatctttcctaggaagcattctttttcttcttttagttcccaagttccaagggtatttttcattcctagtaggtttatatggactcacagaatgtgggacttttttcctgtcggggtatttggtgatgtaagtatccggatagtggaccacagatgccttaaat

SEQ ID NO: 87565 - DNA, 471 bp, Homo Sapiens
ttttttttgggaactctctccctttatttaggatatcagaggaaggggcaggagaggggaggagagttcagtcatctcagcttgaagcaagtgctcggtaagcactttggtatcgctcccaagggggactgtatcacttccatcccaatgactgaactcgacctgaatgcagactgctgagtccaagtcccaagtctcaggaccccaggagttactagaaagaaacgctcagagctgctttctggtagattattagtgggagaatacatttcccctaagatacctaaaatcaatgcaaagaggacctcagaagtatgtattttgctgaacttgaaacatcagagaaattgttcaaaaatcccctgaagagataaatatgctgatattcaaatttttacctatcttgatgattctcacatgctttgatttctcaaggatgttgcatgaaaatcatttttcctctattagaaa

SEQ ID NO: 87566 - DNA, 313 bp, Homo Sapiens
ccaagcggaccatggtctagtggtagcgtcagtgccaaggaaaagcacctgctactgagcagaccaggaaagggagtctccctttccccaggggagtttagagaagactctactccaccatctcttatggagggcctgacataagtcaggcctgcctgcagttatccagaggcctgaccgtctccctgtgatgctgtgcttcagtagtcatgctcctggtctgctttcatgttccatcctgtacacctggctctgccttctagatagcaatagcagaattactgaaagtattaaaagtctctgaaatgcaaaa

SEQ ID NO: 87567 - DNA, 735 bp, Homo Sapiens
attcggcacgaggatccaattgagtcggctataaaaagtgcgcatatcataggagacgctcgtatcaatagaacttgtagctgtgcacacaggcaatagaactacaataatttcaagcctgccaggagtgtgaaaaatcctctttatcagatcaatcatcggtaacattagcttcaggctattatgcagtcttcagagtcaaacttactgcaaaaaaattagaggggattcatgatggagccatccagatcacaacagactatgagatcctgacaatccctgtgaaggctgtgattgcagtaggctcactgacctgcttccctaagcacgtggttcttccaccttcctttccagggaaaatagttcatcaaagtttaaatattatgaattccttctcacagaaggtaaaaatacagcaaatacgatctttgtcagaagatgtgcgattttactataaacgattacggggcaataaggaagacttggagccaggaaaaaaacaaaagattgcaaacatttattttgatcctggactacagtgtggggatcattgctatgttggcttgccttttctatccaaatctgaacccaaagtgcagcctggtgtagccatgcaggaagatatgtgggatgctgactgggatttgcatcaaagcctgttcaagggatggacaggaataaaggaaaattcaggtcatagattgagtgctatatttgaagtaaatacagaccttc

SEQ ID NO: 87568 - DNA, 244 bp, Homo Sapiens
cccaggaggatagccttcacgaagaacctcaccatgctggtaacttgatcttggatttccagcctccagactgtgcatcatgcacgatagaactgctgtaccccaaagcaagccataaaatctaggaagactatctgaccctctcttctcctccctgaagacccttacatgacaagtgtcatgccctatgcccagaggaagaaatgctacacagagaggccaagaaaaatctgaacacacagga

SEQ ID NO: 87569 - DNA, 388 bp, Homo Sapiens
aagctggcttaatgaacaccttgggcagaaaacaaggaggcctccctacctccacttcatcccacacaggagtcttgatgctgggtgggagtccaggagtctgtctaggaatccaggaaggcttcctagaggaggagccattgcatctgggcccttgaaggatgaatagaagtttcctaggcagcgaagggccaggtactcagaagaccacaggcaagacccagccccatggcctgccccaaagagttcacatctcataaatgatgcttgaataataacaataatagtaacagctcccacatgctgagtgtgcgctgctaggacacagcatgtgacaggaattcagtgcctgaatgaatgagccaataaattaaaccttctcctttaa

SEQ ID NO: 87570 - DNA, 707 bp, Homo Sapiens
ctgaaagagttcccccaataaacctcctgtactcagtcctctaccaagagtctgcttccgggggaatttgccctaagatagtcgtaacaggactggccctaggaaggagactctaaaatgatattttggagctccatcatccacttgctggtttacaatgatctcatcatagacagcagagaagagcatctctctcagaggaggcactgaacagccaaatacacagaagaacttgttcggttgacatccttccatcagcttctgctattggccacctggatgctggtaaaatgggcagagaggtatatcagccacaactgtaaactggagagaacaagagcctcctatcctctaggattgctgaaaaaggatatagtctctaatctgactttcatcagtaatgaagatcgtttttatttttaaatttgatctgcctactatgtctagtgctcctttgattccaaactcaaataggaacaacaccaaaaaacagtatgagttactgtccactccctaaacctgcaacactaacagaagagtgctatttcctccaataactgttcacttccttcctatgacacgtaagatacctatgagcaacccagaagggggctacaatagagatactgttagggctgattatgtatgattctcgaagcgctagcttgacctctaccttaaataaaacgtaaagatataccttgaaa

SEQ ID NO: 87571 - DNA, 586 bp, Homo Sapiens
  misc_feature (17)..(17): n is a, c, g, or t
ctaccagcaatgcattntgtggaccacagtttgcaagtagtacgtctggatagctgtcgaccaggctttggaaaaaatgaacgtctacacagtaattgcgctagctgttgtgtggtttgtagtcctgcgacttttagtcctgatgttaatgtaacttgtcagacctgcgtttccgtccttacctatggagctaaatcttgcccacaaacttcaaacaaaaatcagcaatatgaagattagaggtgaaagcattgttacttacttgtggaagtcggggacataagatgattttcacatcccagagcatcatagatagttccattaagtaaaatcagtaagaccaaaccactggaaaacatgcattttggaaactttaaaataaatggttaacatggcatttctaagaaggcatttaatccagtatctctagtgtacaaaggaaacttgaagttttaatggattatttttaatgaaatgttttattgtttacaaacggtatgttgctgtgtacctaagagtatagtaaggtcaagaagagtatcaaagtataataaaataaaaattgtatactctccataaaaaaaaa

SEQ ID NO: 87572 - DNA, 300 bp, Homo Sapiens
cgccctccggctcgccttctcctggagcaagtccctggtgctgttgtagatggaaatcacctccggggggacttcctcgggctcaggatagtcttctgggggactggtgagcttcagcttgctcaggatctgcccgcggatcgcctcgatcctcttgcgcatgaactggtccatatcgagtgtgctgcaggtagacaggctgagcgcgaccgtgaccagatgcaggatcagaaaagcgctcagcacacagtagtgcattttttaaaaagtggaaaaagaagttgttttaaaagtcagaat

SEQ ID NO: 87573 - DNA, 539 bp, Homo Sapiens
  misc_feature (379)..(397): n is a, c, g, or t
gcgggcgccgggcttgccaccatcgccatcttgcagcgcccgcgtcctgggccggcccgagccgctgcgcggagcctctctttccctcgacccggctgcaaaggcagagtccgtgcgcctgagccccgggccgagactggagcgttctctggcggcctccaagggcgccggtgtctggaagcccggcctgggccagatcccttttgctgtcgtctccgtgattgccgggacagaattcccttccagtggggaaaagggaaggcggtcgcgcccttcccggtgccctgagtggggaggtgaaaccctgagagttggggcaagagggcctggagctagggccgaggcggcgggtgcgcagggtgttccgttgagcccgagnnnnnnnnnnnnnnnnnnnggcctctccaccgtttctgtaggagcgcggcagggagcacacgtccctcgggaagaaaacggcgctggcggctgggcccgcaccgcggccgtcctcgctgagctcctagcgcgtggcctttgcacgtctgtgtacccgtctg

SEQ ID NO: 87574 - DNA, 240 bp, Homo Sapiens
aaagttcccccctccgcccccaacctaccacccacccccagatccgccggaaaagtaaactgtggctggagaggaatctggggtgtgtggggagcggggaggcagggagcgggaaggatggatgtaatcagtgggcctgaacttcattcctgcccacgggccaagagacccttccctgcagaagttccaaactaggggttcttagaactagcttccccactcccacctcaaccttccctt

SEQ ID NO: 87575 - DNA, 810 bp, Homo Sapiens
  misc_feature (48)..(58): n is a, c, g, or t
  misc_feature (105)..(113): n is a, c, g, or t
  misc_feature (796)..(796): n is a, c, g, or t
gcagggggacggagtctccctctgttgcccaggctggattccgtctcnnnnnnnnnnnttattaggaaaccactccctctcctgccctgagttcatactgggggnnnnnnnnntagaatgaggctaacgtggccgaaaaactacacaaatagagtcaggaaggtttctcagcctcagattcctagaagcagaaagagggcactcccacaggtgtttcgtattgcagtgtcctctgaaacaccaaatgcagagaattgtgaaaaccactgatgaaactgtcttaagaaacgtcactgaggccttcccatgaatgggtgcctttcattctttttaattgcctagatcttaactcctcctaccaccttcagtaactgggccaggaactgatgttgcaaaaacactctgcaaccaacaccattatcgaattccaggacattttcataacccgccaaagacaaacaaacaaacaaaaaactgtgtacccattagcagtcgaggaattgattttaaagatcaaacagaggtgcttgattcatgagttgtcttttaagaagtgagtagcccttatgtgggaaattctgaatcctggcaaacaacgcttttggcagattttcagctgtctggagttgggagatacacgcatatctgtacatgcatacatatatatgtatttttgaaaaactgctagtcacggccgagtcattttgggttccaccccttcctgcaatcaaagccttccacacgctacaaaggatttcccttataaggtaaaagaggcttgctagatatatgtggnaaaggaacaggact

SEQ ID NO: 87576 - DNA, 616 bp, Homo Sapiens
  misc_feature (521)..(521): n is a, c, g, or t
gctgcgccccagggggcctgtcctgttggcttttaacacccaaatagattgccaagggatacaagaagccacagggggaaaaacaagtgacatatctgcatggagcctaaatttcgcttggtgattttcagggtagaagcattacatattaaaaacactgctattttaggggaatacagaatttaaaaatccacacagattcgcaacataaaacatgccgcccaaagacacgtccgcggtgtcccgacagttccggctccgcccgcgggccacgaggcggggagcgacggtcactcccctcggttacccggagtacttgggcgggaacgcgtagctcgcgggagagacgggctcctgggcgagggctgcgtcttagtcgccctgcttcttagctctcgaggtcccgcgtgttacgtgttagcaccgcccgggggcgtcagcatgacccgaggctgcaggaaccgtgaactctctgccccgcgggcccaggtgaccgcgggcggcgctctcccgcgcgcggngggcggtgctccccccggctgttcactcagctaccacagcgacgtataatggtgtccgctaggcgttccatgacggcttcctgagggactggagg

SEQ ID NO: 87577 - DNA, 966 bp, Homo Sapiens
  misc_feature (794)..(803): n is a, c, g, or t
gcggagtggataaggctgagatgagtgctgggagtggtggacattcctgctcgtgcaaagatggccactttccccgcagctgcagggcctcgcgctcggcctcgccaggccagccccactccttgtaccaagtgtgaactggggtcattcggtctgtgatctcgttgcactgctccaagtctggcttgtgtccagtgcggtccatgttgaaaatggaggatggctgctgacttctgactggctgagcagtgggttccttcaggttccttgccaaccctcctcccctgcccacaacttctccaaacaaagcaggctgtttgctcacttcgttcaaaaggaggaatgataacccaaatctgcccaagtgacacttgagaaggttttggctggggttcctggtggatttcttactacctaacgcccaagaaaaccaactaaggactctcaaaccatacctggtgggggttcttcgctcaacctcttcttccctaggtcaaagccactatcatctgatgtgttagggatgggttctgattggcagaaattaatcagctcccaatgggagcccacggaactaagtagggtcccaagaaaaaaaacgggagctatttcacagagctgagcttctgccaaatttcattcctcaaacctttcaggaggggtggttggcgtttctaaaatgtttatgggatttgagttgcaggtgtccacttaactgactagctttgataaacaatgtcagattttaactatgaaaacgacattaccttgtgcatttttatattgattcctannnnnnnnnnaagattaaagtttaaatgttttccactagtcatttcacttctaacttggtataggaagcttagctctctacatacctatcatgtgacctgtatcacagaagattcaggaaaaatgcacttgggaatcaaagaaaatggtacatctcttggaaagacaagcaac

SEQ ID NO: 87578 - DNA, 1175 bp, Homo Sapiens
tgaggacctagtagttagagctcctaaagatcaaactcataaaagtatatagcccccacaactatgactgggtacccttggagtttttaattctctaagttgtttcacactgagccttcagcaatttgccaattacagtttaattttttctacccccacaatggttgctatggaggtttctgctcatggatctctgcttcagacagcatgaaagaaattggtagcaattgcctgaataatgaatttaacttttttaaaagacatatctgtgatgctaataaggaaggtatgtttttattccgtgctgctcgcaagttgaggcaatttcttaaaatgaatagcactggtgattttgatctccacttattaaaagtttcagaaggcacaacaatactgttgaactgcactggccaggttaaaggaagaaaaccagctgccctgggtgaagcccaaccaacaaagagtttggaagaaaataaatctttaaaggaacagaaaaaactgaatgacttgtgtttcctaaagagactattacaagagataaaaacttgttggaataaaattttgatgggcactaaagaacactgaaaaatatggagtggcaatatagaaacacgaactttagctgcatcctccaagaatctatctgcttatgcagtttttcagagtggaatgcttcctagaagttactgaatgcaccatggtcaaaacggattagggcatttgagaaatgcatattgtattactagaagatgaatacaaacaatggaaactgaatgctccagtcaacaaactatttcttatatatgtgaacatttatcaatcagtataattctgtactgatttttgtaagacaatccatgtaaggtatcagttgcaataatacttctcaaacctgtttaaatatttcaagacattaaatctatgaagtatataatggtttcaaagattcaaaattgacattgctttactgtcaaaataattttatggctcactatgaatatattatactgtattaagagtgaaaattgtcttcttctgtgctggagatgttttagagttaacaatgatatatggataatgccggtgagaataagagagtcataaaccttaagtaagcaacagcataacaaggtccaagatacctaaaagagatttcaagagatttaattaat

SEQ ID NO: 87579 - DNA, 542 bp, Homo Sapiens
  misc_feature (507)..(507): n is a, c, g, or t
gcggccgcggcggccttggggcacccgcagcaccacgcacctgtctgcaccgccaccacctacaacgtggcggacccgcggagattccactgcctcaccatgggtagggcggggtcttggggcacctgcgctccgcgcctttcgcgctcctggagcaaactttccacctccagtggaggaagtgggagcccggggacagggtgaagagagaggacgggcttttagtgtaactgtagagtcagccacagaagttccacgaaagtggaagttagtttgccagcttctccactcagcctggtgcgttttactcctagtagtaggtgctcgagtattgccttattaatactggggccttagggacctcgaacgtcacggcggagaaaccagaggttaactgcttgggatttggggtggtggtgtttgaacctgtgtggcatccccgcgtcggggcggctaaagcgtcttgacgtttttggctaagcctgcgcgcttctccgcttggctcanagggaggcgatcagatagtgcaagcccccatccct

SEQ ID NO: 87580 - DNA, 468 bp, Homo Sapiens
atgctgcttactgcaccaaggaggcaagaaggctttttagagagcccagaatttcctttcctcaactcctgcttccaagacagtcattttgcatgataaccgtttccccaaaaaacacagacacaaaatttaaagaactggaacagaggaagcagagcttatcatagtatatatgtttagtaccctgtcacttaggtccacccctctttctttgtggattgtggacattttgtttaactgctaaatcatgagaatatatgactgctgagacttttccaaggattttttaaaaaacacattaggctttgtgcagaagtaaagaaaaagtgctgtgagaaccccaggtaggtaatttactttctattgtactcatagtttgtttgaaacctcttcacctctatcccttattgttttatactctgtaaatctgattttacctttaataaacttttttaaagtgaaaaaaaa

SEQ ID NO: 87581 - DNA, 548 bp, Homo Sapiens
tttcatatttgcatatactttaataacaagttcattttagtaataaatgaacaaagaaacagagacagagaacttaacacatgatacttccacaagtttgggtctaaaaaggtttacatcaaagtttaaaacatatactgtctgtgttaacagaggctacaataccaatttggattacgcacattatctaaaacattattatcaaagagtgcaaagttagatcaaacaacatcaagaaaattctgtcctaaaattttaacgtcttttaagaaagtctaaaaacctccttttttcccactgacttcaaaactttgagttttatatcagaatatcaatttgtcattttaactttaccatacatgaaaaattatcaaaaatatatcgatgggtctatactaattgtgactgtttatatttacattaagcaaattctcttgccaagttctttatatacaaattaccaattgtactctgtgaaattcattaaaaagttaaaaaccacagaaatgtcattagaaacaacatatttcaatatgtaactgctttcc

SEQ ID NO: 87582 - DNA, 369 bp, Homo Sapiens
gctggccgttttttcccccaccataccacgtttgtgtgtgtgggagggtgggaatttagccacttcaaaggcctcattccccataatttggaaatttcctttggatttgatcaagtcagatagagtaggtcaaacccaatgggaaaaagactgaaacagcaataaaaacagaaacaaacagttaagcaaaatgaatgatcacacaacttatatgattactgagtgctctaatggtaaggagaaattaagaccagctggttgttaaactttagccaagacaaaaccccaattcagctacttacctagggttgggtctcaggctgaagaccgctcactaccgttctagaagcaagaaataaaacttgaact

SEQ ID NO: 87583 - DNA, 1133 bp, Homo Sapiens
cccaccccaccaccacacgccccacaacaaaccggctaggtaacgaggcccgggtggtttaatcggcacgagggagggaggacagcgtgtagcctggctgctggcgccgagacgccgcttagcggccgccactggagacactccctcccgcctcccgggtctcctggcggcggcggagtgaggctgacagcggggaacctgggagacccctccgccctccccgcggtggcagcggccgatccccggctccggcgcgagggacggccgcgatgcgctcggcctgaggttacccggcccggcccttcctcgcttccctcgactattccactgcgtctccgcgccccggcgtcatcctgcgagtccctctgacgggagggaagatggctgcacggagctggcaggacgagctggcccagcaggccgaggagggctcggcccggctgcgggaaatgctctcggtcggcctaggctttctgcgcaccgagctgggcctcgacctggggctggagccgaaacggtaccccggctgggtgatcctggtgggcactggcgcgctcgggctgctgctgctgtttctgctgggctacggctgggccgcggcttgcgccggcgcccgcaaaaagcggaggagcccgccccgcaagcgggaggaggcggcgaccgtgccggccgcggaccccgacgacctggccttgctgaagaatctccggagcgaggaacagaagaagaagaaccggaagaaactgtccgagcaagaccaaaccaaatgggcggactgccgaagtggctgagggtgaagctgctcgaaacagcctcaagagtgcacaccggcacagccggcgacccagagattgaccgcgacaactgcacaggtccaagacacaactacgaaggactccacggctccgcaatgcttacaaggcacggtgacagaccggatcaacgcccaggcataggaacaggcacgttgacctacagggagcccggtggacgctaccacattgcacccggaagagaaccgcacgccggcgcacacgctcgacaacagggcgcgacaggacacgcgggcactgcgggcccagcaatcccggagcgacagaaccaaccacgccagacgagagcccgcaggcgac

SEQ ID NO: 87584 - DNA, 933 bp, Homo Sapiens
aaggccgcttgttgggcaaggggggcttcgcccgctgctacgaggccactgacacagagactggcagcgcctacgctgtcaaagtcatcccgcagagccgcgtcgccaagccgcatcagcgcgagaagatcctaaatgagattgagctgcaccgagacctgcagcaccgccacatcgtgcgtttttcgcaccactttgaggacgctgacaacatctacattttcttggagctctgcagccgaaagtccctggcccacatctggaaggcccggcacaccctgttggagccagaagtgcgctactacctgcggcagatcctttctggcctcaagtacttgcaccagcgcggcatcttgcaccgggacctcaagttgggaaattttttcatcactgagaacatggaactgaaggtgggggattttgggctggcagcccggttggagcctccggagcagaggaagaagaccatctgtggcacccccaactatgtggctccagaagtgctgctgagacagggccacggccctgaggcggatgtatggtcactgggctgtgtcatgtacacgctgctctgcgggagccctccctttgagacggctgacctgaaggagacgtaccgctgcatcaagcaggttcactacacgctgcctgccagcctctcactgcctgcccggcagctcctggccgccatccttcgggcctcaccccgagaccgcccctctattgaccagaacctgcgccatgacttctttaccaagggctacacccccgatcgactccctatcagcagctgcgtgacagtcccagacctgacaccccccaacccagctaggagtctgtttgccaaagttaccaagagcctctttggcagaaagaagaagagtaagaatcatgcccacgaaaaaggaatgaggcctcccggtttggttgaac

SEQ ID NO: 87585 - DNA, 464 bp, Homo Sapiens
ggccacaacggagcccccagccggttggaaagaggcttcctatgctctcctttccatgccactgcggaaagtgctagggaacaggaagaccagggcattgccaagtgaataataacaaccatgtgtgcggcgttcacgataccccaggctcaagtgagccttttactcagggtctcatgtgatgctgaaaacaaccccatgaagtttagaagcctgtgcacacgaagagacgtggtgtttccctattgatccaaactgcatgctgacctgttcctgccagggctgcgctcctcctgctttgccctggctctcccgttctgcactccctcttctaccgggaattcctggaagcaccttttattcacagtgcctgctttgaatagatacaaatacaatttgtatcttatgtagtccattccacacaattgaaaatataatgtaataaaaatcagaaaagtaaaaaa

SEQ ID NO: 87586 - DNA, 459 bp, Homo Sapiens
gatttcagccttccaagttctgatgtaacaaacaacttaaaacccagtcttcatccacagatgaacttgctagccttggagaatacagagatacccccgtttgcccaaaggaccagccaaaacctcacctcaagccacgcatatgataattttctggaacattcaaattcagtgtttctacagccagttagtctacaaaccattgcagcagcaccatcaaaccagagtctgccacctttgcccagcaatcatccagcgatgacaaaaagtgatctccagccccctaattactacgaggtaatggagtttgatcccttagctcctgctgtcactacagagtatattttccagctacagacatatgtaagacgcatataaagaattgaatgggcctggcatggtggcttatgcctctaatcccaacattttgagaggctgaagtggaaggatcacttgaac

SEQ ID NO: 87587 - DNA, 457 bp, Homo Sapiens
gggtgcaatcatggcttattgcagcttcgacctcccaggttcaagtgatccttccacttcagcctctcaaaatgttgggattagaggcataagccaccatgccaggcccattcaattctttatatgcgtcttacatatgtctgtagctggaaaatatacctgaaagcacaacattcatatatacagtatagcaaaacatggctgaggaaaaatctcaaaaatcacagcgctatgaaaccatgatcaccaagttcataaggccccagaatggtgctacaattttaatgtttccctaaaaagtttggtctcatctccctcaaaacgatttcagtcttcttctctctcccctccctccggtatacctttatccctttgaaagggtgcttgtacaatttgatatattttattgaagagttatctcttattctgaattaaattaagcatttgttttattgcc

SEQ ID NO: 87588 - DNA, 825 bp, Homo Sapiens
  misc_feature (703)..(703): n is a, c, g, or t
agagtatgaagtcgacggcgcgccgaattcggcacgagggcaggacactttccttcctcacgtggaatgtgggacgatcactctgattggggcaaccactgaaaacccttccttccaggtcaacgctgctcttctgagccgctgtcgagtgattgttcttgagaagcttccagtagaggcaatggtgactattttaatgcgagcgatcaactccctgggaatccacgtcctagactctagccgtcccactgaccctctgagccacagcagcaacagcagctcagagcccgccatgttcatagaggataaagcagtagacaccctggcttacctcagtgacggtgacgcccgagctgggttgaacggactgcagctggcggtgctggctaggttaagctctaggaagatgttctgtaagaagagtgggcaatcctattctcccagtagagttctgatcacagagaatgacgtgaaggagggcctacagcgatcccacattttatatgaccgggcaggttgaggagcattacaactgcatctccgccctgcacaagtccatgcggggctcagaccagaacgcctccctctactggctggctcgcatgctcgagggaggagaggaccactctacgtggcacgaggctgtcaggttgcagcgagacatagtctggagaccatctgcttacacagcggtgctgctacnaggtgtcattatagctgctgatgtgaggctctgccatggtgtcacttgcaagccaagtcatgagtgcggctacaactcaactgtgagacacagcatgccctgctgctagacgcctagtataa

SEQ ID NO: 87589 - DNA, 991 bp, Homo Sapiens
tgcggccgccgccgcggcggggagcgcgtctccgcgcagctgggacgaggcggaggcgcaggaggaggaggaggccgtgggcgacggcgatggcgacggggacgcggacgcggacggcgaggacgacccggggcactgggacgcggacgctgccgaagccgccaccgccttcggggccagtggcgggggccgcccgcacccccgggcgctggctgccgaggagatccgacagatgctacagggcaagccgctggccgacacgatgcgtcctgacacgctgcaggattacttcgggcagagcaaggccgtgggccaggataccctgctgcgctcgctcctggagaccaacgaaatcccctcgcttatcctgtgggggccgccgggctgcggcaagaccactctggctcacatcatagccagcaacagcaagaaacatagcataaggtttgtgacattatctgcaacaaatgccaagacaaatgatgtgcgagatgtcataaaacaagctcaaaatgaaaagagctttttcaaaaggaaaaccatcctttttattgatgagattcatcggttcaataaatctcagcaggacactttccttcctcacgtggaatgtgggacgatcactctgattggggcaaccactgaaaacccttccttccaggtcaacgctgctcttctgagccgctgtcgagtgattgttcttgagaagcttccagtagaggcaatggtgactattttaatgcgagcgatcaactccctgggaatccacgtcctagactctagccgtcccactgaccctctgagccacagcagcaacagcagctcagagcccgccatgttcatagaggataaagcagtagacaccctggcttacctcagtgacggtgacgcccgagctgggttgaacggactgcagctggcggtgctggctaggttaagctctaggaagatgccctgtgatcagaactctactgggagaataggattgccc

SEQ ID NO: 87590 - DNA, 370 bp, Homo Sapiens
ctgaactgtgaccctgccgggaaggatagggcactgtgctttgcgtactggtggctgcctgcaccctctcccagtgtcccagaagtgggctcctgctttctggtgtatggcgctggaggcctacttataaaggatcccactgccttggtgccagtcttggccaggacccacactgggacagtcagcaggagcttgagcggggtaggggccggctgggagtcactccagcactaaaaactcaccaggcgggaatgttactcctttctcatgccggaggaaagcctttgattgtgggtcccgaagaaaaacgacttctcgggtagaaagttggtgatgtagccttcaattaaaatgaggatatctcttaaaa

SEQ ID NO: 87591 - DNA, 893 bp, Homo Sapiens
ttttggtgttgattttatttttaatagctcagctatgagactgtgactttgtgcatatacttaaaacagagctaacattggaagcctctaacttcacagttagagggtcttcatgcccaaagcacctccaaccatccaagccatgatggcactcattctgctgttccatcccttttcggaagatgtgcagaagtcatcctcagagtcctcggcactatgcttataatttggactttgaacaccacgtgatctctggcacctggttatgggggtccagtatccacagcccccactgggaattatggcatttctcttttgtagcatacaataccaaataattaggctttttctgtgaaaataaactgcttttaatacatgtattattaaaccaataaagcattaatatttactaattactaatttaagcaaagtaaaacctatttcagagtaagggaaaagcatgcagaaacacacattgttatgagctgttgataaacaaggcttaatataatcctggttttcctcattctatcttaaagggacatttcaaactcttgctttcataaacaaaactttgtaatttgaaagagtccaggtttttataatgatcacgttccttaaaattaaacgacagttttcacttttcttaaagggaaaagtgttcaaaactttctcacagagaaagcattgattttcctctgagttcctcccatgaactgtcttgatcgctgccaactcagttccttctgtattctgtgcatgtggaatacactgttttctgcttaacgagttatttccaaccccatccccagccacacctcagttccacgagtgttcgtggctcaatgacctagggaccccaagcattcaccataaataaggctgtttactga

SEQ ID NO: 87592 - DNA, 805 bp, Homo Sapiens
tttggtagcaatgactgatgtggaaatacatatgcagatttattgctcaggcaagaacaggtagaagaaatgcaatacatgatatcttggtttcttctgcaagtggcaacagcaatgaattagccttgaaattagcaggtcttgatatcaacaagacagaaggtgaagaagatgcacaacgaagttctacagaacaaagtggggaagcccagggagaagcagcaaaatctgaaagctaacaccccactttgaccctcgaccacacctgaaaatgtctcaaatctccaggagtatctggaatgcatttgtttccatgagtgaaaagaggaaaaagaaaatggctgtgctgcattgcaggaacctgctcattatcatgttaaaaatgagggcagaggctgtggctgcaggcagacttttccctacctctgtcattagcaatggttgaaatcatgtggcttgtgtttgggcgtcatttttgtatggatcctttcacttgatcatatgacgaaatgcttatagagagtagctccgacctagatgatgattcttcctgtagcatctggcccctcacaatgtcagaggatttaattgtgtctaattgcgaagggttgattgaaccccagagtttaaatatctctggctcaagtgttcacccagtaaaagaaagatccagaaagcactgtttttagcattacgtatctgtgtgttactgctgtgttatttacactgttttgtattgtacaatatatatgctcagcactgcccccttctctgattgcttatgaaaaacaaaatgatgtacatt

SEQ ID NO: 87593 - DNA, 599 bp, Homo Sapiens
gggcggagggagagaaagctgccgtctcgagtgcggaggcaggctgagagctcctcgaggaagcgaggctgagtcctgcaggaattctcaagtactgtattgatatttctgtagtaagcttaaaagagaattaatacaagcacagtccgtatcgcgtggggttaccgtcttccaatggagtctggttacacgtttatgagacttggagccaagaaatactactcgcttgtcgagggctactgagaaaagaataaagacggtcataaatgatacatgatgccttagagtcaagagaaggccagatgctgtcttggtgcgctgtacaagggaaggtattgcacaagtttggagcgagaggaatgggagacattcgcaatccttccacagccggtggaggcaggccaacctcacagaattgcacggggcacgtgcatcctgttcttttttctggaggcgtttggtctcagcacacgctcattcatcacattaatgttaacatctacaactaatttgtgaatttgctttttattgtatgacatctgtaaacactaggaatttatgcctcattttgtttaatatcatagatcttttaaccgaaa

SEQ ID NO: 87594 - DNA, 475 bp, Homo Sapiens
tggttagctttcttttcaagaatgtatttccatacttcttttgggtttctagaaaagaaggtacatttcctggatttgagctttagccacagagagtatctgggaccagaaacacaggatctctattaaaagaacacgaaacgtcacttccacacgacctgcaatttctagaatggagagaaagcttcagtaaacattcagtaatagcatgcaacaaaggtgggaaaactgaggctgagataaagtaatgacttaatggcacagtaagagaccaagttacgatttcaacccagaaatacttgattccaaagccccaactctactgcatgatatactaagcactattatatctctacttctgagtagaatgctccaagattttgctgggacaggaagggtataaatagtacatacatacatacacttccatattattttggtgacaataaaattacgtcataaaaatgtaaaaaaa

SEQ ID NO: 87595 - DNA, 529 bp, Homo Sapiens
tgttcagtatctgtgaaaagtttcttgcctcggtttcagactaaggcaaaaactggaactccatctgtccacctccagttttttagtgttcatctccctctgctgattctagctgagagtccttattggtaaactctccttgctgagatggaaatttactaggcaagaagaagttaagctttagacagctaggacatattttcttacaagcttcttcacctatcttttcagttaactctttgaaagcttattttatcccttacatttaatggtttatttttacataatagagaagacaaaaaaaagggaattagttttgtttagtcatccattttatctcaagcagaggcatcccttccatgttcttcttgtctgaacaaaacaaaatgttattttttgttgttgtcgtccttagtttattcttggctttagcctaaaataacagagtaacaatattacagggctgttacaggtatgcggcttctgttctcctcttgagtttaattcattaaactaaatttaaaaaaaa

SEQ ID NO: 87596 - DNA, 723 bp, Homo Sapiens
gtcgacatcattaatatatattgtaatgttgggaagagatcactattttgaagcacagctttacagatgagtatctatgatacatatgtataataaattttgattgggtattaaaagtattagaaggtggttataattgcagagtattccatgaatagtacactgacacaggggttttactttgaggaccagtgtagtcaagggaaaacatgagttaaaaagaaaagcaggcaatattgcagtcttgattctgccacttacaggatagataacgcctgaactttaatgacaagatgatccaaccataaaggtgctctgtgcttcacagtgaatcttttccccatgcaggagtgtgctcccctacaaacgttaagactgatcatttcaaaaatctattagctatatcaaaagccttacattttaatataggttgaaccaaaatttcaattccaggtaacttcctatggaaaccattatttttgtgtatgtcttcaagaatgttcattggatttttgtttgtaatagtaaaataccggatacatttcacgtgtccttcagtattgatttggttgaatattgggtcataatggttgagaagcatggacactagagccagaatgcttggatatgaatcctggatctgtcacttacttctgtgtgacctttgaaaggctacttatttcctctcttagctttctcattaaaatcaatgaacaataaaaa

SEQ ID NO: 87597 - DNA, 614 bp, Homo Sapiens
aagagggactcagatcacctggaattatggcaatgtcttgcaaggatacttctgaaaatcgggtgtcacgggaagctgaactttgcatcccagttctgaaacatacagcaacctcatggagacagatgcatcactcggcattttggggcggtagcgagttcagtgacctgccagatttcttagcattaacttgaaagagaagacacttatttgatttgatttgatttctactagtcaagtgggcacctggattaagcagactctcccccaggcaccccggaggcctctgacatcccttatgtccagcccagacatggcctttctgtggcctcagcttatctgcccagtccaatcggctatagccagaataaaaagggaggaagatccaagagagggaaggaggctttcccagctactttcctgctaaccagggcagaggctggtctacatccccctatccaggtggcccctgcagtcatggcttttctgcttctagaagccatccctgagaacatcattgcagaactcaaaatacattgcatcatacaaaatgaagtggagaattaaggtaattatccaattattaaaaaccatttcttattcgttagctaaaa

SEQ ID NO: 87598 - DNA, 423 bp, Homo Sapiens
aaaaggaagttccaagaagaatttttaagaactacctctaggtgtgcctccacgctggccctagctttcccattgctgttccattgctgagacaaactggaaggctccctttctgtttgaagttttatgacttgtagtcaggctttgctgttcgtcacagtgtcattttccattcaggtaccatcacctggtcccatcaacaggtctagtatgtagctcactgataacagaggaagatgtgtctcctcccaccctcttcctaatggtcattatgcctttctccatctattgtctctttcaccccttcccctctcccttgggctctgatgaaaaattgttgactgcagtttcggaagtttgatctgagaaccaaccatagaatgtttcagttctaggaaataaaaccagttgataaaagcaaaa

SEQ ID NO: 87599 - DNA, 1135 bp, Homo Sapiens
  misc_feature (380)..(405): n is a, c, g, or t
  misc_feature (512)..(512): n is a, c, g, or t
  misc_feature (515)..(515): n is a, c, g, or t
  misc_feature (518)..(518): n is a, c, g, or t
  misc_feature (1115)..(1115): n is a, c, g, or t
accaccccaccataagtactagctcgtgtaaatcggacgaggctctcgcaagctgctaccatgatggaagtttgagagttgagccgctgtgaggcgaggccgggctcaggcgagggagatgagagacggctggcggccgctggccggagcccctctcagcgcctgtgagcagccgcggggtgcagcgccctcggggagccggccggcctgcggcggcggcagcggcggcgtttctcgcctcctcttcgtcttttctaaccgtgcagcctcttcctcggcttctcctgaaagggaaggtggaagccgtgggctcgggcgggagccggctgaggcgcggcggcggcggcggcacctcccgctcctggagcgggggggagaannnnnnnnnnnnnnnnnnnnnnnnnntgcagctccagggagggggtctgagtcgcctgtcaccatttccagggctgggaacgccggagagttggtctctccccttctactgcctccaacacggcggcggcggnggnggnacatccagggacccgggccggttttaaacctcccgtccgccgccgccgcaccccccgtggcccgggctccggaggccgccggcggaggcagccgttcggaggattattcgtcttctccccattccgctgccgccgctgccaggcctctggctgctgaggagaagcaggcccagtcgctgcaaccatccagcagccgccgcagcagccattacccggctgcggtccagagccaagcggcggcagagcgaggggcatcagctaccgccaagtccagagccatttccatcctgcagaagaagccccgccaccagcagcttctgccatctctctcctcctttttcttcagccacaggctcccagacatgacagccatcatcaaagagatcgttagcagaaacaaaaggagatatcaagaggatggattcgacttagacttgacctatatttatccaaacattattgctatgggatttcctgcagaaagacttgaaggcgtatacaggaacaatattgatgatgtagtaacgtttttgcattcaaagcataaaaaccatttacagatatacaatctctggtgctgaagacattatgacaccngcaaatttaattgcagagtg

SEQ ID NO: 87600 - DNA, 656 bp, Homo Sapiens
  misc_feature (529)..(529): n is a, c, g, or t
  misc_feature (554)..(554): n is a, c, g, or t
  misc_feature (576)..(576): n is a, c, g, or t
  misc_feature (596)..(596): n is a, c, g, or t
  misc_feature (610)..(610): n is a, c, g, or t
  misc_feature (631)..(631): n is a, c, g, or t
tttgatctatgaaccattttatttcaaatacatcttacggtgacaatttggcctactgcttggtggggaaaggcctttccacgtttcactcactgcagagcaatccagctttcctgtgatattcatctgatgtttatatccatcttttgaaatataggggctattagaccagaaatattccatgaagaagggagcaaagattcatgtcactgacaacttctgaaagggcagtctaatgacaaagtcagtcgataattgctcagaagatctgtattcaccagaaagagtctttctgctgatattcagaagatcaaattttaagctcagcatgaaccaagatccagttacactcagtatctcttcttttgtgggtctcatttcaataatgttccagacctgattcagtcagtctcaaataccctttggaataatagtcttctgttctctagcagtgacatttctccagcaacagtggcatattcagaagaaccagaaaagttcatttggcaccaacatttcccatgaggtncttcgagtagtcaaattcatagagncggaaagtagaatggtgtttgncaggggaaggcaggattcanccccctaaaacttnctgttttctttgtgcctctgngctgtgagccaagacacttgttctg

SEQ ID NO: 87601 - DNA, 680 bp, Homo Sapiens
caaagtttatatatttttaatttttctaacataccacattgtctgttgtattaataccagttcactttttgttttctgcagaaaaatccagaggaagacaactcagggagaacattgggttgggagccagggcacttgctgctcaccatctgcaccgtgcgcagtatggagcagctcctgccgttcttcaatgtgctcagtcaagtcttcaacagcaaagtcacaagccgatgtggaggacactcagggagtcctatcctctactcaaatgccttccctaataaggacatgaaactggagaaccacaaaccatgttccagcaaagccaggcaaaaaatagaagagatggtagaaaaagattttctggaagggatgataaaaacttgagcaccattgctggttccatttagcttacatgtaaatgtaattatttaaaacacacacactgctctgcgttgtatagtttttccttttttgtatgtaacagaacacatttcagattgtatttaatttaaatatttgtatataagagcaaatgtctgaatgtggcctgaatcaagtttaaatattgttggctcatactgattatggtgcctaagagagctatatatatacacatgtaaagtccattgtttttattgtcctgagttgtcttaaacctgcaaaatatacactaccca

SEQ ID NO: 87602 - DNA, 1857 bp, Homo Sapiens
gtccaaggtagcgaggcctgggtggcgaattcggcacgagggcgcagggcgacggacccacctccggccactgggacggcggcgcggagaaggcagactttaacgccaaaaggaaaaagaaagtggcagagatacaccaggctctgaacagtgatcccactgatgtggctgcccttagacgcatggctatcactgaaggagggctcctgactgatgagatcagacgaaaagtgtggcccaagctcctcaatgtcaatgccaatgacccacctcctatatcagggaagaacctacggcagatgagcaaggactaccaacaagtgttgctggacgtccggcggtcattgcggcggttccctcctggcatgccagaggaacagagagaacggctccaggaagaactgattgacatcatcctcctcatcttggagcgcaaccctcagctgcactactaccagggctaccatgacattgtggtcacatttctgctggtggtaggcgagaggctggcaacatccctggtagaaaaattatctacccaccacctcagggattttatggatccaacaatggacaacaccaagcatatattaaactatctgatgcccatcattgaccaggtgaatccagagctccatgacttcatgcagagtgctgaggtagggaccatctttgccctcagctggctcatcacctggtttgggcatgtcctgtctgacttcaggcacgtcgtgcggttatatgacttcttcctggcctgccacccactgatgccgatttactttgcagccgtgattgtgttgtatcgcgagcaggaagtcctggactgtgactgtgacatggcctcggtccaccacctgttgtcccagatccctcaggacttgccctatgagacactgatcagcagagcaggagacctttttgttcagtttcccccatccgaacttgctcgggaggccgctgcccaacagcaagctgagaggacggcagcctctactttcaaagactttgagctggcatcagcccagcagaggcctgatatggtgctgcggcagcggtttcggggacttctgcggcctgaagatcgaacaaaagatgtcctgaccaagccaaggaccaaccgctttgtgaaattggcagtgatggggctgacagtggcacttggagcggctgcactggctgtggtgaaaagtgccctggaatgggcccctaagtttcagctgcagctgtttccctgaaagccagagaagaccttcctcttacatcacattaaggtctcacccttccatggaaggattgggaggggtggaatttcctttattaaaagggtttctgtccagagttttttattcctgccaccctgccctgcccgtttgtgtttgcctttacttcagaggccaatagcagagcctacctgacacagaggggacctgggggcctggcacagaatcttatgcctctcccagtgggcttttggatgggctctctgccacctccctggtgttggaggaagtgggtttctgaagcttgcagctgcttttgcaacctgctgggcctgggctgccctagttaccgggaacctcctagtcaccccatagaaggtgaactggaacatgggatgccctcttactgctcctgcttgcctgcatcagatggacacagaaggagggggctgctgctgaaggagtcaggcttgggatggagagcaagaagccaaaggactcgtctgggagcatgatcggcccctcttactagcagctccatcagctgatcagaaatcagagacagaaagggactaggttactccgttaaatcctaccctattttcagcctagaaatcacatgggcgttttcagg

SEQ ID NO: 87603 - DNA, 820 bp, Homo Sapiens
ttcgcaccgacgggtgatgaagaagtggacttcaagaaattcatcctggggacctccaagttcagcgtcaaggccgacgagaagcagaagttgaggtttgcgttcagcatttacgacatggataaagatggctacatttccaacggggagctcttccaggtgctgaagatgatggtgggcaacaacctgacggactggcagctccagcagctggtcgacaaaaccatcatcatcctggacaaggatggcgatgggaagatatcctttgaggaattcagtgctgtggtcagagacctggagatccacaagaagctggtcctcatcgtatgagcctttttcttacaagcaccacccaacaacttctgctttcttccctatctctttcaagatttgctcaagacgtccaactgtctctctgacttatctggaagtatttctttttgtgaagccatatgtcctaacaggagcttcatcaccaactcagtgctattaattctccttctctgaatgactcagggtaccctatagggggaagagcaagtcaaatgagcatagtggggaaagaaaaggaaatggcttttataaacatcttttactttgttttgattcaaagaccaaactagaactttaaaagttcaaaaataagaaagtatacatttttgctgttatttctcatcattttgtatatgggaggaaatttataatttgcatgggtgttaggtgaactgttttcatttgcttgtgttcagatatcttgccagattgttaacttcctattgtagcaacagggacaaatatatttgtctttgctgggcaaaaa

SEQ ID NO: 87604 - DNA, 481 bp, Homo Sapiens
gcatcttcagggagaggcacccttgccatgtgatgacaaactgaccacatcacctttgtcctcccaaacctccattctgacttctctcaggaagaatctgagtgagcttgatcagattcagaggtacttccgccagaagctcaccaagcctttcctacccctcagccctcagactcaaacggccatctcacagcaccaggagagctgtagggaccatcttgggccaggtgccagcagcctagaccctgggagccagtgtatcctggagaaatccagtaacctggtgttgcaagtcagctccttaatcacaggtagttactgaagtaactggaagcatgaacatgcccaccaggactcccagctcccaacgattcctgagcatgagcagatagtctctgaaagcatttccacagatgtatccacaactatagattagattctggtcctctgatattagaataaagtactaaaaattgtaaaa

SEQ ID NO: 87605 - DNA, 685 bp, Homo Sapiens
atatacagtcccttttccttccctgcctctgatacgtatgctgcattctccagccacatggcaaggcagaccctagaccaacttgctcatgcctcctcaaaggagcttgatttctcctctcctgggagaagtgataccacaagaagccaagcatcacgccatgaagagcatgtgcagaacattcgccggtttcatgaatccctgcatcttcagggagaggcacccttgccatgtgatgacaaactgaccacatcacctttgtcctcccaaacctccattctgacttctctcaggaagaatctgagtgagcttgatcagattcagaggtacttccgccagaagctcaccaagcctttcctacccctcagccctcagactcaaacggccatctcacagcaccaggagagctgtagggaccatcttgggccaggtgccagcagcctagaccctgggagccagtgtatcctggagaaatccagtaacctggtgttgcaagtcagctccttaatcacaggtagttactgaagtaactggaagcatgaacatgcccaccaggactcccagctcccaacgattcctgagcatgagcagatagtctttgaaagcatttccccagatggatcccccactatagattagattctgggcctttggtattaggataaagggctaaaaatggtgaaaa

SEQ ID NO: 87606 - DNA, 493 bp, Homo Sapiens
ccggagcccggacacgggagcctcccagtcagttcaagacccgacatgagggaaaagggacgtaggaagaagggcaggacctgggcggaggccgccaagacggtcttagaaaaataccccaatacacccatgagtcataaagaaattcttcaagttatccagagagaaggactaaaagaaatcagaagtgggacttctcctcttgcatgcctgaatgcaatgcttcacacaaactccagaggtgaagagggcatcttctataaggttccaggtagaatgggagtatatactttgaagaaagatgtgccggatggggtgaaagagctgtcagaaggttcagaagaaagcagtgatggtcagtcagattcccagagttctgagaacagcagcagcagcagtgatggtggcagcaacaaggagggaaaaaagagcaggtggaaaaggaaaggtaaatccacctgatccttcaataaagtactaaatgctgtaggac

SEQ ID NO: 87607 - DNA, 498 bp, Homo Sapiens
  misc_feature (286)..(342): n is a, c, g, or t
gtgatccacccgcctcagcctcccaaagtgctgggattacaggcgtgactgtgcctggcccaccccagcattttttaagatgtatgtattcgttgttctgtttttccagatgattctgtcgtaaagtgatgctatgttgtcgttaaaacatcaaagtgattgtacggtttttgatgggattattcaagtgtcagaattaactgttcaaaatgttctgaatcatgtagatacatggcaggtaactgtttatgggagaaaagtacagtgctgttacgtggcactgtannnnnnnnnnnnnnnnnnnnnnnnnnnnnnnnnnnnnnnnnnnnnnnnnnnnnnnnnatccacaatattctcgtgcagtgtgtttggaatcctggtctgggctctcgtcgttggccttgtagatcaagtaggggaagtgagtgatgttcagtcatgctgctgggacacttggttttccagatgaaaacacataaatcaaactacatgcactat

SEQ ID NO: 87608 - DNA, 456 bp, Homo Sapiens
agaccggtgaccgccgccctgcccgcaggccatgtggcccccgctgttgctgctgctgctgctgctcccggccgccccggtccccaccgccaaagccgctccccacccggatgctaacacccaggaaggccttcagaacctgctccaaggagtcggggctggcggagacggagagctgcgggcagactcacacctggccccgggctctggctgtattgatggggctgtggtggccacgcgaccagaaagccggggaggaagacctgcggttccgtgagaggcgtccagggctgcaggccacggcgacaggctccggggaacatggggctttccctgtccactcccaaggagtgtgggcctcaacgcattggcaggggacggccgtgtgccctctccagaccccacccccagatgcatttattagaaataataaagttctttcttagctaaaaaaaa

SEQ ID NO: 87609 - DNA, 478 bp, Homo Sapiens
  misc_feature (273)..(292): n is a, c, g, or t
ctggttggggtagagcaaaaggatggtcactcttccgaggtctccctgaaatgaatgtatttctcccccaaaagagctgatatttaatgttttaataaggatttttgagaaacaaataaccttatttataatctgggtgatccaatcattttttactcccttttgatgccatacatagaggaaagtctagcttttttggcgtgagacttttgcaatgtgcagtgggataaaatgcatttccttttctggttcgtttttcttgttaacacgcgnnnnnnnnnnnnnnnnnnnntcgttccactcaccacctggacaggcgtcccccagcacggacacactggcacacaggtgcccacatctcttcctctcagcccctccacctgcctaatgttatgcaacctccttctgatgtatccaccaaaccagtactgaatgtggccgagacgttttcagtaaatcttattacctaccgtaaaaa

SEQ ID NO: 87610 - DNA, 413 bp, Homo Sapiens
ttttacacgtggtaaaactcatttaatcatcacacacatgtgaggtagcttttgggattattcccatttcacagatgaggaaaatgagaatcagggagggtaagtaacttgccagagctccttcagccaggaagtacaggactctagatattaagcttattaaagagttcttgctgaacattgattcagacactgacacttggctctggatggatgggctcagtgttgctctgcatctggattacttccaaaggtccatctgtgagcctgcctgacccccgggatggggcggcgcagcctttgcagccttggcactccatctggagagactacaaccacacagccagcaaattactgacccagcatattctgaacccaggtctttattctttccaaaacttcacagcaccttc

SEQ ID NO: 87611 - DNA, 570 bp, Homo Sapiens
ccacatatttgtttgtttaaaatggctttcccaaaatcaaagtagactaaagcagccatctttaaaatccaggatcatcaatgctattaacagtatcaggtaaaaagtacactttaaaatattttaatcaggcagagttttatggatagagaatagaagagaaaggtagtaaatattgaacatattccaatataggaacctatctctgttttagtacaaaatatttctgacatctgaactagaggtcaagagaataaattcatttgtatacatctgagcaacctgtctttcagatgataaagtatctagccttttctgacaccataatagttcattttatagggaataagccattaggtgtatataattgctttctagaaatgacctaatgtccccaaccactgtgtagtggcagatcactgtttcacagcatattttctcccaaggaaagtattcaaaagagactgcaactaacaagactcttatttcatcaaaatttaaatatttctgagttgtatttttaatgcctctttcttttctgcctaaatgcttagaaattataaagcaaaa

SEQ ID NO: 87612 - DNA, 1050 bp, Homo Sapiens
  misc_feature (943)..(943): n is a, c, g, or t
  misc_feature (999)..(999): n is a, c, g, or t
cagtcgacggtaccggacatatgcccgggaattcggccattacggccggggcgctggcgggaggtttggagcagatggataccgtatcgacgtggggcctccggtatgttgccgctgcgttgagtttcataagtacaagccagacctttgatttacctaccctatcttctttactgatgaagctgaaactactttgtgatgcctattgtcccagatctttctgttaattgcctaacaacaaaccagtttagaaacatcaactggaatcaatttgcatttgaaaattagatcagcacaaagacttgatattgtggaatgactagcaaacaagcaatgtcatctaacgaacaagaaaggctcttgtgttataatggggaagtccttgttttccagttgtctaaaggaaattttgcagataaagagcctacaaaaacacccatattacatgtcagaagaatggtatttgacagaggaacaaaagtatttgttcagaagtccactggattttttaccataaaggaagaaaactctcatttaaaaatcatgtgttgcaactgtgtgtcagatttcagaactggaattaacctcccttacattgtgatagaaacacatacaaagaataatgtttttgggcgcctcccccactcccaatacccttaaaacatgtcggccggcctcggcccctcgagaaagctttctagaccacttcgtttggcgccgcgggcccccctagggtaagtggaacatgggccatagcctggttctcctaggaaacatcccgggcccatggacttagtggcttggaattcctcccccattaaaaacacgcccccggggggaaacccggacgggttctggaaccaaatcccacgattggaatttctgggagggtccattatctgggaatccgtatccaaccagggaggtctccaggggggagacntcggcatatctgacaatattacggccgcgccgcgcccctgtgtcaacttctcactntgcaagagaacctggggtcgggcatatttctcttttgaagccgcatctccc

SEQ ID NO: 87613 - DNA, 559 bp, Homo Sapiens
ttgatattaagaaatctgaaaaactttgaataggtagtaaaagatgatgaattcttagagctttacctcagaatgtgtaattttcatgcttttcctttctagaaatctaggaaacctgacatgggacctttggtaaatacattattattcatacattttgatggaatataactaatatgtttattttctctaaaccatagtttcataagtacaagccacacctttgatttacctaccctatcttctttactgatgaagctgaaactactttgtgatgcctattgtcccagatctttctgttaattgcctaacaacaaaccagtttagaaacatcaactggaatcaatttgcatttgaaaattagatcagcacaaagacttgatattgtggaatgactagcaaacaagcaatgtcatctaacgaacaagaaaggctcttgtgttataatggggaagtccttgttttccagttgtctaaaggaaattttgcagataaagagcctacaaaaacacccatattacatgtcagaagaatggtatttgacagaggaacaaaagta

SEQ ID NO: 87614 - DNA, 524 bp, Homo Sapiens
ggctggaatggaaatgaggctgtggaatgaaaggtcactctcaacttggggaaaatggcatttcaccaggaacatcaagtacctcggaggcagaacatgcgaggggcagggaacgccaagaggaggcacttacctgccattgagaaagtgcggctgctcagagggcctagcctctcttgttcaaaagagaacagaggctcacccacagcagacattcctgcttccggatcctcagcggcctctcccagggggaggaggaagaagcaaagagaacaggctaagagtcaccacttaccaggccagccccggtcttgtacgcattaggtcgcccggcggggcaaggacactgtcacctctttgcaatcaggcagtctgaaacccagcgacttgccttcatgtccccgggctttcgcctataatttatcaccctcaacagcagctcggctgagctgaaagtctccggtgcagtgcaccgaagagccattgacttcgtgggattgtgaataaatacgaggaactgcaaa

SEQ ID NO: 87615 - DNA, 492 bp, Homo Sapiens
ttattactagacacatctattaacattgcagccagacctggagagatatcctctggaaccattacagggcttttcaaagaacacacagtcccactgaaatcagcagaatatttcctggcctctctactgcaccccagggggggtgttcacactcctcaaagcccaggccagactcctgttaatgctaatagcaacacatgtgcactttcaagggagagaggaccacacagtgcttagtatgctagtaagcattaatttgattccttgggtgcaaaacaatgtcaatgggaccattttgaggcatatgctactgctcacaagcccaattaaaccaaaggattattgctatgttgcattatccataggagatgtacatatgatagattattggggatgcaatttgcagtgcattgtttattcccaatgtattgggtgtttggtgttgctttggaaaggttgtttacattgaaagtaaactcacattaaaaaata

SEQ ID NO: 87616 - DNA, 120 bp, Homo Sapiens
tttttttccgggtataaatggtaaaatgttaatatttgagattcttggctttttcttacattattctgtctttcctacttaatttttaattgttactaagagaaagctggtcacagtaca

SEQ ID NO: 87617 - DNA, 491 bp, Homo Sapiens
tacctgcccttgccggtggacaagatcatccagcgtacaacaaagatggtcaacaagatcgtgcagtacagcctgattgaagggaactgtgagcactttgtcaatggcctcagatatggcgtaccccggagccagcaggtgtgaccccatttgctctgatatggcttcttacagagctttcttggggtttgtcatttcattagtgatcagaatggtagagcacgccctgatggaaggagcgaaggctgctggagcagttatttcagctgtagtggatagcataaagcccaaaccaataactgcctgaaggtgatgaaaactccagctagaggaagagttactgacacaagcaaaaagaacatgcttccttcccttgccttctctcaatggctccgattaagaaaattgtgaacttctggaagaatctacaatgtatccaattacccttccagaaatacatccaatatatacgagcatagacccacaaaaaa

SEQ ID NO: 87618 - DNA, 651 bp, Homo Sapiens
cccagacctgaagacctgattgagatttttcgaatgggctatgagcactgggccatctatgtagaagatgattgcgtggtccatctggctcccccaagtgaggagtttgaggtgggcagcattacttccatctttagcaatcgggccgtggtgaaatacagtcgtctggaggatgtgctgcatggctgctcctggaaggtcaataacaagctagatgggacgtacctgcccttgccggtggacaagatcatccagcgtacaaaaaagatggtcaacaagatcgtgcagtacagcctgattgaagggaactgtgagcactttgtcaatggcctcagatatggcgtaccccggagccagcaggtagagcacgccctgatggaaggagcgaaggctgctggagcagttatttcagctgtagtggatagcataaagcccaaaccaataactgcctgaaggtgatgaaaactccagctagaggaagagttactgacacaagcaaaaagaacatgcttccttcccttgccttctctcaatggctccgattaagaaaattgtgaacttctggaagaatctacaatgtatccaattacccttccagaaatacatccaatatatacgagcatagacccacagactctcaggatgggaagg

SEQ ID NO: 87619 - DNA, 342 bp, Homo Sapiens
  misc_feature (62)..(62): n is a, c, g, or t
  misc_feature (120)..(120): n is a, c, g, or t
  misc_feature (323)..(323): n is a, c, g, or t
ggttatctgatggtgcacagtttcagtacctaggatgggcttctcatcgagaagtgcctggntccaaaaggtcattcttgaaactgatacttcaggtggaaaagtggcaggaggaatgcnaggaaggggaaggccggacgattatccactgcctaaatggtggcgggcgaagtggcatgttctgtgctataggcatcgttgttaaaatggtaaaccggcaaaatgttgtcgatgttttccatgcagtaaagacactgaggaacagcaagccaaacatggtggaagccccggagcaataccgtttctgctatgatgtagctttngagtacctgggaatcatct

SEQ ID NO: 87620 - DNA, 547 bp, Homo Sapiens
agcggatggacagcacccacctgggtttactcaagggtgtgcattcattttaggtgggatcgccacaggatttcatgttattttccttacggcttccttttcactgacctcatttgttgagttaatgtaagttaaatgtgtttatgatataactccactgtacatcatcctttgagtagtaaaggataaaagcatatatactacctatatgtatgtgctgtatgtgggcatttcattgagatctaattaatagctagcctatttatggttattcgttttagtaagttctgtgggagcaaggtatttaaaatcaaaactaataactacatcatggtttttgattaggatctaaatattcaggttttaagcctgctgcaaacttttaaaatattatgatagattctgtactacatgtgggaaacaagcaagaactaaataatcaaatgttgtcaaccaaaagtaatagttgggtattggagatttttttaaaatgtttttatgttattagctatttggagttaaataaaaacagaacaaggaaacaaaa

SEQ ID NO: 87621 - DNA, 1134 bp, Homo Sapiens
caatgtatctaacaacttcaactggatatccttatacttaccataatggtgttgcttattttcatactccagaggtaacttcggtcccaccgccttggccttcacgttctgtatgtagctcccctgtgatggtagctcagcccatttatcagcaacctgcatatcactaccaggccaccacacagtatttaccaggacagtggcagtggagtgttcctcagccttctgcctcttctgctccattcttatacctgcaaccttctgaggttatttatcaaccagtggaaattgcacaggatggtggatgtgttcctcctccactgtctctgatggaaacttcagttccagagccttattctgatcatggagttcaagcaacatatcaccaggtttatgctccaagtgccatcactatgcctgcgcctgtgatgcagcctgagccaattaaaacagtgtggagcattaattattaagacaattgggcagctctattccagctcaactgatttcttgtccaatgatccttgcgtggccgagatccagcttcaacgaaccagctagaagctgcccgttgtgaaacttagtgttagttaatacctcaccatactcagttattccactataagctgtctaaatttgatgaaatttgctttttcagctgttctacaaaattatttaggtagatgtggcatgttggttttttatgtgctaacctaactgtaatgaccttttctacaacatgttttatccattccataaataataaccacattgggaatagtgaggtgtcttttattttctctgctttgtgttattttttcttatcaaacaattagatgttatgtttcatattatttgatatttattttcatatttaggataagaatcatttttaattataatacttttaatactttcatatattttacaacagtatactatttaatattaatgacaattctatttttgctttgctgttttgtcatttaatatgcttttgtctaatttttaattcatttattactgttactccttatttaattttgcgtctgccatggttttcagaatctgaatagtatttatacttcttttttataacattttccaaatattagaaataccatcaacatgaaa

SEQ ID NO: 87622 - DNA, 728 bp, Homo Sapiens
aaaagttcattgtattttattgtataagaaaacctatacagaaccactgagcaagaaacaaagcagtgcataacagagactctttaaacagtatcctggatgacaggatgaaagacatgtaattttaaacaaggaattcgattttttattaaacctcttagctatgtagaacaggcctgttattagtagttttattgccttagcaaaaggcagttttatgattttatttggtgacttcacttgcatcacatgaaatagacttacaccttaattcctttctgttctagcatataagcattagaagacaggactcaagtgtctgctggctgtaaaaatactggagaaactcatctatagcatgcagaatacatattcaggtatttattattttaagtaaaccataaaaccattgataattttacatattaatggtgatcacttaacttcgcatttaatctacaatacataattcgcgttacctttcccttcacttgaactcacaaaatatctgtaaagggagtgaatgtgaatacagttaaaatacccttactcactactatgttgaactatttgcaaatattttacttcaagccatggtattattagccataaaaaggatagtaaatgaaattcaaatgtgctgaaacttgaaaggcatagtttaaaaaattacatgttgtggtagcagctattaattgtctaaactcaactatgtgcaatacaataaa

SEQ ID NO: 87623 - DNA, 536 bp, Homo Sapiens
agaaacaaattcaaggagcagcagccaaatacctacgttggctttaaagagttctctagaaagtgttcggaaaaatggagatccatctcaaagcatgaaaaggccaaatatgaagccctggccaaactcgacaaagcccgataccaggaagaaatgatgaattatgttggcaagaggaagaaacggagaaagcgggatccccaggcacccagacggcctccatcatccttcctactcttctgccaagaccactatgctcagctgaagagggagaacccgaactggtcggtggtgcaggtggccaaggccacagggaagatgtggtcaacagcgacagacctggagaagcacccttatgagcaaagagtggctctcctgagagctaagtacttcgaggaacttgaactctaccgtaaacaatgtaatgccaggaagaagtaccgaatgtcagctagaaaccggtgcagagggaaaagagtcaggcagagctgatggatccagtttgaaaaaacaaaatgccattcaaccgtaaaaaa

SEQ ID NO: 87624 - DNA, 760 bp, Homo Sapiens; identical to SEQ ID NO: 10654

SEQ ID NO: 87625 - DNA, 568 bp, Homo Sapiens
tgtttaagaagtaaatgctcccaaggcatttgaaatgaacatagaaacataatctaaatgtctctaaattttccactttgtgttttctaaacacaaattgtattactcatttgagcataactcaagaattcagcgatgataaattgaagggctgaatgtgagaactccattaattccacttcttccaagaaagttaacctcaggaaatactgtttgaagagaagaaagtagtaccaaacaaaaaccttaaacagtacttgaatcttttttgcgctgagactataaagaattcattctaacatcttgtttcataagggccacatcattcgttggagcatgatagtgtgatttgtgtacaattgttacctctcagctgctgaagttcacacttcaaggatctaggagctctgtgaggggtcgtccagcaagatgctgatttgtctttcagttggtatggtttctgtgatcggggtaaactcccgtctcccactattcaaaagcagcccaactcatgctttggaatccactgaaataaaaatagttacatgaagtttaactttgctttaaa

SEQ ID NO: 87626 - DNA, 406 bp, Homo Sapiens
gggaccagagcaagctcaagacccagcagtgggacagccagacagacggcacgatggcactgagctcccagatctgggccgcttgcctcctgctcctcctcctcctcgccagcctgaccagtggctctgttttcccacaacagacgggacaacttgcagagctgcaaccccaggacagagctggagccagggccagctggatgcccatgttccagaggcgaaggaggcgagacacccacttccccatctgcattttctgctgcggctgctgtcatcgatcaaagtgtgggatgtgctgcaagacgtagaacctacctgccctgcccccgtcccctcccttccttatttattcctgctgccccagaacataggtcttggaataaaatggctggttcttttgttttcc

SEQ ID NO: 87627 - DNA, 383 bp, Homo Sapiens
tgtatacccaaatctatacccaaaagaactgcttttatataatttttaaataaaacttttcaaacacaaaagagcgtaacataatgaaaggcatgtatccatcaaccagcatcaataattataaaatcgctcttttaatgagtataaaataagaactgaacttaacgtttaattggcagcgtttctccatttctgataataacagtgcaccctaaaatcagcagcgtcttagatttagggcctcagaaacaaggccacccacactggatccgaggggcaactgggcacctccatggacacccatgcttcataaagacagctgcaccctacactgggttggactgggacgttttcagctatccaaaataaaacgttggttttct

SEQ ID NO: 87628 - DNA, 401 bp, Homo Sapiens
  misc_feature (96)..(96): n is a, c, g, or t
gctctcacatcgacagaccacaacactaagccaacaatgatacggcgtccaccagcagttgtttgctacatttgtggtcgtgaatatggaacaaanatctattagcattcatgagccacaatgtctgaaaaaatggcataatgaaaacaacttgttgcctaaagagttaaggagaccagtacctaaaaaaccagaagtcaggaccattactgacaaataagaaaaacagttctgaaatgcctgtccaaagaattatcttctgatgctgagacataaagacactatgtcctggcaacactgtgcatgagagggacctatgggaatttgctgtattctccaaaagtttctttcatacatcatcaaaccctttgaatgtaaaataaataataaaatacttaaaa

SEQ ID NO: 87629 - DNA, 433 bp, Homo Sapiens
ggcacgaggcaaccatgcctgcatatcagggcagcattttatgatcccatggctctcacatcgacagaccacaacattaagccaacaatgatacggcgtccaccagcagttgtttgctacatttgtggtcgtgaatatggaacaaaatctattagcattcatgagccacaatgtctgaaaaaatggcataatgaaaacaacttgttgcctaaagagttaaggagaccagtacctaaaaaaccagaagtcaggaccattactgccaaaggcttctatgatcttgatgctttaaatgaagctgcttggacaagtgcccacagccagttggttccctgtaatgtttgtgggcgtaccttcctgccagacagactgattgttcaccaacgatcttgtaaacccaaagccgccaagtaaagcccttttctctctaaaa

SEQ ID NO: 87630 - DNA, 629 bp, Homo Sapiens
atcaattaagacagctcaataacaagttctcaacctgttttgcctgattaggcttttaaaagtcattttaaaaaaactgactctacattttttacaagtgtggaaagacagtattttaaacatctaaaacagcaataatctccatgatcctttaaaatgagtacagttagatttatgaaaaaacaatcacattgctctaatttctctcattttcctgtggaccagggagaggtttctcaaattggtgtttgggaactaatatcccaaacaagacgtattttcagtaatagagggagtacagttcagtggaaagaacatggaatctggacacaaatttaaactgaggccctagcagttaccagctgtgtaccctaagctctgtcagtttcctcaattgtaagatagctaaatcataggactgttaagagaattatgtaaacgtaactagtgcttgacacagagaaggtgctcaacaaatttgttttcctcctcttcctttcctctgaagccacttttctgttctctggaaatgaatctaactggggccactctggccttcttttaacacaaactcagccctgttggaaggatcacataagaaactaaagtactctaagaataagcctcct

SEQ ID NO: 87631 - DNA, 656 bp, Homo Sapiens
tttaacagtataaaaacaatcaatctttattttatcctctgtcttcatatcatcaggaaaagttacttgatcatttattggggaaaaatctgggagggaatgtgctctgccctctttttgatgttttccctccataccacacacagaacccggaaatcaatgaccagccccgtcatgctgccatcaggagaaagtcagacagaaagttagagataaagctgctctcaggcttgtttagatttatatgggtgcaaacacaacgtagtccaattcagttatcatgaagactttacataaaagtaattctgtccacaaatcctataatatttttcaggagaaggaaatttgatgtatggagaattgaattggtattctcacctaaaattgaagtgaggagatgagagaatgaaatgaaatacctgaattacattttagtgtctatacaggtgagggctatattcatatgtagacatgtctacattcccttagcagagctacaaatatagctgctcataatttgaattatgttaatctgtttcttcatgcacggtagatccttttctgagtagctcgttctccaactgtgttgaacttccaactgcttgccaggtttctcgggatgtcaccttggagtcacctctctctcctaaactcct

SEQ ID NO: 87632 - DNA, 606 bp, Homo Sapiens
  misc_feature (531)..(531): n is a, c, g, or t
tggttgaatcctcctggaattcacagggaagtggctttgccctctgccctcgctgctggaaggcaaggggccgttctcgccttggttttctaggttgtgttgcggcaggagctgactgcccctaggcctagatctctgcacaacttcgctcagggacacctgcctctgtgcatgtctcatggtgtgaatgtgtttcctgctcacaggtaccgttttgtgtcatgcagttactggaatgtacaaaagcagctgtgatctttgtgagagctgcacagagcaggagtctgagagctgcacagagcaggagtctttatttggttcacttctggtctgcagcaaccacttgctactaaaagatggaaaagatgtacaaaaatgtcacagccctttagaaagcgacattatcagaaatgtatgaccttcagtcctccctccctctcctatgcccccaccagaccaggcggcgagaaggaacagggagtgaacatgtaacggaaaacaataaaactggaaaattttttaaacctgggnaaaacaacaaaaccaaatacaaaccaatacaacatcaatacactacataaacatccacacaaccacaacagaaac

SEQ ID NO: 87633 - DNA, 487 bp, Homo Sapiens
gcaggcgctcaggcacaccccgacgacatccaaagcagactcctgggcgcgtccggaaatcccgtcggaaaaggcgcggttgccatggcgccggagatgctccccaagcatcctcataccccacgggacaggaggcctcaggcggacacctccctccatggcaatctggcaggagcgccccttcctctgctggccggtgcttccacccatttcccctccaagaggttaataaaggtttgctcctcagcacccccccgcccaacccggcgtttccatacggtttgttcacaggccctttctaggccggtggtgaatgctcacttacattgaccgctgcgagggaattgttcggcgagtgctgcccatcttcaaatcaatgcctgctcagaacaacagaaagggcctcagatgtactggtttccacagaaccattgttaggcttttgtgaagcatttttgaacctaataaataatgtcaaaagtcaaaa

SEQ ID NO: 87634 - DNA, 521 bp, Homo Sapiens
ccggggtggccgcacccccttcccacctgtcctgggcccgtgtagctccggggcgtccccggccagaccctccccgctttccgcggcctggggcggcgcctcccgcagggcccttccctctgcccccgcctgtgccctggcggccccgtgcggctgagaccaagggcgcgcccctctcccggctcccggtctccgtgcggggcgaggctcctgggggtctctgcgcacccaccgcactgacagcgcccccgcaggtcatccagcggatcttctacgccgtgaaccggtcctggtccggcaggatcacctgcgccgagctgcggaggagctccttcctgcagaatgtggcgctgctggaggaggaggcggacatcaaccagctgaccgaattcttctcgtacgagcatttctacgtcatctactacaagttctgggagctggacacggaccacgacctgctcatcgacgcggacgacctggcgcggcacaatgaccacgccccttctaccaagatgatagga

SEQ ID NO: 87635 - DNA, 662 bp, Homo Sapiens
cagttgtttctcattcacttttaatcacgttttgagcacctgctaagtaccaggcattttgctaatgaggagcacagaggtaaaagacacatcactactgtatgaaatgcgtagctcagtggtgtgatacacaagcacagagaggtaacagagagcaaggagggcatggaagagaggcctctaactttggactgggaagggagaagatgtaagacaagaaagtcttccctaaggagctgatgcttgagctgtgccctgaggaatgaagagtagaccagttgggctaagcagacagaaaaggggaggaagctccagagagcaaatgagcatgagagtgcctgatgtagttagggcctgctctcactttaaatgaacacagacatagcattattgtggcacaaccatatagtgtggagataaaaaatggtggctatggaaattacaaagtagcagttaagaaataacgttaagcagtgttttataagtggactgtaagtataattatgtaaaatatacatatagtaaaaaaaggaaatccacaaaataatactgttttgggggcagtggaattataggcattttttctgttcttcattttcaggttctctatatcatcgtttgattcattctacagtttaaagattgtaagggccaggcgcact

SEQ ID NO: 87636 - DNA, 563 bp, Homo Sapiens
  misc_feature (469)..(500): n is a, c, g, or t
cattcacacgttaacagggcaccagtcgttaacaagtggaatggaactcaaagacaatattcttgtctctgggaatgcagattctacagttaaaatctgggatatcaaaacaggacagtgtttacaaacattgcaaggtcccaacaagcatcagagtgctgtgacctgtttacagttcaacaagaactttgtaattaccagctcagatgatggaactgtaaaactatgggacttgaaaacgggtgaatttattcgaaacctagtcacattggagagtggggggagtgggggagttgtgtggcggatcagagcctcaaacacaaagctggtgtgtgcagttgggagtcggaatgggactgaagaaaccaagctgctggtgctggactttgatgtggacatgaagtgaagagcagaaaagatgaatttgtccaattgtgtagacgatatactccctgcccttccccctgcnnnnnnnnnnnnnnnnnnnnnnnnnnnnnnnntcccttgttctcagtggtgcaggatgttggcttggggcaacagattgaaaagacctacagact

SEQ ID NO: 87637 - DNA, 545 bp, Homo Sapiens
attttgtggcttcagctaagctgtgtaagtgccgccaaaaatgaagtggagcagagtcctcagaacctgactgcccaggaaggagaatttatcacaatcaactgcagttactcggtaggaataagtgccttacactggctgcaacagcatccaggaggaggcattgtttccttgtttatgctgagctcagggaagaagaagcatggaagattaattgccacaataaacatacaggaaaagcacagctccctgcacatcacagcctcccatcccagagactctgccgtctacatctgtgctgtcagacacagtgctccccaggcacctggagcccgtacctaaactctaaagttgaggcatcatttcttactcctgtctttcagacttgtctgtctctatccttggtcagatgatgtaaaatgtttaagtttttaaaatataatattctccccttctagaccatctctcttctctacaacatcatcaccaattatgttaaccagacagtatgtgatttttatcttgaaagtaaaatatacagggta

SEQ ID NO: 87638 - DNA, 494 bp, Homo Sapiens
cagtggcagcttggctgatgagctataagccagccttgtttgggttcctattccttctgctgttgcttagcaactggttggtcaagtatgaacacaagctcaccctcccagagccccagcaggaggaagagaaaccaaagacttctgaaaacgactccaagaacagcaaggccgtgaacacaaaagaagtcaatagaacgcatgcctgctttgccctccaggacgagatcctccaacggctgttgttcagtgaaatgaagatgaaggtcctagaaaatcagatgttcatcatatggaataaaatgaatcaccacgggcggtcaagcagacatcggaattttcccatgaaaaaacacagaatgaggaggcatgagtcaatttgccccaccctgtctgactgtacttcgagttcccccagctaatgaggccgaggcgggctggcctctgccgatgttaccttttacctcagtaaaacccagtcacagcctaaaaaa

SEQ ID NO: 87639 - DNA, 513 bp, Homo Sapiens
gacatcatattgatgccaaacttagtgggggcacccggtcggcatagggaccagctgttctaaaggtctcttccaacctttgcctttttctttgctgcggccaatttgctctgttgagtttcttctgccattgcggggtggggagggaggcggggttggggccacgtgagcaaaatcccagtgagcactgatgaacacctccacttgcctaccagacagctgtgtgactgagcccgaggaggcataactagggcccccatagaatgcagaacaggggcgtggccttaatgctccaagcccattggtcaatgacaaagatgaaagggaaggggggtgtggccaggcagcagtatgtccagagggacctgtggctcacaaggaaagctgtccatgcaactgctgtccccgcctactctgaggggaggggccgccccctctgggagaggggaggggccggcttttgctttaaaagctttaaaactttaaaaaatatatgtgtgtatactttatgta

SEQ ID NO: 87640 - DNA, 809 bp, Homo Sapiens
ttagcaaagaaacagttagaaaaaggacatattgagccttcattttcgccttggaattctcctgtttgtaattcagaaaaaatccggcagatggcgtatgctaactgacttaagagccattaatgccataattcaacccatgggggctctcccatcccggttgccctctccagccatggtcccctttaattataattgatctgaaggattgcttttttaccattcctctggcaaaagaggattttgaaaaatttgcttttactataccagcctaaataataaagaaccagccaccaggtttcagtggaaagtattgcctcagggaatgcttaataattcaactatttgtcagactttcatagctcaagctctgcaaccagttagagacaagttttcagactgttatatcgttcattatgttgatattttgtgtgccgcagaaacgagagacaaattaattgaccgttacacatttctcagacagaggttgccaacgcgggactgacaatagcatctgataagattcaaacctctcctcctttccattacttgggaatgcaggtagaggaaaggaaaattaaaccacaaaaaatagaaataagaaaagacacattaaaaccattaaatgagtttcaaaagttggtaggagatactaattggattcggagatattaattggatttggccaactctaggcattcctacttatgccatgtcaatttcgttctctttcttaagaggggacttggaattcaacagtgaaagcacgttacctccagaggcagctaaagaaattgaatttctcgtag

SEQ ID NO: 87641 - DNA, 600 bp, Homo Sapiens
atcaaatgaacgttagaaaagggacatattgagccttcattctcgccttggaattctcctgtgtttgtaattcagaagagatccagcaaatggcatatgttaactgacttaagggccgtaaacgccgtaattcaacccatggggcctctccaacctgggttgccctcttcggccatgatcgcaaaagactggcctttaattataatcgatctaaaggattgctttgttaccatccctctggcggagcaggattgcgaaaaatttgcctttactataccagccataaataataaagaaccagccaccaggtttcagtggaaagtgttacctcagggaatgcttaatagtccgactatttgtcagacttttgtaggtcgagctcttctaccagttagagacaagttttcagactgttatatcattcattatattgatgatattttgtgtgctgcagaaacgagagaaaaattaattgactgtaatacatttctgcaagcagaggttgccaacgcaggactggcaatagcatctgataagatccaaacctctactccttttcattatttagggatgcagatagagaatagaaaattaagccac

SEQ ID NO: 87642 - DNA, 621 bp, Homo Sapiens
taagacttttacattgtacttggatcaaatggctacattaattggtcagggaagattacgaataataacattgtgtggaaatgacccagataaaatcactgttcctttcaacaagcaacaagttagacaagcctttatcagttctggtgcatggcagattggtcttgctaattttctgggaattattgataatcattacccaaaaacaaaaatcttccagttcttaaaattgactacttggattctacctaaaattaccagacgtgaacctttaaaaaatgctctaacagtatttactgatggttccagcaatggaaaagcggcttacacagggccgaaagaacgagtaatcaaaactccgtatcaatcagctcaaagagcagagttggttgcagtcattacagtgttacaagattttgaccaacctatcaatattatatcagattctgcatatgtagtacaggctacaagggatgttgagacaaattaattgaccgttacacatttctcagacagaggttgccaacgcgggactgacaatagcatctgataagattcaaacctctcctcctttccattacttgggaatgcaggtagaggaaaggaaaattaaaccacaaa

SEQ ID NO: 87643 - DNA, 416 bp, Homo Sapiens
tggctcagttctttattttatagttagcaaatgaaattagaaactgctttggcacaggtcaaaggtggctcccatatactcactagttttcctcaggattatcaatactcattatcaaaatgtacttttgcttggttaccatttaaagttgccaccaatgtaaatgacaggggttagggtgggtatgggtgtggggaacctgagcatacacacaattttttaaatcttttagatgtaatgcaattaaccatatctaatattcttttagaaaacacaagaaacacaaaacatgctcaaagatcaagaaatcgagttatacttttcataaggcaccaccaattaccctgataaattgtaaataaatatgtaagggaataatcaatagggagtcttgaggttttacaagacattcctgt

SEQ ID NO: 87644 - DNA, 702 bp, Homo Sapiens
  misc_feature (160)..(197): n is a, c, g, or t
cggacgatgccgtgacgcggcacggcgacactgttggcaatatgagcgcacccctgtagagggagcccttcggtcctggaggcggcgcggcgtgaagacaggttgctatttgagagcgttcccttgaagcccctcagagagtgggggaggggcggcggannnnnnnnnnnnnnnnnnnnnnnnnnnnnnnnnnnnnntgccgacccggcctgcacgcacgcgcatgcccgtagcgcgcggagccgcggtggccggcagcactgcgcgtgcgcggtgaggagcccgctaaggagcggcgctggcggacgtcgggctggctgcccgtgacgtcgtgcggagagctttaaagtgcgggccgggccgggcgtccgagggtctggtcgggagtcgggccgcgtctccgcagcagccctccgcggcatgaggcgctgccggcgcccctgccccgcgggacgtggagaaggtggaggaggaagaagccccgttgtcgccaccgttgcatgacccgccgctcctgaggccctaccccacgcccggaccctcgacgccccccgccgggtcccccactcacgcatgggggttcggcgctaaggacccccctccctccgggggccccggggcgcgtccccttagagccatgcccggctgccccgcccgccccggaggaccctagagcagcgtcgtgggggccatggcggccgc

SEQ ID NO: 87645 - DNA, 831 bp, Homo Sapiens
  misc_feature (96)..(112): n is a, c, g, or t
gctgacgatacagaaggttctcaactgctcaacccgtggccgttgtgttcccttccagtcaagcccccacttgccaccacagaatggaacaatcannnnnnnnnnnnnnnnnaaaaacagggtctcgctctgtctccaaagctggagtgcagctccatcatggttcactgcagcctccgcctcctgggtttgagcgatcctcccatttcagtgtaaccaccattcttatctctatcaccatagattagctctgcatgtctttgaacttcatataaatggaatcatgcatagataggctcttttgtgtctggattctctctgttaacactgtgtctgtgagactcactcacgctgtgtgtagtattatgcttcatccttttttgttgttgcatagtattccactgtataaatataccacaatttatttgtctgttttccaattgctgtgcatttggattgttttgtttttcactattttgaataaagctgctatgaacatccttgtatatgtcttgggtatacagatggtcctggcttacaatgattggatttaaaattgtttgactttatgatgggcttatcagggtattaaatgtgtttctgacttacagtgtttttgacttaccacgtgtttattgggacgtaaccccttcctaagatgaagagcatctgtatacatccagaatcctgtggagcaactcataacccatgaggaatgggagccgacagacagactcatccccaggacagatggttctcactacatctcataaagcttcttagaagatcttacagattgagcaaccagccagccacaccgggccgacgagt

SEQ ID NO: 87646 - DNA, 716 bp, Homo Sapiens
  misc_feature (61)..(61): n is a, c, g, or t
  misc_feature (174)..(174): n is a, c, g, or t
aaagaagcccccaagcatattagggagacaatgggcagcagtattttgatgcctttacaanatcatgaaggaagggctgttaattgtagcacaacctgaacctgtccactgctgcatggacatgtctacatcggtgcatccacgaactcgatattcagctggctgggatgctanatttttcttcatccctctatcttatttacctacatcactggcagactacattttgactagatcttggcccaaaccagcccaggcagtctaaagaaaactgggttggtgcttcttggaatgaaggcaaaaatctgaaattgttagtgtctcagtaatcctgatttagaacccaggctttttgtaacaatgtgttttcttgcctaaattcatttatctggcatcatcagagtactaacatgtttatatttcagatatccaaagcttaccactttaggtgatgaatctttactattttagcccttttttgatgagactatttgtctaaagtgaatcatttgttcttgccttattaaacagagtagatggaaaacaatttaacctattttgaagtcatttctttatgaatatgaataattgttctatgctttaataatctattgtgaggaaactactaagaaatatgttggtgtgtttgtccttacttgaaatgggtctgtattatggtacttttaataaatatttgatttttaattatcttcaaa

SEQ ID NO: 87647 - DNA, 2033 bp, Homo Sapiens
  misc_feature (1718)..(1758): n is a, c, g, or t
  misc_feature (1964)..(1964): n is a, c, g, or t
  misc_feature (1997)..(1997): n is a, c, g, or t
caaacgggcaagggagacctcctcccgggcatgcagagcgcagcgattctgtgcacagggagccggagggctggggctgggagatcccggcggagccccggcagagcagtcgcccgtgagcccccgcaactcagacgcgctcggcctcgcgctccggggctgggaccaccgagggcgagctgcagccttcgccacccggtccgccgccggactccgcctcccacaaacagcccggcaaggcccttttccgccgctccctcatccagcgaagcctccttcccagcttccccggcggcggcgccgtgacgtcacttccgttctccagcgcgcacgtgggaggaagtgctggtgccctctgccgctgctcccgtctctttggttacgctcgtcagccgctcggctcagccgcaaccacccgtccaccatagccaacggagtccaagagaacgtcagcaggcgccagccgtgtgccgctatgggagtcccggcgttcttccgctggctcagccgcaagtacccgtccatcatagtcaactgcgtggaagagaagccaaaagaatgcaatggtgtaaagattccagttgatgccagtaaacctaatccaaatgatgtggagtttgataatctgtatttggatatgaatggaatcatccatccctgtactcatcctgaagacaaaccagcaccaaaaaatgaagatgaaatgatggttgcaatttttgagtacattgacagacttttcagtattgtaagaccaagaagacttctctacatggcaatagatggagtggcaccacgtgctaaaatgaaccagcagcgttcaaggaggttcagggcatcaaaagaaggaatggaagcagcagtcgagaagcagcgagtcagggaagaaatattggcaaaaggtggctttcttcctccagaagaaataaaagaaagatttgacagcaactgtattacaccaggaactgaattcatggacaatcttgctaaatgccttcgctattacatagctgatcgtttaaataatgaccctgggtggaaaaatttgacagttattttatctgatgctagtgctcctggtgaaggagaacataaaatcatggattacattagaaggcaaagagcccagcctaaccatgacccaaatactcatcattgtttatgtggagcagatgctgatctcattatgcttggccttgccacacatgaaccgaactttaccattattagagaagaattcaaaccaaacaagcccaaaccatgtggtctttgtaatcagtttggacatgaggtcaaagattgtgaaggtttgccaagagaaaagaagggaaagcatgatgaacttgccgatagtcttccttgtgcagaaggagagtttatcttccttcggcttaatgttcttcgtgagtatttggaaagagaactcacaatggccagcctaccattcacatttgatgttgagaggagcattgatgactgggttttcatgtgcttctttgtgggaaatgacttcctccctcatttgccatcgttagagattagggaaaatgcaattgaccgtttggttaacatatacaaaaatgtggtacacaaaactgggggttaccttacagaaagtggttatgtcaatctgcaaagagtacagatgatcatgttagcagttggtgaagttgaggatagcatttttaaaaagagaaaggatgatgaggacagttttnnnnnnnnnnnnnnnnnnnnnnnnnnnnnnnnnnnnnnnnntcaaccagctttcactcctagtggaatattaactcctcatgccttgggttcaagaaattcaccaggttctcaagtagccagtaatccgagacaagcagcctatgaaatgaggatgcagaataactctagtcctttcgatatctccctaatacgagttttcacatctgaatggctccccggtctccattaggaaggaattagccganaaagcagaagaacggttgacagttgaaacctgnaggcacaaagggataaatgctcaggttttattgggc

SEQ ID NO: 87648 - DNA, 773 bp, Homo Sapiens
cagtcgacggtaccggacatatgcccgggaattcggccattacggccggggtctgtaaaatactttttttaagaaagcatttatatttatatgacagcttgaactgacaacattgtgtatatagatcatcttgaagtattatttcacattgaaaagaagaaaatatattgataactatagatgttatgaagaagagggtatttctagttttgtactaaaaatcaattggatgaactaaatccaaaacatgacactgtaggcagcagttttaagtcttatttttactgtttatatatttgaatgctgctacaacagatgatcttcatccctgaagttttcagctaaacttggtttcctagaatagactgttaactttcaaaatttttattggtgaaatggaaatactgtttttccttgtgaatgaattttcatatttgtaagtgctaagtttataattcaggtttgatcaaggtgtgaataactgaagaaaataacttgctggctatataggaaaatgctgtggaaatgaactgtgtatatacttctgggaggaacaaatttaatcatttcttctgttaagcactaatcagtatagtgcaactcctggttctgtactgtattttatatgcaacatatatgctttaatattttaatgtttgtgcattaatattttcaatttgtttaaccactttgctgctaagattttgccgtcccattcccattttttcctttacaattttaaacaagtttcttcattaaaaactaaagtaatg

SEQ ID NO: 87649 - DNA, 836 bp, Homo Sapiens
  misc_feature (154)..(183): n is a, c, g, or t
aaagggaggcattagtaatattgaacagctggtaaaaaagcaggctggtaccggtccggaattcccgggatatcgtcgacccacgcgtccgaatttacaaaatagttgggtaaatgttccaacaaactttaaagtaccttgaagtcaaatgtcnnnnnnnnnnnnnnnnnnnnnnnnnnnnnncttaagtgttacattaaaactctaaccaaggaaagggttctttaaagaacattcccttagagggataaagttgagaagtgtgccttttttttaatggcttgaagtttcagaggtgataaaaattaaaatcacactactatttgaagctcattttctatgcaggtttttaaacgtcatttatgtatcattctttttatatatcacacttaagcttgtgttagcttttttcttttgccccagatcaaactgaacaatgtatatacactatctgtctgtaaaatactttttttaagaaagcatttatatttatattgacagcttgaactgacaacattgtgtatatagatcatcttgaagtattatttcacattgaaaagaagaaaatatattgataactatagatgttatgaagaagagggtatttctagttttgtactaaaaatcaattggatgaactaaatccaaaacatgacactgtaggcagcagttttaacgtctttaatttttaacctgtctatatatttgaatgctgctacaacagatgatcttcatccctgaaggtttcagcctaaacttggtttccctaaaaataggaccttggtgtttaaaccctttttttctcccccaaaacacttttttctttccacaccttt

SEQ ID NO: 87650 - DNA, 998 bp, Homo Sapiens
  misc_feature (523)..(553): n is a, c, g, or t
  misc_feature (847)..(892): n is a, c, g, or t
aaaataaggctaggtacgaggctcgggttgtaaatcggccgaggctcctcctgcagcagcggcagcggcagcagcagttagcagcggcaacttgaggctgcaccccgggcaagtccccagggtggtgctcagccgagaggggggcttggcgccccgaaggggtgtgtgtagggtgggggcgaccagctgggaccagctggtggccctggaaaacctcccacacacccacacccacacaccccttttgtgttgcaggctgcccctccaagagcggaggcagcgagagtacgcgtgtgcctcgcgccggtccacgcggggagagcactggggaccgagacccggcaccacctcccggtccgccctccagggaaaacgggaaaactagcaagagctagcaagaactagcaagagcttgaacaaacgcctggactcagattggaagactgctcatttgtctactgcctcattcctggaaattgcactggaactgtctgattaagaaaaacagaataattctgacagnnnnnnnnnnnnnnnnnnnnnnnnnnnnnnncacaccaccccgggggacccttatgcggggtggcggaaaaaagcgggcaaagaaaaggggcacaaggcacaaaaggggacccgagagcccacactctggtcgacaccgggggaaacacccggggaaccccaaacgggggcgcagaaaacaatacagcaaaacaaccacggggaaaacccggaaaacacggacgcgcgagcgcaacaggagagccgagagcgagcagccaagaacagaaggcagcagaacccggagacggacacgcacgcgaccagaccaggagcgaagcggcannnnnnnnnnnnnnnnnnnnnnnnnnnnnnnnnnnnnnnnnnnnnnccgaaggagcaggacgacgacggataagggcgacgacgagagaggagaagcaagaaggacggagcacgacaagaacgaccacaccgggacacgggcgccggcacaa

SEQ ID NO: 87651 - DNA, 559 bp, Homo Sapiens
  misc_feature (379)..(379): n is a, c, g, or t
cagtttcacgcaatttaattgaagtttaaaatgagttgcccttcagcaaaaagattgccatcaaaattgggaggaacaaccctgttagaaagacccccaggagcatgggaaatgtaccctgagatgtgaaaagtccaccgcaaacaacaggttttagagtgagaggtagctgatagttaccattcttgaaatgcctcacaggttcaaacagcaggtctaaaaatttctggatctcctcaggttgggtcccggccagaaaccgcaggacaatggccatgcgggtgcctgaagcaaatttcccctgagttttactcccagtcttattcttcattcgcccatacaaaattctgaaaaggcaaaagcacattatttgtttgcncattaattctaaaatatgagttgttttatttgcctaaaaggctagaagagcaactcaatagatttaaatggatatattataaaacacagaaacatgaaaatagaaattagatatttaacacagacaatgaaaaaagtcaacaacaaaataaggctaagagagctgggtgcagtgctacgt

SEQ ID NO: 87652 - DNA, 541 bp, Homo Sapiens
  misc_feature (203)..(233): n is a, c, g, or t
gtagcataaggtttttgcttttgctttgccttaagagttccctagggagttaccagggcttttcgttttgtgtagcttttgcagcatggatcaaacattggcttactgtgctaatgtgtgaagagaaaaaattctctaaagcaggtgagctttaatgaacaaatgtgtattttatctgagtttgagtagggtgcgttgtggannnnnnnnnnnnnnnnnnnnnnnnnnnnnnnaattatatgaagaaagtccagttctcataaatattgatcacttaaaaaacttactctttcttgaaaaggtacacatgtaaaatttaggaaaataactaaagtaggggctggaaccataagaagaatgtttatcagcacgttcatttattattttggatttggaacttggctttgtttttcaatagtgacaagaatggttcagttctaggaatgttctggaagatgctgttaattttactttaaaatgagaatctggtgttactgtattttatcgttttcaataaaacttcttaagtgttttggaaaaa

SEQ ID NO: 87653 - DNA, 716 bp, Homo Sapiens
ctgaaaagtgactactcagatatgttggaagtcacatcgaagactatcagaatattaccttgtgttcataggttaacttgtttttgtacacgtcttagttatttcaggcatctctttgcttaaaattgagtttcttgtaaatgtgactgatgagcgaggttagaagtggaagaaattcctgtgcatgttctataatctgacaccctgaaagcaagtttcctttcgtcattcacatgctcttgttctgccgtgactgttcaggtgtatggtagtaagtaaatgtattaacatggtgaacagtagtaatattctatcatagagtattagcccttgcaagttttcagggcgtcttttccgacttcagtttttgtgataaagaatgtgaacagttgttagatgttctcagtgattcaactttaaaacaaatttctcgtgatgattcatttcaaaatcctgagtgagtctgactgaaaaatacgagagaaaagagagtggtttccgtttgcagctacacagctgtgtgcatcgacgttctcctggggtgtgtgccaagcgaaacccaggggtgaattggattcttgaagagaccaaagcctgtaactgtccagcttctaatttcaaaacgggtccattagggcttcgttgtgttaacaagttgacaccatgactagtaaatgtaaacgtgtatgtataaaataaagtttagcaaattaaaa

SEQ ID NO: 87654 - DNA, 590 bp, Homo Sapiens
cccctccacctccgcagccagtgaagtgtgttgtgcctgctgaagtgatcaccccccgcccccagccctgcatcaggccacaggtcttggctttctccttatcaccatttgctgttatcacggcacacagcagggaatcccaggcccccccgccaagtggttacccaagtcaccactcctgacccaaaaatcaggcatggcattaaaacgttgcaaattcctttactgttatcccccccaccaccaggaccatgtagggtgcagtctttactccctaacccgtttcccgaaaaaggtgctacctcctttccagacagatgagagagggcaggacttcaggctggatccaccactgggctctccctcccccagcctggagcacgggaggggaggtgacggctggtgactgatggatgggtagtgggctgagaagaggggactaggaagggctattccaggctcagccctgctcctgcagctttgccgctgagtgtaggaaaaacaggcatgacagaccagggtgagggttgtgcccagctgggccacggccatgcgtggggtggcccaataaacaccgtggactcccaaaa

SEQ ID NO: 87655 - DNA, 553 bp, Homo Sapiens
ggccatgtcacccactggtcactctctctccagccggtgatgaacaatgacaagcactgctttgaatgctatggctacgacatcatcatcgacgacaagctgaagccctggctgatcgaggtgaatgcgtccccgtctctcacgtccagcactgccaatgaccgaatcctcaagtacaacctgattaatgacaccctcaacatcgccgtcccgaatggtgaaatcccagactgcaaatggaacaagtcgccacctaaggaagtcctcggcaattacgagattctgtatgatgaagaattggcccagggtgacggggctgaccgggagctgagaagccgtcagggtcagtctctggggcccagagcaggccgatcgagagactcggggagagcggtcctcaccacctggaagtgagtcccacctggaccttatcaaaactactcactccacctgggcccctgctgaagccctattttgaaatttcccttttgtagagcttttttcctttcctaagccctgtaaataaatgaaggcacttctttggaaggttaaa

SEQ ID NO: 87656 - DNA, 510 bp, Homo Sapiens
cttcggggaccagatcaacaatgacaactggaccgaatcccttttgccgtggtaggggctgaccaagagcacctggtgaacgggaggtgtgtcctgggccggaagaccaagtggggcatcattgaagtggagaacatggcgcactgtgaatttcctctcctgagagacctgcttatccgctcccacctccaagacctgaaggacataacccacaacatccactatgagaactaccgcgtcatcagactcaatgaaagccacctgctgccccgcgggcccggctgggtgaacctggccccggcctccccaggacagctgaccaccccccggaccttcaaggtctgcaggggggcccatgacgattctgatgatgagttctgaccaccggcggatcccggggctgctgggcttcctgagtccccagcggctctcaacacacacctatgtaccagagcatctattaaatgtgagccttgctttttatgaaaagctgtgctttgaaaacaaaaa

SEQ ID NO: 87657 - DNA, 527 bp, Homo Sapiens
cccttgcgtatctctctcccctctccgtcctcggcatggggtcacattgtgggtcattatttcctttcaccaaggtatgagcagagggagagagggctggaaaaagagactctccctttgctaactgatgagggagaagtatggggtccaagtgggcctgccccttgcctaatttttgcccaattttttggcctctggagtccctggtagacttcttaacttcttgcacacaaggttaccatgtgtctaattgctcagctccagttagagtggtggagggaaactggtatcaatgaatgaatgaatgaatggatggatggtttaatgacagcttggagaaccgactggggtttgagcaagaaacaggaagagaaagccaacatcttttagctcaccaaatactttcatgccccttgggaggaagaaaaatggatatgggaaatgcagagcatggaagagcttaaattgagcataaaggacataaaactagataagtaagatcagaaataaaagatgagtcatcatcg

SEQ ID NO: 87658 - DNA, 488 bp, Homo Sapiens
tccctccccggaggttcgcttgtgtgttccgaagagggtgaaatcaggctggcaccgcgggaagaggctagagtcactaaatcaccttgtcctcttgaggctgctgtccgtatgcagcgacattctgcccgttagaggactcagctcagggcctggtacgctcaagatctgttagctaccagcaccatcaccacgaccaccgtcatcaccagcagtatccctcagcctcgtctaccttgctcgtcaagcagggtgctccaggagtgggtgtaggccactttcgccctgcctggcagatgcaactttccaacttccacctccacttggacctgctctctctactcaagtctagctggtggctgctggagtttgcgtgtgtgtttcttactatatcttctgacttcggacgcctaacccaagcttattatctcccctaaaatgggacctccttaaaatatatattacctttctttttccagttcttaaaa

SEQ ID NO: 87659 - DNA, 669 bp, Homo Sapiens
gaaaaaaaattcagccgagaaattttcagggattcccaagaagaagccaaaaaagactacgaatctggtcagctgtatggactagaaaagttttgggcttatttgaaatattctcaatctaagacacagtctattgacccaaaacttcaggaatacctctgtagttataagaggttagaagacttccgtgttgatccccctattagtgatgaatttggaagaaaaagacattcctctacttctggtgaggagagtaatcgtcatagacttccacctaattcctctacaaagccaccaaatgctgctaaacctacatctaccagtgagcttcaggaggctgatccgatagagtaatacctaattatatcaccatgagatggcaaaacggaatgtcagatctgtagacttttgacaggaaaaatcaccatgatcgattacttctgctcatcataaacatctagttcctaagcaggatatgagaatctgccttcctgtgacctctcctgggctcagtgacactccagtcgccgccccaccccacatcaatgccacttccaagtttgacttgcatcttacaaaccatatttctgtttactttttttctgccctgggacatttttaataacttttagataacaacttcaacaaaaatttacctcccaccaagag

SEQ ID NO: 87660 - DNA, 806 bp, Homo Sapiens
tttacagccactgaggtttaccaccatcagggctccatcaagtatcgtcgaagatgcctaagtgagagaaaaagcttggtaattggtcagtccaagacaatgaataccctctatcgtttgtggtccttactcttcacagatcacttcaataacacaatgtatgaggaatttagacaacttgctcgggaagacgcaaaagacaattacaggtatgggttagaatgtctgttcaggttttatagttatggactggaaaaaaaattcaggcgagaaatttttcaggatttccaagaagaaaccaaaaaagactacgaatctggtcagctgtatggactagaaaagttttgggcttatttgaaatattctcaatctaagacacagtctattgacccaaaacttcaggaatacctctgtagttttaagaggttagaagacttccgtgttgatccccctattagtgatgaatttggaagaaaaagacattcctctacttctggtgaggagagtaatcgtcatagacttccacctaattcctctacaaagccaccaaatgctgctaaacctacatctaccagtgagcttcaggtaccaataaactctcccagaaggaatatttcaccggagtccagtgacaattcacattaaacagtgctgcctgtgtcctgtggtctcaagaaatggtgaaatgcctgagaaatagactcttatgaaagttctttgtccttgaagtcaacatttacatcagtatttatttggggaaaatcttctggtgtttaattgtgataataagaaagaagaaaaagaaa

SEQ ID NO: 87661 - DNA, 413 bp, Homo Sapiens
taaaattacaccaacatgtattggcttaaaacaagaaacatttacgatgtcacaatttccagcagtcaggaatctgggtgagggtaactgggtggctttggctgtaggttcctcaaggctagagtcaaggggctggctggagctgcaggcatctcagggtggaaaatctgcctccagactcactcatggcagtgggcagccctcaggtccttgctggctgttggctggaggcatcagttccttgccccatgagcctctccccaggcagttcccataatggaagccccttccatagagcaagcaaggcaaggtggggaggaccaacaggacataaaccagtcttccagtaaccatgatcctgacgtagtaagttatctatcgctgtgtaacaaatcagcccaagatttactggt

SEQ ID NO: 87662 - DNA, 276 bp, Homo Sapiens
accccccaccccgccacatcccccacatcttacagaatctcgattgaatccccgggggcacatccctcagcaggacagcaacagtctttgccgcagcctggggagggctgtgctggggatgagcgccgagtggccgtggactaagtgaaggaaatgaccatgctcttctcccagctggatggcgaggccgggcaggaaccgcggaattcctgctcttcgttttcaaacactttgctgtcaagctatttgaataataaatacacattataaaaatgt

SEQ ID NO: 87663 - DNA, 473 bp, Homo Sapiens
  misc_feature (26)..(26): n is a, c, g, or t
gtatatctcgcgatagcactgtttanaatggcggcttcaaggcgtttcacgggtgtcccggacaggcgtggaggtggggcgcaggcgaggataaagcttgagttggccaggagtcggaaaacgattgcaggcgggaccgcgtccgtcggggctgaggaaacttagcgtggcagaccctaaactgggataactttagggatatggccttcttttcccagttgcctcaaacttagagcagcgtcgtctttagccgaagattcattttcccagcattttccttctccaggcggagtagttggagacagagggcaagccagaaactgaccttcccatctcctcattcccttccatcaagaacttttcatcgttctttccccaccctggtttgtaaatggtatttggcttcataaaaacgtttgtccacaggtgccctgctccatcagttcgctccagcaatataggaagttaccaaa

SEQ ID NO: 87664 - DNA, 1100 bp, Homo Sapiens
  misc_feature (807)..(815): n is a, c, g, or t
ggtgtccttgtcacagacgtggatcgcaagtggagcttttgctgatgtgttcctgaccgaccccgggtcccacctgtgccccctaaaccaggcggtggatcaggcccgaaggaaaatgctggaaaaccaccaccgccacccagcagtcagagaggacctttcgaggtgatgcactgtaaatccggcattgatgtttccaccatgtggaaaagcaaggatttccctggccccgccctgcactccagctcgcccctttcccgcgcgaagtgaaggatgcgtcacttttctgagcggcccctcagacctctcctgctggtccctggacctctggctgggagcgctcattcttgtgactggcaggctgccctcggtcgctgctgtgatgaggatatgtgcaacctccataaatatgtcggtggacggggcgtctcctaataaacctgataccaagaagacaacttgagccacttggatcccgaagtgggcttcccgggaaacctcgagcagagcaggctacacaatcccccatcctcaagtccccaccgcctcttcttcctcactgtccccgccccctatttgtggactaaagatgaactctggtgtgcatgctattattgctgcaattagaatattatcacacacaaaggtctctatattaacgctgggtttataagtgaccgtatattgtaaagagctgttaaaaagtattatagacctattcatgtattatttcacatgttttgactctggcttgcagcaccattcggagtaaggatgacagcaggcccagaaggtgtcttactcagnnnnnnnnntgcctggtcagcaattcactgtcatgcacctatttttagattgggcagggagatgggaggagtcgtgatttttactttgaatactatttcactgacgttactaagcattgcagcacaatgtagaaattggcttgggatggataggtatagggaagggcattcgttgggaaattgatgaccggaaactagaaagcccctataatgtggaatatgcaaatgtgcggtgaaaccgtatactactttccctgccatgacactaggcaaaaaatattaaatgttaaaaaa

SEQ ID NO: 87665 - DNA, 464 bp, Homo Sapiens
  misc_feature (242)..(267): n is a, c, g, or t
  misc_feature (269)..(269): n is a, c, g, or t
cacttcttgcccttactcaaaaacgaaatggccagtttccagaggcgtcgggggaacggctgacgaagtcacaatcgttatgttctcaattgttttcctcctcttactttctctcctgcctcgtttggacaggccagtggcattcgcccttgaggtccctcgcagccccggccccccgggcccgcccacacctctggcttcctctgtgcatcctgtgaagtctgtttctgatgcgttggcgnnnnnnnnnnnnnnnnnnnnnnnnnnantgagggcccagccctcatgattccatttcccaattcctttctggtctccatcctctctgtagatatgtagatctctttgaaacgaagtaagcacccatccctcccagctcactcggctccaccgtggggacctgctgggggagccgctggctccctgaggaaagtgaaagccaataaaacatctcccacaaaaaa

SEQ ID NO: 87666 - DNA, 1819 bp, Homo Sapiens
cttgctgtggtctttccctggtgtcctccattccgtccttcctcttcttttctcgcttctcatgatcctccttgggccctgtcatactgggacctagctggctccgaggatactctggcctccccccttcgttcctgggatccgagaataggtctctagtccggattgcttgaggtgtgttagtgccggggagcccggaagaactggccccaagcccgttggacacagctgctgccttgggagcccggggtgacggcgccgttgctcacagaccacaggctggggtactgactggagctggtaggtgggctggcattgtggctcacggggagcatgctgggatggccaggcattccaaggctggaccaattgtcatgggattgcagcatggataaacatgcaggtgagttgtcagaataggttggagaattgttccgatgagcataggggctggggtagggtgaggaccggtggctcctcagggttgggtacctgtcacagctgtgcgtggaggggagggagagggcacctccaaactgaggatgaggatttgcaggtggacacagggtgctggttccaggaagaagccacccccctgattgggagtacccaggttgctggctgtctccgggttcctccatcatctctttgtgatcacttctttcctttgcatcaaggaaagcttttgcaaatggattgtacttaattttaagagctgtgatctcctcgttctgataagcagtcaccgctatgaactgggtctcagggaagcagtggctggtgatcatgcgctgtggatccccaactctcactatgtggattcgaggctcatacttatgcaaggagttcagcatgatctggccccctccgttgagcttgttggtgagcttgactttgctgaaggagacgggagccttcatccagtgggccccgaagttgggcgagtcggggtggatgtagacgcagctgggcgcctgcggctccggcttgccccccggcacccattccccgttcacgtacttccagcggtggttgtccgccgccacgaagtccagcaggaaggagtacatggcgttggggtccaggccagacacgttcaccttcagcaccggaaacatcctcctgccgttcttggtcacgatcatctcattggtgagctccttgaagcgcagccacagctcgctctcctccaggcccacgcgcagttcgcgctctgtggggtcgcccttctcgctgcccgcctgcagctcattctccacggcgctcagcaggtggtccactcggtactgcaggctctttcccgcgctctcggtgccaggggagctcatcctcccgtccggctcccctccccgccgtccccgaagcccagactcgctacctgagatccaccttccccgctcttggccgccgccctgtccccgctccaggcgcgcctccctcccctcccagggacgagcgcatttggccgggctttgggatgcgccgcgctcgtctcgccgcagtagtagtgctgttctcgcgcctccgatgcctcaactctccagtctggcagtttccggtgcacctgtccccacacgtccctcgcccacggagccccaggcggcgttacgcacacccaggatcgtggatcagcctgccccggcgtcgggtgtccccgcggctctcaccatctggaaaaggaaggtccgcgcgcagagagggaaatggacggaaataagcaaaagccgacgcgtggtcgacgatatcccgggattccgaccgtacagcctggctttcttaccactgttcatatcacagtgctcgggggcggctcactgcc

SEQ ID NO: 87667 - DNA, 632 bp, Homo Sapiens
tcattcagcaattcagtttaatctcaggatactcagagcaggacaacaaagcctggtctgagcccatgggcctctctctgggggctgcacggagacgtttgcagccccgggtgcaacaccacatagtcacgcatccctcccaggagcatcctcatcaattcaaggagacacatggggactcggggcctagtgcagcttctgagccccttcctggaaaacatctctatgctccttgcccccatggagactgggcccctatctctgggatctgtggtggggctgggctggggccctctttgtaaaccataggaaactcagaataaagacccattgtccagggacagtcactgcagaactggtctgtgcccctggcggacttggagtgtctctggggcaggactggccttgggccccagctccttggttgggggtacacagtcaacctgtcattgtcagctagttgtgcccaggaaggctatattccctgcccaagtgcagttaccgcccggagcaaagcctgggacagctggtgtgctaccctacccccccagcgcccaccgatcagtgacaacagctcagcagaccctagtatatgggccctcctgcagcagcactggcatgggggtccatat

SEQ ID NO: 87668 - DNA, 508 bp, Homo Sapiens
taacttaactgtggacatataaacatttaataaatcagcacacaactgtgatggtgattgatcctttgacacgcacgctctgtgtggacgacacgtgctcccagcatggtaggggaatgacctacggggctgacttcggaactgaagactccccatatatgcacactgaacacttgcgtgcagacgctcccgaataccgcaggtcttagccaggcaggggtgaatggagggaacagagcagctccttccagcctctgggcaagcagagtgcttcctttttccagccccaggcatcgccttccctagacacggttttctctctgtgtgttctctcattctttccagcaacagcacagacagagctcagactggctgtgtgtggggtggcccacaagacagcgagcctgcttgcgctgccgttgtgctgtgtgatccccgcccagcccttgcccctttcctcacttctgctagagagctggtgctgctcttggagaagcctgcgcatgac

SEQ ID NO: 87669 - DNA, 688 bp, Homo Sapiens
gttattacagggtctgcgttgtatcagccattggcttggcctctctctgttcctccctctgcacctagaactcttatccttcctgtggtttggtgccgactgggtcggatctgggcttagagtaatagctttggtgggtttcctggatggatgtgaagttgggcctcccatgggcccaagggagtaggatgtcccattccccacctgtccttcctctaggaagtgtagatcagaaagtgaggtggtgacctcccacctctggtctggttaagagtctcactagggccaaggcaggctgcagaactttccctcttcctctcattgagggtgatgacaagagacatccggggactgtgcacttacagtcggtgtggaatgtcactcttgcagtctttgaggcaggataagtatttttacatattttaagggtgcaggaggacagcagctaacaaggccaggaaatactcacttccctccaccctcaacagaatgtggtgggggtgaaacttgaagaatttttgtttccccttctcccttcttacgtttgggaagttttatgtagtgtaacacactctagacgagttaccagaagatgtggattctagttctgattctgtcactcattggctttgagtgacatatttttatttcctgggcctgttttctcacattaaaaaagtagaagtta

SEQ ID NO: 87670 - DNA, 697 bp, Homo Sapiens
  misc_feature (105)..(200): n is a, c, g, or t
  misc_feature (496)..(542): n is a, c, g, or t
agtccatattgttccttatcacctgccaacaggaagcgaaaggggatggagtgagcccatggtgacctcgggaatggcaattttttgggcggcccctggacgaannnnnnnnnnnnnnnnnnnnnnnnnnnnnnnnnnnnnnnnnnnnnnnnnnnnnnnnnnnnnnnnnnnnnnnnnnnnnnnnnnnnnnnnnnnnnnnnaggcatgacacacctgggggaaattggcgatgtcacccgtgtacggtacgcagcccagagcagaccctcaataaacgtcagcttccttccttctgcggccagagccgaggcgggcgggggtgagaacatcaatcgtcagcgacagcctgggcacccgcggggccgtcccgcctgcagagggccactcgggggggtttccaggcttaaaatcagtccgtttcgtctcttggaaacagctccccaccaaccaagatttctttttctaacttctgctactaagtttttaaaaattcccnnnnnnnnnnnnnnnnnnnnnnnnnnnnnnnnnnnnnnnnnnnnnnncatggctcatgggacccaccccccgtggcactcatggagggggctgcaggttggaactatgcagtgtgctccggccacacatcctgctgggccccctaccctgccccaattcaatcctgccaataaatcctgtcttatttgttcatcctggagaa

SEQ ID NO: 87671 - DNA, 818 bp, Homo Sapiens
cgtttacttggctatcattcatctcatttagtttagtcaacttccaattagtcatgtcctgagattcagagaaatgctctgtcatattaaggaattctgtagtgccaagagtttcttcatgttcataaccttcatgtgtcatcagccctaacttcattaggcacaaggcaatcgtgaacaccgttcacagtcattattccttccagaccccattaggcatgtctgggtttgagaagcacaaggtaaaccagaccggagggattcttcagtggtgctctcctctgctggctctttgtttcatcaaaatcccctcactcatgtgggaaaaggaatttggactccctagatctgtcctaggagagctgattttgccagtgaggtcctcatctggtatatagttctcttgctttttaacagcaggacatccatctgttccctgggatgagattactgaatcaaccgttaaacttgtaatcgcagacatggaggggtctctacctatacttccgtcatcctttaattgtgaaggggaacagacactggctagactatcagatgaagtaggacacagatggttaacagatctcccctctgttttcggtctattcaatggatccatttgtttctctgaattcatatctttttcagtggactcatttatactaaaactaaattgatcagtttgtctgttttcattatccagtgaacagctaaaagcatccataagggattgactattataattattacatcctgtaaatcgttttgcccggccgtaatggccgaattcccgggcatatgtccggtaccgtcgactg

SEQ ID NO: 87672 - DNA, 667 bp, Homo Sapiens
aaaatgttctcttttgagaacaactgcttatttgttataaaagcatttggttaaaatgatgtcatcataaagaacagtggctttgtttcaatacatatttttgagatgattatctagaagccagattaataaaatcagcttgtgaccttgctaagcatataaactggaaattcagatacattcaaaattatgggttcatttaaaagtgttctaccttttgggtatgagactaatatcactaattcctcaatagttatcatggctctatcttaattaattagaaaatatgtgtgtttaattctttgagaattaaaatagagaatattaacagagggttaaaaactgcttcaactccaataagataaaggaagctcaaaatctatgagctgagtgttcaattagctttgcctactgagttcaattttatgtcaatacaacagtggatcagacagtacgactttgaactggtgaatgtaaacaattgtttttcacctaagctgctttggaagaactgatgcttgctgctaactaaagttttggatgtatcgatttagagaaccaattaatacctgcaaaataaagcatactgtggtacttctgtttgatctagtatgtgtgattttagattgatggattaaaaattaataaagatcatacattccataaa

SEQ ID NO: 87673 - DNA, 417 bp, Homo Sapiens
tggcatcctccccagtggacccaaaccagcgcatacttggtgtgtggagatgggagacaaaggacagatctaggagccttgaaggatcaccagccaccgaccctccatcagggccaactgggcaggaaagggaacattgcagacctgatttcccgacgatgtcaccctgtcctccctccttgcttcttgctctgctaactcaactctgccttcctctttttcattcttctactctgccctatatggaggacaaatggacaccaggggtgctaaccttattggtgcctgccccagcctaccccaggtgccagcagactctcgtgcacaggaggctcccacagttatggagccaggaaagaatttctctgcactggatggactgtatattgagattaaaaattatattcctataaaaaa

SEQ ID NO: 87674 - DNA, 362 bp, Homo Sapiens
ggctaagtgactcacaggtgaaaagctgttacagcgtggatctgctggacaaagggaagattcatgtcctgagagggacggaacctgacggcccaagatttcatcacactactcagaactgcagttgctgctgtaaatggattccaaaaccacttttaattgacccaccctacattgcctcagttcatctctcattctgcaccagctgcctgttgtcccaaagtttcaatgctaattccactacagcatgctcctggaaacttatgataaggaatctggaaccatctggttttagttgactttttaaaaatacgttttagtgtcacagttgaattattaaacataattatgcaaggtaaaaa

SEQ ID NO: 87675 - DNA, 1313 bp, Homo Sapiens
gggaggagccgccggcaagggggcaacgaggaagctcttaagagcgcggccggaaagcagttgagttacagacatcctgccaaaatgatttcttcaaagcccagacttgtcgtaccctatggcctcaagactctgctcgagggaattagcagagctgttctcaaaaccaacccatcaaacatcaaccagtttgcagcagcttattttcaagaacttactatgtatagagggaatactactatggatataaaagatctggttaaacaatttcatcagattaaagtagagaaatggtcagaaggaacgacaccacagaagaaattagaatgtttaaaagaaccaggaaaaacatctgtagaatctaaagtacctacccagatggaaaaatctacagacacagacgaggacaatgtaaccagaacagaatatagtgaccaaaccacccagtttccatcagtttatgctgtgccaggcactgagcaaacggaagcagttggtggtctttcttccaaaccagccacccctaagactactaccccaccctcatcaccacctccaacagctgtctcaccagagtttgcctacgtcccagcctgacccaagctcagcttgctgctcaaatgttagcaatggcaacaagtgaacgaggacaaccaccaccatgttctaacatgtggaccctttattgtctaactgataagaatcaacaaggtcacccatcaccgccacctgcacctgggccttttccccaagcaaccctctatttacctaatcctaaggatccacagtttcagcagcatccaccaaaagtcacttttccaacttatgtgatgggcgacaccaagaagaccagtgccccaccttttatcttagtaggctcaaatgttcaggaagcacagggatggaaacctcttcccggacatgctgtcgtttcacagtcagatgtcttgagatatgttgcaatgcaagtgcccattgctgttcctgcagatgagaaataccagaaacataccctaagtccccagaatgctaatcctccaagtggacaagatgtccccaggccaaaaagccctgttttcctttctgttgctttcccagtagaagatgtagctaaaaaaagttcaggatctggtgacaaatgtgctccctttggaagttacggtattgctggggaggtaaccgtgactactgctcacaaacgtcgcaaagcagaaactgaaaactgatccagaaatgacgctgtctgggtcaacatttcagggaggagtctgccaccagtgtaatgtatcaataaacttcatgcaagcataaac

SEQ ID NO: 87676 - DNA, 924 bp, Homo Sapiens
gaatactccatttaggaaagtgcttaatcaaagaaaattagccaataaataaagaagaaatgctaggaaaactattattttgcaactctaatgaaatagtgtatctagccaatgattattaatcactgttaaaatgatttggtgaaacttgatggagaagtttatgatgaaggaatcaggcataacacctgaactcactaattaattttagcatcattaaagtggggaactaaacatataattatatgcctatcattgtgacaaaataggaagtacacagtaccacccaaaaaatatttttgcctaaaatactgaatcaaaatctaatcgagtctctatatctagcgaattacttacaggaaacatgagagacagagaaactccaaatttcacgtgttttttcataggtcttttcaaacgtattgttcgtaagtaaccactgatcttattggtctaagtgagttaggattctgatagacccttgggggcaatttttaccagcttggtcctccagtttcatttttattcctttctgccaaccttttaatctctcttctgcatgcagtttatgaagaatttatatccaatggtccctggcactttgaataaaatcaaactccttactgagacctgcacagccctgcccacctctccagcctcatgtcgtgcctcctgagtctcactcatcattctgcagtcacaccatttatcttccagttcttctagtgccccaagctctttacacacgctgctgcctctatccagaaagctcctgcctccctcctactcatgatgctcctcccgttcatcctttagctctcaaaacaagtgttacaccctcagagaagccttctgcagccaacctgtctaatctagggtcacctcacccctacaatgctgtcttatcttcatgacaacttgcaa

SEQ ID NO: 87677 - DNA, 800 bp, Homo Sapiens
  misc_feature (565)..(565): n is a, c, g, or t
  misc_feature (576)..(576): n is a, c, g, or t
  misc_feature (698)..(698): n is a, c, g, or t
cgcaagactagatggagaattaatgaagaagaaatagaaatgaggcttatttaaggtacaaaattcttgtatttgtaataacctagatttatagatataaaacaagtcttttaaagacttccctaaaatactcaatataaaacaggagttacttatcctagatcatccttagttaggtacacatgattctctgtgcaactagctggtggacatgaataaaagctgctgggcctataatgtactaaaacatttttctcccttcagcaagacaggtagggttgaaggctaaatgcatcagaggagtattttcttaggcattttggacaatctttttgcagtaggttccataggttttccccagcgaaagttgactcagaccagagtaactctgacacaagttgccaagagggaaaaaatacttcatttgctagattacccaaatgtgtagcttcatttaattaccaaggtaagaatcatccccaaccacttttcagctgagaacacttgccagagaatgtctctggatgggaatagatgtggtaccagctagggcactggactaccngagttcagctngcaggaaatcaggagcacctcaaatattgggcatgctctgattcagcagtggcagtggcctataacttttcagatgatatctccatgtgctatgttaaccaaaataggcaatttattacganacatttttttctgtaaagcaaataaatatatacattcaggattctttctcctcaaaaaggtcagatatgggagctgacatcataggaaatattcagatcggg

SEQ ID NO: 87678 - DNA, 429 bp, Homo Sapiens
tagggatgaatcagttaacttgcttgagtttcacattcttcatctgtaaaatctggtgattagactggcccagcaaaagatataatgggcaaaagatataatacacataaattggaatgaatctgcattttccaagcctgatgactttattaaaactgaattaagtcactaactggcagcctgaagatgaaaggaaagaactcagtcatgcttcttaaggtaaaagggcagtctaactgagaattttgttatctctgaggacaaattacaaggagataaagacactcaagatcacatggaaggcttctgctcccacttagagactgcaatgtaaggtatggaaacagaatattctctatagaaacatacatattaaaatatgaacatttttgttcttatttcaatccaaaaataaataaatgaattaaa

SEQ ID NO: 87679 - DNA, 514 bp, Homo Sapiens
ccagagctgaacagatatacctcacctttccactatatgcactgagtccatatgtagtcagagattttcctccaaccaaaacaacatcatctccaaatttataagaagattcaagaagtgattcaactgtgaaaggaactgtttccatgctttcacggtctcggtcccactggaagagggctccatccagggaaggaatgatcatcttattcccaaatacctctggtttgctaaggctggatgacaccaaggaaccggatcccacatccaaatcccactgctttttaccatgattttcaggatccaaggcagcaattctcccatctaaagtgctgataattactaatgacctgccgcgcggtcgcaactctgtctcatcgtctggttccggaccccgaggctcctgctctcccgcggctgccggcagcgcctcagcgtcctccacagtcacctcggccgcagccacggcgcccgccgccggtactcgcgtcgctgaggtgggagcagcggccgc

SEQ ID NO: 87680 - DNA, 526 bp, Homo Sapiens
tggtacagacccagcaggcaccgcgcgcaacgccgctagagcccctcagagccccagctcccgaccacccgccggagaatttcgagtccctcaggaaagcagctcccattggccagcccggccccctccccgcacatcattggatactgtcatgcaggtcccgccctctcggcgcctcaggttccagcgagggcgtaacggcagtgaagtgaaaaatggcgggaaaggccgcctctgagctggccgtgcatctgcgcaacgctggcttgggagccggccggtggtggaggagccctcgacgacagcctcaaggcctgccgctcctcacgcgcccggctgccactagaccatggacgcaggcagccgcgcgctccaccgctccgggcccggcgctccacgccgatcggacgggcgtcgctcacaccaccgaggcgagcccggacactgaagccactttgttgtcctcggcccagggctgcaggttctgcagcgcgaagagcgacgagttgtgcaggcagagagggtc

SEQ ID NO: 87681 - DNA, 551 bp, Homo Sapiens
gcggccgctgtccccaaaccctcctcccgcgccggggccgggaagacgtgctgtgcccagccccaggggcgatgccctccaaggccgtctcttagggaggatcttttgatttctccaaggagatcattgctggacttaagtgattactttggctgtttgaaagaacgctcagccccgactgtaggaggcagtgagggtcgcagattgcgccaagattccaggccccgcctgtgagaccctggagctcattttcctgatcaagcttacattgtgtccaacgatttggccagcgctaacactccacgattctaaaacgcaagcctaggtcttctgtctgtacttttctaggtaacttcccaacagtgttgaggaataagtgacaggctttctccctggaggagagccagccacccggttctgcggtgacgggtacctccgccgcggtgtgagtgctcggcctccgtctggaagtggaacactcacaggatgaccgaatgaaagtaccacccccgaaaggagagcgacgcccgctggaagcgcttgcatagctg

SEQ ID NO: 87682 - DNA, 550 bp, Homo Sapiens
gcggccgcatgacaagcctgactggtgtctggtgcggaccactgaccgctccccagcggcagaaggcctgggcccctgtggttcactgtgcatcgcccactccagaagtagcatggaaatggagggcatcttcaaccacaaagactcgctctccgtctccagcaatgacgccagtccacccgcatccgtggcttccctccagccccacatgatcggggcccagagctcgccgggccccaagcggcccgggcaacacccctgcgcaaagtggctcaccagccccgtgcggcggctcagcagcggcaaggcccacgggcacgtgaagaagctggcgcacaagcacaagaagagccgcgaggtccgcaagagcgccgacgccggctcgcagaaggactccgacgacagtgcggccaccccgcaggacgagacggtcgaggagagaggccggaacgagggcctgagcagcggtactctctccaaatcctcctcctcggggattcagagctgtggagaagaggaaggcgaggagggggccgacgccgtgcccctg

SEQ ID NO: 87683 - DNA, 1295 bp, Homo Sapiens
atttcttcttacttaattaaccagttcgagcgaatagcgagtactcgcctcttttaaaaagagctcctgacgtgctgtgaggaaggaagggagagattaaaagatggcctggaggtgatgctcagcgtgccgaagcgagccaaatgatgccatgcacctcagcatgctgaaagggttggatgaaaacattgagtctcagggagaactcatcctacaggaatccttccaaagtgtgggacccaaaaacccttaattcgaaagggtcgagaacggcatctcttcctttttgaaatgtccttagtatttagtaaagaagtgaaagattccagtgggagaagcaagtacctttataaaagcaaattgtttacctcagagttgggtgtcacagaacatgttgaaggagacccttgcaaatttgcactgtgggtggggagaacaccaacttcagataataaaattgtccttaaggcttccagcatagagaacaagcaggactggataaagcatatccgcgaagtcatccaggagcggacgatccacctgaagggagccctgaaggagcccattcacatccctaagaccgctcccgccacaagacagaagggaaggagggatggagaggatctggacagccaaggagacggcagcagccagcctgatacgatttccatcgcctcacggacgtctcagaacacgctggacagcgataagctctctggtggctgtgagctgacagtggtgatccatgacttcaccgcttgcaacagcaacgagctgaccatccgacggggccagaccgtggaagttctggagcggccgcatgacaagcctgactggtgtctggtgcggaccactgaccgctccccagcggcagaaggcctggtcccctgtggttcactgtgcatcgcccactccagaagtagcatggaaatggagggcatcttcaaccacaaaggccaagccatgttccggatttctcaggacctaaatgtgagtttactgtcacttcggtaagaaacaggaagaattaggctgttgtttctccagaaatctgaagagaaaggcagaggattttcagactttggccaaaagccaaaggtgtccacttccatttctggtgaagctgcccatgcatttggaacagcggtgggcttcccctcgtggtgtctttgcatttagagatctgagccatgctggcttttagcctgttgccagaatgctttgcattcagtatattcagttgcatcaatataagtccttgaatttgagttgaaaataaagtacaacttttcctg

SEQ ID NO: 87684 - DNA, 570 bp, Homo Sapiens
ttttttaagctttaaaggaaggttagcttgtaaaaataaaaccagaaaggcaaagtactcaatgctttttttgtgatgcaagatcttataaaaatctaaaatccatatttacttctaggaactttaaaaatattcgcacattcattatttcattcaacatttgttggagcttcattatgttctatgacctgtgccaaatgctgaggatagaaagaaaaatgaacaatattcctttaaaagtgctctagtgaatccagtggagatctagtggagaagatacataagtgaacaaatagttacaatacattgtattgagagcataagaaatgagctgtggaagtgcagagaaaggaccacattattttcgtggagtggttggaaatggctacacaggaaaggtaacatttgacttgtgtctggaaagaagagtaggagttttccaggtgaatgaataaagaaaggtcaacagaaatattgtaggagcaaaggcagggaggtgtgatagagaatatcatgattggagaattacaggatttaatattggctatggagtaatatttgtgttgaaaa

SEQ ID NO: 87685 - DNA, 843 bp, Homo Sapiens
  misc_feature (192)..(192): n is a, c, g, or t
gaacaaaccatgtgagctagtctagctgctatggcagttgctaatcgagatatgactactgcagaaatagcctatgcagcaattggtgatattgataaggttcagtacatcaattctataaacaatcttccatctaaagtatcaaccatggcccacatactactgtttagtgggaacatacaggaggctganatagtacttcttcaggctggccttgtttatcaagcaatccagatcaatattaatctctacaactgggaaagggcactggaattggctgtaaaatacaaaacacatgttgatacagttcttgcttaccgtcaaaagtttttggagacatttggtaaacaggaaactaataaacgatacttgcattatgcagaaggtctccaaatagattgggagaaaatcaaagccaaaattgagatggaaattacaaaagaaagagagcaatcatcaagcagccaatccagcaagagtataggtttaaagccctaaatgccatgcgtatctttaagaaattttatcttttgaaacacgttctgattaaccaagggtaagcatgttttggttgctaaagaaaaaagcataatctttaaccgagtataagtacttgctgtgtatttagtgtaaaagtacatgcagaaagatgaaacacaaagtaattgatgtatttctatcttttatattttttagtccaataattagcaaaatattactatgtacttaagagatacctgtgtagtgtcgattatatgtcagttttttgcccattacttcatccctaaatcttcagcatgaacaaatattaatgtcgataataaaacattggactctttgaaa

SEQ ID NO: 87686 - DNA, 913 bp, Homo Sapiens
  misc_feature (709)..(709): n is a, c, g, or t
ctactgtaaaggagatgggttagatgttcactttcatttggacccgtggatacccattgaacagatgcttgaaacctgcaagtaatcttcagatcctagcagaaccataggcctttcctttgttttgggaggatatagcctgcctatatgctgtggaaatgaacggggagcagcagcttgatgcagatgcctcaatgtgtaggacctgggaactgtgttctggtccttagagaggtcctcactttacttatcaatgcagcctacaaacccagccgtgtccttcgggagctccagctggacaaagactctgtgtggcacggatgtggggaagtcctaaaagccaaatataaaggaaagagttatcgggctactgttgagatagtgaaaacagcagatcgggtgactgaattctgccggcaaacctgtatcaaactggaatgctgtcctaacctcttcggtccacggatggttctggataagtgttctgagaactgttctgtacttacaaagaccaaatacacacactattacggaaagaagaaaaataaaagaattgggaggccacctggtgggcatagtaacttagcttgtgccctgaaaaaagccagtaagaggagaaagaggcggaaaaatgtttttgttcataagaagaaacgctcctctgcatctggtgataataccccagcgggctctccccagggaagtgggnggtgaagatgaggatgacccagatgaaggggatgatgattccctaagtgaaggcagtacatccgagcagcaggatgagctacaggaagaatcagaaatgtcagaaaaaaagtcatgctcctcttctcccacccaaagtgagatatccacatcgctgccctccagatagacaaaaggagaaaaagggaggcttcgcacttttcat

SEQ ID NO: 87687 - DNA, 1068 bp, Homo Sapiens
  misc_feature (265)..(299): n is a, c, g, or t
  misc_feature (697)..(729): n is a, c, g, or t
  misc_feature (886)..(894): n is a, c, g, or t
  misc_feature (975)..(975): n is a, c, g, or t
acggcagtaactataacggttctaaggtagcgaggcctgggtggcgaattcggcacgaggcggccggccgcctcctcgcccgcccgcccgcagccgaggagccgaggccgccgcggccgtggcggcggagccctcagccatggcctcgggcgacaccctctacatcgccacggacggctcggagatgccggccgagatcgtggagctgcacgagatcgaggtggagaccatcccggtggagaccatcgagaccacagtggtgggnnnnnnnnnnnnnnnnnnnnnnnnnnnnnnnnnnngcggcggtggcgaccacggcggcgggggcggccacgggcacgccgtgcaacagcacagcagcatcaccagcacaacaaccgcccatgatcgctctgcagccgctggtcaccgacgacccgacccaggtgcaccaccaccaggaggtgatcctggtgcagacgcgcgaggaggtggtgggcggcgacgactcggacgggctgcgcgccgaggacggcttcgaggatcagattctcatcccggtgcccgcgccggccggcggcgacgacgactacattgaacaaacgctggtcaccgtggcggcggccggcaagagcggcggcggcggctcgtcgtcgtcgggaggcggccgcgtcaagaagggcggcggcaagaagagcggcaagaagagttacctcannnnnnnnnnnnnnnnnnnnnnnnnnnnnnnnncccacccgggcaacaagaagtggggagcagaagcaggggcagatcaagaccctgggagggcgaagttctccgtcaccatgtggggcctcatatgaaacaaaagattttgacccttgagaccgggggttgaacaaaacgaccttttgcggaggacctnnnnnnnnnggtttttcccgaaaattatgcaaacggaacaaaaactttccctccctggagggcattcccccggcatttagaccctcccanaatccaaaaacacattggggtccaaattcttggttcgaatttccacccctaagtaattatcttagtccataaaatcccgtcgcctcccccaat

SEQ ID NO: 87688 - DNA, 1047 bp, Homo Sapiens
ggagatgccgccgtgcttttataagacgtcctacgtcgttgtccctacctaatgtgtgtgtacaatcctgtcattgattccatgcgtttaccaggtgagtgtctctcaactccaaatttgccgcgcgtcgtgatcgccgttctggtccccatttgccaagggtccaaaagccctggcgatccatagtccccacccttccggggatcggtccccacaggtgatttcctgtttctcgtcatcttcaaatacctccggggaggcattcacatccaacttgagtagtgtttcaataatgagctccaagaatttcaggccgtcaaggttggaaatatacactaatcccttaataaggttatgaacgtaacattcagggttctctcggattttcgaacaatggaaattttccaccagtattggcatgagaaaccacggtgtcaaatggtacatatcttgctattatttgcaaggctctgtgacatgtgtcaaaatttgcaggaagattatcatcttcatcatcagaatctgaaacatctacatcgccttccttaatgatcactcggggaggcacaaaatgggaagcaatcatgctgagacacggtctgaggaaaacagtctgtgctgatacaagattaccaagaaaagccaaatactcttccactactgtttgacttctattcaaccaaggcaatcttaatataatactgataagttgctcaaagtcttttgtcaagtacatgatagaagaacggaattctagcagccagttgatgatctggtcatcctttatgtctggatctaacagctggttcttcaacaactcaaagtcatttgtttcaccctttttgtacttcagcaagacttctgtcacagttccaccaaaccgaacagtttttcttgggggagaattgaaaaaatcattctctaatgcacgcatatttgaaatcccagtcctcgacgcgcccagcgtcttaactgcagaggacgaagcggccgcatctcccggcaaacgcgtgtgaagcagcggtgccgccattgggccgaactccc

SEQ ID NO: 87689 - DNA, 1466 bp, Homo Sapiens
acgcagagcggagcgtggagagcggagcgaagctggataacaggggaccgatgatgtggcgaccatcagttctgctgcttctgttgctactgaggcacggggcccaggggaagccatccccagacgcaggccctcatggccaggggagggtgcaccaggcggcccccctgagcgacgctccccatgatgacgcccacgggaacttccagtacgaccatgaggctttcctgggacgggaagtggccaaggaattcgaccaactcaccccagaggaaagccaggcccgtctggggcggatcgtggaccgcatggaccgcgcgggggacggcgacggctgggtgtcgctggccgagcttcgcgcgtggatcgcgcacacgcagcagcggcacatacgggactcggtgagcgcggcctgggacacgtacgacacggaccgcgacgggcgtgtgggttgggaggagctgcgcaacgccacctatggccactacgcgcccggtgaagaatttcatgacgtggaggatgcagagacctacaaaaagatgctggctcgggacgagcggcgtttccgggtggccgaccaggatggggactcgatggccactcgagaggagctgacagccttcctgcaccccgaggagttccctcacatgcgggacatcgtgattgctgaaaccctggaggacctggacagaaacaaagatggctatgtccaggtggaggagtacatcgcggatctgtactcagccgagcctggggaggaggagccggcgtgggtgcaaacggagaggcagcagttccgggacttccgggatctgaacaaggatgggcacctggatgggagtgaggtgggccactgggtgctgccccctgcccaggaccagcccctggtggaagccaaccacctgctgcacgagagcgacacggacaaggatgggcggctgagcaaagcggaaatcctgggtaattggaacatgtttgtgggcagtcaggccaccaactatggcgaggacctgacccggcaccacgatgagctgtgagcaccgcgcacctgccacagcctcagaggcccgcacaatgaccggaggaggggccgctgtggtctggccccctccctgtccaggccccgcaggaggcagatgcagtcccaggcatcctcctgcccctgggctctcagggaccccctgggtcggcttctgtccctgtcacacccccaaccccagggaggggctgtcatagtcccagaggataagcaatacctatttctgactgagtctcccagcccagacccagggacccttggccccaagctcagctctaagaaccgccccaacccctccagctccaaatctgagcctccaccacatagactgaaactcccctggccccagccctttcctgcctggcctggcctgggacacctcctttctgccaggaggcaataaaagccagcgccgggacaaaaaaaa

SEQ ID NO: 87690 - DNA, 352 bp, Homo Sapiens
ttttttttggtgcaagtgattgataagagccaatcgtttattttcactgtcccagtcacaagctctccctctgtccccactcctgcctgctcctacctgctgtggagagcaccctcgcgctgcctccccaccctccccacaccacctcatcactctcctttacttggctgccagtccagctgcctcagaatgtcagaagggtgccattttcagttcttttcctgtctgactgtagggtatagaacaggcagccctaagtgctgctttctgcgcaaatgttttttgattacaaatctctaactaggtttgaaatgttttatagaataagacaatattcttttcaacaaacttt

SEQ ID NO: 87691 - DNA, 492 bp, Homo Sapiens
ccatgctgctggtatggagaaattccacaccatgattattagcctcctttaagctgaatgggatttaaccattctaggcaacacccctgaagggcatacctaacctcaatagtgttggcttttaaaacgtatgtttgtatggtagagaaactttgtaaaagaagaatccaagagaagtttgtgaggatcctacaaacccaggcccactcactttgctctaattctttctagtatcttgtagatctaatgggtctgggataaaaactttgaaaagtgtcaatattccatgtatgctgctgaaatgaagttaagtttggaaagaagtgatacctctagactgggtttatattaatctgggatataaatgaagaagacatactaatagaactccttgcttttaattggggaaatagggctttaataattttgacctcaactaaaaatgatatgcaatagtctctgtgtgtgtttgaaatacattgtgttctcaga

SEQ ID NO: 87692 - DNA, 1991 bp, Homo Sapiens
  misc_feature (1678)..(1738): n is a, c, g, or t
tgcggccgcggttgcgagggcgccgaggcaggcgcgcggcgggcaggcctgggagggggcgggtccgcgcgggcttcggaggagcccgccctgccagaggagagggaggtcacggcgtaaaggtgcagctgccgccaccgccgcttctgcaaggtctcagggacgggctgcagccatgtcctattgccggcaggaagggaaggatcgaatcatatttgtaaccaaagaagatcatgaaactccaagcagtgcagaattggtggctgatgaccccaacgatccatacgaggagcatggattgatactgccaaatggaaacattaactggaactgcccatgccttgggggaatggccagcggtccctgtggagaacagtttaagtcagccttttcctgcttccactatagcacggaggagatcaaggggtcagactgtgtagaccagttccgggccatgcaggaatgcatgcagaaatacccagacctctatccccaagaggatgaggatgaggaagaggaaagagagaagaagccagcagaacaagcagaagaaacagctcccattgaggccactgcaaccaaagaagaggagggatcaagttaatgaaggccacaaggcactgggcaccagtccttttggagtggaccttttgcaaaaggccttgtcatcaccttccaagaaagtttccttctgttgtcctgtgcattataatatacaaaataacttattttgatgatcagaggtcttgaggtcttgacctcttgacatatacactgaaaaaaatgggggttgtatgtatgtgtgtcctacccaaacctgtggccgccacttttgaattctcagattgccctgaattttgccacttttaaataatgtgctgaataagctcagcaactaaaaaccattacccaagaacgtttcttgtgagtgagctgatttattctgattcattatattccttttggtagattttataccccttggggaaataatacaacaaaaacatctcttaaaaatgctgggatggggccatatctactaccagaggccagatggtcagatatgatttctgcaaacccatcttgaccttgagtatgtgaaagggtactgtactttattcctgatacattttggtttccatgtaggtgttgagctcctggttttctgtgtttggatgatgaagatttggacccttccattcataatccctttctaagtgaaaggagaggctgacctaactattaccagagtagtcagaaagacaggaaacggggccaatgtacacactcaatctaaaacgagtcaggtgcaatgttcttgagaggtggggacctaattattaccagagtaccagcaagagaggaaacgttgtgaattaagtattcaattaaaaggaaacatgatttctacctgaaatagaacggaaccagaacggacaaaccaaccccaccacaagaaacgcctcccttaaaatgctgaaccccggcagcaaccctcacacgaaagaattttctcttgtgggggccgccttgggcccctaaaaaaattttttataaaaccttttcttttgggccccccggggcccctttaagggaaaggggaaactggggccataaacctggtttcccctaaggaaataccccgggctcaaaccaaataggggctttgggaattctnnnnnnnnnnnnnnnnnnnnnnnnnnnnnnnnnnnnnnnnnnnnnnnnnnnnnnnnnnnnnaattccccccaaggggagattcctacgaaagggtttttctcggggggacctttcttccaaaggcggacttctccagagcgaacgctccaaaaaatcaaaatataagcgcccccccgcccgctggcacattttatttaagcaaatacggtgttgtggaatattttttttcatagctctttctcctgcatatactgtgtgaaaaaaccctttcatccaagccggtctttttatatccaactctccaatctctcca

SEQ ID NO: 87693 - DNA, 647 bp, Homo Sapiens
ggggcaatagtgaactatagaacagttgtacaaaaagcaggctggtacggtcggaattcccgggataatcgtcgacccacgcgtcgccacgcgtcggagaagcaaaccccaaggattgaaggctagggttctagggcctttgggtggggagggcccgggccggacagcctcagctccgtcccctgccccacaagattcacctgggcctccagtcccacgctggccccaactgctgcagctctcggcttccgcccaacagcctctggaggtgaggcgggagcatgccctcagcgaggctgggcggcgggtcctgctgtgccatctccctgtgcgcctgagcagatcaatccaccagtgcaaaacagggctaacggcacctgcaggacagcagcacgctccatccctcatgctcagctgcctctgcggccacggacttctgcccttcatctgctctctcttactctcctgagcctagcccgtccgtaagctccctcccctgcctggttcccagggcaggctgactcagttgactgcttggtccaagcctggccctggcacttgtcagggtcagcctaaggagatgggaataaagaggccagagagcaccaagtgagctcatgtttcaccagaggtggataaaaccaagt

SEQ ID NO: 87694 - DNA, 1621 bp, Homo Sapiens
  misc_feature (70)..(128): n is a, c, g, or t
  misc_feature (198)..(256): n is a, c, g, or t
  misc_feature (321)..(349): n is a, c, g, or t
  misc_feature (381)..(403): n is a, c, g, or t
  misc_feature (1479)..(1492): n is a, c, g, or t
cttggggcagctgccgggcgagtcagcggagtagcggccagcgggcgatggagacagagagacacccgannnnnnnnnnnnnnnnnnnnnnnnnnnnnnnnnnnnnnnnnnnnnnnnnnnnnnnnnnngctggaagctggagcggtccgtgcgctccccgcgcccgagggtgcaggaggctctgaagcggctgctgcnnnnnnnnnnnnnnnnnnnnnnnnnnnnnnnnnnnnnnnnnnnnnnnnnnnnnnnnnnnggcgtcgctggcctcggcccctttgttctcgcgcgctccccctcgccgcccactcccctgctgtnnnnnnnnnnnnnnnnnnnnnnnnnnnnntcctcccgcccgaggcagtcgggctcggcgcnnnnnnnnnnnnnnnnnnnnnnnagcacgccagccgccgagagtggggggcgatggcgaagctccgggtggcttacgagttacacggaagccgaggacaagagcatccggctcggcttgtttctcatcatctccggcgtcgtgtcgctcttcatcttcgggcttctgctggctgagtcccgcgctgcaggatctgcaagccacggagggccaattgcacggtgctgtcggtgcagcagatcggcgaggtgtacgagttgcaccttcacctgtggcgccgactgcagggggccaccttcgcagtaccccttgcgtccaggtctacgtgaacaaccctgagtccaactctagggcgctgctgcacagcgacgagcaccagctcctgaccaaccccaagtgctcctatatccctccctgtaagagagaaaatcagaagaatttggaaagtgtcatgaattggcaacagtactggaaagatgagattggttcccagccatttacttgctattttaatcaacatcaaagaccagatgatgtgcttctgcatcgcactcatgatgagattgtcctcctgcattgcttcctctggcccctggtgacatttgtggtgggcgttctcattgtggtcctgaccatctgtgccaagagcttggcggtcaaggcggaagccatgaagaagcgcaagttctcttaaaggggaaggaggcttgtagaaagcaaagtacagaagctgtactcatcggcacgcgtccacctgcggaacctgtgtttcctggcgcaggagatggacagggccacgacagggctctgagaggctcatccctcagtggcaacagaaacaggcacaactggaagacttggaacctcaaagcttgtattccatctgctgtagcaatggctaaagggtcaagatcttagctgtatggagtaactatttcagaaaaccctataagaagttcattttctttcaaaagtaacagtatattatttgtacagtgtagtatacaaaccattatgatttatgctacttaaaaatattaaaatagagtggtctgtgttattttctatttccttttttatgcttagaacaccagggtttnnnnnnnnnnnnnnggtgaggacatctgggtctcatttgcttctgctaggttaaacttttacttgacaacaaggattcctgctgaagtctgaaccttactgtgtaaccctcagtttccactattaaagagtatcttttgaaaa

SEQ ID NO: 87695 - DNA, 583 bp, Homo Sapiens
gtccaagagagaagcttctttggcttggtactggacttgggatgacagctctgtttctctgagggccgtcctgaccagggcaaacagggtggcattgaacatgactgtcccgtcgctgttcagaggcatgttcatggagaccaggcgctgcaggcgaagagaagcaaagctggtgatgatggcaggcggtgcttaggggaccgcagaacaccgtggcagagtgatatggtttggctctgtgtcctcgcccaaatctcatgttgaattgtaatccccagaattggaggtggggcctgatggaaggtgattgcatcatggggtggatttctcataaatggtttggtaccatccccttggtgagtgagtactcatgagatctgcttgtttaagtaagtgtgtggtccctcccccttctctcttgctccctgtctgtccatgtgacgtacctgcctcccctttgccttccaccatgattgactggaagcttcctgaggcctccccagaagcagaatgctagtgccatgcttcctgtacagcctgctgaactgtgggccaattaaacctgttttaatataaattaaaa

SEQ ID NO: 87696 - DNA, 571 bp, Homo Sapiens
aatttcatgtgaattgcactttaataaaaataaacaagtatttaaaaatccaccaatgcaaacacttctctgttcctctgtggtggaggaagggacacgcgcttttttttccgaccttaggaaggaacaagggagccggggtcccctcccagcctgggagccctgggcacagtcccggctcatttgtcagagctatcggagccgtcctcgggctggtgggagttcagggctctgaaaggttttctgtcaaggcttgaaagggggccaggtttttttccccccggagccgcgcagtctcggggctgttgttctcagcaatcgcagggcctcgtgttagcaggaagcacagccaagtagggtttcccatccatgaatcctggagactccagacttcccatccatccagggttctgcagccctctctgaggctggagccaatctccccttccgtcaagggatccggggagaccgccaagcccggtgctcccctgagagtctctgagaggccccgacaccgcccccgctccaggtccccgggatgctcgcgcaggcgggagcccggggcgcccgg

SEQ ID NO: 87697 - DNA, 498 bp, Homo Sapiens
atttgcatagacctgacattcagctgccttgcagttgcttcctcccatgagccaaggtggtgtcagagggcaactggatgactcgcagtaccacagcactgggacagacagaagccacacctttcttttgggtttttgccaagcctcctccatctcccatcagtgctgtgggctggctgcaagcctcgaaacagttctcctggaagggaggtttttgctttacccccgccagcacttccgcacacaatcatagagaacctctctgctctctgctggcctacagcttgtctgtttctcaagcagaggcaggaagagctagtcttagcatttatattttaataggaagttgactcccagcatgtaaaagtgatccacgcagccggagtgtatgccgggagctaagtggtctatgggtgaacatatcccaccttgcttcctgagtccttggtcccaatcttctcatttgttcctctcgttttaaattttttccccccaaaa

SEQ ID NO: 87698 - DNA, 2770 bp, Homo Sapiens
  misc_feature (1508)..(1508): n is a, c, g, or t
  misc_feature (1630)..(1630): n is a, c, g, or t
aatacggctagtacgaggctggctgtgtaattcggcacgagggcttaacatgattcttggtatggtgactcctgtgaacgatcttagaggatctgattctatgcgtatgacaaaggagagaagttattacggtgtaaatggcagcgttttatagactagcagatctctttgggtggtctcagcttatctacaatcatatcacaaccagagtgaactccgagcaggaacacttcctcattgtcccttttgggcttctttacagtgaagtgactgcatccagtttggttaagatcaatctacaaggagatatagtagatcgtggaagcactaatctgggagtgaatcaggccggcttcaccttacactctgcaatttatgctgcacgcccggacgtgaagtgcgtcgtgcacattcacaccccagcaggggctgcggtctctgcaatgaaatgtggcctcttgccaatctccccggaggcgctttcccttggagaagtggcttatcatgactaccatggcattctggttgatgaagaggaaaaagttttgattcagaaaaatctggggcctaaaagcaaggttcttattctccggaaccatgggctcgtgtcagttggagagagcgttgaggaggccttctattacatccataaccttgtggttgcctgtgagatccaggttcgaactctggccagtgcaggaggaccagacaacttagtcctgctgaatcctgagaagtacaaagccaagtcccgttccccagggtctccggtaggggaaggcactggatcgcctcccaagtggcagattggtgagcaggaatttgaagccctcatgcggatgctcgataatctgggctacagaactggctacccttatcgataccctgctctgagagagaagtctaaaaaatacagcgatgtggaggttcctgctagtgtcacaggttactcctttgctagtgacggtgattcgggcacttgctccccactcagacacagttttcagaagcagcagcgggagaagacaagatggctgaactctggccggggcgacgaagcttccgaggaagggcagaatggaagcagtcccaagtcgaagactaagtggactaaagaggatggacatagaacttccacctctgctgtccctaacctgtttgttccattgaacactaacccaaaagaggtccaggagatgaggaacaagatccgagagcagaatttacaggacattaagacggctggccctcagtcccaggttttgtgtggtgtagtgatggacaggagcctcgtccagggagagctggtgacggcctccaaggccatcattgaaaaggagtaccagccccacgtcattgtgagcaccacgggccccaaccccttcacacactcacagaccgtgagctggaggaatatccgcagggagggtggagaggaagcagaagggctctgaagagaatctggacgaggctagagaacagaaagaaaagagtcctccagaccagcntgcggtcccccacccgcctcccagcactcccatcaagctggaggaagaccttgtgccggagccgactactggagatgacagtgatgctgccacctttaagccactctccccgatctgtcccntgatgaaccttcagaagcactcggcttcccaatgttagagaaggaggaggaagcccatagacccccaagccccactgaggcccctactgaggccagccccgagccagccccagacccagccccgaattggctgaagaggctgccccctcagctgtcgaggagggggccgccgcggaccctggcagcgatgggtctccaggcaagtccccgtccaaaaagaagaagaagttccgtaccccgtcctttctgaagaagagcaagaagaagagtgactcctgaaagccctgcgctaacactgtcctgtccggagcgaccctggctctgccagcgtccccggccacgtctgtgctctgtccttgtgtaatggaatgcaaaaaagccaagccctccgcctagaggtcccctcacgtgaccagccccgtgtagccccgggctgacccagtgtgtgctcagcagccccaccccagcctgccccttgtcctctcgagcctcagttctgggggagacatgctctccccacagggggggaggcactaatcatggtctgggctgcaggtacttgaaggcctctgcacgcttctgggcctgcacgttcaacacttccctgagcctcacctttacctgccgaccctccctgtctgtgaaactcaccactctcactgtctcctgcttgggctcccccacttccagcccctacaagtcgtcaggtgacaggaacaccagactccctgggattcatgtggcactctctactgcctacaaagatcccacttacctgtcttacacagccttggggtcccgaaaaacctcgtgtgccccaccacgcggccccgaccgacggccaggtctgggaccacactggctggcaggacacccccagtgacaatgcggccgtgtgcacgccaagcggtactgccttgcatatctagcacgagatcgcgcgacacactccaatgcggagccggtactcacacacagcatctcgagactccgcactcggcacgcaccggaggcaaacctcacgacatacaagacagctacgtactatacgacgcacacagccctggcatccccaccccgcccgtagtcgagggctgacgcacaaacaaagctacacgtgccgccctctcgagcaacgtc

SEQ ID NO: 87699 - DNA, 1092 bp, Homo Sapiens
  misc_feature (23)..(24): n is a, c, g, or t
tccctggatcttcaaccggcaannccaccaaggtttattgggagtaatagaagggcctccttcaacggctctttctccaaactgaccacgagcccccatggttccggagaataagaaccttgcttttagggccccagatttttctgaatcaaaactttttcctctttcatcaaccagaatgccatggtagtcatgataagccacttctccaaggggaaagcgcctccggggagattggcaagaggccacatttcattgcagagaccgcagcccctgctggggtgtgaatgtgcacgacgcacttcacgtccgggcgtgcagcataaattgcagagtgtaaggtgaagccggcctgattcactcccagattagtgcttccacgatctactatatctccttgtagattgatcttaaccaaactggatgcagtcacttcactgtaaagaagcccaaaagggacaatgaggaagtgttcctgctcggagttcactctggttgtgatatgattgtagataagctgagaccacccaaagagatctgctagtctataaaacgctgccaatttacaccgtaataacttctctcctttgtcatacgcaatagaatcagatcctctaagatcgttcacaggagtcaccataccaagactcatgtttaaggcagccatccctccttgcggagctgctgggtagacatttggtacattcgtggtcataaaatctgcaatctgctgtaatgccaataggcctgtggggttcttccccttcttaaattgctcctgtatcattgattccaattcttcacagaaagcagggctttgcagaatcatggacaccctcttcttttgctccatcatgttgaagtcctggcgaaggtctggtgccatgttcctctccctcaagtactctgagttgttctcatctactcggtcgaagtacctctccttgtgaggggctgtggtcgggggtggtgaggtcaccaccgcagcacgaaatcaccattcattgtacaatcttctaggttcctcagaagcgaatcgtgggcagcgcgcgggattccggggtcccagtgcggccaccgcccgtcggctcc

SEQ ID NO: 87700 - DNA, 284 bp, Homo Sapiens
gcacatcttttctttaaaactgtcagatcatttcagtatttcaaatccgaggaaaacagcctgcctgctgctgtatttgaagttgtaatggtgtcaaaaagtcacgactgactgacagccgtcagtcccagaggggctcattaaatcataaaaacttgacaaggaaataattgcgcattgccagcaacttggcgcctgtttagacgtttttattttctttcattattagtccccaccattacgttcattaacaaattgcattaaacaactgttaagggctaaaa

SEQ ID NO: 87701 - DNA, 995 bp, Homo Sapiens
tgaggacatgtgtttatcatgtgttgtgggtgggtgcagtgagttctctattcaggagtggaagctggctcagggctcatccagtccaatgtcccacaggtatagaagtgccctgataaaatctcagagctggctgtccagtcaagatttgcatacctccagaaatggggctcttactacccctcacagtagcccatttctactgttgggcacctccaatggttcagcattttcttttccggcagcctctttctttgggctggggggtgggcggaaaactgtcactccagcctaaccctcagggacaagagaggcagctggggtggaaacagaagcagaaaaagtaataagttaaatccaagaatgaacagagacacggcaggatgggcagggacattcctggggtgccagcagtctctagcttgatccaaggaggcactggggaagaggttgctgatggcaagattccaggcaggaggtgactcagaaggccgggttgtcaatgcccctctgatccccggtatattcttcaggcctgaagctgtagggagggggtggctctgtgggagttgggcccaggctgggcttcagaatcacctcactgtaggggggtgggggcgcagaaagggatactctgaccctctctggggggatgatggagggcagttccaggggcccccggcaatccactggggtgtctggctccggctctctgcagttgcgacagaagcacttagccaggccacagatgcaaaagacggacaggatgaccaggaagatgatgacgaagatcctcacggggccagggaagagctcgttctcctggcagcagctgtcaccacagcatttgaatcctttggggcaggcaaggatgagaccacatttggctgcaatcttttgggggccagccagcaggctgaacagcaaggtgggcgcgaggccggggacccaagcttgggacatcctcctcgtgccgaattcgccacccaggcctc

SEQ ID NO: 87702 - DNA, 381 bp, Homo Sapiens
gcggccgccagaaggccttgtcctgcctgtcctcaagttatcagcatgacacagcggtgctggtgatggtgatggtggaggtttcaaagttgaacctgatgaaaacgctccacttcttcggagccatctgctgctgtggcgcacaggtttccacttgtcataggaaactgtgcttggtgcatcccctgtgcagccggctgtgaactgtgggctccaaccctgcttggtttgcttcaactttctgagtgacgtgcagaccttcacagaggagccgtggggtggctccatccaacgcctccctcgctgcccctggggtggagctggggcaggtcccacatttctcagaaggactccaggatgcagctgcgtctggggcctcag

SEQ ID NO: 87703 - DNA, 946 bp, Homo Sapiens
  misc_feature (12)..(12): n is a, c, g, or t
  misc_feature (49)..(49): n is a, c, g, or t
ttagaagtcatntacactgaccctgtggatctttctctgggcaccgtgncagaaatcactggtcatcagctcatgagtttgtctactgcaaatgcaaagaaagatcccagctgcaaaacctgtaatatcagtgttggacgttaatgcccacttttcttattcttactcagccccttttcctcccttaggagcattggtcctctgttgtccatttttatcaccagatgttttccactgaagcatgcacatgccactgtcaccaaaacaaacaactaccactttccaaatttcattcagaaccattttagtgttttcctattccctacccctcccactactttcaatgatgaaataccctaagttaagttctccttttgacactttattgcctagatgctgcaatgtttttatgtttcctttatgccaaacataacaaaacagttatatagactgctttagcaaagtacacaataatggcttataaatggtgtttaaatatgcattcattttaatctactgaacaaatattgggataactccaaaccgcatgaaagggtgtaattgcagcatgagttaaatcttgaagcctagaattgtcagcacttccaacttcttgtttgacagtgttatttatgttatttatattagctaacaggaaacaactactgtgtttcaacataataaatataatagaaaaatattttatttgtattgttgtataaaatatttacaatcatatagaatatatagagttacattttaatagcaactgtgtacatgtcacgaaaccatttcccttatcaaagatgtaatttgtaaacctcaaatagttgtgtatctgtcctgttagaagtagatgacttcaattaaacaaatttatgaaggacattattctgattataaaagttataaaatattaggtaaatacagagaaaacaataagcct

SEQ ID NO: 87704 - DNA, 475 bp, Homo Sapiens
acccagaacagaggaaaatgaaaattcggagttgggagatggaaatgaaggcagcatttctcaaagccaggtcgtctagcaaggaagccaactgtggagctcggcggagacctctcccgccagcccttctttatacgtccccaagtgcctccctccctcctcctctttactgaaactgaaaccaaagcgttcacagttagattttcaccttgtgccactctcttttggggtctggcttgagcatctatgggcagccacagcgaccagtctagtcccagacagcacaggtcaagcagcgtgggactgtggagcccctggcaggctggcctggtgctgcccccttagcccagaagccctgccaggtccagtggcctggggtcccactgctgagggcacctgccaggcctcactccaccctgaatggactcgagccatgtattcattcagtaaactgacataattctcccaaaaaaaa

SEQ ID NO: 87705 - DNA, 477 bp, Homo Sapiens
agattttaaccagtttatttaacaatgaacacgttttagattctaaccagttcatttaagtagaattaaaagcttctagcaacaaggatatcatcttgataattattgaatgtttaaaagtatttaattcttaggttaaaggaaaggacttgggaaatcacagaagggcattggtggctgggtgttctgctcaatggctctaaagctgcagtgtgcgagaactgcttactccaaagatctgttcatccaacagctgaaactcttctttcccagttccctactctcctctggctcttaagttgggaaatatcagaagcaaaaagtcagaaaaaccatgatgctatctgtgatttcactactccctctttcggacatagactgcacttgcaccatgagagtcatccactttccatggcataatacaataaatgacttccgtttctgtatttctattttgtaaccaaaactatcaaatgg

SEQ ID NO: 87706 - DNA, 559 bp, Homo Sapiens
atggtagtaggaggtggggcctttgggaggtaattaggcttagatgagatcgtgagcatggagccccatgatgggattagtgcccttataggaagaggaagagacacccacagcttcctgtctttctgcttagaacagaataagaagatggctatccatgagctaggaggatagccctcatcagaacccagccatgaaaccaccccgatcttggacctcccagcctctagaactatgagaaataaatgtctcttctttaagtcacctagtctatggtatttagttataccagcctgagctaagacaccagagtaattaggcaagaaaaagaaagaaaaggcattcagattaggaagaagtaaaattgtctctattcacagctgacatgatcttaatgtatagaatatctaaggaatcaactaaaaagcttagaactgattaacaaattcaggatggttgcaagatataagatcaacatacaaaaatctggtgaatttctacacactagcaatgaacaaaccaaaaatgaagttaaggaaatcccacttaaaatagcatc

SEQ ID NO: 87707 - DNA, 552 bp, Homo Sapiens
  misc_feature (433)..(466): n is a, c, g, or t
ctgatccagtgtcttcgcaggctcagtggcccggctctgcccccggtgtggtcttgaggcctcctgagaaccacaacgcgggggagcgagaactcttggagtgcgagctcaaacccaagccaaggccggccaacctgcgtcatgccattgccactgtcatcatcactggcgttgtgtgtgggattgtgtgtctcatgatgttggcagctgccatctatggctgcacctatgcggcaatcacagcccagtaccatgggggacccttggctcaaaccaatgatcctgggaaggtggaagaaaaagagcgatttgacagctcaccagcctgagagcttttgtctcaaataggattggtcattgcaggccagaagatagtgtctgagtagggctgatgtgtttcctgttagtctgattttgcttttgccaaaagacnnnnnnnnnnnnnnnnnnnnnnnnnnnnnnnnnngatgtgtctgtaaaaaatatttctggggaggaatttatgttgcgatttttaaaatactataggtaaaataaagatgatacttgtga

SEQ ID NO: 87708 - DNA, 419 bp, Homo Sapiens
caacatttatccaggaagttgtgatataaatatatgtgtgtgggtataacattatacatgtactgttaatacattgattttaaatgaaaagataaaccatacatatttttaaaaattatctcatataaggggatgaagagatatgacagagagaaaaaggaacaggtcaaatacctcaaaatatgcttcggtttgtagatttgattttgaaaccacataaatatttttacataattatgaaacaaattgaaatattaaaaaaatcagttcctaaacatcaaaaccaaaatggaataaacataactattgatttgtggcatgtccacaaagaaagagacaatttcatgtgacttaaaaacattaatttcattgtacatccttagtgagacatgccctaaaaacaaaaagaacataaaaaa

SEQ ID NO: 87709 - DNA, 550 bp, Homo Sapiens
  misc_feature (436)..(437): n is a, c, g, or t
tatcggtgaaagcctcggtttaattggagacaagatcgaaggattattgatcaacggaccgaatgactgatcgtcaaagtggacaatacacaagcagcttacagaggtcctgtgctcaccctggggagaggagccctgcttgggggtgggtctgtctctccagtcaccccctggctcctggagaaggggggaggggacaggctctgccagccccaacccctaggatgacacgacttcccataaaacaacagcggtgagtccacccttttcccaggactatggtacagtttgtataatacagcaggaacagagactctcccaacgggagacctccttccctaccttcccgactgggtcagccagggaagggcaagtttttattttccctttttgcctccgtagaataatttacaaaccaaccttacagagtcgtcannatagttagatagcgagcaaaaaatgttaaggatgaacaaaaagaaagaaaaggcccactccgatcgccggctgggacaaaaacgactttcgctacaaatatgaacctgtacag

SEQ ID NO: 87710 - DNA, 491 bp, Homo Sapiens
  misc_feature (94)..(138): n is a, c, g, or t
  misc_feature (218)..(239): n is a, c, g, or t
caggagttttgtttgagcccagcctgtgcagcatagagagacccccaactctacaaaaattaactaacattaaccaggcgtagtggcatgcacnnnnnnnnnnnnnnnnnnnnnnnnnnnnnnnnnnnnnnnnnnnnnaaaccggagttcaaagctgcagtgggctgtgattgcgccgctgcattccagcttgggggacagggtgagaccctgtctcnnnnnnnnnnnnnnnnnnnnnnctatataattttgtgtggaaaatataggtaaatatatttttgactttggggtagtgaaagactcattaagccacaaaaagaatttaaaaagaaatgatgaacatacttgaccatatgaaaattagaacctaaatccataaacccttaagaaagtgaaatctaaactacaaactgggagaagagataaatagtctcaagactacatgaagaactctgataaatcaatgagaaaacaacctaataggaaaatag

SEQ ID NO: 87711 - DNA, 486 bp, Homo Sapiens
gcaccctgacctccctcagcaaccacccgtatgcagaagaaataacagctcctgggacaatgagaccgttgtcatccactcagaaatgtgcagagccacacgaggcagcaagctgggcctcggaggttttttccaaggcaagaattttcacctggacatgctgggctcccatgattccatgggtagaagtcagaaggtcagagaactttgatgagaaaaaaagttacatcattgttttcactaacctccaggcgaaatttagtatttccttccttgatgaatgcaggcaacaaaccactgcaggacctgtcaccttggcctgagagcagtcacagatgtttttgtatcacgtggctctggctgcaaacagctggaatgatgttaaagctcatctctgtaatcatggtggttattacagtgactatatctactctctcacatagtgttattcaatataagaataaagaaatggctgttttataaaaa

SEQ ID NO: 87712 - DNA, 373 bp, Homo Sapiens
cagttgaggccagggtggtcagggtgcagaataaatgccatcgagcctgtggctggccctctgctgctgttctctccctccaacctggctgtttcttgcggggcaaggggtgggctcagggctgcaggggtttctcaaaggcaatccagctttcacaaaggaagcccatgggaaggcaggtgggagggaaaggaaggggcacagccctatttcttcctacctgctaggacaaggtggaagagtgtatctggggtgggaaggagggcttcccctctctgctgcgagagactggtctgtgtgaaatccacttctgggacaggcagtactgtctgcagcgatacccccaataaacggaactttttaacccaaaaaa

SEQ ID NO: 87713 - DNA, 140 bp, Homo Sapiens
ctacattattaagacaactgaatgtgatttaaaatttatttgctgctcttctttttctaggatggagcctgctagaatatacaaccaaaataccacaaatttaaagataaaaataattgaaataatacaaattttccttc

SEQ ID NO: 87714 - DNA, 586 bp, Homo Sapiens
tttaaatgtttagtcttttatttaaaaactataaacagtcaccaaagtaaataaagccattctataacataaactgttaggtctatattttttactgcacatcctaaggacacagcagaaatggtggttgggaggccttccacatttttggatgctaatagaacaggcaataggcagttataaatggatacatttcacgctgggggaaaaaagacaatttaaggaagtgagcagtttctgagcaggaatgtggtacagtattaagaatggaagaataatacaataaaattccacactatattaagatagaaaaagtagtgaagaaaatatcatacctgcacataatgcatatataacacaggagaaaacctgtataaaattccatgtatttaaaccaatttacaaatacaaaaaattctgtccaagctctgagcttgtacacgacaaacgtttacagtggatacatgttaaggaaaaccaaaaaataccttcaaatagtttttcttctaaaaaatgacatgagatatattattccatactctttcagccagcaaaatgagttctacaaggtgtataatacaaaaaa

SEQ ID NO: 87715 - DNA, 1058 bp, Homo Sapiens
ttccattctcctattagtagacatttattgtttcactaatataagctattttgctctgaactttcttgcacgtgcctataacttaaaaatacacatacttttttaaaacatgcagttaaacaggaacatacacatttctttaacatgtagttaaacaggaaaagtaacacatgtgcatgaagaatacaaccaagagagccatcacgttcaagaaaagaccacaggttattccgagtgaagtaaggctttcactagaaggcacttggggaacgttccaatgacagcgacattcatcgctacagtagaaactcacacaatcgcagccctttattagtattttgttacccagtagttcctgtgtccattcatttcctcaactggagtgtgagctccaagaggaccgaaccgggcaccgacaaggtgagccaatatgaatgtggcgagtccgcaatgggggctacagcggccgacctctggggctgtgccaggccactagagtgtgatggcgcgagggaagggtcggggaaacagggcctaacctcacttttcaccccgaaagtcaagatagccacggaaacagggatgaatggggagcacagacacctgcctcgaagtgtctcttcactttcactcacaaagccgtcgggtcagtaaccagaagccgaggggcggatgcggcccccgccctgtggcactttctcagtctggttcttccagccgcgcctctttgccttacgccaattccgtaaggaggcgctgaggccaactggccggctcccgcagctccaaaagttgacgtgaaattgcgcggggcagagctgactgcggccatctttaattcgggcaagaccccaccctcgcaccccacccactagtccttttcagcgttcccaggattttctccaacaaatgtaacgcggttaaccttagaagcagtgttgaagaaacacgcaaagaggcctgagtatccatgacctcagtggtgcgaaacccggccaacttaaacatggcggctaaacccgaacagcaaaacgttgctgacgccaatgaagtcatgc

SEQ ID NO: 87716 - DNA, 497 bp, Homo Sapiens
  misc_feature (78)..(302): n is a, c, g, or t
catgtatttgtagttcattcattctcattgctgtatagtcttccgtttgtttatccatttttcattacatccaaaagnnnnnnnnnnnnnnnnnnnnnnnnnnnnnnnnnnnnnnnnnnnnnnnnnnnnnnnnnnnnnnnnnnnnnnnnnnnnnnnnnnnnnnnnnnnnnnnnnnnnnnnnnnnnnnnnnnnnnnnnnnnnnnnnnnnnnnnnnnnnnnnnnnnnnnnnnnnnnnnnnnnnnnnnnnnnnnnnnnnnnnnnnnnnnnnnnnnnnnnnnnnnnnnnnnnnnnnnnnnnnnnnnatgtgtagcataaaaatgaattacgctaatgatcttagtgggttgaatttctcgaaacacctaaattgtaccaaatgagttatattgcagcaggtatgttgttaatttcatataacaggaaaataagagcaaaagtaattgcccttattaactgacacattagtattacatactcattaggttattgctccttag

SEQ ID NO: 87717 - DNA, 670 bp, Homo Sapiens
  misc_feature (143)..(268): n is a, c, g, or t
tccctaacgctcaagtctagcccctcatttcctggcaagcatcaagcttgattgtgtctgtaacctctcagaagtcagacctcagaagtgtgcttttctgggaaatcggggtcagggaggaaagaaggagggaataaagacannnnnnnnnnnnnnnnnnnnnnnnnnnnnnnnnnnnnnnnnnnnnnnnnnnnnnnnnnnnnnnnnnnnnnnnnnnnnnnnnnnnnnnnnnnnnnnnnnnnnnnnnnnnnnnnnnnnnnnnnnnnnnaagtggagcctagatttcaaacacctgtaagactctgaaatctatattagctcttctatacatgagcctaaaatgcaactgtaaaccaataagactgacttcctcttgaggcttatcactagctctgaatagaagcattcccaaatgctgtctaagcaattgttgcgtcatgggaataagttgataaattctcagggttacatactcctttagatgcactggaacttttctcagtatgtagaatcaagtgtaaggaaaaaggatttgaaggggaaggggagaaataaaacaggactgagccttacacgtgttgaccagaacagataatgtttggattttctttacttttttcccagagaaatcgaataaagaagtttgtttctgttacctaaaatcaaaaaa

SEQ ID NO: 87718 - DNA, 637 bp, Homo Sapiens
  misc_feature (230)..(265): n is a, c, g, or t
  misc_feature (449)..(453): n is a, c, g, or t
  misc_feature (456)..(462): n is a, c, g, or t
  misc_feature (467)..(467): n is a, c, g, or t
  misc_feature (469)..(469): n is a, c, g, or t
  misc_feature (472)..(472): n is a, c, g, or t
  misc_feature (517)..(517): n is a, c, g, or t
tgactcaggggccctgccccctccacttggtactagctgtaagcggaacaccctgccccagggccggacttccagcccccagagccctctccctgtcactccctgaaacactattaatagctctgccgatagctggtgttgtcacaactgcctggaatccgaaggtggaggacaggcagccccgcgcccctgagactggagaccctccccagtgtggcatttcctgccannnnnnnnnnnnnnnnnnnnnnnnnnnnnnnnnnnntcttccttcaccagctcccctcgactcaagcccttgtcctcattatccggcccagaccaaagattccctcatccctgggggcagccctgccgctgtgtctcctttgtatcctaaatctttatttttctaggacatgttatgcctccattttcaattaaaataaagttatcggattacacccgcnnnnnaannnnnnncgtananaanaaaaaaatgtcgggccccctccgcccctcgaaaaaactttctaanaccctttcgtttgggggccgggggcccccagtaggtaaaggggaccagtggccctaacccggtttccctaaagaagaacccggggcaatgaactaggggcttgggaattcccccccaaat

SEQ ID NO: 87719 - DNA, 433 bp, Homo Sapiens
  misc_feature (42)..(42): n is a, c, g, or t
tgccaagtctgggaagcgagctctagctggaggtccagcccntactgaaagacaccccaattcaggagctcaacttgtggtccccagggagaaaccctaagctttgggagtagttcgaccctcacagcctcgtaaaaggcggtgtgacagttttgtcacgggcagaaggaagaaacgacgtcgtagccagtagggagcagcgggaccatctgaccccacttgccagtccctaaaggtgggtgccccagagtagattccacccctgctgcccaccaatggagaatcccaatgttgaatctcatcccaatgttgttttgttgttctgcaaaagtggcaagcatggagagagaggtcagactggctaggctgcagggggaattacctttggaaggagctatatagaaaaaaaatgaataaagtgttttgttggaaa

SEQ ID NO: 87720 - DNA, 1384 bp, Homo Sapiens
  misc_feature (557)..(557): n is a, c, g, or t
gggactccgctgacaccttccctttcggccttgaggttcccagcctggtggccccaggacgttccggtcgcatggcagagtgctacggacgacgcctatgaagcccttagtccttctagttgcgcttttgctatggccttcgtctgtgccggcttatccgagcataactgtgacacctgatgaagagcaaaacttgaatcattatatacaagttttagagaacctagtacgaagtgttccctctggggagccaggtcgtgagaaaaaatctaactctccaaaacatgtttattctatagcatcaaagggatcaaaatttaaggagctagttacacatggagacgcttcaactgagaatgatgttttaaccaatcctatcagtgaagaaactacaactttccctacaggaggcttcacaccggaaataggaaagaaaaacacacggaaagtaccccattctggtcgatcaaaccaaacaatgttttccattgttttgcatgcagaggaaccttatattgaaaatgaagagccagagccagagccggagccagctgcanaaacaaactgaggcaccaagaatgttgccagttgttactgaatcatctacaagtccatatgttacctcatacaagtcacctggtcacaactttagataagagcactgggcattgagatctctacagaatcagaagatgttcctcagctctcaggtgaaactgcgatagaaaaacccgaagagtttggaaagcacccagagagttggaataatgatgacattttgaaaaaaattttagatattaattcacaagtgcaacaggcacttcttagtgacaccagcaacccagcatatagagaagatattgaagcctctaaagatcacctaaaacgaagccttgctctagcagcagcagcagaacataaattaaaaacaatgtataagtcccagttattgccagtaggacgaacaagtaataaaattgatgacatcgaaactgttattaacatgctgtgtaattctagatctaaactctatgaatatttagatattaaatgtgttccaccagagatgagagaaaaagctgctacagtattcaatacattaaaaaatatgtgtagatcaaggagagtcacagccttattaaaagtttattaaacaataatataaaaattttaaacctacttgatattccataacaaagctgatttaagcaaactgcattttttcacaggagaaataatcatattcgtaatttcaaaagttgtataaaaatattttctattgtagttcaaatgtgccaacatctttatgtgtcatgtgttatgaacaattttcatatgcactaaaaacctaatttaaaataaaattttggttcaggaaaaaaaa

SEQ ID NO: 87721 - DNA, 443 bp, Homo Sapiens
gggcgcgaggggcggcgggctagtaccaaacgggctcgcgtgggtcggtggcaagtaccaagcgggcgagcgtggggcggagtgtggctcggtagtcctctgcgtgccctcctgggagctgggtgctgtgagtcctaccctagcgggctggtctcggcgcggagtcggcgccgaacccgagctgctgctctggggcgtgtgcctagggcgcagggctggagcgcgggggctgcgcggttgctcgcggctccgctgaggtctctaggaaagggggcgatttgagggttccgccgtgaccgcttccaacggcggacacgcgcgctctggaccagagccgttgcccgctgtctcgtcacccgaagcctcctcctgacgccgtgctagtgcgagggtctccaggggaattcggggcacaagtcgggccggagcatccgggcggccgc

SEQ ID NO: 87722 - DNA, 354 bp, Homo Sapiens
tgccactgcagttccgcctgccaggaccagtctttccctagaccttcccattcctgcctcttcctggcttggctgcctctttctggtgcttcaggtctcagatcaaatgtcacctcttcagagaggacttcattgaaatctctgcctaacacagcccgtatcaaggtcaacacttttctctttttagacttaggttttgatataaagaagtttcataaaaatgacttgggcagctatcatctgtttaaaaggtctgactttgttgaaataatttgggctttcctgttctttgagttttgataaaacaactgtaaaaccatctgcctttttaaaaaaaattgagattgatgtaaa

SEQ ID NO: 87723 - DNA, 619 bp, Homo Sapiens
aagcttggtgctcacatttcactttttaacacacacggacaaaaaatatactcatgtacaagcaaaaatactcatatttgcccatgtgcccaaacacccacagacaatggagtattttaaagacccttgggcttttatttttttcagcaaatgaacaattagcctcaatagtcaaataaacatcaaaagatgaggggttttcccccttcctctgctggtacaaaatatagcaacaaaggggggcaaagtagcatgaaacctgaagcagctcacacagaaggactcaagaaaataggatcttccaaatggaagtttcagttagcttcaggggtctcagaattgcatctcctaaattttgattccaaaagggaaattccctatggcccagcaggcccatacaatcaattttccacattatttgtgtaaatatctgtcctgttgcatattctggaagaagtgacagtttcaaaatgagacttgccaacacacccccttgtcccaaacaataagaatcagcagaacatccctatcagccctctcaatttattcttcatcagaagccagtggaaaaggaattcagcaaagtgagatccccaactgcacaaagcacaaacactca

SEQ ID NO: 87724 - DNA, 532 bp, Homo Sapiens
cacgtgtagccccagctgtctgcaggcaccaggctgggatgagctgtgtgcttgcgggtgcgtgtgtgtgtacgtgtctccaggtggccgctggtctcccgctgtgttcaggaggccacatatacagcccctcccagccacacctgcccctgctctggggcctgctgagccggctgccctgggcacccggttccaggcagcacagacgtggggcatccccagaaagactccatcccaggaccaggttcccctgcgtgctcttcgagagggtgtcagtgagcagactgcaccccaagctcccgactccaggtcccctgatcttggggcctgtttcccatgggattcaagagggacagccccagctttgtgtgtgtttaagcttaggaatcgcctttatggaaagggctatgtgggagagtcagctatcttgtctggttttcttgagacctcagatgtgtgttcagcagggctgaaagcttttattctttaataatgagaaatgtatattttactaataaattattgaccgaga

SEQ ID NO: 87725 - DNA, 441 bp, Homo Sapiens
tttcatggtggccagagagacatttacagtgtgagtgtgaggcccggcttaggcctgcatccttgggcagggtctgcccttggtcccagggtcctaaggctgctctgcagagagccccgtgccttagtgtttgatctcgaggatggagggattgtggtccaggatggcgaggataatcttgtccatgtactgcctcagccggaagttgatctcctcctgctccttcagggcttccattagctcatcgcgcgaggcggtgtctatctccgcagccagagactgggctttagtctgggcagcaaagaggttttttgcttcgtagaggctgaggctcaaaatctgcccattcaagtcgtcgttctgatcccgcagcttataattctcctgcttgagccgcttgacctcgtgctcgagctccacctcgcgggccctggcattgaa

SEQ ID NO: 87726 - DNA, 196 bp, Homo Sapiens
gctgggtggtctagaaagtgccccacacagaaatctgggttatcataggatctgccttgttcgtttctcttctttcatagataaaaatactgtgcttcctactgtccagtgtttgagcacagtagtttcatgtaatctgctgagttgtctagtgtttaaggcatcaggataaatgtttattatggccaaagcagaa

SEQ ID NO: 87727 - DNA, 881 bp, Homo Sapiens
taggtgtcagatcacagagggggtttgtattcacgtgcttcactatccaatcccgcacggagcagttcaaggcggccaactgcttgtgataggcatttccgacacaagctttactggaagcaaggccagaggaggagggctgctgactgtccccattagttttgggatttgaaactttatcaaccaaggtggtagggccatttgcagcaagagaaccaaaggctaccttgggatctgccgctgcctttgcactggcgaagggaggggcactggttatgttgtttccattcgacagtccttccaaaggcttccctccagcgccactaccaaatccagaaaagcgtcctcctccagaaggtaccaccaaacctttaaaacctttaaaggctcctccagtgtcagattcaaatccaacatttctgcgctttgctttctttatggctctattcttcaagacttcctcactggccatggagaatgttcccacctcttcagcttcatcttcttgatcccaattcctatctgtcagttccttctcggcatttcttttggccatgttttcgaacctcctcggcggccgccgctgcactcgctgggtcttggttgcggcgaaacccggggcgcagcggcgcaggggtctggagcccgcaggggtcgccgggctgagcgcgctcggccgcttccggtgctgcgctgcggaactcagaggacttagtgctcggcaagcccagagactcaaacaccatatccctgggggggctcctcacgctgtgttcggcagggaggcgagagcgccggttcagccagagacagctgggggaaccgcgccgaacacgctccgggcggccattttgtaactcgaatctacccccaaaaacccc

SEQ ID NO: 87728 - DNA, 848 bp, Homo Sapiens
  misc_feature (288)..(308): n is a, c, g, or t
ttttttccttcttaccaatcattatttttattaatatattttacaagactgtggtcgaaataatattaaatacaaattttttatacagaaagtgtaataaagttaaaatagttccttgtaattcatagcattattgaaatgcttacaaaatttttgcatagagtgtgcaaggattgatgttattcaaaacaaaactaaaaagctcttcttacatcacacccaaaaccagagaaaaaccaaaccaaaaataatccaaaggctgaactcaattactttatgggaatgggnnnnnnnnnnnnnnnnnnnnncaaaatctccaagcaaatgggacttccatgacctcaccattttggttaagaacatcagaatccggcttcttcagaagcgcatctagccagcataatgatggatagcctctgccttttccttctaaaacacgacctccttaagaagtatgtctcagcttcttcataatctcaaaaagggagaaacctgactgggggaggtggttgatacatgaaaaactttattccctccgtcacagactagataaaaattaattttgtgttcactaaatttagatgtgccgacacttccctttacttttctagaatcttgcatctcttccagagagctagatttctggctctggtaaggttagtcctatgagaccctttaatggtatctattcctggcttgccatttggatgtcttaaaccattaaaaaggaaatccctgactgacttactgtagagtcgagtctttttcatttttggctcatccttttactaaggttttgtggtgggttgttgaaccaggaaagcactggcactggggctgagtctttt

SEQ ID NO: 87729 - DNA, 446 bp, Homo Sapiens
ttcagaaccgagaagccaaagttccgcaggaatgagagagcccatgctagcccaataaaaacgctttcccctcctcaaatcctactcaggagacgtgaatgctgtggagcagcccatcgtaccttgtcctgctccgagacccaccgaattatctctcctgggggacagcgtctccgtacagatcctcgtccctcccaagatgttgtttacacgaggggcttcataacggattctaacggaagacactgaaaagcgccatggctacttattctgccacatgtgccaacaatagccctgcacagggcatcaacatggccaacagcattgccaacctgagactgaaggccaaggaatatagtttacagaggaaccaggtgccaacagtcaactgaggaaaaaaaataattaaacaggcctaagaagaaatcaaaaaccataagacccct

SEQ ID NO: 87730 - DNA, 421 bp, Homo Sapiens
tttatggtttttgatttcttcttaggcctggttaattattttttttcctcagttgactgttggcacctggttcctctgtaaactatattccttggccttcagtctcaggttggcaatgctgttggccatgttgatgccctgtgcagggctattgttggcacatgtggcagaataagtagccatggcgctgtacggagacgctgtcccccaggagagataatcggtgggtctcggagcaggacgaggtacgatgggctgctccacagcagtcacgtctcctgagtaggatttgaggagggaagcgtttttattggctagcatggctctctcattcctgcggaacttggctcttcggttctgaaaccacacaggatagttttgagaattggcccagaattagtgcctaataaacataaattct

SEQ ID NO: 87731 - DNA, 614 bp, Homo Sapiens
gcggccgcttggacagcccgggcaacctcgacaccctgcaggcgaaaaagaacttctccgtcagtcacctgctagacctggaggaagccggggacatggtggcggcacaggcggatgagaacgtgggcgaggctggccggagcctgctggagtcgccgggactcaccagcggcagcgacaccccgcagcaggacaatgaccagctgaactcagaagaaaaaaagaagagaaagcagcgaaggaataggacaaccttcaatagcagccagctgcaggctttggagcgtgtctttgagcggacacactatcctgatgcttttgtgcgagaagaccttgcccgccgggtgaacctcaccgaggcgagagtgcaggtgtggtttcagaaccgaagagccaagttccgcaggaatgagagagccatgctagccaataaaaacgcttccctcctcaaatcctactcaggagacgtgactgctgtggagcagcccatcgtacctcgtcctgctccgagacccaccgattatctctcctgggggacagcgtctccgtacagcgccatggctacttattctgccacatgtgccaacaatagccctgcacagggcatcaacatg

SEQ ID NO: 87732 - DNA, 523 bp, Homo Sapiens
cagaatgctgccacatattggaatgaacttccacagtctgcatgtaacccaacatataattcttctgagcatttatttggaacttcatatccatactctgcttggtgtgtttatcagtacagcaacagcaatggcaatgccattacccagacataccaagggataacatcatatgaagtacagccatctccttctgggctgttgaccacagttgcaagtactgcccagggcacacattctaatcttctgtactctcaatattttacttattttgcgggggagccacaagcaaatggctttgtgccagtgaatgggtattttcaatctcaaatacctgcttctaattttcggcagccaattttttcacaatatgcttctcatcagccattaccacaagctacatacccttaccttcctaatcgatttgtgcctccagaagttccttgggtttatgctccatggcaccaagaatcctttcatccaggacactgaaaatagtcttctgtctattgaaataagaaaa

SEQ ID NO: 87733 - DNA, 373 bp, Homo Sapiens
gatgtctcaagaccacctttatgcttgataattcacaaacaggactcataagactcaggagcatgttagactcccaactgggctttattcctctaaaaggctgtagagcaagaacaataggaaaaaggtgtaagtcaagcagtctggagagggtagccataagcttttgagtccttcaccacctgagttgcacagggtgtgctccctccagcagtgaactaccaggacgtgtttgaaaccactggccaggaaaagcctgtttgagtctcagggtctgccattatatgaagggctagatacgcaggcacatcctgccatgtgcccagctatggtaaccaaatctcaggaccccgacaatgaatgaggtgcacat

SEQ ID NO: 87734 - DNA, 1125 bp, Homo Sapiens
gttttcctccaaggagcctcggacgttgtcacgggtttggggtcggggacagagcggtgaccatggccaggctggcgttgtctcctgtgcccagccactggatggtggcgttgctgctgctgctctcagctgagccagtaccagcagccagatcggaggaccggtaccggaatcccaaaggtagtgcttgttcgcggatctggcagagcccacgtttcatagccaggaaacggggcttcacggtgaaaatgcactgctacatgaacagcgcctccggcaatgtgagctggctctggaagcaggagatggacgagaatccccagcagctgaagctggaaaagggccgcatggaagagtcccagaacgaatctctcgccaccctcaccatccaaggcatccggtttgaggacaatggcatctacttctgtcagcagaagtgcaacaacacctcggaggtctaccagggctgcggcacagagctgcgagtcatgggattcagcaccttggcacagctgaagcagaggaacacgctgaaggatggtatcatcatgatccagacgctgctgatcatcctcttcatcatcgtgcctatcttcctgctgctggacaaggatgacagcaaggctggcatggaggaagatcacacctacgagggcctggacattgaccagacagccacctatgaggacatagtgacgctgcggacaggggaagtgaagtggtctgtaggtgagcacccaggccaggagtgagagccaggtcgccccatgacctgggtgcaggctccctggcctcagtgactgcttcggagctgcctggctcatggcccaacccctttcccggaccccccagctggcctctgaagctggcccaccagagctgccatttgtctccagcccctggtccccagctcttgccaaagggcctggagtagaaggacaacagggcagcaacttggagggagttctctggggatggacgggacccagccttctgggggtgctatgaggtgatccgtccccacacatgggatgggggaggcagagactggtccagagcccgcaaatggaccctggcctccagtgccttcccccgtggaataaacggtgtgtcctgagaaacccc

SEQ ID NO: 87735 - DNA, 427 bp, Homo Sapiens
ggctcatggcccaacccctttcctggaccccccagctggcctctgaagctggcccaccagagctgccatttgtctccagcccctggtccccagctcttgccaaagggcctggagtagaaggacaacagggcagcaacttggagggagttctctggggatggacgggacccagccttctgggggtgctatgaggtgatccgtccccacacatgggatgggggaggcagagactggtccagagcccgcaaatggactcggagccgagggcctcccagcagagcttgggaagggccatggacccaactgggccccagaagagccacaggaacatcattcctctcccgcaaccactcccaccccagggaggccctggcctccagtgccttcccccgtggaataaacggtgtgtcctgagaaaccaaaaaaa

SEQ ID NO: 87736 - DNA, 1040 bp, Homo Sapiens
ttcgttagagagtatgaagtcgacggcgcgccgaattcggcacgaggattacctggcagaactgatagaagaatacacagtggccaccagcaggatcataaaatacatgatctggttctccaccgctgtactgattggcctctacgtctttgagcgcttccccaccagcatgattggagtgggcctattcaccaacctcgtctactttggcctcctccagaccttccccttcatcatgctgacctcgcctaacttcatcctgtcgtgtggactagtggtggtgaatcattacctagcatttcagttttttgcagaagaatattatcccttctcagaggtcctggcctatttcactttctgcctgtggataattccgtttgcgttttttgtgtcactttcggccggggagaacgtcctgccctctaccatgcagccaggagatgatgtcgtctccaattatttcaccaaaggcaagcggggcaaacgcttagggatcctggttgtcttctccttcatcaaagaggccattctacccagtcgtcagaagatatactgacccccatgcaggcaggatgtggggggcaagatcaggagagtcaggcccctgggcctctatgccaggtggggaccagaagtcgggaaggcacctaccacctgccctggctttcttcccctcaactctggagccccatccccaccctccttggggggctcagcttggctcagatctgatgcttcaagaggctgtaacctcagagggcaccaaggagggtggcagagcctgcttagccaggaggccgaggtccctcagtcctcccctgtcccttccaaggtgggtcaggaggttctggccccgctggggcaggcagggcagggtctgtgaagcttaagagcagatggtgacaagttctctgggcaggtggccatggggaggggccatggcttggcatgtccaacagaaatagtttttgctgttgaacggtgatttctgtccaagtgcagatttccgtttgaataaagcttcgcttctaggtggcaaa

SEQ ID NO: 87737 - DNA, 705 bp, Homo Sapiens
gcggccgccctggggacgcagacgccaaggcccctccttctagggccgggagccgggccggcctagccaggctcaaagatgtggaaagagacagcttaacagaaaaggaatgtgtgaaggagaaattgaatctcttgcacgaatttctgcaaacagaaataaagaatcagttatgtgacttggaaaccaaattacgtaaagaagaattatccgaggagggctacctggctaaagtcaaatcccttttaaataaagatttgtccttggagaacggtgctcatgcttacaaccgggaagtgaatggacgtctagaaaacgggaaccaagcaagaagtgaagcccgtagagtgggaatggcagatgccaacagcccccccaaacccctttccaaacctcgcacgcccaggaggagcaagtccgatggagaggctaagcctgaaccttcacctagccccaggattacaaggaaaagcaccaggcaaaccaccatcacatctcattttgcaaagggccctgccaaacggaaacctcaggaagagtctgaaagagccaaatcggatgagtccatcaaggaagaagacaaagaccaggatgagaagagacgtagagttacatccagagaacgagttgctagaccgcttcctgcagaagaacctgaaagagcaaaatcaggaacgcgcactgaaaaggaagaagaaagagatg

SEQ ID NO: 87738 - DNA, 490 bp, Homo Sapiens
  misc_feature (61)..(109): n is a, c, g, or t
  misc_feature (140)..(213): n is a, c, g, or t
atcctcacactggtcagttccaaccttcccaggaatcttctgtggccatgttcactccggnnnnnnnnnnnnnnnnnnnnnnnnnnnnnnnnnnnnnnnnnnnnnnnnngctatgagagacagagccaggatttgaaacnnnnnnnnnnnnnnnnnnnnnnnnnnnnnnnnnnnnnnnnnnnnnnnnnnnnnnnnnnnnnnnnnnnnnnnnnngcctctatttcgagacccctgactccacacctggtgtttgtgccaagaccccaggctgcctcccaggtcctctgggacagcccctgccttctaccaggaccatgggtagcaacaagagcaagcccaaggatgccagccagcggcgccgcagcctggagcccgccgagaacgtgcacggcgctggcgggggcgctttccccgcctcgcagacccccagcaagccagcctcggccgacggccaccgcggccccagcgcggccttcgcccccgcggccgc

SEQ ID NO: 87739 - DNA, 394 bp, Homo Sapiens
  misc_feature (316)..(316): n is a, c, g, or t
  misc_feature (354)..(354): n is a, c, g, or t
ggggccgccccaagggtaaggaacaggggaggcggagtagcgccacgttagccgctttccctgagagattgtgaagcacgttgcgcacggggccctttctggtctggcttagccaaggaggaaggggaaaaggcagaaatcacaactcataggccagcgtcttgagcgacacttcctcagcgggaagaaccggcaaaaaaggccttccaagatggcgggccctgacggggccgccccccttgagcctggcgcagtggctgcgcccatgggcccgaaaagcagccgcgggagcccaggccgcgcggggaaagccgcnagaacgtcctgaagccctggccggcagcccctgaacanaacgaggcgtccacagcgtacactattgtttctaatgtcg

SEQ ID NO: 87740 - DNA, 605 bp, Homo Sapiens
atggaaatgaatatgtgaaagtagaaaattgttgaacattaaaatgatgttgaatttaaccacaccatagagatgataaagtgcagtttccatgctacaggaaataaatccacataataggatttccaggagagaaaatcaatacagaaataatagaagaaaactttttgagttaaagaaagatttgagttgcccaattatagggaaaaagggaatcaggcaaaattagggaagagctccttcttggacattcctagggacaaagaataaagagcctggtggccctcagagtaagtgacagcatttaacgacagaagtcccagagcaatatctgaaggttttaagagggaaaaggttgtaacccacggatccttcactcatccaagccactggccgtatgatataaccacagaaagacattctcagccttgcaaggattcagacatttgccacccatgtatctttcctgaaaaaattatttgtagaaatagtcccaccaattaagaagggaatctaaatgccagaaattaaagatgtaatgtcaaagaaataatgataaggtataaagccaataaaatatagagttttacaataaagaaaaaaaa

SEQ ID NO: 87741 - DNA, 1133 bp, Homo Sapiens
gctggtaccggtccggaattcccgggatatcgtcgacccacgcgtccgtgctgcttgttcgaatctactgtatgctgggtgcatttgaaccagtggtggatctttactccagcctcgatgctaagcatatccagcatgataccattggttatcttttgacccgatatgctgaatctctaggtcagtatgctgctgcgtcccaatcctgtaacttcgcactcaggttttttcactccaaccagaaagatacctcagaatatattattcaagcttacaaatatggtgcatttgagaagatcccagagtttatcgcttttaggaacaggctgaataattctcttcattttgcacaagtccgtactgaacggatgctgttagaccttctacttgaagcaaatatatcaaccagtttagcagaaagtataaagtcaatgaaccttaggccagaagaagatgacattccatgggaagatttgcgagacaacagagacttaaatgtttttttcagctgggatccaaaagacagggacgtttctgaagaacataagaaactttccttagaggaggagaccttgtggttaagaatccgatccttaacattgaggctgataagtggacttccaagtctcaaccaccctgtggagccaaagaactcggagaagactgccgagaatggggtatcctcccggattgatattcttcgtttgctccttcaacagctggaggcaaccctggagacaggaaagcgatttattgagaaggatattcagtatcctttccttggtcctgtacctaccagaatgggtggattctttaattctggctgttctcagtgccagataagctctttttatcttgtcaatgatatttatgagctggataccagtggtttagaggatacaatggagattcaggaacgaatagaaaatagttttaagtctttactagaccagttaaaagatgtcttcagtaaatgtaaaggtgacctcttagaagttaaagatggtaacttgaaaacacatcctactcttttagaaaatctagttttctttgttgagactatttctgttatcctttgggtatccagttactgtgagagtgtcctacgaccatacaaactaaatttacagaaa

SEQ ID NO: 87742 - DNA, 642 bp, Homo Sapiens
ttttttctgtaaatttagtttgtatggtcgtaggacactctcacagtaactggatacccaaaggataacagaaatagtctgaaaggaaaaattgcaaattcaccaataaggattacactaaaaatatctatcaggaaattagaggcaatggattcaacaaattctaacgcagttcttctatgtaaatcccttcaatttctcatgtgaatctccactctactttctgcaatcactctactgatccaggccttcatcatctcctgctcagaatactacaatggcctaactcttcagcatttcttctggctctcctagctcaaaatccatcctccacttcactccaattttctgtcacttccctgaagaagtggggactgatttaacatccttttcactcaaagaagagtccaaattcctaagcatagaatccaaaagttctttacaatatacctctcccgtcacatctctccaagcaggtaagataccaccttacctgcaaatcttaacttacatatgtatggcaaaatctacccagttgatcagtacatatcctgcactgtatcaaattagctgtttatatgtcttctcctatactacagtgtgtgcatgtacatatatgtccgcttattactcattcactta

SEQ ID NO: 87743 - DNA, 547 bp, Homo Sapiens
ggaagagcttcaaggccacatcgcagagggactccgacacagggagacccaaagaaaaggcatcagctacttaaacatttttagcagttcacagatttcttcactttctctctggaggggcagtggagagcgcacggcttctgaggcagcggcctgggatgaacctctagcaattccgctcaccagcagtgtcacctcagataagctacttaaggtctctgggcttcagttttgtcacttgtcaaggaggaagtcgtcctccccctgtgtcatgaagattcaaggagagacacatggactcaccctgaacaacatggacactgagcaaaacctcaatttatggttttaaagatgtcaagaagtattaccttaatatacatgtcacaaaaatccttgtcagactctgttctgatttacttgctatgtaggtcacatagcaagtaaatgcctaaaaagtgcaatttaatgatcctttcgtaaactcctcttcccctgggctggaatgatgttctggagttataaattaaaagaatgctggtaccctaaa

SEQ ID NO: 87744 - DNA, 465 bp, Homo Sapiens
agaggtttacagtaatcataggcctcatggggtgcctcagatcacacgatggaggcagctagacatgctgcctgcatgtgagcccaattctctctccatttcaatttccttgtctctaaatccaagtgataaaacttgcacttccttctaccaccccagggtcatgaaaaagttaggaaaccaaacgtattacattttataaggtttgttttccactgcaagaagtgtggatgctatctatataaagtgagactcctcacatttggaggggcaatttctctcttgggaaacttgtgagaagagctcttaggttggctccttacactgatgaaacctctaatgaggtgtcaaaaccacaaacaaaactataacacatgatggccaaaacaaacttattaaatgctgataaaatcgttaagatgagtaggttgaattggatcagaggtttttgaccatattgtgcta

SEQ ID NO: 87745 - DNA, 492 bp, Homo Sapiens
gtcaaaagtaaggagtacttgatagcttgcattgaagatcacaactatgaaacaggagagtgctggaacggactttggaaatctaaatggattttccaagttaacccatttctaacccaagtaacgggaagaatatttgtgcaacctcacttcttcaggtgtgtcaaccttcatattgaaatacccaaggacctgaaagaaagcttggaaatagttaaccaagctcaactggctctaagttttgcaaggcttgtggaagagcaagagaacaaatttcaagctgcagtcttggaagaattacaggagttatccaatgaagccctgagaaaaattctacgaagggatcttccagtgacccgcactcttattgactggcacaggatactctctgacttgaatctggtgatgtatcctaaattaggatatgtcatttattcaagaagtgtgttgtgcaactggataatataaagaattgctcctggtaactaaaaa

SEQ ID NO: 87746 - DNA, 482 bp, Homo Sapiens
agtggtttccttgctatgactttccccttgctgttgatgagctggtgaatgtagcaagctatgtgacggtcattgctgacaagtatagactactttcaggtctctggagtcctcagagtctggcttttcttcatattattttatagtaaatggaattatcttcacaaataacttccatctgttttcaaataaatagaaatttgatacatagcaaaacggggtattcgtctcacagtcctacagtacaccaaacaaacaaacaaaaatttccacaacaggtctggctaacaaggagagaaaatatttttaatgttttaaataacatatattctccacatatttaaaagtctgtgttcacactaaaaaaagtgaactggtatgctactaaaagtcaatatggcctcgaattccagagataaagtaagtctacatattcatgaagcttatctctactgccttaaacactgagtatttttatctac

SEQ ID NO: 87747 - DNA, 582 bp, Homo Sapiens
tggtagtcacaggtcaataagaattgacctgcaaagccacaaggatttgttgccattctctgacttatcggtgaacatcaaggaaaagattgactctgaagagccaccatccaagatccagggagacacactgtggaatctgtggaatgaaggtcctcagtgacaggcgctgtgtgtcctcccaccatccgagatccaggcagacacgctgtggaatgaaggtcctcggtgacaggcgctgtgtgtcctccgaccatccgacatccaggcagacatgctgtggaatgaaggtcctcagtgacaggtgctctgtggcttacgaccatccgagatccaggcagacactctgtggaatgaaggtcctcggtgacaggcgctctgtggcctccatctcatcctacccttcagagcgcccgacctcacccctctggtagaagctcgcacatccagtggccagcccttcccttgctttctgggagaagcaccgtgacttgtagaaatgaccacaatatttttttaaatgaagttatgcaaatctgatagactgaagtaaatgtttcataaaatcaatgactgtttaaa

SEQ ID NO: 87748 - DNA, 976 bp, Homo Sapiens
  misc_feature (821)..(836): n is a, c, g, or t
ggattcataatgacggcactaaactcttggtactgaacagccttaagaaaatgatgaatgtcgctgagctggaactccagaactgtgagctagagagaatcccacatgctattttcagcctctctaatttacaggaactggatttaaagtccaataacattcgcacaattgaggaaatcatcagtttccagcatttaaaacgactgacttgtttaaaattatggcataacaaaattgttactattcctccctctattacccatgtcaaaaacttggagtcactttatttctctaacaacaagctcgaatccttaccagtggcagtatttagcttacagaaactcagatgcttagatgtgagctacaacaacatttcaatgatcccaatagaaatacgattgcttcagaacctgcagcatttgcatatcactgggaacaaagtggacattctgccaaaacaattgtctaaattgcataaagttgaagactttgaactctgggacagaaatgcatcaccctcactcccagagaaagttggtcacctctcccagctcactcagctccagctgaaggggtaactgcttggaccgcctgccaacccagctgggccagtgtcggatgctcaagaaaagccggccttgttggggaaaaacacctttttgataccctgccactcgaagtcaaagaggcattgaatcaagacataaatattccctttgcatcttttaaaataaaacagagaggatgcatagaaggctgatagaagacataactgaatgttcaatgtttgtagggttttaagtcattcatttccaaatcgnnnnnnnnnnnnnnnnggggaaagggaaggaaaaattataatcactaatcttggttctttttaaattgtttgtaacttggatgctgccgctactgaatgtttacaaattgcttgcctgctaaagtaaatgattaaattgacattttcttactataa

SEQ ID NO: 87749 - DNA, 780 bp, Homo Sapiens
  misc_feature (757)..(757): n is a, c, g, or t
tatttatcacattaaaaagtcatgcaaactttattcatcatagaattagaatgtggttccatccataagccagatagaatgaaatgtaaacgtaatgctatgcaacttaaactctgctggtcaagggagtgtcttccaaccatctcacagcaattccattttattttctttctaatgttatacatttctcctggtcatattcaactgtaactaatttttacataagtgtatcctgtattgtcctctttcttggattcttcctttatctcgctagaatattgttgcaggggtgggaggcaattctccatgtgttatccaagactctcttttcaaggacatttgtacagcaagattagtgtcttcctctgaggcagagagcaagtttgattcctgaccaggataataaagatagcttcttcctccataggaaaagttggctgggtttactggcagacttcttaagattgggggttccctaaactcagggatccttggctgtgaatgcagacccactgtaaacacagcaccagccccggcagccctgcgtctcccctatggaaggcacaaaggtaccaatgcaaacaagaagctcatgctgcctgctgtgcggtgaataatgaagttgtttgtctctgactgggagtctcatttcttctgccagcatctctgaaattggtagactaactgagctgcaagcagggtaaactctcagacctttcattgttcctaacaagcactgtagagcgatattttcatnccatgtgcccaagatgataattt

SEQ ID NO: 87750 - DNA, 448 bp, Homo Sapiens
tacttggagccataagtaacctcagcaaaaacgaggcctctgcaagccactttcccatgccaagcatccacccggcccacaggcatgtttctgccgccactccgcaagatggacagggagccagcaggcaggcgggaagggccaagtacaggcaatcacccccatcttcttggtttgaagctttatccatgtatcatgttccgtgtagccattttattttttaagaaactgctaatactttctccctaatggaagccctgatcccccagagagctacaggtctgctcccgacgggcctcgggcctgacccgtccacacagggccgtgtcaacagcagcgactcaagggacgtgtgtacatatgtaaatgagaaatagagacgtgtcaacagatgcattcatttctcttggaatgtgtattgtttttattttgcgaaacaaaacaaaac

SEQ ID NO: 87751 - DNA, 382 bp, Homo Sapiens
aaacttctcaataacaaaagagttctcccctggcccctgacctccttgatgcagcctgggcaggggtggcaatagcgagggcggccatgagaagctgaggcggagcgtccgagcagatccgggccatcatggtcctgcagtgccgcgaatcaccacagacggttacaggcagggaggacgggagccggtggacagcaggagccgctgcagccgaaacggtgcggtgtgtgtgtaatcactgatcgcagggtgaagctcaaggtctggattctgttatggaaatgaaacaaaattgttttcttcctgagtttttataaaaatcactgctttgaaaattatcccgtcagaaagagaataaacggcatttattcataccaccaaa

SEQ ID NO: 87752 - DNA, 571 bp, Homo Sapiens
  misc_feature (185)..(185): n is a, c, g, or t
  misc_feature (357)..(400): n is a, c, g, or t
ttgaagccgacacaggagtaccaaaacagcagctctcggtcagctaccttctgccagagcagaacacccatggcaccaggcggacactctcatcagggcccagcagcaacctgcagctgctgttagcagctcggagaccatgcccttcattcagtgcaaacacaggtcacccaacgggggcttgntcgggcagagcccggtgaagacccccatccccatgtccttccagcccgtgcctggaggcgtccttccagaggctctggacacctcccacgggacctccatctgactgcgccgcctgccctcctgcccaccctcccacccacccgaccagcagagctttttaatacaagaaannnnnnnnnnnnnnnnnnnnnnnnnnnnnnnnnnnnnnnnnnnngagactctttcatttttcttgtacatatgtgtaaataatgacagaatggagtggggtaaaagtgtattttgaatattcccaattttcgaagtcagtaaaaaaacacaaaaactgtatgaatgactttgtaaattttgttctatatgaataaaaaggcaaattacttgtgat

SEQ ID NO: 87753 - DNA, 493 bp, Homo Sapiens
  misc_feature (355)..(407): n is a, c, g, or t
gtggatcttggtttcgggatctcggtgctgcagacggcgagacctcctgcacagggtgtacagcaagctgtgattcctgggaaaactaaaaaagctctctgaacaacggggcccagagctgatggcagacaatgtcagccactaacaacatagcccaggcccggaagctggtggaacagctacgcatagaagccgggattgagcgcatcaaggtctccaaagcggcgtctgacctcatgagctactgtgagcaacatgcccggaacgaccccctgctggtcggagtccctgcctcggagaacccctttaaggacaagaaaccttgtattattttataactgtgttctcatatgtnnnnnnnnnnnnnnnnnnnnnnnnnnnnnnnnnnnnnnnnnnnnnnnnnnnnnaggcagggcatcattcagtaattagctcaaacaaaacatctcaagtccccaaaacctttaattccaaaagaaatcccccctctccc

SEQ ID NO: 87754 - DNA, 886 bp, Homo Sapiens
  misc_feature (337)..(390): n is a, c, g, or t
atctcggtggtgcagacggcgagacctcctgcacagggtgtacagcaagctgtgattcctgggaaaactaaaaaagctctctggacaacggggcccagagctgatggcagacaatgtcagccactaacaacatagcccaggcccggaagctggtggaacagctacgcatagaagccgggattgagcgcatcaaggtctccaaagcggcgtctgacctcatgagctactgtgagcaacatgcccggaacgaccccctgctggtcggagtccctgcctcggagaacccctttaaggacaagaaaccttgtattattttataactgtgttctcatatgtnnnnnnnnnnnnnnnnnnnnnnnnnnnnnnnnnnnnnnnnnnnnnnnnnnnnnnaggcagggcatcattcagtaattagctcaaacaaaacatctcaagtccccaaaacctttaattccaaaagaaatcccccctctccccgccaaaaaaggcgttcccaccgcccggatggggtagaatggaccttgtaggtggagatgaattttcaggtccgaccccatggccctctcagtttgggccaaaagggatggaggctttacggccacttcccattcggaataactgaaatcccccagcgatggggtaacaattttttaaaactctcgattgccgtttcaattgtggaccggcgccgagggggaaagggaggtgacttcgcccggtggcaatagttccgggagaattggccattggtaaaaagacttcatagggtcactggaatgctttgtgttgtttttaagtagaggtaaaattgagatggggggcgggaggtgacatcatgaagttttttggaaatatctctttatttaaaaaattgttactccataaa

SEQ ID NO: 87755 - DNA, 536 bp, Homo Sapiens
  misc_feature (382)..(435): n is a, c, g, or t
tgcggccgcggggcccgagcgcagggagtggagcttggtttcgggatctcggtgctgcagacggcgagacctcctgcacagggtgtacagcaagctgtgattcctgggaaaactaaaaaagctctctggacaacggggcccagagctgatggcagacaatgtcagccactaacaacatagcccaggcccggaagctggtggaacagctacgcatagaagccgggattgagcgcatcaaggtctccaaagcggcgtctgacctcatgagctactgtgagcaacatgcccggaacgaccccctgctggtcggagtccctgcctcggagaacccctttaaggacaagaaaccttgtattattttataactgtgttctcatatgtnnnnnnnnnnnnnnnnnnnnnnnnnnnnnnnnnnnnnnnnnnnnnnnnnnnnnnaggcagggcatcattcagtgattagctcaaacaaaacatctcaagtccccaaaacctttaattgcaaaagaaatgccccctctccccgccaaaaaaggcgt

SEQ ID NO: 87756 - DNA, 446 bp, Homo Sapiens
tcaggaagctcaggggctggggaaacagagaggaggagaccccatccagcctgggaggagggagtttgggaaaccggatgtcagattccagccactggggagttggatttcaccctctgtagtcactttcaagtctaaaatcccacgaagaactgaagttgggcagggaaattgaaagtaaaagtgaggaatggagaagtttctgtgccacatttgacgtgaaactgaaagtgatcatgtatgtgtccctcctgctcccatatgatctggcacagcgccattcagttttacagaagctgaagctcagtgcagtagcctggcttgccagaatgcactcttccttaacggctcacatttccatccacagcccaggtctctgccctcccagttcaatccctcaccccagtccgttatttttaaggcatataaaggaaaccagagacaaa

SEQ ID NO: 87757 - DNA, 530 bp, Homo Sapiens
  misc_feature (28)..(28): n is a, c, g, or t
ctatagggaatttggccctcgggccagnaattcggcacgaggcgccacgaggcagacttcctaggtagctctgaaacaggtggtctgtagaccacactttaagaattatcttcaaggattgggctagttttagtttgtagtgatttcttgtgtctcttaatgaaggcctagtcaatatagtctggattgattggataaacacagaggaacaagagagcggcagaattgtaccatgcatgcagcaggccatgctctacacgggcctctcaggatgcagcagagaggtaccctggatatacaggctttttggaatactgatgtgagtgtagaggccagaaaaatgaagctaggtggtattggaggagaatctctgaagactgctctcagtaggctgacaacaagttaagatgaatgtgtaactgttttctacattcttcttactgctataaaaataattgaaatgcagaatgcttaacttcattcagctgtaagccttgtaagaacatcaataaaaatttaaaaattctaaa

SEQ ID NO: 87758 - DNA, 681 bp, Homo Sapiens
tttaaacagctttattaagtatcattgatatacaaaaactgcacatattaatgtatacaatataatgagtttgcgattcagttttttaaatctcccagagatgagtatgcttgctatggtgtggctgagtggttagttttcccctctcatctacacagctgaattcccatgcaacgtacttccatggaaaggcatccaaataaattggctgtcaaggcctcagtgaaccagaaatatgagttccccatgtaaactcatttcagtaacagataaaatctgtggagccataattttccttcataatccaaacttgcttctagttctgaacttcctcatgtctaatcaatatttgctttcatgtttcaggtgaagccaaaaaaatcctaagtaatgatgatctgcttttacaaaatatgtaacttcaaaagggccattccttcctagtacttttcattttgataaaaatatagcttaaggatgaatgattataaatgtgacataatgaaaagtgtatggaacttttagtttgaagatcttgatctaagacatgtatcttaacattactagttaagagacagcagccctcatacaaaatttccctgagcctcagtttccccatctataacatggagattataccaatctcaaagagttgtatgacattaagtgagccagtgaaca

SEQ ID NO: 87759 - DNA, 447 bp, Homo Sapiens
cctcagttcatccatgtgatataagccacacccatttacatctgaggtcacaactactcatcagattttgaataatcctctttctactgcttcacaacagttcacaagccacaacacttccagcattaattcttcttcaacaaaccagaagactcattaggatccataatagctgccagtgtagaggagcctcagttactttcactttgatcattatccctgggagaagaagccaacagctcctggtgaccacaataagagatttcatttttacctcttacgaagagctcagtggaacatttctcatcaccggctgtcacataatactctgaatcatctgtcatctgacagttattgataaacaggattctctggcatcctttgtgttcaaagatgtatctgttttgaataggatgaaaataaacagagtctgtgaatgtgaaaaaa

SEQ ID NO: 87760 - DNA, 463 bp, Homo Sapiens
ccataagcaaattatagtttgacaagacaagattgggggacatatatggttaccagggaattacctcttatgtgttatatctttatattatttatctctggaaaagagtaccctgcaaaattccctacagctgcaagcagatgtcacttgatggacagagggggaattctgcccctccggtatcgggaaatacatactaaagacattgcgaaacgctgaacctcttcccataaataaaaggtttgtttgtaaaatgggaaatccacccataataaatgaacaataggcactgccagtttaggcctgttcatgaatggatctgcaagacagcatcttcgtttaacaacattatctgtgatttgatacatttatccttattacaatattgtttagttggtagaaattctatgttttctacaaggaaattgatgtttattaaataaaactgaaaataattaaaaaa

SEQ ID NO: 87761 - DNA, 873 bp, Homo Sapiens
  misc_feature (760)..(794): n is a, c, g, or t
  misc_feature (839)..(839): n is a, c, g, or t
cccattccaagagcagccgaaaccagctcactcatttatttgactgagaacattaagaaggacaacaaaattaaacattctttaataaaattcctatagaaagctcagtcatagggcaaatactcagttctctttcccatatcaccgaggattgagagctcccaatattctttggagaataagcagtagttttgctggatgttgccaggactcagagagatcacccatttacacattcaaaccagtagttcctattgcacatattaacattacttgcccctagcaccctaaatatatggtacctcaacaaataacttaaagatttccgtgtggcgtgaaaccatttcaatttgaactaatatccttgaaaaaaatcacattattacaagttttaataaatacagtaagaagagctggcatttttctaaaatactgaatttcagatctggagtttattccataaataggtttcttttcatttgcttgctttcttggatacatttgctcaagtattattctctatgaagtgaactctttcatagataccatataaaaactgtattaatatgtgcctcattatagaagcagctggaagaactggatcacacagttacctaactgaaaagtaacttaggaaaaagctctgctttttgtaaaactttaaatcacaggctgaagaataccaaagaaacatttatatagaactccccccggccgtaatggccgaattcccgggcatatgtccggtaccgtcgactgnnnnnnnnnnnnnnnnnnnnnnnnnnnnnnnnnnncggccgcttcctcgctcacagactcgctgcgctcgtcgttcggtnttgagagtagcgccctatatgattatcagtcctt

SEQ ID NO: 87762 - DNA, 848 bp, Homo Sapiens
aagtacttagcctcttctgacttctcaaaggacaatcggatacatatcttcctgaaaagaagtagttaaagttcccttgggaactagctacttggtagttacaattcccaaatgcagaacttggtcttttcatgttaaaagccttaatctcatttgggtactcaaaagagaaatcagagtttattctggttaacttgagaagccaagaaagatcatttttagcaagtatgccttccatccttggcagaggcttcccagcatcctaggctcagcttaccgggtgataggccccataagacacacacatgagcagggtgagaaatgcttgctttatagctgctccaccctcatctccagagattttgtgtctatggttgtgggtctggaaacctggcaggaaccacttctagagtacctttgcctaaactcttttagaattgaggccccaactttgatggcacatttaatacccaatttcttccataatagatatttttaatagcaggacagatggcactgattagatcaagaactatttggaagtgcctcttatgtttttttcctgcattctgtacataaagttttaagtggcaggtccagatatgtaaaatcatttctctctattttccagctggttttgttaatgattctctaggacagcaggtaaatgagttaagttgttggcttggggcaagtgaagtttgtgactatgcttgatttaataagctgagagtctcttgtttgtctgtcaaggtgccttcctctgctgaagccttacctccttctcacccagtaacggttaactcttctcttgtgtatatgcaaataaacctattattcacttaaaa

SEQ ID NO: 87763 - DNA, 416 bp, Homo Sapiens
  misc_feature (102)..(102): n is a, c, g, or t
  misc_feature (107)..(107): n is a, c, g, or t
  misc_feature (111)..(111): n is a, c, g, or t
  misc_feature (157)..(157): n is a, c, g, or t
  misc_feature (185)..(185): n is a, c, g, or t
tttttcccccataaataagtttcactcttcggcgattttcttcacttgtttaagataacgtgctagctattccaacaggtaacagctttcacagtttgcccntggcntgtntcccccatccccccaccctattcctgccagtgagtccttcctgtgnttttctcccttttcccctcccagccagntgatttcagtcaccctgtcccccctcccctgccaataagcccccccaggaataaaggctttgttttggggatgcttaaatcttgactggcacttcccggctgtgggggctggggagccacttgtaacatttctgtgcagattttatgttagccactgctatgtaaaagcacgttcaaaatgaatttcagcagattatgtgttaccataatgaataaacgtcctctatcccc

SEQ ID NO: 87764 - DNA, 438 bp, Homo Sapiens
agctcattgaaggaaagactgtaaaaggtggaatttctgaaacaagaattgagaaacgcattgtgatcacaggagatggagatattgatcatgaccaggcactggctcaggcgatcagggaagccagagagcagcaccctgacatgtcggtcacaagagtggtggtacacaaagaaacagagttggctgaggaaggggaagattaagtaagaaagtcattttttaaacaacactcaactttgtgaacccctgaagattttttgaccgttccaagtcttaatgccacaccactattccagcgaatttatgctacaactggtaacaatgaccagaagcctgaagaattaaaatgccaacaccaaacctttccttaccagctctggtctatattgctcccatgcatttaatatattattttgttttataaccacttctaaa

SEQ ID NO: 87765 - DNA, 822 bp, Homo Sapiens
aaactgatatttggtctaaatagttaactcaaggtcacactgagcttgagttaaggaatagtgaaggaagcaaactcaggactgctggacttccaatcccacactcatccattgctatatgtatgctagatttcatcactaatgtgattatccatactaacacaaatgatctgacaaatctgaaacattttgtatattatttaagtaactaaggcaaatgggaatcttgcagttttgctgctggtttgggtttaacttagaccgaggtgaaaacaagcttgaagtggacagtgttaggtttttcaaaagacacttctgcattttgctgatgttcagaaatcaagtagcagggaatataaaaaattctggcctcaactatgaaatgagttgccactcaggtcataataagtgacttttgagtatgacaaaattaaaaattaaaaacccagcatccttatgtgtatgaagcattaagtcagtgagctcttgaagtggttgaaaagaatgagttcttgtagaaatcatcgcatccacagggaactgtgagccagcttgagacacatcaaggtactgagtatggagattccacgatggcttcaccttggctggcctacaaatgttccatggaattaaatttggagcaagctcagttatgatgacatcaacccaagagttctggtctattatcaaagcaagtcattgaagtctctctattaatgggaaagagctcaccttctctgccaatggccctcccgcaatgagttcacatccgtgcagctctttgtaactctcaaaataaaataatttctttaacaatgaaaa

SEQ ID NO: 87766 - DNA, 671 bp, Homo Sapiens
gcccaagaagcagaagccattcgcatcctgacttcaatcttgaacattcgagaatctacatctgacaaagccccccaaaaaaccatctttgttctgaagatcctggtcatgctttactacctgatgatgaattcttcaaaggcacaggaatatggcatgagggccctcagtctagccaaagaacaacagcttgatgtccatgagcaaagcaccattcaagagttattaagtctcatttcaactgaagaccatcccattacttagtgacccatgagctctgcatcaagggttattccaggggctactgaagatctaatatattccagccttgcacaactgctttgaggtactgtagactgctgaagtttccaccctcttcccctgggattgcacacatagctgttatttttttcttacacagcatattaagggaatataaagctttaggcatagaaatcactaaaaactgtgtttgtcatgacctttgtacttgatttatcatgactttgtatgactgagtaatatgtagtcagatcactaatatggtatttgtaattaaactacaaatagtttgtcatttcccagaagtcttccaacgatgcatgtttcatacacttttgctaaaggaggggtaaaggagggggtagggaataaagctatattggaacaaa

SEQ ID NO: 87767 - DNA, 448 bp, Homo Sapiens
ccccttgtgatctggacagaccctggcaggcctcgagttccctggaggttgcgccttagcgacagatgacccgtctctgaccaccaagcacctagaaggcactttcgcaggagcaaggcaggggtctggggcgcggagggggtgggcgcaagccgccctcgtccagcggttcccgccgagcatggtgataatgagggtggggccagcgttggcggtagagcgcctggtggccccggggcccctcctcgtcctccgcgcctccctgcggcgcgcagcacagagagcccagccgcttccgcagctgtcgccggagccggcagtcgcccgcctggaagaagaggtagacgaagggattgagagcgctgttggccatcgccaccacgcgcagcgccgccgacaggccctctccctcccagtctcccgcgggcccggacgaccacgcggccgc

SEQ ID NO: 87768 - DNA, 666 bp, Homo Sapiens
catgctcaaccctggctgaatccttgagaggactcagggcaagcagaacatcaactcctccttcaaggggaacaaaccataggctgaagggaactttagagctgcactagcctggctttcttattttaccaaggcataagcacatccaatgggagaagatgtcttcactcagtggcataaaacacttcctgatgcccaaagtccacctgggcaaagtggccaggtggatgaagttagtgtcttgaagcttcttgttgcctctttcactggcccttcctatgccatcgcctctccccccaggatcagggatgtcatccctcaaccctgacatggctcatgcccaggtctgcctactcccacagtaaaatgctgtccaacctccctttcaaaattacctccgctggggaaaatgcttatcatatatttgtgcaaagttttagcaaggcagccccatggtatctagggaggtctgaaggatggttatctttgggggcgcagttatggatcattgctattttcttctctatacttgaagtattttcatgttttattttaaattttaacaataataatgcatttatttatatgcttctttttaggcctcttctcagcacactgttccaaccaaaattgatctaataaacgtatttattttaaagcagcaaa

SEQ ID NO: 87769 - DNA, 464 bp, Homo Sapiens
aaactgaagaagaatactttagaacatttgtgccattacttactgtcaggaacaagggaggtggagaaagagcatttaggagggcatttccctttttcccaattaaagattgtcgttgcagactcttgactccagccctaaccctttaaacacataggaagacctgtggctcctggattacagagtgtattgtatctgtgaactgtccatctgtcactcattagtcattctgtttcctcaactgggaggaaactgagagattatctaggtggggggatgaggtggagtagccgacctgaaatattttcacataatgagggttatatttatcatgactcttatttggagggaaaaaaaatgatcaaacctcaaacctttgaaaatagaattagctgggtatacgaatcccaaacacatcctaaaacaaagaaactactatttatgagttaaagaatggtgaaaat

SEQ ID NO: 87770 - DNA, 448 bp, Homo Sapiens
  misc_feature (44)..(44): n is a, c, g, or t
agtcttgaatattggcgagaaaagatgaagaagagaggatcatntgtgtcgatctcaaagccctgttcttctaaaatgattgaagctgagatctccacctagtggatatataggattttgcagatctttatgggaacagccaactatccctggaaatccttaatttttttctcttagagaaataacaagttttaaagacttctacttaaatctaggatgattgtcaacaggacaattgcaaatgtatgaaacataccaatatgcatatcagttacactacagttaacaaagctgaatttttattttcatactataattaggaaaacagatcaaacacaaatatgaatatataattatccatgtagaaagcaatattgtaataccactaattgagatatgtataataatttacatgaaataaacatcaaatgtaaatctgctcaaaaaa

SEQ ID NO: 87771 - DNA, 613 bp, Homo Sapiens
  misc_feature (25)..(25): n is a, c, g, or t
  misc_feature (53)..(53): n is a, c, g, or t
tccattctagaaagggcatgtgtgnaaagtaatgtagatttttctcactgggnacttcgaaaggaaatgaccatatgggtagatccctttgaagtatgctgtaggtatggtgagaaaaaccatccatttacagttgcttcttttaaaggcagatgggaggaatgggaactatatcaacaaatcagttatgcagttagtagagcctcatcagacgtttcctctggcacttcctgcgatgaagaaagttgtagcaaggaacctcgtgtcattcctaaagtcagcaatccgaagagtatttatcaggttgaaaacttgaaacagccctttcaatcttggttacaaatcccccgcaaaaagaatgtggtggacggccgtgttggcctcctgggaaacacttaccatggctcgcagaagcatcctaagtgttacaggcctgctatgcaccggctggacagaattttataacccacatctgggaatgaatttgcagcacctggtagaagaaggcaccttggaaggcactgccttgggcttccatggcaggaagatgagaagaaatcttcagggtgatttctggagcctgaaaagaataaaaaacaaaaccaaacctaaa

SEQ ID NO: 87772 - DNA, 568 bp, Homo Sapiens
  misc_feature (64)..(121): n is a, c, g, or t
  misc_feature (186)..(194): n is a, c, g, or t
gaatatttagaataaataagcagctccttcaactcaataagaaaaagacaaatagcccaatggnnnnnnnnnnnnnnnnnnnnnnnnnnnnnnnnnnnnnnnnnnnnnnnnnnnnnnnnnntgtgcaactgactaataaactataaagagatactatctcacagctgctggattagcaaaagtttnnnnnnnnntctgacaataccaagtgactacagaagggatatataaattgttgtatattcttataatgcatactatacagcagtgagaatgaatgtgcattaggtgccaacatctatgactccaaatcacaatgagggaaaaaagttacattgtaggccaggcgctgtggcacgcctgtaatcccagcactttgggagattctgttgaagggggattgaatatacatgttcgagctctgttcccttttaaaaccacactaaattggtaggaaactgattttttaaaagaaaaaccaaaggatcttagaagaaaacataggggcaaatcttcatgactctggatttggtgatggtttcttaaatgtcacaaaaaaagcagaggt

SEQ ID NO: 87773 - DNA, 1381 bp, Homo Sapiens
  misc_feature (840)..(840): n is a, c, g, or t
ctccactcaagggaattctgtactttgccctttgggtaaagtctcatttacatttctaaacctttcttaagaaaatcgaatttcctttgatctctcttctgaattgcagaaatcagataaaaactacttggtgaaatgacttcttgtcacattgctgaagaacatatacaaaaggttgctatctttggaggaacccatgggaatgagctaaccggagtatttctggttaagcattggctagagaatggcgctgagattcagagaacagggctggaggtaaaaccatttattactaaccccagagcagtgaagaagtgtaccagatatattgactgtgacctgaatcgcatttttgaccttgaaaatcttggcaaaaaaatgtcagaagatttgccatatgaagtgagaagggctcaagaaataaatcatttatttggtccaaaagacagtgaagattcctatgacattatttttgaccttcacaacaccacctctaacatggggtgcactcttattcttgaggattccaggaataactttttaattcagatgtttcattacattaagacttctctggctccactaccctgctacgtttatctgattgagcatccttccctcaaatatgcgaccactcgttccatagccaagtatcctgtgggtatagaagttggtcctcagcctcaaggggttctgagagctgatatcttggatcaaatgagaaaaatgattaaacatgctcttgattttatacatcatttcaatgaaggaaaagaatttcctccctgcgccattgaggtctataaaattatagagaaagttgattaccccggggatganaatggagaaattgctgctatcatccatcctaatctgcaggatcaagactggaaaccactgcatcctggggatcccatgtttttaactcttgatgggaagacgatcccactgggcggagactgtaccgtgtaccccgtgtttgtgaatgaggccgcatattacgaaaagaaagaagcttttgcaaagacaactaaactaacgctcaatgcaaaaagtattcgctgctgtttacattagaaatcacttccagcttacatcttacacggtgtcttacaaattctgctagtctgtaagctccttaagagtagggttgtgccttattcaactgcatacatagctcctagcacagtgccttattcggtaggcatctaagcaaatttcttaaattaattaatatatctttaaagatatcatattttatgtatgtagcttattcaaagaagtgtttcctatttctatatagtttattatacatgatacctcggtagctcaacattcttaataaacagccaattgtattcagaatataaaattgaaatag

SEQ ID NO: 87774 - DNA, 468 bp, Homo Sapiens
gaagcagcatgcagaggccgcacccacccagtcagctgctcagcttctgctcatttggctacaactcctcacaggacgctggccatgcttaccattcaggctcccacaaagaagagcaaccgagagaaggtggacccagttctcacagaggcagagactcatttaggaaagagaaagcaaggacacttcattctctgcatgaagcctgcggacagaagaccagcacggtctggaatgtgcccacagacttcagagagatcacggcaaagacattcccacaaaccacagatgattatatggcacatggctctggaatcaaaagcaccttaaagtcataacctcaactccttaatcacaaataatcacaaagagaacaaaaatgtgagtgtcccaaatgaagccctgtgactaaagagcaaaattacaaaatgagattattaccaggagcagatacgagatgaagtcagg

SEQ ID NO: 87775 - DNA, 664 bp, Homo Sapiens
  misc_feature (473)..(570): n is a, c, g, or t
atgtgtcctgccatttttaaaactggctcccatcttgaggcgcagtttggcaattccagctcctgccctcctgtccgtattctagccagctggtcggggcaaggtagggaagctaaaggatcactccttccctttaatctagacgttgcacaaatccttgtccagaatataggcacatggccacacctcgccacagaggagactagttactgtgtatgaaggaaaaaataatcttggagggcacgtagcattctctgccacacttaggaaagaacaggctcctggggtttggagcagatcctcgatgtgtgaacaggaacctcttaaccctcatgtggggactccaaatacccttccaccatttgccctgttctttgcagtaacttggctcattttaggccttctaatgcggagactcagactccccacagcatctattggggtctagtgggcagataggcaagaggctgggnnnnnnnnnnnnnnnnnnnnnnnnnnnnnnnnnnnnnnnnnnnnnnnnnnnnnnnnnnnnnnnnnnnnnnnnnnnnnnnnnnnnnnnnnnnnnnnnnngggagcagaaaaacaataattgagaaacaaaaagagaatttcagatgttgatagatgttatgaagaaaataaaggaatgtgttagtgacttgaa

SEQ ID NO: 87776 - DNA, 554 bp, Homo Sapiens
tagatgctttcctagcttacaaaaagttctatttttgggttaaaaatcaatcaactttctgatatttccccttctgcaatgttattgttcataagaaaacacgagctgaaaatggaaatctgcagttgtttcagttgtcttgaatttctttcagtggccacatcatttccacgttttccacatccgggaggaagcctggactgtgcagccttcgggcacccggcacagacactgtgctggcaggagcttcagacacgccaagtggatggatttggattgaacgcatatgaaacaggagacgggttctcatgtgagatcaaagctcctccaaagcctgttcaagctctaagcgattctcaaatgttaccatttattaaaggtaaactacacctgttgaaggccaagttcagggcagctgttgtgatctgtgtagttaatgtatttattaatgcttgacttttaaaatcctgggcataaatagtgcagagcctcgtatgtttgtcagttcatgccgagatgaaataaatcacgcagaaagtgccagtcctaaaaaa

SEQ ID NO: 87777 - DNA, 195 bp, Homo Sapiens
cttaaggcttcatggaatagaattccatgaatcataatgactacgtaagacccttttctggtaatgaaagcatggagtcttaaccaaaaagctaagcagaattgttagatcttttggtttatgtcataatgtactattggaacttcaagtagatatagtacattaatatgaaatactttgaaatacaccatcttt

SEQ ID NO: 87778 - DNA, 726 bp, Homo Sapiens
  misc_feature (182)..(182): n is a, c, g, or t
  misc_feature (196)..(196): n is a, c, g, or t
gtgcccatgggcatgtatggtgcccacatcctacccatgcccagcacgggcgtgccacactccctggtgcacaacacgctgcccatgggtatgagctacctctgggaatcctcacctatctcgtccccagctcagctccctccagaataccagcttggatctacctcatacttgcccgacanattgcccaaagtgnaggtggatagttttctggcggagcttcctggaagcctgtctctctcatccgctgaaccccagcccgcctcacctcagccggcggccgctgcggccctcctagatgaagcactgcttgccaagagccccgccaacctctctgaggccctctgcgctgctaatgtggacttctcccacctactgggctttcttccactcaacctgcccccgtgtaacccacctggggccacaggaggcctggtcatgggctactcccaggctgaggcacagcccctgcttaccactttgcaagctcagcctcaagattccccaggagctgggggaccactgaactttgggcctctgcactccttgcctcctgtcttcacgtctggcctgagtagcaccaccctgcctcgtttccatcaagcattccagtagcccccacagaggccctcagctcagtttttggctctgttatggagccttagtacccaccccgtctgtgtcccccatgaaggcagctgagctttcagagatgggttcaaaaaa

SEQ ID NO: 87779 - DNA, 805 bp, Homo Sapiens
aggttcatcatttctcaagccatgttatctacgcattattagtctgatggccagtgtgccatttgacttgtagttttatttatagcattttggggcacaggaaattgtccttattcaatgtttagaaaagtcttcagctcttgaactccaggattctcaccagtggccaacagtttctcagaccttaggttttgaattgagttacgtcatcagctttcctggttttaaggctttcaaacatggattggcttctctgattctccagtttgctgacaacctatcctgggactttcctgccatcataattccaggacctgtgaagaattctaccttcagacaactgctcaactggattgaatctgggagaagaagatgggggcattatttcttgacagccacctagattccaacagcatcatgcaacaaatggtactaagaccttcagaacccttgaagagctaatcagcacttatgcatgaaggcaatgttctaaaccttagtggtcaggaaatgtttgagatttgaaacagttgtttgaagttgaggcagaaagtaataaagaatactaaaattatcaaagaaacaccaaacacaaatcaatagcatccaaatgagctttacctttatagctggtactctttctgtcctcttttctgcttcctaagagatgttttttggtgatttggtcctcctaagtgcatgcacattggacaggatagtatgagtatgattagagtgtaagcatgactagaagcacaagttaatttatgagtgattgaataaaagtaattttaaaaaaaataaa

SEQ ID NO: 87780 - DNA, 690 bp, Homo Sapiens
gagattcgcccagagcgcctgacctgcttctgtgacttgtatgccaagaagtgttctgggtgcacaacccccatcagcgggcttggtgggacaaaaatacatctcttttgaggaacggcagtgccatacgaactgctttaactgtaagaagggctccctctcactggtggggcgtggctttcctcacagagaggaccgacatcctgtgccccgactgtgggaaagacatctgaattcaacaccagagaagttgctgcttgtgatctcacacacagatttttatgttttctttctcacccaggcaatcttgccttctggtttcttccagccacattgagactttcttctagtgcttttcagtgatactcacgtttgcttaaaccctttagtgctttgtgatagttcagtcccagggaaagagaaaactcgccctaggccctaggtgggaagatggtttgaaatttttgtaatcgagtaaggcacacccaaatgtaaaaatccttttgaatgatgcctttataaatctttctctcactgtctatttaagtgcaattaacatatgtcacgaacttgaaagttttctaaactcaataaggtaatgaccagttgttatttacagctctgtaacctcccgttgcgtcaagtctaaaccaagattatgtgacttgcaataaagttattcagaacaga

SEQ ID NO: 87781 - DNA, 449 bp, Homo Sapiens
ctaaataacggggcttccctcagcatgttccctctcctgtttgccacggatccagaggccacctgccctgtcttctcgtacccctttcactcttgaggcctgggaggtgaaaaaggccagactgtgcccaggattgattcaattttgcttttactcccagcttccctctcaaaagagagtgaagtctcatttgtcatgtgtcttcagttccccaacttggcatgaacatttgaaccaaacataggaaactaccattaggttgaaagcctgaggcagctgggatggtctttcttgtgtctcttctttgcaccccagagcatgatataagtggtcctaacagattatggataatggagaagccctctgctggttttcctggcattccatgtaaaataggtagagaatatttaaccaatgagcaaataaatgttggcatgtttcatgaaaaa

SEQ ID NO: 87782 - DNA, 577 bp, Homo Sapiens
gaaagttataaccagagtacagacacaggcatttagtatttctgaagaatagtaaggtccagtatctggcaatgggaataggttgctgaaacaaggtgtaggtgatgactgctggaactgatgtatgatgaagtgagaggtgacaatgttgccaagacattatatccagacactcagattgccaaagataatacagacatgaataggataagaaagagttggtcaaatttcctactggatgtgggtgaatgaccaagatatcaattaaggatagaagacagacaataaaatgaataaaatataagataattccatgatgaaaccataaagaaaaatgttttcctatgcagttaaaaatataaaagctcaaaagcactgcatccactcttgtagcacatggactgaataagaagccatatttctagagaaaagtcagaacatgcagaggaagcagtctgttaaaaagttgagggtaagctaaaactataaaagtcttagaagaaaacacagccataaatctatatgaaccttagattagacactgatttcttagatgtaatgccaaagcacaaacaac

SEQ ID NO: 87783 - DNA, 922 bp, Homo Sapiens
caattcaggggaggattccggggtcataatccagttcctatacattctggaagcgggaccaaatggttcttgttttgcggtttcagggataaacggggggccggtgttttcttgggtatgcatttttcgccaatgtttttatgcaattttccagagaaaacatctctaatggtattcaaaaggaggataaagccggccctcttccaagtgtttatctgacacttgctgagctataacgtcagcagtagtgaggaaatatattatctgtgatctgcctcaatccacacgccacaacacccaagagcaactccagggaacacataggaattgttgccttggccaggatatagggtctgtccatttggaagagtgactggatcaaaaggactgccactggcaaaaattgcacgtcccttggttattttgtagcactgctctgcagaacattctgctttgctagttggattactcaaagcaaaaataataggccgttcattgaaggcagccatatctttgagaatttgttctgagaatgcaccaccaattgcagcaactcctatgagggcagttggttttatttcttgaacaatggcttctaggttcttcatttcttcatgttcatgggcaaacttctctttctcttgtgttaaggaagcacgtcccttaactattaatccttttgaatcaaccagccatatctttttgatggctttctcttttggtaaaccttctttttccaaggccatcacaatcaggtgtgcaatccctagggcagcctctccagctccttggaatagtattgtttgatcagacagtttgttcttggttattcgaagagctgcaaggaaaactgcaactgcaacagatgctgttccttgaatatcatcattgaatgtgcaatactggtttcgatacttgttca

SEQ ID NO: 87784 - DNA, 621 bp, Homo Sapiens
ccacccggactcagttgactttctgcttactctggcttatttattctccatatgctccccatcatcactgaagtatcctgaatcattcattaaggaagggaaccacatgtttaccttaaaaggctagagctctctgtgggagagcggtggggttttataatttatcaaactatgaggagctcactatttcatacccatggctgtttagaatgcttaagagaacacagaagctccctgaggtgcggcccttttttatgctggatctccaacactggaagcaaaaggaagtcccaaacagaaactatatgcagtgctgaatctacagtggctctgagaacttttaactaatgggcacttgtaaatctcacaacatttcctactggcgtgaatgccctgggtaaaatgctcattaaactgtcagccagcagagaggtgtcgttgctggaaagagagtcacagcatccaggggtggaaagaggcctccctgggccaccagggccctcctctcccccattcacccaccaccaaccccagactcaaaccctcctttcaaagcctttcagaggatgttacaactctccttcacctccaccaggaaattattctttttctccaatccaa

SEQ ID NO: 87785 - DNA, 446 bp, Homo Sapiens
  misc_feature (386)..(386): n is a, c, g, or t
  misc_feature (431)..(431): n is a, c, g, or t
agtcttcctctgctgccctttactaagcaaaacctggagcaatttaaataggctaaatggttttgattaaatcttgagctccgagttggaaggagaaaatgagaagttaaccccttgagccatgtggtctctttacaatcaagagactgtacatatgtgaaaaaatacaaattaaggacctgtgttcatagacaatctaaactgtgtttctgaagtttgtgcacatttttcttcactgtaatgttattttacagctgtttgttaaaatagtgaataatttaatgatcctaaaagtaacaggtttctgtgtgagtgtgcttgtatacgtgagaattgccttattttcaggtctgttttatttaacgatggttccttgggcggccccntggtgtttaaaaaccccccccggaatgtttgtcgttagatccatntaccgtctttaaaaa

SEQ ID NO: 87786 - DNA, 809 bp, Homo Sapiens
tttacacatcaatatcttgactttattcagggagaatcactatttctctttcggggcttattagctgaggcatttcttgggagtttttgtgtaggaagggctgacttgttgggtggtctctggactttctactcccatcacacaaggtagaatgttagaaaccttctccagggtaaccgaacagtcggagagctctggaggtctatggcagatctgtcagtgtttttctgaatctccagcatagataatcccaagctttattattattgagagctgttctgtagtggtagatcgcttccttgttccgaccttggtccttcaggaaattggcatagttgtagtgaaccttggcattgtggggcagagtttgaactccagacctgaatagggactctcttgacagccaaatttcattctgtttcacagttttccaagagaaaagcaacagcagcaacacagtggacacaatcagggtggtggccccacatcgattcagccaagtgcagagcttgctcagtccatgcacaaaaaggatgcagtagcccatgctaggcatgtaaaggactctctccgccaccacaaaacccaccctgaagaagaggttgctggctggaatgaacgggaacaccaggaacaacaagccgactaaaacctccttgtgctccagtctctggccttcactgctgtgtctgctttcatttaagttttaacagcctctcccacctccaactctggcagtagccggtctcgcctatctacaggcacagctcctgttggatttctcttcatggcaacagctctcagcaggt

SEQ ID NO: 87787 - DNA, 453 bp, Homo Sapiens
ctaataatgagcaatgcatcacctatctcaaaagaggctccccaaaccctcggatttattaggactaactggccggtctcttactctccagacaaaatttctactttttctctctcaagttgcaaaacaactatttctaatgatggattaaaaacctgaagctgctattccattatgaacctctatctagtagctactgcaaactgctcagctcctttgcttgaaacctccaggagggctctgacaaaccaggagtcaggggggagttcacatcaaatcaccttcagaagctgtcaacagtcccagagaactaccttagtggacggaaagaaggatgcggaaaaaggagagatgatgcagccttgctttacgtttgcaaattggataaataaggaaaatatttaattctttaaaaaaatgttaaataaatgggagcttttcaacttgaaaaaa

SEQ ID NO: 87788 - DNA, 436 bp, Homo Sapiens
ctgaagaatgagggtgcaatttccaaagatgcacagaacaaagtaatgaccttctgccttagtgactaaagcacacacaatcatgtgggcaaagggactagggccattagaatcctaaacttcaaagccatgctcattaaaccatttaaagtctacacacatccagaaatgggagaaagggagaattacctttcagaattttacttacacaggagagctgttcacaccttgtgtgagtgattgctgtttttctctagcaccacactcccactcagggtcctgagaggattttaactacagcccttattcgtggatgaattcaacacccatgtctgactttaacacgttcccatcagaactaaagcacatgggcacaatgtgtaggaagttgttctgacagtactcaagaataaaaactcaaacattttcctcaaaa

SEQ ID NO: 87789 - DNA, 914 bp, Homo Sapiens
gcggccgccgccactctcaaaccccccgactgctcctgggtccctcccagacgccgtagtcgctacacgtcacttccgggggaggggctgcgaccctaaggggtgtcgtgagccgcatctgccagcaaacccgggtttggtgtggccgggggatgtagctcgggcgcctcctggagtcgtctcgccgctctccgtcgcgttcggtgcggttgcttccaggtccctgaggcgcccgtccggaacccgccaggacccaagctgccgcctgggccgggacctcggactcctcaaaggcgcgccactttctcctcggttggagggaagaggtggcgctcgcagagcaacctgcgggggaccacttctgttggtgctaagctttggcgagagtctcctccctcctgtgtccctcgtcctccttaccactcgctgttagaagttggggccgtcacagctttctcatcgaagtgccagatcccaggacactacaaacgcttgataaatactaaattagcactgtggctttctagcctggggactgacaaatggaagcgctggagtcgtgggaaaagcttgccctgacgatggaggcagcgaccagaaatccattcgtggctctacccctcactaactcaccaattttaagcaaccttaacctctctaaaacagtcatcatttataaggtggagagaacccaatcttagagttgttgtaatgattaaagaaaataaggtgcatgaaacacctagcaagagtttctagcttagaggttctcattaagtaaaattcttaaggaatcaggtcacacttgatacaagaggctacttgagcagtttagcaccagaaggaatgtaaagtcataaattaggacagctgaacaaaaccccccagaaataaattaggtgtttgtttggacc

SEQ ID NO: 87790 - DNA, 550 bp, Homo Sapiens
cactgaccttctgggtaatctgtcatgacgacctgatagcagaccggcaggatgctccaaactgtcaccaaagatgtcacgagtgcttctgaggctcaagaatctaattttccttacttaaaataaaaggactgaatgctggatgaataaccctttttttcaccccctaaacaaatctcatagggaatcctaatatataaaataaccaaagtgcaagccctgggttaaagccgaggatgggtgctagagatgggctagagcatgtctgcttagctttcttccactatcccagccatttaaagaccacaagttagcttcctggaattcagtttgacaaacacttaggctagatcattgtcaggggaccttcatttcaagctccatggagtaggtcggggactctgccttggtcatccctgaatccccacagccatggttctagcacacagtaagcactaaaaaccaaaacccaaaaacccgtatgataatgtatgtctacagacattccatgaatggatgaataaaagatttttcagaaaccatgaaaaaa

SEQ ID NO: 87791 - DNA, 1322 bp, Homo Sapiens
  misc_feature (218)..(265): n is a, c, g, or t
  misc_feature (749)..(782): n is a, c, g, or t
  misc_feature (853)..(905): n is a, c, g, or t
gggtcccccttcgccgaggcgcccccggtgcccttgccaccgccgcccacgtcggtgtctttcttgtcgtccttgccctccggggcacccccggccgaggacagcatacctcccggcgagcaggccgaggcgctggagctcgggctgcctgtcctgggcgtgaatggctggcaggtggcgctcggtacccggaatcccgacttctccgacgaaacacnnnnnnnnnnnnnnnnnnnnnnnnnnnnnnnnnnnnnnnnnnnnnnnngctccttcttatccgagccgggtttggagtacggcttgaaactcgacttgtcctccacgccgatgtcgctcagcttcagggggcccgatttggtgtccttgtcgcccgcagcaccgccgccggcaccgcccagcgccgcccccgttggaggcaaccgaggagagtttggaggagggcgaggggtcgggcttcccgatctgcgaacatgtttgcgccaacagcgccagcgggctcttcttggcatcgagctcgatggggctgaccggcgtggaaggcaggggctgcaggtactcggggtgcaaaatgtggccagttcgtgccgtcagcatcttcagcaccttgattggcaggcggttggcctggcgcagggggtcagaggggggcacggcgtgcacaaaaggcttggtgctgccggccggggacgagcctgggccggggccggagctatttccagagagcgcgctggtccaggcagggtctgcannnnnnnnnnnnnnnnnnnnnnnnnnnnnnnnnntgtgcttactgcttcttagggcagaaagcgagggcgctgtgctcatgacccacccgcgcgcatgggagcannnnnnnnnnnnnnnnnnnnnnnnnnnnnnnnnnnnnnnnnnnnnnnnnnnnncccgggagcaggagcagcgggaggaggaggagctggcgcggcggccacgggcgcccagcgcgccttctcggcgcctggagccagacgcgagtaatcctgggtggcccgcagcggagccgtggccgggctagaggagccggctggactgcgggagtgccgggcggctcgcggtgtccgcctcgggctgctcccctgcgctgcgttctcgcggccccgcgccggcgctgcgctctgcgatgcgagccgctgcgtgtccagccggggctctggcgaggaaactcacttcaaaagcagctgcaccaagggggagattaaagccttagccgccttccaatcaaatgggagcccgaggtgattggagggtcaaggggatggaagcgtcccgcgccgccgccgcttttggaggaattccggacc

SEQ ID NO: 87792 - DNA, 698 bp, Homo Sapiens
gtcagctgcgcccccaccagtgctgcccggcttggtggggtcaagtgccacgccgtgtggcagtgaactggtggcgggtagccggcgtaggccccggccaggctgcctgggtaggtcatacccgcgggaggcagagggaacactgtctggcccggcttgtagggtgacacgggagccaccagcccagagcccaacactgaggaggaggtgggcgcgctggggccggagccggagcttggagcccgatgaaccgccgcagtccgagcccagagccttgcctcccgggcccccatccggatgctggttcacatccacattaatcccgccgccgcagcgtaatccggccgtgtgccagccccgtgggtcccccttcggccgaggcgcccccggtgcccttgccaccgccgcccacgtcggtgtctttcttgtcgtccttgccctccggggcacccccggccgaggacagcatacctcccggcgagcaggccgaggcgctggagctcgggctgcctgtcctgggcgtgaatggctggcaggtggcgctcggtacccggaatcccgacttctccgacgaaaagcacgcacgagagacgggcggacgacggagaatcgggagagcagacaacacgagagaggaagaagaggtgtaataagtgttgtgaggcccccgtgataaagaagaaacacatcctaaaatc

SEQ ID NO: 87793 - DNA, 1178 bp, Homo Sapiens
  misc_feature (41)..(125): n is a, c, g, or t
  misc_feature (170)..(220): n is a, c, g, or t
ctacgggctaggtagcgaggcccgggtgttgaattcggcannnnnnnnnnnnnnnnnnnnnnnnnnnnnnnnnnnnnnnnnnnnnnnnnnnnnnnnnnnnnnnnnnnnnnnnnnnnnnnnnnnnnaaccgagggggagagaacccgagtgtgtgtatgcgtgtgcgtgtnnnnnnnnnnnnnnnnnnnnnnnnnnnnnnnnnnnnnnnnnnnnnnnnnnnaagaataaaaggaaagaagattttctctatgtatataaagatggccacgttagcaaacggacaggctgacaacgcaagcctcagtaccaacgggctcggcagcagcccgggcagtgccgggcacatgaacggattaagccacagcccggggaacccgtcgaccattcccatgaaggaccacgatgccatcaagctgttcattgggcagatcccccgcaacctggatgagaaggacctcaagcccctcttcgaggagtttggcaaaatctacgagcttacggttctgaaggacaggttcacaggcatgcacaaaggctgcgccttcctcacctactgcgagcgtgagtcagcgctgaaggcccagagcgcgctgcacgagcagaagactctgcccgggatgaaccggccgatccaggtgaagcctgcggacagcgagagccgaggaggtagtagctgcctgcgccagcccccttcacaagatagaaaactcttcgtgggcatgctcaacaagcaacagtccgaggacgacgtgcgccgccttttcgaggcctttgggaacatcgaggagtgcaccatcctgcgcgggcccgacggcaacagcaaggggtgcgcctttgtgaagtactcctcccacgccgaggcgcaggccgccatcaacgcgctacacggcagccagaccatgccgggagcctcgtccagtctggtggtcaagttcgccgacaccgacaaggagcgcacgatgcggcgaatgcagcagatggctggccagatgggcatgttcaaccccatggccatccctttcggggcctacggcgcctacgctcaggcactgatgcagcagcaagcggccctgatggcatcagtcgcgcagggcgggctacctgaaccccatggctgccttcgctgccgcccagatgcagcagatggcggccctcaacatgaatggcctggcggccgc

SEQ ID NO: 87794 - DNA, 1030 bp, Homo Sapiens
  misc_feature (26)..(26): n is a, c, g, or t
  misc_feature (97)..(143): n is a, c, g, or t
aactagctagtacgaggctggtttgnaatcggcccgagggcgaggtgtagagtaacgagggggagagaacccgagtgtgtgtatcgtgtcgtgtgtnnnnnnnnnnnnnnnnnnnnnnnnnnnnnnnnnnnnnnnnnnnnnnnaaagaataaaaggaaagaagattttctctatgtatataaagatggccacgttagcaaacggacaggctgacaacgcaagcctcagtaccaacgggctcggcagcagcccgggcagtgccgggcacatgaacggattaagccacagcccggggaacccgtcgaccattcccatgaaggaccacgatgccatcaagctgttcattgggcagatcccccgcaacctggatgagaaggacctcaagcccctcttcgaggagtttggcaaaatctacgagcttacggttctgaaggacaggttcacaggcatgcacaaaggctgcgccttcctcacctactgcgagcgtgagtcagcgctgaaggcccagagcgcgctgcacgagcagaagactctgcccgggatgaaccggccgatccaggtgaagcctgcggacagcgagagccgaggagaagatagaaaactcttcgtgggcatgctcaacaagcaacagtccgaggacgacgtgcgccgccttttcgaggcctttgggaacatcgaggagtgcaccatcctgcgcgggccgacggcaacagcaaagggtgcgccttggtgaaagtactcctcccacgccgaggcgcagccgcatcaacgcgctacacggagcagaccatgccgggagcctcgtcagtctggtggtcaagttcggcgacccgacatgaacgccgatgcggcgatgcgcagatggtgccgatggtgttaccctggctcccttgggcctgggctacgccgcctgttcaaggcctttgttgtcgcggggtctgacccgtgctttcgccatgatgggctcttgttgggggcttcacccggggcccggttccgtccccggtggtgtcccgggtggctccccccg

SEQ ID NO: 87795 - DNA, 456 bp, Homo Sapiens
tttgtaaaatgtaagtgctgtagaaatatctttgaattcatctggccatggcactcaccagcttaaaattcttcattggctccccagtgtcctcaagattaaggcccctgaccacgtggtccttagagccctccagccataagaatccagttccctatcctcctcacccatgcacttgcccctcaatcctacattctaaagtctggccatataggcacttctcaagtagctgggcttttattgccatttaggccttttattagcaaactgttagaacagtaacatccacacagccaaaagccctcactacactcccttaggtggatgatgccaatctctatgaggagctgggcagcaggaaccattttttacccacatcatggttttcatcatcttggcaattgtgtgctcgcactatatagtggcaataaataacaaaagctttggaatcaaaaa

SEQ ID NO: 87796 - DNA, 533 bp, Homo Sapiens
cagacttgttctgccaaacagcttatttgtagtcagtgcagacaaatcatgcttcatacgcattgttatataaggggaagggggaaggtttatgacaggatttcagagaccagagataattaataattaatgtacagtacactaaaaaaaaccatctgtaccccactattaataagtacaaaaaaccctaaggcttaacgtcatagtactggttattcataggataattatacgttgtatatatagaaaggaagtgatatgagtgatgaacagttcatttgtgctcatagttaactacgtaaacatgatactgagtccagttaaccaccaggccagtgcctgctttgatatttgtaccagatgtgtttggtggtcagcgtttaccatgatccagaatattctaatttttgaaggtcaaaaactttgagtgtttttataaaataacaaaaaactgaaaaatgcagaaaagtataaagatggtaatctctgtaggaaattagtccccattatttagctgtaaaattataattaaa

SEQ ID NO: 87797 - DNA, 600 bp, Homo Sapiens
  misc_feature (461)..(470): n is a, c, g, or t
aaattttggaaacaaaggctccttacagaatatttcaaactgatgctatcaaaagttttgttcgacagctcaacctttatggatttagtaaaattcaacagaattttcaaagatctgcctttctagccacctttctgtcagaagagaaagaatcgtctgtcttaagcaagatacgcttcaccaaaatgaaactttccagatcttcaacttatgaaaacaggtatttatgttgcaacttacatttaaaagatgagtcgaattactcataatccttagaagttagcttgtccgcatctgaaaattcacttttaccttgaagttcaatctgtctctgggaaagactagatgtggaagaatacaattcaagaatgtgatgttttagtaatggaaaagccaagagcgtcaggtggcaaaagtccttctgttactcaagaaaatgctctgaaaaattccttttctcnnnnnnnnnngtaaagattaactccacctcaccaccacaatgaggtatttttctcagcaattgacacctgtttactcagttactccctgtaactatgttatgctgtgaagtaggcaatacagttgaaaaagaagaataaa

SEQ ID NO: 87798 - DNA, 559 bp, Homo Sapiens
cggtgaatgattcagctccaaaatcccatttgattgcctgctctttccagacacaactgcagcaaactggattgtctagacacagatgatgagacagagtttagggtgcaagaagctaactagggatcaacacctgtgtaaggaagcaggtggaagcacaattgaagttgagaaagatgaagaggttgaactgccctgcaggccagatagagccttgccaaaccagtggggaactcggaggaagtcctgcctgccagtttcccatgtggagccgaaacagtcgtgcttttatctctccaccttgctcagtcaccagatgcaggccacgcccagaagggtatgtttttctctgcagctcagactgatgttgaggagctgggagctggaagccacctgctgactgcactccctgcagctggtcagcccatccttctcgaggggcatctgaatggcatcttcatcaggtctacaattttatgtacatgccacattctgggctttcccactttgaagcaattatcagttatgaatgttaggaacacttaatacaagttttaaa

SEQ ID NO: 87799 - DNA, 446 bp, Homo Sapiens
agcccaaaagccagccccattcatctgtgatttaatctgttgtagtggtgagctgatacattcaggtgtgaccgttggtgaaaacttgtgccccttctgtggtatgcccttgccctgttctataaatatctataaatactcatatatatacacacctacacatggccaaccgcctcgcctctagcgctgggaatcagtcactgtgctatccttgtggagtcttgtggcccaactaccagagaacgctgtcccccgacatcccactccaaagtgtgccacctccagtgagcctccttgtcatgcccggcctgtggacagccagcccccgccatccctcccaccccctaccaagcatgggggtgctgtgcaggcagccgtgtggcctgacagtttctaccagtcctgctgtccctcggctgagaataaaacccatttctggatgaaaa

SEQ ID NO: 87800 - DNA, 941 bp, Homo Sapiens
tgatctctcaaataaatacgtcattacctgctccccacagttggcctcttttggaatggcaacggcagagacatcactgtccagggctatcaggaaggataacgtatactccagaaaacctttgcagaaaactgttcttacaacatgaaggacttaagcaattaatatgtgaagaaatggactctgtcagaaagggctcactgatcttctctaggagctggtctgtggatctgggcttgcaagagaaccacaaagtcctctgtgatgctcttctgatttcccaggacagtcctccagtcctatacaccttccacatggtacaggatgaggagtttaaaggctattctacacaaactgccctaaccttaaagcagaagctggcaaaaattggtggttacactaaaaaagtgtgtgtcatgacaaagatcttctacttgagccctgaaggcatgacaagctgccagtatgatttaaggtcgcaagtaatttaccctgaatcctactattttacaagaaggaaatacttgctgaaagccctttttaaagccttaaagagactcaagtctctgagagaccagttttcctttgcagaaaatctataccagataatcggtatagattgctttcagaagaatgataaaaagatgtttaaatcttgtcgaaggctcacctgatggaaaatggactggggtactgagatatttttcattatatatttgataacattctctaattctgtgaaaatatttctttgaaaactttgcaagttaagcaacttaatgtgatgttggataattgggttttgtctattttcacttctccctaaataatcttcacagatattgtttgagggatattaggaaaattaatttgttaactcgtctgtgcacagtattatttactctgtctgtagttcctgaataaaatttcttccatgcttg

SEQ ID NO: 87801 - DNA, 1055 bp, Homo Sapiens
gcctggcggcggcggccatggggcctggcgctgcccgcctggctgcagcccaggtataggaagaatgcgtatctttgcatctattacttaatccagttctgtggccactcttggatatttacaaatatgacagtcagattcttttcattggaaaagattcaatggttgacactttttatgctatggactgtgatgcgacttgccaatccgtatctctcctggaactgctgcacatatatgtggcattgagtcaaaccatcttctcccaaggttttgcagctcacagaaagaataatcatccttttgtggtgatcaccagtcaagaggaagtccaagagaaatatgtgggtgtgtttattcgtctttggaatctatggatatggttaggtacacttatagcatgttatcagtcataggaatatcctatgctgtcttgacatggctcagtcaaacactatggatgccaatttatcctttgtgtgttcttgctgaagcatttgccatctatcaatcgctgcttatttgaatcatttggcacttattccaccaagctgccctttgacttatccatctatttcccatatgtgctgaaaatatatctcatgatgctctttataggtatgtattttacctacagtcatctatactcagaaagaagagacatcctcggaatctttcccattaaaaaaaagaagatgtgaagtacagcattccagtgtgacacgagaaaagacaggctgtggattcagtgcagtaaatagaacacaggaagtattctggtggaaaaattccttgtgttttgataaaaatccattacatgaaataactgcacatacccccaaaactctagacataacaggctatgtttttcacacattgtatttttaagacatatatattctccataccctgcttcaccaaaattcctgcttcatttggattttatacaagttatacttacattgtatgaagtctgattattttcctgtaagtttaatgaaaaataggagattagctgcaatagattcaatttaattaaaaaaccaaacttgaaa

SEQ ID NO: 87802 - DNA, 1144 bp, Homo Sapiens
caccccttccgggggacaggcaaacctagtgcgcaacggcatccctgtgacgtaatagtaacggagacgttcggagcccaggacatgtcgggaatgaggagatacgaggtggcgctggaggcggaggaggagatctactggggctgtttctactttttcccctgccttcgcatgtggcggagggagcggaggtgaggaggctgcgataccgcggacccgccccgggcatggacgggactcagtctctgaggacccatcggggggaatccggtagctcccgccccgcctcatgccagtgtcgggtcgccccacagctcggcgcaccccggggagcagaagctggagcctctgcgaggcctgatgagctgtctgtccagcggcctgggtcctactccccagcgctcgggtcgtggcttcccccgccgcagccccaccgccgctgcccagccagccagtgcattaaagatttaaaccgaagcccaccgtactgacctcctgactctgccgccgctgtcgccattcgagccgagcgcccctccccacacgggctctgttccgtactgacagggcgtccctccctggaagggtgcccttccacgtcaaagcccctcatcagtgtcaggcctcctgttactatcaattggctgtctccccgcaatcccaagccccaaaaaagccatactgtgagtcgcctatatgaagagaactaaataatcctgcctgttactcccttcctcggagcgagggactttgccagctgtctgaagaatcttctctgctgggagtatatctaaaaacattttaaggcagaggtgtaggatgcaaggctgtaaatgggtacagagggggaagatcagaaagaagctgacctggagagaagaggagacgaaataggagtaggcggacgcagaacgaacagcacgcacacggccaacgcaggggacccatccagatggagtccaagaagagaggatcccgagacgaagcacacctaggacagatcggagccaaactcgaaaagcaaaaataaagggccacagagcgtggggcaacccatacggacaccaataagcagcggacccaacacaccatcacaggcgacaacaaggaaggacagtgggaaggcacacaaagggagggacac

SEQ ID NO: 87803 - DNA, 332 bp, Homo Sapiens
acctggggctagggaatccctgattcaatcatgccgctccccaggagacgttcggagcccaggacatgtcgggaatgaggagatacgaggtggcgctggaggcggaggaggagatctactggggctgtttctactttttcccctgcgttcgcatgtggcggagggagcggagctcggcgcaccccggggagcagaagctggagccctgcgaggcctgatgagctgtctgtccagcggcctgggtcctactccccagcgctcgggtcgtggcttcccccgccgcagccccaccgccgctgcccagccagccagtgcattaaagatttaaaccg

SEQ ID NO: 87804 - DNA, 793 bp, Homo Sapiens
gcggccgcagggcctccgtgcactcgtgcgacgcctggcccgtgtggctggtgcagcgcaccgagcgctgccgctgcccgacgccgcactgtgcagagcactcaccccactcgccagccacccagcgggccggggggcagcggcgcaagttgcagcgcatggtggccggtggcttggcggcgggtgagcagtgcgccgggggcagcgtggcgcggtggtctgcgctcttgcaaaggaccacgcggtggcggaggcccggcccgcagctgggggtgcactcagaccagtcgagggccgcccactccggagggcaagtggggccgtggcaggcctccagtacaggtgggcgcggctgcgggcatgcgctgtcgtccagcgccttctcctccgcggcagagacgcggcgctggcacacgaccgagcggctgcgcacgcctgcatcgcagctgcggctgcagagcgaccagttccctacaacccagtctggagggcaaggctccgtgttgcaggcgcgctgccttttgggcagcttgctgtgggcactgcagtagtggggggcgaccgcggagctgtccagctggttgcggcactccaccgcctgcacctggctaccgcctgcacactgggccgagcacttggtccagggcgcatagtgccaggagtaggggggcagcgagtcacgggcgatgggggcattgaagcggtagcggagggcaggcagctcggtccgggccagcaccatgacgatgagagatgcattaatcgtcccagggcttcgaggctctggacctgt

SEQ ID NO: 87805 - DNA, 912 bp, Homo Sapiens
catattccaacagttgttattacattggtaaggaaagaagaacttgggaagagagtttgctggcctgtacttcgaagaactccagtctgctttctatagataatgaagaagaaatgaaatttctggccagcattttaccttcctcatggattggtgtgtttcgtaacagcagtcatcatccatgggtgacaataaatggtttggctttcaaacataatacatggaaaatgctttcgtctcatgaatcatttgcttaaaatgtaacagaaaatggatttttctccattacaggataaaagactcagataatgctgaacttaactgtgcagtgctacaagtaaatcgacttaaatcagcgcagtgtggatcttcaatgatatatcattgtaagcataagctttagaagtaaagcatttgcgtttacagtgcatcagatacattttatatttcttaaaatagaaatattatgattgcataaatctgaaaatgaattatgttatttgctctaatacaaaaattctaaatcaattattgaaataggatgcacacaattactaaagtacagacatcctagcatttgtgtcgggctcattttgctcaacatggtatttgtggttttcagcctttctaaaagttgcatgttatgtgagtcagcttataggaagtaccaagaacagtcaaacccatggagacagaaagtagaatagtggttgccaatgtctcagggaggttgaaataggagatgaccactaattgatagaacgtttctttgtgtcgtgatgaaaactttctaaatttcagtaatggtgatggttgtaactttgcgaatatactaaacatcattgatttttaatcattttaagtgcatgaaatgtatgctttgtacacgacacttcaataaagctatccaga

SEQ ID NO: 87806 - DNA, 983 bp, Homo Sapiens
  misc_feature (118)..(127): n is a, c, g, or t
  misc_feature (368)..(380): n is a, c, g, or t
ttcctttctaaacagaaactgcatttaattccaaaaagtagtattcttatttattatttaaccctttgctgctgctaaaatgtgcacatattcaggctttagtttttccaaaaggcannnnnnnnnnggctgaaaaatattaaacatttgaccacagggaagaatcaagtttctaggatgtcataggtatactatgtagcactgaaaaaattgattttaggtgacagccaaaagtagtcttaaagtagcatgagaccttagataatcgacctaaaagaaagaaaattgtgaaaaagacaaaaatcttcatgcattcctataaaacgctactttaaggtctacttttggagttaattttgtttggtacnnnnnnnnnnnnnaagacgagcaaattgttatatgcttttggcaattgatacaataaactgtaatggtctgtaaataaataaatattgactcatgcgatttatgtaaatagtcgaactgggagagtggatggctcagggtttcggtgtgggcattgtctcttgggcagtagagtgagtcatccccagctcatgggtttgcatccagttcttgtcttaagagacccaaagcccagtgaatggcagccctgagccactgtggaatgggggttctggtttcacaaacagatgcttagatagccaaaccactgtcttgttggtgccaacacttgcactgtggtcaaagacttaccgagcatgggctgaacaaccttcccatctgtcatgtgaatgtccccaagcagtggtgaaggacatgctaggtcagtgttggggaacctgccctgccaggtcctgttttgtagataaacaaatggctgccttctggtgtttttattctatttcatctcattaacactacaaccttgtgttatttacttgataatctgtaattgtatgtaaatacatacaggattatgtaatttgtgtaaatacataattacagagttttgaaaactg

SEQ ID NO: 87807 - DNA, 512 bp, Homo Sapiens
  misc_feature (40)..(40): n is a, c, g, or t
tatatttaagcattaaacctgttctccactgtgccttgcnaaatcagtgtttttcttactggagcttcattttggtaagagacagaatgtatctgtgaagtagttctgtttggtgtgtcccattggtgttgtcattgtaaacaaactcttgaagagtcgattatttccagtgttctatgaacaactccaaaacccatgtgggaaaaaaatgaataaggagggtagggaataaaatcctaagacacaaatgcatgaacaagttttaatgtatagttttgaatcctttgcctgcctggtgtgcctcagtatatttaaactcaagacaatgcacctagctgtgcaagacctagtgctcttaagcctaaatgccttagaaatgtaaactgccatatataacagatacatttccctctttcttataatactctgttgtactatggaaaatcagctgctcagcaacctttcacctttgtgtatttttcaataataaaaaatattcttgtcccaaaaaa

SEQ ID NO: 87808 - DNA, 699 bp, Homo Sapiens
cggtaatgagcttgtattatgactcaatagcatcactttatcactttaacgcagatggaggcctaaataaccatagggcaatggttcttcttagatgcagaaggacacatttatataatcttagggaccccatctctgaggtcactcataatttatattaattcattattattgccattgccccaagaatagataaggataagacatcctgtagtacaggtagcagagatataaactattcttattcttgtgtcttgtctataggaagggagtgtatcctggtgtatgacagcatatagtagagaccagtgtcaattagggcctgtgaactgagacagggtgactggctaagtccacaacccattagaaacccagaaataatcaaatcatgagggatcatggaaaggaagctgaatttgctgagttttgccacgtgggcattgcaagcctatgtgattaaccaccaataaaaacctgggacatcaaaaaataaataagctgctttaattgccaagaattcacatgtggttgtatgcagcattactgggagattgaagtgtatctgcatgtgattctactgtgatggacacttgtaaatttgtgcctggagtctcctggaatttgccctgagaatctttttcctttgttgataagaatctgcatccttttgttttaataaacgataaacatgagtataaa

SEQ ID NO: 87809 - DNA, 1122 bp, Homo Sapiens
tttttcatgtttttcgtttattaaaacaaaaggatgcagattcttatcaacaaaggaaaaagattctcagggcaaattccaggagactccaggcacaaatttacaagtgtccatcacagtagaatcacatgcagatacacttcaatctcccagtaatgctgcatacaaccacatgtgaattcttggcaattaaagcagcttatttattttttgatgtcccaggtttttattggtggttaatcacataagcatgcaatgcccacgtggcaaaactcagcaaattcagcttcctttccatgatccctctagaacaaaagcaggctttcagcataaatcatatcttagaataaacgtatctggttaaattgataccacatggttcagataaatacagcatgactcagggcctcaggcatataaagtcagtcattcaccataaacccaaggcctcagatatacaaaaacactcttcacggtaagactatttccagaactcagaagctagctagtcctaaaaacaaaccttacctttgaatgtgcagggttgaaaaaaccctgggctgctgagttaacacattcttgcctaatccatattttgattgtcctggtctaatctctcctgtagcaaaacaatcatatttttctgagcatctacattgaatatggcatttatatgacagtaacaacagtaatattaacatgaatatgcctagcattttatggacacagtgtagggtaaagattgatttttaaaaattactaatgcatcctacaagcccattacatacactttaatattttgtagaaacaaaattactcattcctcctctcaatctgcttttatttttactttttgataaatctgtgcagaactatttagcattgaaattagataatggttagctgaattctgttttctcaggccatttattattcacccagattacattctgaagaggctttaactcaatatctcaatacatttgattatcaatataagcattatataacttctctacataagatagttgaatcttaccaacaatgccagtgtaatgtcatattgcagtatcccggccgtaatggccgaattcccgggcatatgtccggtaccgtcgactg

SEQ ID NO: 87810 - DNA, 756 bp, Homo Sapiens
gagactacctgctggaacctcactagaattgagagatcaaatggttttggctgttttcccactggagaatataaaaaatacacagttaattttagaaacaaaggctgggcatgattccatcctaagcagcaattcttcaggtagctgcccagaagggcctggagctcctctggaccactgctgatctccagatactccctgagaaccgtcacctcggcgtccaattcctgagtggttttcactactaaataatgactcagtgacccagtctcttggccagaacgctgttatggaatttgggtcgtttggcacttcctgcctggtgcccacctgtctagattactggacccaagtaggtccagtatctccctggtccagccctgtcttgagtccatcacctttatcattaagaagcagccagtagaggttgatgatgatcaggtacgttctctccacaattttcatctaaggaaatcctcgtctccccttttaaaacaaggctgggctcaaacttgtaggatccagttttaacatcttgtaatgcttatacatttttattgaagtgtaccaacgtcttatctcagtttggacatgaatttaaagatatttccaattagctagagagaagagttaaaacatagaagaacataagctttttacatctatatttgacagtgacatatgtttttattatacatgcattgtgtagattctctatgaaaattaagacccttttaaataaaaaaacgaaggctg

SEQ ID NO: 87811 - DNA, 453 bp, Homo Sapiens
aacttgctccactcctgacctcaattctcgtccaacgtagaactgacatcatacacttatcccatccagcctatacgcagaccctcattgcttcgtccacataggcctcattctgcacccctgttccattgtgtagctggctttgcagccctgacacgtttgcataaatacagtcctataacccctaccctgcatgggccttcaccaaaatcctgaactcttcacaaaaccaaagttcatccttttcatccaactcaaaataatatgttaagcctctcaggcagagttccctatgttcccaaggggccactggtctctacttcatagtcctgatcaccctgagctgtgcctatctatgtccatctatgtctccccctcagagaataagcactctcagagcacaggacttgcctgcagctcctccttgggagctcagaataaatggctgagtaa

SEQ ID NO: 87812 - DNA, 577 bp, Homo Sapiens
gggggctaactccagtgttagagtggggagatacaaaaaagtggggaagatacattaaaaagatataaagtaactaggaaaatgtcactcacggtcctctccaggtccagcacacaaactcacagtaatgaattcatgaataactcattgattacagttcaggaaacggcctcagagaggtgaggagacgcccacagtcgcgtggcatggtgcacctgtgttctgaactgtcacttgcctctccctgtgagcctctctttactctgccttgtcttcttgtcctggggcaagaagttagggttcaagacccttcgggatgtgaggatgttttctgccactctggacattagttttctcccctaagtggctctatctctcccggcctgagtttggaagggagacaccattctggtacgacttttcttaggcctgtgctgccatctatggggctcgaaggtgctcgccatgctccagaccggccacctggcagtcaggtgagcttgcaagtgtgaagagcagcgggatgcgggggagggagcaagcccagtaacaaataaagcaaatatcatcggcaaaa

SEQ ID NO: 87813 - DNA, 666 bp, Homo Sapiens
tgatttggtagtgaagccaggacatctacccttgactattttttatgttatttatttattagtttgtccatttgtaacatgtatagatctgtcctgtgagcatttctgatgaatctatggttcttacagaaatttttcaaaggaatcaatttagagatagagttttcatatacttacattaacttattaatgaaatctgtttgcatcagtgcttactgcgacacattaattagcttgattaatttagattagaatcattaacatcatgaaaaataaaagtactacatttctaacgtattcccattgcaggtgttaggtattttttctgtcaacacctctcttttgaattctacatttgagaaataagcatggaaatattagctgccccgtctgccattcaccaggaaaaatttctatggccaattttgtaccatgaagtaaactgttacaatagtttctgagaagcatactataactctgatcttccattgagaataacaaaaataaatatcaattttacacctcatatgtctttttagttctgaatgattagaagaacttgcatgtatttttatcctagaaggtttaaataatacatcaaagttattttcttccaaatgtaattttatgtctgctttaaggaaaataaaattaaatattaataag

SEQ ID NO: 87814 - DNA, 273 bp, Homo Sapiens
  misc_feature (14)..(14): n is a, c, g, or t
tgacgtttaaatcnagaaacaattagcattttattgctagtgcatataatgtcacatttgatacaattttagtacaagtgaaaaaatacactgtggctaacattgaaaagctgcaatcacatttatatatcatatatatttctttacaaattgccagtagtttgagataatagagaagtataaactactgacattcatatggctccacttcaaatatatgaattgttcgactataaatatattttgaaatacatttgttttctaaagaaacgt

SEQ ID NO: 87815 - DNA, 477 bp, Homo Sapiens
attagaagaaaggagtggagaaatgatatgcaggaagaaggcccattctgattcaccaatcgcatggacgcactttcctaccaggctaggagggaggaaagtagagccccaccctgactgctaagccgtttgctttggtgtcatgaaaaaagagttcagcttcccaaatcagagaggaaaaggttttcaaggggtcccctatttctattatgtaagctttaaatgacaaagtggacctctggggccaacgtgggtgtgtgatggtggttttgtgggattctccccatagccccatcagacggcctcaccttctgggtctcagtggccccaggtgcaacacggctcctccagaaatgatgacagccctggcgaccaaggactccctgtgccactgggtttgcgctcagaagtatattcaatgatttccccagaaaattccaagtcatctcctaatactgtttgtgaaaactaaaaaaa

SEQ ID NO: 87816 - DNA, 645 bp, Homo Sapiens
  misc_feature (403)..(413): n is a, c, g, or t
ttagagcagcctcagatgactaaggcggcaactttccatccccatgtctgcaggcctcagcccccctcccacgagcattctcttccttcttcatgaacatgggattttgtgggtcccccatagttcccgatccctctagcactttggtttcataatgaaagacataagaggaaagaaagatcgcagagaagcagcacatggaaaccatcctgtctggagcagaggagcgaagagagaggacagtctggggtaagatgttgctgaggaaacccaattgggctgaggagtggctgggctcaccatcttcccttcttctgtctccccctccgtgggacagtgctgctccccgtgtccaaggtcagggacaggggacagggtgggattgccacttgggcaagtgtcnnnnnnnnnnntagaaattcctgaggaatggctgagattgacatgaaagacagccctcaagtggcccccacacatcccttttgggaacctttcctctcttttacctgaagtaccttcataaatgagtgcctgcttaatttgttttttaaaaacggagtgaaaaacaggcaatgtttatgtctcaaagaagcgtttctgatgaaagcacaataaatgcagttttgcagtaccatgcaaagcaat

SEQ ID NO: 87817 - DNA, 409 bp, Homo Sapiens
  misc_feature (399)..(399): n is a, c, g, or t
tcccgcccgcgcgcggcgggatggacgatcaatccaggatgctgcagactctggccggggtgaacctggctggccactcggtgcaggggggcatggccctgccgcctcccccgcacggccacgaaggggcggacggcgacggcaggaagcaggacatcggcgacatcctccaccagatcatgaccatcaccgaccagagcttggacgaggcgcaagcaaagaaacatgccctgaactgtcacagaatgaaaccagcgctcttcagcgtcctgtgtgagatcaaagagaaaacaggtctcagcatcagaggagcccaggaggaggaccctcccgatccccagctaatgagactggacaatatgcttttggcagaaggggtttcaggtcctgagaaaggtnggggatcggc

SEQ ID NO: 87818 - DNA, 487 bp, Homo Sapiens
aactgtcttcattccagccctgcccttctcaacacgacatatagacaaccccaggtcgtgggtccctagaggacaccaccgatactgtgatgtgatgatgaggcgccgttggctgatctataggggtaaatgcgagcagatccacacattcattcatagaatctgaccaccatagcagatttctgcagaactccaccactgccctgtaccaacagcccctccatgtgcagctgccacaacagtactcatgatgtcaatgtcactgactgctttgccagcacagggacccgacctcttcactgccactaccaaaaataaggagtccaccaggcccatgcgagtgggctgcaagaagggggcatctgttcacctggatggctaggttcctcctgacaacggcacctgaatgacttgcaccctacgccttcaaatctgtgcagcactgtcaaggtcttctttgtaaatgcttcgtcctttgcaaaaaaaa

SEQ ID NO: 87819 - DNA, 882 bp, Homo Sapiens
tgcgtctgtccgggcaggtgtcggagcggctccgagggcaccgggttccctcctgctagctgtggcaggagccacttctctgtgtgaccttgttgctggcggtgcctatcactgtcctggctgtgctggccttagtgccccaggatcacgggaggactggtaacggagacggccgaccccggggcacatggcccagcaaggactggggtttcagaagctgccagaggaggagccagaaacagatctcagccccgggctcccagctgcccacctcataggcgctccgctgaaggggcaggggctaggctgggagacgacgaaggaacaggcgtttctgacgagcgggacgcagttctcggacgccgaggggctggcgctcccgcaggacggcctctattacctctactgtctcgtcggctaccggggccgggcgccccctggcggcggggacccccagggccgctcggtcacgctgcgcagctctctgtaccgggcggggggcgcctacgggccgggcactcccgagctgctgctcgagggcgccgagacggtgactccagtgctggacccggccaggagacaagggtacgggcctctctggtacacgagcgtggggttcggcggcctggtgcagctccggaggggcgagagggtgtacgtcaacatcagtcaccccgatatggtggacttcgcgagagggaagaccttctttggggccgtgatggtggggtgagggaatatgagtgcgtggtgcgagtgcgtgaatattgggggcccggacgcccaggaccccatggcagtgggaaaaatgtaggagactgtttggaaattgattttgaacctgatgaaaataaagaatggaaagcttcagtgctgccgata

SEQ ID NO: 87820 - DNA, 1227 bp, Homo Sapiens
  misc_feature (84)..(118): n is a, c, g, or t
  misc_feature (1043)..(1126): n is a, c, g, or t
aaaaaaatgtataactcatatagggcgctacgcgttatagcgaacgacgagcgcagcgaagtcagtgagcgaggaagcggccgnnnnnnnnnnnnnnnnnnnnnnnnnnnnnnnnnnncagtcgacggtaccggacatatgcccgggaattcggccattacggccgggtcagaagagctcccagtactgggagatgggcagcagctgagaacaaatgagtcattaatacaaagaaaggacataatgacacgaattgctgatttgacattgcagaattcagctatcaaggcacatatgaataatattattgagcccagaggagagcaaggggatggactccgggagttgaacaaacaagaaagtgcaagtgacatgacttctacttttccagtagcacagtctctaacaccaggtagtatggaggaacggattgcagaattgaatcgacaaagtatggaggctcgtggaaaactactgcagttgatagagcagcagaaacttgttggtttgaatctttctccaccaatgtcacctgttcagttacctctcagagcatggactgaaggagcaaagaggacaattgaggtatctattccaggagcagaagccccagaaagctcaaaatgtagtactgtctctcccgtcagcgggataaatacaagaagatcttccggggctactggtaattcttgttctccactaaatgccacctcaggaagtgggagattcacacctcttaatccaagagcaaagattgagaaacagaatgaagaaggctggtttgctctttctacccatgtatcataagtgaagtcaagtctcactgagtttgttcttaataatttattactcccctttccctgctctgacttttaagtttttatatccttctttcagataaaacctacaaagatcctgtgaattagtactaatgaaacagagaaataaagcaattattttttgactttctcaaataagttttcaacaaccaactgacctacagctccctgtgaatgaaactttgactgtagagaaattaaagnnnnnnnnnnnnnnnnnnnnnnnnnnnnnnnnnnnnnnnnnnnnnnnnnnnnnnnnnnnnnnnnnnnnnnnnnnnnnnnnnnnngaggtttagtatatcttagttgatccatttatttatttattttcctgaagaactaatttgctttgcatgtaacttacaataaaattcctctgtgtgattag

SEQ ID NO: 87821 - DNA, 512 bp, Homo Sapiens
tgttttgttttttaagcttctcacttcagtatctaccagacaggcttgtgcaaggagtgaactagtattgtatctgttaatttctttgcaggcaaaaatcaagttaccaggaaaatattttttaaaaaccacgaacagtctaagagcactgaacattttgaatcatttgccttttctcaacactggattttaagcaaggaacaagactattccagttctaaatgctttaatgaacaaggggtattgggttttagcatcaacatgatctatcctcactctgaagctttaacttgagtagctgctgtgctttgtaaagcttcaatccaattcatttgataactacaattaccaaatctgggcattgctgactacacagttcaaaaaaacagcatggagggaagacctgctgagaaccttagaatctatcgataagctcttgaaatggtttaaagtaataaaccacttcaattgaaagggcaataaaatgtttttcgtgtatatatgtaaaaaaa

SEQ ID NO: 87822 - DNA, 294 bp, Homo Sapiens
ggctcagcctatttgccgagatgtctctgcccatgaaatggaagcttcctttattttctgtttcctagacccgtgttcttgtagggaaattagctcttctgtccttttcttccttgccaggacctcggcaatagggtttccggtggcctcttttttttcccatggtcttctcatggctcattgtcagacaggagggaggccctctccttaggccgggtccagcgtttctcctcatggtgtagaccagcagttcccaaactttaccaggccccagaatccccccgaggcctctct

SEQ ID NO: 87823 - DNA, 354 bp, Homo Sapiens
gctattaccataatattatatatattagaaagctatacacaagcatgttaatttcacagatttttttaaaagattcttaatattttatataattagaaatacacatttcaaaaacaaaacttctacaaagagaaaacagttatcttggttagcaaagcatggagttcttcatggcttagggtagtgctttctatacaaaaagtcctttttggttttttacaggactgtttaaaatattagcgaagctatcaaggggaaaaaaacacattttggcttaagtaaactacaaaaagccacaaatgctttgcaaactctgtcttaccttttatatgaaaataagcaaaatgtaatgta

SEQ ID NO: 87824 - DNA, 604 bp, Homo Sapiens
  misc_feature (19)..(19): n is a, c, g, or t
  misc_feature (57)..(57): n is a, c, g, or t
  misc_feature (202)..(202): n is a, c, g, or t
  misc_feature (231)..(231): n is a, c, g, or t
ggcacgagggtgacacggnacagacgatcctctgaggtttcaaggaagacccgcccntaatcctttgaaggtcggaggtcacaggtcaaagccgagaacagaagctggggtggggcacacagaggtggaaagaggggcctgagcatcgggcggccaccagcagggtcccctcctggccacaaggacgctcccgttccagtcnccggaagagggtggctgcagccaccccgnggatgaccagcagaggtcctcacggcctgcggcccggggagacctgagactcctaagctgagcacgtcagcgtctctacctccaccgcagacagaaagaccgggcggacccaagactgcaagctcaagccctggcggcagggcagcggggcctgtgagggccgagggtggacgctgctctgagccagacccgctcgtcagcagctcggcctcccccgctgctccccaccagcgcccgggcttgggtgtttggtgcttccaacttttcaagagaagcttgaaatctgtaattcttatgtgaaatcctgcctttcttaactaattaaagacttaaaattagctagttaaaattaattaaaattgattaaatatgt

SEQ ID NO: 87825 - DNA, 204 bp, Homo Sapiens
ctagtcttcacagatacggaggctctaaggacagatatcaaatacattagactgggcacctatgggggaacaggaatagggaatgaaggagagaaaagagtaaaataaaaaacaaacatgcaaaactgtacataactggcatggattaatggtgataatgtaccaggcactgagaaatatgacagaaaaatatgagaattaagg

SEQ ID NO: 87826 - DNA, 951 bp, Homo Sapiens
tttttttcccctcaaatgttttattttgaaaatatcagagtacagaagagttgaaagtatggcacattgaatacccgtattttccatgtggactcaacaatgaacattttgctatgtttgcctgatctctcaatacatatttaaaatcatttttttgaaagttgtaaacatcagaacacttcattccaaatacttcaacatgcatcccttaagattaagaatattcttcaaactaccaccaccgtcacaggtaagaaaatcaacaaaaattccctaataccatctaataaccagtcatattcaaatttcccaactgtcctaaaacatgtattttataactttttttcaaatcagtttcacacactttagttggttacagctctttagttttgggttttcgttgccattgttggtttttactttttattttgaaatgatagaatcacaggaagttgcaaagatagcacccttcacccactttcccctcatggttacatcttacataaaatgaaaaaggaaatcaacattggtacagtatgtgtgtataggtatagcacctatagatttgtgtaaccaccactgcaatcaagatacacaagtgttccatcaccacaaagacctttctggtgctaccttttaatagttccatccaaccctctccccatttttcctcccaccatccctaacctttggcaaccattaatccatttttcatctctatagttttatcattttgagaatgttatatgaatattttcatacagaatatggccttttgtgattattttcactcagcattaattcccttgaaatttatttgagttgttatggatatcaataagtcaattttattgcagagtaacaagtattccatggtaatacataaaccacaatttgttttaaccacctaaggaaggatatatgggttgcctacaggtttcgaccattaca

SEQ ID NO: 87827 - DNA, 597 bp, Homo Sapiens
ttaaggccaaaggtgcaacatcaccgattttagtagcaaatgccttgaaatattcatttttgtaaatcactcttacatttggaaagtcaggcatgcagatcttacagcggaactggaagtaaactttctcttacatttctgggcatatgactactgaactagaaaaacacttactgaacctctttggcaaacatttatcaagacaattttggacacaaatgcttgtttagaaattttgctcaggaaggtgagtcagttccttaagaatgctggtttgtttcagcatatcctgaaatctaagtctggataccaagagtccctttaactaaatatcatttagagttttttaatggttggttaccttgtggtacagccaataaactgacagtcagttacagccccacagtaatggcataagaatactgacttattctccgtttaagaaagccctctggcaagataccaggtcattttcaatttccgtttacaaagacttagcaaataccttaaaaaaatccaaaagagatggtgttacagtacagttgcacagtgcttatgtctataatatacatgaatctgaatgtccatcagcgagat

SEQ ID NO: 87828 - DNA, 879 bp, Homo Sapiens
gcttcgtcggcgcacacgatttccgcatccggctccggacgcttccggtcttagctggacccgtctgggagggtgtactacagacctccacatgttggacagtaggattcagcagagaatgagtcccacatcctcttttcatccataagccactcttcccaactactcttccgccttccattgtccctatgtctactttactgctcaatctggattttggggaacctcctcccaaaaaggcattagaaggaaatgccaagcaccgaaattttgtcaagaagcggaggctcttagaacggagaggctttctgagtaaaaagaaccaaccccctagcaaggcgcctaagttgcactctgaaccttcaaagaaaggggaaactcctacggtcgatggcacttggaagaccccttccttcccaaaaaagaagacagctgcttccagcaatgggtcaggacagcccctggacaagaaagctgcagtgtcttggttgacccctgccccttcaaaaaaggctgattctgtggctgctaaagtagatttgctggggggagtccagagtgccccttcaaagatcaatagccaccaaaccgctctcagaagaagagctcccagaagaatcctcctaaaagaaccatcctcagaagaatgccccacagaactccacccaagctcattcagaaaataaatgctcccggagcatcccaaaagttgccacggaagaatgggggcaattgactggggagatgggggggcaacaggaccaaaggggcattgttagttcccttggctccgatggaaccattgggcaaactacaaaccggaagagggggctttaattgacgaaataaaatttttttcccccccctggcccaaatttt

SEQ ID NO: 87829 - DNA, 1579 bp, Homo Sapiens
taggctagtacgaggcctgggggtggaattcggcacgaggcgtctgggaggttaggtttgtgagcgtgagagatcgatctgtaccgcggggatcgaagtatgcttatccaggtgggctgcctcaagcctcgatcccacccccgcgctggtagatggtgtcaaggtccttgcgtgggagaaggacttgggtgagatgcatgcggagattgcccccaattccggcctggagccaagggaaagggatgcctggattggtgtctctatcggtggtccacgctgcggatgcctgggtagcccagaggttatctacgccatacttctcactgtttttgagcatacctagatgttcctttcctaggcggagtatagatcgcacgtgttctagcctcttagactcagagggttcgagctctataagcccctccactcccttcattttacaaatgagactcaaacctagagcgcggtaatgaccttactaagaccaaatggctggtgaattgggcttcactagaatccaggcttgctggctaacaccaatgctccctccatcatttcatgttatgttttcatttcccctctgtctgagagattgctctgatgtctttccttccataagtcctacggagatcgagcttacctcatttttctcccaggcctaggagctcaattaccaggatcactttcttccccaggtgtactacagacctccacatgtggacagtaggattcagcagagaatgagtcccacatcctcttttcatccataagccactcttacccaactactcttccgcttccatgtccctatgtctaactttactgctcaatctggatttgggggaacccctcccaaaaaggcattagaaggaaatgccaagcaccgaaattttgtcaagaagcggaggctcttagaacggagaggctttctgagtaaaaagaaccaaccccctagcaaggcgcctaagttgcactctgaaccttcaaagaaaggggaaactcctacggtcgatggcacttggaagaccccttccttcccaaaaaagaagacagctgcttccagcaatgggtcaggacagcccctggacaagaaagctgcagtgtcttggttgacccctgccccttcaaaaaaggctgattctgttgctgctaaagtagatttgctgggggagttccagagtgcccttccaaagatcagtagacaccaaaccgtctcagaagaagagctcccagaagaaatcctctaaaagaaccatcctcagagaatgccaagaactccacccaagctcattcagagaataaatgctccggagcatccagaaagttgcacggcaagatggtggcattgcctgtgagatggtgggcccaggaccacggggcatgttagtcttgggtccatgtaacatgttcactacaacggagatttgctatgacgaggaaatcttccccctgcactttgtggactacgaacagtcggtggtccggacacactgttatgccaacttatatgttagcaatctgaaatccggcaatggggtgccaacaacttaagtaatacaggcagaaaacatacccaatg

SEQ ID NO: 87830 - DNA, 1746 bp, Homo Sapiens
  misc_feature (132)..(132): n is a, c, g, or t
  misc_feature (139)..(139): n is a, c, g, or t
ggtgggttgggcattgattatctctcagcaacgtcatcctctgagagcagttggcatcaggccagcactcgagtgggcacctggacaggccatggcccttccatggaggattcctctgctgtcctcatgganagcctanagtctatctggtccagttccatgatgcatcctggaccttctgctctggagcagctgttaatgcagcagaagcagaaacagcaacggggacaaggcaccatgaaccctccacactgaggccaaagtggcaacctgggaatgaaggctccataaaccatggcatgttgggtttgcaggactggcccacacagtcccctgcaggtggcagccctcttttctgtttctcgctgtcaagagggtgtaagtattccaccagcccgctgagtgtgcacgaaatgttcgcagtgcaacaaaaagaaaaatccatcaggaactctccgtccccccggggccctccggagggagagagagaggaactgctgtttatctcactcagttacttggtatcaccgcctctcaccttctccatcgtgcatgtccccagccacatgggaagtgaaagctgagaagggaaggcagatgggagaagccaatgggaacttctcagtccttttttcctctttggggaataaaataggaatccattaatgattgctttgctgactgagaatgtagttgaaattattcttaaacatcttttattattattactctcagtagtaaaatatcacactgaattcttccatacacaggtgtgcttctagtcagtgtgtagcaaggaaagccccgttcactgctcctgtgagaggttggtggtgacaggatggggaaccgacctcttcagccagtggaaatgttccataagggagagttcaaggcctgtcagaaggctctggtaggccttcctctggccaggagactccagcagggaatgcccttcactctgtaggtgctcgagccccaatcgaggatacagtgtgggtggtggtgctgggctggactagcaggtagactgctgtaggatttcaaattacgtattagattcctgtacattttacagtcgcacagcaagcagtctcacagaaggcaggctagtccattcacagcctgacacgttctaataggtagaagctttcagtgtggttattttttctttggttggtttttgtgcccccattctacttcccaccctcctgccccatctccatcccttcttttacccaatgctgtatgctagtaattgtttttattcctaatgtgtgcaacatcacatctccccaagaagcaacagcatgggggtccagcagttgggggcccaaaagacagtctgaagaggaaagaagcagcagtatctgcgtagcccacagagggcccaggcccctgcccagctgcagtctcccagcctccactttcagaatgaaattcaaagcaacccggacatgtgcccatcagggaccgaaagaaacacgacctccttcctttttgggaagagacgaaagaaagggaaaataaactcctttggatgatatttatttagggagggaagaaggaactgaaaattgttctttgtgttaaaaaccgaagggacacccttttctggttaatcaatttcctgggaaaaaagtaatttttttaacagggggaaatttatgggaaacaaatcctaatttgtgttcaatttgccggggcctaaatgggaaaggggtttaatttttcttggggagggct

SEQ ID NO: 87831 - DNA, 534 bp, Homo Sapiens
ctggccacctgcttataaagcaatataatggtatgtgtaacaatctggatcactttcttcaaaaacggtgtgctttgaaatgccaggatggctgattttacttattttaattaatttttctttgttgctttcagtgaagcaaagaactgccttgtagataaacatattgcatttattggagattccagaattcgtcaattgttttattcttttgtaaaaataattaatccccaattcaaagaagaaggaaataaggtaaaacttgtctattcccttctgtagagtgttttagaagttaaccaactgaatagttacaggaggagtgtgtctctccagattgagtaggagctgaaaaaattttactttgattttcagaaaggttggggaaaaagagggatgaattgctttaatgaggaagatgacaaaaagaagtggtggctaagacattggcaagctttttattgtaataacttaaacttttagttttcagaaataataaattcttaccatggaaaaacttttaaatttccttag

SEQ ID NO: 87832 - DNA, 589 bp, Homo Sapiens
  misc_feature (576)..(576): n is a, c, g, or t
tgcggccgctcctcgcctggctgcagcggcggcagccccagtgctgcccctgtgcggcgcccctttcccgctccgccgcgcactgttgtcatggaggaaccaagatggcggctctggcctacaacctgggcaagcgggagatcaaccactacttcagcgtgaggagcgccaaggtgctggcgctggtggccgtgctgctgctcgcagcgtgccacctcgcctcccgccgctaccgaggcaatgattcgtgtgaataccttctctcaagtggcagatttcttggagagaaagtttggcaacctcacagttgtatgatgcataaatacaaaatcagtgaagcaaagaactgccttgtagataaacatattgcatttattggagattccagaattcgtcaattgttttattcttttgtaaaaataattaatccccaattcaaagaagaaggaaataagcatgaaaacattccttttgaagacaagactgcatcagttaaagtggattttctgtggcatcctgaagttaatggttctatgaaacagtgtatcaaagtgtggactgaggattccattgcanagccacatgtgat

SEQ ID NO: 87833 - DNA, 174 bp, Homo Sapiens
atcctcctgactcttcaggccaggtagcagcaaatagcaaatgaaaaagtcagctacaaaagttaatgaatatgccatctatgcagaacaggcagaaatataaacacattaaaagacaaatatgtagaatgtaatatactgagctgctaaaataaacctgtttaagagaaaaaa

SEQ ID NO: 87834 - DNA, 1792 bp, Homo Sapiens
ggtctgtgttgaaacgtcaccttctcccctatcttccccccaccccgaggtgcacactgaccaccctgctgccaccacggcgccgtccgcacagcgcacaccctcccgctctcagttctcgcactgctgcttctgtccagagtcctttatccttctgaccggttgcgtagtgtgctggtcttttcatggcttttgtgggttttgtgtatttctgctcagctctgactctgttgtggcccagatacatttgtttctctcactcacggctgcatctccagtgccggcacacaatgcacctggctaatgtttgtgcaatgaatgaattgatgcaggcctgaggtcaccaagcctcctccttgcttggagaactcctcgcctccctccaggattccggagcctgaatccccagcgaagccaaacgtccccacagactccacggcgcccccagcggactcccgggaccgacggaggtcctaccagatgcctgtgcgggatgagggagtcggaatcccagagaaaagctcgctcccgtctcatgcgccagtctcggaggtccacacagggtgtgactcttacagacctgaaggaggcagagaaggctgcagggaaggccccagagtcagagaagccggcgcagagcctggacccttcccgaaggccccgcgtccctggagtggagaactctgacagccctgcccagagagcagaggcgcccgacgggcagggtccgggaccgcaggcggccagggagcaccgcaaggtcggaaaggagtggagggggcctgcggagggggaggaggcggagccggctgaccgcagccaggagtccagcaccctggagggcggcccctcggcccgcaggcagcggtggcagcgggacctcaacccagaacctgagccagaatcggaagagccagacggaggctttaggacgctgtatgcagagctgcgcagggagaacgagcggcttcgcgaggccctgaccgagaccacgctgcggctggcgcagctcaaggtggagctggagcgggccacgcagaggcaagaacgcttcgctgagaggccagccctcctggaactggagagattcgagcgcagggccctggaacgcaaggccgcagagctggaggaggagctgaaggccctgtctgacctccgcgctgacaaccagcgcctcaaggatgagaatgcagcgttgatccgcgtcatcagcaaactctccaagtgacccggagggactttcccgcacccgtatttatacagctgcttctgccacacgcaccccttcccccgtgtgaacacgagtgacagggctccgggggaagtctcagagaagccatagcccccctgggacctccggactgggaggggagcagagtccccaggagccgagggggccacccgaggccaggatggaggtgggaggccgagccaagcagggggacgttgccagaggggaccagggccagagacgggaccaggaaggaactgaggaccaagaagtgcaaggatcagtagccaggaccagagtggccgcctggaggtccccatctcacgtgtgatgccaccccgtcacccctcccctcctgagcagggatccaagaatgtgccaagagtcccgccagcctcagccaggtgggcctgtatatagggtccatgtgcaatagggagggacgtcttctattttttgctgccccctccccgcccactgtctggggcagggggagaaggtattttcgagataaagcacaggcaccacaaataaaagtcgtgaagttgccactcaaaaaaa

SEQ ID NO: 87835 - DNA, 826 bp, Homo Sapiens
tacggttgcggctggggttactcggccgagggcgcctctagcagcaaacacagaaggagctctgtgtgtcgtctgagcagtcgcgagaagatttccctccaggacttgtccaaggagcgccggctggtggggctggggggccccccatccaggacgaggatgagggggaagaaggtcccaccgaaccaccccctgcagaacccagaaccctcaatggcgtctcctccccgccgcaccccagccctaagagtcccgtgcagcttgaagaggcccccttctccaggcgctttggcctcctgaagacatgggcagttctggtgccctgggtccccctgaaaggcggacagcggagggagcccctggtggctgggctgcagcgctcgtgcttcctcctcctggctggaagggacctccactcagtgccaaggagctccgtcttgccagaattaccccgaccccctccccgaagctgccggagccctctgtcctgtctgaggtcaccaagcctcctccttgcttggagaactcctcgcctccctccaggattccggagcctgaatccccagcgaagccaaacgtccccacagcctccacggcgcaaccagcggactcccgggaccgacggaggtcctaccagatgcctgtgcgggatgaggagtcggaatcccagagaaaagctcgctcccgtctcatgcgccagtctcggaggtccacacaggatgtgactcttacaagacctgaaggaggcagagaaggctgcagggaaggcccagagtcagagaaaccggagcagagcctggacccttcccgaaggccccgcgtcacc

SEQ ID NO: 87836 - DNA, 502 bp, Homo Sapiens
taacaaatgaccaagttccttggttgtagttgcctaacttttaatacttaaaaatgtagcctcaggaaataagaggcctcaaaaaattgaataaaaactcacaactttctctccacggaaatctttagtaaaaggcgaaagatttatgggctttgaagagaaacccgagtatattcgtgacttccgcttcgaacctcgcagggagaactaacacttaacacacttatggttgttggatgcctgcgtggtacgcactccctatatgtagtttatgcacacagatgcgtgtaagaggcatcatgctctaaaacagtgcagaaatgcgcgcacagagggagtgcaagcatcttgagggtatcttttcgtggtgcaccatgggtatgcaaatcacaggcggctccgggctgttccgcgccaccggggaagccatgggtcactgatctcctttgctctcctatgctcctctctgctggtcctcctgggacccgcaccccgtgggcgg

SEQ ID NO: 87837 - DNA, 614 bp, Homo Sapiens
cggagttatggggggacccacccttccatttaataactgagaaagccacgggaggggacttgctgggctcacagccagtgatccctgccctgtttccttatggggactgcggtcagaaatggggagtggggcagaaactgtcactgtcacggtcctgtttagagaggaaggtcggagaaaccagtgccgtggaaggctctggggcgttgacaggcgctgtccccagctcaccggctctatgaccctggaagaatggaaacttcgtcagagcagggacgtgagggtgaactgctcacccgggcaccgctggcgaccggaacccagctccctccgggctccgggagaggcggcctcagctgtgtgctggtgctgccctccagcggcgctgggtccccatggcacctggctttctcctgctccccaggggccttttcttctcccgcccacctgtcaccagccgccagggcaagtctctgtgtgactctagggtgaaggtggagggaccttgcctccgaggattcatcccacccggattccgatgagtgagggaccctctctggcacctggtgtttgaatggccagcctcacagttaataaagacaagtttggtaaaa

SEQ ID NO: 87838 - DNA, 576 bp, Homo Sapiens
cggggccggggcgcggggcggagagacgcggccgcctcggcctcgacgccagcccaggcgccgacctccgattctcctgtcgccgaggacgcctcccggaggcggccgtgccgggcctgcgtcgacttcaagacgtggatgcggacgcagcagaagcgggacaccaagtttagggaggactgcccgccggatcgcgaggaactgggccgccacagctgggctgtcctccacaccctggccgcctactaccccgacctgcccaccccagaacagcagcaagacatggcccagttcatacatttattttctaagttttacccctgtgaggagtgtgctgaagacctaagaaaaaggctgtgcaggaaccacccagacacccgcacccgggcatgcttcacacagtggctgtgccacctgcacaatgaagtgaaccgcaagctgggcaagcctgacttcgactgctcaaaagtggatgagcgctggcgcgacggctggaaggatggctcctgtgactagagggtggtcagccagagcccatgggacagctagccaggcatggttggataggggcagggc

SEQ ID NO: 87839 - DNA, 519 bp, Homo Sapiens
ttataaggaaatcatttattgttttttaagggcagaagggatttaggagaaaagctacagtatagattgattctctagaatatcaatgatcccttttcatccatggttcatcaaaaacatactaactgcatttgtttgatcattgcaaatttaaaacaaaacagcatttgctgttaggaaacaagacacataatcctcttaggaattaccattatatcacattaccactgtgaggtagaatggatcattcattaatttctttatgaaatttgcatgctaagtttttctaatgaggctgtaggtttccatgtaaattctgtgatagatagtggctgtagactggtgatgctatccgtgatttctatgagaaacatccttacaagaaccatagggcataatttatatcttccctaagtgtaaaaggatttttatcagggtgatagtatacttgaatgaaatttgtctaatgcagtttttgcttatgttggaaaataaactagattatgaatttttaaaaaa

SEQ ID NO: 87840 - DNA, 1406 bp, Homo Sapiens
  misc_feature (440)..(440): n is a, c, g, or t
  misc_feature (457)..(457): n is a, c, g, or t
  misc_feature (576)..(576): n is a, c, g, or t
  misc_feature (608)..(608): n is a, c, g, or t
  misc_feature (615)..(615): n is a, c, g, or t
  misc_feature (650)..(650): n is a, c, g, or t
  misc_feature (693)..(693): n is a, c, g, or t
  misc_feature (696)..(696): n is a, c, g, or t
  misc_feature (735)..(735): n is a, c, g, or t
  misc_feature (748)..(748): n is a, c, g, or t
  misc_feature (792)..(842): n is a, c, g, or t
  misc_feature (883)..(883): n is a, c, g, or t
  misc_feature (988)..(989): n is a, c, g, or t
  misc_feature (1109)..(1110): n is a, c, g, or t
  misc_feature (1129)..(1131): n is a, c, g, or t
  misc_feature (1187)..(1188): n is a, c, g, or t
  misc_feature (1205)..(1206): n is a, c, g, or t
  misc_feature (1215)..(1215): n is a, c, g, or t
  misc_feature (1247)..(1247): n is a, c, g, or t
  misc_feature (1256)..(1256): n is a, c, g, or t
  misc_feature (1307)..(1308): n is a, c, g, or t
  misc_feature (1327)..(1327): n is a, c, g, or t
  misc_feature (1348)..(1348): n is a, c, g, or t
gccgcttgcccgcggtgcccgcgcacgccggccgccatgaccgtggagcagaacgtgctgcagcagagcgcggcgcagaagcaccagcagacgtttttgaatcaactgagagaaattacggggattaatgacacccagatactacagcaagccttgaaggatagtaatggaaacttggaattagcagtggctttccttactgcgaagaatgctaagacccctcagcaggaggagacaacttactaccaaacagcacttcctggcaatgatagatacatcagtgtgggaagccaagcagatacaaatgtgattgatctcactggagatgataaagatgatcttcagagagcaattgcctggagttgggccgaatcaaacagggcattcagggagactggaataactgatgaggaacaagccgttactagatttcttgaagncttgttatgagagaggncgccgggagcgaataggagccgtacgggagtggggagggagtctcgagggcctgaggagcgacgggggaggggacggaacctcccttctggcgctgatgagacggtggctattacgtgnttggcttcgttgctggcagtgaatggcgtcgnacgtgcnctgtttgcgaattcacgtcgacgcctcgccccccntggggggccgcccgcaagattacctcgagtgagccgggtgagnaanaggggagatacccacggttagcgtcccctgtatcgctanagcgagcatgcgnctctactccggcacttcattgggtggcgattgctggagggagannnnnnnnnnnnnnnnnnnnnnnnnnnnnnnnnnnnnnnnnnnnnnnnnnntgggtcgggtcgggcggtgtggtggcgatgcggcccgctgnttcgcgccgcggcgcctcagagacgcgcaccgtagctttatggcgttgacatcaccaccaagcccgtaggtcgcggcgggccgggtttgatgaggcagaaataannttgttttcccccgcgagctcgtaagataccggatattcccgcctttcgggagcacgccatattcggtacgcgccgatctgttttggatcttccaattatcaagccacacgctccgcccgnngatgcggtggtggtggcgnnncgcggacgtgccgcgcgtcgtgctcttagagaccgtttcccgtcgcgcatggatcnnttgagaaggggccggcnncgcgcagcnacccgcatatataggacgtgtggaaagacacncctaaaatncgcaacgtgacagggacctgcccacgcgcgtacatatttatatatcttttnntatagagatgcgatgtggntgcgtgtcgcgtgtttcgggngggagcgccgctcgtatcataatcttcttaacatatactacatacaggcagtttcata

SEQ ID NO: 87841 - DNA, 562 bp, Homo Sapiens
tcctgacaaagggaggctatacccagtaagcggttatccgaagcggctggagaaggaagtcgggaccctcatgggattatcctggactctgtggatgcggcctttatctgccctgggtcttctcggctccatatcatggcaggacggcggctgtggtggctggacctaaagtcagaagcccaagccacgtggacagagcttccttggccccatgagaaggtagacggagccttgtgtatggaaaagtcccttggccctaactcatgttccgccaatggtcccggcttgtacctcatccatggtcccaatttgtactgctacagtgatgtggagaaactgaatgcagccaaggcccttccgcaaccccagaatgtgaccagtctcctgggctgcactcactgaggggccttctgacatgagtctggcctggccccacctcctagttcctcataataaagacagattgcttcttcgcttctcactgaggggccttctgacatgagtctggcctggccccacctccccagtttctcataataaagacagaaagcttcttcacttg

SEQ ID NO: 87842 - DNA, 491 bp, Homo Sapiens
gacctggggatcatctgtgtgaccaccaagaatatcagccacattaatagaatctacagagatagaaatgtcccaaccgatgtgctttcttttccatttcatgagcatctgaaagcaggtgaatttccccagcctgattttccagatgactacaatttgggagacattttcctaggagtggagtatatcttccatcagtgtaaagaaaatgaagattacaatgacgtcctgactgtgacggccacccacggactctgtcacttgctgggattcacacacggcacggaggcagagtggcagcagatgttccagaaggagaaggcggtgctggacgagctgggccgacgcacggggacccggctgcagcccctgacccggggcctcttcggagggagctgagggccgcgttccttctgaaagcgggacgcgggaggggtggaggctgcggggagccggggtcgcacacaaataaataacgaatgaacgtaaaa

SEQ ID NO: 87843 - DNA, 208 bp, Homo Sapiens
acaggcttatcagtctcactgttggctgtcattgtgacaaagtcaaataaacccccaaggacgacacacagtatggatcacatattgtttgacattaagcttttgccagaaaatgttgcatgtgttttacctcgacttgctaaaatcgattagcagaaaggcatggctaataatgttggtggtgaaaataaataaataagtaaacaaa

SEQ ID NO: 87844 - DNA, 502 bp, Homo Sapiens
tgttcaataaaaatcattactttcactttaccacatattcacattttgaatatcctaacaagtccccaaacatccccatttctaaatccccttttacggaagtttagaacggggaaagtcacaaagccctaaggccttaagctgacttgagactttccgggtggtaggaggcttctgctttgttctctgtgttacgctaacgccttggggcagcagtgccaagtgagctgggaaggtgagtggtgtctttgttttgtagaacggaagaaatagtgtggatgccacggttttgcttttgttagagggctgtatgaaagctcagaattaccttaaattccaaattaattaggtcatcctgtaaaattacccttgctgaggcaccccttagaaggtttcaaggtggccctagggttagacatatcccacatgaagacctctggtccagtgttgaaaatttctgttatttttgtatgttaataaaatgttttcatcagtaaaaaaa

SEQ ID NO: 87845 - DNA, 498 bp, Homo Sapiens
ccgatctggaaggcttgatgggcctcttggccgccaccggggcctgggagctgaccggggtcttgggcttcccttggctcttgtccccgccggccgccctgccctcggcagaggatgagcacgtgaaggagcgcagccggggcgcgggcacctgcttgccgggcccctcgccgcgatcagcctcctgggctttggtgagcacgatgctggtcaaataacctctgcagagactccagggatgggagggtccggatgacttctccatagagctccttgcagagcagtgtggtcagtttcttcaggtgaggaagactgctggaccctgtcttcacaaattcagagtcctgggcgagctgagtgcttaaataatcttggatggccttaagatgctcttctggaagcccactggtgtccatgctttgcagtcgctggaacaatgtctcggagaggctcggccgcctgggtctcggtcgctccgggattctcgtttgaaaaagg

SEQ ID NO: 87846 - DNA, 1018 bp, Homo Sapiens
tgctagaccagcacatcctcatcagcatcaagtcctctgacagcgacgaatcctatggcgagggctgcattgcccttcggttagaggccacagaaacgcagctgcccatctacacgcctctcacccaccatggggagttgacaggccacttccagtgggagatcaagctgcagacctctcagggcaagacgagggagaagctctatgactttgtgaagacggagcgtgatgaatccagtgggccaaagaccctgaagagcctcaccagccacgaccccatgaagcagtgggaagtcactagcagggcccctccgtgcagtggctccagcatccactgaaatcatcaacccaaactacatgggagtggggccctttgggccaccaatgcccatgcacgtgaagcagaccttgtcccctgaccagcagcccacagcctggagctacgaccagccgcccaaggactccccgctggggccctgcaggggagaaagtcctccgacacctcccggccagccgcccatatcacccaagaagtttttaccctcaacagcaaaccggggtctccctcccaggacacaggagtcaaggcccagtgacctggggaagaacgcaggggacacgctgcctcaggaggacctgccgctgacgaagcccgagatgtttgagaaccccctgtatgggtccctgagttccttccctaagcctgctcccaggaaggaccaggaatcccccaaaatgccgcggaaggaacccccgccctgcccggaacccggcatcttgtcgcccagcatcgtgctcaccaaagcccaggaggctgatcgcggcgaggggcccggcaagcaggtgcccgcgccccggctgcgctccttcacatgctcatcctctgccgagggcagggcggccggcggggacaagagccaagggaagcccaagaccccggtcagctcccaggccccggtgccggccaagaggcccatcaagccttccagatcggaaatcaaccagcagacaccgccca

SEQ ID NO: 87847 - DNA, 1079 bp, Homo Sapiens
  misc_feature (33)..(88): n is a, c, g, or t
  misc_feature (1054)..(1054): n is a, c, g, or t
ttcccgcgggccaccgcccgtgatgtcacaatnnnnnnnnnnnnnnnnnnnnnnnnnnnnnnnnnnnnnnnnnnnnnnnnnnnnnnnnatcgaagcgggcagctcgcgcctgagtcatggacttcccctggcccctcctctaccactcccactccctcgccggacccccccgccggggctagcgtctgccgcggctccgagggggtggggctgctgggaatggctgtgcccccttcggcccctcagcagcgcgcgtcctttcacctgaggaggcacacgccttgcccgcagtgctcatggggcatggaggagaaggcggcggccagcgccagctgccgggagccgccgggccccccgagggccgccgccgtcgcgtacttcggcatttccgtggacccggacgacatccttcccggggccctgcgcctcatccaggagctgcggccgcattggaaacccgagcaagttcggaccaagcgcttcacggatggcatcaccaacaagctggtggcctgctatgtggaggaggacatgcaggactgcgtgctggtccgggtgtatggggagcggacggagctgctggtggaccgggagaatgaggtcagaaacttccagctgctgcgagcacacagctgtgcccccaaactctactgcaccttccagaatgggctgtgctatgagtacatgcagggtgtggccctggagcctgagcacatccgtgagccccggcttttcaggttaatcgccttagaaatggcaaagattcatactatccacgccaacggcagcctgcccaagcccatcctctggcacaagatgcacaattatttcacgcttgtgaagaacgagatcaaccccagcctttctgcagatgtccctaaggtagaggtgttggaacgggagctggcctggctgaaggagcatctgtcccagctggagtcccctgtggtgttttgtcacaatgacctgctctgcaagaatatcatctatgacagcatcaaaggtcacgtgcggttcattgactatgaatatgctggctacaactaccaagctnttgacattggcaaccatatcaatga

SEQ ID NO: 87848 - DNA, 692 bp, Homo Sapiens
tcaataaattccagccttctctttcttgctgcttcctcagatattttcctcctttcttctccagtattcactctcttctctggagtttgatgggcctgtttatgtttttgcagtggtttcttttcgtgtaattttttatctccatatttcttatatgctaaaggtattccatatttagcggcaggctttgtaattttctgagcaggcataacagaaatcgagttttgtcctgaagctggtcttttagctggtataggctgtgatccaaacttcgaaaatgtttttagacaaaattcttctgcaataagctgaggagagagaaacttttcaatgcgtttggctataaaacctttctccaatatggagttgactgatggtctatccctaggatttcttttaaataactgagacaccaaactgcggagatcataggaataatgcaaagacacaggtggaaaagatccagatattatcttcagtaccaggtttttcatactgccagcttcaaaagcatgtttaagtgtacacagctcataaaggacacaccccagagcccaaatgtcacttttattattgtaaggtttgttttcacagatttcaggtgacaagtagtatggggtccctatgcaagttcgagccagctctacagtactattaagaactctagcaattccaaaatctccaaggtgtac

SEQ ID NO: 87849 - DNA, 930 bp, Homo Sapiens
ctgtgtggagggtcactcataggacaccagtgggtcctcactgctgcccactgctttgatgggcttcccctgcaggatgtttggcgcatctatagtggcattttaaatctgtcagacattacaaaagatacacctttctcacaaataaaagagattattattcaccaaaactataaagtctcagaagggaatcatgatatcgccttgataaaactccaggctcctttgaattacactgaattccaaaaaccaatatgcctaccttccaaaggtgacacaagcacaatttataccaactgttgggtaaccggatggggcttctcgaaggagaaaggtgaaatccaaaatattctacaaaaggtaaatattcctttggtaacaaatgaagaatgccagaaaagatatcaagattataaaataacccaacggatggtctgtgctggctataaagaagggggaaaagatgcttgtaagggagattcaggtggtcccttagtttgcaaacacaatggaatgtggcgtttggtgggcatcaccagctggggtgaaggctgtgcccgcagggagcaacctggtgtctacaccaaagtcgctgagtacatggactggattttagagaaaacacagagcagtgatggaaaagctcagatgcagtcaccagcatgagaagcagtccagagtctaggcaatttttacaacctgagttcaagtcaaattctgagcctggggggtcctcatctgcaaagcatggagagtggcatcttctttgcatcctaaggacgaaaaacacagtgcactcagagctgctgaggacaatgtctggctgaagcccgctttcagcacgccgtaaccaggggctgacaatgcgaggtcgcaactgagatctccatgactgtgtgttgtgaaataaaatggtgaaagatcaaaaaa

SEQ ID NO: 87850 - DNA, 569 bp, Homo Sapiens
ggggctgagtttgagcggatcacacagaacctggacgtgcacttctggaaagccttctggaacatcaccgagatggaagtgctatcgtctctggccaacatggcatcggccaccgtgagggtaagccgcctgctcagcctgccacccgaagcctttgagatgccactgactgccgaccccacgctcacggtcaccatctcacccccactggcccacacaggccctgggcccgtcctcgtcaggctcatctcctatgacctgcgtgaaggacaggacagtgaggagctcagcagcctgataaagtccaacggccaacggagcctggagctgtggccgcgcccccagcaggcaccccgctcgcggtccctgatagtgcacttccacggcggtggctttgtggcccagacctccagatcccacgagccctacctcaagagctgggcccaggagctgggcgcccccatcatctccatcgactactccctggcccctgaggcccccttcccccgtgcgctggaggagtgcttcttcgcctactgctgggccatcaagcactgcgccctccttgg

SEQ ID NO: 87851 - DNA, 1577 bp, Homo Sapiens
ttctccggaatcgtcgaccacgcgtccggtagaagatctgcctgtgggtcttcattgcccagctcctgcccacactcctgcctgttgccctgacgagagtcatcatgtctcttgagcagaggagtctgcactgcaagcctgaggaagcccttgaggcccaacaagaggccctgggcctggtgtgtgtgcaggctgccgcctcctcctcctctcctctggtcctgggcaccctggaggaggtgcccactgctgggtcaacagatcctccccagagtcctcagggagcctccgcctttcccactaccatcaacttcactcaacagaggcaacccagtgagggttccagcagccgtgaagaggaggggccaagcacctcttgtatcctggagtccttgttccgagcagtaatcactaagaaggtggctgatttggttggttttctgctcctcaaatatcgagccagggagccagtcacaaaggcagaaatgctggagagtgtcatcaaaaattacaagcactgttttcctgagatcttcggcaaagcctctgagtccttgcagctggtctttggcattgacgtgaaggaagcagaccccaccggccactcctatgtccttgtcacctgcctaggtctctcctatgatggcctgctgggtgataatcagatcatgcccaagacaggcttcctgataattgtcctggtcatgatcgcaatagagggcggctgtgcccctgaggaggaaatctgggaggagctgagtatgttggaggtgtatgaggggaaggaggacagtgtcttcgcacatcccaggaagctgctcatgcaagatctggtgcaggaaaactacctggagtaccggcaggtgccgggcagtgatcctgcatgctacgagttcctgtggggtccaagggccctcattgaaaccagctatgtgaaagtcctgcaccatacactaaagatcggtgaagaacctcacatttcctacccacccctgcatgaacgggctttgagagagggagaagagtgagtctcagcacaagttgcagccaaggccagtgggagggggactgggccagtgcaccttccagggacccatccagcaacttccactgcctcgagtgacatgaggcccattcctgcctctttgaagagagcagtcagcattcttagcagtgagtttctgttctgttggatgactttgagatttatctttgtttcctgttggaattgttcaaatgttccttttaacaaatggttggatgaacttcagcatccaagtttatgaatgacagtagtcacacatagtgctgtttatatagtttaggggtaagagtcctgttttttattcagattgggaaatccattccattttgtgagttgtcacataataacagcagtggaatatgtatttgcctatattgtgaacgaattagcagtaaaatacatgatacaaggaactcaaaagatagttaattcttgccttatacctcagtctattatgtaaaattaaaaatatgtgtatgtttttgcttctttgagaatgcaaaagaaattaaatctaggtaggtaattaaaa

SEQ ID NO: 87852 - DNA, 760 bp, Homo Sapiens
cggtaaactactggagtaccggcagttccccgcagtgatcctgcatgttatgaattcctgtggggtccaagggccctcgttgaaaccagctatgtgaaagtcctgcaccatatggtaaagatcagtggaggacctcacatttcctacccacccctgcatgagtgggttttgtagagagggggtaagagtgagtctgagcacgagttgcagccagggccagtgggagggggtctgggccagtgcaccttccggggccgcatcccttagtttccactgcctcctgtgacgtgaggcccattcttcactctttgaagcgagcagtcagcattcttagtagtgggtttctgttctgttggatgactttgagattattctttgtttcctgttggagttgttcaaatgttccttttaacggatggttgaatgagcgtcagcatccaggtttatgaatgacagtagtcacacatagtgctgtttatatagtttaggagtaagagtcttgttttttactcaaattgggaaatccattccattttgtgaattgtgacataataatagcagtggtaaaagtatttgcttaaaattgtgagcgaattagcaataacatacatgagataactcaagaaatcaaaagatagttgattcttgccttgtacctcaatctattctgtaaaattaaacaaatatgcaaaccaggatttccttgacttctttgagaatgcaagcgaaattaaatctgaataaataattcttcctcttc

SEQ ID NO: 87853 - DNA, 942 bp, Homo Sapiens
cggcgtagagttcggccgaaggaacctgacccaggctctgtgaggaggcaaggttttcaggggacaggccaacccagaggacaggattccctggaggccacagaggagcaccaaggagaagatctgcctgtgggtcttcattgcccagctcctgcccacactcctgcctgttgccctgacgagagtcatcatgtctcttgagcagaggagtctgcactgcaagcctgaggaagcccttgaggcccaacaagaggccctgggcctggtgtgtgtgcaggctgccgcctcctcctcctctcctctggtcctgggcaccctggaggaggtgcccactgctgggtcaacagatcctccccagagtcctcagggagcctccgcctttcccactaccatcaacttcactcaacagaggcaacccagtgagggttccagcagccgtgaagaggaggggccaagcacctcttgtatcctggagtccttgttccgagcagtaatcactaagaaggtggctgatttggttggttttctgctcctcaaatatcgagccagggagccagtcacaaaggcagaaatgctggagagtgtcatcaaaaattacaagcactgttttcctgagatcttcggcaaagcctctgagtccttgcagctggtctttggcattgacgtgaaagaagcagaccccaccggccactcctatgtccttgtcacctgcctaggcctctcctatgatggccttgctgggggataatcagatcatgcccaagacaggctccctgataattgtcctggccatggattgccaagggagggcggccatggctcctggagaagaaaatcctgggaagaaccttaattgtggatgggaggggtattaaaggggaagggagcacccatggccctaaggggggaagcccaagagaaagctggctcccaccccagaaa

SEQ ID NO: 87854 - DNA, 1231 bp, Homo Sapiens
  misc_feature (900)..(900): n is a, c, g, or t
  misc_feature (903)..(903): n is a, c, g, or t
  misc_feature (945)..(945): n is a, c, g, or t
  misc_feature (973)..(973): n is a, c, g, or t
  misc_feature (987)..(987): n is a, c, g, or t
tacggctaggtagcgaggccgggtggtgaatcggcacgaggcgtcggcggagggaagccggcccaggctcggtgaggaggcaaggttctgaggggacaggctgacctggaggaccagaggcccccggaggagcactgaaggagaagatctgccagtgggtctccattgcccagctcctgcccacactcccgcctgttgccctgaccagagtcatcatgcctcttgagcagaggagtcagcactgcaagcctgaagaaggccttgaggcccgaggagaggccctgggcctggtgggtgcgcaggctcctgctactgaggagcaggaggctgcctcctcctcttctactctagttgaagtcaccctgggggaggtgcctgctgccgagtcaccagatcctccccagagtcctcagggagcctccagcctccccactaccatgaactaccctctctggagccaatcctatgaggactccagcaaccaagaagaggaggggccaagcaccttccctgacctggagtccgagttccaagcagcactcagtaggaaggtggccgagttggttcattttctgctcctcaagtatcgagccagggagccggtcacaaaggcagaaatgctggggagtgtcgtcggaaattggcagtacttctttcctgtgatcttcagcaaagcttccgattccttgcagctggtctttggcatcgagctgatggaagtggaccccatcggccacttgtacatctttgccacctgcctgggcctctcctacgatggcctgctgggtgacaatcagatcatgcccaagacaggcctcctgataatcgtcctggccataatcgcaaaagagggcgactgtgcccctgaggagaaaatcggggaagagctgagtgtgttanaangtgttttgaggggaggggagacagtatcctggggggatcccnagaagctgctcacccaacatttcgtgcnaggaaactacctgnagtaccggcaggtccccggcagtgatcctgcatgtatgaaattcccgggggggtccaagggccctcgtttgaaacacgcttatgtgaaggcctgcaccctatgggaaaaaatccctgggagaaccctccatttcctaccacccctggaataaaggggggtttttaaaaaaagggggaaaaatggattctaaaccccaaatttccaccacggcccccatgggggaaaggggttcttgggcccaat

SEQ ID NO: 87855 - DNA, 1255 bp, Homo Sapiens
  misc_feature (389)..(448): n is a, c, g, or t
  misc_feature (491)..(491): n is a, c, g, or t
  misc_feature (659)..(659): n is a, c, g, or t
  misc_feature (1149)..(1149): n is a, c, g, or t
agcgagattctcgccctgagcaacggcctgacgtcggcggagggaagcaggcgcaggctccgtgaggaggcaagatctcagggagttgatgaccttgttttcagaaggtgactcaggtcaatacaggggcccccatctggtcgacagatgcagtggttctaggatctgccaagcatccaggtggagagcctgaggaatcaggagctccaggaaccaggcagtgaggccttggtctgagtcagtgtcctcaggtcacagagcagaggggacgcagacagtgccaacactgaaggttctgagggggacaggctgacaagtaggacccgaggcactggaggagcattgaaggagaagatctgcctgtgggtcttcattgcccagctcctgcnnnnnnnnnnnnnnnnnnnnnnnnnnnnnnnnnnnnnnnnnnnnnnnnnnnnnnnnnnnnactgcaagcctgaagaaggccttgaggcccgaggagaggcccntgggcctggtggggtgcgcaggctcctgctactgaggagcagcagaccgcttcttcctcttctactctagtggaagttacccttggggggaggtgcctgctgccgactcaccgagtcctccccacagtcctcagggagcctccagcttctcgactaccatcaactacnactctttggagacaatccgatgagggctccagcaaccaaagaagaggagggggccaagaatgtttccccgacctggagtccgagttccaagcagcaatcagttaggaaagatgggttgagttgggttcatttttctggctcctcaagtatcgagccaagggagcccggtcacaaaagcagaaatgctggagagtgtcctcagaaattgccaggacttctttcccgtgatcttcagcaaagcctccgagtacttgcagctggtctttggcattgaggtgggtggaagtggtccccatcagccacttgtacatccttgtcacctgcctgggcctctcctacgatggcctgctgggcgacaatcaggtcatgcccaagacaggcctcctgataatcgtcctggccatcgcaatagagggcgactgtgcccctgaggagaaaatctgggaggagctgagtatgtttggaagtgttttgaagggagggaggacantgtccttcgcacatcccagggaagctgctcccccaagattttggtgcaaggaaaactacctggaatacccgcagggtgccccggcagggaatccctgcatgctacc

SEQ ID NO: 87856 - DNA, 521 bp, Homo Sapiens
tcgagtttgggactgaaaagcttactcattggaattctaaggacagctccagttaacatgaaagtaaaaataaaaacccagaaaaccttttggacagattacaacaaagaagaattctgatacctcttgtagattcattttccaccccaaagattaggtaacaaaggagatgtgggagagaaagaaacaaaatgggagagaaattgagataagagaggaccatgtgaaggaggtgaagtatttaaagtggaaaggaggaaaataacctgaactcttaactgctcttgaaagttcactctgtcttcactccagctctattgactgattacctgtagcccacttgctattcaacagtctttatcaaagacagatcacttggatacttttgtatgagtggtgtcacaaaaagacatcttgagccaccaaataaggtgcaatatacaaaccagaagtcccattcagcccagtatttgttctcaaatgtcataaatgctgtggacaagaaactaagaacaaccaaa

SEQ ID NO: 87857 - DNA, 338 bp, Homo Sapiens
  misc_feature (1)..(1): n is a, c, g, or t
ntctatgttcatactcctcaaaataagggtaccaccacaggaaaaaagggaaagaaggaatactttcagtttcaaaaccagtggtatagaagcaagctggcttcactcccctccacagaaaacccaaaacaaatatacagtgctgagattttcatcagcaacaacccagaactcaaatatgacaatgagacagttcctggggccacagagagatgaaaaaactctgagcagatggtaagagcatctgatttccacatctgcaatggccctcccccaactcatggtttctacactggaaaaagtgagactgaggaggtcaactaccttccccatcttcc

SEQ ID NO: 87858 - DNA, 465 bp, Homo Sapiens
aaccagagttcgtaattctaatgacctctccagatttatggctgcagcattcccaagaaggggtagggaggggcatataatgagctaccctcaggggatcagaaaaaaaagggaagctgtcccttagcgaagaataaaactgtggactgacccccacccatttgcgaagaaagtactgggtcttcagctttcattgttcagccggtggtctttgtggacaacaccaggggcccctcctgctgaagactgtctggacttcctgattttcactcctgtataaaccccctcccccattactacctttgtctccttggggaaaaaaaatgtttttcacttaagcaaaataataactacccagtatttgtttctggagtgaaattgtaaacttcattgtacattcttcctggctttgatgcttatcgtgaagagttcagtgaaaataaattgtttttatgaaagcatata

SEQ ID NO: 87859 - DNA, 536 bp, Homo Sapiens
  misc_feature (256)..(302): n is a, c, g, or t
cggagggaggggctgggggatgtcagggccacggagcgcaaagcgcaaaggcccgggcgccggccctgccgccgccgccagttcattttcatagagtcgcccgagcttaacgtcgccttgcacgtgttttctaagctccacaggtggctttggggtacacgggcgcagctcaccctccttcccgcccgctccccggccccgagctcgaggttaaacagggccgcggagtcggccgggaaggggtcccggcagcccnnnnnnnnnnnnnnnnnnnnnnnnnnnnnnnnnnnnnnnnnnnnnnnccacctgcggagaagtcgtcctcgcggtcggagctgtgccggctgccgtcgctgtctctctccggcgagctgtggccgggcgagtcccgctcgggcacccgcaggaacctgcggcgccgccacgggggcaggtgctcgcgcccgggggtctcctccgcggcgaggggcgagcccgggcggcccttggcctcggcctcccgctgctccaggtcgcgggtcccccgctgcggccgc

SEQ ID NO: 87860 - DNA, 706 bp, Homo Sapiens
  misc_feature (605)..(605): n is a, c, g, or t
ccgcgacctggagcagcgggaggccgaggccaagggccgcccgggctcgcccatcgccgcggaggagacccccgggcgcgagcacctgcccccgtggcggcgccgcaggttcctgcgggtgcccgagcgggactcgcccggccacagctcgccggagagagacagcgacggcagccggcacagctccgaccgcgaggacgacttctccgcagacttcagctacgggacggacgagtacgacggagaggggaatgaggagcagaaggggcccccggagggctcagagaccatgccgtacatcgatgagtcgcccaccatgtccccgcagctcagcgcccgcagccagggcgggggggatggcgtctccccgactccacctgagggactggctcctgtggtggaagcagggaaaggcctggagatgaggaagctggttctctcggggttcttggccagcgaagagatctacattaaccagctggaagccctgttgctgcccatgaaacccctgaaggccacctgcaccaccttaccagtccgtgctcaccattcagcagatcgagaccatcttcttacagattccagacatctatgagatccaccanggagtctatgtacaccctggccccatggtgcacaatggacaggcaggtacccaatggccactctttcaaaaatgggccgacacctgggtgttcaaaacgtt

SEQ ID NO: 87861 - DNA, 365 bp, Homo Sapiens
ctggttccagcccatgatgtgacttcgatagctcttctttattgtttgtcaggggcagctgttctggagtctcagttgcagaagaaaggcctggatttaataagtttttatagcaaatgccaactgggcctatcaaagctgcctggagaccccacagggcatgccatggcctctttcaagactcctcagttctgttcaagagctgagaactgcaggcatttcagatgcatcggccactggggtgaaacgcaggccaggaacttgttgtctctcctgtcaatcattcatcatcttgttcactcctggatctccaggctgaaccatggtaaaccaaactttttctcagtagaatgaggcagcaattt

SEQ ID NO: 87862 - DNA, 431 bp, Homo Sapiens
agctatacctcagccttgcctcacaagctttctgcccaccttttagtgcagccatcgctatggcaactatctttacacagatgtaacatgacagcacccaccccagcgataccacgtatctcttcatttctgcctcagaactaagcattcatgcatgcacagccacaccccacaggatcgcttcccaaagtaatctccctacacacaagacctcatggctctgctgtcactcagctcgattcaaggaatagcgagcaagcaccctgacaagtactgtatcagtcaggactctgcgagaagtgctagaacttggcagaggggcagaaaatccactcagattcactaacaaagacgtcacatgcttgctttggcaggacacatactaaaattggaacgatacagagaagattcacaaaaataaaaaatagaaa

SEQ ID NO: 87863 - DNA, 768 bp, Homo Sapiens
agtacggatgtgagaggagctagaatcagactggatctctgccacttttcccttcctacctcttaacttgcaggaaacaatgtgtctcttccgacagtgtctccagtgttcacagaatcaactgaagttttgtttgctcatctagatatactggtcttccattagttcctagtagcagcaatggggccaacagccctgcctctgttccctcccagttagcttacagtgctacaggaccatgatttctggggttggattggtgctgccccaggacacactccagttgccgtaccagtggcacttctctgggttcttcacatggcaccatcatccagaatactcccccagataaagcaacttcgggagtagtgtttcagagaaggactcatgatttccaggagtcaaaagccctcagtccaccaacagaactatgccagttggtcttcatctccaagataaaagatgaggtcagggatgggcatggtgcataactctgagccctgagtgagagaactgaggcagctgcaacttcacaaggtcaaggcccgacctccgcccatccccaccagcccaaagacttgccacctcagtgcccgagcatcctctggtgacctccctcaccagcccaacttaatctcaccagtgaaaacagaggtgaggcgagagtacccagcctgaagatgcttcttctatcagcctgcagaaatgttacactttcccttcaggcatccattaataaaagaaattgccatgctttctgccaggaaa

SEQ ID NO: 87864 - DNA, 2109 bp, Homo Sapiens
  misc_feature (1520)..(1622): n is a, c, g, or t
  misc_feature (1736)..(1744): n is a, c, g, or t
agttgatggaaatcggccgttgggatgctgtctaagcttggatacctgagtaataacggacaacagattaaagctccgcatccttgcgccacgtgcttcggtccgtggtttgcgtgcagacgtttgacctgtatggtgaccctcgcgatttgcaaatgtgctgaggatctggaatactgaagtggaaggcacctcttgttatggggagcatgtatatttccctcctgtgacgcactgcttccacagagaggtgcaaacgtgcaaacgctcagcgaccgcagcgctcctgcccctcccccaccgtaactccggggtcgcggatctgcccgccccgctctcccgaagctgttcgggcagtgtccgaacggcttcggaggggcgagaagccagcatccgagccgcctctccggaataccagcagcctgacgcacgcgtgctgtcgggggagggatgctgggacagctgctcccgcacacggctcgcggtctcggcgccgcggagatgcccggccaaggtccggggtccgactggacggagcgtagctcttctgcagagccgcccgctgtggccgggaccgagggtggcggcggcggatcagctggatactcttgttaccagaattccaaaggttctgatagaatcaaagatggatacaaagtgaactcacacatagctaagctgcaagagttatggaaaactccccaaaatcaaacaatccacctctctaaatcaatgatggaggcgtcctttttcaagcatccagacctcaccacaggccagaagcgttacctgtgcagcattgctaaaatctataatgcaaactatctgaagatgttaatgaagaggcagtacatgcacgtacttcagcacagctcacaaaagccaaggtgtcctcactcatcacagaagccgccttagctcccgttactcacagaaacagcattacccttgcactacatggcgacatcaactggagagagaggactcggggtcttctgatatcgcagctgcatctgcacctgaaatgctcatacagcattccctttggcggccagtgagaaacaaagaagggataaaaactggatatgcatctaaaacaagatgtaagtcactgaagatttttagaagaccaaggaaactgttcatgcaaacagtttcttcagatgattctgaatcacacatgagtgaagaaaaaaaggaagaagatttactaaataattttatgcaatcaatgtcaattgaagaacagggagaacatctgatgttaacttgacagtcttgtctcgtgtattgaattcgtgccaaaggtgagggtaaggggttgtgagttgtgtcctgtatgtttaggatggtattgttatttattaaatcattaagtaattttggtttgttcagaaacttaaaacaatgtaattggtctgatgtagttccatgtaccaatgatagttatgtaagaaaatttacatgtaacatatacttgtacttctagctagatacaattaaaacttttcttgcattcnnnnnnnnnnnnnnnnnnnnnnnnnnnnnnnnnnnnnnnnnnnnnnnnnnnnnnnnnnnnnnnnnnnnnnnnnnnnnnnnnnnnnnnnnnnnnnnnnnnnnnnctttctaaacctttcctttggccccgggggcccctttaggaagcgtgaacttggcccccaagctgccccccctaggagaaccccggagttcgtgaattaagggctttgggtctnnnnnnnnnaattaaaaaaagccccctggggggggagacctaaccggtctcaagaaacaaatccccccaagggggatttcccgggaggggccccttaaaagggagattctcaataaaaacgagggtttcccccgagagcgctaaatcttcgcgagattccaatatttacccggccccgcggcccatgtggcacaccctttctataacaatggacctggcgcggcgcaactcctcttttaaaacccattctcgcgccccagaacagtgtggaaagccccacctcccgcaaagccggcgtgtgtggagaaacacctttgaacatccccccaacccgggaaatctgctcaacccctagtggtcccccatatttgagc

SEQ ID NO: 87865 - DNA, 701 bp, Homo Sapiens
cctgctttggtcagtagaatacagctgaagtgatgttgtaccagttttgcgtctggtctttacaagcactggtagcttcaactttctccttcttggtactcacccaccatgttgtaaggaaacccaaacagccacgtggaagacagttctagttgagctcccagcccagagcctatcccaactctccagccataccctgacttccttcagcaaagagacagcttctgattcatgttcgtctcaccataatccatttccctctctgcagatacttccaaaagttacactagatgttaactgagcactaaggacactacgtgaaagactggagtacaaacatccaaaggactgaagaatttgaagagcactgaatgtgggagataggacagaggaaaggagtcaaatgtctccaagaaacgaagcctgtgtgccctggagaatgaagaagcatcatcaaatcggggagactgaaggaggaatcggttttcagagaaaaacaatttatattgtcttagctgtgttaggtggcatactattacattcaagtgaagctgtgtaatagacagagatgacaaattttattcatttatgaatgcccaccaaaatatatatatagtttttgccctcatgtctcttattgggatgacagacataaatcaaagaattccataaataaatattaaaaaacaatttgtgataaa

SEQ ID NO: 87866 - DNA, 539 bp, Homo Sapiens
gacgattctgctgtatttgttaaacgttgacatttggttctagggccttgagtatgtgccacgtgcttgtgaaatgctatgattcacatgtaacatttaaacattaatttaaaaagggaaccttggagaattcttttgttcactagttcctttttttctctacatttttaatttattaaacttgctgtgaaaacactttgattttctaagaggaaggtactttaagttccaggatgaacatgtagctgcactatgccagaaattaatgagggaagactttcttcctaagtgcttatgttttaacttatgttagtgaaaccactacaaggtgtttcaggcgctgataacatgcttcacacctgcccttggaggtcacagtactaatttacttcaaatttagttatgacagtgtcactgtatcctagttatgtttacagaacaaataaataatgactgtcatacatccagaggagaccgaacctgcccagctgatgtactgttttatggaataaagtcacttgatcagaaggaattgaaaa

SEQ ID NO: 87867 - DNA, 930 bp, Homo Sapiens
  misc_feature (42)..(72): n is a, c, g, or t
cctcaatatacacgacagagtccacttcatcccacatctacnnnnnnnnnnnnnnnnnnnnnnnnnnnnnnngatagtgacagaacaagcccaaagaagctggcatagaatctgtgctgagaaaagttctcccccagtataacctaaatccacacccatctctgacaaagcattccaggctgaacaccactttcatgttgtcataggtctttaaaagccagctgatagatcttcttctcctgaagttcttctccagaacttaacagcattttagagatatcagaaaagatgtaaggcatttgaccatcattagtgctgagaggtagagagaagccaagttttattactctcattttacatatgggatgtctgaggcactaagaaatgagaagattggcccatcggtggaagccactgcaagtaaaatccagatatcccgtttcataggtactttgttttctatcccccaaatcacagacctgcattactaaaatggctgaagtatcctgctgaggaatcctccaagatgaaaacctcccagtgtgctctaccctccttccgacctatgagcccagcttggatccactgagttgctggattcactgtcctttgcagtaggaagaatctgcttagaaggatatgtatttatatatctttttaccatctcttcttggagatgctcttcatctccttgaaatagttatattaaatggatgtggggctaaagttagaccaaatcttccagtcaggaggggcttcttagaatcctcaggtaaagcaaatgccaaactctgcattaggctcacaaacattaggaataattccatctttgccagttgttctcccagacacacccgcttccctatcccaaaaggaataaaggtttcttttttaattcgctgtccttggtcatccagaaatcgattaggg

SEQ ID NO: 87868 - DNA, 499 bp, Homo Sapiens
aggtgctgtcaccctcaggccttgtttgattcccagaacaaacctgtgaagaacagaacctggaagcatgtcaccattttatagatgaagaagcagaagctcaaaagacagggacttgtccaagcctgtacaaccagcaagtgactcagcaaacggaaagaatgcaggtttcctagttggccacactgagaatttggtgctttgacaactatacttcatctattgtaaattttccagcttcacacaatttcttttatttacaaaagtactaattattatagctaatctctccctaaggaattcaccaactgagggaaaaacaagaacaccaatgtagccacatctaatggccttatattttgttgctcacttatttcctgtatacttagttttatttgaaacttaatgttgattggatttgagaagactgttccccacaggatattttcaattgttagaaaaaaataaaataaagaacaccaccactgaacagttaaaa

SEQ ID NO: 87869 - DNA, 620 bp, Homo Sapiens
  misc_feature (37)..(37): n is a, c, g, or t
atgaaggctgcgggcattctgaccctcattggctgcntggtcacaggcgccgagtccaaaatctacactcgttgcaaactggcaaaaatattctcgagggctggcctggacaattactggggcttcagccttggaaactggatctgcatggcgtattatgagagcggctacaacaccacagcccagacggtcctggatgacggcagcatcgactacggcatcttccagatcaacagcttcgcgtggtgcagacgcggaaagctgaaggagaacaaccactgccacgtcgcctgctcagccttggtcactgatgacctcacagatgcgattatctgtgccaagaaaattgttaaagagacacaaggaatgaactattggcaaggctggaagaaacactgtgaggggagagacctgtccgactggaaaaaagactgtgaggtttcctaaactggaactggacccaggatgctttgcagcaacgccctagggtttgcagtgaatgtccaaatgcctgtgtcatcttgtcccgtttcctcccaatattccttctcaaacttggagagggaaaattaagctatacttttaagaaaataaatatttccatttaaatgtcttcaaaa

SEQ ID NO: 87870 - DNA, 1009 bp, Homo Sapiens
  misc_feature (34)..(34): n is a, c, g, or t
acatggtccatgtacatttgcagctgccaccatngcatctggttcctctttggcttccagatttaatatggttttatccttactcgtagagtcttggaatgcaatattatcatgagctggacttgtgccttgggcctctatcgtgggagaagctgatcttgtatcctcctctttcttacagagcgagtttctgtcaaggtcacaagaagccatattcagaatttctaatccaggatcacttgaagttatagtaccgtctgtcgatgaagtgtgtctgggtaatggtagtgagcaatataccatggactgcagcaggctctcaggacacacgcgtgcaacaccattctcttccatacttgggtcatcattcatcctgatgcagcctgagagattcgttcctgggctggggccacttgtggggcctgggcacttgtgttgtctttttacatccaaagcaccatcctttacttctccatatgtgggcctttcacacagagtgtggatttggttggctacacctgagaaaggtgttgattccagggttggaactgctgtaaaactatccagagataaggcatccagcagaggtgtgtaccagcacgtatgtttcaaggtcaggggtgtctgatgtattcttgcttcttgaccaccatatagtttgtggcaacactgcttcaatttttcttgaagaggttgttgaattgcatctgcgcaggacagggaatcatagtgaggaaattcctcatctaaaaagcttcttcagtttccttgtcttctgctgaagtgcctggcaagtgttcgataattcagtatttatagtttgaaggttccgttgttccgaaattgcttcctctaatttatgcagtaaagacgtagctttttcactggcagtgtgggcttctcgatctcgatccttaccctggacatggatagttagtgctggattgtagcagtgtggccaggaaacaaagcaatggagtgctcactctaatgaagcaggcaaaactga

SEQ ID NO: 87871 - DNA, 986 bp, Homo Sapiens
tccagtcttcgaagggaaccccacgtcccggactctcgctatactgtatatgacggtgtagtgaagtattccaacccgctccacttgaagtatagtacgtcgtcgagaagtggtctggtaatgtattgagaatattcctgggcctgcagcaggcttttcaggcacacgcgtcaacaccttgtcttccatactgggtcatcaattcatcctgatgcagcctgagagattcgttcctgggctggggccacttgtggggcctgggcacttgtgttgtctttttacatccaaagcaccatcctttacttctccatatgtgggcctttcacacagagtgtggatttggttggctacacctgagaaaggtgttgattccagggttggaactgctgtaaaactatccagagataaggcatccagcagaggtgtgtaccagcacgtatgtttcaaggtcaggggtgtctgatgtattcttgcttcttgaccaccatatagtttgtggcaacactgcttcaatttttcttgaagaggttgttgaattgcatctgcgcaggacagggaatcatagtgaggaaattcctcatctaaaaagctctgaaacagcaagccatggtgttccccttcaatgaactccttttgaagtgactcaattgttgtcttcagtttccttgtcttctgctgaagtgcctggcaagtgttcgataattcagtatttatagtttgaaggttccgttgttccgaaattgcttcctctaatttatgcagtaaagacgtagctttttcactggcagtgtgggcttctcgatctcgatccttaccctggacatggatagttagtgctggattgtagcagtgtggccaggaaagaaagcaatggagtgctcactcttatgatgcaggcaaaactgaaaatgtgtttttcttctcagggaagtgataagcctctcctgaacttctgcaattctgtgtttgcatgggcttggtatccc

SEQ ID NO: 87872 - DNA, 444 bp, Homo Sapiens
tattgcgtcactgcgagtccagagcgcacggctggatcatgagcacgcccgcgctggcgcctgcgcgcttgcgcatcttcctctgcccggcgcgcgccgcagccgtcgggatcacctcggggttgcgctgcttctccagcaagtgcatgcgcgccatggtctcagtcagcatgtctatgagcagttcctgctgcagcttcaggtagttgttctcctccagcaacacttggcttttggaccgctgcacctgcgccttccagccccaggcggtccgcgagagcagcggcgaccgcgtcctcgccagctggctctcagtggtccaccgcccgccgcggaacacgaaggcctggttgctgaggcgcatgcacggcgcgccgtaggcgaggcccagctcggcctggcgcgtgttgtggtccagaaggtagaaggtggacagggagggca

SEQ ID NO: 87873 - DNA, 425 bp, Homo Sapiens
tctagaaaggcatggggtaaccttgggagatgtgccacagcctagtgcccagagttcccggatggtaagtgcacgcatgtgctatttgcaggtaacaaggatgaactcacatccttcaaccccttcagttcagtcaactgcctttttgctccttctaccattttaaagtttaacagggttctactggatcccaaattatcattctcaaggtaacaccctggtcaacattaacatcacccctctaactcaaaggtaccactacgggatcaatttgaaacaggatgcttcagaaatttgtaataatgggcaacttttgtcaatttggaaataattccctatgtgcaaagttcaaaattgtgtaccacagaatcatttcctatctaatgaactgtcatcagtaaaagcagtctcaacagataaaaaac

SEQ ID NO: 87874 - DNA, 797 bp, Homo Sapiens
  misc_feature (610)..(610): n is a, c, g, or t
  misc_feature (781)..(781): n is a, c, g, or t
cagtcgacggtaccggacatatgcccgggaattcggccattacggccgggggtcctggagcggcgcagccggagtggggccgtgaggagaataaaggcagccccgttgatgactgaaaatgacaaagcatccacctaacagacgaggaatcagctttgaagtgggagcccagttggaagcccgggaccgtttaaaaaactggtatccagctcacatagaagacattgactacgaggaaggaaaagtactcatccatttcaagcgttggaaccatcgttatgatgagtggttctgctgggacagtccttatttacgccctttagagaaaatacagctgaggaaagagggcttgcatgaagaggatggatcttctgaatttcaaataaatgagcaggtccttgcttgctggtctgattgtcgtttttacccggccaaagtcactgctgttaacaaggatggtacttacactgtgaaattttatgatggagtagttcagactgtcaaacatattcatgtcaaagctttttccaaagatcaggcctaaagaaacagatcacaaaagtctttcatcatctcctgataaacgagagaagtttaaagaacagagaanagcaacagtgaaagtgaagaaagacaaagaagataaacccttaaagacagaaaagcgacccaagcagcctgataaagaaagaaagttaatctgttctgaaaaaggggaaagtgtcaaagaaaagtctttccccagaacgaggagggaagacagggaaaacattttccgaanaatgaccggagaggta

SEQ ID NO: 87875 - DNA, 906 bp, Homo Sapiens
  misc_feature (314)..(356): n is a, c, g, or t
  misc_feature (627)..(635): n is a, c, g, or t
tttctgcagtggacaaataaacatcctcaaagtagcaactgcaaatcagttacccttagaaaagcaagaccaaacactgtagttacactattagcagtgaccaaaaagggctaatattttctaagaatagtttaaattacagacatttgttatatttaccttatgtgaaatacatcactatttaattacattaattttaacatctgttgtgtggagttgtatagttcatgcaaaagcctgtgggtatgggtttttcaaaccagcagaaaggtcaaaggtacctgaatgctaaactgcctggctcccagcttttnnnnnnnnnnnnnnnnnnnnnnnnnnnnnnnnnnnnnnnnnnnacagagttggaccagttaactttaatggccatccttttacaccacacaagttgataaaatttatctgttcagcaaagagattgaacaaaaaagcacgttagtaatatgaagacaggaaaacgaatgaaagtctaacacataactcatattgatttactttatttctgttagattttacactctgaaaatttcacctcatttagtttgtacaaatactagacatggaaacttaaagcccagctattaattgataatgaacatttttcactannnnnnnnnctatctgaaccttaaagatccaagagctttggatcttttcgggtatatgtcaatggagggattattttataatacttttgcattgacatgaaagtgggttcatggggggaaaaaccactgaagctgtggaacattggggaagcaaaccaagcatattattccttctccaaaacctttcccttgcctttttcaccagaaaaataacacccgggataatggttaacatgcgggtgacattttccaaaaaactttcaaaagaagtatgctttcc

SEQ ID NO: 87876 - DNA, 518 bp, Homo Sapiens
  misc_feature (188)..(212): n is a, c, g, or t
catccctaaaatatatgaaccaatctgcctagaaatagctaggaatctgccaccagaaagatgaataaaataaaagattgaagaagtagcaagtagcagtatggaagacttgtggctaagaagacacttcgcactgttatgcaccaggaggattgactgtctctgtggcttggaggcagttatacgtnnnnnnnnnnnnnnnnnnnnnnnnnaaagttaacaggagccggagtctgtcttcaaagagcagtcagtagagatgaagagtaaattactgattccatagtacatgtcagatactgcctagggacttcctaagtagaggtcaaggtcccactgttatacaggtaggggttaatgagctagcaaattaggatattaatattaatggagcatctttagtacccacaggctaatgaagtctggggtcatttgggttatattaacatgaaacaaagtggaattttagaccaaacgcatttaccagaataaagagagcaattttcctgattaaaaaa

SEQ ID NO: 87877 - DNA, 433 bp, Homo Sapiens
tttacagcagcaatagaaagttaacatgggggcaggggtgggggaaggagtccgagagcctgaggcctgagaacaagacgggaagacattgctggacatttattttatgacgtgcctcatcagcagaacaaagaagggcatggacttatgtttaaaaactgtccagaagtgaccaaagaaattcaccagtgatgcagatgagctcctaataatcatgccatcggagcaggctgtgatagcctggaaatcctgcctgaaaccaaactgcaacatttccaactaagaaatcaagcggtgataaacctcagtatctgaaagggttaaatattgtgcccacgtgactactgttctttctttctgtgaattaatgtgtgtgccagaaaatatttgtgaataaaaaacaattacataatctcattgtcatgaatgtggt

SEQ ID NO: 87878 - DNA, 462 bp, Homo Sapiens
cgcgccccgccgctgagccgtcgcggagccgcgcagccctcggagcacgaatatatacagccctgctctgggacacacctccattggatttaaaagacagtcctcgtcagcactgactttcagctatggaatcgcagacggttgatgatgaagcgccggccgtgtaaatgaagatcgggtgaggagcaggacgatgcccaagggtgggtgccctaaagcaccacagcaggaagagcttcccctcagcagcgacatggtggagaagcagactgggaaaaaggataaagataaagtttctctaaccaagaccccaaaactggagcgtggcgatggcgggaaggaggtgagggagcgagccagcaagcggaagctgcccttcaccgcgggcgccaatggggagcagaaggactcggacacagtgctctgtgttgatgccttcagatgcctccagcccagtccctg

SEQ ID NO: 87879 - DNA, 495 bp, Homo Sapiens
ttccgggtgacaggctccttcttaatcctcttccgctcagggccctgcttctctgtgtccgagtccttctgctccccattggcgcccgcggtgaagggcagcttccgcttgctggctcgctccctcacctccttcccgccatcgccacgctccagttttggggtcttggttagagaaactttatctttatcctttttcccagtctgcttctccaccatgtcgctgctgaggggaagctcttcctgctgtggtgctttagggcacccacccttgggcatcgtcctgctcctcacccgatcttcatttacacggccggcgcttcatcatcaaccgtcgattccatagctgaaagtcagtgctgacgaggactgtcttttaaatccaatggaggtgtgtcccagagcagggctgtatatattcgtgctccgagggctgcgcggctccgcgacggctcagcggcggggcgcgggcgctgcccatgcagcccgcggccgc

SEQ ID NO: 87880 - DNA, 467 bp, Homo Sapiens
ggtacccatggagcgtgaagaaaataaaaggaggacagaggaaataaacttcttttataggctattaacaacctatttaatttttcagcagatttcttctcactgtgacaccaaggatcccattcattaatccaaaaatgcttacctgttaccactctgaatacactctaagtgaaatccagaacaaaattcacaacatttcgacaaaactctatcaagtccaagaaaaccaacctggacactcacgcattattttgatacttatttttacaaatcaatgacaaaaacataaattgatagagaatgcagtgagtatttaccgattccatagctgaaagtcagtgctgacgaggactgtcttttaaatccaatggaggtgtgtcccagagcagggctgtatatattctgaaacaagagagtgagattagctcatgtcaataataatttcagcctcagttctttcatcg

SEQ ID NO: 87881 - DNA, 1023 bp, Homo Sapiens
  misc_feature (63)..(94): n is a, c, g, or t
agtgctaagcggaaaattaaccctcactaagagggaataagcttgcggccgcatacgcggtcnnnnnnnnnnnnnnnnnnnnnnnnnnnnnnnnccattgatctcaaagcacttgtcctcaggatagggaagagcagggggatgcaggaatagcagggatagcttgctcccagccccctccccaatttggttccgttgacataggaattttacgattcccaaaccatgcaggggctgagccttccttatgatgactttgttctccctcccactgggggaatcctccctatgccttaaaactgccgagccccactccatgtaataggattcctgggcttcctcaatgggggttcatgttcttggactgcgggccctcagtccttaactggaaagtgaccgtccactgccccatggagcccatctggacacagcacagccccaaaaccgttagcagctggctctgtttccaagcctggggaggggttcctcagtgcaggagttggggacaggctggggatccaagctgcttgagggggtcaaccttggaccaaagttgccttaagcctgtggtaaaagggcttcagggaaggtaagtgggccacctgctggaagctgccagctgcccggctggcaatggtgtgagtgtcttggccctgtccctgccctggggtccagcaggtcatccctcccttcttctctctcctttggcgtttgttcctgtagtcactgggctaatctccccctagcttcaagctgtacatagggcctcccagtgcaaatcctcctgcccataccgtgcacccttagaagcctgcgtgtgcatagagcgccccctacttcccagttaactcccagttcttctccctgagcttggtatttgtcatgtgccaactctgactctgaggtgggcagtgagggaagcagccccgggcctgcttgcttcctgtccccgaaatgttcgtttcttctgaagtaaatatacatatataaataaatgtataaatactgctttgtatctgaaaa

SEQ ID NO: 87882 - DNA, 1066 bp, Homo Sapiens
cagtcgacggtaccggacatatgcccgggaattcggccattacggccgggggagcgtctggagctcacagtgatcagtgaccacatcattctctctgagcagaggagcaggaatccctcaagcagcagcctggtcttggctggtgggcagatgcaaatagcttttgctgttattaatgaagtaattactaaatgcacttaaaccaggtcaggaaggaatggaaggatggagctagaaagctcagagtgggccagagcacggggtgtgacacttgcaaagacagggctctgactctgatccctcccagggagcctccgacacccatcccactcccaacacacaagaccctgggttagggaagaagttgtatcttaagtgccaccttcaagtttccttagtggtgcctggtgcatttccgaggctacatccaggctcatggaaggagtgtagtaattcatttagccatgtctgccatgggtccagaaaatgggcaaagggaacttggctgtccttgccctgtggtatgctgccaacctctttgggaagcaggcttgcccctgtcccaccactcattctcagctttgaatgggagggcctttctatagtggaggcctttccttgaagcctatgaactgcaggcccccttttgccattgatctcaaagcacttgtcctcaggatagggaagagcagggggatgcaggaatagcagggatagcttgctcccagccccctcccttcttctctctcctttggcgtttgttcctgtagtcactgggctaatctcccccctagcttcaagctgtacatagggcctcccagtgcaaatcctcctgcccataccgtgcacccttagaagcctgcgtgtgcatagagcgccccctacttcccagttaactcccagttcttctccctgagcttggtatttgtcatgtgccaactctgactctgaggtgggcagtgagggaagcagccccgggcctgcttgcttcctgtccccgaaatgttcgtttcttctgaagtaaatatacatatataaataaatgtataaatactgctttgtatct

SEQ ID NO: 87883 - DNA, 467 bp, Homo Sapiens
agccccactcattgtaataggattcctgggcttcctcaatgggggttcatgttcttggactgcgggccctcagtccttaactggaaagtgaccgtccactgccccatggagcccatctggacacagcacagccccaaaaccgttagcagctggctctgtttccaagcctggggaggggttcctcagtgcaggagttggggacaggctggggatccaagctgcttgagggggtcaaccttggaccaaagttgccttaagcctgcgtgtgcatagagcgccccctacttcccagttaactcccagttcttctccctgagcttggtatttgtcatgtgccaactctgactctgaggtgggcagtgagggaagcagccccgggcctgcttgcttcctgtccccgaaatgttcgtttcttctgaagtaaatatacatatataaataaatgtataaatactgctttgtatctg

SEQ ID NO: 87884 - DNA, 438 bp, Homo Sapiens
tttggaaaataatacttggaaaacatttaattggcattggaaatcagtacaatcttttgaaaagggatttagtgacacataacaaaagttgttaaaattctgctccctttaactcaataatttcaagaaatttaaaagtcaatcattagaaaagttgtaaatgctcaacgataggggaaatgaccgaggacataatggggcaccaactcagtgagtaatttgcagtcagttgagaggagacccctgaagtctatgtgacaacatggaaaacaataaattaacaaggcatttataaagtgtggaattctatacctcttacaatcagctctatgtagaaacatatatgtttataaacaaagattgaaaagagaacacagacaaaaatgctaagactatggttgcattaaactgcaagattgcaaatttttttctttaaaa

SEQ ID NO: 87885 - DNA, 424 bp, Homo Sapiens
cgctgaataaatgaagagcccacaaggcacttagtcgctgagggtggagctgaggcttggatcctggaccacctccctgcacccctttccaggtggaagagtggggatcccaggcagggatggagggtgaggatccgtgaggagctatggggtgctgaacagaggacctgaatttaagtgaacacgcaggcttccaggcaaggtcaggcaccgtgcacacagtggcgaggagtgtagccaccacctctccgaaatcagctccaaacaggccctccaggtagacagcagtcctggggccatgtcaccaaagccagtgggaactgttccacctgctcactctgggtttcttatcccagatctcaaaatctccagcacaaccccaaaggtccagtgtttccattaaaatgtgggtctcaatgtgaaa

SEQ ID NO: 87886 - DNA, 673 bp, Homo Sapiens
gcggccgcaggagcgcgtgcggcgtggactttgccgggctcgccacacagccccagacccgtttaggaccgggagaccgaacgcagcgtccagccggggagtttcggcggcgttctccgggcaccgcgcgcgggaagccagacgcagcggggggacacatctcgcggtggcgttgccagagtgaggagttagcaggcaggacttgacgaggctctttggtttttctagtcctcaaccactgaagaagaagcttgatgcttggctgtcagaagacatgaattacgcacggttcatcacggcagcgagcgcagccagaaacccttctcccatccggaccatgactgacatattgagcagaggaccaaaatcgatgatctccttggctggtggcttaccaaatccaaacatgtttccttttaagactgccgtaatcactgtagaaaatggaaagaccatccaatttggagaagagatgatgaagagagcacttcagtattctccgagtgctggaattccagagcttttgtcctggctaaaacagttacaaataaaattgcataatcctcctaccatccattacccacccagtcaaggacagatggatctatgtgtcacatctggcagccaacaaggtctttgtagggtgtttgaaatgatcattaatcctggagat

SEQ ID NO: 87887 - DNA, 298 bp, Homo Sapiens
tcattatgttcatgaagttgagagagtgttttgaaaaagaatgttggaaagcatttccactgttagatgattttaagtcaaaaagttatacaacagtgtgacctatttgcacacaagcatggacacagaattgtgtcatatgtttaaaacttttctagatccttttgtggttcataagcttgatgattgagttttcgcgtccacatgtgagatgtgcctcccttgagccttgtcattggcacattacctgcctgatgtcaacaataaccataaaaaataaaaatttgttaagcagaaa

SEQ ID NO: 87888 - DNA, 551 bp, Homo Sapiens
tcagagagcagctccgcatatgactcgagacccgagagcagctccagcgagagtgagggcagcaagcccccccacttctccagccccgaggctgaaccggcatcctctaacaagtggcagctggataaatggctaaacaaagttaatccccacaagcctcctattctgatccaaaatgaaagccacgggtcagagagcaatcagtactacaacccggtgaaagaggacgtccaggactgtgggaaagtccccgacgtttgccagcccagcctgagagagaaggagatcaagagcacttgcaaggaggagcaaaggccaaggacagccaacaaggcccctgggagtaaaggcgtgaagcagaagtccccgcccgcggccgtggccgtggcggtgagcgcagccgccccgccacccgcagtgccctgtgcgcccgcggagaacgcgcccgcgcctgcccggaggtccgcgggcaagaagcccaccaggcgcaccgagaggacctcagccggggacggcgccaactgccaccggcccgaggagcccgcggccgc

SEQ ID NO: 87889 - DNA, 654 bp, Homo Sapiens
  misc_feature (526)..(567): n is a, c, g, or t
aattggaaaacaaagctagagatgtaggcatgatttagttcaaattggtctaatttaccaaacagaaaatacagatttcattctaaatgtgattgcttagagagggctaaattttatcatctcatgtaaattttaaaataacatcctgggaataaattataaagaaggaaaaatagaagcagagaaagccggcagaggactatttcagatggtgtgtgatgacagaggatgacaaaagcttggatcagggaggtgatgttagctatgaaagcaaacagtcaggatatatttttgtggtaaaattaatggaatttgctgatggcttaactatttgggggatggagaaagatgttaccagcaatgatgcctaagtgtttggcttgagcaccttggttggttgtactgagttggtgtctggggaaataatgaagactttcatttaaattaaaataggaatgctagcctaatatgcaaatcctcattatattaacccaaatcatcaaatcaaatatgcatcactttctannnnnnnnnnnnnnnnnnnnnnnnnnnnnnnnnnnnnnnnnnataataaaaaatataatctattttatatagttatatttttcattaaattcaatttttcaaatcttattaaaataaagaatggctaaa

SEQ ID NO: 87890 - DNA, 1057 bp, Homo Sapiens
  misc_feature (895)..(895): n is a, c, g, or t
ggtccggaattcccgggatcgcggcggcgcggagctcgggcggccgtggaggaactcagcctcggccgcaggaggcgccgggagcggagccgccgggagtcgcgcaacaggtttccttctccatcgctgcgcccacaggggacgcgcgccctgccgggagaggggcttctcggttcgcactctcgctcccagtccaggcaaaatgaaagaccggctagcagaacttctggacttgtccaagcaatatgaccagcagttcccagacggggacgatgagtttgactcgccccacgaggacatcgtgttcgagacggaccacatcctggagtccctgtaccgagacatccgggacattcaggatgaaaaccagctgctggtggccgacgtgaagcggctgggaaagcagaacgcccgcttcctcacgtccatgcggcgcctcagcagcatcaagcgcgacaccaactccatcgccaaggccatcaaggcccggggcgaggtcatccactgcaagctgcgcgccatgaaggagctgagcgaggcggctgaggcccagcacggcccgcactcggcagtggcgcgcatttcgcgggcgcagtacaacgcgctcaccctcaccttccagcgcgccatgcacgactacaaccaggccgagatgaagcagcgcgacaactgcaagatccgcatccagcgccagctggagatcatgggcaaggaagtctcgggcgaccagatcgaggacatgttcgagcagggtaagtgggacgtgttttccgagaacttgctggccgacgtgaaaggcgcgcggggccgccctcaacgagatcgagagcccgcccacgcgaactgctgcgcctggagagccgcatccgcgacgtacacgagctcttctttgcanaagccggggcttggtggaaaaaagcaggcgcaacccctgaaacgtcatcgaagcttcaaggtaccaaaagagggcccgactacacccggccagggcccagggcgccggtggccggaaagcccctggccattcacaagggagaaaaaaccccttgccgggacc

SEQ ID NO: 87891 - DNA, 859 bp, Homo Sapiens
  misc_feature (264)..(264): n is a, c, g, or t
  misc_feature (557)..(620): n is a, c, g, or t
atcaatgtagaggatcagaatgactctatttctacccgcccaaaaagaaaatgcggaagacagaaattgaaatgtatgcttgtgatttgtgtgacaagatattccaaaagagtagttcattattgagacataaatatgaacaccagggtaaagaccctcatgagtgtggaatctgtaaaaaggcatttaaacacaaacatcatttgattgaacacatgcgattacattctggagaaaagccctatcaatgtgacaaatgtgganagcgcttctcacactctgggtcttattctcaacacatgaatcatcgctactcctactgtaagagagaagcggaagaacgtgacagcacagagcaggaagaggcagggcctgaaatcctctcgaatgagcacgtgggtgccagggcgtctccctcacagggcgactcggacgagagagagagtttgacaagggaagaggatgaagacagtgaaaaagaggaagaggaggaggataaagagatggaagaattgcaggaagaaagaatgtgaaaaaccacaaggggatgaggaagnnnnnnnnnnnnnnnnnnnnnnnnnnnnnnnnnnnnnnnnnnnnnnnnnnnnnnnnnnnnnnnnagcaaaaactgaaggtctgatgaaggatgacagggctgaaagtcaagcaagcagcttaggacaaaaagtaggcgagagtagtgagcaagtgtctgaagaaaagacaaatgaagcctaatcgtttttctagaaggaaaataaattctaattgataatgaatttcgttcaatattatccttgcttttcatggaaacacagtaacctgtatgctgtgattcctgttcactactgtgtaaagt

SEQ ID NO: 87892 - DNA, 468 bp, Homo Sapiens
tttagattctgttatcattttattgtaaaatattttttaatacagaataattaaaagagctttaaataccatatacacataatccagattcaacattaacaggttaccattctgaggccttttgacacatccccatcattctttcagcactcccctagttactagggcaattagatgtttcatactcatcctgctccagccttggatgtaatcatttattcaggagccctgattccttatagcggaaaaatggtattaagcactaggtatgctcactgctattgagatatccatagcccaggctgtctgagtggatgcagttagggaatatttatacattcatacacatatacagcacatctttatatgtatccttacacacacatttacagttatatttctttgtctaacaatatatattgaaaaatcatgtgttcacagtaaaacctccaatccagcatcatacag

SEQ ID NO: 87893 - DNA, 536 bp, Homo Sapiens
cttaacacaaccaaatctgatttgagaattattttgaggcttgcagctctgttttgtttgtggcataaatatatacatacatacatacgcaggtatatatgtatgcaaaaatgcttattgactgtggaaatgacagtttaagtcactctgtatttcttttttccatgagtctaatattgaattacgatgattcaaaggctctcagagtgttgtgctaacatcgtaaatggctaaacatccaaaaaagaaaacaattaaaacacaacggcacacacaattttcctaaagttggtggaaaataaggtaggcacagttgattgttttgagctggtagaaaaacctgggcagctagcagaggtctggacaaccacggaaagcccacagcaaggaccacaccgtgagcagccaccagagatttgggatggtagacttaccaagagtgtccactggcgggggggcacacggtgagaaagtgcaggatacacaattaacacaaaaaggaaaataataaagtcgagcaggtattccaaaaaaaa

SEQ ID NO: 87894 - DNA, 306 bp, Homo Sapiens
acgtaatgtcttagacaggtactgcgcccagggctgaaaagggagctgtctgcgttcttcccctgctttttcaggagctcacggaagaggccatgctacccaacaggggcaaacaacaaagaagagaaaggggtctttgaagatgacaggaaggtagtccattccaaccataaatgatgaactctgtgaggctcagtttcctcttctgtaaactgcagacaatcctcatagcatccctgtgaaaatggaaaagctaagatgtccagtgcgcttggcacagttgctaacatgtcaaaaacacccaaa

SEQ ID NO: 87895 - DNA, 527 bp, Homo Sapiens
aggagcctcgagctcctcatttccaaagctgaactgccccgtgtctgattccgatttctcttgagcgcgtttcggagccggcccagaacagagggaagccagacacaccatacccggcccaacagtggcagggcggctgcgggtgctggtcaagctgggtcacccggcactgagtgacgatcagcaaatactcagtggacgaaatatttgcagtgcagtgaggtgaggggcataaccgcggagcgtattcgaagagatgagagagactggggattaggccaggcttgaagggaagaatggtttgagcaccgaggacaagaattaattccccaggcctgggttccagccttgtgcggctatcacgtgcttgaaacctggctagtccggagtgagatgcgctttacgtgtaaaatacaggattccaaagacgtcgtataaaataatttgtatattgtttgcatgttaggtaacatttttaatgtattggattaaataaaatgcattaaaattatttttacattcctttt

SEQ ID NO: 87896 - DNA, 574 bp, Homo Sapiens
agaccctgtcccttgactaccaagcctccaaacacttgggaacactgcactattcagttctgtgctgtggtggttttaaactaggcccacaaattctttgatactccttttatactctttccttcaagaggaacccagttcctctcctcttaagtgtgggctacacagagtgacttgcttctaatgaatggaacatagcagaagtgatgtgtattacttctgaggttaagtcgtagaagacatggtggcttccatcttgctctctcttggacactcattctgagtgaagccggctgccatgttgtaaggacacccaagcaatcctgtggagagggccacatggcaagaaactgaggcctcctgccaatagccatttgagtgagccatttgaccaggaagtgaatcctccagccccagtagagccttcagatgatggcaaccctggctgacctcttgcctgcaactgcctgagaagatcctgagccagaaccactcggttaagcttctcctagacacctggcctgcagcaaccacgaaataataaatgcttgttgtttttaagttgctaaaaaaa

SEQ ID NO: 87897 - DNA, 381 bp, Homo Sapiens
agctggagcagccacctgaggacccagagctcaaagccacatgttgagaagggcagagataactgtatccactctggactgctgacctttgaactattatgttatttccagggaaatgcaaaccaaaggatgtggtctctgatctaatccttagagaatgtgaccatgaagacacttttcctacctggtaaacaaaagataatgagaaaagtgaggttggaagttggtttactgagccaggagctataacaggtgctggagcaggggtgtgatctgaatgaccagagggaaggactgatggaattggatggtgagagcctccaggccctttaggcttctccctgactttataatgaaatacaaaagtcagcctccaaaaaa

SEQ ID NO: 87898 - DNA, 457 bp, Homo Sapiens
aaggacagagccagatctggctgggccatctcaccttttggaggccgaacttgacccgggatggaaataatgaagcagccactggctttcccaaggcctgtgatcctcctggtcaccagaaatcccaagttcttatctcctgctcttccagtctcctctgttagggtactggttcccagcgcagagcttctgtgattaccagaagaacactgaaggagtctttttgtctgtttggagccagctgagatggccctgagatccacagagcctcctccacgcccctggatggaggcgctcctgctcttccaccctttgtatctctcacttggcacccattcccgtaattaatcacaaactccgtctgagctattcctttctaagccatgccctctgtactctgacttgccccaaatagacaaatgcccaataaatatttgctgattggctggaaagcaaa

SEQ ID NO: 87899 - DNA, 631 bp, Homo Sapiens
  misc_feature (595)..(595): n is a, c, g, or t
  misc_feature (617)..(617): n is a, c, g, or t
gcggccgccacccctgtacagccacagaatgaggatcttgatgcagggcctgagagagcacgctgcgccgtacttccagcagctgcggcagaccacggctccacgcctgctgcagttccctgagctgaggctggtgcagttcgactcagggaagttggaagctttagctatcttgcttcagaaattgaaatctgaaggacgtcgggtgctgattttatcacagatgattcttatgttggacattttagagatgttcttgaacttccattacctcacctatgtaagaatcgatgaaaatgccagcagtgagcaacggcaggaactgatgaggagtttcaacagagacaggcggattttttgtgccattctctccactcacagccgtaccacaggtataaaccttgtagaggcggacaccgtcgtgttttatgacaatgacctgaatccagtgatggatgccaaagctcaggagtggtgcgataggatcgggagatgcaaagacatccacatatacaggcttgtgagtggcaattccattgaagagaaattgttgaaaaatggaactaaagatctgatccgagaagtggctgctcanggaaatgactactccatggctntcttaactcagcga

SEQ ID NO: 87900 - DNA, 587 bp, Homo Sapiens
acgttcttattttaaagaaaggttgtgctcgctacactgctggtgtgtgcattctgagacctcttgtattcaatctgtgaaggatatgtgtattaatccgtacacccgtatagcctcaatatttgtctgaagacacttaaattctgacccataaaggaaagttctagaagcaatattttcacttatttaacattctccaaacaacatcaagcattgatacacactgaagagtgcgtttattttttgtatcactctaagtatgttggaatatgcaaggactgtggttcaaattagaatgtataaggcatattataatttagttcatactgaataagaaattaacagaacattgttcggttcacacgttccaaactttgagtgatttctggagttagacatagattttctattttgttttaatttgtcaaggtatttttcttcccttcatgaactttaggtacacataacttatgtcatttatttatggtcttttatacctagtttgtaaaattgtaaaatagcaaactaaatgcaaagagtttgcatttgaaaataataaagtagttgccgtatacaaccctgcaaaa

SEQ ID NO: 87901 - DNA, 907 bp, Homo Sapiens
ggccaggagctcagaccgctctttgagactctcccgaaggagaatgggagggtaggggcgctgccagactccttccctggtgggcctagatgaagacgctcaaggacccgcatgacctgcagttgcagtcgtgttctccgagttcctgtctctctgccaacgccgcccggatggcttcccaaaaccgcgacccagccgccactagcgtcgccgccgcccgtaaaggagctgagccgagcgggggcgccgcccggggtccggtgggcaaaaggctacagcaggagctgatgaccctcatgatgtctggcgataaagggatttctgccttccctgaatcagacaaccttttcaaatgggtagggaccatccatggagcagctggaacagtatatgaagacctgaggtataagctctcgctagagttccccagtggctacccttacaatgcgcccacagtgaagttcctcacgccctgctatcaccccaacgtggacacccagggtaacatatgcctggacatcctgaaggaaaagtggtctgccctgtatgatgtcaggaccattctgctctccatccagagccttctaggagaacccaacattgatagtcccttgaacacacatgctgccgagctctggaaaaaccccacagcttttaagaagtacctgcaagaaacctactcaaagcaggtcaccagccaggagccctgacccaggctgcccagcctgtccttgtgtcgtctttttaatttttccttagatggtctgtcctttttgtgatttctgtataggactctttatcttgagctgtgggaatttttggttttggttttggccttttaaataaagcccccgggttgaaccccttggaatattaaaataaatgccttttttgggcctttttcccc

SEQ ID NO: 87902 - DNA, 845 bp, Homo Sapiens
gggagagggttacaattcaaacgcgggcgggcgggcccgcagtcctgcagttgcagtcgtgttctccgagttcctgtctctctgccaacgccgcccggatggcttcccaaaaccgcgacccagccgccactagcgtcgccgccgcccgtaaaggagctgagccgagcgggggcgccgcccggggtccggtgggcaaaaggctacagcaggagctgatgaccctcatgatgtctggcgataaagggatttctgccttccctgaatcagacaaccttttcaaatgggtagggaccatccatggagcagctggaacagtatatgaagacctgaggtataagctctcgctagagttccccagtggctacccttacaatgcgcccacagtgaagttcctcacgccctgctatcaccccaacgtggacacccagggtaacatatgcctggacatcctgaaggaaaagtggtctgcccctgtatggatgtcaggaccattctgctctccatccagagccttctaggagaaccccacattggatagtccccttgaacacacatgctgccgagcttcctggaaaaacccccacagcttttaagaaatacctggcaaagaaaccttaactcaaagcagggtcaaccagccaggaacccctgacccaggctgcccagcctggcccttgggccgtctttttaattttttcccttaaagggactgggccttttttggggatttctgggatagggactcttttatccttgaacctggggggaatttttgggtttggggctttgccccttttaaaataaaggcctccgggttggacccccttggtatatttaaattaatc

SEQ ID NO: 87903 - DNA, 916 bp, Homo Sapiens
  misc_feature (856)..(856): n is a, c, g, or t
gggagttgcagtcgtgttctccgagttcctgtctctctgccaacgccgcccggatggcttcccaaaaccgcgacccagccgccactagcgtcgccgccgcccgtaaaggagctgagccgagcgggggcgccgcccggggtccggtgggcaaaaggctacagcaggagctgatgaccctcatgatgtctggcgataaagggatttctgccttccctgaatcagacaaccttttcaaatgggtagggaccatccatggagcagctggaacagtatatgaagacctgaggtataagctctcgctagagttccccagtggctacccttacaatgcgcccacagtgaagttcctcacgccctgctatcaccccaacgtggacacccagggtaacatatgccctggacatcctgaagggaaaaggggtctggccctgtatgatgtcaggaccattctgctctccctccagagccttctaggagaacccaacattgataggcccttgaacacacatgctggcgagctctgggaaaaaccccccagctttttaagaactaccctggaagaaaaccctattcaaagcaggggcccccaacccaaggaagccctggaccccaggcctgccccagccctgggtccttgggggccgccgttttttaaatttttcccttaaaatgggccgggcccttgtttgtggatttccggggatagggaatccttttaaccctggagcctgggggggaattcttggggtttggggttttgggccatattaaagttataggcgctccgggtgggaaccccctctgggaaatttataaataaaagtgggcctttttttggcgccctgttttttacaanagggtcgagatgcgaggaggtgagaagcgcaactgagcccggctggtggacaagtcacgc

SEQ ID NO: 87904 - DNA, 533 bp, Homo Sapiens
aactctaggatgcaggttccgtagtgggcggaccttccagcaaccagagtttggagaagcgaaggggacactggtggatctccaccatgaaaattggcgctttgggaatgtccaaaatttccagggcaaccgtccgtcgcccctccccgaccccgcctccttttaaaggagaaacggagtcccaaagaggcatgcagcaaggtgcagcggtagcccgggtttccttcggcttttgcggccttagcattatgtctaggtttgaactgtgttcagtctcttttacctccccctattcgatacgcagagcgaattcgatttgagatctgagggcagacccgaaccaggaaagcaactcagacgctagggccccgaggggcggagcgaagcggtacccgccccctggcggccggagccaatcagcgcgggcgttgagccggccaattagcgcgtgcagggggcggcctgccaatgagctcggggcccctcgggaggcggagctccgagcgccaccgggagggctacgcggcggccgc

SEQ ID NO: 87905 - DNA, 582 bp, Homo Sapiens
  misc_feature (95)..(156): n is a, c, g, or t
gtagcagctaggactacaggcgtctgccaccacgcccagctaattttttgtattttcagtagagatgggttttcacagtgttagccaggatagtnnnnnnnnnnnnnnnnnnnnnnnnnnnnnnnnnnnnnnnnnnnnnnnnnnnnnnnnnnnnnntaagccactgcgtccagccctctgccttcttttaaaataaatcaggtagacctaaactaacttaaatgttctcatgaaaatcagtaaacagcttggttttgtattaacttttagatctcctcaggaacctacatgtgacaaattcctaagtttaacaccttaatattactagtaagtagcatgagtggtagactatgtctggactccacatcctgccacttccattccagtatctggaccacatcaccactaggagtatggagttaatcatcagtatgacacagcattgaaattctaagcactgctgttactaattttgttaatgtatgcatataaacaggtatataaacactaaagccataaaagagcagtatctatttctttagtactaaaagaatttcaactgttagaaaaatgaattggctt

SEQ ID NO: 87906 - DNA, 529 bp, Homo Sapiens
acgctaaatcacaaagaggaaggaagtggcaacacagctcccgatgatgagaaaccagacacttcccttattacacaaggtgttcctactcctgggcccagtgctaatgtagccaatgatgccatgtcgatattggaaaccataacttctcttaaccaagaagccagtgctgctagggcttcaacagaaacatcaaatgccaagaccagtgagagagcgtcaaaaaaacttccatctcagccaaccactgatactagtactgacaaagaaagaacttcagaggacatggctgataaagaaaaatctacagctgactctggaggtgaaggactggaaacagccccaaagtctgaagagttcagcgacctcccctgtccagtcgaagaaattaaaaattacacaaaagagcataataatttaattctgctaaataaggatgttcaacaggaaagcagtgagcaaaaaaataaatcaacagacaaaggtgaaaagaagccagacagcaatgagaaaggagaaagaaagaaag

SEQ ID NO: 87907 - DNA, 500 bp, Homo Sapiens
  misc_feature (124)..(342): n is a, c, g, or t
cgccctgccctgcctgggccaccatgtttgtcgggttctcagagcctaaattcaatgattcagtgattgccccctataaccccctctgcggccctctatcatactcccctggatgggccactcnnnnnnnnnnnnnnnnnnnnnnnnnnnnnnnnnnnnnnnnnnnnnnnnnnnnnnnnnnnnnnnnnnnnnnnnnnnnnnnnnnnnnnnnnnnnnnnnnnnnnnnnnnnnnnnnnnnnnnnnnnnnnnnnnnnnnnnnnnnnnnnnnnnnnnnnnnnnnnnnnnnnnnnnnnnnnnnnnnnnnnnnnnnnnnnnnnnnnnnnnnnnnnnnnnnnnnnnnnnttcaactaccacctacacctgctgccccacccatggcctcggcactccttgagggccaggaccaggaccacctctgtgtccctggagacagcacagagtctagcatgcagctgagcttaataactatttgcaaagtgaatacatgaaaaaagaacaaa

SEQ ID NO: 87908 - DNA, 1131 bp, Homo Sapiens
agctcggagcgggcgctggaggcagctcgaggcgcgatgtcggtgccgctgctcaagatcggggtcgtgctgagcaccatggccatgatcactaactggatgtcccagacgctgccctcgctggtgggcctcaacaccaccaagctctcggcggccggcggcgggacgctggaccgcagcaccggcgtgctgcccaccaaccctgaggagagctggcaggtgtacagctctgcccaggacagcaaggccaggtgtatctgcacagtggtcgccccacaccagaccatgtgttcacgggatgcccgcacaaaaaagctgaggcagctactggaaaaggtgcagaacatgtctcaatccatagaggtcttggacaggcggacccagagagacttgcagtacgtggagaagatggagaaccaaatgaaaggactggagtccaagttcaaacaggtggaggagagtcataagcaacacctggccaggcagtttaagggctaacttaaaagagttttttcaatgctgcagtgactgaagaagcagtccactcccatgtaaccatgaaagagagccagagagctttttgcaccatgcatttttactattattttccaatacttagcaccatttcactaaggaaccttgaatacaaccaggatcctcctttgcatgcgactgtagctgcatttcatgaatagtttgaacccttgtcaatgcattttttgaaccaatgaatagaatcatagagaaaacttcggtgtttgttgactcaaagcatgtaaccttaagatgttgcattctaaactgacaataaagacctttcccagaataatgtagactcgtgaaagtagataaacattacaaagattaaccacttggatagacacaataatggcggggaggtgcgccgcatggatgttcgccaccccttggagcgtgccacgtagatactcggcgttcccaagggttgttttcgtgggcctgaacgagggccctcgcataaaggagaggagggtcacaattctaagaatctcggcatgcacggaccggagcagtagtccagaaccgcctgcagtgggctacaacagaggattgccggcgacaataatgctggaaggaggacccacgatggta

SEQ ID NO: 87909 - DNA, 462 bp, Homo Sapiens
tgaaagaaaaagtcgtatggaagacctacacaaaataaaagcaagtctcattacttttcaaggggagtgtagaagcgattagtctctgatgataataagggtaccccccatgtaaaactgccacaagctctcagaagtgagactttagctccttacaaatgctgagcagacgtgaacaccctcctgggagattgatgagtcctattaaccttgttgcatagatggaaactcagaaacaaagtgactctgaggattaagaggaagtcaatgtcagcaccaggattagaattcacacttgcctggtttctcagcccacaaccagctcccccatggattcctgctttgtctccctccccaagtgaggggacagggtgtttccaaactttaaaagaatcctgttatcctcaggcctctgccttgtaggaagatcctttcttttaataaattacagagctgaaaaaa

SEQ ID NO: 87910 - DNA, 500 bp, Homo Sapiens
  misc_feature (355)..(355): n is a, c, g, or t
gtgatgggtgtgaaagcattttgtaaactgtagtgcaagcatacggcaggggagtgaaccatactttcactagcgacttgaatgaggtgataaagaaaaggctcagaacttcagaaaatgcaagaggggcttgaccctggattggcagaggaaagcaatggtgggatcgataccttggagagccaaggaccaaggggttaagggtccatgaggacaggcctggatcatcaggaagctgagtgtggattccaagagtctcaaggttagagaagtcgcctagtccacctcccctctctgcttctcacagaagggtctgctgaacactctggtgacagagaactcacccaacatgttnccatggcagaggcttttcattagatcaaggtgacatctgttttactggagcttccaaccacgtgtcccaatactgcccttagtcacaggcatccaggtcctctctctcaggacagcactttgaataaatgaggacagctcccaaa

SEQ ID NO: 87911 - DNA, 475 bp, Homo Sapiens
atttccattgtaaccctgacatttctcaaagataaagcactttttgatcatgaaacacatgaaatctttgtgtgatgtggatcatagtttctcaggctcccttagataattgcttatgaatattgttctaactctgtgtaagaagagtagaaatctttgctaatgttagaaggtttgtattattgatccagaatgcattttgctagtttccaatggatgggagagtaaataatgctgcattcacaatttaataagttactttcccttgagccttaaggtaactttttcttttctgtcaactacagcactgaagttatagtaagtgaatgagattatcagttttcagggttggttttagagtactgtaaatcaattagctgtcttcctaaagagttacaactcccattcagtatactggataatgggtgtgtgggtggggctggggagggcgggagatagtttgtaaaaaagaaaa

SEQ ID NO: 87912 - DNA, 413 bp, Homo Sapiens
cctgagccgatcggggaaatgactcacttaaaagaagtctttatcaaccacagcagaatccacagttatatggcttctgggaatttccaggttttcaggtgctaagtgagggaggaagagggtatgaagcctcctggcacagagttgctggcaatgctctgccatgctggccctgctgccttcaccatcagccactcaggtatagaaaatgcagctacctcttaggagtccagagaggaggtctaacttaggactcaggccagtggctctaccatctaccagaacctgtgatcttggacaagtgattgaattctgtggatcctccatttcttcaaaatctataaaatggggcaataatggtatttctctcttagagttgttatgagggttaaataaagtgtacatatagctaa

SEQ ID NO: 87913 - DNA, 504 bp, Homo Sapiens
atggcctgccggtgcctcagcttccttatgatggggaccttcctgtcagtttcccagacagtcctggcccagctggatgcactgctggtcttcccaggccaagtggctcaactctcctgcacgctcagcccccagcacgtcaccatcagggactacggtgtgtcctggtaccagcagcgggcaggcagtgcccctcgatatctcctctactaccgctcggaggaggatcaccaccggcctgctgacatccccgatcgattctcggcagccaaggatgaggcccacaatgcctgtgtcctcaccattagtcccgtgcagcctgaagacgacgcggattactactgctctgttggctacggctttagtccctaggggtggggtgtgagatgggtgcctcccctctgcctcccatttctgcccctgaccttgggtcccttttaaactttctctgagccttgcttcccctctgtaaaatgggttaataatattcaacatgtcaacaaa

SEQ ID NO: 87914 - DNA, 1343 bp, Homo Sapiens
  misc_feature (95)..(95): n is a, c, g, or t
  misc_feature (557)..(570): n is a, c, g, or t
ccttcggtcatcgtgcagcctggtaagagacctttacctgtggaatctcgagatactcaaagaaagcgtaggatacacagatgtgattatgatgnatgcaacaaagtgtacactaaaagctcccacttgaaagcacacagaagagcacacacaggagaatagccctacaaatgaacatgggaagggtgcacatgaaagtttgctcggtctgatgaactaaaaagacatttccgaaaacatactggaatcaaacctttccagtgcccggactgtgaccgcagcttctcccgttctgaccatcttgccctccataggaaacgccacatgctagtctgattgcctctgtgtcctgcctcagcgtgactccccactcacctggctctctctctgtcctgcctcccattatctaacacattttttacatgtacattttaatttgattcagctggtctgaatctctgaatttatatcatccaaaacttccatatggtcagtagtagatgttctctaatcctccctctccttaccacgggtcagacctaaagaatgtgaacacnnnnnnnnnnnnnnctggggatgctaagcaaacccttcttacagatacgtttaatgtaataagaacaagggaacatgtaaactaacataaccaattgtcagttctccatgtattcctcaaaagaatgtcagagtaaatgtattagaaatacagtatccagacggctagttccttgccagagacattcttacctcgtgcccgggttgataatattttatgctgtgacagtgaaaacaagtgtggccccttgcaccggttagctagaagtacagccagatttcaagctagtgcagtcacctcttccgtcattcttcacaaatctggtcaaccgggatcttagacttcatctgaatcgagttcttggccctccttggtgcctgcagctcatatggaggtcttggccaccaaggggagatgagcccaaactttcgatctaggggggtgatgtgtagcagttcaagggaagggtgctgtgtttcatagcatggagtcggaggagagggccatttagcagggggagcagaagaggcaattcctccggggctaggggtggtcaatgacggttccaacattgtgtaagctgtgtgcagcattcccagagcttcagtctctgtggcatactcagcttggtaaaaccatgtgtgaaagccatataccgatggggttatccatggcaactatcttccattcctacatgtctttattatgagactcatcacacatggttagtagggactcccaggattattggcaggatggtaagaacctttcggggaaaagatggatg

SEQ ID NO: 87915 - DNA, 463 bp, Homo Sapiens
tgtccagcattcaataaaaattactagatacacaaagcaaaccagtgcatatgtttggtggtggtatgtgctgcggagaagagggaggcaggataaaggtatagtcagtgccatatttgggctgtaatgagtgagtcttgtggctatttggtggaagatgttccaggcggagcttggattgtttgaagacagtgggcagaggtgagagggagcaggagggaggagaggacggacagtaggtgggggccagatcatgaaagtgctggtaggccataataaatgcatcaattatctgtgttgctgcatcataaacaaccagaaaacttagtgtctacattggatgcaatgtacactgttcaggtaatggtacactcaaatctcataaatcaccgctaaagaacttatccatgtaagcaataatcatgtaccccaaaaactattgaaataaaaacaaaataataat

SEQ ID NO: 87916 - DNA, 513 bp, Homo Sapiens
gacgccctttctacctttctctgtaccctgggtcactccaaaaggaggaagtggactaaggtatgccttttctcccctctctttccagatacttaacaacccatcttcaagcctgcactttcctcgagtgcagcctggatctcttttaatcgtcagaccctgaagtttgctttaggaaagtcccaacttcactcacatatagagtatttaaactctgctggaaggatgttaggttactcttaaatcaaaccctaactgctgctgagaaacagttggccctgtaggcagcaaagaaatttggagatgaactttgtgtctcatacagtgccagggaaggggaagagccttatccaattgggagagtaatagtgcccttaaaggaccctaaatgtgaccataataatagcattggtgagtggagaagaaaactctttcaaatgcgtatattggagaagccacaaaggactatagccaaacctattaactactacaagctttccataatagataata

SEQ ID NO: 87917 - DNA, 439 bp, Homo Sapiens
  misc_feature (24)..(24): n is a, c, g, or t
  misc_feature (67)..(291): n is a, c, g, or t
gggaataggtttcaacatatgaanttgggggaggacacatttggaccacagcatgaacctttagaannnnnnnnnnnnnnnnnnnnnnnnnnnnnnnnnnnnnnnnnnnnnnnnnnnnnnnnnnnnnnnnnnnnnnnnnnnnnnnnnnnnnnnnnnnnnnnnnnnnnnnnnnnnnnnnnnnnnnnnnnnnnnnnnnnnnnnnnnnnnnnnnnnnnnnnnnnnnnnnnnnnnnnnnnnnnnnnnnnnnnnnnnnnnnnnnnnnnnnnnnnnnnnnnnnnnnnnnnnnnnnnnctttagacaaattgttaagagtatcatgtactacacttctgaaacttaacgtgatcatcaccactgacagatgattcacagagagagactgtttgaatcttgtctcactagtttttcctgtgcaaaaataaaatggacagaattgcaa

SEQ ID NO: 87918 - DNA, 400 bp, Homo Sapiens
tcttcctctgaagagcctgaggattcctcccttctcccaacttcccatacttcttttatttgtttggctcattttcaagagcattctagaatttctctaaaggagggccttagtggtggccatctatttaaagcgctaaggtgggtagaacgatgctagaggacatgtttcaaagttgcctggcagagcaggtaagctcctttccttcgcaggaaacgtaggataagggcacagctcctgcaagcagcctgcctgagttcgagtgctaggtgtctcactcagcttagtgatcccagacaaggttcttagcctccatgtatctcagtctctctttctatggacttaggatagtaatatcaggattcttgcgatgattaaataaaataatgactgttaagtt

SEQ ID NO: 87919 - DNA, 752 bp, Homo Sapiens
ccaatctgaagtgggagcggctgcaggcagtcaacaaaaacatcatcaaatgaagcctgttccaatgaacggtctgagtttgaccagctatcacatctggtgggtagactggtatggtgcagtcttccagtctcgcagttggacaaaaccagataatctggaaggaagagaagctctgactcacttctggtttcctcagtggctacggcattagtgtttgggtcatctcttggcaaagaggagctggcagcatgggcggtaagaagggagctggcagaggatggctgcagggaggagcgcgtgtaagagaggctctccatggaatctgctgcaccatcctccaggtggccaaggttgcagacctgactgatgctgtgcacccacacctgcatgtcttgctcagttttggccaccaggtagaatgtacgggaagtagtcttgacaatgaacacgaaattattctgaaattccttccgaacaaagctggggcccacatgcttccacactgcacactcgctgaggtctatcacccggatgggcttgctggagtgcttgttcctgtagtactccaagacatcggggttgccgctcatgcggcctcgccggaggacaaaccagcgcttgcgccaggcgtagcgctgtagcttcctctcggggggcgacttaacgagccagccggtgcacactgcgtcgcccgcactcatcgtggccgccaccgccgcttcctccagctgggccagccgcccacggca

SEQ ID NO: 87920 - DNA, 3911 bp, Homo Sapiens
  misc_feature (3623)..(3623): n is a, c, g, or t
cggtccggaattcccgggatgacggcgggtgcggcggggccgagcccgcacgatgcctcacttcaccgtggtgccagtggacgggccgaggcgcggcgactatgacaacctcgaggggctcagttgggtggactacggggagcgcgccgagctggatgactcggacggacatggcaaccacagagagagcagcccttttctttcccccttggaggcttccagaggaattgactactatgacaggaacctggcactgtttgaggaagagctggacatccgcccaaaggtatcgtctcttctgggaaagctcgtcagctacaccaacctcacccagggcgccaaagagcatgaggaggccgagagtggggagggcacccgccggagggcagccgaggcacccagcatgggcaccctcatgggggtgtacctgccctgcctgcagaatatctttggggttatcctcttcctgcggctgacctggatggtgggcacagcaggtgtgctacaggccctcctcatcgtgcttatctgctgctgttgtaccctgctgacggccatctccatgagtgccatcgccaccaacggtgtggttccagctgggggctcctatttcatgatctctcgttcactggggccagaatttggaggtgctgtgggcctgtgcttctacctgggaacaacattcgcagcagccatgtacatcctgggggccatcgagatcttgctgacctacattgccccaccagctgccattttttacccatcgggtgctcatgacacgtcgaatgccactttgaacaatatgcgtgtgtatgggaccattttcctgaccttcatgaccctggtggtgtttgtgggggtcaagtatgtgaacaaatttgcctcgctcttcctggcctgtgtgatcatctccatcctctccatctatgctgggggcataaagtctatatttgaccctcccgtgtttccggtatgcatgctgggcaacaggaccctgtcccgggaccagtttgacatctgtgccaagacagctgtagtggacaatgagacagtggccacccagctatggagtttcttctgccacagccccaaccttacgaccgactcctgtgacccctacttcatgctcaacaatgtgaccgagatccctggcatccccggggcagctgctggtgtgctccaggaaaacctgtggagcgcctacctggagaagggtgacatcgtggagaagcatgggctgccctccgcagatgccccgagcctgaaggagagcctgcctctgtacgtggtcgctgacatcgccacatccttcaccgtgctggtcggcatcttcttcccttctgtaacaggcatcatggctggctcaaaccgctctggggaccttcgtgacgcccagaagtctatccctgtggggaccattctggccatcattacaacttccctcgtgtacttcagcagtgtggttctctttggtgcctgcattgagggtgtggttctccgggacaagtatggcgatggtgtcagcaggaacttggtggtgggcacactggcctggccttcaccctgggtcatcgtcatcggctccttcttttcaacgtgtggcgctggcctccagagcctcacaggggcaccacgcctattgcaggccattgccaaggacaacatcatccccttcctccgggtgtttggccacgggaaggtgaatggtgaacccacatgggcactcctcctgacggcactcatcgccgagctgggcatcctcatcgcctccctcgacatggtggcccccatcttatccatgttctttctgatgtgctacctgttcgtgaacctcgcctgtgcggtgcagacactcctgaggacccccaactggcggccccggttcaagtactatcactgggcgctgtccttcctgggcatgagtctctgcctggcccttatgtttgtctcctcctggtactatgccctggtggccatgctcatcgccggcatgatctacaaatacatcgagtaccaaggggctgagaaggagtggggtgacgggatccgaggcctgtccctgagcgctgcccgctacgcgctgttgcggctggaggaggggcctcctcacaccaagaactggcggccgcagctgctggtgctgctgaagctggacgaggacctgcacgtgaagtacccgcggctcctcaccttcgcctcccagctcaaggctggcaagggcctgaccattgttggttctgtcatccaggggagcttcttggagagctatggcgaggctcaggccgccgagcagaccatcaagaacatgatggaaattgagaaggtgaagggcttctgccaggtggtggtggccagcaaggtgcgggaggggctggcccacctcatccagtcctgtggcctgggaggcatgcggcataactccgtggtgctgggctggccctacggctggcgacagagcgaggacccccgtgcctggaagaccttcattgacaccgtgcgctgcactacggctgcccacctggccctgctcgtgcccaagaacatcgccttctaccccagcaaccacgagcgctacctgcagggccacatagacgtgtggtggatcgtgcacgacggtggcatgctcatgctgctgcccttcctgctgcgccagcacaaggtgtggaggaagtgccggatgcgcatcttcaccgtggcccaggtggacgacaacagcatccagatgaagaaggacctgcagatgttcttgtatcacttgcgcatcagcgccgaggtggaggtggtggagatggttgaaaacgacatatctgctttcacctacgagaggacactaatgatggagcagaggtcgcagatgctgaagcagatgcagctgtccaagaacgagcaggagcgagaggcccagctgatccacgacaggaacaccgcgtcccacaccgcggcggcagccaggacccaagcgccgcctacgccagacaaggtgcagatgacctggaccagggagaagctgatcgctgagaagtacaggagcagagacaccagcctatccggtttcaaagacctcttcagcatgaagccggaccagtccaacgtcaggcggatgcacacggctgtgaagctcaatggcgtcgtcctcaacaagtcccaggatgcgcagctggtcctgctcaacatgccaggtcctcccaaaaaccggcagggagacgagaactacatggagtttcttgaagtcctgaccgaggggctgaacagagtcctcctggtcaggggtggcggccgggaggtgatcaccatctactcctaatgcccaacagcatccacggcactctgggacaggcacggaggacggcgtgggcagcctgggcctgggcttggcccagggaaacagacggcagacacacctgtcccccagtgatgccacccaagctgcccatggggcttcctacggaagtttctaggcccgtcacctagggctctcctgttcagccttaacaggctcagcaaatcagggcgtgggctggacgatttccttgcatctgagggcagacgctgctaccggagtgacctggacgtggccagatcttctcgcaggtcacaagaagccagtgagcccttgcctgggntttctggaaggtctttttccttggctggatttacccagagggttaggttgcatttctacccccatccagaaaattcttggaagagcccccggaactgaagctgtcccctgatgaggaaggtgaaacgtccagccctggccatggctcccgctcagggccccgggcccctgccaagtcactctggttccttggaatgggcttttgggggttcctggaaccctccaagggcaattggaaactgggaaggaacttcgtgtcccattggcccgtgtgtccaaccctctcgga

SEQ ID NO: 87921 - DNA, 543 bp, Homo Sapiens
agtctatctctgtcatggttcatatatgtgtgagcatgacggactgaagcccgtattatccacagctgacaagtgtcaggccgacagttcaatcagcccttcctcgagatgatgcccagggccccgtgtttgaagtagggcaataaagcaggcaacacaatccgggcaaactgatccgatccctgtatgtaaaggggattctgcttaataacacagtgtggtttttttccctctccaaacacattagtccttaaacagtgagttggcccttaagaaaatctgtgactgacatgaaaatgctgaagttttaaggtggttggtttatccgtaacctcatggggctgcttctttgtgcagactagttttgtcaaagtcagaaaaataatgtattcagtgtctgatcatttttagggagttattcgaatgggattttaagtcagacatcctgatgttgacacagggatcattttcttgtccttttgttttacatttgtggaacagatcatttgcattggctaataaaattaaatctatgaaatgcaa

SEQ ID NO: 87922 - DNA, 509 bp, Homo Sapiens
cgagacagctcctccacgcaacctaccacagactctgtaattagagtggcctgaagaagccgggagaggctccatgaccccggcaggctctggccaaaccttgctgcgtttcatggagcccctccctgtccgcgcctgggacgcactggccccaacaggttcctcgactcgaattcgctgtttgggttgctctgtggtttcctcgctgactgaaagtggatgagaataagaaggaaactgagagatgatcaggcaggccagccttcgcgatttatgaatgaggagcctcccaccctgtagaactgcttggattagaagtgggcaagttatttaagcttacatgcatgcttataaagcttctgttttcacatgtagtaaggtggaggcttgacgacatttacctaatgagctgttgtttggattaaatgagatggttggtgcatggcagtcatttagcacaagtacctggcaatgtaagagaccaataaaagctgggatttattttcaaa

SEQ ID NO: 87923 - DNA, 469 bp, Homo Sapiens
aattcccagaattctggaaaacttgattctgaccatttttgccagtgttcttgttgctttcgtggaggaaattttaaagattcttacttctccattttcactgtccaagcaaaagggctcacttttgaatgaagacactgagacctgaggggagcaacttatcaaagttcttataactataaatgggtgcaaatgcatatttttaaagattgaggtaaaattcatatgacataaaatgaaccattttaaagtgaacaaattggtagcatttagtacatttacaatgttataaaactgccacctttattactttcaaaacatttttgtcactccagaataaaacctcatgtccattaagcagttaacttcccattccctcctccccacagttcctggcaactagcaatagactttctgtttttacagatttactattctgtatatttcacataactggaattatacaacc

SEQ ID NO: 87924 - DNA, 480 bp, Homo Sapiens
ccatttgcttaggagatcttcctccatccttttattttgagcctatgggtgtctctgcatgtgaggggggtttcctgaatacaacacactgaggggtcttgactttttatccaatttgccttcaaagtaaagtttcaaagaaaccacctgttttctttgtactaataactttgtattaatggggttttggccgaacgttaaaaaatgttatcaggaaatatattatgtacagaaagtaatgtaatgaagcattatgaacttggaaatctggcaccaaatgtaagacactgaacagtttgaggacagtttaagtcccccaaccccaccatgttcttctcccttgatcctattccttctcagaagtaccttctatcctgaaaactttgaaatcgttaatttttttctacagatttatatatgtacacaaaattttattacagtggtattcaactctaatttttcttttccccccacttcaga

SEQ ID NO: 87925 - DNA, 469 bp, Homo Sapiens
gcacccaaatctccatctcaggcgctacttctggcaaggcatatcatgaggctagtgaagcacctacaagaaacttataactcaaggttgtaaaaatggcatggtgactcttacaatcatatcacagtgggcctctccaacaatttaaacctcatgacctaggtgaaagctgtgaaaggatccacattaattcttcagaggcagggctaagactttcaagactgaaaagagactagcataaggagacttaacaggaacccagtcaaggccattcatggccatgggaccacgcataaatggagaacgagtaaattttgctaagtccaaggacattggagagatagagtcactattactgatatggtgactgagtcaacaacatactgccactatgaagtaataagaaaataaaaagttaaaaaatgtaacagataacagttggagggtgaatatattttaaatcaatcag

SEQ ID NO: 87926 - DNA, 1026 bp, Homo Sapiens
tgcggccgctgcgggagccacaggaagtgaagagcttccgccgggagaccgcggctgcaggaacggaggcggaaggggccctgcggcgacgacgtcgtcgacgggggtggccgtgggagctgagcacggagaagactccctctctcggaagccggatcccgagccgggcaggatggatcaccaccagccggggactgggcgctaccaggtgcttcttaatgaagaggataactcagaatcatcggctatagagcagccacctacttcaaacccagcaccgcagattgtgcaggctgcgtcttcagcaccagcacttgaaactgactcttcccctccaccatatagtagtattactgtggaagtacctacaacttcagatacagaagtttacggtgagttttatcccgtgccacctccctatagcgttgctacctctcttcctacatacgatgaagctgagaaggctaaagctgctgcaatggcagctgcagcagcagaaacatctcaaagaattcaggaggaagagtgtccaccaagagatgacttcagtgatgcagaccagctcagagtggggaatgatggcattttcatgctggcatttttcatggcatttattttcaactgggcttggattggtttatccttctgtatcaccaataccatagctggaaggtatggtgctatctgcggattggcctttccttgatcaaatggatccttattgtcaggtttgctgattattgtactggatatttcaatggacagtattggcttggtggatattgcttgtacttggccttgctcctttttcttcagaggattcgttaattatctaaaagtcagaaacatgtctgaaagtatggcagctgctcatagaacaaggtatcgcttcttatgtagagactgcatcaaccgacattcctttcttataccaacgtgacacttcagatcatctgtaaacctacacttcattgaagctactaattacggagacaatagcgaagaacagacgggttccaactgccg

SEQ ID NO: 87927 - DNA, 562 bp, Homo Sapiens
  misc_feature (397)..(421): n is a, c, g, or t
ttttgtcattgtagtgtacatggagtgatcattttactaacataaatattttctatgtgtgtttcagtggatgacaatcgagcagcagaagaatggtgtgcctaccctttaatgctgcagtttaagagaacttgtattgtgtcatttcagattgtaggctgagagttgtaaatagtgaaaatttgagtacttctattatttgttttggttagaaagtgaatttaaaaaacaaaccaaactctaaactttctcagattaaaagtcctgagacctgaagattgtaatattcatgtctgtgaagcttttaaacattacacttgagatcagtcatgacttgatattcaggtaaattttcttttccaagaagcttttgaataagcatatttcctccaaaggnnnnnnnnnnnnnnnnnnnnnnnnngagtgtagattattttaaagcactaattgcattacattggtaactgcaatataaaatagccattattgttttgtgaagcatggttgaaattagctagtggtcccttttgaatttcatgagcctctcaaaaaagaaaaactt

SEQ ID NO: 87928 - DNA, 839 bp, Homo Sapiens
caggaccagcagttctgcaggggcgtgctggggtggtttgggagtgcacagctgaacgcttcctgtttggattttacactcaccttcgtgttttaaagaagcctcagagtgcactgcagctctgtcagggccccattcccagcagaggcttcaggtgctttgtgtagagtccagggcagctggagctttgttggggagacttctggacccaaagggagctttcccaagaagcctttgatggccacactgtaggcagcagtgactaagcactggcagttccagaacatttacccaggtatatgttactaaaacaggctccacctcagtttatcaacattataagttactgttctaagaaaagtaaatacagttccagatgggttattgcagattaacagaaagacactcaactggactcatgtccctgcaattaaacttacttcaaccttttggaaagttatcaaaatctaaatttggaatgaatgcatttcctattttttgtctacttttgggtgataaaaagtactagcccttatttatagatatgagaaacataatgttctaaccaacaacattatggtatttgtgtgacttttatttgaaaaaatgtgagcagtaatttgggttagcctaccttcattaattctatcacatagatttcagtttttagaagggtttctgtcatcatggaagaggtggtctgggactaggtacttctcgtcttgtgagctaaggcttgtgtcatgaaagacaagaggcctctcttaacagcccagtccttgtctgcagggggaggcctgagcatttcccagccccagtgtccacacatctcagaaaaa

SEQ ID NO: 87929 - DNA, 462 bp, Homo Sapiens
tttcaggagagcaaaacaaagttgctctggacggaagatgcctggggcgggagaactgtgttggggccggagaactgtgttgaagactgaagccccacttacccagaacgtccaaaaaggacgttagtcttcccactgcctggataggcaatgagggattactagctgtaactgaggaaagcttctcacaagaaagaaataccaaaatcatcaaacagaaaactagagaaaacggacccaatgatgggagaagaaaatgtctttgaaaatcattatctttaaatgtaagatattttaactgtaaaacaggaataagagcttatttttgaaaaaggcaatattcagagaaacaagagttcttggaaatcaaaaatgattagaggattcaaaaacaaaataaagttccttttgtaaacaattagaaaaccagaaaaaagtaggaaatgactgttttgaggtaaa

SEQ ID NO: 87930 - DNA, 1360 bp, Homo Sapiens
  misc_feature (532)..(534): n is a, c, g, or t
  misc_feature (537)..(538): n is a, c, g, or t
  misc_feature (540)..(540): n is a, c, g, or t
  misc_feature (547)..(654): n is a, c, g, or t
  misc_feature (656)..(656): n is a, c, g, or t
  misc_feature (672)..(672): n is a, c, g, or t
  misc_feature (719)..(721): n is a, c, g, or t
  misc_feature (736)..(750): n is a, c, g, or t
  misc_feature (789)..(798): n is a, c, g, or t
  misc_feature (801)..(809): n is a, c, g, or t
  misc_feature (902)..(902): n is a, c, g, or t
  misc_feature (1051)..(1051): n is a, c, g, or t
  misc_feature (1100)..(1100): n is a, c, g, or t
  misc_feature (1103)..(1103): n is a, c, g, or t
  misc_feature (1238)..(1238): n is a, c, g, or t
  misc_feature (1332)..(1332): n is a, c, g, or t
gaatgcatctcatcaacttaaaagtcagtatcatattattatcctcctgttctgaaaccttagtttcaagagtctaaaccccagattcttcagcttgatcctggaggtcttttctagtctgagcttctttagctaggctaaaacaccttggcttgttattgcctctactttgattctgataatgctcacttggtcctacctattatccttctacttgtccagttcaaataagaaataaggacaagcctaacttcatagaaacctctctatttttaatcagttgtttaataatttacaggttcttaggctccatcctgtttgtatgaaattataatctgtggattggcctttaagcctgcattcttaacaaactcttcagttaattcttagatacactaaaaatctgagaaactctacatgtaactatttcttcagagtttgtcatatactgcttgtcatctgcatgtctactcagcatttgattaacatttgtgtaatatgaaataaaattacacagtaagtcatttaaccnnnaannanaaacacnnnnnnnnnnnnnnnnnnnnnnnnnnnnnnnnnnnnnnnnnnnnnnnnnnnnnnnnnnnnnnnnnnnnnnnnnnnnnnnnnnnnnnnnnnnnnnnnnnnnnnnnnnnncnaaccccggaacagccncctctacggccaggccgcccacccacgcaggaacaagaagaaggagnnncttggggggggccgnnnnnnnnnnnnnnngacaaaaattttttataaaaccacccctccctgggtgcnnnnnnnnnncgnnnnnnnnngttggcacgatagaacaaccacgacggttgcctcgctctgtcctctccctccctcacagaagaaacaaccacccccgcgcgggagacacaaancaccgtggggcgcgggtgtgcgatacctcccaccacacccagatagaacaaaaaacacacacccgcccgcggcggcgcgaatcacaaccacgcatggaggtctcctctatagtacaacacacaccacgatagagaaggggcgcggcgtncgttgcggaggggaagccgcacaccggacggagggcgcctcaacactcnacnagaggaggaagcgcgtccgcactcgacgcgaccgcgtctcgctccccacataatacatatgatcgtctcctcgcgccgccgctggcactgggtctcataattagtggaggagaacaacgacgcgtgtaggagtgnttatatatataaataagacactctcacacgcctccgagccaagcgtgtggaaacatacactcatccacgcagaggcggcgggagacatgataantcgttgctaccgctgctccacccctcta

SEQ ID NO: 87931 - DNA, 511 bp, Homo Sapiens
aacctttttaacagttttaagataaaattggctgcagccttggcaagatgtcgaatcaagcatgatgccctttcaatttaccacatccttccagaaacagttaggaaacaggaactaagggcctccactttaccactttatgcttggataaatacttgtaaaatcagccctgaagaagtttataataatttgaagagaagaggctataataaagtcaaatctgtattgcatattgatgataaagtatttgctgtggatcaacattgctatgatgtcttaatttttccatctcatcttaaaaatgatcttataaatatagatcttttcaaagattacaaacttatatttcaggtaaactaatatttactttcattgtgattctcaacaatccaacctagccaaagaacttctccacttaaaaataaaacctaacactgtttatatttttatagattatcagggaggttaataacccctaattgtcaccttgaataaaattaaaacctataaa

SEQ ID NO: 87932 - DNA, 622 bp, Homo Sapiens
aaaaaaattaggtaaggtagcaagatatattagcatacaaaatcagtagcttttatatagagagcaataaccagttagaagacataatggcagaggaaatctcatttactagcaaataaattaaatacttagggataagcttagcaagaaatgcacaaaacctacacaaggataattttaaaacactgctaaaaggcacaaaatagacttgaataaatggaaatacatctcctattcttggataggatgacaccacattttaaagatgttagttctctctaaatcagttaatatcatataatatcaataaaataccaatgtaccttaaaaaatgaatttagacaagttgatactaaagttcacatggaaaaacaaacatgtatgaatagccagaagcacaataggaaaaattataagggggactagccttgccagttgttaaaacatactataaagtctctataattaaaacagtgtggtaccatgcacaagtagaccagtggaacagaaaacccagaaagacccaagtacatatggatcctggattgaataccgaacgagaaaaacaacattactgggaaaacagctacaattcaaataaagtatgtagataataggattg

SEQ ID NO: 87933 - DNA, 538 bp, Homo Sapiens
gaaccaaacggggctttggtcatttaccccacttagggcaacacgggcggctggttggtgacccagttaacccttaccacattgcgctttaagggcacgtggaagcggggttacgcaaagcgttcggcatccaacgccttcaatggtgtgtagggtcctgtacgtcctgcgttccgtgtacgtggatgatgacagcgaggcggctggcaaccgcgtcgactatgccttcaacaccaatgccaaccgcgaggagcctgtcagcctcaccttccccaacccctaccagttcatctcctccgttgactacaaccctcgcgacaaccagctgtacgtctggaacaactatttcgtggtgcgctacagcctggagttcgggccgcccgaccccagtgctggtgaggacgactcacttccaggcatggagcctgcttgcctttgtcccctccacccccacccacccctgggtcccagagtggggagccccatcctgtgagctcttggggatcgggaggtaaaggaaattcacagcatgtgacag

SEQ ID NO: 87934 - DNA, 721 bp, Homo Sapiens
catcagaacaacaaaagctttgttagaagtttgtctgtggacaggatttgaactcgaggaaaagctacagagtgtgatgaagccccataggaaggcctggagaagctctgccccacttgcagccctgcagcttggtgctaacttgcctcacacatcgagtgccaagacccatgctgggccattgtgatcatccatgtctctcccccggggaatgttcagcatcagaggccatgcatttgacgacagggaacaaaagaaaggagacgattatgtgagaaagctctggtgaaaataccaaataaaaccactgaaaagaagttctttggcttgctgaaaattcagtacttgagtaaaattcatttaattttgagccttccctacagagttctcttggcatgccctgttgtgctgcagcagaaaacaaggcaaagtcagagttattttcctcactgcagactgaatagaagttggaataaacgtgagtatatccagaaacagcaaattcacccacctacagtaaggagaagactcatagacctttgaatttggtggcttcaggggttgaagctgtgagaaaagaggaagatctcaagtccgtaagttgcacctctagaaattcaagatggatcccgagtggctaactggatataaactcaaaatagacttaagcagccatttgctgattggaggtcacacaaatactctgagttccctccaaaat

SEQ ID NO: 87935 - DNA, 549 bp, Homo Sapiens
tgtggctgaccgatccatagtgatgctttgagcacaaggaaggactttctggaatctacttatctgaccaagaaagcttctttccaaaagaaatgcaattgtcttgagacttcttccctagggatctgatcaactaaccagaaaagagcaaccaccagagaagagactattgtggtctactctatagaagggatcatgctttgaacctcatcttgaaaggagattcaatctttccttcttgctcctaatatcaacagagggtggaatatatgtgcaggaacaaataatatctctgtactgggaagtgcaagattgtcttctagtcaccggcacttgacacactaaattgatgcacatccattttaaacccggcatttgtgctccatatcttgccctttgacctatttggattcatgtgggaatgtgaccctctgcttgaataggatgatgacattttcaaagaagctaaatcttaccaaaaatcagattctggtacgattgtgatcaagtagtataataaagctaatcgtggcttgcagaaatcgaaaa

SEQ ID NO: 87936 - DNA, 606 bp, Homo Sapiens
caaggaaggactttctggaatctacttatctgaccaagaaagcttctttccaaaagaaatgcaattgtcttgagacttcttccctagggatctgatcaactaaccagaaaagagcaaccaccagagaagagactgtgggtgtcattgtgactggctgctacctccccatgagtcttctaaaataaaacctgcaaattcacatcttccccatgcttccagagaatgcatattcttcctttgaaaaaagaaaaccaggtagtcgtacagtgtccagaaggcaaaaggacaagtatgcactgccctacttacctactttccacactgctgcacaggaaaatctgacagaggacaataacaaacatctcaccagctcatgcgttcttttttgatcctaattccgagagactcaccaaagacatgaagagaaaacaaacaatacttttcttggaaatattgtaattgctggtacatttgttgttctggcataaagtagaaattgtcaggtaaacattgcttccttttggatcaaaaagaaatttaaccaaataaatgcaagaggtatgaggcaagataatgggaaataaatgagatttaaaaaatcaaaaa

SEQ ID NO: 87937 - DNA, 739 bp, Homo Sapiens
tgcgcctccactacaggaggttcaccgtggccaccacctgcttgcagccggtgacggcaaactcgcggccagccacgcggtagaagctgagctgcgcggccaggttctccgcgcgggcctggtcaggaaagaagccctcacccgccatctcgtcccggaagcagctgaccacatcccgcttgtccagcagcagaaacggcacgatggccgcggcctgccacagcggatgctcccgggacagcacagccagcaggctggcgcgcaggtcttcttccgcctgcgccgctgcggcctcggcactgcggaagccgtcggggcgcaggggcagcgcgcgggacgcgttctgcagcacgaagcgcgtgacctcggcgccacccgcgccactgaggagcacgtagatggcgttgtggaagtggtgggagcgctgcggctgcaggaagccgaacagctcgtccagcagcggccgcggcatgagctccacgtcgtccagcaccaagagtggggtcttctcctccgcttcggcccgcgccaccacgtcggccacgcgccgcgccagctcctcgcggcagtcctgtgcggcgcgcgcctcggggcagtggtgccgcgcatggtattgcagcacgagcgcgctgtcctccagcaccgagcggaagtggcgcgccagcaggcggcccacgtggctcttgcccaccctcgtgccgaattcggcgcgccgtcgacttcatacctctctcccacc

SEQ ID NO: 87938 - DNA, 654 bp, Homo Sapiens
gatgcagagaacccaagagtgtcttatctgaaataccaccaggaatgtctggacacagtagacaaagttttttcaactggacgccttaggatacatgcttccaaaaacaaagtagccaaaaagaaaccagagtcacagaatatcagagccaaaggaacatttggaggtaactcagtacctcctccttttcaacctacaggggagatagtggaagagaagcagggatgggtctgccttctgtgcccacaattcattggagattgttgtggtgaagaatttcttttatgatgaaggagaaataaactcccatcagctttaattcaggcaggtttattgaaaaggtgaagaagcaccttgcagaagcaaagcatggctgaggcttgtgggctctgtctggacaaatgagcagccgacagtggctgatgctgcccctgactctggggccgtgcggtctgtggttctctgtgagcatctcttctattctcttgcaccttccctcagcctggcagtctctgtgtactcttcaacccataattgagcgaggctgtaccagccccaatgccatgtagcactttatgtcaaattagaaaggcatgaaataaactagccctttataatacaactgttggaacaacagttgaaaataacaataaa

SEQ ID NO: 87939 - DNA, 481 bp, Homo Sapiens
ccttgtacacactgttccagccatggaagaatccttccattcttccaacaagccaaacttttgtttttatctcagggtctttgttcttgctgtcccctcagcctggctggttccttcttgtcatgcagttctcattataaacatcgtttctccagaagcatcgtttatcattctatataaagccatctctccctacacatacacagatgtgcatgcacacacatgcacacgttactctcaatcccattaccctgttcttttctttttgctgtacttcatcattctctgaaattaccatgtgtttacatgttacatagactttctgtgaaaacaacagctacagatctaaaccaatcttgagtgagtgactcaaaaatcacaagcatcgctgtcactgatgatgtggttttctgaaatggagaacaactcttagtaaaggtccaaacaaaacaaactacaagtgtctctccattcttcatag

SEQ ID NO: 87940 - DNA, 557 bp, Homo Sapiens
ctaacctccgccgaattctctgcaggattgaccactgggtccacgtgtgactgagagatgtgagaagctcagcagatgggcagggatgactcactcatcatactaatgtgattcaacaaagaaaggcatgttttctcttccaaatatgctgtgtgttcaagtctgagatgctccaggattcacaaagttcccacagcaggggctcccgttcactctgggggcacctgccacagcagctcccattagcgcacgaaggataccacgctggctaccgcaaacggggcggagtaggctgcagcgaagccttgcaggccgatgaccacgtagcggcatcctttgatgatgaccttcccgacattcttgccgtacttcttcagcttcctccggtacctcttcctgggctgctcgctcggcgccggctcctccagtggctcgtagcgctcgggcaggagggcgaagtgcaccctccgcgcgccccgggtccccgggccccgctcgtccgccgcgctcgtcccgctctcggccgccgcctccgcctcgtccgcgtactccaggtg

SEQ ID NO: 87941 - DNA, 484 bp, Homo Sapiens
  misc_feature (316)..(335): n is a, c, g, or t
cagtcgcccgcatcgcggctctcgctaagatcggccctaagagagaatggaaggctgtttcctagaaaggagcattggtggcggctgctgggaagacacggggaatggaacgggcctttgcttccgcagcacaaagcgtcacgaggtggggaggaggaaaggccggcgactatctacaccgccgcctgcagcttttactgggagcgctgagcgccagcctggaggtgcacgtgttgcagtgaggagccctgaaacatgcgtgttttactgcacaagatgtgcccttgaatggagtctaggccagtcggggtcaccnnnnnnnnnnnnnnnnnnnncacccaagaagggagaagcggtcaccccccacgtgctggaatgacagctttttacttgctaggcagttggaccttttccgaattttctacaatgcacatagatttgtacttacatctttaaattaaaacccacgcaactccgaaaaaaa

SEQ ID NO: 87942 - DNA, 919 bp, Homo Sapiens
cagtgcaggatggccttaagaggagaagtaatgtgctaccaagtggcccagccagagtgtgaaccaaacagtctggtaccaaaaccctattctggatcattcctcctttctgctccaccagcagtttggggcacaggcttgggaatccagacaggaaagctcctcccctctgaagcagtgggaccaaaaatgacagcatggttctagacagctctggaagtcaggcctgtgattgcctcattccctccaccttggcccccaaaatggccagtcctgaaggggtcacagttgatacttctctgagggggcatggggttggctgaggttatagcagccccacagggtggtaagctgggatgaagcaatcaactggaactcaacaagccttgagttctcaaagggggtgtgggaaggttcttatacatcttctatgaagggcagtttatcagtcactaaattacaaatacataaaccctttgtctcaccaaacctgctgggaatgaatcctacatatatatttatatgtgtgcaggctacatggttttcattatgctattgattttaaaagtaaaaatttggaaagaacctccatgtccaccatggggaactggctaagtcatttatggtggaatggtgatcataaaaattcattaaaaatgaagactctatatacagcttgaatattccttatcgaaatgcttgggaccagaagtgtttcagatctttgcatattttctgtttctcatttcagttcacattttctaagcatgatattcctactgatttccttgtagatattttgaaacagataagaaactcctccgtggaaattactgttaactagggaaaagacatgtttttttctgtcataaaagtaatgcgagttctttgtagcaaaacttggaaaatgcataaaagt

SEQ ID NO: 87943 - DNA, 673 bp, Homo Sapiens
gtctcgctcaatgtatctaagtatgagacaactacttcagcagtctatgatgtaaaaaattgtatagatatactattgcagcttttgcagatataccgagaaaagcctggtaataaagttgcagacaaaggcggaagcatttttacaaaaacttgttgtttgttggctattttactgaagacaacaaatagagcctctgatgtacgaagtaggtccaaagttgttgaccgtatttacagtctctacaaacttacagctcataaacataaaatgaatactgaaagaatactttacaagcaaaagaagaattcttctataagcattccttttatcccagaaacacctgtaaggaccagaatagtttcaagacttaagccagattgggttttgagaagagataacatggaagaaatcacaaatcccctgcaagctattcaaatggtgatggatacgcttggcattccttattagtaaatgtaaacattttcagtatgtatagtgtaaagaaatattaaagccaatcatgagtacgtaaagtgatttttgctctctgtgtacaacttttaaaatctgactttgttttaaaaaaacataaactgttcattacattcttcatttttatcatttatagttttatgcatgtaataaactaatatgtcataagatgattaaa

SEQ ID NO: 87944 - DNA, 1248 bp, Homo Sapiens
  misc_feature (70)..(70): n is a, c, g, or t
  misc_feature (77)..(111): n is a, c, g, or t
atgtatcgactcactatagggcgctccgcttattgcgaacgacgagcgcagcgagtattgagcgaggaangcggcgnnnnnnnnnnnnnnnnnnnnnnnnnnnnnnnnnnncagtcgacggtaccggacatatgcccgggaattcggccattacggccgggccagtcacaaactagtgcagcttttgacaacaactgccgaacagcagttacggcatgctgatatagacacaagctgcaaagatgtcctgtcttgcacaggcacttccaactctgcctctgctaactcttcaggaggttcttgtccctcttctcatagctcattgacagaacggcataaaattctacaccggctcttacaggagggtagcccctcagatatcaccactttgtctgtcgagcctgataaaaaggacagtgcatctacttctgtgtcagtgactggacaggtacaaggaaactccagtataaaactagaactggatgcttcaaagaaaaaagaatcaaaagaccatcagctcctacgctatcttttagataaagatgagaaagatttaagatcaactccaaacctgagcctggatgatgtaaaggtgaaagtggaaaagaaagaacagatggatccatgtaatacaaacccaaccccaatgaaccaaacccactcctgaggaaataaaactggaggcccagagccagtttacagctgaccttgaccagtttgatcagttactgcccacgctggagaaggcagcacagttgccaggcttatgtgagacagacaggatggatggtgcggtcaccagtgtaaccatcaaatcggagatcctgccagcttcacttcagtccgccactgccagacccacttccaggctaaatagtatgttctggggacaacacctcattttaaacgtttagtgataatgtggattagcattttgtctctcaccagtattacacagatcctttgcttaagagtgaaatatctttttattaatgccactataaataataaaacagttatatttaggcatgtgaacatcattcatcatgtgtattttaaattatgacctctatccttttgtaattaatgttaaggtgagcaattgatgttaaggagaacaattttgtcgtctcacccaaaacaccccataacaggactttcagaaatacagtattgggtcagattgtttccagatatcttccttgaaaactaatcctgtgagttgcagaaataaaagattctgtacta

SEQ ID NO: 87945 - DNA, 721 bp, Homo Sapiens
gaagagatcacgtcaccccttggggaaggtgtgtatatttatgggctctacatggatggagcagcctgggacagacggaatgggaagctcatggaatccacccccaaggtactcttcacgcagttacccgtgctccacatctttgccattaactccacggcacccaaggaccccaagctgtatgtgtgtcctatttacaagaaacccaggcgaactgatttgaccttcatcactgtggtatatttacgaacagtgttgtccccggatcactggatcctgagaggagtggcccttttgtgtgacatcaagtaagttcatttccatctgctcagggcaccagaacccacatagacagcctgtgctattgagggactcagtgatgtgtgtgtcttttctccccagtaattccttaattactctttctacattaaaaagttgatgttctaaaattgctagtgcgagtgtgttttcctcacatatcaatattcaaaaagataactctaaatgaatgttttttattctgggaaatcatatttcactataattactttttaaagataaaaccctgtttggatgttagaacactttggaagctctgaattttaaaaatttgaaagtgttgatatgtgacatcctaaaaagagcctagtagttgtaaacttttccctcaagtaggtaccaatttcccttgaataaaatctagccatgtctatgtctgaac

SEQ ID NO: 87946 - DNA, 467 bp, Homo Sapiens
caacagagcaagactccatctccaaaaaccaaccaaccaaccaaacaagaaaacctgagggctgtgaaagcctatgccacccacaagctttggatttagatctagactagatgagagtgggtggtccaatttcaatagcctccaaagtgactgtaagtttgaagtttagtatgaaatttggagtcaaaagaagtgaagctgattcacttctaccagttaacagctatgtgatcttggccaaatcacttagtccttctgagattcaatttccatctataaaatgggcatatactacctcctttctgggatttaactaaagaaaggtttgtcaggtttaactaaaagatgtgtgtaaaaatacctgttatccagtacagggaatgcaatgaatcttccctccttttccccttcgtgggttttattgttaaactcttaatataaataaatatatttcctgtaaaaccaaa

SEQ ID NO: 87947 - DNA, 609 bp, Homo Sapiens
  misc_feature (209)..(254): n is a, c, g, or t
  misc_feature (516)..(516): n is a, c, g, or t
taagatgaattaatttgattacaggacatgctaaatttgaggtggacacaccacaaaacatacagactgaggtgtgttgcttttaatcatagataaattttagaatcgaacttttgaggcattgacttaaagggtaaaattgaatttgttagagttgatagagacagggaaaagagaaacctgaggaaaaggatatagtacttcaggtnnnnnnnnnnnnnnnnnnnnnnnnnnnnnnnnnnnnnnnnnnnnnnccctggcaaccttcatttaactcaaagctttaggtaatgttaaaggatatggaacaggaggagggaatacaaatctttaaaccaagtcataaggaacagtgaaggatagttatgaaaaggattgagacagtgtagttgcagaaaccacgggaaatatggtggatttggttagcatgggtcagtagtgtgatggaaaagtcaaaaagttttgaaaagctgagagaaaaactttgaattaggcaaatggtaagcttgaggaggncagcttaatttgaatgatggccttaaacaccaggttgatgaagtttaggagatgatgaggtaagaataaattcagttgcatctcagatttggc

SEQ ID NO: 87948 - DNA, 568 bp, Homo Sapiens
  misc_feature (60)..(60): n is a, c, g, or t
  misc_feature (93)..(93): n is a, c, g, or t
tgcagagttcaccagtgtgcaaatggagccacctgcattagtcatactaatggctattcntgcctctgttttggaaatttaccaggaaaattntgcagacagagcagattaccctcaacagtctgtgggaatgagaagacaaatctcacttgctacaatggaggcaactgcacagagttccagactgaattaaaatgtatgtgccggccaggttttactggagaatggtgtgaaaaggacattgatgagtgtgcctctgatccgtgtgtcaatggaggtctgtgccaggacttactcaacaaattccagtgcctctgtgatgttgcctttgctggcgagcgctgcgaggtggacgcgaccctgagattgccatactgtgaagaagcttggaatgaaaataacatgtcaagagagagtcccagccatgccagacatccctgctgaacccggcctcagtcaccgtgcctgctggatgcaatcacttagtgacccacgtgagaacagcaaaggaaccaccagctcaatccacaaaatcatgagaaacagtaaattgttttaagccattaaa

SEQ ID NO: 87949 - DNA, 397 bp, Homo Sapiens
tgggctcatgggatccttcaacctcagtctcccaagtaggtgggactacaggcatataccaccatacctggctaattttcttatttttttcatagagatggggtcttgctacatcacccaggatcccactttcctactttaaatggcctgtctttatccagcttagccaataaaatccaagaaacattggtcagacctagtagagacacaggtgaaaggacttctacggagggggcagtgggcagcatctgaggctgaagctggctgtgggattcatttggcggagggggctttgggagacagcactggactgaaagtgcggagcttgaggctgcttctggacagggctggattctcactgtgagaaggcccatgaagccccctaaaggtccaccat

SEQ ID NO: 87950 - DNA, 476 bp, Homo Sapiens
tgccagacatgcacgattatctttcctcatttcagatggattttccaaagtcagtagattggataaagcagcatctcattcactgaggtcacaagatagactaccagaaaattgctagttttctaaagagaaactactgatttgagtgatgatctgtgtgtaatggctccaaaaaggagccgttctcttggtggcagcagttggattcagagcttgggcatcctgatcatcaggacagacatttacaggatatgtatagaattactgccccaaatagagggcaaagcactagacagaagggtgagatccaaggggaatttggaatctatatttcatcagaatgcactcaaagcaaaaacagtaagtatgctccatataaagaaatgtttcttaaaatgtttttaatttaaccctacccatcccttggcaaatctttttcttttaaatcaaataggaataaagaagaaaatcttcct

SEQ ID NO: 87951 - DNA, 504 bp, Homo Sapiens
gctgaatggctaggtcatatggtgatctagtatgtaactggaattatgttatacattgcccttcctctcccataagatggacaaaagtgtttctgtatcactgtgtcccagacaatatttagaattacccagctttccagtttttactttagaagtttaaagtgatatagaatatatctggtatttctcatattgaaatacatttgaacattagttcatatcctttcattgccttttgtttttcctcttctgtcaatggtctactcatatgttggcctgtctttatttgtatcttgactttttattgtgtattttgtttatggtggggtactttattggtgattaatacgattttcaagtatattatatgggctagtcccttgatactattgaccctgtatttatcttcagtctcttgttggtatctaactttggttctgaagtttatggaatggaagtatttaattggaaagattaaacatattggtaaaaatataacaacac

SEQ ID NO: 87952 - DNA, 640 bp, Homo Sapiens
actatagggaatttggccctcgaggccaagaattcggcacgaggcacgagggaggatggcgactccgggtctggatgtgtgctccccttgcgtgctcttcgctttgcaaatggatccctacgtttttaagtgcacaagatcccctgggtgtcgcctgcacaccgcccccgaggccgcccttgtttgagtccacctctccttggctgtgcagcgtccgccagccatgctgacccctgaagccttggctgtgcctcccaagtgcaccgggtttccctgcagacacacgctttggcatgaacatgccttcttaggcatgaacaagaagttcacgtggctgccacacccaagtgccttgcatttcgcctgctccccgcaccccccccaaccatgttgccacacgaggcttattctgaattacaggttggttgtgatatcacctctggtacatggactgttaaaactattgaaagggaggtggatctgaagcacgcctacctgtttcctggcatacttggaacgttgccagaccactggatacttagaaggctaattctacatttatcctcagccatcattctgagcgccttcaaaagatgaatcatctgcaccgactattaaatttaataaccatgcaaaaaaa

SEQ ID NO: 87953 - DNA, 939 bp, Homo Sapiens
ccatggtgaatatagaacaagttggttaaaaaaagcaggctggtacggtcggaatcccgggatatcgtcgacccacgcgtcgttcttcccagtctgcctttggattaaagcaccaagcagagaccacattaattccctttgctatactgtgatccttagtatgttaattcttaagaaaccaacatatcactgaaagaaggctggcagaacgcaagtgcattttttcactgtgggaagaaagatcaagtgacgtattattttttcctggttgtcacttaatgggctgagtaaaaagcttgaaaactcagactttcggtcttggttctgccactcattggttatgaggaggcccagagcaggtaagttcaccttcctggccttactttcctgatgtgtaatacggaattacttcacagtagcatgacagtataagacaccagcagtagatacaactatgatgacattccatgagttggtatttttagttctaactgctaaatttgttctctttacgggacagatttctaataaagtgcttggtcttaaaatacatggttggacagaggtgccctatcccttaactatgagcaggtgctacctttgggatatttattttaaattttaatactttggtactcaattgtcagtgttccatggtgtgtatttttattttcgggattagtggggggtctaacagggagaagaatagtctctaattactacctcttaaactaaagcaatttattttgttcctggagcaagttaaatcttcgtcggaaggagcttggcatatattttttagcatgcattgtttctgttgccctgaaagtactgaaaggggttcaggcccggactcagggaaagtgccgtgaacagggcctccggaaagggctattggggccgacctcctcccccataaggcggtcttgaggaaacctc

SEQ ID NO: 87954 - DNA, 909 bp, Homo Sapiens
ttttttgacatttcactgcacttttatttttttaaccatgtacaaagttgattaaatacacaaaggtaggactgctataggatgaaagtggtggagtcagaggtcacaatccaaagcaaggtgatagtctcttgaggatgacaccctgattgctgaattagggtgagaatcaactttcagctgttaacaggggacaaggagaatgaagttatcaacagttaacattattggattaattgaaatgaatgttggcagagattttgctggctttacatcaaattgagtatagtacttcaaactgagtatttgatgagggtaaacacttaatcaagttttccacatgtaaaattgagaattaattaaaagattatacaacccacacgttatgggtatctcatataaatttatatacacatgtgcaaacttgcagtgtgcatatatttgtctatatctaaatatatccaaatccattgatgaacagttagaaatttagaaattattctcccattttatcattccctttcctagaattttgtcacaaatataatttttccatctgtttgaagcctactctctggaggcatgtaatgtatggacacagtaaagccctgaggtatcacagggtttttatcagagaaaataataacactggtgttataaaagatccattgtgaggagaaagatatatttcacatgattacaaatacagaagtattatttcatcaaaagctggtatcagtgaatacaatttgtttttaatgttttatttaaaatatttaatctcaaaagaatttgttgagtagaataatgatattggtaagaaataatgattcagaatttcctttaatttgttgacttttaaaattaagtgaaatactaaaaagtactatttaatgtagtttcatgaag

SEQ ID NO: 87955 - DNA, 544 bp, Homo Sapiens
  misc_feature (474)..(503): n is a, c, g, or t
ttgattactaattcaaatcatatggcaattataattcttctaaaatgctatcatttgtaactgtatcccctgtattaaatctcattaaccacaggcagctgttacagaaagctgcattgtttcacattgagctgttacattagttcaggctaaatgttgggcgctccaaccacatccaagaataaatctggaaacacactgctgggatactgctgttagagcccttcttggccttgtattcccagaaatgagctccctttccttagcttagaagaatgtgattatatccaggacatcatgttcagaaaacttagtttactttcagcatagaatgcattactgttggaataattggcctctagctcttaaatgtctctgataacttattaatatctatctttataaaatagagtgcaactacttttgtgtaaaaatgtttgcctttaaatttagtatttcatatcagcacatcgnnnnnnnnnnnnnnnnnnnnnnnnnnnnnntaaaagagtctgtaataaattatttttttcacgtgtctcta

SEQ ID NO: 87956 - DNA, 298 bp, Homo Sapiens
gagtgaaatcacgcgggcaagttggagtcttgtgctcagaaactgtaaagggatcctaggggctgtgaacactggaagtggctgttcgcaggagtggcatggatgtggcttggctgtgggccagggtcctctgctggggggcacagtcagggaagagaagggaggtgggctgtgctctggtgtggttttctaagagttctcatttcaagtctggccctccagggcattacgatggtgccttcccagctcagcactcagccatgtgcctcggggaggctgctgtcctgcccccacgggc

SEQ ID NO: 87957 - DNA, 728 bp, Homo Sapiens
  misc_feature (69)..(69): n is a, c, g, or t
agacagcggcgttgccatggcggcgtctctggggcaggtgttggctctggtgctggtggccgctctgtnggggtggcacgcagccgctgctgaagcgggcctccgccggcctgcagcgggttcatgagccgacctgggcccagcagttgctacaggagatgaagaccctcttcttgaatactgagtacctgatgccctttctcctcaaccagtgtggatcccttctctattacctcaccttggcatcgacagatctgaccctggctgtgcccatctgtaactctctggctatcatcttcacactgattgttgggaaggcccttggagaagatattggtggaaaacgagcagttgctggcatggtgctcaccgtgataggaatttcactctgcatcacaagctcagttccatggactgcagaactccagctgcatggaaagggccagctgcagactttgagccagaaatgcaaacgggaggcctctgggactcagtcagagcgctttggctgaatgaggggtggaaccgagggaagaaggtgcgtcggagtggcagatgcaggaaatgagctgtctattagccttgcctgccccacccatgaggtaggcagaaatcctcactgccagcccctcttaaacaggtagagagctgtgagccccagccccacctgactccagcacacctggcgagtagtagctgtcaataaatctatggtaaacagacaaaaa

SEQ ID NO: 87958 - DNA, 940 bp, Homo Sapiens
tctggggcaggtgttggctctggtgctggtggccgctctgtggggtggcacgcagccgctgctgaagcgggcctccgccggcctgcagcgggttcatgagccgacctgggcccagcagttgctacaggagatgaagaccctcttcttgaatactgagtacctgatgccctttctcctcaaccagtgtggatcccttctctattacctcaccttggcatcgacagatctgaccctggctgtgcccatctgtaactctctggctatcatcttcacactgattgttgggaaggcccttggagaagatattggtggaaaacgagcagttgctggcatggtgctcaccgtgataggaatttcactctgcatcacaagctcagtgagtaagacccaggggcaacagtctaccctttgagtgggccgaacccacttccagctctgctgcctccaggaagcccctgggccatgaagtgctggcagtgagcggatggacctagcacttcccctctctggccttagcttcctcctctcttatggggataacagctacctcatggatcacaataagagaacaagagtgaaagagttttgtaaccttcaagtgctgttcagctgcggggatttagcacaggagactctacgctcaccctcagcaacctttctgccccagcagctctcttcctgctaacatctcaggctcccagcccagccaccattactgtggcctgatctggactatcatggtggcaggttccatggactgcagaactccagctgcatggaaagggccagctgcagactttgagccagaaatgcaaacgggaaggccctctggggactcagttcagagcgccttttggctgaaatgaggggttgggaacccgaaggggagaaaagttggcgttccggagttggccagcatgccagggaaaattggagcctt

SEQ ID NO: 87959 - DNA, 842 bp, Homo Sapiens
  misc_feature (516)..(534): n is a, c, g, or t
agctgggtaatggctgggtagcatgaatagttttaatttcagttcacagcaaatgacgatgatcgcagatttagcaccttagtttgtacttcctctgcacctgaatcatcgatcactgtgaagcgtgagctgaaggtccagaaaagctgtattcttagataacctcatctgtgattgctcccaggactgcagtttacttcaatctaagggggtggttttcttattagagaatgtaagtattcaatactaaatatgagactgaagccttgaagacattttatagtggtggcaggtgttatagttcaggaataggctgtttaacaagtcaaatgcatatcattccctcttaagcattaactttttcaaagcaatggaattatattttttggcttgaaatggtgggttcttctatatttgatttctcggttttcttagtagatattactggctcctctaatatttcttcaaaacctttcccctaatctgggaggttttcttagaggctaccttagatgnnnnnnnnnnnnnnnnnnntttcttaagtgatagcccagtggatgagactttggaggttgtagcactgaggattctaggtgggagcaggtaacttggattgggaaagtggattcagccccgaaatgcttaacccactggtgctaaaacgtgtctcctcgccttccagcagtttcctgtaagctgctatctcaatgtcaagagccattttgacattgaccaagtcctggtattcccgaaggtggcgtgccatctcactcttggtgttcctcagatcattctccagctgcccaatgctatcctggtagccagctacctcctcgtcgtcc

SEQ ID NO: 87960 - DNA, 512 bp, Homo Sapiens
  misc_feature (272)..(308): n is a, c, g, or t
tttttaaagtcagtaaacaatattttactgaaacatttcataacacagaaaatctgtctgaagtgtaaagttactgtcttacacaaggaggacagacccattttcaaagactaatatgaatacaataaatatggagtttacatactaatttatacacagaaactctgccccatagccataaaatttatattcaacagtggaacatataatttaatcatttgatttatttgacaggttttccttactaaacacaaataactacctggttttcnnnnnnnnnnnnnnnnnnnnnnnnnnnnnnnnnnnnntcaacaatctgtacagtttctaaacataaagctcctaaaaggcacaattgtctatacaacatgtacaaaaatggctggagctgacacaaaacaacaattattggtcaaaagttcatgattgcacaaagattagtcatgagtttatgtcagaaaaatgtgctttaaggaaaggagggttttcaaagaaacctttaagtgttatat

SEQ ID NO: 87961 - DNA, 444 bp, Homo Sapiens
aaaacaatgaatcaactggatatgatgaacatcagtagactgctacatgtaacagcagcagaatacacattcttctcaagctcacatggaacactcaccaagataaattatattctggcgaatagaacacaccttaaccaatttaaaagactagaaatcatatggtgtgtgctttggaattcaactagaagtcactaacgaaagctggaaaatccccgatacttggagattaaacagcacacttctaaataactctgggtcaaagaagaaatctcaagataaattttttaatattttgaactaaataaaagtgcaaacacaacttatcagaatttgtgggatacagttaaagcagtgattagagagaatttttatagcattggatgcatgtattagaaaacgagaaggttctaaaatcaatcatctaagcctccaccttacaaa

SEQ ID NO: 87962 - DNA, 638 bp, Homo Sapiens
aaagaagccgtgggcacctctgataagctagccacagctgagctcaccatgccaaagaccagctgaagtcccttcatggaactgttatgaaaattaaccaggagcgagcagaggtgagttcacatgtcagaccaggtttccatcaatgatgctgctgccaaaaacatggccaccttgtattattgatcttgctatagccattggttattttataaaccactgtaaagttgtctgtttttcttaagacctaaagattatattccccccatcacaacccccaataatttattttgtgctgccatggatactgcgttctactgagccctgaaaggaatcatcaaataaacatgctatccctacctttaagtgtaaggatgcttagggaggtagctgtcaatatctacctggacaagggttcctgaaggattgttatataatccctctgaatctcaaatttttcatctcgtgcagtcatgtgaaaatgttacttcatagtatgactccttactgagctaatgtctgttactgtgctttataggatgcaaatgctaatgagattaagatagcagatcataggagacaaaaatctaatgatgagagcccagagagacataatcatggaagacggtagtaaaagt

SEQ ID NO: 87963 - DNA, 588 bp, Homo Sapiens
  misc_feature (524)..(541): n is a, c, g, or t
tacaatcgagctcggtaccggctgagcagctggcagttacagcaccaggcagaactcgcccccaggggaggcccccccagatcccaggcctctaggccccacatcaacagtgcactgcacgttgaggacaaggccatctcggactgcagaccctcacggccttcccacactttgtcctcacttgcaacaggggcttcgggtgggcctcccatttctaaagcacccactatggatgcacagcaggacagacccaagtcccaagactgcctgggcctagtggcccccctagcatctgctgcagaggtctcctctacagctcccgtgtctgggaagaagcacagaccaccaggacccctgttctcctcctcagatccccttcctgccacctcttcccactccggggactcagcccaggacacctcgctgattcctgcccccctcacacctgcaagcagggatgccggcatcagaagaatgtttcgtgttcgaaattgtttgaggggtttgggtttatttttgttggnnnnnnnnnnnnnnnnnngcttacgtgggcatccttcagcttttaataatctgaaaaattctaaa

SEQ ID NO: 87964 - DNA, 543 bp, Homo Sapiens
  misc_feature (394)..(421): n is a, c, g, or t
gggcaacatagcaaaaccctgtctctacaaaaaatactttccgtacattagtggttgccttaggctaaaaattgggggtaatgaatgggaagtacaggattcatctaatgggtacaggatttctttatggttcatgaaaatggtctaaacttattgtggtaatggtcacataacaatatattaaaaaccattgagttgtatattttaagtgggtgaattatatggtatgtgaattatatctcaataaagttgttagtaaataaatggggctgaagatgttatccttcattgtggtgtaaatgaactttcacaatattttcacctgtgaacccaaataaaatgattaaagttctgatggaaaaatcttgaatggagtataagttttccgttgttnnnnnnnnnnnnnnnnnnnnnnnnnnnntccaagtgtgccttgaattgtacagagcacaattattatgtttgaaatgtgtactacttaattttatataatttggtttgtgaaattaaagacatcaataaaaatgattcctgaaagtagta

SEQ ID NO: 87965 - DNA, 482 bp, Homo Sapiens
ggccgcgcggtgctcctgtctggggccccaggactacccctgccccccggcgccgccggcagcccggcagtgctgcgagaggccgtggaggccgtggtgaggagcttcgccaagcacacgcagggctatggccgagtgaatgtggtggaggcacttcaggaattctggcagatgaagcagtcccgtggtgctgacttaaagaatggggctctagtggtttatgagatggttccctccaacagccctccttatgtctgctatgtcaccctgcctgggggaagctgctttgggagtttccagttttgccccacaaaagctgaggcccggaggagtgctgcaaagattgcgctaatgaattctgtgtttaatgaacatccttcccgaagaatcactgatgagttcatcgagaagagtgtctctgaggccctggcatcttttaatggcaacagggaggaagctgacaacccaaatacagggattgg

SEQ ID NO: 87966 - DNA, 494 bp, Homo Sapiens
gatctcaaacaagatgtatgcgaaatgccaaaagaaactggcccctgcctggcttattttcttcattggtggtatgacaagaaagataatacctgctccatgtttgtctatggtggctgccagggaaacaataacaacttccaatccaaagccaactgcctgaacacctgcaagaataaacgctttccctgattggataaggatgcactggaagaactgccagaatgtggctcatgctctgagtactgttcctgtacctgactgatgctccagactggcttccagtttcactctcagcattccaagatcttagcccttcccagaacagaacgcttgcatctacctcctcttcctccatctttggctcttttgatgcacaatatccatccgttttgatttcatctttatgtcccctttatctccaacttctagaactcccagtttatacctgtgtcactctcaattttttccagtaaagtacttgatgtagtaaa

SEQ ID NO: 87967 - DNA, 458 bp, Homo Sapiens
ccttcagacactcccagaggactcggactttttcttctgcacttttttggaaaatcgccaggtgccaaaaggtgcattttaaagcgctgactgtaaatgctttatttctttgattagtaccactagtctatgtgggcagcggcattcctccctggagcactcagctaggcggttccgtccaggagcttgaaagcatcccagcggtgcacctgttcagtctgaggacctcaagcttgggtcaggccagcatgttttaggtatggatgtggtgacttaaagtacttgattgtcttgatttcaccctgaaagctttggcaaaccaagtttcaacccttactttaaaaatctgacactgctttactccatatcaatttggaagcttctaattcataaatatacctaaacgttggcattttatctctccaggagttattaaacatttcttcctttttagcaaa

SEQ ID NO: 87968 - DNA, 653 bp, Homo Sapiens
gcggccgcggcgtcggggctggagcgatggcggcgaccgcggtggcggcggctgtggcgggaaccgagtcggcccagggtcccccgggcccggcagcgtcgctggagctgtggctgaacaaagccacagacccaagcatgtcggaacaggattggtcagctatccagaatttctgtgagcaggtgaacactgaccccaatggccccacacatgcgccctggctactggcccacaagatccagtctccgcaagagaaggaagctctttatgccttaacggtgctggagatgtgcatgaaccactgtggggagaagttccacagcgaggtggccaaatttcgtttcctgaacgaactgatcaaagtgttgtccccaaagtacctggggtcctgggccacaggaaaagttaaaggaagagtcattgaaatactcttcagttggacagtctggtttccggaagacatcaagattcgagacgcttatcagatgctgaagaaacaaggaattataaaacaagaccctaaactaccagtggataaaatcttacccccaccatctccctggcccaagagctccatctgtgatgctgatgaagaaaagtccaagcttctgacaaggcttctaaaaagcaaccaccacgaggaccctcgtgcc

SEQ ID NO: 87969 - DNA, 602 bp, Homo Sapiens
gcggccgcggcgtcggggctggagcgatggcggcgaccgcggtggcggcggctgtggcgggaaccgagtcggcccagggtcccccgggcccggcagcgtcgctggagctgtggctgaacaaagccacagacccaagcatgtcggaacaggattggtcagctatccagaatttctgtgagcaggtgaacactgaccccaatggccccacacatgcgccctggctactggcccacaagatccagtctccgcaagagaaggaagctctttatgccttaacggtgagtttggcttgccttgtagcctaacctttcctgtccttgtgctatagagagccgagaggcgctttgcttccacacagatccttttcactggagaagggaggtcccctgagaggtttaccttcacagcaggttggaggagggagatctgggccagggtccccacccttcttcctcctgtttctcgtctgtttcttcagggcagcattgagtctactgtgggagaaggaaaggaaggttttatttcacttgccctgcttagaccagggctggcaagttcatgtgccttttctagagagggcagttctagcacagtgtccggat

SEQ ID NO: 87970 - DNA, 746 bp, Homo Sapiens
  misc_feature (441)..(468): n is a, c, g, or t
aggccgtctggcctgtctaataactgcagtatgatcatgagagggaaatacaccccttagcagccagtcaaggtctctacgtatggggttacagatggccaatgatctctccaactattctctgaacttggtccacatacagaaagagaggaattgtgcctcagaagctgtatgtaatggatgacacccaggagcctcatctgcaccgggacctaatatggtgataaaattttaggcttggagctgatactgtaatgaggtcatgtatcctgaggctgtttttcctgaataatctacaaactcaagcaaagtaataattatattcaaacaaataaacttttctctaacatggagtcagtactgtgaaaaagtatccatttttaactgttgcaccttgggttcttatttcaaaaagttccatgaagaagatcagccccagcnnnnnnnnnnnnnnnnnnnnnnnnnnnngttggatccagagatgcctgagttagagatgactttggcaactctcctcattggcatacttaaaaccctgctcagggaggagcttatttgccaccttctatgcggaagcatgttcacgactgcacctgtgctgcctttactccacctctacatacaatgactcggctaaccagccccaccaaggcccttgttttcaccttcgttccaggaggtgctgctttgaggaattatccccagtgtcctccttgttgcaagtaataaaatcctcttgttaagtc

SEQ ID NO: 87971 - DNA, 894 bp, Homo Sapiens
gcctgggaccgcggaagaggcttcagacgctgcagcgatgcctcgcccacggcgggtcagtcagctcctggatctattttacatcctgaagtccaaactctagatctacggagctgcgatatatcagatgctgctctcctgcacctgtctaactgtagaaaactgaagaaattaaatttaaatgcttcaaaagggaaccgagtttctgtaacttcagaaggaataaaagctgtggcttcatcttgttcatacctacacgaagcttctttgaaaagatgctgcaatctcactgacgaaggagtcgttgctcttgcactcaattgccagctgctaaagatcatcgatttaggtggctgcttaagtattactgatgtgtccttacatgcattaggaaaaaactgcccatttttgcagtgtgtcgacttttcagctactcaggtatctgacagtggtgtgattgcacttgttagtggaccttgtgcgaagaaattagaggagattcatatgggacattgtgtaaatctgactgatggggctgtcgaagctgtccttacttactgtcctcaaatacgtatattactcttccatggatgccccttgataacagatcattcccgagaagtgttggagcaattagtaggcccaaacaaactaaagcaagtgacatggactgtttattgatgcttttttgaagatgatcaatgctaggaaagcttatcaaaactactttcccaggaaaccatctatagagatttgcattctacttaatgttaacactatttttaattattttattgtcttaagttataactctcagagaattagctaagtcttggtatatacatggtttgtgctttactcttaaacatctttaaagtgctattattctaaaaa

SEQ ID NO: 87972 - DNA, 408 bp, Homo Sapiens
  misc_feature (234)..(296): n is a, c, g, or t
aattacagaattgctgtagaaatttatataaaagttcaagatgattatattcgtgttcaaggtggtatcatttatttcttctagggtcacaagatgctgctcatgatttggatacatattaattaagtggaagtggatcatataaaggtcttctttatcatctttgtggagagtaggctgaggagaaggagggagcagaggagctgacttgctgcctcagggtggcagaagtgnnnnnnnnnnnnnnnnnnnnnnnnnnnnnnnnnnnnnnnnnnnnnnnnnnnnnnnnnnnnnnntagttgtaattattgctaatgcagttttatgacttttcagtagagttaagaaaacgggaaatcactggtattcaattctgtggtcttttctctttcagcaaataagaacagc

SEQ ID NO: 87973 - DNA, 1118 bp, Homo Sapiens
  misc_feature (1019)..(1019): n is a, c, g, or t
  misc_feature (1069)..(1069): n is a, c, g, or t
attcccgggatagcgacacggtagagtcagtcatagagtctgctttggatgacctggacctgaatgagtttggcgtggccgccctggagaagactttcgataacagcacagtgccccacccaggaagcatcaccatcggcggcagcttgctgcagagctctgcacccgtgaacatccccggctccttgggcagctctgcctccttccactcagcatccccgtcccctcccgtcagcctctcctcgcatttcctgcagcagccccagggccacctgagtcagtcggaaaacacatttttgggaacctcagcatcacatggatctttgggtctgaacgggatgaacagcagcatctgggagcattttgcctctggaagcttctccccgggcacttcccccgctttcctatcagggccaggggctgccgagctggcccgacttcggcaagagctggatgaagccaacagcaccatcaagcagtgggaggagtcctggaagcaggccaatgcaggcttgtgatgcctggaagaaagaggcggaggagtgctggtgagcgggccagtgcggcgggcgccgagtgcgagctggcccgggagcagcgggatgcactggaggtgcaggtgaagaagctccaggaggagctggagcggctacacgcggggcctgagccccaggccctgcccgccttctccgacctggaggcgctctcactctccaccctctactccctccagaaacaactgcgggcccacctggaacaagtggacaaggccgtgttccacatgcagtcggtgaaatgccttaagtgtcaggaacagaagcgggcagtgctgccgtgccaacacgctgcgctgtgtgagctctgcgctgagggcagcgagtgccccatctgccagcctggccgggcccacaccctccagtcgtgaccctgcaggcctggcccagcctggcccagatcttctcacctaggactttttaaggatttatattatatgaatatatatttattagtgggtaggnatggatggataaaggaaaagggatatgggaaatgggatacaatttcccgnaagaatggaaaatggataaccatttccccaatggggggcaggggaaaac

SEQ ID NO: 87974 - DNA, 258 bp, Homo Sapiens
ctatgcatgtagatgtattaaatatgtaaatgtttttcaaagttgaggtaatattgtatagaattttatagcctacattttaatttcttgatatcttaagcatttcacttattagatattgttcaaaaatgccatttttaatatttgtataataccctatcatgtgagtataccttaactaagccattcccatattcaacattttgtgtactgtttttctaattacatatattacaatgaacaaccttatgcataaaa

SEQ ID NO: 87975 - DNA, 798 bp, Homo Sapiens
attagctagtttctcattaatccctgatcaggccagaaaactgatagaatggtaattcttttcaaatgaaaataatggtcagttcctcagcttttcatgaaatgatatgggagcagctcatatcataatgtctgaatatttattttattcatctgtctaattcacccttttcttttaaaagccccagtttcagaatgtgaatcagggatattcctgttactaaaatggaaatgtaattccaagtttcttttttaattttttaaatttatgtcattgtattggactatgcttatatttaaaactacttaatttagagttaactacctgcttaggccccagaacattacttatgcccttcagttaccaaaagatttgtgcaaggttttgtaccctggtaaatgatgccaaagtttgttttctgtggtgtttgtcaaatgttctatgtataattaactgtctgtaacatgctgtttccttcctctgcagatgtagctgctttcctaaatctgtctgtctttctttaggttagctgtatgtctgtaaaagtatgttcaattaaattactccatcagacacttgtctgtcttgcaatgtagaagcagctttgtagcaccttgttttgaggtttgctgcatttgttgctgcactttgtgcattctgaacatgaatgtaacattagatattaagtcattgttataaggggttgaatttaaatcctgtaagtcaaaattgaaagggtgttattaagtgtgcctttattttgcatgaaaataaaaagaattatacgtaaagcaaaaa

SEQ ID NO: 87976 - DNA, 602 bp, Homo Sapiens
acggtactgaacagacaattaaccccattcagatcgtccgctactggaactacagtcatagcgccccacaggatgacctcatgctcatcaagctggctaagcctgccatgctcaatcccaaagtccagccccttaccctcgccaccaccaatgtcaggccaggcactgtctgtctactctcaggtttggactggagccaagaaaacagtggccgacaccctgacttgcggcagaacctggaggcccccgtgatgtctgatcgagaatgccaaaaaacagaacaaggaaaagccacaggaattccttatgtgtgaaatttgtgaaagtattcagccgaatttttggggaggtggccgttgctactgtcatctgcaaagacaagctccagggaatcgaggtggggcacttcatgggaggggacgtcggcatctacaccaatgtttacaaatatgtatcctggattgagaacactgctaaggacaagtgagaccctacttctccctctgcattccactggctctgccatggactatacaagcagataattttccctctattcaaaataaaatctccaaatgaaaatttgggaatgtagcaaaaaa

SEQ ID NO: 87977 - DNA, 1251 bp, Homo Sapiens
gggtccggaattcccgggatccttggagccggatccggccccggaaacccgacctgcagacgcggtacctctactgcgtagaggccgtagctggcggaaggagagaggcggccgtcctgtcaacaggccgggggaagccgtgctttcgcggctgcccggtgcgacactttctccggacccagcatgtaggtgccgggcgactgccatgaactccggagccatgaggatccacagtaaaggacatttccagggtggaatccaagtcaaaaatgaaaaaaacagaccatctctgaaatctctgaaaactgataacaggccagaaaaatccaaatgtaagccactttggggaaaagtattttaccttgacttaccttctgtcaccatatctgaaaaacttcaaaaggacattaaggatctgggagggcgagttgaagaatttctcagcaaagatatcagttatcttatttcaaataagaaggaagctaaatttgcacaaaccttgggtcgaatttctcctgtaccaagtccagaatctgcatatactgcagaaaccacttcacctcatcccagccatgatggaagttcatttaagtcaccagacacagtgtgtttaagcagaggaaaattattagttgaaaaagctatcaaggaccatgattttattccttcaaatagtatattatcaaatgccttgtcatggggagtaaaaattcttcatattgatgacattagatactacattgaacaaaagaaaaaagagttgtatttactcaagaaatcaagtacttcagtaagagatgggggcaaaagagttggtagtggtgcacaaaaaacaagaacaggaagactcaaaaagccttttgtaaaggtggaagatatgagccaactttataggccattttatcttcagctgaccaatatgccttttataaattattctattcagaagccctgcagtccatttgatgtagacaagccatctagtatgcaaaagcaaactcaggttaaactaagaatccaaacagatggcgataagtatggtggaacctcaattcaactccagttgaaagagaagaagaaaaaaggatattgtgaatgttgcttgcagaaatatgaagatctagaaactcaccttctaagtgagcaacacagaaactttgcacagagtaaccagtatcaagttgttgatgatattgtatctaagttagtttttgactttgtggaatatgaaaaggacacacctaaaaagaa

SEQ ID NO: 87978 - DNA, 629 bp, Homo Sapiens
taaatcttcaagatgttgtaattcaagaatataggactgtctctgaaagacctgctccttccacaagaagtgcataggtccataatatttcataaaatgaagaaaaagaatgtggcctatacaattattcaccatggtattgcccaactttccaaatctggataaagctgtgggattcttggaagcagcttgagtgttttcatcttgcctgggaagcccaggaattccacctggtccacaccggcagaagttacagtagactgtgaggcaccccaccttgctcctgatgcagtttctgtgccattgctggtgctggtggaggcagcggagcagaggctcaggcacaatgaagcgtggatgtgttatgcaggttgctgcaaaactcaccttattctgacttttggatttcatggcattccaggaagctccttgccatgctgttggcctggaagtccacctgtctggtccatagtgacgtcctgaagagccagtctgtaaaataaccaaccacttacttagcgtttggatagactccatgccttctctctccctgcaaagaaaaatcttgaacatttatgatgtcaattagtgaaagtattgaaaatactaaattataactaaaagcaaaa

SEQ ID NO: 87979 - DNA, 457 bp, Homo Sapiens
gcggccgcgggcgatgccaaaaacgaagccccatgtgccactcccctgatctgcagcttcggtaggccggtggacctggagaaggacgactaccagaaggtggtgtgcaacaacgagcactgcccctgcagcacctggatgcacctgcagtgcttctacgagtgggagagcagcatcctcgtccagttcaactgcatcggccgcgcgcgcagctgggaacgagaagcaatgccgccagaacatgtggacaaagaaggggctacgacctgggccttccgcttctgctcttgccgctgtggccagggcaacttgaagaaggacacagactggtatcaggtgaagcggatgcaggacgagaaaaagaagaagtctggctccgagaagaacacagggaggcctcctggtgaggcggcggaggaggcaaaaaagtgcaggcccccaaacaagccccagaaag

SEQ ID NO: 87980 - DNA, 315 bp, Homo Sapiens
gtgggaaggcaaggaaataggggcttaccacccaaaagatgggaggcagaagatacccacctgagttgcccagagcccacagtgtttgctttctcaccactccggactccacctttgagctctttgcgagagatgtggatttccagctttgaacaatccaagaaagaagcccaggcactaagcttattggtatttggcaaacctggtatcctgcagccgagcatgaacatgaaatacattagaacttggcaatgagagatcccatctgttggtttccagggatgtaagtgagtaataaaagctgtttcaagtttt

SEQ ID NO: 87981 - DNA, 700 bp, Homo Sapiens
  misc_feature (68)..(68): n is a, c, g, or t
caggtgaggactccaatcaccttctctcagaacaaatcacttcattttattgtcttagtttgtatatnttctgtgacttgaaataaactttgaacacatttttagtacactgcaaattgatacacatgacctttttgcttttaaaaagcttaacactaagggtgaaaccttagatgtgttttctacccttactgcagtattgtactttaacatattgccatagtttggtttttaggtaacccacttattcttcttgatgatatttgagaatttctcagaagcaatgttttctggaacttggtttttgtttagtttgcttccagtaagaattattataaggctttgccctctgaaaatattctagcacttcggagtcttctaggagaaaatatcacatgcttagagctataaaatggtcagaaggctaacagagcaaagagcctagcacagctgtgtgtttagtttagaaaaatccaaatatcaaaatgcatttgtttcaatagcaggtctgaacatgtataattcagagttaagacaaaaattgttttagcactggtttgagtgtgtcagcaacacaagagactgttgacatttacttgtgtgttcttaaacttatcagtctaggcagtcaactttgaaagtttaaaaagccactgatttttcacatgctcaagatgaaataaaaacagaaatcaaatga

SEQ ID NO: 87982 - DNA, 458 bp, Homo Sapiens
gtaacttaattttttccctgttttagttatacaggttggtttggaaatttgtgttttggcataaacaagtaaaatgtgcccattttatggtttccatgcttttgtaatcctaaaaatattaatgtctagttgttctatattataaccacatttgcgctctatgcaagcccttggaacagaacatactcatcttcatgtaggacctatgaaaattgtctatttttatctatatatttaaagttttctaaaaatgataaaaggttattacgaattttgttgtacaaaatctgtacaaaaatctgtttttacatcataatgcaagaattggaaatttttctatggtagcctagttatttgagcctggtttcaatgtgagaaccacgtttactgttattgtatttaattttcttttccttttcaacaatctcctaataaaactgtctgaaatctcaaaaaaa

SEQ ID NO: 87983 - DNA, 545 bp, Homo Sapiens
ccatatgttctcgtactttctcaaatccctataaagaattacttgttatctattaaaaatctcctttacccaaatctgtattatggtttcgccagacaaatattatgtgatgtagcccagaaaatccacaccttttgtcctttttatgttttaatttgaataatcatgtgcttagtcccttggtttactgccacatcagtttaacacgatatcagcacattcccttgtcatcatcaaggtgttggctcagatttattcttaattggatgtttaaagcatgtactaccttgttacagttggtttagtgtagtggattattgacatgacatcatgagaagatgtgtaattttataccacatttataaaacatgattttgttttctacccttcaaggtaaacattaaaaataaggtggtacttgtgtacttgtacataaaaccaaaattatagttgggaaaaaaataaatttatatatgaaaatgtcaaaatcattttaaaagtattattttcaaataaaatggagaagctggtgaaaagtcaaaaaa

SEQ ID NO: 87984 - DNA, 170 bp, Homo Sapiens
aattctttaggcttgaaaattaccagagtgttcataataaggatttggaaaaggagtctattcaaccaagcagatctctgcctttctttcgtctttactatgaattctgaataaaatggagaacacactctcaatatgtagaaaaataaaattttggcaaaacaataaaa

SEQ ID NO: 87985 - DNA, 759 bp, Homo Sapiens
atttcccagcagttgtggggcgtaaagaaactcccatggtcatgtgactccagatacttctggggctggttgaatgcagtgtttaataaggtggattatgatcgcatcagggatgttggccctgacagggcggcatccgagtggttgctgcgctgtggggccatggtgcgctaccatggccaggagaggtggcagaaggactacaaccaccttccaacaggccctctggacaaatacaagattcaggcgatcgacgccaccgactcttgtatcatgagcattggatttgatcacatggagggcctagagcatgttgaaaaaataaggctgtgcaagtgtcattatatcgaggatgactgtttgctgagacttagtcaacttgaaaatttacaaaaaaccatattggaaatggaaataatatcctgtgggaatatcacagacaaaggcatcattgctttgcgtcatttaagaaacctcaaatatttgttgttaagtgatcttcctggagtaagagaaaaagaaaatcttgtccaagcctttaagacagcactgccttctctggaactaaaattacaattgaagtaaaataatgtgtcttatttcagtataaaggatcatttgaaactgttgattccaaacatcaactaatattatatagtcatcagtagaattataaggatgccatatcatgacattttagaagtggagagtgcatcatatgtagaaaataaatattcagacgtggctcattaatgttaa

SEQ ID NO: 87986 - DNA, 472 bp, Homo Sapiens
ctccaggtgattccgatcctaatcaagtgtgagcccactgtctaatgcggtgcataccatagcaggtgcacgggtcttaatcatcacctcagtcctctgaaacaggcaagtgtgtccattttacagaagaaggaactaaggcctggaaggcaagtccttgcctgagactaaacagaatcccagcaacataggacgaggctggaattcccacacctggactaatgcacagccagtgtttcaacgtcgccaacccagaaatgttttctctccctgtcatgctaattttcagccctttctgggtgacttgttcatcatccaaatatattatttttgttttgtttgactaaaggcaattatatttacattttctctaagtactggaatgtaatggttgaaattcctattcagtgatctggaagaactctaatgttctaaagtgattctttgataattaaagaaagatgtaattatg

SEQ ID NO: 87987 - DNA, 639 bp, Homo Sapiens
ggatttttggtggggtgttgatgcaatgttttgcaactagatagggatgatggctggctgcacagcattgatggagttcaatggtgcaatcgcggctcacggcaactagaggagttataacacaagatttggggtgacggcatggaaattaaaagctggtgaagcacatggcctttagatctggatgtacttgagctgtggaatacagagcataaaggggagcacaccactaagataaatctaggttcttgtctcataaccaggaaaaattagacatgccgacaaattgaaagaagctttaggagtcagatcctgatagagaccagacactgctggaattctcactccaacaaaagattacttcaaggtcggaacccaaacctgggtgaagaataactcacttataacctggcaggatccatgatggtgccagccccttcaccaaatgtgaccataattcaaaaggatcacacagcaagtcataccacctggcacctctgagccccccttgcctcttctgcattccagaccctgctttaaaaacccctgtgttcccaccacagattgaaggtggaattgtttactgctcttcctctgctagcatagagaataaaggaaaatgtcgctccctcttaaaaa

SEQ ID NO: 87988 - DNA, 454 bp, Homo Sapiens
gagctgctctcagctgttctgatgccttcagcaggaagacctcattgcaataagtgaaatgctgctctaggtagaagctctccctgctgtttttaagaagccacattcctcattggtcagtttcttgattgttcgtctgttggagaggtgctccctagaagaacctgccatacgtttcaaagcaataaaatcactgtatatctttctaaggaccttcaagtcatgactccagggaagcctattgggaagtctactaaaaactgcctgatttacaagaaagacctgaacttgtgggctcccatttgatttttttctcctcaggggactcagacattagaaagaaaaagcctcacagatttgaagaactggacccccaaatcaactcacctgcctggaagcaactgggaaacccttccaataagtcctgataataaagcacttcagggtcccaaaa

SEQ ID NO: 87989 - DNA, 496 bp, Homo Sapiens
gaaaattaaaagtaagtttattcacagaaagcatttagcaatgtacctggcatttagtaaatgcttactacatacatggtaccttattttactgtagcaggttttaaatgaggtaatgtaagcagagcatctaaacgagagatctgtcagtggatcagcagagaataggagcctttgctttcacccaattacatgtgattgcaatgtggggttttatttctccatattttttcctgaattaggcaatcttcctcattatcttgtgcttgatgacaccattctcgaggaaacactagtttttgaatctcttagatagataagtagaaaataacttccagattgacttaactccaattctctccagcatgggtactttttctggctgatgttccccagtagagacagtgggggatccaccttccacgttctgctcaggtgaggcaaggaagccacacagctgggctttcctgtcctcaggaaaaagaggggtcacatg

SEQ ID NO: 87990 - DNA, 413 bp, Homo Sapiens
gtgttataatgctgtcaactagatacataaagcagtttgcttaatttatagggtggcaatagtctggaaacataagtcatgtatatatttctaatagtgcaaactttgatgaccacttctgggatatgctaaaggtgcaggtttagtcagtggaaatcagagacaaatcaggaacacaggtccatgtgcaggaaatgatggaaatgctacagtaatacacctgttggttgcagtttggcactgtacactcaactatgcattgctaataagggaagatgctgaacggacatgatggcattcagcacatcatgtactatagtgtaatatcaataaaccattaggtacatttgcctgtgtttccagactttatggccaccctaaatattcttagatacttgtattcctgaatacta

SEQ ID NO: 87991 - DNA, 508 bp, Homo Sapiens
gaaaactcaatataaaagagataaaagatgctcctcctaaagtgagatatggagatgagaattctgccttttcatctttccaactctcctgcagtggcactgaagaatttctgaacaacttgtagggtgccttgggttagagtttgaaaatcactaggctaatcttctgtggttctttagccttctactatatgactcccctaccaaagttcaaagcctgacaaaattaaccttagagaacagtcccttactaaaggaaaaaggcagctctgggatcgtatctgattacaatcatcgacaatttcatggcatttaaagcatacatagggccacacaggagaagctatctataaaatttgcatatatgccaaaagtcattcctaccagacctaatctagcccaaatgacagaaatcatattctttctgttgcagaaaaatactagacctaaaatttcatcaatgttcattttacatataaagccaaacaaatttaattaatgagcactc

SEQ ID NO: 87992 - DNA, 474 bp, Homo Sapiens
ccccacacaccctccccatgctccgtgcaggatgtcctgtgttcacgccagggcaggcacaaggaaagtcagcacggccccatgttcccagcagctcagtctcacctgtgagtggcaggagtgcgaggtgtgagttggatgagggctttggaccccagcgctaaggtgggctacgtggagctcccaggatgctggggtcacaggccccagtgagcctgctgaaattgtagcagagactgtaatattttatctagactacaagacataaatttgctgtgtgttcttgcactaccaactttaataataatgtctttgcatgccatctattctctcatgggcaataacacagatacaaacggtcctgagtgctcagcgctgctgggttttggggtctgctttaggggaaacatttccaaaacctgccgtccggtgcgtttgctcttctgaaaaacgtccccagaaccagcggccgca

SEQ ID NO: 87993 - DNA, 582 bp, Homo Sapiens
agtacaatgtttacattactatactgtcaagctgaaagtataaaaaatgtacatatacattttgagttatgtatcctttttttaaaaaaaagttcgagtctgttgcactaggctgtacatgactaaagttgacagatgctatgctagatttataatcactagttctggtacttgtgtctttgtatgatcaaagcatgcaataagcaatacaaaataccaagccttatacttaaaagaagtttaacatattggttaatatactggttaatatactggttaaacatattgaatgtatataagtggcaaaactagatttttaaggaagtgtacattataatattggagctcagtactgcatgaagagacttcattaaaactaagaaaacatttatttggggagaaattttaggcatttaagaacttgtatttttctattttaaaaagttaaattattccgtaatttggaagaagtttcgttgaatgtaggacataaccgtttgaagggttttcatttgaaaaattgatgttttttgtgccttaatattttgttcttttaataaaaatgctctgaatttgaatgat

SEQ ID NO: 87994 - DNA, 1357 bp, Homo Sapiens
gatgaatctcatcaaatttaaatcacttgcacaatttcatctcattaggtagttgagaataaggactcggatccaatctggggtgctttccactatctaaccctttcttcccaaattccagttttatattctttttccaaaataaaagtccttctaaaatcgtatttcagtagtttgagctcctactctgataaattcctgttagtagttttgaaacaggcctttcttatggcttatactaaggccacttaaaggtaaatttattttggttttaaaatactatgcatctgttataacctacgaccctaagatatagaaagtttataaaagattactgaaataagacatgcttgttatttcttgatatatggaaattagaattgatttcatatactgtttgtcctgaaagtcaataaattgggtcacttaggagatagcttgagcttattcttagtgttactgatataatttctaaacagttactaagcagtgttatacaaatggactaacttctgatttgttttttccagagggaaaattgcaacccttgcctacaaaccagactgacagcataatttcttaggaaatcaagaatcaatacagggttatttctttagattaaaccttaaaagcccccttggaggctgaacgaagcagaggatagccatgcaatacacttgaacgtgaaaaatggtcctctttcattggagaggtcttccatcttcagctaaaccgacagagtggtgaacaagaacaaggggaccccttgttgaccaaaataatccagacaaattcaaatcgagccctttccaaggcaaggagtggaacaggcccaagggtggactagatcacatcttctgctcacaccaccactgagcaaccctctccaggactgccacctatgcataggtcatgccctgtgcaagagcacataaagtgggagctgaagtcctgcccaggctccattcaccaagcagagcttatgttgttgtgtgtctgtgtctacccagaggatgtgggtcctttttaaaatgtgcaccaatgcatcttgtatgagctggcaccagctcggaccatcccaccctcataccctggtcctatccagggttatattccctactttagaagaattaattatttttatgaacgtatttagtttattgtaaaaaatgaaatatatgacacaaattgaaattaatttcagaggtaaaggtcagaatattaccatgtatgtgaattatgtttgtatgtatatgtatatatcaagagagttatatgaatatacatttttgtgtatcagaagtgaggacaatttaactttgttaagtgtttgaaataaaattattttgagttttgg

SEQ ID NO: 87995 - DNA, 596 bp, Homo Sapiens
  misc_feature (125)..(299): n is a, c, g, or t
ctaacggctagcaggcccaagaaccaggaaaagctgattaaagttcaaaggcggggaaaaaaaacccaatgtcccaacttgaaggcatttaggcaggaggaattccctcttatttatgagactgnnnnnnnnnnnnnnnnnnnnnnnnnnnnnnnnnnnnnnnnnnnnnnnnnnnnnnnnnnnnnnnnnnnnnnnnnnnnnnnnnnnnnnnnnnnnnnnnnnnnnnnnnnnnnnnnnnnnnnnnnnnnnnnnnnnnnnnnnnnnnnnnnnnnnnnnnnnnnnnnnnnnnnnnnnnnnnnatcgtcaaaaccccctacttttggtttcttgataaataaaataatatttatcttctgttttagtggaataaaggtatggaaaacgctttgatcagtttctgtcttttgttgatctggaattgcagtatcattgtgattaaagaaactaaaatacagtgtaattaggggatcacatccaaattttgcaaaccctttggtaatgtttagaatatatttgattaattcattttcaattcaacaaacacctgttaaatactaactatatgtcagctaggtacatgttatatgtcaatgaaa

SEQ ID NO: 87996 - DNA, 675 bp, Homo Sapiens
gcggccgctgctctgcattagctgtgagcttctcattggctttggaccctgggttgatatcacacttgattctctgagcaggtgctggcttgtgacctgggcagaggagatctgccctggaagttgggggcccgccccgagctggggctgagtcactgcagctgacctttgctgtagctgctgctgagcctcaggtcgctgggtgctgctgaagctcagggatacagctggctgctgcaggaacatctggacgttggagtcctggaccaggcagagctgctcctggatcttgtggagctcttcctgttgccaccggatattggcctgcaggatccgcgtccgctgctctagctggtctttgatggtctggaacatgctgaactgtgccgaaaactgtgccatgggagcgggcgtgctctgcagaacggtctgaggcaggagctgctgtgtgaggtcgcaggacaatggggaaggcaaacgggccggcatggtggctgcctgactgagcccggggacaggtaactcttggggcaaggtggctaatcttggcaaagcccgggtgctggcctctaccatcaacttggtgggagtggacgtgagtgatggaaggggtgagacgttagcggtggtgtgaagtcatgcagagtaacgacgggaagggggggaggttcgcgg

SEQ ID NO: 87997 - DNA, 626 bp, Homo Sapiens
  misc_feature (68)..(68): n is a, c, g, or t
cagctccagccccagcccaggtgggccgcccctggcggggtcgcttaccaacggacaccaaccccagnatgcatgggccagagggccggcccccggcatagatgtgcacatcggttttccagtgtgaacaaaagattacgaaacctagaaactgttggttccgtgtaagtagttgactacgtgttttagaactgtgctgaagacatctgtaagactattttgtgggggaaaaaagtagtttcctttaaggtaaaaagcattttatatgatccttagcacatttttaagttttatcttaagggagacgcgcacaaaagcggctgccaaaccgtttcgtcatcctcacagcaaggaccggacgcttgctagccaccccggagcactgctctccttttaatcatgtattcatctattttaaattgccggcgacgacttttgtctatttatgaagaaaccttgagaacgaagttacagcttatcctaccgtgtgtgtggttttggggtttcgtttgggtttgggttcttgacgtcgtttgcagctgtttcctggccctggcgagtgtctgtcttggtgcccagtgcttctctcaaatctctttataataaaacttctgaaaagctgaaaa

SEQ ID NO: 87998 - DNA, 383 bp, Homo Sapiens
  misc_feature (62)..(62): n is a, c, g, or t
attcagagcccagctggaacctgaatgtcctgaccccccatccagtgccccccttcctactntatgctgcctctcgggtgacacacacagcagcaagtgagccctgcagacagagacattctagaacccaggcctgggaccagtgctcaggagccatactctcagctagattgccttcagcctgccaggaggaggagcagcccagtccagactgaaagcctccaaggaggaagttctaccggcttctccatgcctccaaacccactgtaccttgtgcattccatctggaattttcttctgttgaaaggaaggtgctgggtgggaggaggagggagaggatcaggaaaaataactaataaatactaggcttaatatctgaaaaa

SEQ ID NO: 87999 - DNA, 360 bp, Homo Sapiens
ttttaagctgtttttcatttttttattgctgttaattcaaggaaaaaaggttgcataaaatccaatctgttctagaaatataagtggcctttccagtacataacatttcaaatatcaaagtatatggtaaacatacaaataaggagaaggtaacatacctcctatgtacagtacagtattttaaatcataaaataagctccataaagtacaactggcaagtgattcacaacgcggcccataagtggcttatcaaaactctcacttgaacaactcaactgcagcttaacaattaatttaataatgtggtccaaaaatacccagatcaaataaaatatatttaatcaaaataatttccttta

SEQ ID NO: 88000 - DNA, 548 bp, Homo Sapiens
  misc_feature (41)..(41): n is a, c, g, or t
  misc_feature (312)..(312): n is a, c, g, or t
tcagcgactgaagccctcttgtggctgaagagaggtctcanatttttgaagggatttttgacagaagtgaaaaatggggagaaggatatccagacagccctaaataatgcatatggtaaaacgttgcggcaacaccatggctgggtagttcgaggggtttttgcgggacacacaaatgtctgatggtggcccaggagggctgtcactcagaatcaggcgggtgcagagtggcctgcaggacatgatgacccagcatgagacaggatgcatcacatctgggtgacgcctctctccaggggatcagcctggaantaaatgcctctcctgggccaggatgcccagcaagccccgagatgcctcctggagagaaggaagtatgtgagagtatcctgagttaagtgagatctaaaatgcctgagaaaaccctgaaatgactgagtctatctggaacttatttgattgtttttctgccatcagatagaatgaggtctcaaaagagaaattaaatcatattacaagaaaataaagctcaattgcttgcctaacaa

SEQ ID NO: 88001 - DNA, 990 bp, Homo Sapiens
  misc_feature (799)..(799): n is a, c, g, or t
  misc_feature (851)..(851): n is a, c, g, or t
  misc_feature (880)..(880): n is a, c, g, or t
  misc_feature (882)..(882): n is a, c, g, or t
gggcacttgtgaaaatggatctttaaatatggaaataaatggtgaggaagaaatcctaatgaaaaataagaattccttatatttgaaatctgcagagatagactgcagcatatcaagtgaggaaaatacagatgataatataaccgtccaaggtgaaataatgaaggaagatagaatggaaaacctgaaaaatcatgacaataacttgtctcagtctggatcagactcaagttgctctccagaatgcctctgggaggaaggcaaagaagttatcccaactttctttagtaccatgaacacaagctttagtgacattgaacttctggaagacagtggcattcccacagaagcattcttggcatcatgttgtgctgtggttccagtattagacaaacttggccctacagtgtttgctcctgttaagatggatcttgttgaaaatattaagaaagtaaatcagaagtatataaccaacaaagaagagtttaccactctccagaagatagtgctgcacgaagtggaggcggatgtagcccaggttaggaactcagcgactgaagccctcttgtggctgaagagaggtctcaaatttttgaagggatttttgacagaagtgaaaaatggggaaaaggatatccagacagccctaaggacacacaaatgtctgatggtggcccaggagggctgtcactcagaatcaggcgggtgcagagtggcctgcaggacatgatgacccagcatgagacaggatgcatcacatctgggtgacgcctctctccaggggatcagcctggactanatgcctctcctgggccaggatgcccagcaagccccgagatgcctcctggagnagaaggaagtatgtgagagtatcctgagntnaagtgagatctaaaatgcctgagaaaaacctgaaatgactgagtctatctggaacttattggattggtttttctgccatcaaatagaatggaggtcttcaaagagaaa

SEQ ID NO: 88002 - DNA, 495 bp, Homo Sapiens
cacaatgacaagcccttcagcaccgtggatagggacagagactcctattctggtaactgtgccctgtaccagcggggaggctggtggtaccatgcctgtgcccactccaacctcaacggtgtgtggcaccacggcggccactaccgaagccgctaccaggatggtgtctactgggctgagtttcgtggtggggcatattctctcaggaaggccgccatgctcattcggcccctgaagctgtgactctgtgttcctctgtcccctaggccctagaggacattggtcagcaggagcccaagttgttctggccacaccttctttgtggctcagtgccaatgtgtcccacagaacttcccactgtggatctgtgaccctgggcgctgaaaatgggacccaggaatcccccccgtcaatatcttggcctcagatggctccccaaggtcattcatatctcggtttgagctcatatcttataataacacaaagtagccacaa

SEQ ID NO: 88003 - DNA, 574 bp, Homo Sapiens
tgcctcaggttattcaaataacatcttcaccattgatcaaatgctcaagaaaaagcagacttgtacagtggccgatgcaactgctattaaacaacatgtgaagagagctactgatacctataatttaggaattgcccttgaacaccgaaaagagatgctaaacctctggcagaagatccgaggggatttgattgggatggactctagaaatgagtccttttatgacaccttttcaacttatacatggtcctggaatgtttgccaagaattactttctcctaaggacttaaggttatatgatgcctatgtgaatagaaattcctcccataactccagatcctcttcctcatcagataccagtgaatgttacacagactcaggaagaaaaagaaaacggaaaggtttaaagggatttcaacaatgaaatttctacattttctaaacagctcatcaaaaactactttttcatagttatcaaaattattgtttcttgcttttgtctaagtacattcttagaagctggaaattttgacatcttttggattctgaccagtaaaaaagtttaagtcataaa

SEQ ID NO: 88004 - DNA, 595 bp, Homo Sapiens
cttgccagttaatgatggtgcaggacttgggaaaggatcttaaacccgcagggaaaccatcagatctacagatctgctatttggaattttcagcctaggcttttgggaaattcatatttatttttaacttccttggatccttggaaatgaaacaacataccctttgtcatcagtcagtatttattgagcacgtgctgcgtaccctgggctgaacagcatacagggtggtgtaaggaaggacccgtgtctttaataaaataggggtctctctccacctaagtccccttgggttagatggcttttctgcaggctgcactgacgcagggatgtgtgagtgacactcaaggacaagaacaattctcaggctcattaattccagtcctccctcctccctgtcctatggggcctgcccaccccaccccaccccagggcccacggggaccagagaggaacttagtacccttggagtccagctatgaagtagaaactggaatgcagtggtttcacttcatcttccaaaagtagcataagttcttgtttctaaaatttaaagtcccacacagttgaagaacatttttaaaataaaactattaaa

SEQ ID NO: 88005 - DNA, 356 bp, Homo Sapiens
gtcctgcaagactgcagatccacaaaagctggttttatagaggatcatgaactatgcacaaactgggttcaagactttttttctcaagtttagtaggatatttagaaaaaccaaccttcctcagagtgactgcatctcattgccattacatgcgttctatatattcgatggacatacacctgcgtatgtatatccaatatgtgtgcgtgtgagcatgcgtgtgcgtatgtgcgtccgacataccacttcccgtgctgccggcgagcattgagttgtagaaaaactgttgttttaaaattggggatggaagtcaagaatatgtttgtttgtttttgggttttgttgggtttgagggg

SEQ ID NO: 88006 - DNA, 525 bp, Homo Sapiens
  misc_feature (28)..(28): n is a, c, g, or t
  misc_feature (165)..(175): n is a, c, g, or t
tgaaaatgggtctttcagtcttggcatntcatttaggatctccatgagaaatgggcttcttgagccctgaaaatgtatattgtgtgtctcatctgtgaactgctttctgctatatagaactagctcaaaagactgtacatatttacaagaaactttatattcgtnnnnnnnnnnngaggaaattgaattggtttctacttttttattgtaaaaggtgcatttttcaacacttacttttggtttcaatggtggtagttgtggacagccatcttcactggagggtggggagctccgtgtgaccaccaagatgccagcaggatataccgtaacacgaaattgctgtcaaaagcttattagcatcaatcaagattctaggtctccaaaagtacaggctttttcttcattaccttttttattcagaacgaggaagagaacacaaggaatgattcaagatccaccttgagaggaatgaactttgttgttgaacaattagtgaaataaagcaatgatctaaactaaaaaaaa

SEQ ID NO: 88007 - DNA, 349 bp, Homo Sapiens
tttttttgttctttttactttatttgacacaacctggaggcagactattgagggcttgcacggtggctccatcatgctgtccgttgtcccaattttcctgtttcttttttatcttttcttaaattattgcaccaaacttactctccagtaggtggctttcaagaaatacttcatatttaaatgcccatgccctcatatttgcttctgcattcacagatgaaattaagtttcttcttaaaagtttcaaatgcgtgatatcttgtgggttaaaccacttacaaaacatgggagacaagttttgatgctgttctagaaaccaaaccattgccagcaaaacttctggctggct

SEQ ID NO: 88008 - DNA, 513 bp, Homo Sapiens
acatacctggttgtacaactttagcatcggggctgctggaagggtaaaagctaaatggagtttctcctgctctgtccatttcctatgaactaatgacaacttgagaaggctgggaggattgtgtattttgcaagtcagatggctgcatttttgagcattaatttgcagcgtatttcactttttctgttattttcaatttattacaacttgacagctccaagctcttattactaaagtatttagtatcttgcagctagttaatatttcatcttttgcttatttctacaagtcagtgaaataaattgtatttaggaagtgtcaggatgttcaaaggaaagggtaaaaagtgttcatggggaaaaagctctgtttagcacatgattttattgtattgcgttattagctgattttactcattttatatttgcaaaataaatttctaatatttattgaaattgcttaatttgcacaccctgtacacacagaaaatggtataaaatatgagaacgaaaa

SEQ ID NO: 88009 - DNA, 525 bp, Homo Sapiens
ccaatgcaatacaagcattgaaatggatggcatctgatcctgcttcatgtgattcttcatttagctctggactctttacatcattaaggtaccctgaatatattcagtatggctttttctttgcaggaatttaaaagcaaccctatgaatataacatttgtcaaaaagagcaagtgccaagccagttgagaataaccttacaatgtgtacaaggattccagcttatgcaacatgaaaatggcaaggatgaagacctttatgatgatccatttccatttaatgaataggaagaagtgttatcaattctgttgatggaccccttaatctcttctactgattatcttctacttgaaccagtgccaaattaatgttgcaagctttgtcttgaaatataaacatgcactaaccagtggaaaagcttgcctaagtgattgttgtcataatgacacggattcaatgaataattctattcatggaatttcctccccttaataaggaaagagtaaacaaaacaacactataaaa

SEQ ID NO: 88010 - DNA, 732 bp, Homo Sapiens
  misc_feature (25)..(25): n is a, c, g, or t
  misc_feature (41)..(41): n is a, c, g, or t
  misc_feature (52)..(52): n is a, c, g, or t
tttaatagggactacctatagggantaggggccctcgaggnccaagaaaganggcacgaggcgtagaagaggaaaggctgggggtttcggatggttgtttttgaagccatcagtattcttgaagaagcagcatatcttgaactgtcctatgggtgaaggctttgatgtggtcctgtaaaaactgggaagatttggaggatcatctgaatacccatccaacagagatccatgattcatgtatttctcaagacagccatacactaaaattataagatcataagaatattaattatattctaccaatgcaatacaagcattgaaatggatggcatctgatcctgcttcatgcgattcttcatttagctctggactctttacatcattaaggctttttctttgcaggaatttaaaagcaaccctatgaatataacatttgtcaaaaagagcaagtgccaagccagttgagaataaccttacaatgtgtacaaggattccagttctgctgctatataaaccagcctcaaatagtctgagtctgtgatatcactgggtcacccccatcacttcagtagaaggcctgccactgcctgacatgtgaaagagagcatccaggataagccacctgtcaaactgtcaactttatgcagatatacaagtgacaggtttgagatcagcccagcccagtcaacagagaaatatcccagtagaatcattatataattaaataacatt

SEQ ID NO: 88011 - DNA, 486 bp, Homo Sapiens
gcagtcaaacccaggagcacaagccatcgacccaaaatttgctgcttcagaaggatgagcttgacagacaaaatcccaagcgcattaacgcagtctcccatttgccttcgagaacacccctgatccagacaaaaaagagcacttcctccagcagcagtgagtttgaggatctgaatgcatatgcttcccaaagaaatttttacaagagaaacttaaaccgctactgccaggagcactggccattccagccatgcctcactgggaggccctgagcattctagccggcggctgcacagctgctggggcatctccatgaggaagagggcggtggacaggagtcatgaagactaattcggaaactcccctgaaggaggagaagacatctgagccatccttgtgccaccaagcaagagtcactccagctcctaaaaagccaccatgggaagacctgcctccaattaaagttcttgattgcaccagaaaaaa

SEQ ID NO: 88012 - DNA, 575 bp, Homo Sapiens
agtcccagctctgccagttatgcccagctgtggggacttgggcagctcgtttagtagcaccgtgcctcagtttcccatatgtaaaaggccattttgagtgcctttcacagccctgcataaggcaggtgtctcagtgttcactgctgtctctccagctcttagtccagtagctgcatggtgagtgagcgtagggcgcaccctggaaggctgccaagcccaaagttgtgcagagcgctggggactccagactccccacagcagcagagactcgggactgaggcatcctctgttcacaggacatgctggcatctactgggtcagggctctgctgctcggtggctgtgcaaccttgggcaagttcctcaacctctctgtgtcttcgtaccctcatctgtaacatgcgtgtcgatagaccctactactcagggttgatgagaagattaaatgtgcaaaacctgcttgactgtgcccacaaatcctgattgtaggaataaattaatgactttttataaatattttgatcagatggactcagatgatcacagatgtcttcacatgcctatgactaattttgt

SEQ ID NO: 88013 - DNA, 465 bp, Homo Sapiens
tcccgctctcctcgggctcgccgcccccgccccgtgcaccctcccccatcgcgagggccccttccctcccctccctgcgggcgggcaattcaaacccgaaagggcgggaaggcggcgctcggggttggcgggcgggggaaagcgctgccgccaaaaaaccgccccctcgcccacgttccccgcgcacgagacgcgcgctgtcgccgcccacgagttccccgggctgcgcgcgcctccctctcccgccctcgacggctgccatagcaacggcgctgggctccgcctccggagggggtttgtttgcgccatctgcagctgttgctcctgcctgtcgcggtggtgcgggctccgctgcactccacggctgcgctccggtccagcactcgcttctcggggtcggcgagccggagctcctgcgcgcgcttcgttcttatacgaacgtcgggctcactcatttatgtccta

SEQ ID NO: 88014 - DNA, 628 bp, Homo Sapiens
tgcggccgcctccctcaagagcaaggtcctgagcgtagcagaggtggccgcgaccacagccacccctgacggaggccccagagcgactgcaacaaaaggagccggggtacactcgggcgagaggccccctcactccctctctagtaatgcaagaactgcggtccccagcccggtggaggcagcggcggcgagcgatcccgcggcggcccgcaatggactggccgagggcaccgagcaggaggaggaggaggaagacgagcaggtgcggctgctgtcttcgtccctgaccgccgactgcagcttaagaagcccttcgggcagggaggttgagcctggggaggatcggacgatacgatatgtccgatatgaatccgagctacaaatgcccgatatcatgagactgatcaccaaagatctgtccgaaccctactccatttatacctatagatattttatccacaactggccacagctgtgcttcttggccatggtaggggaggagtgtgtaggtgccatcgtttgcaaggtggatatgcacattaagatgttcccgagaagggatatagccatggttagccggaattccagatgctggaaagatggcatttgtactaacttggttagaaag

SEQ ID NO: 88015 - DNA, 420 bp, Homo Sapiens
ttccttaggagtgtcagtcaggatctttgattttggagcacaagccttctgcgtgctactgactgggtcctggcctccctccttccatggcatcgtcgtgaatgggaatttccaccactgcctccattagtcagaagattgaacatgttgtaactgtagaaagcccgtcatccttgtgtatgcacttgctgaaagatccactgaagagcaaccttcatgaacattaccaggggacttgtgctcctataaaacgcactgttttcctcactgcgaggtgggtctctcaccgcgatggactatctgtgatcacagagcacttcttccctgggccttccctgtcacactgatggtgtgagtatgtagggcaggggtgggagtgaacatgttaatctcttttgaataaactgattttgaagtaaa

SEQ ID NO: 88016 - DNA, 863 bp, Homo Sapiens
tttttttcctcactgatagctgatcacattaaacaggtacaggtgctaagaaagtttaagactgatcttttggcaatgacagtttaggttaactctgtttggaattcctaaaaataaaaagaaatcccttaaaaaaggctgacaaactgaccacttggccttgaatcgactgttagggtcacacctgccaatgccaggggacatcacaaaaaaatagagaatgccaagataaaaagttcactgcattcaatttggcctaatttcttgataatagtttcctattagattttccgattaatactgatggctcttacctaggctgtgataattaggttttgatctattgtgacattaatgatcacaatcagttgactttgaaattgtcttaattaatggctctttccttgtcagcttttgcctccagtgcaggattcattcccttccccactgccttgttttaactccttctcttactgacctcagaaacaaatagcattggaggatcactttcttcccataaaacaagactttaaactattttaaaacatttctcttgacagaggagcaatatgagatgatgttagatgaaatgaggatcagaatgaaaaggcaagagaacaagctgtcaatgaacaggaaaaattccatcttagaaaacaaccaaagtcaagcacaatgttaaagtgacaagttgaagtaactctaaaaagacaagatgaggtagattaaaatccaagaaagtcagcacaagcaaaaagaaaccagaattgtttttatgaaactatctaaaaaaccgacgcgtgggtcgacgatatcccgggaattccgaccgttaccagcctgctttttgaacacgggtaaga

SEQ ID NO: 88017 - DNA, 523 bp, Homo Sapiens
gaatgcctgagtgtgtttccagattggggggggagaggtggtgttttactttttgacatgctcttagcatgttatgctagtcattctggatcttatgtttgcaaattctgttgaacattcagtgatgtatttgaaatgagaaagtcctttataacatagtgtgaatgtttgtggccaattcaattgtggaatcttatggctttgtttttactttgggtagaagtttaacttccattgttcagattttaggtttatctagtgaaattgtgccaggtagttgtctaaatatggaccaattttgggaaatgaagattaataagtgtatatttgattctagataatcctttactcaaaatcataagttaaagattcacatcattaagagttatctaacttttatgttgtcaaatctttaaatgtggatgatattcagcattctatctatgaatttcctttaggaaaagagaaaaattcagtcaccaaaccctttcttggagacaaaatttaccacatatcgaaaatg

SEQ ID NO: 88018 - DNA, 516 bp, Homo Sapiens
ctcatatcgatctcaatccaaatactgttgacgagatcataattgattgccaattttgatcttttggctttggaattcaaagcttagaataattttctgccaactaccacaaagtccgcagtttgaatagaagagtgcaaagcaacaccagcaaggcccaggaccacagctattaaagaagactcaccaccaaggagattaccgccatcatagctaccattagattactggtggtcagcggcttgttctgagacctcaggttctcttctgcaatgtgagccagtctcttcatctgcccccaggtcggtggagttgcttggggagttttactggtttccatctgctcaacagagatgttcatctgagccgtctgacgaactgggggcgcagagacattctgaggtcttttcctcttcttggactctgtctcatggcacagcttaagatgtcttgtgggtacccaaacaggaagctgactctctcctggtgaaatacaagcaaatcctcaacctcaaa

SEQ ID NO: 88019 - DNA, 489 bp, Homo Sapiens
  misc_feature (297)..(305): n is a, c, g, or t
gaccaccagtactaaaataactggacactcattgtacctcccagcgataagtatgtgtaacaggccagtgtgttgtccccatgatcatgaattaggcttgggatgcttccaaatatattcaaggtgttggaacaggataggcagctgtgactccctcaagagtccttagaattctaaataaaatgcagagccatcctaagacacaggggtatggacaaggcctggtgacaccaaaggtgcttgtatccaattgaaaaaggtgcctgtctcaatttcataccacctttattgcagttnnnnnnnnntcacactctggggacacttggtggaattacagagccaccatcatcattccaaccactatttcattttctgtagttttacctgtgtgcaattactccccctccattctgttccacttcttactccttagtaccaaatcctccccctcgggattgagcgctgctcctggttaataattcctactac

SEQ ID NO: 88020 - DNA, 550 bp, Homo Sapiens
ctgtttcacagtttttatttaattttctagtttcacgttaggagagctgtcttcttcacttaggatggtaatttcatttcttgaggtagagttttcctcttaaagcttctcagacttatatctcagaagtttaatgtttgctgcatcttactgcatgtcatacatcactgctttcaactctttctccccttgagaaagtacacctttaatcttgattgaggtgataactctctcttttaactttttcatcagctcctgtcacttttttcctctgattataactctgctgttaaagtctaactctaaaatgtttgtcttgatggcctacaaaagcaatgttttcctccagtataacttgattctgtacacttggcttttcttaatgtgtctgaattattccatgtaaccagaaaagttcccatgctgttactaaaagccatgtacttccctgctcaaggtactagttttctgtttacactcatagtgtgttctcacaagcttgaccacacattcttcctgtgtctgattaaattcaagtactgttttcact

SEQ ID NO: 88021 - DNA, 399 bp, Homo Sapiens
tttctaggcaagattgctgtatagttggtgctatggacgttccagtatatctcattgggagagacatagtatctgtctgtcccaacttcagtgagttaagattggtcagaagatttagctgtatacctggtccaccatttataaggttcctcatcagccatacattaccttaagtaatggtttttgcaatggacttctctagaagtcacaaactggaaattttttaattccatcattctttctgcatttagtagttggaattctttagtagggatcaatttttcatcattatgtatttgatatcttgaaatatagtttgaaaagaaaaagcaagatccatttgtcattattttctgttattgatccattttctgaataatgaattggggtcctgatccc

SEQ ID NO: 88022 - DNA, 723 bp, Homo Sapiens
  misc_feature (418)..(488): n is a, c, g, or t
tttatgaacaaacacttcatatgcactttattgcttttaggtttgaattatctcacggtctgtttgaaaatgaaagactaagagatcgtaagtatatgtcagatcagatgaactaagttgcttaagtcagtggatcccatatcaacttgtagccacattgttgcattcagttaaccacctacagtaaaatgacatgttagcaagagaagcaatataccaattatgctgcaagaaactaagagataaatcaactatttaaaacatgtaataaaggcagaagagttaaccatttgtgagactttagcaaaattcatttcatttaaaatcagacacaccataagaagttcaggtccaacaaatcttgtgggtgttgccttccctaaaagtgatcaactagctaggcagaatggctggcacnnnnnnnnnnnnnnnnnnnnnnnnnnnnnnnnnnnnnnnnnnnnnnnnnnnnnnnnnnnnnnnnnnnnnnntggatattatgaggtctcattgcaaataaataaataaataaatgttgtcaactgaagctaacatagcccatttaattgttacggtgttgaagtatttaaaaattagcctgcaggtaaagtaattacatgaaggttttcttttttatttgtcttaagtaaggttttttaaaacctcatattaaagtgcctgcaagaaaaaaatagtgcatataaaaatattttcctcagagcataa

SEQ ID NO: 88023 - DNA, 490 bp, Homo Sapiens
gagagccgctggatgaaagaagaatcactccactgcatttgtgagagtggccaggtcacctgtgtggtggagatttgtcccccggctccctgtcccagtcctgaattggtgaaaggaacctgctgtccagtttgcagagaccgaggaatgccaagtgattccccagagaagcgctaataaaagttttgtgctgttgagcaccaaatgggaaatttctcaggaagagacatttaggacttcagaacttttaacttgtagtcacattgttgatatggaaaccactgacttaagcaacttagttcatctaatcttacatatacttacgatcttttattttttcattttctaacataccttgaaataattcaaaactaaaagcaataaagtgcatatgaagtgtttgatcataagaaatatttcttactgtaagctgtcagttttatatgccacacctggaaataaaaagaatatcatggaatatttaaaaaat

SEQ ID NO: 88024 - DNA, 417 bp, Homo Sapiens
tatagaaagactctctctaacgttagctacgcgtgcagaaatgtggggcgcttacaagtgtgggcagccgcagcctgttcctcacccctgtcctaacgggacatactccgcgcatgcacatttaggatcaccgtgtcttctcgttggactgatctgtcgttaggaccctggacccaagtaattgtctttgctctgaagttttgacagtaacaaaggcattccagctctttctttttcactcctgtcggtgtaacgtgccgtttttcatcctttgacttttagcccgcctgtgccctgtctgaagggagttgtctgtggacagcacggagtggtgggtgtttgtaatccactctgccagcctcagtcttcaaaccgcgccgtatggaccaattacatctgccctttactcttcaaaaa

SEQ ID NO: 88025 - DNA, 538 bp, Homo Sapiens
gatgggatggtagggacagaaactgcagggtccgcagaaggaactgctcaccgaaagccaacaagcttgccctgtggaatcccagaaaggcccaggaacttcgggacatcactgaaggcagagtgaagagaggaagagaagacagagaaatggaggggagaaaactattaaaataagtaataagaaaactttccccagaagtgcagaatctgaatttccagtataaaagggtccattgagcgccaagaacaatgaaggaaaaaaggtcccactcaggcctatgtatcattgtgaaatttcagaactagagggataaagaaaagatcctaaaagcttcccgagagataaaaaagaagatttttacaaaggatcagcaatcagaattgcctcagactgctcaataaaaacatcagaagctagaagaaaatagaatgaggcgtcaaaatcctgagggaaatgattcccacctataatttcatattctgctcaattatcaattgagtattgaagggaaataaagacatttttagaaaaaaaa

SEQ ID NO: 88026 - DNA, 1066 bp, Homo Sapiens
tttcatgtacattcagaatttttattttaaaacaaagaatcaaacaaacaataatggaaaatccatatggaaatattcacaatcttctcagtgagaaataggaaaacaacttccctgccttactgccaaactgaggagccagaagttgacgtgaagttggaaggccacctttccagctaaaccccactccatagctacgtgcatttttattcaaaggctccaggagcagagggaacagtgagaactaagaaccaaaatactgtcactgacaagggtttggctaaagggtctgagatgtgtaagcaccaagaagggaaagggagactgagcaacatatgaaaaaggggctgtaggaacaaacacagagaaaataagtcaacaataacgtacttccacccagagcaaagtgacagtgcacatacattcatcctctcaagtgtgggctacactgcacattgactcatactgtctaaacctggtttattggaaagattcaagtcccctgagggcattcggcataggaccacagtgacatggtaacagacatacgcaagcgtgccgtgagcctaaagcaacaacacactttagataataatcgctcagaaaaaaatcctctcccagagctgaggttacaaattccaagtttgctataaacattctttggggaattcctttaaaggtatgagttaaaatacaacagaaaatcaacacctaaaatctcctaaagaacaaagtggaaaaataatgaatctctaccaagaaccaattattttaggtttcttatttggatggctctcccacgagataggtggcgggattacttcaaaagtaatgagactactacaagaaggagttatttcatccagtgaggggaacaggctttctagaaatcactttctcttccctggactccatccaaaattagaacccatcaaccatcattaactacaatgcccatattagttaataatcctagatttcaagtactactacatgtaaactattatcttaaagaaaaaagctccaaaggaaatcagtagctttattatataggtatatgactttt

SEQ ID NO: 88027 - DNA, 492 bp, Homo Sapiens
gcggccgctcactgaaatagagagccaaggagacacaggccccagctagtcccacgccagcttctccccgcccggaaagcagccccgcgcactttcgatcccgagaccctctacgatgctcggggtcgccagaaatgccaccgcaggaagcacctaccactatccggacggaggggagctccctgccgcctcctcccgcccaaccgcgacggggacccacacctcggagcagacataaggaagcctcaggggtggggagaagggaggaagcaatgcgggggcggggagggaagaggacccagaagtccaggtatcagtcagcctccaaaaaagggggaggggtgttatccgtggtgtttggggaaggagtggaacccagaagccatcttgggatgggaggaatcaatcgcgatggctccaaaggttgctcctcgcgggactacccgcaaccccgcccgaccgcgcttgttcccgtgaaaccccgagcattgg

SEQ ID NO: 88028 - DNA, 520 bp, Homo Sapiens
acttcagttgggctgaggcggaggagccgccgcttctgacctcgctctggctccggtgcgcgcggctgagcgcgtgcgaggccccgcgcgtcgggcaggggcggcggcggccactgcgcgccgccctgaggagcgccccagcggcggcgcgactgcggctgaggagagagccggctccgggcctccgcgtcctcctgctcccccggccccccgcctcctcgggggggcggcggcgactacggactggtgacggccggctgcggcttcgggaaggacttccgtaagggcctcctcaagaagggcgcgtgctacggggacgacgcgtgcttcgtggcccggcaccgttccgcggacgtgctcggggttgcagatggtgtaggaggctggagagactatggagttgatccatctcaattctcagggactctaatgcggacgtgtgaacgtttagtaaaagaaggacggttcgtacctagtaatcccattggaattctcaccacaagctactgtgagttgctgc

SEQ ID NO: 88029 - DNA, 369 bp, Homo Sapiens
cgcagatgggagaaaccatctcctagtaatgtgactgaaaggaagaagcgtgggtcatcttgggaatcaaataatctttctgcagacactccctgtgcaacagttttagataaacaacacatttcaagtccagaattaaattgcaataatgagataaatggtcatactaatgaaacaaatactgaaatgcaaagaaataaacaggatcttcctggcttatcttctgagtctgccagagaacctaatgcagagtgcatgaatcaaattgaggataatgatgactttcaattgcagaaaactgtgtatgatgctgacatggatttaactgctagtgaagtcagcaaaattgtcacagtctcaacaggcatt

SEQ ID NO: 88030 - DNA, 466 bp, Homo Sapiens
acagttgtggatgctgagactgactccaagtcttctaaatgagtgtggatggtgtcttctgaagtctttgacaccgtaatgacttcaggaatttggtcaaagatcaaggtgctctcatcagatccaactcataatgagagacgccagttgtactctggagcacttcttccttaatttctgatatgtctagctttccaagaggtcctgaagcagaaggtgcattcacatggagaagttttggctctggaaaactaccagtattccttcaactttattattgaggaagccaacataaatcaacacgattcttttcccacaaaagttcctttccaacctttgcagctgtctgcccacagatgtttcacatcactgtacttatggcatttttgtcctatgggccatcttctctgcttctgttgcgagacatgagacagattttcctaataaaacttaaaacacccaaaaa

SEQ ID NO: 88031 - DNA, 1165 bp, Homo Sapiens
gcggccgcatctacatccaggcccacatcgacagggacgtcctcattgtcctcgtaagagatgctaaaaaccttgtacctatggaccccaatggcctgtcagatccctacgtaaaactgaaactgattcccgatcccaaaagtgagagcaaacagaagaccaaaaccatcaaatgctccctcaaccctgagtggaatgagacatttagatttcagctgaaagaatcggacaaagacagaagactgtcagtagagatttgggattgggatttgaccagcaggaatgacttcatgggatctttgtcctttgggatttctgaacttcagaaagccagtgttgatggctggtttaagttactgagccaggaggaaggcgagtacttcaatgtgcctgtgccaccagaaggaagtgaggccaatgaagaactgcggcagaaatttgagagggccaagatcagtcagggaaccaaggtcccggaagaaaagacgaccaacactgtctccaaatttgacaacaatggcaacagagaccggatgaaactgaccgattttaacttcctaatggtgctggggaaaggcagctttggcaaggtcatgctttcagaacgaaaaggcacagatgagctctatgctgtgaagatcctgaagaaggacgttgtgatccaagatgatgacgtggagtgcactatggtggagaagcgggtgttggccctgcctgggaagccgcccttcctgacccagctccactcctgcttccagaccatggaccgcctgtactttgtgatggagtacgtgaatgggggcgacctcatgtatcacatccagcaagtcggccggttcaaggagccccatgctgtattttacgctgcagaaatggccatcggtctgttcttcttacagagtaagggcatcatttgaccgtgacctaaaacttgacaacgtgatgctcgattctgagggacacatcaagattgcgattttgggctggtgtaggaaaactcggggatggggtgacaccaagacatctgtggactccagaatacatcggcccgagataattggtttcaggcctagggaagtcggggattggggcttggggccggtgtttgaatgttgttggcggcccctgagggggtgaataaccttcacctctggaaaaggcttcg

SEQ ID NO: 88032 - DNA, 465 bp, Homo Sapiens
ggaatttagtgtataatatgtgtttgaaactgagatgatgatagaggcctatctctgtttacatgcatagctttgagttaggctaaatacatcagaagtgttctactgaccacataagaagttagtattgccaatctttcactgcatgtgaaaatgtgaccaatttagcacaaattctctcttagttccagaaaaatcagtaaatgcacatgccctgttgattggagatcagtagtgccatcttcataaagcaagacaacattatgacactttaaaacagtagcaaagaagtctatttattaacccacaaatgtagcatcaagccagactcacaggtagcaaaatgaattacacacctacttttactgactattcaacataaattgaatctttaacatgactttaaaggctatttacaaagctcgtttaaagtttttcaaacatgatagaaattttctaaatttt

SEQ ID NO: 88033 - DNA, 788 bp, Homo Sapiens
  misc_feature (19)..(19): n is a, c, g, or t
  misc_feature (53)..(79): n is a, c, g, or t
aatatgcaggtcacttggnatattagataatgagggaaaatgccaggaagagnnnnnnnnnnnnnnnnnnnnnnnnnnnatgtgttgagacaaggtgctgtttagctttgggtctaataatttttggtttgaaaaagaatgagttgcaacttgcctagagatgaattttaggaggactctgaggaaaccagattggcagtgaatatgtggtgacgaagtgagaaacacttcagcagaaggtggaacaaattattaactgacttattgctcatcctggcagaaacagccacttagataagaacctaaagcctcctctcaaatctagaatgtcttagtgggaaggtgggagataaggagcttgtaaatagcaaaatcaagtgggattttgagtttacttgtccctgttctacccatagccaggaaacttaactggagttttaataaatgacactatctcttactcttttctctttttggccacatctccaactgataaaggaattagccatgtgggtgagaggtgagactgaagtgattgtctgctgcactgattctcagaattgtgcattacagtgacctgaggacattttgttaaaaatctacaattgtaggctttcccctgaagattttgatgtaatagacctaataaggcctgaacgtgtttaaaaatgttttcttgaagctgggcacagtggtgtattcctgtagtcccagcttgagcctaagagtttgaatccagcttgagcaacatagtgagactcttgtctctaacaacaataatagccaaa

SEQ ID NO: 88034 - DNA, 449 bp, Homo Sapiens
gtagccaatcacttgattactaggtaattcagagtagatttcagtctgttttcaggtctactggaaaaccataaatgaggttaaaatgacagctaaagcaaaataatgtgtcatttgtagttggcaagaggccctcattttttaaaaattttcttaattcccatcaataatatagtgataggaatatattcatcacttttgattctagttttaaaaggaaaagagctaactactaaataatcattgaaaatgtagggcttcctcagaaatgtgagtaaggatattggaggcaggagcatgaggcggcagtggccaggcgcaggccaggaccccactccttccagtggcaccatggggaaggccatgagcaactcaaagcaggcactgccctgcgtggccaagttgcggacagtccacatggaggtgcatcagcacagaggcagcactac

SEQ ID NO: 88035 - DNA, 976 bp, Homo Sapiens
  misc_feature (65)..(172): n is a, c, g, or t
  misc_feature (197)..(226): n is a, c, g, or t
  misc_feature (253)..(281): n is a, c, g, or t
  misc_feature (299)..(503): n is a, c, g, or t
  misc_feature (774)..(823): n is a, c, g, or t
ataaaatcttgtcatatttgcatgtaatctactcacatcctccaatatacttatttattattatnnnnnnnnnnnnnnnnnnnnnnnnnnnnnnnnnnnnnnnnnnnnnnnnnnnnnnnnnnnnnnnnnnnnnnnnnnnnnnnnnnnnnnnnnnnnnnnnnnnnnnnnnnnnggccaaaactagggtccatataccnnnnnnnnnnnnnnnnnnnnnnnnnnnnnnccccctgaggcagtcttgctgtgtcannnnnnnnnnnnnnnnnnnnnnnnnnnnnactgcagcatcaagctcnnnnnnnnnnnnnnnnnnnnnnnnnnnnnnnnnnnnnnnnnnnnnnnnnnnnnnnnnnnnnnnnnnnnnnnnnnnnnnnnnnnnnnnnnnnnnnnnnnnnnnnnnnnnnnnnnnnnnnnnnnnnnnnnnnnnnnnnnnnnnnnnnnnnnnnnnnnnnnnnnnnnnnnnnnnnnnnnnnnnnnnnnnnnnnnnnnnnnnnnnnnnnaccatggttggccatagagctttttttatcccctgatttcctgtccgtgtcattatgttttcctttttcactcagaaccatgatttcctgactgcaatggtctgtgaacatttttccccttacaataaatataatacatactcaccagataaaaatgtaaatactgatgaggaaaaattgtaactaacattttcggggctcttgtgggttagggactttatactaactcattgaagacagacagtagcctgaaagaaggtagggtttgggnnnnnnnnnnnnnnnnnnnnnnnnnnnnnnnnnnnnnnnnnnnnnnnnnntagagtcttaagctaataaatggcagagttggttttcaaaccagaaataacttgtttatagtacccttccaaagccttttctatacacaaatatatataagaatgggatcatattgtgaccatctttccatgtcaataaatggacttcaacag

SEQ ID NO: 88036 - DNA, 512 bp, Homo Sapiens
gtctgcgcctacgtgcgcatggttttcctgttgctctacgtgctgttcctcgccgacgaggagttcgacgtggtagtgtgcgaccaggtgtctgcctgtatcccagtgttcaggctggctagacggcggaagaagatcctattttactgtcacttcccagatctgcttctcaccaagagagattcttttcttaaacgactatacagggccccaattgactggatagaggaatacaccacaggcatggcagactgcatcttagtcaacagccagttcacagctgctgtttttaaggaaacattcaagtccctgtctcacatagaccctgatgtcctctatccatctctaaatgtcaccagctttgactcagttgttcctgaaaagctggatgacctagtccccaaggggaaaaaattcctgctgctctccatcaacagatacgaaaggaagaaaaatctgactttggcactggaagccctagtacagctgcgtggaagattgacatcccaaga

SEQ ID NO: 88037 - DNA, 762 bp, Homo Sapiens
ggggcagaagacccccatcagggtgcggggtgcagttgcggctccagggccatggcggaggagcagggccgggaacgggactcggttcccaagccgtcggtgctgttcctccacccagacctgggcgtgggcggcgctgagcggctggtgttggacgcggcgctggcgctgcaggcgcgcgggtgtagcgtgaagatctggacagcgcactacgacccgggccactgtttcgccgagagccgcgagctaccggtgcgctgtgccggggactggctgccgcgaggcctgggctggggcggccgcggcgccgccgtctgcgcctacgtgcgcatggttttcctggcgctctacgtgctgttcctcgccgacgaggagttcgacgtggtagtgtgcgaccaggccatttgcatcccactgtccttgtgttcggagccaggccacaccgtcctcagcagtgtcatgtgttaaaaacgccaagctgaatatatcatgcccctattaaaacttgtacatggctccccattggtttttggagaaaagttcaagctttttaccttggtgtctgcctgtatcccagtgttcaggctggctagacggcggaagaagatcctattttactgtcacttcccagatctgcttctcaccaagagagattcttttcttaaacgactatacagggccccaattgactggatagaggaatacaccacaggcatggcagactgcatcttagtcaacagccagttcacagctgctgttttt

SEQ ID NO: 88038 - DNA, 429 bp, Homo Sapiens
ccttgagactgatagaacagactctaagtctggtaaatatttacaagctatcctctctgaagcctgctaccctgaagcttcatctgcatggtaaaaccttggtcttcataatcccttaccttaacctaaacattcttttctattgattccgggtctgtagataataaccaatcgccaatcagaaaatcttcgaatgcatctatgacctggaagcccctgacttccagttgtcccacctttcctgaccaagccaatgtacatcttacatgtattgattgatgtcttatgtctctctaaaacatataaaaaacatataaatgcaagatgcagcctgaccaccttgggcacatgtgtcatcaggacctcctgaggctgtgtcataggcatccccttaaccttggcaaaataaacttttaaattgaaaaaaaa

SEQ ID NO: 88039 - DNA, 321 bp, Homo Sapiens
tggtttcagttgttttaaggcttaattaatgaaatgccttaatcagctttccaaacatttttatatatgaatacagcagaccaaggagctggatctcctgctatccttacacgccttgtatctatcaactaaagctgtcattaatgacttgggcaaaatggcaagaggtataataaagtcttcctgtgaattagccagtagggtctgacacaactagtcaactaacaaggttcctgactagtacctcagtatttcagcaccttaagcactgataaatttcaatcagtcaacaataaagtgagtgttccaactagaaaaaaa

SEQ ID NO: 88040 - DNA, 524 bp, Homo Sapiens
tccaggagcccccgatccctggctgggcaggctacctgccgagagccaaggtcactgaatttggctgtggcacgagatacactgtcatggccaaaaactgctacaaggacttcctggagatcacggagagggccaagaaggcacatctgaaaccatatgaagaaatatatggagttagctccacaaaaacttctgctccgtctccaaaagttttgcagcatgaagagctgctgccaaaatatcccgatttttctattccagatggaagctgccctgcccttggaaggcccctgagagaggaccccaaaactccgctgacatgtggctgtgctcagaggccaagtataccatgcagtgggaagatgtatctagagccactgtcctccgcaaagtatgcagaaggctagaagcgcagagtctcccaaggaggtgaactttaagtggggcttccaaaacctgccattctcatgttggaatcacgcccagtgagcaataaagaaatttagtaacaagaattttttaaa

SEQ ID NO: 88041 - DNA, 156 bp, Homo Sapiens
ctgtttgtttgttttcatgttgaatgcccacaccaccatcctctcatcccagccagtaagaatttcagttgtgggcctccagtcttctggaatgtcttcactgcagcccctggaaatcactgctttcattcccacaaaaccagtattacttttttt

SEQ ID NO: 88042 - DNA, 809 bp, Homo Sapiens
cctatgcaaagcaggtaagaagccgaactctgaggcctctcgccattgtctccgagtcggccagctggagcgttttcggggctgtaaagggagaatggcgcatgcgcatattcagggcggaaggcgcgctaagagcagattgtggtctgcattatgtctggagccagaagtaagcttgctcttttcctctgcggctgttacgtggttgccctgggagcccacaccggggaggagagcgtggctgaccatcacgaggctgaatattatgtggctgccgtgtatgagcatccatccatcctgagtctgaaccctctggctctcatcagccgccaagaggccttggagctcatgaaccagaaccttgacatctatgaacagcaagtgatgactgcagcccaaaaggatgtacagattatagtgtttccagaagatggcattcatggattcaactttacaagaacatccatttatccatttttggacttcatgccgtctccccaggtggtcaggtggaacccatgcctggagcctcaccgcttcaatgacacagaggtgattcctgcctttttcctcagtaggctgagggtacacagaggtgatctaagtcagggaccagaagctgtgacatgttaactaagattgataggagaccttaacatccccaaaatccaacccaaactcccaaagatccatgtgccacatgttcattccattaaagaatgtctgacgttacaaggcagttattcatctatggatctttccatttattaattacacaataaatacaggaatgtatacttaaaccaaaa

SEQ ID NO: 88043 - DNA, 449 bp, Homo Sapiens
ctcacgtcaaccgggcttgcacccccacctttccagcctgcgccccagatctgcagccttcgcccctagatacacccgcctggtgatgaggcgctcctcgcgttccttccgggctccaggtgtccgtgagcctcccttccgccctggcctccggtctctgccttgctcgtgcttctaccaccacccttcccctcccaacccggtggatcctctcgtctcccccagtctccagtgcaccggctttccctcgtcctctgcgcagtccatctcagctcatctctccaatgccatcatctctcctcaccatctctcggtgccctggaatgtttgctgtcagatgtcccctgtgaaacccacaaacgcttgcgatttggcctctttgttttattttgtgtagtcctacaacgtcttgttactaccccctattacaacacttataactcaaaaaa

SEQ ID NO: 88044 - DNA, 844 bp, Homo Sapiens
agccccgctccgagtgccacgtctccaggaaccccctccttactcttggacaacactccgcccccgcccgggcctccgtcccccaaaccgccctcatttgtgcagcgccagatccttcggacacatccctaggtgtctccatcctcattcggtccatccaactcccagacctcacgtcaaccggctgcaccccactttccagcctgcgccccagatctgcagccttcgcccctagatacacccgcctggtgatgaggcgctcctcgcgttccttccgtctccagtgcaccggctttccctcgtcctctgcgcagtccatctcagctcatctctccaatgccatcatctctcctcaccatctctcggtgccctggaatgtttgctgtcagatgtcccctgtgaaacccacaaacgcttgcgatttggcctccttgttttattttgtgtagtcctacaacgtcttgttactaccccctattacaacacttacaactcaacagggctccaggtgtccgtgagcctcccttccgccctggcctccggtctctgccttgctcgtgcttctaccaccacccttcccctcccaacccggtggatcctctcgtctcccccagtctccagtgcaccggctttccctcgtcctctgcgcagtccatctcagctcatctctccaattcaatgccatcatctctcctcaccatctctcggtgccctggaatgtttgctgtcagatgtcccctgtgaaacccacaaacgcttgcgatttggcctccttgttttattttgtgtagtcctacaacgtcttgttactaccccctattacaacacttataactcagaaaaa

SEQ ID NO: 88045 - DNA, 1007 bp, Homo Sapiens
cccttccccttagacgccgataagggacaggtcgtactgcttttgtgcgccgtttcctctccctcccccagcttgagaagcagctttcgtctctggggtcgatcgcctacgaacgcgccgaattccacgccagtgtgaggacccttggctgggcctttcttcctcccgggacactgaagctccaagagtagccgcagccttgccttccccaaacgctagccctgaaggggaagaaaagaagcgaggcttgtctgcaggcactcatattccttgatttgatttactttgggagggggagggcggggagttacccctctcctcgcgaacgcttcttttgttccagaaacccaggggaagccagacctctaccatcgggcacttaaattacccttgaatttgtgacaaaagtgtactataccattcacttcttagtgtcatagttggggcatgtctaaattgtttaatttgaacagtgcgttcagacgcaagacaaattcgcgcttgcatttttgttgaaaccgtctctggctttggatcccaccacccgcaagaatcctaaacctaacgtttgataacaaaacgaaggagaacccttgggaaccccctcaatggtcaatttaaaataacagatggtgcataatcctaaaggaagactagtgacctataattaggcctagaaccctaatcaaacccgtattaccgatccaaattaaaacctggtagaatctaatacattgactgcaattaaaatgtttgcctggaaattagtatcactgatgacaaatatttgtatttctgatgaatatgtatgtttaaagatgctttctttctagaaaggaaaggagaccttggatgtagggtgtgttaatcatttccccagaatctgagctccaaactatgttttagaaactggttaaattttttttaaatgtttgcctgctttctacattgctaggttagaatacatttaaaacaaacgccttcactaaaaatgtttccaatgaaaa

SEQ ID NO: 88046 - DNA, 465 bp, Homo Sapiens
taactctttgtcccaagacttcttccaagttggatagtggaactttagatgaaagattccattcattggatgctgcttctaaagcgaggatgaatagtgagtttaactttgacttacatactgtatcttcgagatcactggaaccaacctccaaaattattgaccagtaaacctgtagcacaggatcaagaatctttaggttttctaggacctaaatcttcactggatttccaagtcgtacagccttctcttccagacagtaacactattactcaggacttgaaaaccataccttctcagaatagccagatagtaacctccaggcaaatacaagtgaacatttcagatttcgaaggacattccaatccagaggggaccccagtatttgcagatcggtgagtctcattgtgataacaagcaagctggatcgactttgtaataaagggtttcaaatacttaagtaaa

SEQ ID NO: 88047 - DNA, 532 bp, Homo Sapiens
ttttagtttcactttgcttgtttgccatttatttttattgcatttttaatggagaaataagtcatctgttttcaaaacagtgcttgaatataccaggagtacagataccataaaacaaagcaaactccactcactaggtacatcacatgaaaaaatggtctgacattcaggtaataaaaatcagaaataaaaagtcccaaggttccagcttggtaaaacagacacagttacaggtaatgtttaataaactaatttttttcccaatgtgtaaacaaaatgaccagactaaatttgtgcctggccatttcaacctaacgccatagccattcaaaatacagatattgtgcacacttcacccgatttattattgtggtgaaacggcaaagatgtgagaaaaagaaatactgtgtactagatatcagaaagtaatggtgaaagaaaagtctctacagcataaaaggacatgactatattccaactttggaaataatgcagacaggaaagagtttaagtggtagccctaactagggag

SEQ ID NO: 88048 - DNA, 850 bp, Homo Sapiens
cgcgcgagacctggacgcgccagatggacttcatcatgtcgtgcgtgggcttcgccgtgggcttgggcaacgtgtggcgcttcccctacctgtgctacaagaacggcggaggtgtgttccttattccctacgtcctgatcgccctggttggaggaatccccattttcttcttagagatctcgctgggccagttcatgaaggccggcagcatcaatgtctggaacatctgtcccctgttcaaaggcctgggctacgcctccatggtgatcgtcttctactgcaacacctactacatcatggtgctggcctggggcttctattacctggtcaagtcctttaccaccacgctgccctgggccacatgtggccacacctggaacactcccgactgcgtggagatcttccgccatgaagactgtgccaatgccagcctggccaacctcacctgtgaccagcttgctgaccgccggtcccctgtcatcgagttctgggagaacaaagtcttgaggctgtctgggggactggaggtgccaggggccctcaactgggaggtgaccctttgtctgctggcctgctgggtgctggtctacttctgtgtctggaagggggtcaaatccacgggaaagatcgtgtacttcactgctacatgcccctacgtggtcctgttcgtgctgctggtgcgtggagtgctgctgcctggcgccctgatgcatcattactatctcagcctgactggtcaagctctcgtgccgaatcttggctcgaggcccaattcctataatgagtcgataaatccgaacacaggctaattggtccctgtgaattggttcccgtccattccaccacatcc

SEQ ID NO: 88049 - DNA, 405 bp, Homo Sapiens
cttacttctacttcctgcctttcctctgacaggaggattcttctacagccagatgattccttacagatcttggcaccagtggaagcagatgtgggtttctacacttgcaatgccaccaatgccttgggatacgactctgtctccattgccgtcacattagcaggattatgttgtcatactgtactccagtcacacatgctacccccttgcatatctgtttagcaacagtattcctgcccccatgacttcaggctgatctgggaagggacccttagcaggcggctttgcggggaagatcaaagtcaacaatgaagaaggcaatttaaggagccctgggccggattaaagactgatattattaatgcctactttttgtgaataaaacatttgcttttattctaaaaa

SEQ ID NO: 88050 - DNA, 684 bp, Homo Sapiens
aagactccagaccatcagtccagggcttagtcagcggggcccggagtggcttccctggctggcatctggacttaggctatttccgtgcacgtaaaagcggaatattggaacggttgcacagaacttccaaataatttttaccgccacgcaagatttagccctgaggtcttaatctcaggatttgggacagtaaaagctgtcgtccctccccctcgtccagccggtggcaagcgggtactgcgggcggttccgtccgtcccctttcgcagaaatggcaacgaatgaccaccagcattagctgagccaggggacgtgggagggttgattgcctaaacgactctgcatcgccgcctctttttgaaactaagagaaaatggtgggagatcaaaagaaaactaaataaacacacaggcaacttgtcctgggacctcaactaagcaaatgaagccttattgtgtgtgctgagcctgcagttcccaaccttccggggaagatgggaggacagggcgacaaagggcacagtaggcttgcctggcagtaagtgtgaccgcagctatccaggcggaagagcagaggactgaaaccaccctccagcaagcgagtgtccgccgcgttgagaaccgcgcaccctacccatcggccacgtgaccagtcctttttaaaaaaaatttctttaccttaaaa

SEQ ID NO: 88051 - DNA, 445 bp, Homo Sapiens
ttttcatacttaagaactacaaaagtactatacaaacgctttatttacattaaatcacaataggtacataaaaagttgaggcactggtatctgtggctaatggtagtaatcacagctcatatagtaaagtgtataacattaaccttttaattttgagctgttgcaaaattaccattttaatattatatataccatatattcagtaccaattatgacttttttctaaaataataatagaacatgatgcccagggaaaaagaaaatacttaataactttcccaagtgctagtaaaaaacacattggtatacacctgatttgaggggcagacatgattcagcctatgagccattaggagagcgaagcaaagcttttttaaactggaaggacactcatgctgattcggtacagactcttcatctttcatactgggaaacaatgctcacc

SEQ ID NO: 88052 - DNA, 535 bp, Homo Sapiens
tatgcaaaagggactcctgtaagccaggtgaagaaggggcaaggcccttcttggtcagcagggataaggcagttgtgtatgggagagcatgcgaggagggcgagggctgggggagatggagcaggaacatttggttggggctctgaggcactcttctgcttggggagtgtgtgggcaaaggcaggggctgtgcaggaaggatttagctaaagccataaagctggaagagggtttggggaacggctttgaagttacatttgttttgcaagttctttgtttttattaatgtttgcatgttatttgggtagctgtagggagtaggttttcggggagttaaagtgcactctctcacccctccttcagtcctactactgcccctagatacacaatcacctcaagtgactttcacgtcaccaggaatgggcaaagtctagattttggaacagaaaatattttaggtccccgtccctctctgtaaccaataaccaatgccatataaatgcaaaagtataaagaagtccagaaattcttaaaa

SEQ ID NO: 88053 - DNA, 322 bp, Homo Sapiens
atcccagttgagggcccaccccaccccaggacccagctggtgcagttgacaaggatgcgctgcgcccaaggctatttaaacccgccctgttggggggcctcgagctcagatcttcgcagagcagagcagcggctggagcgttctgccggctcagcgtggacctggagcttacagcgtcttacgacttggaagtagattcagaggataggacagtacacttggatatttactcacctttttctcattcactatgtctgccgtggtctcgatgagagtgtgccacgtaagtttcccccattaaaagtcatgaattcagtggaaa

SEQ ID NO: 88054 - DNA, 561 bp, Homo Sapiens
acaatttgttgaatctcaggtaaatgaggtctttgcatttaatgagttttatcttgacaggcgccgcctcgcccccgggccctttcgtccacatcaaaaatgcatcaagtctccacgtgtttcgggccagggcgtggcttggcattgaccttcatgaccttacatagctttagagaagccataacgttagactgcaatactaacgaccgacgcccctccgggcagagaccaccgcgcccctctgcgccccagcgacgcggcccgcggggacgtcgctgtccgtcctgctcgccctgtgccctctcactgacttctcccgggtcgtgtcttttaaaaactcctgttttcacaccttacaaagccagctctgagcagacagggcgtcctctcgtagaacctgcgcaccccgttcccagcgcatggcgccccgggccgcgagcttagcttagaccgtggtgtcctctgtccgtctgtcctgcgcctgcgcctcctcctgcatgtcggggcccctgcgtgtgttctctccggatggaatcacagccaataaaccccagtgaattc

SEQ ID NO: 88055 - DNA, 601 bp, Homo Sapiens
  misc_feature (97)..(131): n is a, c, g, or t
tttagcactgattcagctttattttggtcaacaaatctttaggagaaactctgtaaattaaccaaaaggattaatattaatacaatgtagactatcnnnnnnnnnnnnnnnnnnnnnnnnnnnnnnnnnnnctgagatataccaacactgtgtgaccaaaagcaaaagaaggaaaccctacaaattgttgaagacaccccaaacctaaaacagatagaggaaaggcccaaagtccacatccagtgatttttggggaagggtaagtacaacagttcagccacaccacctattccgctggctgcatctgacactcactccacatcacctctggcacatgctgtctccctcaccatgccaggacttagcaaggtgaggtctactgacacgcacccagaaatctggcaatcacatcttcccagaagacaggacaggcacttgagactgattctactagaggcaatgaatttttagtacaaagagaatggtttcctggctcttcagtctccgggtttgctgataagaacttttaattcactagccacagatgtgtgcctttttcaaattctcaatcactacttccaaagtttcttagcaccacttg

SEQ ID NO: 88056 - DNA, 538 bp, Homo Sapiens
cgtgtgtggctcttctctggagaaatgttcaagggccccttgtttaattggctctttcctcttcatggtggagttgtgggagttctgggcatattctgggccaccagcccctcgggttccaagatgcagctactggagacagagttctcacacaccgtgggcgagctcatcgaggtgcacctgcggcgccaggacagcatccctgccttcctcagctcgctcaccctcgagctcttcagccgccagaccgtggcgtagcctgcaggctcgggggcatagccggagccactctgcttggcctgacctgcaggtcccctgccccgccagccacaggctgggtgcacgtcctgcctctccagccccacagggcagcagcatgactgacagacacgctgggacctacgtcgggcttcctgctggggcggccagcaccctctccacgtgcagaccccatgcgtcccggagcctggtgtgtgggcgtcggccaccagcctgggttcctccccttgtgaaataaaatcttctcccctagaaaaaa

SEQ ID NO: 88057 - DNA, 395 bp, Homo Sapiens
gatgcgcaggagctctccaggctacagagcgcatttcaggaactggactgggatgtacagaggcaccatggtgggaaacagctgggccttcctgcaaagaggggagaggctcttggaggtgcagggcttgcgttttctcaacccagactgcctctgagaacagggcagggggtgtgaagagctgatgccctggccctccccactggctagctttccggggactaaggactaaggctgggccaggattctggggttctaggggctctgcctccacacgccagtgcctgtctgttgagttcacttctctctaaaatctcattttacaccacgacccagtacaaaccactcagaaaaatgtttcattaaaagttcggcatactacatgcatgcactct

SEQ ID NO: 88058 - DNA, 458 bp, Homo Sapiens
ctgctacccaccctttaccttgcagccccttgggtatcttgggtattatgtcctccactccatcctctgccagatgactgtgggctggggcttatggagtacctatattatcaagaagggaatacgaagtgacagagctgggcctgaacctttgttttcctaggagttgagggagaactgtaggaacaccttgggaagcctttactggttgtcctcttaagaagagctggataatgtactgagaatacctgtcctttcttggtcctggagggcagacagcagctacagcaggactggtggaaccagcttcctggcaggaattaccctcccccaaagctagggacccaggaagatgccctgtccagcatagactttaaagagagtcaaactctacggaagaggattgtaacggaccatttctgaataaagtgatgatcagccacaatgacattagtaaa

SEQ ID NO: 88059 - DNA, 549 bp, Homo Sapiens
aagctaaaatgttattgaaaacaaatgtttctcaacgagctgcttcggaacaatataacgtattatgaagctccgtacattttacatgttcttgcaatcttgacaggacaaaataagtcctcaactttttcctttgaattttgaaactgaaaccattttcttccttttccagactctcctgcatcaagaccgggctgtttggaagaaaccgtgtaaaaagtgcatgagcagtgagcatggaagacatggaaatgggatgcgtctggggctgaaggtagcattgactcagcgaaggctctcactctgcttccgtggtccccgctggggcagccagtgtcaggccaggccaaactgacacagcagaatgaagggctgtacagtgggtccccatgaaacatgttactaaaaaaaggtgcaacgagaaccaagtccctgtgcattcttagtcacaacggtgggcagaagaacccatacgattcctccctttggtattaaataacagtttttaaaaagctttttagaaacaaagcaaaatacatggtgggactg

SEQ ID NO: 88060 - DNA, 1265 bp, Homo Sapiens
actttttttgtggcacataatttgtgtatcaacctgcttaatttgagtgcgcgtctctattttcaccgtcggatttctccattttttaagatcgtgtaacaagatgatttaagtgttgacacagctgtcattcttcctcgtcttagcgcacagatctgcgcaccgggtgttagtgcaaacatatagtttgtttcacaagaagcccctttctgaggtcctatcccctcaaattgtcaattgggggcaaccaaggttacttttcggaaccatgagctcgaagttagtgttttattactacatgctcagaacaaatttgtattgagctacaatggagcagagaattcgtgagccattcggttgaccttgtcactagtggacatcgaaggaattctcgttatctcaagcctcacctagattcacatggactgaaatgtgcatcttctcctcatgggctgggttatggtatgacgttgctgcgacatgtccatcgaggaaactacttgtttgagcattttgagaacaaattttgtggactcatccgctgccctttatgtgaagaatacttgaaaaatcaaatttatcaacctgaaaattatgggagagagttcccttgctcctggaacattaccgaaaccatctgttaaatttgaacaaagtgatctagaggccttttataatgtaatcactgtatgtggtaccaatgaagtacgacataatgtaaagcaggcttcggatagtggaactggggaccaagtttgaggtagtggaaatgagacattgctgaacaaaagagaactgggtttacctgaccctctaaagcgctaagtactgtcagcctgaaaaaaatcttctatacagaaactcttccaaatactatatcagtaatgtctgaatgatttcagatgtgaaaattgacatattttagttgaaatacctttctggactacagacttacatatcatgtgaatacttacctatttctacccgagttgcagcaagtattctgaaagcttaatgcaaataaatcccactttagatcttacagctaactgtgtgccttagaaaccaggtaatattttccttttacttagtgaatattctgctaatatctgcacttttcatgtgggaaaggattaataatggtccaggcttcccctctttaagtttcatgtttacttttgtctaactctggataattgtattttacaaatgcatctcactgtagtatatttttaaaactattaaatattttagagatgtttaaa

SEQ ID NO: 88061 - DNA, 649 bp, Homo Sapiens
tgaaatgtgcttatattttatgaagtttggagaacatcatctattgagtctctgagtatcagcgaactgccagggcgaatgctgagcccctttcctgggagccgagctccgtcccatctgctgtcacaaagacctcccagcttctggcacgttcttcagaaggcggctcctgtgcatggtgggaggctcacagggcgtagtgcccatgttttctgtagcttcctattactgcagcacaagcaaaaggtcacttaggccccttcggcctcttttcatatggagtctctacttcatatgaaccctttacttagattgaagactttgaggtaatataaaggttcaggtgggtgacatgaatagggtagatagaaattactagagccagagtaaactggagagagggtggaggtttctcagctacttctcatagcccaaacccagcagacaggtaccgtgtgtcacagggcacggggacgagaaggtgagagaggagggcgcctgtctgctcagcacagatggggagctctgaaggccacaggaaaggacagggatggattttgttgtagctgctttttcgggtacggtaacgtggactttggtttgtaaacaaaagtcaaattcatatttttcccaccaaatctatgtaaaa

SEQ ID NO: 88062 - DNA, 553 bp, Homo Sapiens
tcaaacagcaacaaatgtgcttctgctgcctaccacagaattttccttggtaagaagaaaaccctacattacatttctttttggcttctgtctctgcagcctcagagttgatgatgaatgcagtcctgctccactttgattccatctggctctggaaggtgtttctgaagatttgtgaacagcatttgaatttgtttgtttttatttatattgtctttttactatgatgtataaatatgtcctgtaatgtcattgatctatatgatgagtgagacaatcaagtgttaaaatggaacttgttgattaggatatttataccatagtttagttttcttaagaaactctgacagacacgatatttaaaatgactaaatttacactttgacataaggctactaaaaggtagaatataccattgagatatgccacttgaaaaaactacttttaaaaaaatggcattactggtgtcatgaagaaaagaaatgcttttatctcaaccctggtttcaaaaatttgtgtaaaaattttcccctcaataaatagtttacttctg

SEQ ID NO: 88063 - DNA, 367 bp, Homo Sapiens
tttaacacttgattgtctcactcatcatatagatcaatgacattacaggacatatttatacatcatagtaaaaagacaatataaataaaaacaaacaaattcaaatgctgttcacaaatcttcagaaacaccttccagagccagatggaatcaaagtggagcaggactgcattcatcatcaactctgaggcaaggaaaattctgtggtaggcagcagaagcacatttgttgctgtttgatagttctgtacttattttgcacttttactcattcggtatgttaaaaagaaagcatttggctgtagaatcccttctttaggcaaagtcatcaaaataagaagcctttggaacttcaatgaaagacagaa

SEQ ID NO: 88064 - DNA, 907 bp, Homo Sapiens
agagcaatgtgaatatagaacacgtggttaaaaaagcaggctggtccggtccggaatcccgggatattcgtcgaccacgcgtccgaaattcccttctggcaattaccctccatgtataggtgataatcgagatctgcttgtccattggtgccatggcgcccctggggtaatctacatgctcatccaggcctataaggtattcagagaggaaaagtatctctgtgatgcctatcagtgtgctgatgtgatctggcaatatgggttgctgaagaagggatatgggctgtgccacggttctgcagggaatgcctatgccttcctgacactctacaacctcacacaggacatgaagtacctgtatagggcctgtaagtttgctgaatggtgcttagagtatggagaacatggatgcagaacaccagacacccctttctctctctttgaaggaatggctggaacaatatatttcctggctgacctgctagtccccacaaaagccaggttccctgcatttgaactctgaaaggatagcatgccacctgcaactcactgcatgaccctttctgtatattcaaacccaagctaagtgcttccgttgctttccaaggaaacaaagagtcaaactgtggacttgattttgttagcttttttcagaatttatctttcattcagttcccttccattatcatttacttttacttagaagtatccaaggaagtcttttaactttaatttccatttcttcctaaagggagagtgagtgatatgtacagtgttttgagattgtatacatatattccagaacttggaggaaatcttatttaagtttatgaatataaccatctgttactgttctaattatatttaaacccccctcaatgcagataaagatgaattagtgactatt

SEQ ID NO: 88065 - DNA, 792 bp, Homo Sapiens
cataagtccatgacacatgtgtacaaaactttcattgtgatattagtgtcataataataatatataacaacatacaacagagcaaccaacaagcttaacacctgagaaaagataggtgcctcccagaagtaacaaacatgagtacttgattacctagggcacacatagcacagaccaagatataatcgccttgaaagtggatgaaaagaatgcagctgaaacatttatcaaattattggaggccaaatgtgaacactagtgaagatcaactgtggttggagaaatgaagaacagcaaaactctaaccccgggacaagtacaagattactgagaaagcttcaccccacaaactcaggggcactaagactgaggctgagccgtaacgacagaattttcccactgttaaagcaaataaatatggcctgagaaggatttctatatttgagtccttgtggactaactgcaacctagcttaacagagtaagaccatttaaagggaccaaaaatggatgaacatacttggcactatgaactaaaagatctttggctaaagaagagatgaagactcattcaactcctacaagtgaattaaggagctctgagaaggcaaagccagcccaggagggtggacacactaagaacaatgtgccttgtcctgatacacagttgtggtataggtaacaaaatctgagtatccaacctaagatgttacccctcacctcaccagaatacctccaatcccttccctggaaacacagaataaattcctatagaaagaaataaagcagaaaa

SEQ ID NO: 88066 - DNA, 429 bp, Homo Sapiens
atacctcctggtcagccaaagccctggctgactgccaggcagttgcgcagtagctcttcctgtagtgaaactgttcatcttatcattgttgactaaactctgttggaagttgtctcactagccatatgagccacagctgtctctatcctgaatagcttaatgagccataggttgctgactcctggactgcaggaaccttttagttgcctctcgccacagttgaatttccttctggacctccatctctcttcatcacagttgtcaacacttgagccttctcccatgttacttcttatgcagtgtcccttctacttaactgtaagttttataaaagcagaaaaccgtcttattcagttttttgcttatgcagtaaacattgaataattgtcaaatgaataaataattgtcaaataaatgaatatattgaaa

SEQ ID NO: 88067 - DNA, 653 bp, Homo Sapiens
  misc_feature (235)..(235): n is a, c, g, or t
ttttcaaaggggttttttttcagttagtttattatattttatgcgaagaaaaaggtgtaaaatcagcaactggcagatggttgcataggtcagttagaaacacacacataaactgtagaactgtgtaggaaattattttaccctaaatgagtagggaagatagagcttagtatcttgattcttgccttcttccgggattgcttcttagaatctcataggagaaaagaaaatgagnaatagaactgcattttagaatgagaaagtcttatgaggatcatattgtacattcccttcatctgccttctctctgtgggatactcattacctttggtttatggctgctgaggtcatcacgttttagtgactcacaacaaagcagaaatctgctgagcctctcgcattaaactctggtttgaactggtttgagaaggcctaggagtcaacctagaaacaccatgctgatttttatcttgaaattaaataaatattcaggaattttcagaatgagacttgaaggtgcagacttgtagttgtacttttaaaaaaatattgtaaccaatttgttaagtaggctgttacagctgtagtgattgtagtgttttaattatggttgtagctataaagagttagggaaaagtactgttttaaaccaa

SEQ ID NO: 88068 - DNA, 351 bp, Homo Sapiens
catgagccacccacgcccagccaagtttaaatgtttattttaatgtttgtgcaataacgtccagttttaccaagcagaatgatgtgcataggagcttttatgcagaactcactgttcttcagttagagcttattactctaatagtgaaatcaaatccatcttcagttgctacatggctttgttaaacagttaaacttgagttggagatgctctgtcgtagggaggaattttcgctccacagatgtgttcatataatgtattttcccctttcccctatggaaactttgtggaaagattatttcagtgttaaccctgattgatattttagtaattaaacaagtgtctgttaaa

SEQ ID NO: 88069 - DNA, 664 bp, Homo Sapiens
catttcctttcagttacggtatatgattctgcctgagaaagcaggatttatgggaaggaaaacttgtctaaggctcatcaagatggcctgacccagagtcacctaagagaactcttccaacttaaatgactagggtgtgtaatcagttgcttcttattctgtgtctcagatttcctagtccatgacatttaatagtgagtatagagtaggatattctatacattttagtatttggcccttggaaacaaagttaaataccatgtcactcagaagactctcaaagtttgtgtataaatggcgaagtatgcactatgagagattctaatccattcacatcattcttgagttgtgcaaatacacttggctttgatttcacttggtgatctaaatttgtttatttaagctgcaagaaagttacattaatttggaatgtgtcatcacttggacccagtatatcagatttttattgagtaaaatgttaaaaataataagtgtaactcagattctggatgttcgagtttacaatacattgcctgtaataaaagctgattctgaagtgcatttttcttgacttactttggcagaaatatacttatatcttaatttatagtttgtaagtttatactgttttctaaaagtaataaatcatttcatgaaaaataaa

SEQ ID NO: 88070 - DNA, 880 bp, Homo Sapiens
atgactccagcatgatctggcatgaagatcctttatacccaatatttctagtgttaaagtaaagaagagagctcttgttttttcagcaaattttccaagttcctgatattacgatatgctttgtcatccagatttttttctctttcatcgacgattttcataaccatcttttagtcagatttatgtcttttaacagccttccatagttcaatggccacaggctgatgtggtggattgtcacagtatatatcttccacagtttttttccaaaactgcattcgcatcagtccaattgttttctcagagactgagtctttaacttttccatatgtgaagttacttccaaatatcctggtggtgggtgggtttcttagcaatgtttagtgttcagatcccagtggcatacagtacagcaagacagcagcaagagtaatccagcctgagccagttccacattaaaggccctcagtgcaaaaacagagcttcgggattctgcagggagcagcagggagcataaataaccttcataatcccgtttcctccagtctctctttcttgtgattttcctccttctttttaacctactccagtcaggactccatggccaccaaccactcctcacgaactgcctgtgccgaagtcaccactgaccaccatctgttgtgctggactcctgctgactccagtagggctggcaccatgtcagaaaggccgaagaagagacctgcctttgccagacagttaatccacctatatgtgggacagagccttggtctggaaaacactttcaagcccactgtctcactctcttgtcactataaataacctggtgagttggcagtcccggcgtgaatgcccacaatttgcaggtatgcaaaca

SEQ ID NO: 88071 - DNA, 462 bp, Homo Sapiens
tttacacaaatctttatctcaagaagaaaatctgaaggatcagtttaactatacccttagtacatatgaagaagctttaaaaaacagagagaacattgtttccatcactcaacaacaaaatgaggaactggctactcaactgcaacaagctctgacagagcgagcaaatatggaattacaacttcaacatgccagagaggcctcccaagtggccaatgaaaaagttcaaaagttggaaaggctggtggatgtactgaggaagaaggttggaaccgggaccatgaggacagtgatctgattgaaaaaaaacgacagtctggggaagcgatcacatctggtgaccaggctgcttcattcaacactgtgtaaacaccaaagccttaacttagcaaacagttgttagaagtgggacactccaaccacattccaagctgagataaaatcaaatcacaaatgtttaaa

SEQ ID NO: 88072 - DNA, 828 bp, Homo Sapiens
caagctgtaactggtgccagaaaagacagaagctgattgaggtcccagcttggtaacagtttgaagagttgcaggactggctggatgagtactggctgcagcaaatcaggctgccaggattctttatggctgtttctgcttccactacagctgagtcagaaaggtcgctgccccgtggtggcactagacgcagtggacctggcaagcaaatgtttccgctattagctctcagcaacagagactcatttatggtcaccttggaaatctgggcttatcgatctacagcccaagtctgctgagaagctggagcttactaaaggggaaacctgagagctgttcaagccccaaatattttccacttctgcgtcacctctgctgtctgttagcagagtggaggagaaaatacacagcacaaacaacgtgaaaaaatagttactctattcattaaaagctgtaacttccagattggacttgagaagcaattaagcaacagaggaacctcatctactatctgtattcaggcatgctcatgagaacacgctgctccagctggacttagaggaacccggtgcatcacaggcattcctgacagagtctagtggtcctgctggtccactcagtggtactcagtcctcctcattctcggggataggttccaagacccccaggggatgcctgaaactgcggatggtaccgaaccctacatatattatgtttttttcctatacatacatacctatgataaagcttaatttacaaattagatagagtaagagattaacaacaactccagcaatatactgaaataaaagttaaatgaatgtgaaa

SEQ ID NO: 88073 - DNA, 591 bp, Homo Sapiens
  misc_feature (149)..(159): n is a, c, g, or t
aggagtacctggctaaagaatctccagctagacaaagtagaagtgtctgtgctctggcagttgaatatattgtatcaggctcaacagcacctttcaccaaaggatgagacttcacaaccattagatcttcttttattttgtttttattnnnnnnnnnnnttttaacacaccattgctaacttgaagccattagatcttcttacccccaataccacaaaagtttagtggaatcaggggtataccaaggcaggtggagtaggggagctgggagtggtcagcccccagggcaggcaatgagggattgtgaatctgtgaagaattttaaagcaatgatacagctctaaatgcaatgtactatcctggacttagccctggaaaagaaaaaagatattagtggaaaaactggtaaaattcaaataatgtctgtagtttggttaatagtattacaccaatgttaatttctgtgttttgataaatgtaccatggttatgtaagctggatgaaagatatgtgggaaatctctctactatttctgcaactctcctgtaaacctaaaaatgtttcaaaataaaagatttaatgctaaaaaaa

SEQ ID NO: 88074 - DNA, 732 bp, Homo Sapiens
  misc_feature (29)..(29): n is a, c, g, or t
  misc_feature (91)..(91): n is a, c, g, or t
tccatccataaatccagttctactatggnctgagttctggtcaaagaagaaagtttagaagctgagacacaaagggttgggagctgatganactcacaaatgatggtaggaagaagctctcgacaatacccgttggcaaggagtctgcctccatgctgcagtgttcgagtggattgtaggtgcaagatggaaaggattgtaggtgcaagctgtccagagaaaagagtccttgttccagccctattctgccactcctgacagggtgaccttgggtatttgcaatattcctttgggcctctgcttctctcacctaaaaaaagagaattagattatattggtggttctcagcaagagaaggagtatgtgtccaatgctgccttcccatgaatctgtctcccagttatgaatcagtgggcaggataaactgaaaactcccatttaagtgtctgaatcgagtgagacaaaattttagtccaaataacaagtaccaaagttttatcaagtttgggtctgtgctgctgttactgttaaccatttaagtggggcaaaaccttgctaattttctcaaaagcatttatcattcttgttgccacagctggagctctcaaactaaaagacatttgttattttggaaagaagaaagactctattctcaaagtttcctaatcagaaatttttatcagtttccagtctcaaaaatacaaaataaaaacaaacgtttttaatactaaa

SEQ ID NO: 88075 - DNA, 464 bp, Homo Sapiens
gggcaggaggcgtgaggagaaactacgcgttagaactacgactcccagcaggccctgggccgcgccctccgcgcgtgcgcattcctagggccgggcgcgggggcggagaggcctggaggatttaacccaggagagccgctggtgggaggcgcggctggcgccgctgcgcgcatgggcctgttcctggcccgcagccgccacctacccagtgaccatgatagttaatctgcttaaatacttcaagctgtacaagtctgctgtggaagtgagcaccacacaatgtggcttcagcttccgatgtgatttctatttgaactccgatattagaaaccatgtcttagacctcccatgcagctctcaaagggctttgcattgttgtggttacatggaaatgttaaacaaatgagttaatggaataatttttatttaattgtttttaataaatattcatgaaaaatgtaaaa

SEQ ID NO: 88076 - DNA, 581 bp, Homo Sapiens
  misc_feature (302)..(325): n is a, c, g, or t
atgaattatatgactttcttaatgaacagtggggccatggaggaaagttttgtttcatggatgatgagtgaatatctttgctagactcctgagccactttcctgcctgaaagtcttaaggtagaagacctgattgaatctttccttggttatcatttatactgattgcttgatggccttttctgtgaagatcaactcttattgtttggtcctcatagatgtggaagttgcaggaggatggagactaagtgagacaatgcaaactaccctggaagaaaaaccattttacatttctgatgtgannnnnnnnnnnnnnnnnnnnnnnngctaaaaatggaagggagcaagagcatgcagctgaggtttccagttagctagattccagttaatcaggctttactgtagatcactctttaaaaagcagaattttttaattttttgcaatatgagcccctccccctcctaaacaggaagtgggatattttaaatcagcctcaaagtttaaaggatgtgaatggtcatataatctgctaaaaatgacgtcaatttctattctaaaagctaggatcaggagagctttta

SEQ ID NO: 88077 - DNA, 525 bp, Homo Sapiens
ggtatgcctatatgtatatgcctatatttaagactttatgagatatatataatctgtttaagatactcatacaaaaagttacctattgatcagttaatgaaaatgtgaccataggctcataggaacataaaccagtactaccactaggaccaatggttcaatatttgttaattcagcgtttgtgactttacagatatctgttgaaacataacaaaatgtaactgtacatggagataaaatttatttctgcatattgcatatcttattgtgtgactttgccaaagttgtttattactagtagattgtatgtgtagtggtgggggacatgtattccttatcatttaatatacatacaggattatattttctgtaattaaaatacttttactcttcttttaaatattgatatactttatttttcatttttttcttgcttgattgcttgacaagaacatccagtgcagtgttgaattgagtagcaagagtgaatatccttgtcttgtttatgacattagaaagaaggca

SEQ ID NO: 88078 - DNA, 611 bp, Homo Sapiens
gttctcagagagagcaagggtcaacattatctccctggggagaagttttgacactctagcaagctcttctgttactcacttaagtagtaaacaggaagaatatgttaaggttgccaaaacactttttactgatgaagcattaaaaccttgcccaaggtgccagtcccctgctaagtaccagccatataagaaaaggggactgtgtagccgaacagcctgtggttttgacttttgtgtgttatgtctgtgtgcttatcatgggtctgaagaatgtagtagaggagcagcaaagccaagaaatagaaaagatgctctcccaggaagtgcccagagtaagcggaatttaaaacgcctctgaagagactaaatatagaactcccccatgcagtgttctatttatctgacttaaaattatgaatattttgaatacatgcaaatcttcccattaatgacaggtgatgattaatttcctattttgtatatattataatcgatgtcattgtatgttttctttaaagttgttttgaaaaaattttattttactatgtcattttacccattttaataacttggtattttaaataaagaattttcattgttgttaaaaaaaa

SEQ ID NO: 88079 - DNA, 918 bp, Homo Sapiens
  misc_feature (284)..(284): n is a, c, g, or t
  misc_feature (602)..(612): n is a, c, g, or t
  misc_feature (790)..(803): n is a, c, g, or t
tgcggccgcagcgaagctgccgttcatgtgttggaggccaaatgtggcaaaccaaccccaggcccacccagagcgagcaaacgctgagacctgaaaggacatggatgagaagaggagcccgcttcctgtacatatatttaagtgacaaacacggtcaaaagcttaagggacaggttttatggttgcttgtgtaataaagcatgtccttcgtatgtcacagtttggggcaacggaagtcttttagtgatggctaatgggtctgggcagcatcccttcatgaattnttttttaatccaatatccgttgatttgattgtgattagagaaccttggacattttgctgctaaagaatcttttttcccctctcccccttcctgaccctacttgcactgctgtggatttttttaagagaagcaaaaacaaaagtaaactcctttccctggccctccaaacatatattctgtgagataactgtgcctgctaccaagtgttaatcctgggatcgtatttttatatcatattcacatatttgtttttttaattggtgttagatgacatgattaataaaaaaggcaagatattttcagaatttgaatttcagnnnnnnnnnnncttttgaaatgtccctttaagatttttttattctaaacaaaataaagaaaatcctgctgctctggtccttgtgataagcctctcttcggcatctgaggagcagctgcagcaaaatctaggggtgtaagtgtatcaggacttatgtgacttatattttgggaagatgaaggtttgggannnnnnnnnnnnnnacggctagcgcgaaaagtttggaatccttccccggttatcccccgtgggaggtaaatcacaattctttcaaccccttgggggtgtgttaaattttgaaaggcaagggtccatttc

SEQ ID NO: 88080 - DNA, 461 bp, Homo Sapiens
  misc_feature (187)..(201): n is a, c, g, or t
cagtactcctgttaagccattagtctctaaattccagctttactgtggaagttctatagaagtgttaaatacaaatttttccctgtcttgcttcacacaggttccttaaaatcagttttgaactttggtcatagagtcttcatatttcaatatttggtggtccctatgacttatacataactttgtnnnnnnnnnnnnnnnttttttctgatgctttgaatatagttttgaaaggagttttgacttttttcccctcattcatctcagtatagagtgcgctatttcacaatacgatttttgtcattaaaattaccatattctttattatataacgttaactattgagttgatctgtttaaaatataaatctcaagttaattaaaaataagcttttcaaaaatgtattatatttataacaaatatactgtaaatagaataaagacatgctattcactgtaaaa

SEQ ID NO: 88081 - DNA, 403 bp, Homo Sapiens
tgttgcaagtcccaagcctctcggggcctacaggcaaaccctgactgcccatgaagcagccgcaggtgccaaaggacccactgccaacaaggaaatgagggcagtggatcacacaccctggtgaaactgaggaggagcagagaatgaaacaggaaactggagacagcatgacttcagaccagcaaagaaaagtcaccaccctggaaactaatgctctaccctaaacaaagaaactacacactgctttttgccaaagaggctagtggtatgagtcaggaaaggacaagaatgaccaacttctcacaccctgaaccacattcaaagtctaagccaagagagcacctctggaagtcagagtaaagaattcccttcgaaataaaatatttgctttaacatttaaaaa

SEQ ID NO: 88082 - DNA, 451 bp, Homo Sapiens
aaggtcttgccgattctgtgtgatgagcccacttcggacgctcctgaggtcgtcagaaatgaggaggaagttgttggctgtgtcggcatccaaggtcatatccactgtgaaaaggaaaacaagttgctcagcaagtggacagaagccaaccccatgcctctcttctacttcaaaggcccaaatatctcctgactttagtttctttaattctgtttcttcctccaaaatcaaaacttttcatgaggaaacttccctatttcaaattttcataggtatgctttgtggcaatacgtgactcttattcacagtagcaattcttattttactttacgtcacgtgtttgcttcactgaacttttcttcatttagagtggagggtctctgaaggcagacaccatgcccccctttctaccaccttgatgtgtgaacaaataaatgataattaagacaaa

SEQ ID NO: 88083 - DNA, 773 bp, Homo Sapiens
agtaaacaaacacgtttttattgaatgcctgctatgtggtgacccagtaactgtggagaacaatatagatatttaagatttaaatactatcctccggcgttctgagaccctcctttctgtggcatacaggtcttagaatgttagattcaagaaggtcttagatttatgcataagtcccccattttttaaacaaatagaagcaaactgattttccactgagctctgtgtttctgaggtgcacatccttgttcctgtgactttgacacctctgttaatgggtctgtaataaaaattcctctggttcgggtgagtcccattcccatctctctcatttcaactgctccagtggaaatgtggtctggaatatgcatgaaaggggtggatccagaatgtacgaagaaaccaagtagaagctgaacagggaagaatggtacaggaagttgtaaggggtatttaaggaaaggagaagagatggggcggaaaggtgctttctggatcaaagtagggtgaaaacgtcgggatgcaggttagtcacaccacggagggcctcaccactagtctgattaatttgcattttatcctgtgggagatgaggagcgaaagaaagggttttagactctagctttgggggtggggtgtcaactcatgtctctgggcttaagtttccacatctgttaagctggagaagtaatacttgctgggctaaccaatgtacacaaccattgtcataaccaagtatcgatggtgataagaactaaacagaaaacacagaa

SEQ ID NO: 88084 - DNA, 508 bp, Homo Sapiens
agtgagatgtcggaaaggggagagcaggagcaatggcagaggagtccggagaggctcctgaggagtgtacttcgccttggaagttctccaggccctcagaggtggacgcgtgcagcacgggcactcaaccctgagcccaggagtccgtcgtgcatgccgaaggctcctcgtcctcaccccatgtggggtcctcagctactgcagattctccctcgtcccgggccaggaagcgccactcggtgatctgcagcagggcctcccgggcctggctgatggtgaatggaatgcactgcggaggcgagagaggatctcaggtcggcagggaggagcgggagagggagacgagtctgaaggacccggatcccggcccacctgctgagtcaggtagactttgaaagcagagtccatgactcgagccagcaagtcggccaagatgtcccctacgacgtcgctcgccctcctcgagggctgtaagcgccatccactcggcctcactgagccgcccagg

SEQ ID NO: 88085 - DNA, 566 bp, Homo Sapiens
aagaaatctgatacagacatcaaggatgcagtcgacccagagtccactcagcggccaaacccattccgtcgacaaagcattgtcttagatcccatgttacaggagggtacctttaacagccagagggcaaccttcataagagactggtccaacaagatgcctgacatggcttacgaacgcaagctaaagagcctcatggagaaaagcaccgaacctaagatggaaaccatgaggatgttgaagccagaggaggtgctgagctgccgatacctgaggttatccaaggagaacattcggaccttgctcaagttgtgcaaggatgcaggaatgaatgtggatatccacccccacatggtcgaagaggacatagatgctaaaaaggtgttcaccggaatacccagcatggccctctaaatagctcctctcgccaccaccttcaggctccttctgtcatgggacccttcacctccagatgccatcctctggcacactacaagtggtccttccaacttagtgcatccctttagaaagtaagcaatcagaaaacaagcctcggctgtgtgatc

SEQ ID NO: 88086 - DNA, 528 bp, Homo Sapiens
tctgaggcagaaaagtcaaataagtcaaaggctgggcagaggtttatttctcagtcacacctgcagggaagtccagggataaaatgaacaatcctgtacatttcccagttataggtatgaggcaacacttcctatatgttgggtctcagtatatgactcacaatttcaacagtggactggatccacgcatgacagcctcagtccctcctgcagactgtgtacccttagtgaagtcacagcctcacagctgtgctgaatcttggtctgagagtcaccaacccacctgtggacaggattcacctatgagaggcaattttccaacttttgtcagcttcctaatgtgagattcagagcctcagtggtgggctgtgttactgttaaagaatgacaatatttactgtcatctgggtgtgcaacagtcacaatatcacctctgtgccatatttcattaggtgtcaacatttagcatgaaaattataaaactataaacccagctcaaggcaccatcatctttttgtgatttttaat

SEQ ID NO: 88087 - DNA, 460 bp, Homo Sapiens
tttatcacaattcataatatagccatttattaaaactgggaccaagttatgagctttcgggagcaaaacttttccctaattcactgagcactgtggcggctgtaggacgagcacttggaccctgtgcactcagaagctcccactctagtggggaggatgagactggcgagcaggacacgatgacaaatgacactagtcaggtatgagggagggtagttagagaccaatgagatgtcactactataaagtaaaagtaactgatttctttaacaaaatctaatgtataaatgttaagtgcagggaaatctgaaactatttattgtgataattacatttataatttcaccatttggatgttacccatctgaaatcaccaggtaaaagtcagggccagccactttgcccaaataaaatatatgcatagatggagaaattatataagttaattgtaataaatatg

SEQ ID NO: 88088 - DNA, 495 bp, Homo Sapiens
caaatggtctcctgcttttcctcactgaggcttataaactaaatttgcctttggctaagcgcagttacatgaaccaaaaagaacattttagacttgggaagcaacaggctgagtcacattgtatggggcagagttggccaagcccccggcagtcacagccctactctctgtgttccttctaggcctgaggacgcatcaacacaaagctccaggcagttgctcctggttcatcagagagcacaggaaatttaaatctatttgcctttcctgtcataaaagaaacagcacactgactttcaaactcaattgcattttgcttatttgtgcttaacaaaaaatatgtgtgctttgccaatactaacgtcccacttctctgcactccctttctgtataacagggattgcttttgtatttgtttcttatagatgctgatgatgtgccttattcagattagttggccattaccagaataaagaataaatttgaatttttttc

SEQ ID NO: 88089 - DNA, 467 bp, Homo Sapiens
cttaacatataaggttaatatgttaccttacatggcaaaagggactttgcaaatgtgactaaagctatggactttgaagtgggaagattatcctggattatcagaatgggactaatgtaacctaatttaatttctcaattttcttaatttgtttctctagccctaccctgtattgacttcttatactctatgttcaaaggtgacaactcttcatgagatgcatcaactgtgttcctcgaactcaggcaggttgttgaagatcacaaggtactagtggtataagaggatgggaggagagtaaagttaaatcatttattcctctggctcctttcctttctggctatgggtttgcagtggttttgtttttctctggccttctcctgaaccatttgttgaaaagactgctctttcccccattgaattattgtattcaaaatatttgaataaaactttatatcagtagaaaa

SEQ ID NO: 88090 - DNA, 465 bp, Homo Sapiens
tttaatgagaaaaatgtggcaactgtaataatgaagcacggctggccaagaagctctctagaaatgggaaaataataatccttattttgacaagaaagatcaggcctccactcacataggatatggagctggatcacagtggttttcatcaaccgctgaccctgcaccaccaaagaggcctagcaggagaaatttcagccatcatcttcctccctggcagtaagtagaagccaggcaggctccccagcagggaggtctggggctccctgaagccgaagagtagggctgggtgatgttaatacatgccctgagcaggtcacattaatgtcagtccctgccaatgggtatgattcttttagctccaggattggtggagggaagcctataaggaaaggaaaaggagaaccagacacatttctcaaaactagcagacacttctgcactcttgctgctggtaaaagccct

SEQ ID NO: 88091 - DNA, 500 bp, Homo Sapiens
ctggaattgcgtaatagatgttggttgttggtggatgcagttaacacttacagtccagttactttcttaatattcattcaggtgagtcattcttatgtgaaaaaacaatttgcattttagttgatcatcataaaaaaattatgcagcccacaatgcttgccaagagtgtaggacactgttttcttatttagtttaattgacaaaacaactggagttctgggctttacgggttctcggagtaagggggttagattatttttatagtttagctttccacctggcatgtctcgtttttccattgctctcccctcaacacccctgacccaaatgaaacaattctagtcatcaatttcaaagatgagtttcataaattaaagtttggcatctatcatctacttttatgatattctcttacatttggggggagaattggagatttagttatcagatataatggtcaaatcaagtcagataaaaatgggaaaatgaatactattgta

SEQ ID NO: 88092 - DNA, 462 bp, Homo Sapiens
aaaaagcaactactaatggtccgtcaagctgccctgcaccagctgtttgaaaaggagcatcagcagtaccagcaggaactaaatcagatgggcaaagctttttatgtagaaagattctgatggcatccaaaacactgctcttccattctcaacatgcctgctaacctagccttctagaacctctaccaccttgaacctccttcccaaaacatacatggatcttgctatctgtcagggacttaagacagcacttccactctcacttctccactctctcgttaatcctttgccgctatttgggaaacaatctatgaaacaacagtaacaacaagagtgacgccttgtggtcatagtgggatttactatgttgatgtaagggggcaggggtggggaggggtggacaatgagagttgagaatcctgccctggtataacaaataaacttacttcaaaaaggctcaaa

SEQ ID NO: 88093 - DNA, 509 bp, Homo Sapiens
  misc_feature (41)..(54): n is a, c, g, or t
caccactgcactccagcctcagtgacagcgagactgtctcnnnnnnnnnnnnnngtgactgaggaggaagaggccaggtggcaaatggaacagaatcaccaaagggtgaacaggactaaggcaatgtagtgtatggctcagctacgtcagagtggaaaaggtgttattagagcagaaactatggtccctgcgtcacagggaagcaacctacagagaagcagcagctccccaagagaggagagataagaagccagaagcctcagagtgaacaattgtcctattagggattgctctagagagagaaacctctgggaacgtacccctgtgaggcagcacagcacaatgcttttagaattgtatgagagttgatatatctccatttgttttgcaaaggcaaaaactaagatacagagagattatctgttaaagttatgtatttctttggtaataaagatgctgacagtgttgctggaatgcatttctttaataaagatattgtacaatgaaaa

SEQ ID NO: 88094 - DNA, 401 bp, Homo Sapiens
caacccacagaggtcattgcaacatatctctgagcccctaatttacgtagtttgactcctgcctgggccctcccttcagtgatttttgtgacatattttttgactcagcacctaggtaatgtgactcttctccactgcttggactctgtcacagaaggtattgtgatgtatcactgggcctgacacctaggtgaaggtactgtcttctcctgcctgggccctgcataaattgtatattttgacatgtcactgggttcaacacatgggtgattcaactctctcacatggaccttgagcatggggttattaggacatttatttttgttcatctcagtgatatgactcctttcctccctgaaccctgtcaaaaagaaagactgtgacatatcacttaaaccaaa

SEQ ID NO: 88095 - DNA, 320 bp, Homo Sapiens
ttgccaagcctactggtcagcaacttccacgtggagactgaattcctgaaagaactttcaataattggaataaaggttatccaattaaattgcttttgagtggaggttttaagcagatttagatcagttaacaggaaacaaaaaaaaccccccttctttaacatgtgggcatcttcatacagtcctgtaaatttgcaaatatggttctgtaactttaaataattgaattatttgtttttccctgcagagtggcttttgttgtattacttttcctttcttgaatgtcttagggaattataataatgattacctctcctttg

SEQ ID NO: 88096 - DNA, 479 bp, Homo Sapiens
gcggccgctttgcgggtagtgggactgtggccttgcgctatgccctgtgcttccgtgggacgtgtctaggaacgggtgggctttctgcgggaggcgggggtcgggcagggctgctggtctggagtgcttgtgctctcttggtagcttttgtgtggcaatggatagggagctggtccaggaaaagcgtctgtggaagaagaggagggtggacgcaccttctccaaggcacctgtagaagtcactggaactcccgtgaggcctcctgttgaccttaggccctgcgggagggagggcaccttccacctttcccccagctgaaggtctggtaccagacgcaggaaggttccaggccaacacagcgctccttcacacagtccatgccctgtgccaaactctcttccagccctggcgcgacaagatgtggttggggccccagatctcctggagggcgagagggacagaccagagggacggctagt

SEQ ID NO: 88097 - DNA, 649 bp, Homo Sapiens
agaggtaggctgctgtgctccagaaggcagtggcctgagctaggaagcttttaaaaattacaagtaatcattcagacttagttaatggaactattcctcagagacagccagaaactcagcagggaaggagacttggtaaagagcagacatcctgtattctgtggaatcggtgctgaaaacactatttgatcattatggggaaagatgactcctaaaagaacagttggggacatctgatttggaaagcatttaagtcccaaaaggaagaattacatgaaccctggccattcaccctgcaagacagaaggggtaactcaatcactattgtatagggagtgtcaagctgttcttgactaccatggacaatctcatagaaggaaatagaaacagttgcaagtggacacaagaaacaactaagtatcactatgatgttaactgtttaagaaaggttgaaaattactggttctgaatggtaaaattcatctgaagtacaaaggttgagatccttgtgtccttccaaagttatttttctacagatcttaagcacaagttaaagttttatttacttcaggcaactacaagcatctattaagtttttttccctgtgccatgatcaaatattaaataaatccatacagtgaaacacaaa

SEQ ID NO: 88098 - DNA, 434 bp, Homo Sapiens
cagattaagaactgtggatttttttatggccacagtgcattttcagtagcccttatttttgtaactgcattccagggcctttcagtggctttcattctgaagttcctggataacatgttccatgtcttgatggcccaggttaccactgtcattatcacaacagtgtctgtcctggtctttgacttcaggccctccctggaatttttcttggaagccccatcagtccttctctctatatttatttataatgccagcaagcctcaagttccggaatacgcacctaggcaagaaaggatccgagatctaagtggcaatctttgggagcgttccagtggggtaagtttgtgagggtgttcctttttgcttgttcttcccaaatttaaagcatagttaattcaaggaaaaaaataaaatcagtactgataagtcaaaaa

SEQ ID NO: 88099 - DNA, 577 bp, Homo Sapiens
gcatgtgggatagatgtgaatctttagggatgaactgtgatagggcgaataatggtccccaaagatgttcatattctaccagaacatgtgaatatgttatattacatggcaaagggaaattaagtttggagatgaaattaagggttctaatcagctgatcttaaagtagggagattattctggattagttgagtggtcccaatcaaatcacatgagctcttaaaaatggaagggggatgcagaagcatttgtcagagagataccacctgaggacttgacttgcttttgttggttttgaagatggaggaagggagccatgagtcaaggaatgaggcagcttgaaaacctgggaatggccttcagcatacagccaacaagaaaacaagggcctcagttctacagccggaaagaactgaattctgccaacagcctgcatgagtaagaaaacagattctccctagagcctccagatagcaatgcagtcctgctgatgccttaattttagtagagtgagacctttgcagacttctgacctatataactataattaataaatctgagttgttgtacgccaaaa

SEQ ID NO: 88100 - DNA, 915 bp, Homo Sapiens
gcggccgcagccctagcgccctgctcctccgcctgggcggtccggctgcggtgacggctctcgctgcccgactgggggccatgaagccgagtccggccgggacggcgaaggagctggagcctccggcgccggcccgaggcgagcagcgcacggcggagcccgaggggcgctggcgggagaagggcgaggcagacaccgagcggcagcgcacccgggagcggcaggaggccacgctggccgggctggcggagctggagtacctgcgccagcgccaagagctgctggtcaggggcgccctgcgcggcgccgggggtgcgggagccgctgcgccccgcgctggggagctattgggggaggcggcgcagcgcagtcgcctggaggagaagttcttggaggagaacatcttgctgctaagaaagcaattgaactgtttgaggcgaagagatgctggtttgttgaatcagttgcaagagcttgacaagcagataagtgacctgagactggatgtagaaaagacatctgaagagcacctggagacagacagtcggcctagctcagggttttatgagctgagtgatggggcttcaggatccctttccaattcctctaactcggtgttcagtgagtgtttatccagttgtcattccagcacctgcttttgcagccccttggaggcgaccttgagtctctcagatggttgccccaaatctgcagatgtgaatcccaagtaccagtgtgatctggtgtctaaaaacgggaatgatgtatatcgctatcccagtccacttcatgctgtggctgtgcagagcccaatgtttctcctttgtctgacgggcaaccctctgagggaagaggacaggcttggaaaccatgccagtgacatttgcggtggatctgagctagatgccgtcaaaa

SEQ ID NO: 88101 - DNA, 527 bp, Homo Sapiens
agtgctccaggaagcttttgtgtcctcggatgaacacggactgccccaggaacaccttcaagggttttgtgggactcaagggagaagatgaagccctcccagaaggccctgtcactacaagctgaggacctccctgggcaaagaccaaactctgactccagctctgaattccattgcagccaaatggatatttctcgtccctcggcccttggttgtttttcctaacattttttatttccaacctacccctaggttttcagtggcttccttagaatcagtaagaagccctgccagtgcagagcacgtgcctttgcttctgccccagtgccttcctaacagtccagagacagccacaccccaccaagccaaagccaggacaccctctgggttcctcatgctctgcccaagaacactgtgccacagtgagtgccagcctcaccaatttctccaggtaaacaaacactcctaaaattattggaaaattgttcctcacaccttttatattttcagtaaaaatgtaatagaaa

SEQ ID NO: 88102 - DNA, 498 bp, Homo Sapiens
ttttaaaagaatttaaatactttaattcaacaagtgaaatacaatagtagctataaaactatggagatggtaaattaagcaataacagaaaactgctataatttatgctaaacttccttttatcactacttaagtttcattcatcacattaatataatactgcatctcaacatctgcaattttgacaaatgcctggaaagttttttgttcagaaacagacgccggtctgacagaaacacattggaaaatgttctttttctggtcatagttgccaacacatctatgaactcggcctctaatcagtctcggaagttcacgatcctgtttttcaaaaaataagtatcaaaaaatagttattacttcatctgaatttcaattttttaaatatttatgtgatcaactaaacatgtgccacctcaaaatgctataattccttcacgtgagtcagggccccactgctaacaagacaatgatagttattcacatattggtaccctg

SEQ ID NO: 88103 - DNA, 545 bp, Homo Sapiens
tgaagggacaaattgtcttgggaaccagctattgagagtcggataggtccgcaaaaatctctggttctcaagttcctaacgagcagcttcctccaaagaagaaacggcgagttggaaccactgttcactgtgactatttaaatagacctcataagtccatccaccggcgccgcacagaccctatggtgacgctgtcgtccatattggagtctatcatcaatgacatgagagatcttccaaagacataccctttccacactccagtcaatgcaaaggttgtaaaggactactacaaaatcatcactcggccaatggacctacaaacactccgcgaaaacgtgcgtaaacgcctctacccatctcgggaagagttcagagagcatctggagctaattgtgaaaaatagtgcaacctacaatggaataggcataaggatcaaacacacaaggtcgatagaaaaggggcacagtcatcaccaccttcctcgagaatagccttctttgaccttcctgatctgcataaatgtatttccacatatgaaaaaa

SEQ ID NO: 88104 - DNA, 527 bp, Homo Sapiens
agcctgccgaaagcccccagtcagccactaagcagttggatcagcccactgctgcttatgagtattatgatgctggcaatcactggtgcaaagactgcaacaccatctgtgggaccatgtttgatttcttcactcatatgcacaataagaagcacacacaggggcaattccaaaagtcttcagatttccaaaaggaaggactgcagcagacatttctgcccccagaaaggcagggatagaaaccacagaggccacggaaatgatgggtgcccttgtggccagtaggcaatcacctgaaggatctgacttccagaaggtgggtatgactgatgggggtggggataagttgtagagaagatcctgtcattttagctgccaggaaatggtgagttgggtgagtgaatgtgtatattgttgtacctgtagaggatgaacaagattagaatgtacatagagggtatgtattttagacttgccactcctcaccttatttagcattgaataaattattcctgaagtccccccac

SEQ ID NO: 88105 - DNA, 795 bp, Homo Sapiens
  misc_feature (12)..(12): n is a, c, g, or t
  misc_feature (701)..(714): n is a, c, g, or t
gcagacttcgangaactgggatggaaaacagatgtttattcagggggcagatataagtatcattgtacgtatgccccttatgcagcctgttaggaaagtacagtcagctactcattttaaaaaagttcgcggaccttccagagctgatcctaaccatcttgtagatgatctgctaacaccttgctctccaggtgaccctggtgccattgaaatgacatggatggatgtccctggagataaacttttggagccagttgtttccatgtcggatatgttgcggtcactatctaacacaaaacctacagtcaatgaacatgacttgttgaaattaaagaagtttacagaagattttggtcaagaaggctaagccaaagacaaggaagatgcttaccatatgtattctttctttcatagatatttttgtctatttggatcgcattaattgtttccagtaaaactcttttaccacagggaaatacacatctcacttcagagttccattaggttttatattgtacttttcctccattacttattaaatactcctattaacaaaaggtacaaaataacaggttatgaggaaatgagcgatatatgaacggcataaaaacagaaattacccagtaaaaaggatgtcagaaattgacatacaaatatttacaatttttatgaatggtggtctttgcaaagagcatttatannnnnnnnnnnnnnactaaaatgatatagggtttattttatattttcaaaaaaattgttaaacatcattcttatcaatgtaaaatttacgttatt

SEQ ID NO: 88106 - DNA, 591 bp, Homo Sapiens
  misc_feature (49)..(49): n is a, c, g, or t
gactgtgcctgcctggggtctgtaatatgactctgtccttgtggattanaaggacttggtgcagagttcagggagggccgtgggttctgaggcgggacacctactctcatactgggatgaggaatgcgccctaaatcactgaggcggtcagagaacaaactaggtttagagtcatcaagcttctgtctgtgccttctgggttcccgaggtccatctactgtaactttaattgctctgtgataggtagctacttggggaggatttgtgaagacggttatggtcaaggtgaaactcttgcctcgtccactccggcccacaaatctcagatcgttgaaccttgctacttggtttttcataacagcagaggcattccggagctcagcagaataattttcatcgttacccgccatgacagtaaccacagtcccatctggtacctctccgagggctaccaccttgaaggccacgggcagggtcttgttgcagcgccagtgcgagggcagcaccgagcacaggaagttggggctgtcggtgcggacgagttcggccgggtggtcggcgatgatctccaccatggtgcggttgtcgtgg

SEQ ID NO: 88107 - DNA, 521 bp, Homo Sapiens
aattgctgtgctctcactttctgaaatggaacctcaggatcttgagctagagctctgtaagaagcatcattttggtattaacaaaccagagaagatcataccatctcctgatgactcaaagtttctactgaagacctttacgcatattaaatccaatgtgtctgctcctaataaaaagaaagttaaggaaagtaaagagaaggagaagttggagaggagattacttgaagagttgctgaagatgttcatggactcagaatccttttattatagcttgacctatgacctgaccaattccgtgcagaggcagagcactggggagagggacggtcggcccctctggcagaaggtaccactcacagctcgtagagcagggtttgcccttgggaagaagtgatggcctgttttggcttttgtaggaaaactgaaataatgtgtttctgaactattgttcctgcaccttttctaggttgatgaccgatttttttggaataaatacatgatacaagatcttaaaaaaa

SEQ ID NO: 88108 - DNA, 1367 bp, Homo Sapiens
cagtcgacggtaccggacatatgcccgggaattcggccattacggccgggtacataaaactaattcaacctgtatgacaggactactggtaaaatgcatatggaggtggtggcagagacaatccttcaggccatgttttctacctgttttgatattcactggacaggaaaaagggcagggctagagagagcaaatactatggctagatttgctgcattgctgtcccatgaatctcgagagccaacagacatgtcctaacttgctattaggacaaatgtgacagtcaaaaacaaggattagagggagggagaaaaacaagaattaagcagtaccaaagctgaactagatgcttgtgtctgaactagttgctctctctctcctttctccttccagggattcaagccaaagtggtcagctcagggatcatgtaacttgcagtgcaagcccaggatggtaggatgcagggttgagggttctgatagagaatgattccaaacagaagtgatgaattcctttgtgttaataagatgccagctatacccagactggaaacataacatgcaaagcactatctacagtgattagagatcctttcatggcattcatggtgtggagtgtgaacatccacacccatactgtaatgtatttatacacactagtttctgtctcattttcagtggtctccattcctagaaaagtcacaattatccattcctacttgatttcccattaaaagaatattatggtagcagattgtgcccctcattaaaaggcttaatgccaacattttcatagaaatgactacaaacatcatatatagtaaatttaaaaacaatagcaaaaacaaaaacagtggtcttcagtaaaattttcaaaacttcttttagtaaatcaatgaagtcaaaatgtcaagtaatcacccaaagttgcatttaataacaaaaggcactacatactgtaccaagtttatcttcaatatttgtgccttacttactttgactataacaaattccaatgagtcagaaagtatttccttcatcaaggtccagttccgacagcattcctgggaaaaatttgaaaggagtttgtacggaatcttcatagatacctgagaagatgagctggagatgtttgcctttttcacactacaaatttttctgtaataaacttgggaattagaggtcaagtttgttgatggcatagcttcctttgcataaagagtatatttcttttcaaagtatatatttttgtaacctaccataaagtccgtaagtgaatacaacgaatgtaattgacataataattgaaaatcattgactatacctaaaatagttctttataattaaataactctacacccaatctgg

SEQ ID NO: 88109 - DNA, 537 bp, Homo Sapiens
  misc_feature (19)..(19): n is a, c, g, or t
  misc_feature (36)..(36): n is a, c, g, or t
gctgtcttacttgttactntaagccattcagttttntctaagataaaaaaggttagtttatctaggcagaaatagtatgtaaataattatacaagtagtacatggatatgacgaaaaccttgaagctgatgtgcaaagagctgaaacttggaaaatacttaatgagagaatggcctaaagagctattcggtactctgaattccccaaaggcaaggaccaatatttatccacctccgatatctcctccggaaccttacacagtacttggaacacagtggactctctacaaataccaaattgggaattaactcttattataaatactgagtgtcagccctggttcttccgggctccaaaactaacatatgagtagatttctccaggtagacaagagtgaggtaaacccccaagaatcaggaactagagccaagtaaagaataagccccgagaagctttgagtaaaaaaggagacgtgtttgcacattgagaaatggaacacaagtagaaagtccaaaaacaaagataaaacttgcagca

SEQ ID NO: 88110 - DNA, 1669 bp, Homo Sapiens
gcggccgctcccacttcagattggtaaccactagcttatggagcccaggcagcttcatataatgcccagccctcggcctcttacaatgcccagtctgccccatatgctgcacagcaggctgcttcctactcttcccaacctgctgcctatgtggcacagccagccacagctgctgcctatgccagccagccagcagcctacgccgcacaagccactaccccaatggctggctcctatggggcccagccggttgtgcagacccagctgaatagttacggggcccaagcatcaatgggccttatcaggcatcctatgcggctcagtcggctgatgcggccactggctcctatggtgccgcagcagcctacggggcccaaccttctgccaccctggacagctccttaccgcactcagtcatcagcctcatatggctgcttcctatgctgcccagcagcatccccagtgctgctgcctcctacctgaggccagccaggcaatgcctacgatggggcaggtcagccgactagcagcctaacctgtccatgtcccagggagagccagaagccaaaggccaaccagagcaccacacgacggccctacatgaggcgtcacccggacgcgaacaccgcacccacggaaccaagcgaagcgcaggaagacacggtaccagcacacaggggcatcgatccggcgcgactgcactgccacacacgggactacatggacaagtgaccacagacgacgggcccatccatgcacccaccaagacaatggaggagccataaaagaggacaaacagggagagccatgacgggctatgggcaatagggcaaccagcacacaaaccacgacacggacacctccggggccgccccaaaccacggccgggagcgctaccaacgatacgaaacacggaccggggacatagaccccaagacaggaccaacacaagagagaacagacgagcgagtgcacatcggacgacctagccaccgtgcgaacaaccacaagaggagaccacacgggggcgagacgaccacatccaatagcacagcacaagacccatggagagcaatagagaaccgcgatcgacgacaggcaggagcccaaaggccaacacaagatgcacagcacgaggcacataacggccgcacagcccaccagagagaggcgcaaagtgaacacccacatggacatcgacaagaaacatgaggccccacaggaacaatacaccaacaggccacaacaggaaccactacaagccacaggtcacggatgcaaggaccatgggcacacggccgcgccacacgcagctacacgccagacggccccctagggccatccacaggcgaagagagcacagcccacgaaaccagccaccgcaccctagaaaagtgtagacccgccagcagacaggcgaacagacgacaccgcaggccgaacaaacgggcacacagcacaaacaccagaacgagtgacaagcacaacacgccacagaccaaacgagggagagaaagaggggcaacacgcaaaggaaaagccagaagcgcaccacgaaaaagcagcagaacaccagccacggaacagccacagaacacccgggagcgcaagccacacgggcgacgagcgcacgaagagcggcagccagcgccggtggcctgcgcgcagg

SEQ ID NO: 88111 - DNA, 1443 bp, Homo Sapiens
  misc_feature (669)..(669): n is a, c, g, or t
  misc_feature (1218)..(1226): n is a, c, g, or t
gaactttgaaccaggatggctgagccccgccaggagttcgaagtgatggaagatcacgctgggacgtacgggttgggggacaggaaagatcaggggggctacaccatgcaccaagaccaagagggtgacacggacgctggcctgaaagaatctcccctgcagacccccactgaggacggatctgaggaaccgggctctgaaacctctgatgctaagagcactccaacagcggaagctgaagaagcaggcattggagacacccccagcctggaagacgaagctgctggtcacgtgacccaagctcgcatggtcagtaaaagcaaagacgggactggaagcgatgacaaaaaagccaagggggctgatggtaaaacgaagatcgccacaccgcggggagcagcccctccaggccagaagggccaggccaacgccaccaggattccagcaaaaaccccgcccgctccaaagacaccacccagctctggtgaacctccaaaatcaggggatcgcagcggctacagcagccccggctccccaggcactcccggcagccgctccccgcaccccgtcccttccaaccccacccacccgagagcccaagaaggtggcgagtggtccgtactccacccaagtcgccgtcttccgccaagagccgcctgcagacagccnccgtgcccatgccagacctgaagaatgtcaagtccaagatcggctccactgagaacctgaagcaccagccaggaggcgggaaggtgcaaatagtctacaaaccagttgacctgagcaaggtgacctccaagtgtggctcattaggcaacatccatcataaaccaggaggtggccaggtggaagtaaaatctgagaagcttgacttcaaggacagagtccagtcgaagattgggtccctggacaatatcacccacgtccctggcggaggaaataaaaagattgaaacccacaagctgaccttccgcgagaacgccaaagccaagacagaccacggggcggagatcgtgtacaagtcgccagtggtgtctggggacacgtctccacggcatctcagcaatgtctcctccaccggcagcatcgacatggtagactcgccccagctcgccacgctagctgacgaggtgtctgcctccctggccaagcagggtttgtgatcaggcccctggggcggtcaataatcgtggagaggagagaatgagagagtgtggnnnnnnnnngaataatgacccggcccccgccctctgcccccagctgctcctcgcagttcggttaattggttaatcacttaacctgcttttgtcactcggctttggctcgggacttcaaaatcagtgatgggagtaagagcaaatttcatctttccaaattgatgggtgggctagtaataaaatatttcacaaaaaaacattcaaaaacatggccaaatacaacatt

SEQ ID NO: 88112 - DNA, 461 bp, Homo Sapiens
  misc_feature (153)..(195): n is a, c, g, or t
attcaaattaacttatataacttagttaaaaatgggggaatctcttcaatgcagcctacctcagctcccaaggcccaatcagatacagctctccaaacctgccagtgctggtgaacgcgctgctgggagcactggcaccccacagtggttgtnnnnnnnnnnnnnnnnnnnnnnnnnnnnnnnnnnnnnnnnnnntgccctctcacctctatggggatgtagagcatgaatcctggctctcctgtgtgcgtcatgctcatcacccggatcccctttgcatagcccacgctcatctcctgcagggacaaaggcagcagtcagcctgggcactcacattgcttgtcaagggagggacgcctggggaaacctttcattagtgctgcaccctctgtttactgttgagggagacagacatcaaggcaagaatttcatcccgaaagtggttaacttccaggtcctga

SEQ ID NO: 88113 - DNA, 570 bp, Homo Sapiens
cttttaagttactgtttgcgtatacagtctttgcgtatttacactgtagatagaaagatgaataagacattcttaagagttgatgggtggagagttatataaataaagaattatttcgaaagatgtttatagagtgagaatgacatttaataggagcattttactcatcaagtatagaggttatgctgagtgtacccaggtgagagctgatcatttaacctggaaccaaagtttaaaggtcataataaattaattgaggaaatgtttttaagtgaaatatacatttttaaatatgaccgagtccttttataattatcaacagttgtggttttcattaaacattaagtgcctctttcttaattcttcaccggctttccctgccacctgctacgcattacggttcccccaactaccaacctttagtgtcctataaaatgaaactcttcttaattttagcatgaataaaacataataagcaggatgaatcagccaccagaagctcacataatatattccaggatcaaattaaaccgccatttgtttaataaactccttttaaaaacataaaaa

SEQ ID NO: 88114 - DNA, 592 bp, Homo Sapiens
accaacgccaacaacaacgtgtcgggagcagccgcggccgaagccggagcaggggccggagtcgcggctggagtggggcctgcgcgtgtgagtggccgagagttgcccgtgccggagacctcaaactccgggcgggagcgctttcggtcggccgagccgccgtcgcccgcggcaccgtgtccccaaggcccagacagcggggcgggggtctatcaggcgcgggactggcttctctcaggccgacccttctagccgggctccggatcttcctcggcctcgggcccccttcacgttcaggacggaggccggagaacggtgatcatcacacaccccagccggcttcctggccagggcattttctctgcggccaagcagtgttgggattgtagctgctgggagccccctcctgccgccacctctcctgcaaggaagggactgacgcgttcccactttcttactctgcacctccccactctcttcccattcaagaacgagtgggaagggactgacgcgttcccactttcttactctgcacctccccactcgttcttgaatgggaagagagtgggtcccgggaattccggaccggtcc

SEQ ID NO: 88115 - DNA, 739 bp, Homo Sapiens
tttcccgggcaaatgctttaatttctctgaactcgttttcccagtccttgaaatggtggtaatattatccccttggtggattcctgggagttatatgaagtgtctgttgtatctgggaacctcattggaggctcatagatagttttagagatttcagatacctcttgcaattgtgtgcaaaatcgtgcttgtgtgtttgtgcacatacgtggattttcctggggagaagttcctttgctttcacgactctccttcagagtgttccaggctgtggaatgcaccagactaagtgatcctgactccgtagctgcggaagtaccgtcactgctgcggaaaccagctcactggtactactttactagatcttaatcaaaattcattcagttgatatttgttggtgtttacaacagccttgtctcccttcacctcctttttaacaacaaagtttctactcttgagttaatttcgtttgaatatatggttatttgggagctggaggttgcaagaaagcggctcaggctttattcctgccaatttcaggaagagccacattggagccaccagggggcgccctagtcttttctctgccgctttccttccgcagctgcgggtggtggttatctgaatttttcatgtccagcgcggtacccctttcagtggtgaggtcgcgagtggtggtggtgttgagagcagtggtcttttctagttgaaaaacatcaagcatgcatgcagctttctg

SEQ ID NO: 88116 - DNA, 315 bp, Homo Sapiens
ggcctggtgagcaaaatatcccaaacctcgcgtgatctggaaggggaagccggataaatacggatctccagatgtgccagtctcgagtctatcgatatgaggtccccctagagtttctattcatcattttaaccgcatttcatcgatcttgagacacggcttttgatattttatcacctcaagataaatagtgttagatgtctaatagcagcgtttttctaagagatacatgaaacaacagtgtcagaaacgatgctgtcttccatgcgatgaaattgttgtaataggtgctcaataaatgttgacaataaaaaa

SEQ ID NO: 88117 - DNA, 755 bp, Homo Sapiens
  misc_feature (532)..(624): n is a, c, g, or t
  misc_feature (629)..(629): n is a, c, g, or t
  misc_feature (635)..(635): n is a, c, g, or t
  misc_feature (659)..(688): n is a, c, g, or t
tcgtgtatcatattcttccttccatgcaaaattcttttgagtgcagaaactctgccaataagcgtagaaaggatggacgtatcatagtcactctgggagtctccaaaagttgggaaatcatcaacctcttcctctaacacagattctagttcttccttggcaatcatttcaaaaacattacgatacaccgtgtaaaatcccttttcatcatctccataaccagaataacagggtaacgggtgaaatagcgtagcaaatctaaagctgtccatctggatattcgccatcaaacccacctttaagtagggcctctctatgattatcataccatgctctttcctgagggtcactcaacacatcatatgctgcttggattaatttaaattgttcagctgcttctgcggcattatccagatttttatccgggtgccatttcagggccagcttccgataggccttcttgagctcctcctcgctggcgtcgcgccgcacccccagcgcctcatagtgacacttcatcgcccgaccgggnnnnnnnnnnnnnnnnnnnnnnnnnnnnnnnnnnnnnnnnnnnnnnnnnnnnnnnnnnnnnnnnnnnnnnnnnnnnnnnnnnnnnnnnnnnnnagtcnttttanttcaccgggccagcctgcgagccnnnnnnnnnnnnnnnnnnnnnnnnnnnnnntggtgtaggtcagtgaaggcgcgcggtggcggcagacgacgcaggctgcggcaagcgggagcgcccc

SEQ ID NO: 88118 - DNA, 560 bp, Homo Sapiens
ctcctgtatattgcacttctccggactttaaaatgggaggtgcttctgatgtatctaccgctaaatccccattcagtgcagtaggagaaagcaatctcccttccccatcacctactgtatctgttaatcctttaaccagaagtccccctgaaacttcttcacagttggctcctaatccattacttttaagttctactacagaactaatcgaagaaatttctgaatctgttggaaagaaccagtttacttctgaaagtacccacttgaacgttggtcataggtcagttggtcatagtataagtattgaatgtaaagggattgataaagaggtaaatgattcaaaaactacccatatagatattccaagaataagctcttcccttggaaaaaagccaagtttgacttctgaatccagcattcatactattactccttcagttgttaacttcactagtttatttagtaataagccttttttaaaactgggtgcagtatctgcatcagacaaacactgccaagttgctgaaagcctaagtactagtttgcagtccaaaccatta

SEQ ID NO: 88119 - DNA, 465 bp, Homo Sapiens
tacatgatgagtaagtatctaggcaaatctgtgctattatttaatgttgaaaaagtttcatacatgcctgaggaacactgtcaggatgccaagaaagggaatttgttggtgtgtgccactgggtataatgttcactctggatgaatatgatatttgatttgggaataaacttcaagagactgaactaaagtagaaaatttcgagcaacacatatgattgtgctttcctaacaaaaacgggtgtaagaataatgtctgccattcagaagggttcacaccccctaaattgatttctcaaaaaaggccataaataagtccaactgattcatttacttgggaaacaacggagctaaagctaaccttggccatacaaagagagatgatttctagaacacgtatttaaggagcacttacatcattagcccatgatcctgcaataagaaagttccccggcaaggttggtggg

SEQ ID NO: 88120 - DNA, 511 bp, Homo Sapiens
  misc_feature (271)..(281): n is a, c, g, or t
  misc_feature (376)..(403): n is a, c, g, or t
gtttatacaacatgctacactacgcacttgggagcagtattcaaataaaaatatgattgctgcctcaggtcattccaaaagtatagtcatccaaaagtatttaaggcctatgctgaggactgaagcacaagtgttaagactgctattccttactctgacctaatagctttcccccattcattctcatcaaatattgatttaacaatggaaagtggcaggaagcttgtgttcccattaaacacaacacttcccctcctccccagaaaacagnnnnnnnnnnngtcaggaacagggaagaaaagtaatcacatttaaatggtgatagaaaaatttaagtcttctatgctttaagcatttaattgcaatgtgtaggtannnnnnnnnnnnnnnnnnnnnnnnnnnnggagtaccaggtactgtgctaggggctgggagtaaacaagacatagtccttacccataggaagttatattttgtatctccccaggaaattccaacagagtgacatgtg

SEQ ID NO: 88121 - DNA, 567 bp, Homo Sapiens
tgagggtggaaggatgggatgggttccagaggtattcctctcttaaatgcaagtgcctagattaggtagactttgcttagtattgacaactgcacatgaaagttttgcaaagggaaacaggctaaatgcaccaagaaagcttcttcagagtgaagaatcttaatgcttgtaatttaaacatttgttcctggagttttgatttggtggatgtgatggttggttttatttgtcagtttggttgggctatagcacacagttatttaatcaaacagtaatctaggtggggctgtgaaggtattttggtaaaatgggattaacatctacaatcagttgactttaagtgaaagagattacttaaataatttgggtgagctgcacctgattagttgaaaggcctcaagaacaaacactgcagtttcctggaaaagaagaaactttgcctcaagactatagccatcgactcctgcctgagtttccagcctgctagtctgccctatggatttgaagtttgccaaccccaacaactgtgtgaattaatttctaaaaataaagctatatacagccaaa

SEQ ID NO: 88122 - DNA, 984 bp, Homo Sapiens
  misc_feature (41)..(80): n is a, c, g, or t
  misc_feature (84)..(118): n is a, c, g, or t
aagagcttatcatcactatagggcgctagctccgccgcagnnnnnnnnnnnnnnnnnnnnnnnnnnnnnnnnnnnnnnnnccgnnnnnnnnnnnnnnnnnnnnnnnnnnnnnnnnnnncagtcgacggtaccggacatatgcccgggaattcggccattacggccggggccactgatgaaataaaagataaaactgcagagctgcaaaagctttgctcctctactgacgtggacatgattcagctccaacttaaattgcagggctgtgtttctgtgcaggtcaatgctggtccattagcatatgcaagagctttcttaaatgacagcaaagctagcaagtatccacctaaaaaagtgagtgagttgaaagacatgtttagaaaatttatacaagcatgcagcattgcacttgaactaaatgagcggctaattaaagaagatcaagttgagtaccatgaagggctaaagtcaaatttcagagacatggtaaaagaattatctgacattatccatgagcagatattacaagaagacacaatgcattctccctggatgagcaacacattacatgtattttgtgcaattagtggtacatcaagtgaccgaggttatggttccccaagatacgctgaagtgtgaggaaatgcagatgtacgtgacaatgagactgacctttctcaggaatatttggagctgtgcaaatgttaaaatttaaagatttgatatacatggagtgtttcttctcgacaccaaaattttcatgtgttccaacagggtgcttacatatttgtaaataagcaacttgaaagtgcctggaaaattgcaccactgtgcttggtttgtacttttttaggtaaatctatatgctgaaaagtagagctcaaaaacagtagttcaatttgcttaattattgcttaaaataatggtactatgtaaaattgtataatggaatacaataaaaggtaaaacttatttgtaattaaa

SEQ ID NO: 88123 - DNA, 330 bp, Homo Sapiens
  misc_feature (19)..(19): n is a, c, g, or t
tttcctacttctagccggnaaagtcagtatttcagaatgaataccagagccctttaagtaaaaacttcctttaatctgttctctgcagcccctatttggtataccaagtgttctagatacctgaaatacacctgtacgtggctacttaaggtaaatttctttctaccgtagaacagagggcgagtcagctttaggcttcatcagcccagccctttcatttctctaaggaaaggtatcaaggtgggagctgacagtctaatgttacttcctaaatcagaattcagtttgtatcctttaataaacagcttgtcttgctgcatctcctcaaaa

SEQ ID NO: 88124 - DNA, 677 bp, Homo Sapiens
  misc_feature (559)..(572): n is a, c, g, or t
gatctctaatactgcctaaaagtatgctttcactgtcagcagttttaaaggtgaaatcagagcagcactaccctcccacctccaaagcatctgtaaaatcattctatcattgagtatcgtttaatgcaaaaggacaaaaacaactcccgtgatatgattgccaggagattctgtttccccatttctatatttgtggattttatatgtaatcacctatgtcagagaaagaaaacctttcaaccaaatgattggttcaaaaggaaagaatgattcaaagcagaggaatttattatgcacagcaaaatgtgtcttgtattaaatatttttattaaaagaatgtttcattaatgcattgataagaaaactaggttagttgcgagggatgtttctggtttcatttcaaataattaaatttctactgctactaccaagaggactggctcagtggtggcaaaatactggtgatgctccctagagcaggaggcccggaagtgctgacgcagccatcagcctgccaagattgttttttaatcttcacagtgttttaaagaacatgttnnnnnnnnnnnnnntctagtgctcctgctgtcaagatttctgtcatggaaaccttgtttgagaaaggtgttaataaaattctattgcaaaaatttctttttctagaaaaaataaataca

SEQ ID NO: 88125 - DNA, 566 bp, Homo Sapiens
  misc_feature (461)..(475): n is a, c, g, or t
gtctctctctagcaagaatttatctgacaaacatacccaaatagcacaccctctcaagctcaatgcctcaacagttgtttcactgtactgatatctgactgctgaacagtgcctgcccttcacccacccccagcccgagcattaacacagatcttcaggattgggacaaatcccccagctgcttttgcctctcaatccatctcccctcatcgataccaatttcccaggcctgaacacatctgttattttgctctgacattgtgaatttgtgacagtggaaaccctgatatgtgcaactgagcttatagaaataattactgtgaaatggattaattttgataccactttaaactgtgcttgtattcatgtgttgacccttgtcagctgggaaatctgtacattcagtatatgtcagcatttcattggagcctgggggcaacagacaaacttgcttctgattnnnnnnnnnnnnnnnttctttttataattgttgaatttggctgttacattttgtcttcttctttacaagaaaacaataataataaagagcaaatggcatccacttg

SEQ ID NO: 88126 - DNA, 506 bp, Homo Sapiens
aaacaaaaacacagccagataatcattattcttcccttacgtccccccagcccccacctggggcagtcgctctcccggctgcgtcccttttcgtccatgtcctagcagagactacagagcagtacagaggctctcgctgaaaccagtcccaggctccacagagtcagatcacggcttcacaccagtcgttctggtcacttaggcgttcgcgtgagcgctcaaccccttaccgccacctcatcgtcactctacaccattctgagcgcaaaaatgttttgattgagacaaatttagaccaagcaatgaccttgtaaacagagagaggggctcagacatgctgagaaatccttatctctagagaaacgtctttaaatgctaagtaaaagccctagcaagtaaaagccctgaggcactagggtgtcggttaggggtcacaggcggagaggtggggcgcctgggggtttcggtagggagccacccacagataactcagacagccagattct

SEQ ID NO: 88127 - DNA, 465 bp, Homo Sapiens
  misc_feature (348)..(362): n is a, c, g, or t
cgcagcagaacacgaagtttgcattccccaaggggcggccagggggcggaccagggaaaggtagtcctctgcattttgccgtgtgctggaatggtgtagagtgacgatgaggtggcggtaaggggttgagcgctcacgcgaacgcctaagtgaccagaacgactggtgtgaagccgtgatctgactctgtggagcctgggactggtttcagcgagagcctctgtactgctctgtagtctctgctaggacatggacgaaaagggacgcagccgggagagcgactgccccaggtgggggctggggggacgtaagggaagaataataattatctggctgtgtttttgtttnnnnnnnnnnnnnnnctggtgtaaatctccatagacttcctatcctcgctcccttcacccacccacgcgctcccaagatgcaataagcaaataaaaagactaataacgctgtaaaaaa

SEQ ID NO: 88128 - DNA, 407 bp, Homo Sapiens
ctgctagcagcagcaggttgaggagctctgggccacaaacaaacgcttgcctagtcccggcttcacaggggaccccactccaaccaatccgaaccctggaccagtgggagcttaaccttcccccttagaaatttctgcccaggaagccagggttttctaattccaaagcagagtccacagtgggtcttgacatcaatgtaaggggtcaaggccatcttttttactaaaggaagacagagcagaccagagcacagcagatggcgagtacgaggatgatctgagaaacttcaatttcagggtttgagtttgacgtgtgtgtttgtgtacatgcacacgcaggccacatccattgtaaaatgtatttaatgaacgctgaggattaaataagactctgaaagcccctaaaa

SEQ ID NO: 88129 - DNA, 709 bp, Homo Sapiens
  misc_feature (82)..(82): n is a, c, g, or t
  misc_feature (88)..(88): n is a, c, g, or t
  misc_feature (106)..(106): n is a, c, g, or t
ctttaccagaatggaaaatgtgcaaaagaaggtggaccactcgtatctcaacagacatcttttgaaggtagtgggtcagtanccagcncaacattaatagaaattntaagtgacactggagcagaaggacccacggtggcactctccctttctccacggacatcggacatcctcaaaaatcagactgtcaggtgggcagaagaaatccagactagtagaccacaaaccataactgaacaagactctaacaagaattcttcaacagcagaaattaacgaaacaacaacctcatctactgattttctggctagagcttatggttttgaaatggccaaagaatttgttacatcagcaccaaaaccatctgacttgcattatgaaccttctggagaaggatctggagaagtggatattgttgattcatttcacacttctgcaactactcaggcaaccagacaagaaagcagcaccacatttgtttctgatgggtccctggaaaaacatcctgaggtgccaagcgctaaagctgttactgctgatggattcccaacagtttcagtgatgctgcctcttcattcagagcagaacaaaagctcccctgatccaactagcacactgtcaaatacagtgtcatatgagaggtccacagacggtagtttccaagaccgtcccagggaattcgaggattccaccttaaaacctaacagaa

SEQ ID NO: 88130 - DNA, 563 bp, Homo Sapiens
cataagcccaccccagggacaagccaggaactcccctgtccctgagaagtcccacccccaaccctagcactcatgcagggcctcggagggtggccctgcctccctcaaatgccctccccccaaactcctatcacctggaagcctctactaggcctgtgccccattccagggaaccctctgctcccatccagggccctcatttcaccccttccctgaagcctgtctgcggctgtccccacctccctccagccaggggagggtgctccctgaccagatggctccacctgtcactccctgtcactatggtggtccttcctcctctgaactctgggaccttgcagaggctgctcaacacctctgagctcgaatctctgctccaggggatgcaggttatgaagatgagagcgtgagacagcgagctgtaagggaagcaggttacccagggatggacagaggatgggccctggccctcatgttatgaagcttctccacgtggtgccttcctctgtcaaatgggcagaagaatatccttttgatagaattaaaatatacgaaaaccaaaa

SEQ ID NO: 88131 - DNA, 620 bp, Homo Sapiens
tgggcagggcccaggcatgagatcagagtcacaacatgtaggtgctgggccaagtgatatgtcacaatgcccactgtagacaggttccaggaagaaaaggagcatcacatcatctaggtgataaaccctgagatatctcacaatgacccctttgtgcagagatcacaaagaagaatcatataacctgtgtgctggatccagtggtatgaaagtcaacacctgtattttgggtctaagtacatgagacacaatgttggacaatctatactgagagcctcaattcttcctgtagacagtgtctcctcagtggagtaaaagcctcacggtgtgttgaatcttggtctgagagtcgccaacccactggtggaccggatccacttacaagagtcaatgttcaaactttcaactgtctccagctgtgagattcagaacctcaacagggatgcaggttatgaagatgagagcgtgagacagcgagctgtaagggaagcaggttacccagggatggacagaggagtgccctggccctcatgttatgaagcttctccacgtggtgccttcctctgtcaaatgggcagaagaatatccttttgatagaattaaaatatacgaaaaccaaa

SEQ ID NO: 88132 - DNA, 807 bp, Homo Sapiens
caattaaaaggtaccaaggaattggtcgagaccaatggccacagccatgaggattcaaatgaaatcaatgtgttgacagttgcattagtcaaccaagaccgagagaacaatattgagaaaagaagccaaggcttaaaatcagagaaagaagctctgctaataggtatcatatcaacgtttcttcacgtccatccttttggagccaacatagaatatctttggtcatacatgcagcagctggactccaagatatctgcaaatgaaatagaaatgcttttgatgaggctgccacgcatgttcaaacaggaattcacgggtgtgggagccacgctggaaaaaagatggaagttgtgtgcctttgaaggaattaaaactacctaactgcgaagagcaaagcatctctggaaatgaaaccatgtgaacctggccagggcggtgcgacggggaagcaggaggtgtggggttggtcccgcacgcaacctttgtggagccatcgaagcctgcctttagttatatctgtggcgttctcttgtaagtggaaatgtaattgtgtaccagtttcttaaaataaacaaagcttcatactgtgacagatctgtttcctatgaaaaccaaacaatgattccacagtcataatgatggcaaaatcttaaaatgtgctacatttgagaatagctcaccaagcaaaatatttaaagttaatgatggtgtagcaatgattgttgctaggctacagagttgtatatgtaatgtatagctgaaatcattaaatgacattttcctgaaagtctttctgttttagtaaaa

SEQ ID NO: 88133 - DNA, 585 bp, Homo Sapiens
taatctcatgccagaagaagcactcctgaggcagaggagatttcaggagagaacaggttgaacattaataaggaggagctttggcactggtccaagaaacaggataagctaaatctctgcatctattctggacaccagaatggcgcggggaccatttagaggtgagatgggcagatgaggagctgaagtttcagagaggttaagcaatttgcctaggttcacacagcaaagatgatgaaacttacaaccacaaggtgagcccttcttactagaagttctcttcgtgtctcctggtgttcacatattggaagacttaatccttcagtgaccgggaaaagacctcctaggacctaccaatccagccttatcagacacctggcagagaaagtgatttctgaagcaggagaaaacccaggaagattgctcagttcctgtgcaagctgcttcccagctggagatgacagttaatcttgaaaatcaattcagtgcctgctctcactgcagacactcctcagggcaggccacggctcctctcaccaccgttaaacagaataaaaagtggggaattgagcagcataaaaaaaa

SEQ ID NO: 88134 - DNA, 393 bp, Homo Sapiens
ttagcagtgtaacaaaattgaaattgatttattggtcaagtgaaatctgaaacacatgatcctgattagtggtccgctctctgccacgtgatgattcagggaaccagcttccttccatcctgtggctccactgtctttaacatgtggccttcagggtcactgtgcctaaggtcatcttcatcaagaacaaccagtgctggcttctgatttatgtatatgcaggttgtgggtaagcagtagctcagctccacaggtcttctcattcccaggcccaggcagaaggagcaactctcatgtggattattcccattcatttttagctccgagactgttttgctcgtagaccagcagccacccctaatgcagccggccccctcctaagggatcatgggc

SEQ ID NO: 88135 - DNA, 518 bp, Homo Sapiens
ccgtcagcttctctccaatgacaccccagggttgtcctacagggccaccgaagcctgaagctcctgtgagtggggccgataagaggccattttgaaaagtcctcagcatgggcttcgcctttagatccacgtcgtttctcctttctaacccgagatgtgtcccttgggtgcgaagcgacaccagcgattctctcggaggccccggtggctcacccccacgactccccggggaggcggtccccatccctagggaaacccggcccgcccagcctttgttgcagaaaccgcacacggagccatatttgctttcagccaaaggcagacgtggtcggaggagtcggaagggcaggggcggacccgaaacccgccgtgcgccccacttctccatcgcgctccttcctggactctccaactccactaaacgggcacagagacgccaccgctgtcccagaggcagtccgctaccgggacccgctcccgaactccgccagagcgcgcgagggcctccagcggtcgca

SEQ ID NO: 88136 - DNA, 240 bp, Homo Sapiens
tcacccgccccctcccccaactcaaggccccttccacatcccgtttcgcctccctccaggactccaccccggctcccggacgccagctgggcgtcagaccccaccggggcaaccttgcagaggacgacccggggtactgccttgggagtctcaagtccgtatgtaaatcagatctcccctctcacccctcccacccattaacctcctcccaaaaaacaagtaaagttattctcaatccaa

SEQ ID NO: 88137 - DNA, 598 bp, Homo Sapiens
  misc_feature (20)..(20): n is a, c, g, or t
  misc_feature (37)..(37): n is a, c, g, or t
  misc_feature (50)..(50): n is a, c, g, or t
aagggagttgctcctcaggnctttgatgcatttcacnctgtcaaagctgnttggcctcacctgggccagggctctagaaaggggtgccctctggatcctgctgtggcctcacttccttggggaactcatcctgtgtgggaaggcagctccaacagcttgaccagacctagacctgggccaaaagggcagccaggggctgctcatcacccagtcctggccattttcttgcctgaggctcaagaggcccagggagcaatgggagggggctccatggaggaggtgtcccaagctttgaatacccccagagaccttttctctcccataccatcactgagtggcttgtgattctgggatggaccctcgcagcaggtgcaagagacagagcccccaagcctctgccccaaggggcccacaaaggggagaagggccagccctacatcttcagctcccatagcgctggctcaggaagaaaccccaagcagcattcagcacaccccaagggacaaccccatcatatgacatgccaccctctccatgcccaacctaagattgtgtgggttttttaattaaaaatgttaaaagttttaaacatgaaaaa

SEQ ID NO: 88138 - DNA, 332 bp, Homo Sapiens
gccatgttttccttttcttggtcatgtataagcaataaagctgttttttgttcttcatctttcttaaccccaaattttcttctatgccttaggcttcgatggttcttccaacccccttaatatggcttagggtggtttttcaaaacctacaatcccccatttgcactactggccatggaacatttatttctagtgttcctgccaatcagagatctctatattaaattctaaaatgggattaaaagaagagttggagaattcacacttattgagtaactgatgtcatacaacctggaatttctgaattccaaataaataaatttcactctttg

SEQ ID NO: 88139 - DNA, 698 bp, Homo Sapiens
  misc_feature (61)..(61): n is a, c, g, or t
  misc_feature (96)..(96): n is a, c, g, or t
gcccttcctgtcaaagcccagaatgtcgtggcccacactgctggggcgaccagattcaatntcatgttgtagccggaagagtttctgccgggcaanagcctcggccattgtccagctccccatgtgtcaggacccccagaagcgtgcttttgccagcatccacgttgcccaccactgctaccctgacctccaggaagtcattgtctcctactcgtttccggaccaggtaatcacgcacgcggcccccagcttcttgccgttcccgcagaaggatgacatcggcctctatctgttccgccatgctcttcactgtggcgtaggaggcctccatgtcagcttcactcagcccatactcagtcccatctgatccctgcccaatgacatatatggtctctccgcatccctcgtccatcctctcccacatctgccgaagtaggctgtcatactgctctgatgtagggctcactagaaccagcttgctggtgaggtccagctctggctcgccgttgagcgcctcgccgtcctcgctgcagtccgagtcaaagccgccgtggagtcgggcggcggccgccgcggccctggccgcccccggggagctgggctcgggggcgaacatagaggccgggaccggcgagtccatcgcggagcgactgcgctccgcctcgtgccgaattcggcgcgccgtcgacttcatactc

SEQ ID NO: 88140 - DNA, 698 bp, Homo Sapiens
gcggccgccgcccgactccacggcggctttgactcggactgcagcgaggacggcgaggcgctcaacggcgagccagagctggacctcaccagcaagatgggactgagtatgggctgagtgaagctgacatggaggcctcctacgccacagtgaagagcatggcggaacagatagaggccgatgtcatccttctgcgggaacggcaagaagctgggggccgcgtgcgtgattacctggtccggaaacgagtaggagacaatgacttcctggaggtcagggtagcagtggtgggcaacgtggatgctggcaaaagcacgcttctgggggtcctgacacatggggagctggacaatggccgaggctttgcccgccagaaactcttccgccacaaacatgaaattgaatctggtcgcaccagcagtgtgggcaacgacattctgggctttgacagtgaaggcaatgtagtgaacaagcctgacagccacggcggcagcctggagtggaccaagatctgtgagaagtccacgaaagtcattaccttcatcgacttggctggtcatgagaagtacctgaaaaccactgtcttcggcatgacaggccatctgcctgacttctgcatgctcatggtgggcagcaatgctgggcatcgttgggatgaccaaagaacacctgggctttgcactggcactcaatgtacc

SEQ ID NO: 88141 - DNA, 556 bp, Homo Sapiens
  misc_feature (27)..(27): n is a, c, g, or t
aagttctgtctagtattatatccctanaatgcttttaatagtggtatgttacaagtggcataagaagatcctgtttttaaatttgtcaggcattttattattcagtacataatatgtatagatctgagtgctgttttccttgcattgtctattatttttaccttgtctttcccctaagagaatttgaagaaaatcttcaccaatatttctagtgttgatggtaattaggaaaatagtagttgagagatgtaagaatagattgagaagagtgagtaaaatgggtgaaatgacaagtgggaaccatgtagctgagatgtatttgtttaaatgaaaagtctacactggttcttaatgtgaaaatcaaaccatgtatctaccttaagaacaatgttgttgtttttaatttattgtagcgatttagtttttttcacgtaatatttctattttctttccagattgtttttaatttaaattgtggaatttttacttctcaaaatgtattaagtactgtattttctgaaatcttatttttaaataaatattttttaaaaacgta

SEQ ID NO: 88142 - DNA, 336 bp, Homo Sapiens
aaataccagaacccttcatgccaaagaaagcacttagcgcggggttgccacccagtaggttttcataaacgattgtttagtctgctttccttaaataaattggccatcacgtctcccgttagggtcttaatgagaccccaagaggcgtcatttgtataaaaagaaactctgtatatgcagtagaggaaagaaaacatatagaaaggagactggaaaagtgtgctcaaaacgctggtaacggttacctccagagaagagaacgatcgggacgatggtcaaagcggaccttacttcgagtttcttatttatctttttatttttaaacaaacattattg

SEQ ID NO: 88143 - DNA, 844 bp, Homo Sapiens
  misc_feature (507)..(515): n is a, c, g, or t
tgggatattagtaaaatgagtttctgatacagaagatctagaaagcgcctgaaatgctgatattctgtctcccaggtggaggagttcagctattaccttgactttgccgaagtcctaggcactcccatgccctcagagtctcattttgaatccaggcacttagggatgctatttttccacatcaaacagcttcctcccagccaaagaattctggtgacagtagtgaagataattttcacccctgcttacagaatgacaaagcaaaagcaaagaggagaagaatgaagtaaagacaaccaaaggaaaagactgatggctccttaagaatgatcttgataaaggaatggtggctgaggggtccatctcctaaaccacccaccttactgactccctagagcaatgccatacagaaagctgcaccttgaggggaagacacaagaatcctggagtggaaaaaaattgggtaatgatgacagccttcgaggtcttgagagtaaagcagaagcnnnnnnnnngtgttatttttatcttttgaagatggttccctcttaagacttttgcgaatgattaagatttcaattatgttccaggaaaaaaataagatttttgcttgacaaaaaaaatttttgtctagaacaggtgggaaggaagagatagtttagccacatccaagagacctgtaaattgggtacagtgaagtgaatggtgtaccagtcataaaagaatgttaactggagaagtctctgctgtcttcctgtaactgaggggggtgtaaccatccttgtggaagcgtccacttttattgaagattggctaaataaatctgtgcctactgaaactcaaa

SEQ ID NO: 88144 - DNA, 536 bp, Homo Sapiens
ttttttttagttaaacctatttattcttactatgaagttattaacttcatttatataggccacacaggtttaattggcacactttacttaagaataagacaaaataagtcactcttctttaaaaaaaattatggtcatctgttttcaaagaataatcccagatacttaattaattaaagcaaattttctacgatcagcagtgagctttttaaatgatcactaagtgttcacctgaagattatcaatgctatatgaagtgtaaacttgaaaatttgtgtccattttataataagatacaatttgcactgaagagtttttaaaaagataacctacacacatacagttaatttgcctcaaacaacttcttagaaatacagtataaacatttaagaaccacgacaaagttgtggttcaaacttcaacaaagattttcttgaaacccagtataaagattactggctcaagaccatatcccaaagtgaaatcagcaggagatttgattgtaagactctaccttttaaaaaaagagcacactt

SEQ ID NO: 88145 - DNA, 743 bp, Homo Sapiens
cagaagatggatggatgtcaagacagatggtggaaaagttgtgagatgcaaagcctcatggtacagcagtcaccttgcaatcatgaagataaaagccacaaagaatggtagctcagaaggtggaaggactctgcatagttgaagacactatgattagatgtatcagccctggacttaagtacctctgcttttcttaataggagaaaaataaccctcttccttccttatgccaatcttctcgagttccttgctacttgcagctgagtccactcttgactgatatcacctaatctcagtcgctatcagattaaacaacagcattactttcagagggccaccaagaaaaaattgcctgggagaagagtaaggagcctgaagatctgactaactttctctgtagccctttaccgaatagcagattagctgagctcatatgatcatatcaactagtcatcaccttgattagaacacagaagaagtaagtgttcgtggattcaaactgaagagtcggatggaggagtgtcaaggacatgtcatcataaggaggcagaaagtgagagggtatctttaactataagtgatggttttataaagtagatgcacagttttagaaagtaggaaacccactacaaatgaagtgtctgaacatatagtccagaaggtgtctggtttaaacaaaaaagaaattactacttaggggcatgaacagcaccctatctataaataaagactgccatcataaa

SEQ ID NO: 88146 - DNA, 498 bp, Homo Sapiens
  misc_feature (99)..(99): n is a, c, g, or t
gagatctacacgcacaagaatctctttactgagaggctgaataagatatctgatgggctgaaggagaaggacatacagtccacactgaaggtcaccagnctgtgctgactgcaggactcacttcctctcctgcaatgaccccactttctgcccagccaggaaccggcggacctccctgtgggctgtgagtctcagcagtgctctactcctggccatagctggagatgtttcttttactggcaaaggaagaaggaggcagtaaagcaggaacagggcagcccgcatgtcttccagaagtgaacagaggccgcagctaccaccgtcacaaagttcactcatctctgggtcccggtgaccccatccccccataccctccatcctgggtcctggggccccaaagctctgaggcctaggagactgcgctgtctcgtggtttgcctactcctacacctttataaagagtctcttcattaaaacccctcttcatagcctaaaaaa

SEQ ID NO: 88147 - DNA, 541 bp, Homo Sapiens
gccggctctctcggagtgcagggattggctgaacttcagccaaaggacggaaggaagctaggcgtccgcaactgggccccactgcgctgaaatggacgtcgcgccctctgttggccgggaggtttctcagtgatgtcgccacgtgttttctgcgtggaaaaagtgaaagatcatccagtcatttttttcaactgatgtttattaggcgtcttctaagacctaggtctgggcacgcaaaaacaaaagacatgatccctgacctcaagaagctcttcttagaagagtatattttagtgctttaagacctcttgggatccgggctagctttctagtgaccttgggaacattattaacctgtctgagcctcccttccccttctgtgtagaggtaataacacccatttcgcaaggatggtgtgagggttggaagagataatatttgtaaagtactgtggcaggcacacagccagcagggaaataaatgtggctattgttagtgtaaaaataaatcaaatatagtaaaacctaagtcttacatgaaa

SEQ ID NO: 88148 - DNA, 591 bp, Homo Sapiens
tctgaaaataggagattccagtctacccgaatcagtgtaatacggaaatgctcactgttttaacccttaaaagaaaagtaatctgatgttaaccaatcagcattttttcctgttacagttctcaccttacaaaacccactgctttgccactgcccagtgagacctctcattctattttgtagaatggaggctgatccgattcatgcatcttgaataaaagccaattagatctatgattaaatttgttgtaattttgtcttttgacaacatgtatattaaaagtactcaatctttttgttattgtttttgatagaaaaaataactatgctacacttatccacagtccttggtcagccaacttcaggctcaaatatgtcacattacattctacaacttgctttaaaaataaatgtgcagaacttgagaagcaaaaataatactactcagccctaatctgttttgacattaatgaaacccacgtaatacaatgtattgcacatacacatacatgtacatatagctaacattcattgaatactatgcgcttgttctgtaccttacaacaaacttctaaggtagaacatttcagct

SEQ ID NO: 88149 - DNA, 945 bp, Homo Sapiens
  misc_feature (800)..(800): n is a, c, g, or t
aggtagcgtccaagatttaccaccacatcatgattacagatggtcaccaacttatgttttaggattttttgactttatgatgggtttatagggatgcagccccatttcaagctgaggagctccttagggcttaggaatcatacctctttcacaccatggtaaagttggaaaattgttaagtcaagctgtcattaattaggagactgctgtgttgctaacgttatatgcatttttaacttatgatgggtttattgggaattaaccacaatgtaaatcgaggaccatctgtatattgtatgatttttgctaatgcattgagagagatctgtgtaaattatctatgacttcagaatatgcatattacctccaactgtgttaactcaacgtttttcaagagagtaagggtactttcaccctatgtggatgtactgtagaatttttctaagctacgaaagtctataaataacaaatcaacttaaactttttgggaaataatttctactaaagattcataatcggcgtattccttcaatgactgtacaagttcatccagtagataatctccttgcataaaagtttcaagatcatgcagcgtcttgtttattctgtgatctgtgacccggttctgtggaaaattatatgttcttattttctctgatcttcctttacttccaatctgaatttttctagcatcctggcttttatttatttcttcttctagatgcatgctgtacaagtttgcacgtaactttgtcataaacagctctttatttttcagctgagatctctcttgttgacantcagaaacaacacctgttggaagatgaactatccggacagcactgtccgtggtatttacatgctgccccccagctccactggctcgcttagtgtcaattctcaaatctttcggattaatcaccagattaatctcagtaggctggg

SEQ ID NO: 88150 - DNA, 1600 bp, Homo Sapiens
ccaatgatacttgaatatattaattagtactgttcctattattgtttgtttctacccatttccagaatggattagcaccagcttagagtaaaaggtacagactcagcaaattccaaaccaggattgccccatagacctcctgaagttacgcagtgtgggttctctaccctagatagttaaaacaagggtcaaagagtctaatacaagatgggtgagcagtgacagcagcatgtccaggcgaaaggatgtggctatccctgggcacacacaactggtttgagtgtcccgatagactaggctaagaaagaaataagtatgagctcctttaaagtagaaaaacttaaataatcacgtatgtacttttacattctgttatctgtcattacaggtaatgctgaaagccatcccttctttcttgaactctttcaatagattggtgttttcagttatgcgggaagggcggcagaaggacaaaggaagcatagatgacctgcctacggtcctaaagtgtgcacgcctggttgaaaggatgtacagccacatcgccgcacgagctgaggagtttgctgtgttttccccatttatggtggcccagtacgtgttggaggtacagaaggtgaccttatatccagctgtgaaaagtctgctgcaggagggcatttacctcatcctgaacctctgcatcgagcctgacgtccagttcctgcgggcctcgctgcagccgggaatgagagacatctttaaggagctctataatgactatctcaagtaccacaaggccaaacatgaaggagagaaaagatatacggcctaaggctatgggacagaagtgccgccagggacactgtccagaggctttggctgcatggtctgaaagagctggagaatgaaagacttaagatgttctaattcgtagtattggtatacatagaaaatcctttggggtttatgtagtatattttgatgtattttacatcgtgtttttcttactattttttaatacatagttttatgcagtaagtattgcaatagaatcctgaaaattgaccctgggatgagattaattcaatagaaaaattgctgactcttgggacctttccgtgtttggttctcgtcttggctcagtggtttggtgttccctcgtctgcactggaaactacataaaacttggctttttactttgggtacatgggcgtataattcagccctgtttaaatataactggcctttcaaagttcttcaagtaacatgggaagtattcttgaaactgtccccatttctggcttcctctaagtatgcttctggagaagtccggacaagtttacgcctgggccgagggtctgcccggcggggacaatgggccccaagaagggcggaaggttcacacggtgcaggggcagcgcggcgccgggctaaccgtgagacacaggaggaatttcccaacggcaaaaaacccaggggtgtatacacacaactatatatccgccaaaaagagaaagaacacaacatcgcaacaggccggcgtgagcacagatgatgataatcatacgggtccaaactgctacttccctattcccctcctgctagctcactccgcggc

SEQ ID NO: 88151 - DNA, 182 bp, Homo Sapiens
tttgagtataaagggctgggtgcagcagttcatgcccagaatcccaacaccttggggactgaaacaggaagatcacttgaggccaggacttaaagatcagcctgtgcaaaatagcaagacaagatacctacaacgcggggggaaaaaaggaaacaatctcatacaggttcttatcagtgtcc

SEQ ID NO: 88152 - DNA, 621 bp, Homo Sapiens
ctccccctgcaatgaagacctactgccttcctgctcttctatcttcatacctgcaattgtctgcagaggatccctggatacattaaaattgaggggagaacagcaacattccgcatccgaggccacggaaactaccagctccaatggttcacagattctgcatttggtctctctacatttcctgggctgacacaatgtctctgtgaagctgaggtgtcagtgcttgctgtgaagaaaagcaatcccccagtgaaaatcagtgagaatgaggagtgagggtggcatggccccatctgattcgaaagttcgagaaattgcacggtgcccagcagacacacatatcccattattcaataattgtcattgttgaaaaatcgaaaaaatagattttaagagaaagaaggaaccaccacacattattaacatggctattatccataaaacagaatataacaagtgttggcaggctatggaaaaataagaagccttccgccctgttgttgggaatgtgatgtggtacaggggctttggaagtgagatggtttccgttaaattcttaataaagttaccagatgatccacctgtgtcctcatctgggtatatacccccaaaaattgaaaa

SEQ ID NO: 88153 - DNA, 831 bp, Homo Sapiens
tggtgtttgagggaaactttagtgggattgcagtggaatgtaaggtcagggcacgtgggtgctctctcggggtggggtgactgggagacctagagggaaagcctgctatgcagggggagagcacaggactggccctgctctgcggcctcctttgtcccataacctgaagttaagtcacatcccctgtcgggacctccgtgcactcatctgtcaagtgggggcgcttcccttccagcatcacctgcagcagacgggctctcgggagtcgtgggttccaggcagctgtgtggacccagggacagacattcaaagggacgccagccatccttggtgacaggggccccaacttagcatcccttcccttccgttaggaaggagatgaccggaagcaaccccttcacagacacgagcacatcggcaaaccctatgaaagtggaattttctaacaaaataaacttgcttgtttgatctgttttctgtaacttttgctaaatactttatacatttttcatgttaaagagccgtgtctcccgccagcactcctcaccccggtatgaatgtgtttcctccacattgtatatccttccaccctctggctgcctagatcagtaaataaaattgatgtaatataatttataagtaacactgttgaaaccctgatcccagtggaggctgtaacccacctgcccccgcaccacccccctgacccctgttaccgcatttgtgtgtattaatgctgaagaattaaatgtttaaagagtttaaattttgaaggcgtttgctatatacagttgtcctgcattattataaagagttttcaggaagttaaaa

SEQ ID NO: 88154 - DNA, 620 bp, Homo Sapiens
ttgtggaaatcctggtgttccacccaaaggtgtattatatggcacaagattcgacgtcggggacaagatccgctacagctgtgtaactggatacatccttgatggccaccctcagctcacctgcatggccaattcagttaatacagcttcgtgggattttcctgttcctatctgtagagctgaagatgcttgtggaggaacaatgagaggatccagtggcatcatatccagccctagttttcctaatgagtaccataacaatgctgattgcacttggaccattgtagcagagcctggggacacaatttcactcatatttactgattttcaaatggaagagaaatatgattacttagaaatagaaggttctgagccacctaccatatggtaagtaaatagcttctattaaccttgcattgatgttgttgaagcaaactaaggaacaaagaacaactgaatgtggacttttacaggtttggatatttaaaagatcttacaggaaagttatgtgaagaggttgtcagagctgaaggatatttttgaagatcgagctatttacataaaaaatagatgaaattcaaaacttgtataaacaaataaaagttattcataatgtaaaa

SEQ ID NO: 88155 - DNA, 523 bp, Homo Sapiens
cgaccaggatgaagaaacttcaggcggagtcccaggagagcagcgcgggatcccagcctcagcctgcccagacggagaggtgcagaccgacctcaaagaagatggttctaactcctcccgccctctcttcccattgagaaatggagccccaccgcgacacaggcttggagaagaagtcgagaacgggatgtggcaaggatctctgtcactccaacgctggcctttctggccaagtcacccgtttggcactccttcccggaagcccatggcggtggcattgtgctgtatcccgcctgggctctgacctctacactgtcctccctcttgctctgtctgccatgtttctgacgggcctggatgcttcttggtctggctcagtgtcttccacagagaacacttttgagtccatcagggagaaactgtgtggaaatccatttcgtgaatgttgtcatcataaatcatcaaaatgtcatctgatagaacacccctttctaagttaatttacttatgaaacattaaaaaa

SEQ ID NO: 88156 - DNA, 547 bp, Homo Sapiens
tttaagatggctgtttcataaattagttccctattcctaactttggagaacctggttttttcttacctttcaaggtccaaatataaaactataaactttcagtgttggacattcttgctttttgaaagcaaattcctcctcaattcatgacctgtgggccagctatcatgaataatacacccatagcacttgggttttatgaatgtgacttctaaatcctcctgcataatagctttaggtgacttgaagagttaaaagctgtcattgtcatcaatatttactgtacatcaaactcatttaaaatgctgttagaaattgctgactggcaagactgtcactgacaaaaacaccagtttaggacagattccatgggaaacaaactagaataactgaaagctaaaatagagcttaatggtagagaaagtctcagaaacaaggacagagatcacagaaaagacaaggaaggactcctattgttttttctgattttgaagagctctttgtgcttacctatttatcctaaacaaaaaggcatgagtaaaaattt

SEQ ID NO: 88157 - DNA, 402 bp, Homo Sapiens
ctcagggtatcctcgagagccttaaaacagaagtctctggaacctgtgtcctctccctgtctgtcccgccctcgaatccctgtgtcctcctcacccgctccctcctgcagtgagcatcccgggttgttggtaaagatcttggtgcctgggaggtcggagcttcgtctcctgaaatggtttatactagtgaaccctggcgccacgttctgtggcttataatcactttcgtcgtcgccgcatgaggaagcaaatgacaccgccccttaccctggaaaagtggctgcagccttccccggatcttagttttactcaccccgaagtcaatttctcggtaactccaccctgcaaaacctctgtggaactcatcctcagggcacagctaacagttttcataatggaaaa

SEQ ID NO: 88158 - DNA, 494 bp, Homo Sapiens
  misc_feature (31)..(31): n is a, c, g, or t
actatagggaatttggccctcgaggccaagnaattcggcacgaggcggcacgaggctgggttgcctggacaaggtcctggataggacagaaggcctttcttctttctccagggagaagagatacacttaaaccagggtcccacaggctcaatgggtctccttccaaaatcagcttccagtgagccctcagattctccaaatactgggcagctggatttcccagacaccttctgcaatctgctgacatctaatatacctgtagactgttctcctgctgacaaggttgttcttgctcttatcctataaagaagagaggtggcagagagttggaggggagggcctccttccctggcatgtccatccgagggtctccaagaacatcctggctgtggcccacacctttctgtgtggttaggaggagtatcggatgccttctctttccaaccttggcttgtaagtttcccccaataaagtctgttccttcacccataaaa

SEQ ID NO: 88159 - DNA, 495 bp, Homo Sapiens
cctcaggaaacatactccaccaccatcttacaagtttgtgctacgggtggagggaaaatgaatctaatgtaggaggcctcccgctgtgcgtctagcaggaaagaccatacggtgcaagtctccaggatcactagaggggtggattgttcatttcagtccaggtagcaacaggaagcccgtgcaaatgttcctctctcactgcggggctaaggagtgtgggtcctttcccgcgactacctgcttgcctctctcagaacctgcaagtgaagtgcggaagatctgtctatcttctcggcggcgcagagcccaaggtagaaaccgatggaggcggtgcactagataacatcaaagccccgggcaggggccagaaaggggggcacaggcagcccggggaatgaagcgcctccctctagcatttcctctcacgcccacttccaacctaggaggcttttggtttctgcttttttgtttttaaaattaaaagtttaacccagg

SEQ ID NO: 88160 - DNA, 491 bp, Homo Sapiens
  misc_feature (364)..(401): n is a, c, g, or t
  misc_feature (455)..(455): n is a, c, g, or t
tatctaggccaaatatctagcagtcagtgtgtggctagatacatttctgcacataaaggctcatagaaatagattcagaaaaagcaaaatagataaaataaggcttacccaggtagaagagtaattgagctatttgttgatatgctttagtgggggcttggcaaaagtgggtaaagaggtaagctggaggataggtcatatgcaatctatgcctctaacccggaaactgttcctaggaatttgttctaaggaaatattacagatacgcgctaaagtgtaactacaaggatatttgtcactatagtatttaaaagagaaaatatataaatgatcaaaatattgaatagtaagggattgtgatacnnnnnnnnnnnnnnnnnnnnnnnnnnnnnnnnnnnnnnaaatgggatagtaatgcaagcattcagtgaaaaaagtagattaacaaagtacangatcctcatttattttaaaaagataaaaacacccag

SEQ ID NO: 88161 - DNA, 541 bp, Homo Sapiens
tttcctataacctcgatcatgttctctaaatatcaaaggaaaactgtacagatgatatgatataaaacgcagggggttttctttggatcagtttacacttgaggtcaataatatatgcaacgtatgcgatgaaacggaattcctttcatatcttccctatggtcatgggcatagtcccataagtaataatccagaagaatggaattgatctctccattaggtttttcacccttttgttcaataagctccagaagacaatcccggatcagctcaacacaccaaagcgagcaccctctgatttccacctcttgcctgtctccatatgagagcatttctcctttgagaagcttcttcagtaggtcatcagagtatttcagggctccaagatgagcaagaacctgaggtaatctataatcagcaaacatggtgatactggagatgtccttgaagcagccatctccttttccttccaatacactccacgtatctgctacaaggatttgggctcgtttgtaaaaagaaactcttttccctttgttgg

SEQ ID NO: 88162 - DNA, 770 bp, Homo Sapiens
cagtcgacggtaccggacatatgcccgggaattcggccattacggccgggggcctcccacgtagctcgaactataggtgtacaccaccaggcctggccagtggttacattttgtgcatccaacctggagtcccctcctgcatttcaggacatccctatgcccatttagctctgtgtgaagtgctttctctggtgtagtttcccttccactagatggagctgtcaaagtccaaagcagtgtctaggcatgacaaatagctcaagaatacccaagtattttattgttgattttggaactgggactaaaggcagatgattttataagtaatctctttaagagtcatttacttccatctaataaaaacaaatagacaactttatactgcatggcttattatacttggaggatagaatctataatttaaaaccagaatttagattgaaccagcatgtattatttctggatgaaccaatatgacaacctaaatggatggaggcagatcagaaatagtatacaaaacatacacagcagtagtaattaaagacaccgaattcaaaaagtaaaccatgacttaacaacatgcaaattgagcaatattgtgagataacacctggtattctttactcccattactttccttgttgtattctttcctgctaactgagttgtcttaagctttggctagacacttggaatgtgttatcccatccgttggcagtggttcgaggccataggcccagtaaaccgataaccttctgagggtaaaccca

SEQ ID NO: 88163 - DNA, 507 bp, Homo Sapiens
ttttatttttaaaaataagatcatattaaatgacgttacatgcatcatttatatattactcgcagtgccagcatcctcaaatatggttttaattttggtagatatcttgctagggggagcacatttctaagttatccaaatatagggccctctttccttctctttctgtccacatgcaaccagatgctttgtggagttaaagttgacatttatttaaatgccacttggtgtctggttttttcacctttaatttagggttttctatctgggatgtaaaagaatcacttggagggatttttcaaaataccaatggccaggccactagccagtcaatcagaagcaaaatctccttggatgggacctggaagtctttacagttttccagcattttaatgaacatccctgattaagaaccaccgggtcttaagagtgtggcatatgtatttttcaagttcctagaagctctccagaacaacaacaaaaaaatctgctttattctctgcctgg

SEQ ID NO: 88164 - DNA, 535 bp, Homo Sapiens
gacagtctctttttgggcattgctgtatgcatacctcctgaccccttacctccgtggtaggcagatgaccccctgcccactaaagaatagcagggggaggacaagcactaatccctggaacctacaagtatgccatgttacctggcaaaaagcacttcacagatgcaattaggattatggacctaatagggagattagcatggagcatctgggtacacccaatctaatcacatgaactcttaaaagcagataattttctccagctagagtgccagattccaagcaagagaaacactcgatgtccattaccagctttgaagatgaaggggaccagagacctcatggtacaaccacaaggaactgaattctgctcacaaccagattgaacttggaagtggatttttcccttgtcccttcagataccttgactttggccatgcgagtccttacacagaagacctagtcatgtcacgccggactactgacccacagaaactgtgagataataaatgcgtgttgtttgaagctgctaaaa

SEQ ID NO: 88165 - DNA, 573 bp, Homo Sapiens
  misc_feature (378)..(378): n is a, c, g, or t
  misc_feature (392)..(392): n is a, c, g, or t
  misc_feature (403)..(403): n is a, c, g, or t
  misc_feature (427)..(427): n is a, c, g, or t
  misc_feature (433)..(433): n is a, c, g, or t
  misc_feature (472)..(472): n is a, c, g, or t
  misc_feature (496)..(496): n is a, c, g, or t
  misc_feature (504)..(504): n is a, c, g, or t
  misc_feature (513)..(513): n is a, c, g, or t
cttcgtacacagtgccttgcccataataggtactcaataagcaattgttcctcatagagtcttttgccatgatttatggtgttttttgaaatttgtcttaattgaaaaaagaccaaatatttcaaatgagcttataggcagctgtggccagtgaaaatatggggttgtacagttagttcctagaatgttattttgcactagttgtcacttagaaagatggggttcctgtagattttttggtgctaagggatactttgtcattatgatgaagtaagtgttaagtgtcagataaatagcacacagaatagttctttctgctggtctgttttttctcttcgttgttgttgtttttaattggtaaattggttatcaatcaanactattgtagcagnctacaaagtanattcaccaggcatgacaaaatggntcaaanaaataagtcatcacgcacttaagaaaatgaaacgcaacnttttgaaatttttctgttaaaatntgtcaaantatattttnatgaaagaatttatcaaaaagggcgaaaataaaatgtacactttcattggttcatgactt

SEQ ID NO: 88166 - DNA, 776 bp, Homo Sapiens
ggggtgtgacgccatcccgctgcgaccggcgctccccggggcaggtggctgcatagtcttggcggaggtgaccaaagccacgtaatgtccgtagttcgctcatccgtccatgccagatggattgtggggaaggtgattgggacaaaaatgcaaaagactgctaaagtgagagtgaccaggcttgttctggatccctatttattaaagtattttaataagcggaaaacctactttgctcacgatgcccttcagcagtgcacagttggggatattgtgcttctcagagctttacctgttccacgagcaaagcatgtgaaacatgaactggctgagatcgttttcaaagttggaaaagtcatagatccagtgacaggaaagccctgtgctggaactacctacctggagagtccgttgagttcggaaaccacccagctaagcaaaaatctggaagaactcaatatctcttcagcacagtgaagcgggagtggaagaaggatctaaagggaaaaactgacatgtttatgttatggaaaaagaaatttttctaagtttcatcacaaactgtgtccagtttctctgtggtgttcatgaaatagcaaaaagcaaaccaagtaaagggcatactatggtttatcacaaaggtttatggtcgtgtttcaaattttcatcatttcagtgaacatacttccacgttacattaagtgtgcctagcagtctgttgcattttgtaagctcacaggttttttgtgttgagatggaatctcactcttgtcacc

SEQ ID NO: 88167 - DNA, 562 bp, Homo Sapiens
  misc_feature (376)..(376): n is a, c, g, or t
catattcctcagaatgcattcctccttgttaagcgaagcatgagtgtatatccttgtccgagacttaggctgaattaataaaatttggtttccacaaaggtatttgcataaaaagtctacaaaatggagaaacggttttccagttgtttcagataacgtctacctctagctttatggcgaatgctctggccagaggtcgtggtcacttaggaaagaacagagagtggtcctctctcctcactactcagtgaggtgggctgaccccacaaaagcgacatgccctgggagcacgttaggaaggcaggctctcctcaagacccctcagacctacagaatcagaacctgcattgggacgagcccccaggtgatctccacnacctgtgatcgtgtgacatgccatgtgtacaatgccagaagcacactgggcaaaagtggctccccagagcggcaaacttgcctgtcttcagaatcacggagtctgaaccaagggttctgctggtggcttaatctcccataacgtctcctactctgccaaaaacatttattcattactgttcctaaa

SEQ ID NO: 88168 - DNA, 542 bp, Homo Sapiens
ctgaggagataggttttccttaagccttgatttcctgaagctctctctgttccttatttgggaacaaaaattgcgaagactcatctttccctagaactctgaatggatgaatttttaaaagtggggagaatgtttggggatgtgtctgggctttctttttgccaggcttccttcaaagcatacctgccaatggtgtctgcatagggaaaatgtctgttgtactctttatacctgtttctgttttttgttgtccctttctttttatttttaaggccttaatgcctggctgtggcgtctgtgagacctcaatgtaataagaaaattaaattcagcttcaggcctttaaactgcagcaagatggtggtgtaggggtgtgggacggggagagactcacttttgtaactaaagaacatagcttaacattttccctttgaatggtcacacagaccatttcatttttaccagggcttggggacccaatgcaaagatgatgactatttaataaaatggaaaatttaataaatcctcatattattaaaaaa

SEQ ID NO: 88169 - DNA, 2028 bp, Homo Sapiens
  misc_feature (96)..(121): n is a, c, g, or t
  misc_feature (1351)..(1353): n is a, c, g, or t
  misc_feature (1357)..(1467): n is a, c, g, or t
  misc_feature (1478)..(1493): n is a, c, g, or t
  misc_feature (1522)..(1564): n is a, c, g, or t
  misc_feature (1643)..(1653): n is a, c, g, or t
  misc_feature (1664)..(1727): n is a, c, g, or t
  misc_feature (1787)..(1796): n is a, c, g, or t
  misc_feature (1828)..(1846): n is a, c, g, or t
  misc_feature (1856)..(1865): n is a, c, g, or t
  misc_feature (1888)..(1902): n is a, c, g, or t
  misc_feature (1931)..(1931): n is a, c, g, or t
cagtcgacggtaccggacatatgcccgggaattcggccattacggccggggaatactgattgtcccccttttcctccacagggatatctgcattannnnnnnnnnnnnnnnnnnnnnnnnnaccagcagctcccttgcctcctgcgagcaccgaggcacctgcccagctctcgtctcaggctgtgaatggcatgagccgaggggccttgctcagctccatccagaatttccaaaaaggaactttgaggaaagccaaaacctgtgatcacagtgctccgaagatcggctgaagcttcctgtttacacttggagggaaaagttcttttttattcctactcacccctaccccccaaactaccctcttcctgggaaagtaattgctgagccagtacagccacaaacagtactattttgcagatgctcatgtaagcagcttttcgagagaaataattctttaagcagaataaagttaggctggcattgctcccttaagatcttgctcctttattaaccctgtaaaggagtcttgtttatcctctaatggccaggcttttgggacagcagcatattgaaatattttcaccaactaaaggaaatagacagaaaaacaatgacaatattcaatcacagcagtaaatggcctttgtgttgcaatcccttctaccccatcagacagctcctagaaacattccttacagttcatttctctaaagcattttctgattcttagataactccaatttttgctacctttatcttagacattaacactatagcccaaagcatagttactttgctaaatcagaaagcaactgagttctttgttttctcctcaaatagaatggggaacgttcacaacattctcttaagttctaacaggaataccattgtggttatagaactcagggctgctaaagcaactactctagacccatagttctttttagttagatgtattgaaacagacaaaaatattaacatcagaaaaagctcttgccaattagaggatcttcttaatcctcagcaattaagtttggggtttgaggggggcaggtcattgttacaacagaagtaaatttggcatctatagaaatcaattatgatttttgaaagatttatctaaatatatcaatatagcatctctttaatgttagtcatttattagaaagatcctttatcctgatttgcttaaacctttcaataaattgcactttaaaggattataaataatccatttaaaaattcaagtacacacatcagtgttggttactatgcagagaatgtcattgtgtatagtttcatgtaatctgttatgtcagctgtattttttattaaaatcatgtcaagaaannnaaannnnnnnnnnnnnnnnnnnnnnnnnnnnnnnnnnnnnnnnnnnnnnnnnnnnnnnnnnnnnnnnnnnnnnnnnnnnnnnnnnnnnnnnnnnnnnnnnnnnnnnnnnnnnnncctggggcggnnnnnnnnnnnnnnnnaaaaaagcttttcaaaaacctttctgttnnnnnnnnnnnnnnnnnnnnnnnnnnnnnnnnnnnnnnnnnnnccataaagtggttttccccaagaaaaaaccccggggggaaaagaaacaaaggggtgtgtggattccccccccaccaatnnnnnnnnnnncgccccgccgnnnnnnnnnnnnnnnnnnnnnnnnnnnnnnnnnnnnnnnnnnnnnnnnnnnnnnnnnnnnnnnnttcttctggcgaggggggcgctctttataagcggggggggtctctctccaccaccacaannnnnnnnnntctccccacaagagggcggagggctccccacnnnnnnnnnnnnnnnnnnnttattaaagnnnnnnnnnngcgcgccccgcggtgggcccacnnnnnnnnnnnnnnnaaaaaaaaaacaacgggggtgtggggagngaattaactcttcctttataaataaaacgcatattattttctcgcgccgcggccgacactagatgttgggagagacacacacctctcctctccacac

SEQ ID NO: 88170 - DNA, 1045 bp, Homo Sapiens
  misc_feature (35)..(35): n is a, c, g, or t
  misc_feature (61)..(61): n is a, c, g, or t
  misc_feature (70)..(71): n is a, c, g, or t
  misc_feature (79)..(79): n is a, c, g, or t
  misc_feature (90)..(90): n is a, c, g, or t
  misc_feature (104)..(104): n is a, c, g, or t
  misc_feature (192)..(192): n is a, c, g, or t
tttggatgtggcgatacattcacacaggaacagtntgcatgatacgaattatcgactcatntaggattgnncctcgagnccagaatcgcnacgagtgatcccanccatgctgccccttatgcaggcacggctggagccactctattcccccatccgtagtaagctgtccagcgccctgcagaagtggcaccnccagcgactcctctgccaagctcatcctccagccctggaaggatgtcttcactcctggctcctgggaagcattcatgggtcaaaaacatagtgcccaagctggggatgtgtcttggtgagctagtcataaacccccaccagcagcacatggatgcattctattgggtgattgactgcgaagggatgatctctgtctctagcctggtgggacttcttgaaaagcacttcttccccaagtggcttcaggtgctgtgctcttggctcagtaacagcccaaattatgaggagatcaccaagtggtacctgggttggaagtcgatgttctcagaccaagtgctggcacatccatctgtcaaggacaaatttaatgaggcacttgatatcatgaaccgggcggtgtcctccaacgttggtgcctacatgcagccaggagcacgggagaacattgcctatctcacccacacggagcggaggaaggacttccagtacgaggccatgcaggagaggcgggaggctgagaacatggctcagaggggcattggcgtggccgctagctctgtgcccatgaactttaaggacctcattgagaccaaggctgaggagcacaacattgtcttcatgcccgtcattgggaagcgacacgaagggaagcagctctacacctttggccgcattgtgatctacatcgaccggggagtggtctttgtccagggcgagaagacgtgggtgcccacctcactgcagagcctgatcgacatggccaagtgaactgtggcaggtccagaaccagtcagagacttgcccctaagagggatgtactgtaaataaacagtatttttagatcaccttcaaa

SEQ ID NO: 88171 - DNA, 790 bp, Homo Sapiens
taaaactacggatacggtcctaagtagcgaggcctgggtggcgttctcagaacgaggggaagatgcccctctttccatggtagacctgggcagtgggtgccagctgaccatgtaccccagtcaggagggtgagagtctgttgctatgtgcaaaagtgtgacctaaggtttacgctgcctacaggaaccagaaaactctgattctgtgtcatttacatgtgtaaaatctgaaacttggggccaggacatccaaaatgggaatcctcacttaccaacgttggaggacaccgcccggttcatgatatcaagtgcctcattaaatttgtccttgacagatggatgtgccagcacttggtctgagaacatcgacttccaacccaggtaccacttggtgatctcctcataatttgggctgttactgagccaagagcacagcacctgccaaaaagaaaaattacttgcatccatcgtggcaacaaatgaaggcaagatttctgaagtggccatttgttttgttttgatcctggtcctacaggctagtgacactactttacagggatttatagtagctaaacagtctagcacttatgaatatggattttggagtcagcctggtagctaaagtgcccttgcatgtaaactctctgagcctcagcttccatgtctacacaacagggataccatatcccctaccccatagggttgctgagaggagctgagataaagcaaataaagtgcttggacaaattctgaaacatggcaaatgtccaataaatggagacccctataaa

SEQ ID NO: 88172 - DNA, 496 bp, Homo Sapiens
cggggccaggacctcctatgatgagatttccttttgtacattctccctgcgtgaggtcctggagaacgtgcccgccagccccaaaccgcccaaccttggggacaagcctcgggggtgctgctggccctcctgacaggccttctggccgtgcccatgccccttgggtgccaggggcagaggggtggaatacgttggggtgccccacgatagctgtggggggggctcttagtgcaggatcctgtggattagaaacaagttgctcctcaaagctctcaagcagggactgctctttaggaaggggagcagcggctgggagtgagcagggcagggtgggggcagggtgggggcacgaagtgggccctgggtgacccccacagctcccttccgaggctgcagggccaggcgcgggaccgcaggtagcccagggtgttgtgggtggcagcacttgtttactgcctgctttctacctcgaaataaaggaataatgcttgaaaaa

SEQ ID NO: 88173 - DNA, 531 bp, Homo Sapiens
caacttaaattttgtgccataaaaatatttttgtggtaaggtactatttttttagctctagggatatatcagcaaaaacacatcatgcaatttgagacacataattttgtgttgaatgagcacaacataatttgaagcattgcaaggagatagccagacagcagaattaaatggtcctgtctttttcatttttaatttattgtcatacatgggtttcatatttataacggcatcatgagctcattgcacttaatacctgcaatgtttgctactgtaccacaattgattttcaatactttattacgaaggatgaaactgtaatgttttattaacaatgcttctggaaatgaatgcattttaaagcaaataaatctttttgatagaccttttacaaaatccatttgcactaatgaatgctttcttatggcatataacttaatatttgttactgtgtacactgctcaattggaacgttcagaaataaagactaaatcgatgttacctgtcaagtaaataaataataaaacaccc

SEQ ID NO: 88174 - DNA, 1215 bp, Homo Sapiens
  misc_feature (939)..(962): n is a, c, g, or t
  misc_feature (1037)..(1049): n is a, c, g, or t
  misc_feature (1165)..(1165): n is a, c, g, or t
cagtcacagagcaaagtaaaaaaaggagcttcatatattttattactacaatttaaaggaaacttaaatgttttgattaacatttaactttttttgctcttatctttttaagaaactgagtagagccaaagctgttaagtacacacctattttcctttgcagaaacatccagattatctatcccctttcaattacaagagcacattacactaaaattttactgtactaccaagcccagcttctgccaaaatgaggatatttttgctcaactcaaggttatttcaactcaggacttgtttcaattatcaatgattgtctacgtgacctgggaaattaaattaatagccaaagaacgtgggaaaaccatgaaaccttgagacacaagtttagtattctctctactgctgggaattgggctgaataacctcctaaggcttaaaatgtaaatgttagtgtaatgctttcagctgaatgtatatttttacctacttaaacaaacaattttaagaatataacaaagaatcctactgttttgtggaaaaaaatctgcattttacaaagaatattcagaaaatatcctagataaaacacagatttttgtgatataaataattaaaaaacattctctgtttgttaccagaccgatgcacactccctcctcctttgggaaaccgctgcagccgatcccgtctctttgccttttatttttggcggcctcctttcgaaaactccgccttctgacacgggaccactggagcgcggggagcatgcatcaagggtccgtggcagtgaaaagtccccacacacgctcgctctgtgaactggcttagatgcttctctgtagccccatttggttgccaagcgccggagaacctgggttcgggtaaaaatttcaggtcctccaacgcctcccccaaggaaaattggggtaattgtagnnnnnnnnnnnnnnnnnnnnnnnngtaagttacatccaaagggtcagaccgcatctattgcccagactggattaatttcaagggagaaaggggagatcnnnnnnnnnnnnnttagctgttgttacagggcttgtgaagaaggggcattatgtctgtttcttattacgataaaggctcctcggtctttactgacccctaaagtcctgaatcacaccagaaagacgagnaggcacttatcacagggggcagcttgagtctcccgctagggggcatgggt

SEQ ID NO: 88175 - DNA, 516 bp, Homo Sapiens
  misc_feature (491)..(491): n is a, c, g, or t
tttttgccaattgacttccaacttttaattgtgactgtgataattatatactttctctaaaagatacctgtagacctctatgccatcgagtcaattataaataacagtggaataactgaaaattgcttgctgttggggggcctggaaactttgactagtactcttaaattctataagctggccttgccttcaggttcttaaaattagcccagttctgtctttctctttcatatgagtaaatgaattttggtgtcttgaacttctgtttcatctgcgcgtgcacttttcttctcttcaagcttagggttgagatttcattcatttccctctactactacactcttcgttcatgtgctcatgctcatcttcctccttttcaattcttagttactagatttgggctcttatccactctgcttttctgagactcggtttttggatctgtaaaatggagctaatattaccttttttcccccaagctattgtgaagnattaaatgaaatgatgtagttgtta

SEQ ID NO: 88176 - DNA, 1389 bp, Homo Sapiens
  misc_feature (23)..(23): n is a, c, g, or t
  misc_feature (31)..(31): n is a, c, g, or t
actatagggaatttggccctcgnggccaagnaattcggcacgaggcggcacgaggggaggaagctccgggcgggagagccgcgtccactcctctttccagactatgatggggcccagggacccctcccctccgactgagccccatagaccccctactcaggccagaaggggaaagctgagctcctgctggcccaggcatcagaattcctcagggaggaaaagttgcctatctgttgggtcagatttctgaagactgatgaggcccattttctgacaaacggcaagagtttagaaagtaccagtgacgtgcctgatagaatctcaccacaagatggaagccaactcgtcagaagcctggaaagcccacccagcgtgggacctctgtgggtccaggatcttggaatggtatcccatggttcaatcttctggattcaaccacataaatttaccccacccatgtcgtggacccaagcttcctaccatgtatacttagcttaaatgcaagatagtactattttgttcatcttgattggagtgagaaatgaataggtccatgcacatatatttcttttaccccaacaagatgatgaagaaataaatccataatatcgatacttttgtataagttgtgtttacagttgcggtaagaaattttataattgttgatttgctttatataatttctgcttgctttttatgatatttaaaacaaaatctaagcaacaaattttatgtctgattagatttacagaagctgcttaagtgcttagggataatttgttcatcatatttgtaagtctcccttgttaggtgtttgaagtgtttgaattggctaaattaaatttgtaattgtagtttgaaatatctaaaggaattttcttaattaagtgtttaaatgatgttaaaagtttgtgggacatttaatctatcaaatttacgagttaattgaactatgaatcaatgaacaagtaaatgtgatcttgcttttatataaaaactactaagttcataaataaaatacaaagatccataagttgagaggaaaagcaaaagagccagattctaagatctataacttaaaaaaattaaatattgattgacaatgtaagtcattgcaattatccccactagctgaaatctcacatctgagtgcttacacacaaaacaaaatgttaccctgaacatactaaacaaataaaaaaccacgtggtaattactatacacatgctcactgctggaagcattcatactgcactccaatcccggtggcgacgaatgccgcgttgtgctaccggtgaatcctcgggtgttctcttatggggatcaagtctttccttaattatcttccagggatttttcttccttttcccgagacctggaggcctccca

SEQ ID NO: 88177 - DNA, 625 bp, Homo Sapiens
  misc_feature (614)..(614): n is a, c, g, or t
aatcatcggagcttaaactcatggaggtttcatcagaatctgaggctataaattcatccatactgtcttcatcaaaataacccttattttctttgctaatgtagtctagctgcaaacaccaaggatgagtccatattctacttaacatctgaaaatcttggaaaagctttgcacctgcctttcctcttccaccttcactattattgcccacacctgttaagtgatctaagtagtactgatagagcttgcactgaatagaagtcattctcacagctaacacatattcgtgttttggaggcaagaattttgttaatgctgtataatctttcctctgaacacatccagctaacatctcatagagaatgtgagcacgttttttcatcactctgacatctaccatggtagaatctgcacactgaccattttgaattggatttataaatctattcctgaactccttaatggatccaagtaaattttccttgataaaattaaccatacaatgatactcaattaggttattttgaagtggtgttcctgttaaaataatcctcctccttgatcgtatagaattcatagctttagaaacagcagatgcttcattttttagaatntagccttcatc

SEQ ID NO: 88178 - DNA, 650 bp, Homo Sapiens
caaaaggttttcaggcttaagctccatttctaggtgctccaacactccattatttgtatatgtatggaaataaaagctgtgaccacccccaaccctggccccacgcccaagctgaactcctcagcacagtattctctggaaggctcaagatcccacgctggggaaaagaagttctggagacaaaagagggcaggtgctgccgtgcctctctgctcagtatggatactggaccttgtgctgccagggctcccagtagggccagttcatggcactcagctggaaagtccactgttgggaggcattcttaaccatccactctgtgccgtatgtagtggggtctggtcattctgttggaggagacagaccagtgacgacatttgaaatgcttggtggatgtcttaggcctgttacgatgactgagcactgtgggggcaggagacagaaagtcagtgtctcctagttctgtgctgctttaacgtgcatagaaatcagctgcggattcagcagatcactccttttctgacagatgggcctgcttactatgatgttatatcagaaagctctgaatctgggaattgtgtcccctgaattggagtaacaaaaatgcttagataatgagaatttaaaagaaataaaccaaaggtaaattt

SEQ ID NO: 88179 - DNA, 441 bp, Homo Sapiens
atcctaacctactatgtaacatttttctcttagttaaaaatgtgaacttattattaacctcaattttttagaggcctccaatctttttaaaatataaatatttttgattgacaaatcataattatacacttatgggggtataaacctcaatttttgtaaccctattttggcattttcctgtccttacatctcagcttaaatgctccctcttttgggaggcctttttctgccttcaacatagtagagccttttcccccacccctctgtaacataatgccctgttttatttttactgcttttattttcatgctttgtgggtgtccccactggagtgtaagccctatgggagcaagggctgacctgtgactgttttatctccagggccaacagcagtgttactgtatagtatgtactcaataaatatttgttggctttaaaaaa

SEQ ID NO: 88180 - DNA, 521 bp, Homo Sapiens
gcggccgcacgcggcgctggcgcagctgttgcccccagcatgcggcgcggcgccgccacgtagtgctccagcagctcgaagaggcagtcgaagctctcgcggctgccatccaggtgaaagcggccggcctgaaagtgcacgcggatgctcgtgggtcccgaggccatcttcacgctaagggcgaaaaagcagttccgctggcggctgtcgcgcaccaggaaggtgcccacgggctcggcgcgcagccgctcgtgcgccccgtgcacgctcaggggcccccagtagaatccgcaggcgtccaggagcgcgctggcgcgcgtgatgcgccggtaatcggcgtgcgaacggaatgtgcggaagtgcgtgtcgccgggggccggggccgggaccgcggggcacggccgcgggcgcgcgggggccgcgggcgaggaggaggaagaggaggaaggttctggccgccgtcggggctctgctgctgtggagactgcattgtcggctgccacctggttgtgtgctaccat

SEQ ID NO: 88181 - DNA, 487 bp, Homo Sapiens
gcaagtttaaatgaacaaagaaaaccttcagaaacaagttgatcaacgtgagagaaatttcatgataattattcatagtaataaagtgtcgtgggcttaattgtatatctggagccagtgtcatccaccaacaatgtgatacaatatgaacttgacagtagttttgggttttgctcattctttcagccacctgtgatcagttttgttgattaaggacttcttgtcaggccattttttaatatcaaagctgaagcaatatccattcagggatttcatcagttgcatcacaaaacacggatgataatatacatcactccattttttccattttgagtccttttaaatgtaatgctaacctttacaattaaaaagtcagattcagaatggaaacaaggtcattttgcaaacattggagctcttttattacaagtctgcttgttaattttagaactgtaaaaccgctctgattaaactatttaactaacaa

SEQ ID NO: 88182 - DNA, 1421 bp, Homo Sapiens
ggtccggaattcccgggatccgggcgcggaggtacgctgagtggagctcggggctgcgtaggggagctgagccgagtggctgggcgggcctggccgggccagcggaggggagacgtcggttgagcggcggcgaacatgcgcttttgacacattggaggctttcttgatcatggatggtgaagatataccagatttttcaagtttaaaggaggaaactgcttattggaaggaactttccttgaagtataagcaaagcttccaggaagctcgggatgagctagttgaattccaggaaggaagcagagaattagaagcagagttggaggcacaattagtacaggctgaacaaagaaatagagacttgcaggctgataaccaaagactgaaatatgaagtggaggcattaaaggagaagctagagcatcaatatgcacagagctataagcaggtctcagtgttagaagatgatttaagtcagactcgggccattaaggagcagttgcataagtatgtgagagagctggagcaggccaacgacgacctggagcgagccaaaagggcaacaatagtttcactggaagactttgaacaaaggctaaaccaggccattgaacgaaatgcatttttagaaagtgaacttgatgaaaaggaatctttgttggtctctgtacagaggttaaaggatgaagcaagagatttaaggcaagaactagcagttcgggaaagacaacaggaagtaactagaaagtcggctcctagctctccaactctagactgtgaaaagatggactccgccgtccaagcatcactttctttgccagctacccctgttggcaaaggaacggagaacacttttccttcaccgaaagctataccaaatggttttggtaccagtccactaactccctctgctaggatatcagcactaaacatcgtgggggatctcttacggaaagtaggggctttagaatccaaattagcagcttgcaggaattttgcaaagggaccaagcatcacgaaaatcctatatttcagggaatgttaactgtggggtgctgaatggcaatggcacaaagttctctcgatcagggcatacatctttcttcgacaaaggggcagtaaacggctttgaccccgctcctcctcctcctggtctgggctcctcgcgtccatcgtcagcgccgggtatgctgcctctcagtgtgtgagtgcctagcctccaggtgggggctcctgccctcctccaacaacccaggacacccacgcctcacccctcggtgcctgggcccagccccgtgcccctccgtctgcctccgcacggctggcagagggcaggctgcatgcagtggcggctactgggccctgcccagccccggaactctgcgcgatatcaatactggctattttctaatcaaaaaaaa

SEQ ID NO: 88183 - DNA, 716 bp, Homo Sapiens
  misc_feature (321)..(345): n is a, c, g, or t
taagttagtttacttaggcctcagaactggcctttaatcatccacatgtaggactgttctggcagcgggggttgggggggaaccgtgttaattactcacacgatgtgctgactcaaagcctttgtcattaaacctgtactaaataaatgcctgaagcaccagcttgtcagggccatggctgctacaactctttctttgagcagcctggtcccctagcccactctttcactggatacctatgtctaagtactttcatctgtcacttggccagggtctatggttcagacccagcacctggcgacagagggagacagcatctcnnnnnnnnnnnnnnnnnnnnnnnnngtatgtttagattgtgggatcagtgattaaagattataaagttcctagaagcagcacaaaataaaaggtagctattactgtttttattatttataataatgtaattgaacttaacagtaagtggcccctgtcagctgccacatggatgggcaggtggcctgaattcttagggatgttggcatcagctccatactccagcaagagagccacagcatctggatttcctccacttgcggcttcaagtaagatggaagaagaatcagaggcctgaccatgagcattagctcctaagaggagaaagactcttgttaatgcaaaaattattttccactgtatttcttgagcaatcttaaaaatatatccccatcacc

SEQ ID NO: 88184 - DNA, 498 bp, Homo Sapiens
ataatatggcagtattggcaggaatgatggaggaatccctttaaaatgtacacttcaggcagcagcagctaacagaaggcctgaccatcagaagggaaaatgcacatgcagatgaatgtgtggcagcactgggatcctccagatatccagttgattatgagaactatgactatctgcatagtcagagtcattctttggaatcagacagatgtgtatgggctggagtatgtacatattagggccataacaattctgaaaactggtgacgagaagccactcaccatttgctactaacagctcaaaggtgaagaatattccattaaataaagcactaaagaagataagcctctcctcaggcgacaaagggccaaccccaaatgaagtccatgctgcgggtcttaaggtcatctgctcataagaaactggtcacttctggtgaggagttaagatgaatggagagagaattggttcccaaaaaccccactaaaaaagcttaag

SEQ ID NO: 88185 - DNA, 789 bp, Homo Sapiens
agaaattgacttgtcttgagtgaaaaatgaaggaagccctgtgagaaccaagattggactaatgagttctaattttcagttgatgattggtccggaaacactcccctgttcatttaaggatctggttcagatccactttattttaccctgggaacaggaatcaaaaaccattacatagtgatttacagtagtttttgtggccatactggattaatatattttgttgatcctctgtacactcaattgaataatatccccaaaggccaggaaactgagatggctcatcagtacttacttttcagctccaggagttgtaataattacattttggagattttcagataaagtagcaatatgttacagtagtcataccaggtgccctgcctttaaatcagggttgcagtgtttcatagttgtgtgaccttgggccagttagttttctcctctgtaaaatgtggttaataatagggctgggagggggattaaatgcaaaacacttactgtgactcatactaaactttcagtgaacactgaatattagtaaagttatttttactgggaagatcataaatatattacaaaaaaggttttttctgtgggatatatgatgcaacacaacaagccgtggattgggtgttgctttgtaaggaaaatcaattacatatgtcttaagtacttcaatctctcaacatctttgttgattccatctgagcttagtcactctactacgtaaagtgtatgatgttacgggtctagaataactagattagggtaaaaaataagtatagg

SEQ ID NO: 88186 - DNA, 454 bp, Homo Sapiens
actccctttctgggggcaactcctataaacagatttagcctaagactcgcgtgttgaaattgacttgccccattcctgccagttaagaggattagcgatacaggtggtgaaaaagaaacgatgacacccctaagacctgagccccttctgggccccacactccacctgtagaactctgatggggccttgtgcggccgaaccacaatccaagagaggtgttcacatcatgtgtcgctagccacagccatctcaaggggaaatgccccaaatgtagaagtatctgacaccaggactgggggttggagcactggatgaacagcgtgtgtgccactctttcactgtgcaccgtcctaagaaagaagcctgtttccctttgaagagcctagtgctgactgcccaattcaatcggaccacgcagggcagtctgaggattaaaagatgctacctttaaaaa

SEQ ID NO: 88187 - DNA, 358 bp, Homo Sapiens
tgggtcccctgggggccacccatcaagggcacatgctacaggcaccccaaggcagagtggcctggcctgcccggggctgacccttagggtgaggagaggacactaactgggcaagagagactagtctatcagtgcaaaaaactcccaatagggataggaactaggaaggaaataccaagaaaagtgatgatggaagatgggggtaaccatactgcagatggggtactcagggagggcattttaacatgcttcccaatggacagaaatcattttttaaaaatcctgcacatagctcaggctcaccagacagactaactcctagtactcggaaatgaattaaaatctggcagtggattaa

SEQ ID NO: 88188 - DNA, 1155 bp, Homo Sapiens
  misc_feature (189)..(200): n is a, c, g, or t
  misc_feature (1134)..(1134): n is a, c, g, or t
atttggataacttatcattaaaaaaatgtgggcatgtgtatatatatttatacatacgctctgactttcaaaatttgttagattctgctagtaaaactgttagaattacatcaaaatgcagagggccatgtgaattggccctccattgtgaatttaaacaattttatttatttaaactttcctacatcnnnnnnnnnnnncaatctctgggaacagactacctctgtagaacaaattggttatttttcgtgaagcaactacaatcactgggattcattcaacttaagtgacaagacaatagccttctactatttttgcttatgattagataaatcactggtctcttttcatggccttctataatagcagaacaggtttcctaaattaaaaaacagaacttaaagcaccttgttggggcagaggaggtgtacagcaggaaagaaaccttagcataccattccagcgaatactcttcaggttcaatccctacagtgtctttgttctcagaattttggtggaggcagtggggggacagacatgctacataggcacattcttagaaagtgctgtaaccttggaggttaaaagtaaaaattaggatgaataactatctttaatattggtccattttctttaggctatcgaatataacaacacaaaaataaaacataacaacaaggacactaatacaaaccaaagtttttggctgccagctcttctatagactctctcaatgtgatcagaaacggtaccttcctttgtgatgaagttggggccttctcttttgagcagtatacccagcaggatggcttggctagccagacaactgcaatcattcagtttttgaagaatttcgtgggtgggtttgtccttccattcactaatgttgacatccggctgctgtcccagttcaggagcactaggggtgctgctttgccgtttgacttttgaatgtttgggaggttctagttcctcaaaactcttaaattctggaagctcttctgtgtcactgattcgtaggaaatcaagttgtactaccacagctccagatattagtgtctgtagacgatacacatgaactttgactcctccaattatacctttgttaagggctgccagcatatctaatatggngtagaaccggctacctcgtat

SEQ ID NO: 88189 - DNA, 448 bp, Homo Sapiens
cttaggtagagaagggagggggtttaagcttagtgagggcaaaattactccattccaccttccgagaccagttagggttttgagagaggtttctgctcaacctgggatctggagggagagctttgatgttggtaaatctgccttgaattcattggtttaacttgcatcaaaataccatgtgagtgtgctcattctcatatatcccctaccaccatcaccaccattctgctgttcagtgtctcttgagagagcctctttgcatgttttccagaatctgtgtgtgtttttcctttcttcccctttgttctttttgctcaaaggtgtgaccagtcattgcccctctggggctttcattctccaggagaaacatcccagaaccagcactgtttagcctgatacctttctaatgtccatgtcaattttcaataaaattcaaaaaaatgctaaa

SEQ ID NO: 88190 - DNA, 471 bp, Homo Sapiens
  misc_feature (73)..(163): n is a, c, g, or t
gatggaaaaataagaatgggttattagctggcagaaatgatgacagatttgagtgcttactgtaggtcagctnnnnnnnnnnnnnnnnnnnnnnnnnnnnnnnnnnnnnnnnnnnnnnnnnnnnnnnnnnnnnnnnnnnnnnnnnnnnnnnnnnnnnnnnnnncatgcacagtaactactaagaagtggaagaaccagattaaaatccagtctatttatgcttagagcctgcccgcttaactactatgcggtgttgtctcagatgtagaacacatctttgttttctctgaggacttagaaaaaacacgcgtgattcttctccactgaatataggaatagtttctaccctgtttagaacatgcatagtctttatcaataagtgttaactgacatgtgaaatcactttctactctttggaagccgatgttttaagtccaagtagtctgtatggtggaaattcctaacttatgt

SEQ ID NO: 88191 - DNA, 1020 bp, Homo Sapiens
  misc_feature (688)..(708): n is a, c, g, or t
  misc_feature (744)..(854): n is a, c, g, or t
tgcggccgcaaggtcagccgcctgggcaagtgctcgggccattccagttttatcacccacctggattgggcccaggacagcagctgctttgtcaccaactccggggactatgagattctgtactgggacccggctacctgtaagcagatcaccagtgcggatgctgtgaggaacatggaatgggccacagctacttgtgtcctagggtttggggtgtttgggatctggtctgagggggcggacggcactgatatcaacgctgtggcccgctctcatgatgggaagttgctggcttcagctgatgactttggcaaagttcacctgtttagctacccctgctgtcagcctcgagccctcagccacaagtacggtggacacagcagccatgtgacaaatgtggccttcttgtgggatgacagcatggccctgaccacagggggcaaggacaccagtgtgctacagtggcgggtggtctgatgcggccagggaagagtcaggtgtcagggcaggaattctattttcgggagatgtctattgccgagtagagtaatatatacccagagtatgtctatagcagagggggttatgggggcgggagggtagactgacatacagaagtctctatttatccgggtgggaagagggagtcacatcgctttggggatccattggtgtttggtttggggtnnnnnnnnnnnnnnnnnnnnnatatcatccagaaataaagacacgtacactaggggnnnnnnnnnnnnnnnnnnnnnnnnnnnnnnnnnnnnnnnnnnnnnnnnnnnnnnnnnnnnnnnnnnnnnnnnnnnnnnnnnnnnnnnnnnnnnnnnnnnnnnnnnnnnnnnttttttgggggggcccctcgcccctttaaaaaaattttttataaacctttttcttttgggcccccgccgaccccccctgggggggaagggaaaaagggggcccaaaagttgtgttctcccaaagaaaaaactccggggcctcggaaaaagggggctcgtgggattt

SEQ ID NO: 88192 - DNA, 314 bp, Homo Sapiens
aaaaccccagtctctgagacaaacaaaaaggaactgtctcattgggaaagcagacgtaggacgcctctgaattttgacaaggcctcatctacgaatttctctcgacgtttgtagtgggtgggcggaagttggttggcctttattcctcttctggtgtgttggggtttaagttgtgttggcctgggtgcaggaaccggcccctccgggttgctcagggatgcagtgtgttaggtggttgagatgcaaaagtgtgcttaaaaaaagagagaataatggcgtttactcaaaaacccaaattctcaagtaagaaaaaa

SEQ ID NO: 88193 - DNA, 430 bp, Homo Sapiens
  misc_feature (22)..(22): n is a, c, g, or t
  misc_feature (47)..(47): n is a, c, g, or t
atatgtgtgactgtgggtgggnacgtgtgcttgtggggcacaggtgncggcccctgctggagcccggctgggcgcagcgcctatgtaggacgggtgttctcagtgacctacctcccaggctcctctgcacctgcaaaggaacaggagtgagtcgtgactgacaggggtggttgagactagactaggtagagtagttaccaggagatgtgaatgtgcgtcaggtgatggatgggtttgtcaagggaatcgttaccgttttataccaaaggtattaacatgggcagcctttgacacatgtattccaaaaacgagtttatattttcaaacggtttttacagcttagactttgtacttactgccctgcctgtgacagttgtatgccttcattttgtatccaacagcaaagtctacaataaaactttaaaacaaa

SEQ ID NO: 88194 - DNA, 773 bp, Homo Sapiens
  misc_feature (186)..(186): n is a, c, g, or t
  misc_feature (201)..(201): n is a, c, g, or t
  misc_feature (316)..(316): n is a, c, g, or t
tttgccctcaggcaagattcgcacagtgggctccaggagtaccagtgttctatgtggcataaatgcataagtcagacaagagtagcccaggccttgatggtctctgctttctgcgcgcagagatacaagcgatgttcaaaagccagtggtgagtgtcaagaaattaccacaaccagaacagagganaatgaaagtaggttntggggccagtcctgccattttgagggtgtttgctaaattactctttttctgtgactgtgtggaaccaaatgccatggaaggaaggaatgaccaccacccagaggcaaaaataacnccgcaaagcttgggaaagtcagccgcagcaaacaatcaggaaggcgaggccaagttcactggatgcagagcagataagaattttaattcatcctgaacgcaaggaaaggcgccaacaaagggaagaggttatcttccggcatgagataagatttgttccttttccttgctgggattctccagcgtccagcacttggagagtttgggggttggtttttttactgccaggattcctctaggaaaaccctccccaagccctggcaggggctgtctggcccttacctgaagggaccacattcactcacaagctagtggccttggtggatttggggtctgctgaattcaaaggttgaacaaagcaaacaggtctcccaagaaagggccctcaaagcgggcaagacggctctctgcaaacaggttcgaaaaaagccttctccctgttcctttttccattaaaa

SEQ ID NO: 88195 - DNA, 384 bp, Homo Sapiens
ttaaaaaggtcatgactcccccctcaccgcactccctcataatataatgaataaccatagagcagtgcctttaaattagctatagcaaggaaatagtcttttcaagtttctgaacaatatatttctcttagttggcacctcacaaatactagatcatgtcagacgctgctggttaatagctgcaggaaggcatgttgtgcagtggatattgctcatggaagtgtgtgaaaatcatagtaagctttgttctccctgctaagacttgctatgtatatttccatcattgtttcatgtaaactgaaccattgtggtaaacttttggagttgatatggaatcactttaatgctgttttcacaaataaaagttttttcttataggtcaaa

SEQ ID NO: 88196 - DNA, 516 bp, Homo Sapiens
cctcactccaacactgaggacagctcactccacccagtgaaacagccgggctctggctggtggaaaagcattggcttcccctgctttctctgaatgaagcatgccgggcctcatctcggacctgcacactgcccctcattatgttcatgatcggcaggaaatggataaagagtggccagaaggtgaaaaagaagagatggccccctgaaagggacatccacatttatttgagcacctaccaggatacctgctttgggagccttctgctgctgcgtgagatccctggctaccctggagagacatcagacaacaagtgagatgcccaagagccctagctgtctttgtctttgcagcccaagctccagacatgtactgaagaagctttaaggataaattcagtcccaactactccctggctacaactatgagacagaccctcccaagtcagaactgcctagccaagctcaggcaactccaagatttaagagcaaaataaaagatagttattgctttaaa

SEQ ID NO: 88197 - DNA, 656 bp, Homo Sapiens
accaagttgcacttattcattggttcagcaagcaggtatcaagtatctatatgtgccaggcactcacatgggggtagcggtgggacaccccagataccaaaagcaacaaggttcctgatttaatggagcacctatgccggaaggggaatggagtgacaaagaataaaactgagtactgtaaaggcaagtggctggtaagctacttgaggcagggtgatgatggagggcttctctgaagaggtgatagcaaggagccagtcaggcaaagaccacgggaggacattctgcagagggaacagcacgtacaaaggccctgaggcaggaacaggcttggcgtacatgagcctggtgaggttgaaagatggcaggatggtgtggggagagtggcaggggctgaggttggaatggtgagtccggccagctcaggacgggttcccggaaggcccaagaaaggagtgtgacacatagcaggaggttaatgttagtagctgtgggtatgatctcctggtcccatgccctcattttctagctagggaaactgagtctggcctatcagacttatctttttcctacaggtgggctcctttctggcctgtgcaactgccagtccctctgctaatggcccagatgccgagggcccctgcgccatcacagct

SEQ ID NO: 88198 - DNA, 877 bp, Homo Sapiens
aaaaaagaagaaaattaagtttgaaacctgaaattaacctcttggtgagaatggaaatggaatgaaatttcactcctttccagatgcagcttctgaagaggagacctggcagcctggcgagcatccagctcgctcacgcacctctttctagtcccgtggccatcagtgagcttctccgggtccctcttgccacttctcagatgttcctttctgtcctaggagatttgtaaaaccagatacttaggatatgattctctagtggagggttaggcctttaggtctctaaaaattgccattcatgaccttcgggcctagggttttgagatgaatgtgcagtgtgtgtggccgctctgtgtgtcccgcttccaccagcttggcattaagcacccggagcatcgcctgctgggcaggcctggccaggggtgagcccctccattcgggggctcagggtcaaggcagattccttgcttggctttcctgctgatttcctcatgaagatgccaattcgtatttaaacatttgttatcaatggtggtgtttgtgtgctgatttctataggtaaaggctgttgttttaggagccaggtttgctgggccagctcagacctcttacaaagtgaagatactaatgatcgtcttgcaaggtgccatagtgtcgtgagggtgaactgaggcagtggctatgcatggtgtctgcagcagcgtttctgaggctccaagaatatcagttcctttttcagaaatggggccagattcttcggatgtagacagtgttctcttcacggatgctaacaacttatcaaagctataatatattaagtatctctgttataataggatagatgcattcctaaaaaaatgtgttaagcaaaaatcag

SEQ ID NO: 88199 - DNA, 1210 bp, Homo Sapiens
  misc_feature (808)..(818): n is a, c, g, or t
cggtcctaggtagcgaggcctgggtggcgaattcggcacgaggcggtcttgtagctgggccagcctggggcttggttctatgtccctgcgggtcggtgcgagggcgaagaggaacccgtgggcccgggggatcccggggggccggaccagtgttccccagttgtgggagcagacgcgtgggcgcatcgcgggcgggcagggcctgaagtgcagctatgtttccagtgttctctggctgtttccaagagctacaagaaaagaataaatctctggagttggtgtcctttgaggaggtagctgtgcacttcacctgggaggagtggcaggacctggatgacgctcagaggaccctgtacagggacgtgatgctggagacctacagcagcctggtatcattggggcattgcattaccaaacctgagatgatcttcaagctagagcaaggagcagagccatggatagtagaagaaaccctaaacctgagactttcaggtggaagcaagaagcaagttttctcaggtatttgccacaggagcctggtggagctccaggaggtttgatctctcttgtgaactctggaactgtattcccaattgtcaattggacatccctacgtatgggacctcagatatttcaaacatgatgtgtccaagtctgtatcacttctggccatcatattgttcttttatttttccaaatttcacatcaccagtaacaaactagctgtgatcatggcagatagcctggaaataaaactcccctttttaccctttgcacagcaaattgacatcaaatcctgttttctacnnnnnnnnnnnaactattgcttccctattctgtattctcactgctccatcttctgatgtaggaggtcatctgttttcctcttttcctctcctctgactcttaagccctttcccattctctttctcagggatggctggtaaaatgccaatatggtcttgtaactttcctgtacttagtgaacctccttatttacaccctgtttgtgaagtggctgtgttcaccctgggtggacacggaatgtttttggcatgtacaaaaagaattttatgctgcctgtgtccagttattaatttgtaagtacactcagctttttgtatctgtaggtttaatatctgtgtatgtaagcaaacttggatgcaaaatatttgaaataaaatcagatgcttgcccctgtagtgaacat

SEQ ID NO: 88200 - DNA, 519 bp, Homo Sapiens
tcagctcggtacctgcctgcccttcttcccaaacactgagaagacccgcgagatgaccccaaagccacgcctgctctacggccctaagcaatagacgcctgccctggctgctgatgatggtgatccctttgtcctttgacttggcagtcaaaaatggagtgacaccccagactcagtcaggaagagaacctgcagcctgcctcagctcaggctaccacgccaggctccactcgctggtatttccaggcttgctaagtactaaccaactcatccccagtaacactgcatgttcatatcctgaattacaaatcaaaatgagcaaacacgtgcataagcaaatgagaaaaaagaaggcacacatcaaatgatgagatgtgcagccagtgcaggtaccccgggagtgttgcaagttaaactgatgaaaagacgtttagtatttaattgctcctcatgtaacattactctgcttcagaaatgttttgtattttgatataaataaacatttgctaaaaaagtaaa

SEQ ID NO: 88201 - DNA, 401 bp, Homo Sapiens
agttaagagaagcagacgtccgaaattatctccatgcattaccaaaaaccgtgggcaccacggcacggggaaaacttaccagacaactctcatgccatcaagccgacggactttcaaaaaaataaaagatgcatttctttacttctttactaagggaattaattatctggaagaacaggaacatacatgacggctagaatatggtcttagcccaaccttaaatagaacaagctctcttcaccccaatcctgccgccagctcatttccctctctttagagactatcatgatgaagcaagtagagaatggaatctcctggaccattgtctcttgccttctttgcagaattttacatttgttctgtccccaaaataacaataaaagatttagaatctcaaaaaa

SEQ ID NO: 88202 - DNA, 1368 bp, Homo Sapiens
  misc_feature (150)..(150): n is a, c, g, or t
  misc_feature (827)..(853): n is a, c, g, or t
  misc_feature (891)..(906): n is a, c, g, or t
  misc_feature (934)..(962): n is a, c, g, or t
  misc_feature (981)..(1205): n is a, c, g, or t
  misc_feature (1210)..(1210): n is a, c, g, or t
  misc_feature (1284)..(1284): n is a, c, g, or t
gagaaatgttcatgcacagagaagtcaggccacttggggactggcaaacgaaggctgcactgagtggtggtgtgttggcaatattactgtgccaaaaatcaccttgtctaattttatggatatgtatggcaaacttattacccttcttgncaagctgcacattaaggtacttgtaagtgtttatgctttgtgtgtaactgttgccttttctaactgcttttcttgttactgaaaatataattctactagttttatcacattaagaggctctccatgcacaaaatgcatgatgtagccgtaaagtaacagcattgtacattttctatctcctgatggcagtggtgccttgtcacctttggaaggttgcatttgtttctgctttcaagcgcaaatagtagcttgctttcagcttcacaaaaatctcctcaaatgtaaaagatacaaaatggcgtgttatcatccaggcttagttggagtatttgcatttttatttttatcaaaacaaatataattggtggggactggccagtaataatgtgtggcgtctttaagccaagagtaatttttaaattaaaaatgaaaattttaagaggtagcccattaaacaagctactgagttggagaattaggggatgactgtggtggtttgtcgctaaggaggcaacagtagggtccaggcggcggggcacgtagagcagttagcatgatccatggttattccttactcatgaacagtgtcgggcgcacctcattatctgtgcatttgtttttcctgggcagtcctgtcagccagttaatccaccagctcttaggaagtaaatacagannnnnnnnnnnnnnnnnnnnnnnnnnnaaagattttatactacatcttgttaaagtcctatgaannnnnnnnnnnnnnnnctattaaaactgctttttctcagtttgnnnnnnnnnnnnnnnnnnnnnnnnnnnnngcctcgtgccgaattcttnnnnnnnnnnnnnnnnnnnnnnnnnnnnnnnnnnnnnnnnnnnnnnnnnnnnnnnnnnnnnnnnnnnnnnnnnnnnnnnnnnnnnnnnnnnnnnnnnnnnnnnnnnnnnnnnnnnnnnnnnnnnnnnnnnnnnnnnnnnnnnnnnnnnnnnnnnnnnnnnnnnnnnnnnnnnnnnnnnnnnnnnnnnnnnnnnnnnnnnnnnnnnnnnnnnnnnnnnnnnnnnnntcggncacgcgcgggaaaagcgttgcgtatggcgctctcgctctcgccatgatcctggccggtctcgtgcggacgtacntcatcaagcgtaacgtacacaacaggaaccagaaaattacaagcacaagcagactaaagcctgtggttcaagtcgcctaaacaa

SEQ ID NO: 88203 - DNA, 497 bp, Homo Sapiens
atctgtcttagagctattggaatcctggatcattgtgggaaatgaaaagaactggtttttagcaaggagaccaagaaactctactccctaggggctagcaatgagagaaaggaagccttgagtctttgagcacagggtgacagtttgggtcctatgtgagatgatcaaatccacagcaacagaggaaaggacaaaaggaaaagatacttcgatggaatcagcagccattgatccaatgccaactccaagactggaacgtcgcaatgatagttccaaggcggaaatttgacgtaattcttttcgacacagttttacaggtctggatgcccattttaattcttctgaaagcatgcctccttctggcttcaggactccatctccagccttatgatctaaaaataatccccaaaccaaaaaattagatattatttcctcaaaattaggtgttttaatcaaaacatcttaacataaatacattattatcacccaatatgaaa

SEQ ID NO: 88204 - DNA, 499 bp, Homo Sapiens
tatcatagacacagaagttacatatgcttttattaagagttaatgatttaaaaaataacctaatgatatgagtgctaaatttgtaaataattgaaatgagtcactttcttctggtaacaccttcctggggtttttagcttcaagagccaccatgctgacaagtaagcactttcattaccaatacttctttcaggctattccattccaagatgaccaaataggaacagctctggtctggagctcccagcgtgcccgacacagaagacgggtgatttctgcattttcacagagttattcctttgtagttgtgatccagcatggatgtggtgtggttgtatcagtgactgcaggtagtctgtggagcattacacagttctttacggaaatagcagctgcaagtgaccaggaccactgacagcagaaggcacctcacttaccatggtaaaaagcagtttagacaaatctcaaaaacaaaataaatgtttattggagactcaaa

SEQ ID NO: 88205 - DNA, 386 bp, Homo Sapiens
  misc_feature (133)..(154): n is a, c, g, or t
gccaaactagagaaaatgtccatatacttttgctgtaaatgtgtttatatttatttgaaatgaaacaaatggtgaggaaacatccattatttgttctctattttaattgctatgtatcttatttaaaataacnnnnnnnnnnnnnnnnnnnnnncacttgaccctgggctagccaaaagcccaagggccaaacctagcatttccactgctaaggtttccagatgaccctcaggttcttccgcgttggttagagagggctacgcatcttctactgctcagccacagtctgtagccagcttagagcttagaagacattgcagtctggatgcccttctgcgagatgaccactcagatgtgtagtggatcatatacacaaaggcagcaca

SEQ ID NO: 88206 - DNA, 531 bp, Homo Sapiens
ttcaccaaaggggcttgcagtggtttattaaaatggctgcatgtcctctggcactctcttcatggagaagcggggtctatgtgccttctcttggagttggatgggcctgtgctggttttcatccatggtcagaacatgctgtggaagcccaggctccccaggaagtccctgtcttggtggccctgtcaacagcctccactgagctgagcttttcagtctacccagcctgggtgccagatgtggggaagtttccagcagggaagccttcagccccagccaatgaattcttcccagctgaggcccagacatcggggagcagagacaagccatcctcatgccctgtgtcaacctgaaataagtgaaaggattggaatcagctttaaagagtttattcaagtaaaaagctgggaatgaccattcagaaaacaaggattccacagaaacggagttagtgctctgaagtgaaaagttaaggtctggcttatataggaggaaaataaagaaatttaacaggattaaaacattttcaaa

SEQ ID NO: 88207 - DNA, 482 bp, Homo Sapiens
ctggacacagtagttctcaaactggacagtgtcaatcagcatcctccgggaggtctggggtggccccggaaatacatgtgtcccacctatcccagcaggagatgttgctgagatgggtgcattaaagtttaggctttccagagtttatattgctaacaacttgaaaggaaaaaagctaactagagaactgactggtcttatttgttttagattctgggctttactaagacttcctactctcagaatctctggactataaacgctgggtggggtgggagctgggaatgttattctggaaaattaatcacaaatgaaaagaaaatcaactctaagactccagttagaagatttttgaaaatggcagaacatgactggccttcattcaagtcagaatatttaaagcaatccttgctaagaagaacttgattttgtataagcagtcccttaaatacagttgcttctcaagaaaaccacacacaaaa

SEQ ID NO: 88208 - DNA, 549 bp, Homo Sapiens
aagaattcggcacgaggccacattctccttcccttcaggatccgccacaaacagacactttttgcttccttaaagtaggatcaaatctagatcctctagcctgggcagtagaggaagaaatgctagcctggaagctcggcatttggtttcactaagggccatgtggttccctgcagcctcatgcctggccccttgacacatccaaagcaaagggagtcctgccccctccccccacttcctttctaccctgcctgtgcacagtgggtgggttggtgtgtctggacactgaggacttcctccccctttgcctgtccttccctcggccctgtgtgcctcagggcagatatagcaagctctttcgaccatagttgatggtaggacattttagactttgtttctcagctctgtacaaacacaaatacacacccccacaaaactaaaatcaaagtttcactacataacactgggccttactgcatgtggttcattctagcatttctgttctgtgctgtgctaagctatactactgtatgttctttcagtaaaaaa

SEQ ID NO: 88209 - DNA, 462 bp, Homo Sapiens
ggaaaaacctcctctagtcatgcccagatctgcctggtctaaaaaccacaaaaatagcaggactttccactgagtcaatgcttgtcacgtctagagacctggatcgagctgtttccttccattcacagagccgtcctgcaggagagatgttacttttaccatcaatgtaaaaactgagccttaaactgcttcagaaactgtttagattcattcaactgaatattcacactggagtttgaatcaaggcctacgtggctttagaaatttaagatccaaacccgtaccactgtggtacctgacatccttcgtgcacctccctcatcttcagagaaacaattctaattcttcactttaaagcaaggtagtgtgactttccaatgacttcagggcattcagtaaagaacagcttggttcaaagtaagttgatgagcacagcaatttcttcataatggcaacccggtt

SEQ ID NO: 88210 - DNA, 1118 bp, Homo Sapiens
  misc_feature (93)..(128): n is a, c, g, or t
accactcacagcgcgccaacgtatataccacatatgggcgcatcctgctttagtcgaacgacgagcgcaggaagtagtagcgaggaagcggcnnnnnnnnnnnnnnnnnnnnnnnnnnnnnnnnnnnncagtcgacggtaccggagcatatgcccgggaattcggccattacggtccggggattgctttccaggggtcactctggcttcgactccgtcgctctcaattcgtcaccaggaggaagacggagctggctgcccagcccaaaggcccatgaggggatgcagttatgggctctgtcgccgtggattgttattttgtgtcagtaagtaatccataaagtgccaacatgggaaagaaacggacaaagggaaaaactgttccaatcgatgattcctctgaaactttagaacctgtgtgcagacacattagaaaaggattggaacaaggtaatttgaaaaaggctttagtgaatgtggaatggaatatctgccaagactgtaagactgacaataaagtgaaagataaagctgaagaagaaacagaagaaaagccttcagtttggctgtgtcttaaatgtggccatcagggctgtggcagaaattctcaggagcagcatgccttgaagcactatctgacgccaagatctgaacctcactgtctggttcttagtttggacaactggagtgtatggtgttacgtatgtgataatgaggtccagtattgtagttcaaaccagttgggtcaagtggttgattatgtcagaaaaaacatgccagcattacaactccaaagcccatataaacataatgggaaatattgaacttgaaagttcccacacaccacgctccctaaacatattcctggtcgccgccctcggcccctcgagaagcctttttaagaccatttccttggggggcccgggcccccctaagctaagggaaaatgggccctaacctgtttcccaaaggagacccctggcccatgactaagggccctggaattcccccccattaaaaaaaccccccgcgggtgtaaacccaaccgtttgggaaaaaaattccaaaaaggggagtctcccaaggggtttttacggggggatctcttccaccgggaag

SEQ ID NO: 88211 - DNA, 483 bp, Homo Sapiens
ggttatagctgatggagatggcctctcctacagaaacaagaattagggagtgcccttattgctttctgctggagaacctgggggaaataaagaacctctcccaatttatacaatctttcagtcctagagtatattcacatttgataccccattgcagggtgggcaggttgttaggcaaagttgggataagggccataaggagttccccggaaagggtggtggccgttgctgcttggccgaccctcctgtttctctaggtaatctcatcttggcatttctggtagccccagcaatgaactgcagctttctgtggtaggtggatagcctagggtagggtaaaatatctgtgacccatatttagtaggggtatcttttgctgtcaacaatcctttctttccaaatggtggcataattgtggaatactaaaatggcatatttggaatctgtataaaaagtacctaactccttggttcttttctagtt

SEQ ID NO: 88212 - DNA, 585 bp, Homo Sapiens
  misc_feature (488)..(524): n is a, c, g, or t
gctgcccaagtcagagatttaccacagatctgtctccccctcaacctggactcaagttactgtggtgagaaacctcactgtccatggttaactgaagaaatccctccttcagaaagaacttgagtagtagatgaggtggttagacaggatctttttccctcaagctgtttggacgccacagccaggaccaactctgacagctgcgagagagagagcccctccaatgtggaacctcctacacagccccccttttgggtccctggatatgagcccccagcaggaccaccactctagggggaagtctccctcccatccctcagatccccacattgttcctcctgtaggagaaaagtcagccctgcccctggagcttctccaagatggcactggactcgccgttatcttgaggagccaggagctgaaatggctccggcttagcaacccagtatggccaaagtggaaaggttctctgtcctttgcagtccccnnnnnnnnnnnnnnnnnnnnnnnnnnnnnnnnnnnnngtatggtctcccaggcacagcatcttcttttaaaaaataaatatttataaacttaaggaag

SEQ ID NO: 88213 - DNA, 404 bp, Homo Sapiens
aagacttcttgggttttattgtttctcgggttttcaccacataccacatggaaaagaaatgtggttagaaaaaataaatcttatggactaaactaatagagcctattgagagtgcttaccttagggagccaagcactgatatttgagctgcacataaattatctctattaacataatgattggtgataacaggtccctccataactctctgataagaatacaaccacagatgagaactaattatctactgcgccacaatagaacagtgccaatgattacatttagccaacgactttcagggttagttaagatttcctggtcatagtcctagcatgttcagtacttaagggcccttctgctcagacccgcagctgtgtagggcaaaactcatatagtggagcatt

SEQ ID NO: 88214 - DNA, 380 bp, Homo Sapiens
gttcaagcctgaataaggtccctcttctgtgctgtcttcctgaagccatctgtggagtcaagcagtcatggctcagggacactctgaagtaggtcccagcacatctgcgtggagcatcaggaggaaggtggatgaatacttaagacccagcctggcctctaaatcggtgctgagcgttttactcagtagacagcttgggaatcatagaaacgatgtggatctgacagagtggctgtggacactgaagcaagccataccagggtggacctggcctttgccgacacgccacacaatcaacccacctctgccccctggggaggatagaaaatccaagaaaatggtgtggatcaataaatccttcccctgatgcaaccattaaa

SEQ ID NO: 88215 - DNA, 495 bp, Homo Sapiens
ctgcattccttggctaatgactttgcatcactctgacgtcttgctcccatggtcgtatcacctactactggccctgatctcactacttgttatatggaacaaagggataaggaagtgacttgcctaagtcactgaggaacctaatattgagattagcactcaatgattcctggctctcagaatgtgtgctgctaccaccaggccacactcttccctccagagagaagatgtgtcagcacggaattgtgctgaagcaaagatgtgaaatagaatgattacatatctacctagtgggaagatctggggaagaatctatcagtgctggcagagaagcaaaccatacgacatcactcatccccagaaagtgaagttaagggaaataaaaaacaatctacaccatttagaaaacacagccaccccatacccttggaaaaaatacactaaaatatcttcatctgatttgacctctaataacatgaataattgtcttataaa

SEQ ID NO: 88216 - DNA, 398 bp, Homo Sapiens
ttctgtctcagcaacttccgtagtttacagactttggagagcccaagctaactaggggcagaagtggtacacccacacagcacagctgctttataaaagtgtggctagactgcttctttaagcagatccctgatcccactcttcctgactgggtgacacctcccaaccagtgtctccagccaccacctaccacctggttgtttgggccagcaaccaggtctgtacccctctgggacagagctcccagaggaaggggcaggctgccatctttgcagttttgcagccttcactggtgataccctcaggtactggaaaacctaaggcgactagggactagagcagatgcccagcaaaccacagcagccctgtgaaaagtggccagactgtaaaaaggaaaa

SEQ ID NO: 88217 - DNA, 744 bp, Homo Sapiens
tagtcgtttcccagtgacctctgccccaaatgtaaacttctttaacctaaaggtctttcatagtttgatctacttatttacttcctttctcttctcaaagataatacatgcgggcaggcctgttttgtccctactataccctcttctcacacttttcttcttttcaaactgttccttggcacttctacatgtcctactttcttcgttgtattccagaaaccctatccacccttttttaaaggccatgctcatatcctgactctgtgacacttccagtcccctgccttcttagaaatcctttgtagtgatggtttgcattattctcctgtattagacaccttctttactgttgtctggttctttcacaagtacttttttacataagctgttttgaagttgtaaatcatcctaaatcttttataagcctcatataatacatagtacaatgccagcctggactctagttttaatctaaatacatagggtttaatttagcagcataatctttttagtcttttgaatgatgaggtaacctcataggtattttggcccattttgtttttccttgaattacatatataactgactatttagactgactcctttagatctcctgggatgctgacctcttggctttccaattcatgagactattgtaaagaataagtgagttcattcatgtaaagtagtaaaacagtgcctgacaaaagttaaagctcacccaattctaattgttatgaaaaa

SEQ ID NO: 88218 - DNA, 1140 bp, Homo Sapiens
  misc_feature (1034)..(1034): n is a, c, g, or t
gtggaccggtccggaattcccgggatagcctgcggaaggcggcggcggcggcacctgcgatcagcggctggggcaggttatggtagtgcggactgcggtgtgagcagagcggccacggggcccgccatgcgccggcggccctgacatgggcgccagcgggtccaaagctcggggcctgtggcccttcgcctcggcggccggaggcggcggctcagaggcagcaggagctgagcaagctttggtgcggcctcggggccgagctgtgccccccttcgtattcacgcgccgcggctctatgttctatgatgaggatggggatctggctcacgagttctatgaggagacaatcgtcaccaagaacgggcagaagcgggccaagctgaggcgagtgcataagaatctgattcctcagggcatcgtgaagctggatcacccccgcatccacgtggatttccctgtgatcctctatgaggtgtgaccctgggaggtggcagacagaagcaccccctgccccggcaagaaactcccaggctcaatcaaggtgtggcttccattgaggagcccaggctggggccacaaccctgaataaactctgttggcccataaccttcagctgtgagcgggtcggtcccacagtattggttgggtgttggtttgtgtgtggacaagaggtggttggtgggtggtgaaggctaatggcagagttagcaccccactctcccaagccacccctgcaagcagcacagcagggcatataccagtcaggaatgcccgttacctggttccttgcctggtctgctttcttccaagtttgcctggggcctagccctgctagaggctacagcactttacaagcaaggtatgctttcttccagcccctaggctgtgggcactgtatacaagtaggaacttcctttccctcacttcccttttaacccctagtcagagcatttcagccgtttgctacctcgattccctcctgtgttggacagagggctggggggcagtggccagcctgattcttccgacctacnctgccatttgttcccgccttcagatggatggacagtttgctggctattgctaggagtggggactgggtgggggcttctccctctacccaggcctggcctggatccc

SEQ ID NO: 88219 - DNA, 414 bp, Homo Sapiens
aagtttcatcttcattttatcaaggaggaaatcaaagcaaggagctgtgactaggacaatacagttagtctagggcataactcccaaccacattagggaaagcccagtaggaacacagagctatagttggctcaacccttattcatgacatcgtgtttcacatcattcaaaagtttttgtggaagtctctgtagtgaccacctgatactgcctgggagttatttccatttgttcagtccctgaggggatagaaaatggaattattactttcttatagttcaattaggcaaatttggatagagcgcattgaacttagttcacaaagggtgcgaaaatccacactgctccttttaaaaaaaatgcatggaaagttacagcaagaagtcagggcctcgggcccagcacagtggctca

SEQ ID NO: 88220 - DNA, 954 bp, Homo Sapiens
gcggccgcgttcccggtgctccagcaccctggccgcctccgccgacttctgcagcctcgatacaaagctctctacgtcgtcgaacacgtggttcaggatgtccacttcccgctccgcctgcagaaccgccaggtcaggaccccggggacccaggtccggggaggccgagtcagcgttgctcgaggtccccaccggctcaggcctctgcgcctcctctgcctcgggaatgggcttcgcctggggtcgtccgcggcccgcgccccgctctacggtgctgatcactgcgcggactgacgggcggcgctgcaggggcggggtctcagcggcgggcgagcggtcgcgctgcaactcctcctgcgtggccctgagcgccgccgccctgcgctccccgcggcccgagcggtaattgtgcagagccccctggatgtcctctcggatcagctccgccccgaggcgcaggccctggaagaagtgcacgtcgggctgcgcgcgctcgggttcctggcacacgagcagcagcaacgagcggctcctgccgggtggcatcaccgcgtcacagcgcacgatggcgcccagtgggtacgactccagctcctccttggaggccgggtcgagcagcgtgacatggtcgggagacactcgcagcagcatctcctgtgcccagactcggccctggctatccatgacggccaacttcctggaggcatcctccacggtatgcacgccatcgtcctcacccaggcagaacgtcaccaggtgattgactgggtactgggatacatcagccataacaactgtggagtaacgcttcctctgctcatagatagacttggcgcttggctttggggcagcttctgggactgtggcggtgctcatggtgctgagtggtagctcccgcccacctggaggtgacctgcctgctcaggctctgccctgctctccgctgtcctttcc

SEQ ID NO: 88221 - DNA, 577 bp, Homo Sapiens
catatctgtcaaaatcccagctgtcatttttatagctgtacacactgatacttaaaggaatgtgaaataacagtgacactttgggaagtattttggcagtttttttaaaaataaaatgtaagaaacagaaaaccaaatactgcacgttctcacttataagtgggaactaaatgatgagaactcacgaatacaaagatgggaacaacgcatatggggcctatcagaggctggaacgtgggagaagggagagaatcaggcaacaagttgacaaatggacatgaatttcacctctgagagtttcataagctggtattgtcctgacattgcaaagtgtttaccacaaagatcctgtacatccatcatccagggccagcgtttgcctgattctaattccactgacattgaaatctacagctctctgtgagtcatttatcacacttattaaaatgttccattgtgaattggaatagcaattcactattatttcagagtgctgcccaaggggcattctatgcagcaaatcttaatgctttattcaaatagtagtttggttttaataaatgattctttgcaaaaa

SEQ ID NO: 88222 - DNA, 320 bp, Homo Sapiens
aggtgaatgcccagaggatgagaacacatagccattaggagagcctgaaagttcagtgtgactgaaagatgaagttcaagagaagggtcaaactgcgaaacccaagctggagagttttagagagactgtggaatggaatgactctccagagctgcagattgaaggcatattttcatctgactttggtgattatgtttccaatctctctgggaataagatctcaatggcgggaacaccttcatggcccctttatagctggtatgttttctttttatggacaatgagaaacatgtaataaactgtgtttccttctcgctagg

SEQ ID NO: 88223 - DNA, 334 bp, Homo Sapiens
cttctaggtatctgaagatgttgaagaccatttcctggaacagcagaggtaaatgcccagaggatgagaacacatagccattaggagagcctgaaagttcagtgtgactgaaagatgaagttcaagagaagggacaaactgcaaaacacaagctggagagttttagagagactgtggaatggaatgactctccagagctgcagattgaaggcatattttcatctgactttgatctcaatggcgggaacaccttcatggcccctttatagctggtatgttttcttcttatggacaatgagaaacatgtaataaactgtgtttccttctcgctagg

SEQ ID NO: 88224 - DNA, 563 bp, Homo Sapiens
ctggctttggtgctgcatgccctggagatcaaggctctgaggatgaagctcggccccctgcagttctccgtgctgtggccttactacgtgctgggcttcggcatctttctgttcatagtggctggtaccatctgcctcattcaagaaatggtttgcccttgctggcacttgttgtccacttcccagagtatggaggaggaccacgggagcctgtacctggacaatctggagagtttgggaggagaaccgagctcagtacaaaaggagacacaggtgacagcagaaacagtcatctagcccaggacatggcttctttacccttcttcaagccatgtgagtgtacacatgtagctgtttgtagtcctccccaccctctctgccagtatctgtgcctttgaggagcttcttgcgtgtcagatcaactctccacctccccatactcacagtgattctatcttgcttgtatgtgaaatttgctaaaagtcctttcaactcttctgagcttcctaagtgacgtttttgcaggtattttcaataaaaagaagggctactaagtcaaaaaa

SEQ ID NO: 88225 - DNA, 559 bp, Homo Sapiens
  misc_feature (62)..(86): n is a, c, g, or t
cctcagcagttccagtatggataggggttcctgttttactagcttttacatctttttatttnnnnnnnnnnnnnnnnnnnnnnnnntgtgcccccagatgtcagaatgaggcgactagggcaccatactcactttccacggctgggggaagggggacgcaggatcatcccctcccaaggagatctgtgggggtcccaccgtccatctggacttctcagcctgtttggctagaactcaggcctggagtctgggtctgccccctccccggctccttggggctctctggtctcaggccagctggcgatgggtggctagagtgatgaactcaagccctgtggccacagttctgggagccttcaaccctggctcatgctgccatagtctccacggtgcccttcacagagggcttggtagtggcagaatggccatgcccaggtgtgtgttgagaccattgacaactgctcgtgtacaggcaccccacagccccagagcatggggcacagcaggcatgcgagtgagacgatcaaggggaataaagtcagtacaaatcgtaaaaaaa

SEQ ID NO: 88226 - DNA, 1116 bp, Homo Sapiens
  misc_feature (79)..(113): n is a, c, g, or t
aaatgatagatcactataggggctagcgttcattagccgaacgacgagcgcaggagtcatgtgagcgaggaagcggcgnnnnnnnnnnnnnnnnnnnnnnnnnnnnnnnnnnncagtcgacggtaccggacatatgcccgggaattcggccattacggccgggcctcctctacccactaaagaaatgtgtaaacactagcaataatagctttatcttaaactcctggacatactcagttcttccattccactgttctattgccaatacctttggttgttttcttcacactcctcttggcagcaaatgtctgaaagtatttcaattgtgtaatgttaaggagttttttcatagcttcagaaaagagggcagcaaatatgaagccttaagttcaaaataagtcattctacctagaaatacagaccccagagcacattgcatgaaaatacctgtactctgcagttcctcaaagcagtattcttcctgaaaagccaaacaccacacctattttcctatttgctaagaatcagaataagcacgttgtaaatagtatccaaagcagattctaaaatgacatagtaagaagccagattcaaattgtaaccaaagaagacaatagaaatcccactttaccccactgtcatcagttagaacacccttgcaaaaaaactgtaaccacttaagcaattcatctgatcccagaagatcataccttctttggaaagtataggacagatatcagttgggaaacgtcggcgttctgagcaacacaggataaatgtaggagggccttaaaaaataaatctcaattcatacactggagcagcaaaaaactgagcaggaaaggaaacagaatccaaagtcatttttcatatagctgttgtcaaatagtataaccttggtgtcttctttgagttgcctggacagtatttatgaaacaaaaaactaaatgccccccatttggggacggggggaggggttcagacctctaacctggattcagagccttagaggccgagagggaatctggaatctggtattactgagatcctaggtaaaagaaccagcctgcgcagtctttcccacctcattggtccgaacttttatttttaaaccca

SEQ ID NO: 88227 - DNA, 473 bp, Homo Sapiens
gaggctgctgtctgccctctctggtcaccctgcctagctagaggatctgtgaccccagccatgaggaccctcgccatccttgctgccattctcctggtggccctgcaggcccaggctgagccactccaggcaagagctgatgaggttgctgcagccccggagcagattgcagcggacatcccagaagtggttgtttcccttgcatgggacgaaagcttggctccaaagcatccaggctcaaggaaaaacatggcctgctattgcagaataccagcgtgcattgcaggagaacgtcgctatggaacctgcatctaccagggaagactctgggcattctgctgctgagcttgcagaaaaagaaaaatgagctcaaaatttgctttgagagctacagggaattgctattactcctgtaccttctgctcaatttcctttcctcatcccaaataaatgccttgttacaagaaaaaaac

SEQ ID NO: 88228 - DNA, 517 bp, Homo Sapiens
gttccaaacggtctaaccattctctctaatcgaacccagatgcttaagattttcttggcattcagcaagcatagtttgtagggcaggaatctcaggattaacatttacatcctgttgctcagccttgatttcaggaacctttacttcaggcatctttatttcagtagcatttaagtcagacacatcaactgcttcattaacatctgttattggacttaatgtatcctcagaaatgtcaacattatcttcattatacaagtgacgaatcaccacagctttcttctttcctgaggtcataaacctgccactgatatcaacgccaacagcctctgcagatattttctcattgcccaaaggagggttctgacttaccagaactgattttctttctttgttgggatgggaatcttctgaagactgcttaattccttgggctttttcatcacacaattcaaaatatcacaaacaatttggattttccattctgcaaacccacattggataaactgcttttttg

SEQ ID NO: 88229 - DNA, 705 bp, Homo Sapiens
tgcagagtttgattgaatgaggcctttaattcctcttggtaatgcttataaattttctgtacacaggtgatgcacatcttcccttagatttattctcaggtatgtaatcttttatggtgcttcttaaatggcatctttaaacatttcccattttataatcctttgttgctagtgaatagaaatacaactgatttctgtatattggcttgtgcctagtcaccctgctaagctctgtattcattctaataatagacctgtaggttcttctcaattttccaggtgcacactcacatcacctgtgagccacaggcatggtggtgtgtggcaacaacaacattcagacagaaagcctaccatctttttggccaggagaacaagaggacagagctggggcaaccaggactgccaaggggtaaggtgggaacactccaaaaagaaaagagtcagtgagggagaactcaagttctgttcttcttcctggcagcttcggacgaaatcacacaggcatctcccatgcccaccacccgttaggaatgtccattcctgggctgcgtgcgcaggtccagcagccagtctgtgcaggcgcctggcccggccagggagattgaggcagacccccacaagccactgaaccccagtctcaagttttctgcacgacctgtacttcagtcaccaaacactcctcgccgctcgccacggttctcc

SEQ ID NO: 88230 - DNA, 438 bp, Homo Sapiens
agaaccatgcagagtccatgtcccagtgctgtcctgctctggtcttgtgacctggacatgcctcctctagaccaggaggatgggatttaaaagttggggactttagttcacaggttcctcatccactgcttcagcttttccttatccactgcttcagcatacagtggcagtttctgagggcagcttacaggtaaagagaatttaaaatgctctcaagaatttaggctttggtcagcttctgggaaggggagaaatggaagagagtgttgaggaactagttttccttcttggtaagaaaaacagggtgcatgtacaaaagagcttaaggaagttttgaatggtgcataataacaaattctagcagacaagatgagctagttgatgggcttaagaaggatcttgaaaccctgtcacctgactgggcactatatctcacac

SEQ ID NO: 88231 - DNA, 544 bp, Homo Sapiens
ttttagtttacacatgatcctttaatctttaataaacccattatgcagatggggaaaatgagactttgagatactaaagtaacttgcataagacagctcagtcattaagtgcagggatggcatgcaaaccaaatctgacttttaaacgttacttcatcaccacagctggaggtgagctgcatcagtacacaattcccagtgaagacaggaagttacataaggagggagaatttgtgagtgggtgaatagagcagaaggtgactttactaacgtctttcgcgcattcattagccctcagcatgcttaaaggtgaagtttaaggatgattaaaggtgaggttttcttcttaccccacagtagtggctgttgacatttgatatttttgctcttaaaggtgtgagatgctctttgcattacagcctagtgccttacaggaaagaatttcagagaaactaaaattcgttttagtccatatttcaagtagtgtgttttagtccatatttcaagtagtgtgatggtactgcttaacaatgaacagacattg

SEQ ID NO: 88232 - DNA, 549 bp, Homo Sapiens
atggggataaacacccgggagctgtttctcaacttcactattgtcttgattacggttattcttatgtggctccttgtgaggtcctatcagtactgagaggccatgccatggtcctgggattgactgagatgctccggagctgcctgctctatgccctgagaccccactgctgtcattgtcacaggatgccattctccatccgagggcacctgtgacctgcactcacaatatctgctatgctgtagtgctaggattgattatgtgttctccaaagatgctgctcccaagggctgccaagtgtttgccagggaacggtagatttattccccaactcttaactgaaaatgtgttagacaagccacaaagttaaaattaaactggattcatgatgatgtaggattgttacaagcccctgatctgtctcaccacacatcccttcaacccacacggtctgcaaccaaactctaattcaacctgccagaaggaatgttagaggaagtctttgtcagcccttacaactatcatgcgaataaagttaagtcaacttca

SEQ ID NO: 88233 - DNA, 375 bp, Homo Sapiens
ccccctagagggtttcagtgtccgctgcaatgtcccctgctattttgctgacacctaaagcagtcgtgtccttcctcaggagcaaggtcgcaagctgaggagcaccatgctggagctggagaagcaaggcctggaagccatggaagaaatcctgaccagctccgagccactggaccctgcggaagtgggggaccttttctatgactgtgttgacacggagattaagttctttaagtgaagtaagcgttccctttccccttcttatttaagacttcccaccttactaaattaccagcaaaacaaaccactctcctgtttgagtaaaataaaaaagttaatatgtggcctccttttctgaagccagatcaaactgtt

SEQ ID NO: 88234 - DNA, 865 bp, Homo Sapiens
gcgagctcggtccggagacacttacgcgagacatagggaagtactgggctgccgagaaagtcacagagggagtgaggtgcatttgcagtcagctttcgctcaccactaagatggatgcagagcatccggaactcaggagttacgctcagagccaaggttggtggacgggagagggcgagttcaatttttccgaagtcttttctccagttgaggatcatctagactgcggtgctggcaaagacagcttagaaaaacaagaagaaagcatcacagtgcagactatgatgaacaccttacgggacaaagccagcggagtgtgcatagactctgagtttttcctcaccacagccagtggagtgtctgtcctgccgcagaatagaagctctccgtgcattcactacttcactggaacccctgatccttccaggtccatattcaagcctttcatctttgttgatgacgtaaaacttgtccccaaaacacagtctccctgttttggggatgacgaccctgccaaaaaggagcctcggttccaggagaaaccagaccgccggcatgagctgtacaaagcccacgagtgggcacgtgccatcatcgaaagtgaccaggagcaaggtcgcaagctgaggagcaccatgctggagctggagaagcaaggcctggaagccatggaagaaatcctgaccagctccgagccactggaccctgcggaagtgggggaccttttttatgactgtgttgacacggagattaagttctttaagtgaagtaagggttccctttcccctttttatttaagacttccccccttactaaattaccagcaaaacaaaccactttcctgtttgagtaaaatgagaaagtt

SEQ ID NO: 88235 - DNA, 524 bp, Homo Sapiens
gtgccttgagcaggctccagcccaaaggtggcctccatggttaccacttcccactctgctgccctgcctcgctttcctcctcggccttcccggatggatgacagatgtcattcccaggttccctaacactcaagcctagcccctcagtttctagcaagcatcaagcttcactgtgtgcctagcctctcaggagtcagacctgagaagtatagcttggtggaaattcagtggcagggaagaaagaaggaaggaaagaagaccctgagctggattcatacacatcatcgcaattcatccacaccacagtcctgtaagaaggctgcaaaacatacagcagaaaggatggcttgaaggcaattgatgtttgtaaaaaaatccacaacaggatccaagctgaagaggtgaacacgtcagcctggtgggacaattctcagcatgtgcaaacataggtaaattctagcctatgttacattaaaaacaatgtcaccgcattttttcatgttaaagtttttttcaaagctaaa

SEQ ID NO: 88236 - DNA, 574 bp, Homo Sapiens
  misc_feature (248)..(256): n is a, c, g, or t
gctggggtagaaagcactggcgtgttgattttgtcggagatcatgatcgcctgcctggaacatcaatgaggtgctggacatcccaagagtgctggacatgctgaggcaacagagaatgatgctggtgcagactctctgccagtacacatttgtgtacagagtcctcatccagttcctgaaaagctccaggctcatctaagctcccacaatttcttacggggccagtcatgtgaagcgtttacagcttnnnnnnnnngcgcttgcctaactcatactttcccgttgacacttgatccacgcagcgtggcactgggacgtaagtggcgcagtctgaatggcggcacgctgaaggaaacgtgcgaagcacaggctgaagaggggtttctaacctgggaaaggtgctcaaggaggacttggtttcaagggccttgccctgccccggtctgtccggtttgcagtacttgcacacattttggagattgtattttctagacaattctctattttactgaagctatgctgggcaattctggcaatcattaaagtgcatagatttctatcttaaactaaaaaa

SEQ ID NO: 88237 - DNA, 1316 bp, Homo Sapiens
gtatgaagtcgacggcgcgccgaattcggcacgaggctgccgggagagctcgatgggcttctcctgcgcgccgcccggtgtctggccgagtccagagagccgcggcgcctcgttccgaggagccatcgccgaagcccgaggccgggtcccgggttggggactgcaggggaaggcagcggcggcggcggcgggagccccaccggggtctgggactggggaactgcctccggcttcacgatgccagtatggacagaatagcttatgatgcttatccccacccaccacttccgaaacattgagcggaaaccagaatacctccagccagagaagtgtgtcccacccccctaccctggtcctgtgggaaccatgtggtttatccgtgacggctgtggcatcgcctgtgccatcgttacctggtttctggtcctctatgcggagttcgtggtcctctttgtcatgctgattccatctcgagactacgtgtatagcatcatcaacggaattgtgttcaacctgctggccttcttggccctggcctcccactgccgggccatgctgacggaccccggggcagtgcccaaaggaaatgccactaaagaattcatcgagagtttacagttgaagcctgggcaggtggtgtacaagtgccccaaatgctgcagcatcaagcccgaccgagcccaccactgcagtgtttgtaagcggtgcattcggaagatggaccaccactgtccctgggtcaacaactgtgtaggcgagaacaaccagaagtacttcgtcctgtttacaatgtacatagctctcatttccttgcacgccctcatcatggtgggattccacttcctgcattgctttgaagaagattggacaaagtgcagctccttctctccacccaccacagtgattctccttatcctgctgtgctttgagggcctgctcttcctcattttcacatcagtgatgtttgggacccaggtgcactccatctgcacagatgagacgggaatagaacaattgaaaaaggaagagagaagatgggctaaaaaaacaaaatggatgaacatgaaagccgtttttggccaccccttctctctaggctgggccagcccctttgccacgccagaccaagggaaggcagacccgtaccagtatgtggtctgaaggaccccgaccggcatggccactcagacacaagtccacaccacagcactaccgtcccatccgttctcatgaatgtttaaatcgaaaaagcaaaacaactactcttaaaactttttttatgtctcaagtaaaatggctgagacaagcagagaaaa

SEQ ID NO: 88238 - DNA, 683 bp, Homo Sapiens
agaatatctgggcagaggaaatagcatgtaccaaggggcatgaagacacaatagtgcagagtatgttgagaagacaaagtggtgttactggagttcagtgtttgcatgtgaggaatggaagaaagaggcaagaaacaaggttagaaagataaattaggatcagcacctcaaatgccatcctgtgaggcatttgaacttaatccgttcaaaatgtggggagtaagcacactgacatgtcaggatttgtttattaatactctgactttgatggcactatagaggatgagtagagagggaagaaggacacaggaagaggagcttattagctgatgtggctatagtgatggacagagaagagtccgggatattgcagcagaaaaaggaataaaacatagtaatccttgacttcaggagtgagagaaagggaggaattaaggatggctgagggaggcttataaggatgaattcagcctaagcaagtaaaaattccttttacaaaaatatacatgatgccacctaatctggattcacatgctatttcttcaagagctgcagaagaaaaaaaatcaattaaattttactctcccagcttcccaaccaaatggttcctaaatataagactcatctttcatgtttcacaaaacaaaatcatatgttaagaaataaaagtggaagaaattaaa

SEQ ID NO: 88239 - DNA, 873 bp, Homo Sapiens
  misc_feature (14)..(14): n is a, c, g, or t
ctaatcacttattntggtcatcttccctgtcacaatggggcacctggcgctatagacacttgggaaacacacagatctggggtcctacagtgtccaggtgaagacgccgggagtcagagaggaaagtcttttgaagcctccaaaaggaatgcacaggaccccacttgaagaggtggagtgcccagtggcggatacaggccccacacatcgcagcagtaaacagggactccacggtgtccagctctccagcctggggtttctcatcacccagtgattccaaaagaaacgatctacaatggcatgactaagttccagaaacaaataaacaaaatactgagggaagcccattggtcactttgattcttcaaaggtgacaattgtccctccctgaaatcttatgagtgcatgaacagactattctaatgtaaatgaaattcacactaaaactgattgaaagatgattctgtttccaaggtactttgtattctcaaattgcatctgcttaccctggccccctcaaaatggaagagtgatgactatttgtcttcgtaacactgtggggacacagagccttaaatggaagagtgtcaaaagcaacattccataaagggctgtcacttccaattttcaagcgaggttggaaaccaaccatgatgtatgaaacactgttggccaaagtgcacaattagtaatacaaaatgaataatataaactattgtaaatatgtgtagacatcgtggcaatttggacatcaaaaacactgccaaattcagaaagaggaagctgtaaactcatggctgttaggaagcttaacttctgtgtactagaacctatcaaaattaaatttctccatgtcaatccgtccaaacaaaa

SEQ ID NO: 88240 - DNA, 162 bp, Homo Sapiens
cttactcatatttcccactccttggcattaattattcatttgtctctcccacaagaatgcaagctccaagaaaagaggaaatgtttttccctgttgtatccttggcacccaaaaaaccccctggcccatcacaggtgcacaataaataaaagtttgcagaaa

SEQ ID NO: 88241 - DNA, 426 bp, Homo Sapiens
ctgtcaagctgtacacttaaaatttgtgcaccttactgtgtatgagttacgccttttaaaagaggaatggattactagcagtaaacaggagatgcccacatcctccacgaatatgtcagctccaatttaggctgacagacaggctatgtccatggcctaccaccaatggtatggctaaaattccatgtagatttggagtaaggggggaaaaatggagttcagctcctggctgaaataattacaaactgggttttcatcaaactcaatgccggctggggcattagaacgtagactgagctgctggacaattcttcattgtgtagtattgcctggcattcccagcccctgctcagaaatgtctgactgcttcccaatcaccttaagccaggaacaagggacggagcaacattcttcatccccgcctct

SEQ ID NO: 88242 - DNA, 1167 bp, Homo Sapiens
  misc_feature (747)..(747): n is a, c, g, or t
ctggaccggtccggaattccgggaaggagacccatcggctctaccgcctgaagctggaggagctgaccaaacttcagaacaattgcaccagctccatcacgcggcagaagaagcggctccaggagctggccctcgccctgaagaaatgcaaaccctccctcccagcagaggccgagggggccgcacaggagctggagaaccagatgaaagagcgccaaggcctcttctttgacatggaggcctatttgcctaagaagaatggattgtacctgagcctggttctggggaacgtcaacgtcacactcctgagcaagcaggctaagtttgcctacaaggacgagtatgagaagttcaagctctacctcaccatcatcctcatcctcatctccttcacttgccgcttcctgctcaactccagggtgacagatgctgccttcaacttcctgctggtctggtactactgcaccctgaccatccgggagagcatcctcatcaacaacggctcccggatcaaaggctggtgggtgttccatcactacgtgtccaccttcctgtcgggagtcatgctgacgtggcccgacggtctcatgtaccagaaattccggaaccaattcctctccttttccatgtaccagagcttcgtgcagtttctccagtactactaccagagcggctgcctctaccgcctgcgggcgctgggcgagcggcacaccatggacctcactgtggagggcttccagtcctggnatgtgggcggggcctcaccttcctgctgccttttcttttctttggacacttctggcagctttttaacgcgctgacgttgttcaacctggcccaggaccctcagtgcaaggagtggcaggtgcttatgtgcggctttcccttcctcctccttttcctcggcaatttcttcaccaccctgagggttgtgcaccacaagtttcacagtcagcggcacgggagcaagaaggattgaggctgggccttcccctgccggcccagaggggcttctgtcctgtgtgttgtgggaggggatgggaggcgcccctcgagtgtgcgtgtatcagggggtctcttctattctcccttgggttttatgggcgctgtgggccctgaaggaagacctgggcccagtgccctcaataaagagaggccccagaggtg

SEQ ID NO: 88243 - DNA, 925 bp, Homo Sapiens
  misc_feature (352)..(360): n is a, c, g, or t
gcggaaatgtgggaactataaatcactaggcggttgccttgttttgacttgagacacccaagaggaacagtcatgtttctcataaaaatcagtgggatcatttttgaattccatcagcctttgtatgtgagtgcaaaacattttaacagttttctcaaatcaacaaacagccttctcctatagctgtacttgcccccctccccaaaaaaccatggatgagaaagaaaggagtcaggggcctgataaaaaatacagacttaatgagcaactcaagatgagaaaactgctctttttccaaaaattaccaactgctgattacagctgaaatggaaccaaatgtttgttttctgannnnnnnnnaatagctgtttaacaaattagtctttgctgagtaaaaggggaaatttctaaacctagtgcactgtttggccagtgtccacagcctcttttctggctgtgttttagagaaagggatttgagctataggctcgcctcctgttctcattctcacaaagctgccttgactgtggcctgcaaccacgagtgccatgctttcaggtcttctgtggcctactggccttcaagacagaggcctgccccagtgtgccacagatccatgtggatggagcctccttcagaggggtcacaggtctttgagactcagcctgggctttaatgtgtaggaaaagccttctggccacccagagagccggagccctgcttgctgtattctctgctcccttcttcctgctgggttttagccataatagggcccggtacgatttgggagtgacatttctgtaaagaagaggaaaaatcatttttctataatttgtaaagttgtgaaagagccactaccacagtttttacattgattattggaacatttcagaataaataaagatattttcttaatgaaaaaaaa

SEQ ID NO: 88244 - DNA, 549 bp, Homo Sapiens
tcagaatttgagagcttccgagtgtttcaggacattaggcttcacatcagggaagtgggagctcaattggtcaagaaagtcaatgccgtctttcagctggacatcaccaaaaatgggaagaccattttgcggtggaccattgatctgaagaatggttctggggacatgtatccgggacctgccaggctcccagcagacactgtctttacaatcccggagtctgtctttatggagctggttttgggcaaaatgaacccgcagaaggctttccttgccggaaagttcaaagtgagtggcaaggttctgcttagctggaagctggaaagggttttcaaagactgggctaaattttaagcatgcaaaaataccaaggaagaacttctcttcgatgataatgtcgagtggaaatcatgcttaatctgaagattaaagtaaaaagtatccaatatttttactcaaattcttcctattcaagtttaattgattttcctgttgatgggtaaacctccagggagggttctgaagcagtaaaaagagatgtagtgcaaa

SEQ ID NO: 88245 - DNA, 698 bp, Homo Sapiens
aaagaatgttttctctcttcaagattctcttttgaaagacatctaaaaagatcaggaaaagaagacctacaccagcatcacttgtgattctcaatgagcataaccccccagaaatagatgacaagagggggcccaacacacaaggggaattacagaatgcatcccctaagcaaaggaagcagagtgtgtacacaccacccaccataaaaggggttaagcatctgaaaggccagaatgaatcagcattccctgaagaagaagaaggcaccaatgaaagagaggagcagcgggaccattaattactggtctgcagcaagaaggcttcttggaaataactgaactattaacttttctgagtataccatggaattccactgcttgacttccagaagcatcctccatctctgcaccccacactcatacagtagctatgcacatcctggaagtctccttgactgaactttagaactaagtacacattgttccacatcacttataattaaagaataagcatttattttacagtgattcttctttttaactatgtaaaaatttgcatacatgtgactgttctaactttaatactgccagagcttaatccttgatgtcctactgataaggtttgcattctaacaacacatgtaaataacatcactttaagagtaaaaaataaatagtaaacacatttagacatgaaa

SEQ ID NO: 88246 - DNA, 1020 bp, Homo Sapiens
ctggaatggatggtgactgtgtatatgaaaacttggccttccaaaaggaagaagacttggaaaagaagagagaggcctctgagtctacagggacgaactcctcagcagcacacaacgaagagttgtccaaggccctgaaaggcgagggtggcacggacagcgaccatatgaggcacgaagcctccttggcaatccgctccccctgccctgggctggaggaggacatggaagcctacgtgctgcggccagcgctcccgggcaccatgatgcagtgctacctcacccgtgacaagcacggcgtggacaagggcttgttccccctctactacctctacctggagacctctgacagcctgcagcgcttcctcctggctgggcgaaagagaagaaggagcaaaacttctaattacctcatctccctggatcctacacacctatctcgggacggggacaatttcgtgggcaaagtcagatccaatgtcttcagcaccaagttcaccatctttgacaatggggtgaatcctgaccgggagcatttaaccaggaatactgcccggatcagacaggagctgggggctgtgtgttatgagcccaacgtcttaggatacctggggcctcggaaaatgactgtgattctcccaggaaccaacagccagaaccagcgaatcaatgtccagccactaaatgaacaggagtcgctactgagtcgttaccaacgtggggacaaacaagggttgcttttgttgcacaacaaaaccccgtcgtgggacaaggagaacggtgtctacacgctcaatttccatggtcgagtcactcgggcttcggtgaagaacttccaaatcgtggatcccaaacaccaagaacatctggtgctccagttcggccgagtgggcccagacacattcaccatggacttctgctttccatttagcccgctccaggccttcagcatctgcttgtccagtttcaattagaagctggctgttgaataactcaataaaataccatacccttgccaaa

SEQ ID NO: 88247 - DNA, 632 bp, Homo Sapiens
  misc_feature (166)..(166): n is a, c, g, or t
aagaatgcatcgtgtggtttggagcaagtgctggcagccgagggcctgggctgtctgactacactgcttctcagtgacgtgagtgtggacagatcgacggacctccgggccgtcacccataaggcaggggcagtgcattgtcgcagggattagatgacacaggcgngtgtgggcttctcagccctggtctggtgcatagtgggcatttggtgaagggtgtagctgttgcttttctggtgccaggtggagctctggctggattccaagcgtgtggcaagggtgaccaggcacgcacctgcagctgtcttcatccacgacctgcccttcctcctacctaaacccagctccagtttcagagcccaccttttccttcctcctcagagacctctctccccttcccactggtctgttccctctgcctcagtctcccaaacagccaatgttttcctttagagatgttctgaagcacaatgttgacaagcctagactctggggccacactgtctgggtgtccctcctctgccccttacctcctgtgcgatcctaggcaagttccttagttgttctctgcctcagtttcctcatctgcgacaataaagagcccactttatccggtggcagtaaagaccaaa

SEQ ID NO: 88248 - DNA, 389 bp, Homo Sapiens
ccggagcgcgggccaagctggagatggatgatgctgacccggaggaaagaaactatgacaacatgctgaaaatgctgtcagatctgaataaggacttggaaaagctattagaagagatggagaaaatctcagtgcaggcgacctggatggcctatgacatggtggtgatgcgcaccaaccctacgctggccgagtccatgcgtcggctggaggatgccttcgtcaactgcaaggagggacatggagaagaactgtgcaagagctgctgcatgagaccaagcaaaggctgtaggccccactggcccaccacagctgccatgccaccctctgcccgtatgaagaggtcactgggggatggagctggcacccacatgaatagctgtatgcac

SEQ ID NO: 88249 - DNA, 561 bp, Homo Sapiens
catagtttccactagaactgggaggcagcagtgcacagtgtagctgattgtactgcggcctgccccgagggccctgtcttatgctccacctcggaggccagcaggaatttcagtatttctgtgaaaactgctttaggttatttctcctcttattccaatcagtttgccaaagaaacagctcataatgtgacaggagccggtccctcagcaacctagaagggatgggatagaactgttatctgagtgtcagatagaaaatatacgagcagggaggggtttcttggcacttttggcaaacattggacttctgcctggtaaacagatctttttatcctttctgttctgaaaattcctccttctccttaaccaagcctctgaggacagtaacacccaaagcattctattccaacacctgtctcccctggtatgtctctgggttggtggaattagcatagagattacttttattttcagggagggccgtaagactataggaaattgactttcaaaaagtagatgattgtgattaaataaaatacaaaatgttctattaatctaaaa

SEQ ID NO: 88250 - DNA, 406 bp, Homo Sapiens
aaaaaggagaaagcagtttaaccacaaacagtgaaacagagctggcagacgcctgaaactccatggaaccatgcagctgtaccctagggctcctcccaggaaaagagagatgtcaacgtggcccaaggtgtcctgaagcactgggattggattaactcgagcgatggccttcccagccctccgtgctgcagagcctctgctcgctaggctgccttcatctcactctgtgtgctgtgcctgtgcacctgtcttgtcaataactgcatatattgtgttgcgttgcctgtcttgctggataactgcatatattgtgttcagttgtgtatttgttttgctttcagtctatatacagttgggtttccaacctctgattctggaataaacagttgcagcgtgtctgagtgaa

SEQ ID NO: 88251 - DNA, 487 bp, Homo Sapiens
aaggctgtatacaaataccttgaataggaataaaattaaggggtctgtacctgatactttaaaaaatgcacacctgtgggaaagaaccgaagaattttcttaaggcttattttaatgatgtttagaagatgttttcctgatcagtgtgatgaagtatagtgttaataaaacatagtgtacagtgtacagaaaatgtaacacaacattgaaatagtgtttagctggaaaatgtgatccagcttgttggaaccctgaaacgtgctgtggtatggctttgtgcagtgccttagtgaacagtacttttctcctcctccgttagctgctgattttaaaactttgaccaaatgtcacatgtaagaggatctgagaaacaaagactgtgattgttcaaagtaaaatcttggaaggcctgctgggaaaattattaatgtagaccaatataatgctacttagaaagtgaaatccgcctttgtagaatcctctccgt

SEQ ID NO: 88252 - DNA, 565 bp, Homo Sapiens
atttgaaatttatagtacaataagttatagaaataaggggggggaaaaaagttattttaaaagagaagatgaattccctatacaaaactatcagtaaaaagactaaaacacaatgatttcagagatacctatccaccagccttcagaaactcaggatacaagattcactaagttgtacaactgagctaacctaacagttttaatatataattttttaaatctgcagctgttgatagctttagctccttaaaaacaaattcttgtagagctcatattaactgttacatgccaataaaaatacacagcccagtcctgaagcttacttttgccacataaacataagcttcaatttcaattttcaaaattatatttagaatttggcaaatacagttaaaatggcaggtaaaacatccctgcttgtagagtaaatacaatttaattaaagcatagcacattttaacaaaagttaaaatctgtttcactatgaaaattttagcaatgactttttgtagtaacattaattaattaaaactagcctttatttttaaatgctatgttggcggcc

SEQ ID NO: 88253 - DNA, 497 bp, Homo Sapiens
accaaatcttgaatataaagaactttgtcatttggtatctgaagaggaagcatttgacttttttaaatatttggatgcaaagaaagaaaattccaaatttacctttaaacctgatacaaacaaagaccacagaaaagctgtccaccattttgtcaacaaaaagtttggaaaccttgtggaaaccaaatctttttctaaaatgaattgcagtgctggtaatccgaatgtggtggtaacagtaagatttcgggaaaaagcacacaaacgtgggaaaaggcctctttctgaatgccaagaaggaaaagttatatatacagcttttaccctacgaaaggaaaacctggaaatgtttgaagcgattggttttttagctatcaaacttggtgttattccttcggattttagttatgcaggccttaaagacaagaaagccatcacctatcaagcaatggttgttagaaaagtgactccagagaggttgaaaaatattgaaaaag

SEQ ID NO: 88254 - DNA, 555 bp, Homo Sapiens
  misc_feature (186)..(222): n is a, c, g, or t
ctggctgggcccgctccggagaggcgtctcggtacctggcaggcggcctgctactcggagcccgctgcggggcggcggcggcggggacatgcacgtgtgagatgccgcctgcgcaggcgctggttcaggactcacacgccgcgctgaggcccgcgggcccgtcatggaggcgcccaccgtggagannnnnnnnnnnnnnnnnnnnnnnnnnnnnnnnnnnnntgccctggttccgttgcgcgccccggatgtggcgcggctgcgcgaggagcaggaaaaggtggtcactaactgccaagagagaatccagcattggaagaaggtagataatgactataatgcccttcgagaaagactcagcaccttgcctgataaattgtcttataatataatggtaccatttggcccttttgccttcatgccaggaaaacttgtccatactaatgaagtcactgttttactgggggacaactggtttgcaaagtgctcagcaaagcaggctgtaggtctagttgagcaccggaaagaacatgtaagaaaaacaatagatgactt

SEQ ID NO: 88255 - DNA, 583 bp, Homo Sapiens
agataaattggcaggcaacccatgtgtatcagtatactcacaaatgtggagtattaggatattaggataaaatatgctcagagttgagagaatttaatgaaacccatgatacttaggtaggacaaatgtcttcagacagagaaattaaggtttactatcacatatgtgaaccctgaaagagccagtctgtaaagttggatcctgagtggctaactgggcctaaattcaaaatagagtgaaatgaccgtttgctgactagaggtcacacacatagtctgtgttcctggagaacccccatgctcacttaactttgggatttgtatagctgtctgttcctatttatgccacctgaatcaaccaatggacaatgacctgcattggccaatcagaactcaagaagcatcaaccaattagaactaagcaagtttgcattctttatccgcataagcaaaccaaagtgggaaaccgggcaggcactttccctataaaagacaggccctctctttgttctcttgaaacatggctgcatatcccacccttccaaactgttagctgtaataaagtcactatatccccttttaaa

SEQ ID NO: 88256 - DNA, 484 bp, Homo Sapiens
cgctgggaactcctgagcgcccccgctcccagcctttgtgccctccatcatttcctggccccagaccccctaccgaccttctctcttggagcgcggagccctcttcgacgcattccgcaggaccgccccttctcagctgctgcccagagcgcccccatccgtcaagaaggcccactgttggtgcttggttcccatctgtcacctagcgcccccagtgcagagcccagcataacctagagcccgctgtcaacagcgcccaccgagggctccccgcccccacgcagcaccagcgccaccgcacacctgactctgtccgctcacacagcctcaccttcacctcttgggtatttcagatccgctctggcccagtgggcagaggcatcgcctagagaaaataacctcagggttccctcatccctctgacaaacctgcctctttccctgaaaccattcaataaaacctctgatcaaagtgtcaaaaaaaa

SEQ ID NO: 88257 - DNA, 461 bp, Homo Sapiens
acaggacgaacaagagggaaacaaaggcaagaggaagaagggacttgctccattctaatcagccttattgcacccctcagagatcacagcagcagtcagtgctctcctcagagatctgaattctactttcatgcggcccctcccctgagctcctgagatagccaatgtttgagccacctcctcagaagtttgagcctcaacaccgtgggatcccttctttgtgctccagagatccagtaacagccagccatcaccctctcttcattcttcataggcctgaactaaggtgttcagggccctccttcaagcttttaggttctgatgactccaaccacttcttttgttccatcctttcctagctctaggaatggtagctgctacctgcagtgattacctgttaccttttataattccttttgaccaatttcccatattaaaatatttctcaataactaaaaaaa

SEQ ID NO: 88258 - DNA, 354 bp, Homo Sapiens
ccatgtcttggagcgcttgctctggagaagccagaggtcatgtcgtgaggatactcaagttgccatttggagaggtgcacatggtgaagaaatgaggccttctgccaatgaccatgaattctttggctattcttaggccttttctcatccagataagatactgaatcagcttatcaagggccaacttattgaattgttattgaatttgagatgaatcaataaagagaaaggagagccatgaaattagaaaaactaccctaattaagtcttcccttttaaaagtcaggaaaactagcattacttgaaaatgagcaccaaaaaaactaaggtcaaatcccaaacaaagtcattatg

SEQ ID NO: 88259 - DNA, 539 bp, Homo Sapiens
  misc_feature (52)..(52): n is a, c, g, or t
ctctgaaattttgattccaggcaatccatggggcagactttttatccttatntgacagatagagaagatgtcatggccctgtaagtcaagagaacaggatggccaaaggcaagaagaaaaagacactggaaggggcccctttctccttcagagagcctcgttcttacacaagggccaagaaacaggacatctaaggacttggaagccccaggcacgtgacccccggcctctctgttctccagctaaggaacgctttatggccttcgcatttattcatgtatttcctggacctactttgtactaggccaagggaagtgagctgaataagacccagcggggttgagagacataaaaatggcttattgaaattcaatactccaagggctggaagagatggatgagtagcgagccggaggagcacaaaggcaggagtcccgctgtctgcctagggaatgcttgaggaaataagaatagcccacatttattaagcacacagtacaagcaagcactctattaaatgccttacatgatgtaaaaaa

SEQ ID NO: 88260 - DNA, 634 bp, Homo Sapiens
  misc_feature (555)..(555): n is a, c, g, or t
ccagcgagaattaatacctggggttggtatggcagggtatgtacagggggaaccccccgcccctgtcccaccccctctgtcaccaaccgaggcaggggggaggttgaggttccccagctggggagcaatggcttgtgagttctgaggatgggggagccaagtcctggcgtttgctggtgatgaagatgtggtgagctgggcagaggggtgtcttgatgaacacgaggcccccaggacccatcctgagacccaggaccaggggcctcactcagttcctggcctcggcctctgacgtcagcccaggctgtgggagcaggcagtccactgagggcccaggcctctgtccaaggagtcgctgcctcctccctccccgtcccccagggaaggtccccagtactgcccgggagggcaggtgggggcagggctggtgcggggtcacatggtcggtagaaaggcagagaaaagccggggcggagggcgagggctgtgtccatgtggcgtgggcggtcacggggagtgggtggccgggctgcttctgttggagctggggctgangctggggctacagctgccctggggggggcccagccactaccgtctcgctctcactcctctgctgttcgctacgaatgtc

SEQ ID NO: 88261 - DNA, 312 bp, Homo Sapiens
tcactgttcaagtctcttccttctcacagccacttcagacgttagcctcaatcttggagaactggtgaggccagggaccccaggacacgtgtggggatgtcaggcagggcctgagtaaaggtcaaaggactccttaatttttaggagaaaatatattctagcagctctcaggtctgaaagcagtgagttaatactcaagtcttcaaacataaaaagtgtcttccagcgacagattactctcataaaaaaaattgtctttttaactttcccatatcaccaaaaatgaaaacataaagataaaagatgctcgcc

SEQ ID NO: 88262 - DNA, 1090 bp, Homo Sapiens
cggtgccggagcagcgggcggcggcggaggttgcgcccgggagcgctcttcgcttccctcggggtcttgctcggacctcggccaccgcctgggatccccaggactcgtgcgtgcagcatgggcggcgtcggggagccgggaccgcgggagggacccgcgcagccgggggcaccgctgcccaccttctgctgggagcagatccgcgcgcacgaccagcccggcgacaagtggctggtcatcgagcgccgcgtctacgacatcagccgctgggcacagcggcacccagggggcagccgcctcatcggccaccacggcgctgaggacgccacggatgccttccgtgccttccatcaagatctcaattttgtgcgcaagttcctacagcccctgttgattggagagctggctccggaagaacccagccaggatggacccctgaatgcgcagctggtcgaggacttccgagccctgcaccaggcagccgaggacatgaagctgtttgatgccagtcccaccttctttgctttcctactgggccacatcctggccatggaggtgctggcctggctccttatctacctcctgggtcctggctgggtgcccagtgccctggccgccttcatcctggccatctctcagggctcagtcctggtgtctgcagcatgacctgggccatgcctccatcttcaagaagtcctggtggaaccacgtggcccagaagttcgtgatggggcagctaaagggcttctccgcccactggtggaacttccgccacttccagcaccacgccaagcccaacatcttccacaaagaccagaacgtgacggtggcgcccgtcttccttcctgggggaagtcatcccgtcgagtatgggcaagaagaaacgcagatacctaccctacaacccagcagcacctgtacttcttccctgatcgggcccgccgctggctcaccctgggggaaactttggaagtgggaaaatcctggcgtacattgctggtggtggattgcaaagggggcgggaattgcttctgggggcggcccggcttctatggcccgctttctttcttatccctaccctcccttttca

SEQ ID NO: 88263 - DNA, 472 bp, Homo Sapiens
gccaagtcctggacagtctttaggccatgttggaactacatttggaaaggtggttgttaaacatttcccagcacacacctggatctgcatctgctgtgtcaattgaaccactcactggttctgtgacctcagttcttcgtagactctggaatggagctggaagctgtcatcctcagcacactaacgcaggaacagaaaaccaagcactgcatgttcccacttataagtgagagctgaacgagcagaacacatggacatatgaaggggaacaacacactctggggcctgtgaggtgcagggagagcatcaagaagaacagctaatgggtgctgggcttaatacctgggtgatgggttgatctgtgcggcaaaccaccatggcacacatttacctatgtaacaaaccttgacatcctgcacatgtaccccggaacttaaaaataaaagttgacaaaaagaagacataacttaaa

SEQ ID NO: 88264 - DNA, 771 bp, Homo Sapiens
caagtaggaaagatttattggagctctcactgccttctataaaacctgctgtttggtacccatggaataccaaattctcacaactgctaggccactcgctagtgctgtatatccatacaattctgtcccagaccctgccttgtatgcctagcaacatgtgaagatttctatttctaaatccagtcattccagttgtacttattactgtcattatgcagtctcattaaatattattaaaagcaattattatggatatgaagaacaaaagatctacttcctctacaaaaaccaaatcaaatgcattgaaaagagacaataaagtcaggtcaccttaaaaataaatactgtcatcttaagtttgaccaagacaaccataaaagattgaggaaggaaatcagatcatttaaaaatgggaagaatagtggtcttagattgctttgtaagtttctgtaagttcctccttcacctaagaaactgaagcttcacatggccaatgatgctgtgtaggtgtcacttgtctgtgagagccaatgaagaacattaatcagaagaaccaaactcaagaacaaggtcatttcctgcttcacaagggccatctttactttgaaagatacagaaagactgtgtatatccttgcttgtgatcttcccaatcagtagcatctgtttctaggtcagatggcatacaagttcctcctctgctaagagttactgcttttgtgcctccccaaaaagatataataaaaataagattgaatatggtcttttaaaa

SEQ ID NO: 88265 - DNA, 422 bp, Homo Sapiens
ctgagacttaggttcaagtgcatgagtcacaatctcaacagtggattgcatcctgccatgagagccccaatcccttctccaagctgtgttccagtagaggagtcgcaacatcaatggtgtgctgaatcctggttggagagttcccacttcacctgtggactggatctgtatataagaggagagatgtcgactctcatgcctgggcttagggcaatgggcatgatcctacatttgggattgtagcaacaactcttgactgcccctgggtgtgagattcagaacctcaattgtgacctgtgtacacttgggcatgtgacaatttctacttttggctgtgtgttcatacaagactctcaatctcacctgtgttctgggccctgttattaaactctctgtagccactccggggtttattccataaa

SEQ ID NO: 88266 - DNA, 1824 bp, Homo Sapiens
  misc_feature (1696)..(1696): n is a, c, g, or t
tccaaggtagcgaggcctgggtggcgaattccgcacgaggggggtctcgactgctttcggcttgctcggcggagcaagatggcggacatctccctggacgaactcatcaggaagcgcggggcggcggcgaaaggacggcttaatgccagaccgggagttggaggtgtccgatctcgagttgggatccagcaaggccttctcagccagtcaacacgcacagccaccttccagcagagatttgatgcccggcagaagattggcctctcagatgcccggctcaaactgggagtcaaggatgcccgggagaagcttttgcagaaagatgcccgatttcgaatcaaagggaaagtgcaggatgccagagagatgttgaactctcgcaagcagcagaccacggtgccccagaagccccgccaggttgctgatgcccgggagaagatcagcttgaagaggagttcccctgctgccttcataaacccacccattgggacagtgacccctgctctgaagctcaccaaaaccatccaggttccacagcagaaagccatggcaccacttcatccccatcctgccggaatgagaatcaatgttgtcaataaccaccaggccaaacagaatttatatgacctggatgaagatgatgatggtatagcttccgttcctactaaacagatgaagtttgcagcctcaggcggctttctccaccacatggctgggctaagcagttccaagctttccatgtccaaggccctccctctcaccaaagtggttcagaatgatgcatacacagctcctgctctcccttcctctattcgaacaaaagccttgaccaacatgtcccggacactggtgaacaaggaagaaccccccaaagagctgccagctgctgagcctgttctcagcccattggaaggcaccaagatgactgtgaataatctgcaccctcgagtcactgaggaggacattgttgagcttttctgtgtgtgtggggccctcaagcgagctcgactggtccatcctggggtagcggaggtggtgtttgtgaaaaaggacgatgccatcaccgcatataagaagtacaacaaccggtgtctggacgggcagccgatgaagtgcaaccttcacatgaatgggaatgttatcacctcagaccagcccatcctgctgcggctgagtgacagcccatcaatgaaaaaggagagcgagctgcctcgcagggtgaactctgcctcctcctccaacccccctgccgaagtggaccctgacaccatcctgaaggcactcttcaagtcctcaggggcctctgtgaccacgcagcccacagaattcaaaatcaagctttgagcaggggagtgaggcagccagaagtgggggcagaggagggtggctctgtttccccaaggcaaagcttatgaccaatgggccatcggactggagacccctgattgtgggaagggttgccagggataaagagcttcctcactggatgggacccgcctttctgtgttgtgttctgccctgtgctcttctctctacgttaacgtttccctggagtatgtttcttcatctcatcgccaagggtagggcttgtgttttttcagtgtgtgccctccccgagcctcagccccaagctgatttcttatctggaaatggtacactgaaattctctggggtggctttcttgtggcccctgggnatgcaccggtggggggctgtctgaaggaccctgctttttcccaggggccgaagggctgccttttcctttgtgtgaattaagcttttcaacaatggaaaggggatggaaaagcccttggtgtcctggag

SEQ ID NO: 88267 - DNA, 606 bp, Homo Sapiens
gagaattgagggtccagttgggagaactattagtcagttcttttatatgctgataaatgatccctcgagttagttagtattctgtccagagtgtttagctcactttcttagcagtgtgtaagctttctccatgtcagaagcaagcctgctctttgataaatctgtcttcctgaaaatctaaatcatgcttttgtctttagatctacacagaaatgaccctccttggatcagttttctttccagtctaatcatctttggaactaaaacttgttctaactcgtctcttggcattcagctactcctagatcttttggttttatcccctggcctcagagccatttatattcccagagtaggcagtacaggatctcgtgttgatttgctgtggttacccagtgtcttctctacatggcataaagcggcaaagcccaccattaggtgaggcggtcccgagttgaggtagagtggggcagaggaagatggcagtgaatatcaaacagtagaccgccatcaacttctaacagccagtacacacactgtttcattttgaggtaacgttcagtcttgcattttgtttaaatattgaaggcaaaaacaaagggctag

SEQ ID NO: 88268 - DNA, 517 bp, Homo Sapiens
  misc_feature (504)..(504): n is a, c, g, or t
gcggccgcgcgcggggactggcgaccctgaggtagcggccgaacgggcccgcccggccatccctgtggggcccacagccatctaggtgcagacccgagccagttgcgcggggtcggtcgcgggggacggcttcggccttttcggtccggagggaccagggcacgcgctgcgacaggactgcggcggcgcgcggcctgcctagctcccaccccggcatcgaagccgcagctctcgggcccacctccgcatcctcaggggttcccgggggctgccgacaggttcctgaccagcgagcgcgcccccggggcaagcattcttggcgggcagaagcctgggagcggagcacagcggtgcaagggaaccgtgccaggcgggaagggcggaatttgcggggaacttggagcgcgctggcctcttcccggcagtaggaggccttcttccctgcccgcccgattgagggctgctgggctggctcaaactggactgcacggtccatcagcctgngctcaccgagtct

SEQ ID NO: 88269 - DNA, 403 bp, Homo Sapiens
tttgttgattgatgaaagaagggcaggggagaggggagatggtgaagcccccaaccctctcaagccccttccaatgcagaagccctgcctgacttggccctagctctgggcttagccattccgtccgcaaggatttctggagcagggagaacgagggtcaagactgcaatgaccaagacagacacacacaggccctacccaccctcattcgagacaaagtcttgaggggatgccaccactggccaaagatatcccccacatcagtcacacacaaaccttattatccagcaggggcatgtactaggtgaagtgcgtggggccacgaggctgtgacagaccctgacccgtgccgtggggaggtggtgacaacagagcagatgccaaaacagctaaggaatggtta

SEQ ID NO: 88270 - DNA, 708 bp, Homo Sapiens
gcggccgccacgaagcgcccagggggcaggccaaggccacgctcctccgggtcagcggcagcgacgccgccggctacttcagggtctggaaggttcccaagcccaggagaaagccgggacgcgcgaggcaagaggagggcacgcgcgctccctggaggaccccagccgcgccccggagctcccggaggcgccgccagccccttcgcaaggcggccaggaaggccagagaagtgtggagacggaacgcgagggcgaaagccaaggccaatgccagggcgaggaggaccaggagggcaaggccgagagccaaggagccgccgtgtgccagagccaaggaggaagcgggagcgacagcggcagacgaggggcgaggacaggccgtgaaggaagacaccacgccgaggtcagggaaggacaagaggcgaagctccaagcccagggaagagaagcaggagcccaagaagcccgcacagcggaccatccagtagccaacgcgggctaaaaccgaccggacatctagcgggcaggggaagactccactaaagacttccacaaagacctcccctaaatctgaaggtcttcctgatccagttgggaatgcatcttgtgggagcagcttcactcccaccacggaccaatgcctttcccccataggccccaagaagagcggctgtcacactcattgaaatgaaatggacctctagaaaa

SEQ ID NO: 88271 - DNA, 427 bp, Homo Sapiens
gtcctcacctcctcctccctgagtggcctggtgggatggaaggtgtctgtggccggctgcccagaacaccaagaagggccctcttcctccttgaacttgagccagcccctggcgtctttctcggggccagagctttgcctctaaatggtctttgtttgcagacgatctgctgtgcagatcatgaaccgtcgccgcagtgccagacagactcttcatccggaccggccgtccccactgggtcccctcaggaaagcgcagaagccggggaccccaaaccgcgtccagctcctcccacccgcccttctcggagccgcgcacttggtaacttgcgtgtgaagaactcacggccgtgttgccaggaaactgcggggagcagcctttgtggtctcacatatgcgtaacataataataaataacggttaacgtg

SEQ ID NO: 88272 - DNA, 644 bp, Homo Sapiens
gcggccgcccgggaaccccactacagacatagcggtcagggtcctcctcaccgtcctcctcgttctcctggcttctccactgggcagtattctctccatcctctgggccctgcctgccctcctggcaggagcgcggcgtggggctctcggccgacattagggacgtccgctcatcacacacttcttcctcgctgtcagaggccatgaatgtgagcatagccctgcctctggaagcaccacgaacacttggggccgcagagaggtctgaatcccggacacttggtttcttcttctcagcaggctaaatgaatgatgctccctggctttcaaagagggcagcgctggtttttaacacgtcactttctatggtcacacagctccctcacatcactctcctgacgtctgagaagtcccacgtcctcgctgggcgaccttgggaaaagtcactttagctctgtggcctcagtttcttcatcagtaaaattcagatggggggactagcttctgtctcaggttccttcagctccgagagcttgcttctggctgtctcctcactgctgcgaattgcctgctctgccgccgcgccctcgtgccgacttcgccacccaggcctcgctaccgtaaaaacccgcttatagttactg

SEQ ID NO: 88273 - DNA, 704 bp, Homo Sapiens
  misc_feature (537)..(537): n is a, c, g, or t
agctgaccctcaaatactgagcgaagcacgtgatcatgctgtttgtgcctgtcactctgtgcatgatcgtggtggtagccaccatcaagtctgtgcgcttctacacagagaagaatggacagctcatctacacgccattcactgaggacacaccctcggtgggccagcgcctcctcaactccgtgctgaacaccctcatcatgatcagcgtcatcgtggttatgaccatcttcttggtggtgctctacaagtaccgctgctacaagttcatccatggctggttgatcatgtcttcactgatgctgctgttcctcttcacctatatctaccttggggaagtgctcaagacctacaatgtggccatggactaccccaccctcttgctgactgtctggaacttcggggcagtgggcatggtgtgcatccactggaagggccctctggtgctgcagcaggcctacctcatcatgatcagtgcgctcatggccctagtgttcatcaagtacctcccagagtggtccgcgtgggtcatactgngcgccatctctgtgtatgatctcgtggctgtgctgtgtaccaaagggcctctgagaatgctggtagaaactgcccaggagagagatgagcccatattccctgccctgatatactcatctgacatggtgtggacaggtggcatggcgatgctggacccctactctcat

SEQ ID NO: 88274 - DNA, 400 bp, Homo Sapiens
ttttactttaaaaaaatcaattaaaaattcaaagcttaataaaagggctggtctgaaagactggattcttaaaataattgcaaaaatttcaaaagcaacaaggaaaaaagatacacaccaggggcccagagaggagggcctggaaccacagctcagctttctgtcctgctgagaggccagggttcccttaattcgaccaaccttggacatggcttagatgctgcccacagtgggtttgtctgtctccatcagtcccattcccccaggaaatcaagaacaaacaaacaaatgtaggaaatgggtaacagagcaatgcacctagctcagagcccaggattttaaggatctggtaacagtgaccatggcaggtactcacctccctgaaaaagggtggcaggtg

SEQ ID NO: 88275 - DNA, 523 bp, Homo Sapiens
ggaccacactgatcctggagaaaagggatggagctgaaaaagatggaatgcttgcagagcatgacctgaggagggaggaacgtggtcaactcacacctgcctcttcctgcagcctcacctctacctgcccccatcataagggcactgagcccttcccaggctggatactaagcacaaagcccatagcactgggctctgatggctgctccactgggttacagaatcacagccctcatgatcattctcagtgagggctctggattgagagggaggccctgggaggagagaagggggcagagtcttccctaccaggtttctacacccccgccaggctgcccatcagggcccagggagcccccagaggactttattcggaccaagcagagctcacagctggacaggtgttgtatatagagtggaatctcttggatgcagcttcaagaataaatttttcttctcttttcaaaaatgtataaaaatcattatacatagcattaaagaaacatttttgagaagtacaaaa

SEQ ID NO: 88276 - DNA, 945 bp, Homo Sapiens
  misc_feature (466)..(551): n is a, c, g, or t
caataatgctcagtgtccacaacccccggccctgcccacacccaagggtggcatgaacacctacagggtgcaacttctaaggtcagatttggaaactggaccttgggaagattgttcatagtaatagattgcaaatactcgattccaggggctatggacttcctgatagggggaaaccttctggactgtaggagtgtctgatctaatgccctctgactggagaagctgacgaatttggtcagaagcccaaagatggggttagggccacgggcagccgggcctcccctctctctttcctgtaccgcttgaagccatggcagggaagctctgaatgcaaaggagaaaagaggtgggaaccagaagcccaggcttgctgtgtgtcctcagcttcttctccaggtctctgagcgtctcctgctttaaggtgatttcctccttccgcacctcaactggcctcatcattttnnnnnnnnnnnnnnnnnnnnnnnnnnnnnnnnnnnnnnnnnnnnnnnnnnnnnnnnnnnnnnnnnnnnnnnnnnnnnnnnnnnnnnttctggagcgtctctgggtgtctggagatggaatgtctctgtggggaaggatccctggagatcccatccatgtcatgtggacatcatatcacatgattctgcccttctggtcgcagctgattggaccagagatggacgatggacacccaacttgcaagacaacacagcccatcacctccctggtgcaggggcctcaccttgcaaggagttgaaaagtgcaaagatgtagacggtggagaggcccaacggggtgaagatggccaacccccatgtcacacccaccaggctcgagaggcccagcaggggggaatctgggagaacgaaccacaggactctgcactatttttgcatctttctgttttatctcaaaataaaatccttctcaatcctgaaa

SEQ ID NO: 88277 - DNA, 880 bp, Homo Sapiens
attaaggaaaagctggggccgcagccgggcgatggcggggctctggctggggctcgtgtggcagaagctgctgctgtggggcgcggcgagtgccctttccctggccggcgccagtctggtcctgagcctgctgcagagggtggcgagctacgcgcggaaatggcagcagatgcggcccatccccacggtggcccgcgcctacccactggtgggccacgcgctgctgatgaagccggacgggcgaggtaagggccggcgctcctcctggagcgcaacggggtccgcagccccgttcccaccctccgatcagccaggaacccgctgcttgtggcgctggccgcaggagagaggagcctgtcaccctgtggagaatgcactcccagttctagtcgttgccccttggcacccgccgacactgctagtgccccatcccaaagtgagcattttctttgtgtgtagcacaggatgcggtatttccaaacccctgccctcggtcttttcccacctcaccgctgctcagctctcaaagccctgccgtttcctcctgccttggcttgggaagccttaggaacagaagctccctgggagcacagagcggttttaaactggccaacaccttaacgcccagagccgccctcctctcgctgccactttggaaaataagagactagagattcactggacgcttcctcccggcatcacaagacttgactgctgcttcagttcccgcttgaccttcatactttagccctttaaaggatgttacataataacaattaagagacggcagggccttcaggcagacttctttggagggtgtcaaacgccttgtttattaaagagtgaattttttaattaaaatcatgttttaaaacagaaa

SEQ ID NO: 88278 - DNA, 624 bp, Homo Sapiens
  misc_feature (48)..(150): n is a, c, g, or t
tcagaagtccttaatttaatagatgggattcttctatctgcttagggnnnnnnnnnnnnnnnnnnnnnnnnnnnnnnnnnnnnnnnnnnnnnnnnnnnnnnnnnnnnnnnnnnnnnnnnnnnnnnnnnnnnnnnnnnnnnnnnnnnnnnncattgaaggagagctgcaaatggctcccaggtgagaaggctgagaactgctgacctggaggttgaaatggatggcttctaataaacctttgggcattgctaagagcagaagaatgctcaatccttttaacagtgataaacaaacatctctggggaatggagaacttgtttggtgctatgcagtatacaaaatgttctgttggatcagtttggatcacatttgattgctggtgaagagacctgaaataacgtagatttaagtaagacagtggtgtcctttctctcacataaaagaagtccacagtagggtgttcaggatcttatggagtctcacagtgccaacatcatcccaggctcctttttcctttctaatctgccatccttggcatgtggctattgtcctcaagatttttttcatagttgccattgtacactccagccattacatctgtgagcatcacatattcggacaagc

SEQ ID NO: 88279 - DNA, 598 bp, Homo Sapiens
actttacacatgcaggaatctccacacaaatgtcccacatgtggaagaacctttaatcagagaagtaatctgaaaactcaccttctcacccatacagacatcaagccctacagctgcgagcagtgcggcaaagtgttcaggcgaaactgtgatctgcggcggcacagcctgactcacaccccgcggcaggacttctagagaagcccaggatctgtcccgtgccgccgctgctcccctccccagacacctctccacgtctcctacccagggggtcgcatccctagcccttcactgaccccagctcttcccttgctgcagccgcacctgcagctccagggagttaactcttcttctgggggactgagaactgtagaaagccacacactactacatcccttcacaaagagtatatgctagtttcttgtagatattcacagctcattttagagctctgtacataatgttgtgggtctttgttttgttgttttgtttgctttgggatcttgttggatgcacttagatatggaaaatggaagccaaattttatctttaaagaccgtaccttcaaaataaaactttttcttgaatgtatcaaaaa

SEQ ID NO: 88280 - DNA, 672 bp, Homo Sapiens
tttttttcaatttacagaatttttattgtaaacagaagctcattactagttattacaaactgaatcaactgaaactcaagttagcaatgtgaaacacatttataggcttatttttgtataccataattggtaatttttgccccctcaatacttttaagaagactgttaaaattttcagcatttcaatgatctcttatttgtcaggtttagcaccatgacattctcattcccttaaaaaaacactcattcaaatctaggtagaacttccacctttcatcatcaaaattatcacacaaaatttattttgtttttttcacaatgcaaaaagaagacaaataagtatattttaaaatattatcagcagtccgttttgtgtggttttacatttttctgtctgcccattattaagaaatcttgcattgatttcatttgccccccttgtcattgcaacccgtctctagaatactgtggtaattgaaactagcatgtacctgcgccccctcccggggtcctatctttgtcacccacctcccccatggctactgcttgtcatatctgtgctcagtgcagggatgagcatacagcaggaagaggcgaagtcagcatttcatttacagaaaaatactatctggtggagacatgagttgctgaagatttactgtggataaaaat

SEQ ID NO: 88281 - DNA, 660 bp, Homo Sapiens
  misc_feature (440)..(448): n is a, c, g, or t
  misc_feature (645)..(645): n is a, c, g, or t
ggaaatacagaaaaggtgagaggaagcaactttcattgtatcgtagcaataaactccacactgggtgacatctacctagaaatcccttccctctaaccaggccatgatgggaacctttgctgcctgcccttggagaaccccggattggcttccctgggactcaggtctggtggcaggagggcagcagtgtgcccccaccatccctcatggcctgccgccagcagggccataatggcaggactttgatttgacttccagccccacatgaggaggggggctaccaagccaggtgcagtgtttgtggccctttatttaagttgttttcttatattattctgcatataaacaatgacgtttaaatggaaaaaacaacaacaacgaaaacctccattgggtggagccacactttaaatgaaaatttctctttgactatgctcagnnnnnnnnntagaattttgaatatatttagcaggtgttgtctatttttaactaactccatatgctgccagtatcgacttcatgacatttgccaaaataaaattttatttttgcctttataagattttcttggaaaaaatgaaatgaatattctgcaagaaaaagttaatttaaaaatgtaatggtccgcccaaaaaatgtgatgtncagattaaaatatta

SEQ ID NO: 88282 - DNA, 506 bp, Homo Sapiens
ttggagatttctgcacagagccgcaagtcccctacccaccatcgccagtcttctgatgcctctgagacaacaggtctcgttcaacgctgtgtcataatccaaaaagacacagcatggcttcggcttcacagtcagtggggatcgcattgttctggtgcagtctgtgcggcctggaggtgcagccatgaaggccggtgtgaaagagggcgaccggatcatcaaagtcaacggcaccatggtgaccaatagctcacacctggaagtggtaaagctgatcaaatctggcgcctatgtcgcactcaccctcctgggctcttcaccttcatccatgggcatctctgggctccagcaggacccatccccagcaggagctccccgaatcacgtcagtgatcccctcaccaccacctcctccacctctaccacctccacaacgcatcacaggacccaaacctctgcaggatcccgaagttcaaaaacatgccacccagatcctcaggaatatgc

SEQ ID NO: 88283 - DNA, 589 bp, Homo Sapiens
gcgggggcgggacgactgaaactcggacgcggcagcggcggcggcggcgcccctgcaggacgcggagctggccctggccggcatcaacatgctgctcaacaacggcttcagggagtcggaccagcttttcaaacaatacagaaatcatagcccactaatgagttttggagccagctttgtcagttttttgaatgccatgatgacatttgaggaagaaaaaatgcagttggcatgtgatgacttaaaaaccacagaaaaactgtgtgaaagtgaagaggctggagtaattgaaacaatcaagaataaaattaagaagaacgttgatgtccgaaaatccgccccctctatggttgatcggcttcagaggcagataatcatagctgactgccaggtttacctggctgtgctttcatttgtaaaacaagaattgtcagcttatatcaaaggtgggtggatccttaggaaagcctggaagatttacaataaatgctatctggacatcaatgcccttcaggagctgtatcagaagaagctaactgaagagtccttgacttctgatgctgcaaatgataatcacattgtggctgaa

SEQ ID NO: 88284 - DNA, 592 bp, Homo Sapiens
gcgtccgcggcggcggtacgacggagactcggacgcggcagcggcggcggcggcgcccctgcaggacgcggagctggccctggccggcatcaacatgctgctcaacaacggcttcagggagtcggaccagcttttcaaacaatacagaaaaagttttttgacttctgagaaaacctcagcgcttcctggagaaactcaaaggcgcttgtaagagatgttgagtcagcaggcctctgagcctcttctctgcctaaaaccatgtcagattcttgggaggactggaaggacttgcaggctgtccatgatttctagacaagtcatctgctcacagacaagaatgtgtctctgccttgctcctggagacgataggagagtccacagatgcagagatgtaagaaaaggagaagaaatgaaaagcagaaatggtttaagggaactggcgggaaagacaggaaactcatctgttgactttttccatcctcttcaactcagtggtgtgttggaaaaaggcatcttttttcccccaactattacactgtctgaaaaggtcctaattaaatattcattaaagataaaaaaacctcgtgccgaa

SEQ ID NO: 88285 - DNA, 726 bp, Homo Sapiens
cagtcgacggtaccggacatatgcccgggaattcggccattacggccggggagagcggtggtgaaactggcagttgacggctcctgggactagatcccgcgaggtagcccccgaactatttctctacgttttctcttgatcctcccgaaatcttccagatccgcgtagtgaggaatcgtctccaccgtcatggggggcggagacctgaatctgaagaagagctggcacccgcagaccctcaggaatgtggagaaagtgtggaaggccgagcagaagcatgaggctgagcggaagaagattgaggagcttcagcgggagctgcgagaagagagagcccgggaagagatgcagcgctatgcggaggatgttggggccgtcaagaaaaaagaagaaaagttggactggatgtaccagggtcctggtgggatggtgaaccgtgacgagtacctgctggggcgccccattgacaaatatgtttttgagaagatggaggagaaggaggcaggctgctcttctgaaacaggacttctcccaggctctatctttgccccatcaggtgccaattcccttcttgacatggccagcaagatccagcgaggacccactctgtcatcatcagcgacgaacggagcgaggagaacaacaccgagagcgtatcaccctacactcccagtgaacaatgccccacccctcccagccatcgtagccaacggagtctgcgaccca

SEQ ID NO: 88286 - DNA, 427 bp, Homo Sapiens
  misc_feature (185)..(343): n is a, c, g, or t
caaaattaggaaacttgaaagcatctacatttaaacaatgttactatttgtctaaaaaatgaaagccaaaaagtagttaaaaacaccaaacttgcaaagacttcagggccaggctccaccttttacaaacactcaagataggaagaaagagagaatttggggtgattaaatgaaatgctgtcagnnnnnnnnnnnnnnnnnnnnnnnnnnnnnnnnnnnnnnnnnnnnnnnnnnnnnnnnnnnnnnnnnnnnnnnnnnnnnnnnnnnnnnnnnnnnnnnnnnnnnnnnnnnnnnnnnnnnnnnnnnnnnnnnnnnnnnnnnnnnnnnnnnnnnnnnnnnnnnncagctttgaaggacacagacatgacagctaaaaaacttttagtttctatccctgaacaaagtgatcacggttactgtagtgagt

SEQ ID NO: 88287 - DNA, 579 bp, Homo Sapiens
  misc_feature (148)..(148): n is a, c, g, or t
gggggagtgtcaacatgcaagatggcggcccatcaccggcagaacacagcagggcggaggaaagtgcaggtttcctatgttattcgagatgaagtggagaagtacaaccgaaatggagtcaatgctctgcagctggatccagcactanatagacttttcacagccggtcgagactctatcataagaatatggagtgtcaatcagcacaagcaagatccatatatagcatctatggaaccacaatactgattgggtaaacgacattgtactctgttggaatgggaaaacattaatatctgcttcttctgacacgacagtaaaagtatggaatgcacacaagggattttgcatgtcaacattaaggacacataaggattacgtaaaggccttagcatatgccaaggataaagaactagtagcatcagctgggttggacagacaaatattcctttgggatgtgaatactctaacagcattgactgcctcaaataacactgtcacaagtaaggtgtttaaaagaaacttctttgaaagtgatcccagttaacataaataaagaatggtttataaaacaaaaaa

SEQ ID NO: 88288 - DNA, 706 bp, Homo Sapiens
gccttcccagtgcataaagtctctgtcgctcccggaacttgttggcaatgcctattttgtggctttcccccgcgttctctaaactaactatttaaaggtctgcggtcgcaaatggtttgactaaacgtaggatgggacttaagttgaacggcagatatatttcactgatcctcgcggtgcaaatagcgtatctggtgcaggccgtgagagcagcgggcaagtgcgatgcggtcttcaagggcttttcggactgtttgctcaagctgggcgacagcatggccaactacccgcagggcctggacgacaagacgaacatcaagaccgtgtgcacatactgggaggatttccacagctgcacggtcacagcccttacggattgccaggaaggggcgaaagatatgtgggataaactgagaaaagaatccaaaaacctcaacatccaaggcagcttattcgaactctgcggcagcggcaacggggcggcggggtccctgctcccggcgttcccggtgctcctggtgtctctctcggcagctttagcgacctggctttacttctgagcgtggggccagctccccccgcgcgcccacccacactcactccatgctcccggaaatcgagaggaagatccattagttctttggggacgttgtgattctctgtgatcccgaaaacactcatataggattgtgggaaatcctgaaaa

SEQ ID NO: 88289 - DNA, 505 bp, Homo Sapiens
ggcgccggagacatgtccaggcggaaacagagcaacccccggcagatcaagcgttccctcggagacatggaggccagagaggaggtgcagttggtgggtgccagccacatggagcaaaaggccacggcacctgaagccccgagccctcccagcgcagatgttaactcacccccaccgctgccgccccccacatccccaggaggccccaaggagctggaaggacaggaaccagaacccaggcccacggaggaagagccgggcagtccctggagcgggccagacgagctggagccggtggtgcaggatgggcagaggcgcatacgggcccgactcagcctcgccacgggcctgtcctggggcccgttccatgggagtgtccagaccagagcctcatcccccaggcaggcggagccgcgaggcgctatctccgccttggcgccgagtgtccagacacaccgtacaagatgattgatttcttcaagatatgcacgcctttccgataaaa

SEQ ID NO: 88290 - DNA, 583 bp, Homo Sapiens
tgcggccgccgggagggcgcgcggcgccggagacatgtccaggcggaaacagagcaacccccggcagatcaagcgttccctcggagacatggaggccagagaggaggtgcagttggtgggtgccagccacatggagcaaaaggccacggcacctgaagccccgagccctcccagcgcagatgttaactcacccccaccgctgccgccccccacatccccaggaggccccaaggagctggaaggacaggaaccagaacccaggcccacggaggaagagccgggcagtccctggagcgggccagacgagctggagccggtggtgcaggatgggcagaggcgcatacgggcccgactcagcctcgccacgggcctgtcctggggcccgttccatgggagtgtccagaccagagcctcatcccccaggcaggcggagccgatgagaaaactgaggctccaagatgttaagtcaattgcccaaatacccaggatcaaacagcagagggagaaatagaacccacatctgcctatccccggagaccctcgcaagctccttaatgaattaaatccttgattaacccttatc

SEQ ID NO: 88291 - DNA, 402 bp, Homo Sapiens
atcttgaagaaatcaatcatcttgtacggtgtgtctggacactcggcgccaaggcggagatagcgcctcgctggggagataagggttaatcaaggatttaattctgcaggagataaagcagaggagggaagagtggagcgggggctccttcctccccgggctccccacagagccccagcggctcctctggccttggctccccttgtgcccccagacgttatctccccacttgggagcgtttctaaccccgtgcccgtatccccaggatggcctgtgccctaggccagagcaggactaaatgcggaggcaggcggacagggaggggtgactgcagctagggcaaagggcagcccgtggggatgactcctgggccggtgccagcccctcagccctaccattaag

SEQ ID NO: 88292 - DNA, 597 bp, Homo Sapiens
tttaacatgttgaccaggatattgatttcgttatctctctgtttcagaatatctcgtagctttctatattcttcttcttttaatggttcttgacaatcttggtctttgctttcagaggagactgtattgttttcaaggatcttcttgtcattcaatagtttctttaaatgatgaaaacagtgatgaactttacgcatatccgcgccaacctctaatctactgtctgaatcctggtcttccaaaaaggatgttattagtttttccagctgaaggagctctgcttctgtgagtgcctctgtcctctgctccccagtgaccatggccagttcatccttcagttcctggatttccttttgtaggcgtttaatcactaatctggggttaatttcttcattaagaacagcttcattctttatgagtgccactcgctgtgcaaatctgcaggtcgatatagactcatcaagattcctatcctccaacgagagtgttgcaatcataattgacatgcagtgccctcccaaactgtcatcttacgacactggtcatcatggactgcctataaggaatgtgcgaacggtgcttttctgaaagggcatg

SEQ ID NO: 88293 - DNA, 450 bp, Homo Sapiens
ggaactgcatgacaactatgattgcaacactctccttggagaaaaggaatcttgatgagtctatatcaacctgcagatttgcacagcgagtggcactcataaagaatgaagctgttcttaatgaagaaattaaccccagattaaaagcaccaagctcctctgatggagttctcttctgcagaaaccaatgagtgaggcaggatctgtttcagcaaaggccctggtcaggtatcagcatcacacagtgttcctgctggagagaggagacagcatgcaaagtcaagattcaggtggaactgaactgctagggtggattttgttgctgtccctacccttccagaagccctatagcattacagtgctgaatgagaaagagagttaacaaagttattagccccaagacaaaaactagttcagaatttaaggaaaataaacatattagacattgaa

SEQ ID NO: 88294 - DNA, 836 bp, Homo Sapiens
gggaacgttaggcgccggaagtggccgttgctggggcttgcgtgggaggaaggtgactgtgaggaaggtgtgtgtccaccgagcacttggattcagcttcttcatttccaacatggaagaaacttacaccgactccctggaccctgagaagctattgcaatgcccctatgacaaaaaccatcaaatcagggcttgcaggtttccttatcatcttatcaagtgcagaaagaatcatcctgatgttgcaagcaaattggctacttgtcccttcaatgctcgccaccaggttcctcgagctgaaattagtcatcatatctcaagctgtgatgacagaagttgtattgagcaagatgttgtcaaccaaaccaggagccttagacaagagactctggctgagagcacttggcagtgccctccttgcgatgaagactgggataaagatttgtgggagcagaccagcaccccatttgtctggggcacaactcactactctgacaacaacagccctgcgagcaacatagttacagaacataagaataacctggcttcaggcatgcgagttcccaaatctctgccgtatgttctgccatggaaaaacaatggaaatgcacagtaactgaatacctatctcatcaaatgccagaccctagaagactgttgcttcttcttctaccagtgggttctcattttcctcctaatctaattatagaatggtaaactccctgtgactttccaaactgacaagcacacttttttcctccccccttgaatcctcatttaatgcaagaaccctcatactcagaagcttccaaataaacctttgatacagattgctt

SEQ ID NO: 88295 - DNA, 454 bp, Homo Sapiens
  misc_feature (211)..(219): n is a, c, g, or t
gtcagtacatagtaggtacatatatttatgtggtacatgagatgttttgatacagacatgcaatgcataataatcatgtcatagaaaatggggtatccatcccctcaaacatttatcctttgttatagttaagtattcctaaaatttaaaatcatcataaaaattttacatggcaatgcattcatttgttttgtttggaacatgataggannnnnnnnncccagagcaccataataatcatatatttttatagcatagagactaaatctgaccaaaatccaatggaaacagaatatatggcttaccatgcataatgttctttaagtaaaaatgattcagacttaatttcaaaccagatgagtctatggcagctcctgtttatgtcatcctttcagtcagcccaataaccatatacccttctcgcagaactgtcctttgcttctgtcacctcaag

SEQ ID NO: 88296 - DNA, 541 bp, Homo Sapiens
gactactgttccgacccgcattctggagaagactacagtcgtgatgaggacacacatcgctcacatagtggagcttctggggacatccccccagccttcgccctctcaggccgctattcccggagttcttcaaccggagaggagagctgcggcacatccacaatctcaagcactggggcctgtacgaggtactcatggaaaagtacgagtggcccctagagcaggccacacagttcagcgcctttctgctgcccatgatggagtacatccccgaaaagcgggccagtgccgctgactgcctccagcacccctggctcaacccctaggcccggctgtggctccacctccagctctccgtgccttaagggaaaagcgggacagctcccaccaccctgctgggcgccagttctccacaaccacagggcagagagacgctggagccaggcccggctctcagagcgtgttctgcctgagacccccgtgagggctctcggagaaagtgtgtgtattcctttcttaataaagtgtggactgaaaaaaa

SEQ ID NO: 88297 - DNA, 874 bp, Homo Sapiens
aactttttaatgtgttgatgcttgaatagagctattctcaagctggaataactgagactgaatggacaagtggatcttcaaaaggcggacctctgcaggcattaactagggaatctacaagagggtcaagaagaactccaaggaaaagggtggaaacttcagaacattttcgtatagatggtccagtaatttcagagagtactcccatagctgaaactataatggcttcaagcaacgaatccttagttgtcaatagggtgactggaaatttcaagcatgcatctcctattctgccaatcactgaattctcagacatacccagaagagcaccaaagaaaccattgacaagagctgaagtgggagaaaaaacagaggaaagaagagtagaaagggatattcttaaggaaatgttcccctatgaagcatctacaccaacaggaattagtgctagttgccgcagaccaatcaaaggggctgcaggccggccattagaactcagtgatttcaggatggaggagtctttttcatctaaatatgttcctaagtatgttcccttggcagatgtcaagtcagaaaagacaaaaaagggacgctccattcccgtatggataaaaattttgctgtttgttgtcccggcagttttttggagtgtgtccggtctaccaagctatggaaaccaaccatgaaaatcccttctctaatattcttcctgatgactctagaaaacccaactgaatggtatctctttggcacattcaacttggtcttgtatttttagtaactgtgttgaagaacattcgtgtacgctttttcactccaagaactaaaaataatgtgattttgcctcaataaacgtagtattccattggaaagc

SEQ ID NO: 88298 - DNA, 397 bp, Homo Sapiens
tttacttgagataaaacaatggcaaatttatagaaattaagtaagagaaagcaagcctactccaatcaggtagaaaggagatgttattcagcaaaaaattggaggaagtaaacaaaatttcatcaattcttgtcatttttcaaaggatcacctgcaccaattctgccatatatatatgaagtaccctttctgatccttgactcctaggctacccagtcaccttctaactggtttcccaggtatttcagactcaggaaagagaaaccctggatcggtgacacaagtattccaattactggaaaagactatgcctcactgtaaattacacttgcagcgtgacctacggtaactacgatatgattaccacacagacctggtgaagagctaatctcgagca

SEQ ID NO: 88299 - DNA, 426 bp, Homo Sapiens
  misc_feature (354)..(366): n is a, c, g, or t
gtgaaagcttactagacataatgattaataataataatgattaataataaacattttggggatttagctgattttattaacaccatttaaatatcagtctaggtgtagtgatagtataacatactggttaaaagcatgggcgctacctttacatttatggtcaattgattttttgacaaggttggcaagatacatcaatagggaaagattagtcttttcaacaaatggtgctgagacagcaggttatccacatgcaaaagaagaaagtggatgcctgcctcatagaacacatgcaaattaacttaaaatggatcatagtcctaaagtaagaactaaaactataagactcttacnnnnnnnnnnnnntccttgtgactttggaataggcaatagtttcttagatatgacaccaaaagtataagcaaa

SEQ ID NO: 88300 - DNA, 1610 bp, Homo Sapiens
gggccatattgtctgtgtgagcagaggggagagcggccgccgccgctgccgcttccaccacagctctatcaaggcttgtcaagcagtgtgctcatcacatggtaaatcatgcagcgtggaacctcataaaatctccaagaaacatcattcacccatactgactagtttcacatctctttgtttgaagaaaacaggtctgaaacaaggtcttacccccagctgcttctgaacacagtgactgccagatctccaaacatcaagtccagctttgtccgccaacctgtctgacatgtcgggacccgtgccaagcagggccagagtttacacagatgttaatacacacagacctcgagaatactgggattacgagtcacatgtggtggaatggggaaatcaagatgactaccagctggttcgaaaattaggccgaggtaaatacagtgaagtatttgaagccatcaacatcacaaataatgaaaaagttgttgttaaaattctcaagccagtaaaaaagaagaaaattaagcgtgaaataaagattttggagaatttgagaggaggtcccaacatcatcacactggcagacattgtaaaagaccctgtgtcacgaacccccgccttggtttttgaacacgtaaacaacacagacttcaagcaattgtaccagacgttaacagactatgatattcgattttacatgtatgagattctgaaggccctggattatggtcacagcatgggaattatgcacagagatgtcaagccccataatgtcatgattgatcatgagcacagaaagctacgactaatagactggggtttggctgagttttatcatcctggccaagaatataatgtccgagttgcttcccgatacttcaaaggtcctgagctacttgtagactatcagatgtacgattatagtttggatatgtggagtttgggttgtatgctggcaagtatgatctttcggaaggagccatttttccatggacatgacaattatgatcagttggtgaggatagccaaggttctggggacagaagatttatatgactatattgacaaatacaacattgaattagatccacgtttcaatgatatcttgggcagacactctcgaaagcgatgggaacgctttgtccacagtgaaaatcagcaccttgtcagccctgaggccttggatttcctggacaaactgctgcgatatgaccaccagtcacggcttactgcaagagaggcaatggagcacccctatttctacactgttgtgaaggaccaggctcgaatgggttcatctagcatgccagggggcagtacgcccgtcagcagcgccaatatgatgtcagggatttcttcagtgccaaccccttcaccccttggacctctggcaggctcaccagtgattgctgctgccaacccccttgggatgcctgttccagctgccgctggcgctcagcagtaacggccctatctgtctcctgatgcctgagcagaggtgggggagtccaccctctccttgatgcagcttgcgctggcggggaggggtgaaacacttcagaagcaccgtgtctgaaccgttgcttgtggatttatagtagttcagtcat

SEQ ID NO: 88301 - DNA, 470 bp, Homo Sapiens
  misc_feature (170)..(185): n is a, c, g, or t
  misc_feature (258)..(270): n is a, c, g, or t
gaatttttaaaagaaacttgatattggtgataaaggtatgaatgaacaactctcttacttgccctcgatgtttcaagatgcctggtgaaaccgagaggccacatggcatgtccaaggagacatgctttttgggttctatatgaatagagatggttttagcctgcaattgnnnnnnnnnnnnnnnncggttgaagccttgctaactttttcccagagcattctgggttgatatttcacagtcaaacgttttggcatggnnnnnnnnnnnnnggcattttaaactcttagtgaattcaaagctctaaatccaaacaatggtgaacacatgtacataacatttcatgttttcagagatacgtatgcttatttaagtgcctttcatgttttaatcaatgtttgcagaatttatcttaaacctgagatgaattaaaaaaattttctccttcaataaaaactaataatggcaaaaa

SEQ ID NO: 88302 - DNA, 594 bp, Homo Sapiens
gcggccgcgtggtgctgctcggtgcccagcgaggtgcggcgcatgaactggcggtgcatgcggagcagcgcgccgcacacaagcacgttgcagaggacggtggcgagaatgaggaaggagctgaagcccgcgtacatgtaggagtaggcggcgtgcgccgtcacgttggtggtccagtcgatgaagcaccaggtgtctgggtactgcagccgcgagctaccgagacccatgttgggcagcgcgcaaaagagcacgttggacgcatagactgcaaagagcgtgaggcccgccaatcgcttgtccacgtagtggctgtagaaataggcatggttgatggccaggtagcgctcgacactcatggcgcagatgatgctgaggccggacaggctgaagaagagcagaatgaaggtgctgtactcgcacagcggctggcccccgggccattggaccttcatgtacgtggcgatggtcaccgggctcaccaacaaagtgcccaacaaggtcgtgacagccagcccacatacccagcgtggtagaggtcgtttctttctgttcttgcgcgacttgcacaagaccccgatggccaaccaggtt

SEQ ID NO: 88303 - DNA, 876 bp, Homo Sapiens
  misc_feature (257)..(273): n is a, c, g, or t
gctttaaaaggggaaaaacccccgggaccccaggggtaccgtggctttgggggggttttggaaaccctttaacttcctttttgtgtaaaccccaaaaatatttttccccccttttcttccataaattttccctaggtatttagggtaagggttaatggcttagttttaagattcctgaaaaggccctgcattttaaatgcttggcacaaccccatttaaaatctacaaaaagctgcttctatttggttttctgattnnnnnnnnnnnnnnnnngaccaaaccaaccaaaccacaccacatcatacagattatgatccgaatggaaaagttaacgtgctgtaatgatatttgtcttgcaacatcaaaagcagcagatactgaatagaatttgcttcaatcataaatactgagactgaaatatgcacgtataaatcaatgaactgaaagctctctatacatagaagcacatatgaagtgcaaaacagtatcaaaagtgagatctctggtatttcagtactcccattcatcagatttcaggtcgagatagctgagaatattctgcgcaagcctcacagcttgtttcctggcagccttacacttctcttctccctgcggatcaacagcatccagggctagcagctgcttggtgagcagctcttccagccggatgtagttcttatcggttcgatttccatcaaatgaaagaacttctccctggatctcagacaagtttccaaggacgctccagacggctctatgggatgggtgctcctcacaagcaaacagctttcttttctcaagggcctccttcaagtcaatatatgtgatcagagtttgcacctcgatcactgctcttctcctggcttcccggatgcc

SEQ ID NO: 88304 - DNA, 580 bp, Homo Sapiens
tccatggaatacaaatgatgactttgatgcctcctgcctgtgaagtatcaaaagatacaggattttaaccccctttggaatcacttgggggaaataatgcatcttcttatttgagaaactctctaaaaataaggaaaaaaacccactcaatttcaaaacagcacattttcaaaatgtctgaagcatgacatgtctataaaggaattctacatataaaatagaaaatcttaagaaaaggagaaaatttatagtttttgatattttatacttaccaaaaattctgtcttttagcacaagtaaacctaggtagcagggaccaagactgaaaataataataaaccaacaagtaatggaaataagcaagtaaacaaaaatgaaaacattctgctaggtaataaacagattccacaaacacattatactgaaaagtaagtgtatcaaagagttagggagcaaagttaagttcctaataaaaggattgtgttgtcagctagaagctttaagcgttccatctccaggtttggtaggatgagaaggaaaataagatatatcatagtgtgccaagcatagttccttgaac

SEQ ID NO: 88305 - DNA, 529 bp, Homo Sapiens
cctggcaacctccaaatagaaaaccattgtgctactggtattacagggtgtggaggattatagatgacttatgtgctatttaagcaatgcattctatcttatcatgtatatatgtgggtatgatgaccaccatactatcggattattgcagagtgtgaggtagtgtgcggtttttaagtgcgtgtgtgtgagagaataaatgcttgaatatctgcaataagtattagagagcactcctgaaatataagccacttcctgacctgggcatattaaccaagaagcaaacctattaaaagtatgagagcattcgattttctacaataatagtacacatttgttgacatgaactagattcaggaagggaatacagaaagagcaggcagacattgggcctatttaattaacttggggcttatgatcacccttcagaagaggatgctaaggatgccttctccagagccaagaggcctctccttgtgcctttatttggctttcctcctctcattggtgacccatcatgttaggaaaa

SEQ ID NO: 88306 - DNA, 269 bp, Homo Sapiens
ctcctcctccgctgcagtgctgtctgtggcaactgaaaccaaaggtgataacgactggagctcaggacaggctgtttctccaagaggagtgtgaagaagtcccgggaatcaacattttgagagcatcccaggggcctctaagaatatattacgggcaaacacttgtagagcacttcatttcatcctcaatcaccgttacgaggcagacacaatcatctccgagtgaaactgaggctcacaggggcgggctccgttgccgaaactcacag

SEQ ID NO: 88307 - DNA, 608 bp, Homo Sapiens
aaatatagcactaaagtaggagacaaaggaactcagctctctgggggccagaaacaacgcatggccatagctcgtgcccttgtgagacagcctcatattttgcttttggatgaagccacgtcagctctggatacagaaagtgaaaaggttgtccaagaagccctggacaaagccagagaaggccgcacctgcattgtgattgctcaccgcctgtccaccatccagaatgcagacttaatagtggtgtttcagaatggcagagtcaaggagcatggcacgcatcagcagctgctggcacagaaaggcatctatttttcaatggtcagtgtccaggctggaacaaagcgccagtgaactctgactgtatgagatgttaaatactttttaatatttgtttagatatgacatttattcaaagttaaaagcaaacacttacagaattatgaagaggtatctgtttaacatttcctcagtcaagttcagagtcttcagagacttcgtaattaaaggaacagagtgagagacatcatcaagtggagagaaatcatagtttaaactgcattataaattttataacagaattaaagtagattttaaaagataaaaaa

SEQ ID NO: 88308 - DNA, 486 bp, Homo Sapiens
agttactccacttcaaagagttcatgatggtgagaaacactttgaatgctcattctgtgggaaatcctttagagtgcatgcacaacttactcgacatcagaaaatccatactgatgagaaaacttacaaatgtatggaatgtggcaaggacttcagatttcattcacagcttaccgaacatcagagaattcatactggtgagaaaccctacaaatgtatgcactgtgagaaggtttttagaattagttcacagctcattgaacatcagagaattcacactggtgagaaaccttatgcatgtaaggaatgtgggaaggcttttggagtatgtagagaacttgctcgtcatcagagaattcatactggtaagaaaccctatgaatgcaaagcatgtggaaaggtctttagaaatagttcatccctgactagacatcagaggattcatactggtgaaaaaccctataaatgtaaagaatgtgagaaaga

SEQ ID NO: 88309 - DNA, 533 bp, Homo Sapiens
ctggctctcaccgtctggttgattcggacgtggttgcactgtcctcgatcctcagccttaccctccctcttctcaggaccctcacactgggattcgtaagaaatgtggaccccaggagggagtgaagagtgttcaagggtcacggtggaagacaggctctatgggaagagagcgagtggataaccacgtgaaggcagaaaaggactccaaccccaccttatgtcctctccaggtgttcccaattctgccagcaccctgccctctgccacctggggctccttccattctgcccagtcgaggcatttctggagggaggacccgtgagaaccttgcatagaacatacaggatccagaggcctctaatacagcatttcagtgcagctgccagcaagggccactgagggtcacaggctggccaggtgctgtaaatgtacagagaccatgtttgtgaagccccacatcaggacacataacctgggtgcatgccaggtctaaagggcagattcattacagagtttatcttgggaaatttg

SEQ ID NO: 88310 - DNA, 536 bp, Homo Sapiens
taagtagagaccatgcccatcgtcgaccggactgcggtcagcctccttggcgtctgaggtgggcgtgctcggggcgaacgcccgccccgagtggcgtggacgcgtcctggttctcgtgcgcctttcccggccgggagcaggcctgtctcgccgccgccggggccgcgttccttccgctgcgtggggctttaaggctcctcggctgggaagtgtcaacttcaggagaaagcgcccgaaagcagtaccctaggaaacaggcgcgccgacccattcggattcatctttacctacaaggtcgcgggcggcttagtctgaatgtgaaaccataaaaactcagcgtattctcagctactggggaggcgatctcggggagcagggagccaacggcgctggccgcagggaagcctggattttgaagcccggcccgtgactggggccttggcttcagttctacccctcgtagggctggtggaggtggtcacacgtctgctatggcgtggctgttagaacaaactggaataaaatacttaaccctg

SEQ ID NO: 88311 - DNA, 990 bp, Homo Sapiens
  misc_feature (83)..(83): n is a, c, g, or t
atgagccaccatgcctggccacgcactgtgggttctacaggatgggtctgtaatgtcacggtgagggctctctctagtagtanatctggagtgaggtgtgtcttgggttgaggaggtggcttgactttcgaatgtaaaactgactgtgccttagcatcaccctgtccagtgcccctggggcagctggtagtgtccagaagaatggacacctgctccagatttagatgcccatctgggcttttgtttgatttgcggcgttcctgtcttctgtaaagctagtgagttgtcccaagagactgatgccacagcttgttcgcagtttacacaaactcagctttaaaattccaaatagaatctgacttgcaaactctagctgcagcatgtggagcttctagatgtttactaccttgaatggttgtcagtgtcactgaaccacaggggagaggagtatggggtagagcaatggtctgggccaaggaatggtgagcttagggtcttcctctgactccttactcctcaaggaggcagttagggtccctcttaagcaggcttctatttcttaccactaaattggtttcctttttcatccagaagttagaactccccagatattcacactataggatctgaattccgagattctaaaatatcttaaaccacaagagagaaaatctagttctgcctcagccccagtcagcaggccatctgtcccttcctctcctctgagtcagacagctctggcaagcaaggctccttggctagttcctaatgcactgacaggagccctcccattaaggacgacttctactcaaaatgcgactctccctctgaacttcagatgcctctgttagcaggaaaaggcattgattggattggatatatttatgtgactgcgggcatttgtggctgtagaatccgtgaccgtaatgttatatgtaatgggaactatcttataaacttgaaaaaaataaagtttttattttctataaa

SEQ ID NO: 88312 - DNA, 513 bp, Homo Sapiens
  misc_feature (20)..(20): n is a, c, g, or t
agagaggaatttttcactgnagaaagctcaagcatgaaggctgaatggtggaagaagtaggctctgatggacattacagtttatccctccagatccactttccttccacaggccacgctccatcctgctctgtgcttcaccaagttggcctgtatgggctatgctggtggcttctttgcactctgtcctttggttgggcctagccaatgagaggcactggtaagggatgagagggtggagaagaatgaggttgcattatatattctctaagctcattctctggtggcctgccacgaattggccacctcactccaccaaaagtagttctttctgtcaggtagccctttctatgaaactactctctttgagttcaagcaacttcttcctcctcttacactttagatcaaggggtggtaacagctcctagcccttgctagcctgagattgctgtacaaatttactggttttcttgatgtctgcctacacattattaaactcttctcattatccaaa

SEQ ID NO: 88313 - DNA, 774 bp, Homo Sapiens
ggccctcagcactcattgccacagggggtcatgcacagcaccaagccacatcagagcctcgaaggtcctccgtggcttttccctggccctttgccatcccgttgccatctgaggacttagtttcctgtttccgtatacatgggccacagctggtggttatcgctagaaaaaagatgttcaagttctgaaccctggcttatagccaagactgcccgagaaaagtagttgaacaggcaagaagaggctcacaagaaagtagcacaaaccgcaaaaaggcctggcaagtacatttgcccttactgcagcagagcgtgtgccaaacctagtgtactgaaaaaacacatcaggtcccatactggggagcggccatatccatgtataccttgtggtttctctttcaagacaaagagcaatttgtacaagcacaggaagtcacatgcccatgcaattaaggcaggattagtacctttcacagagtcagctgtatctaaattggacctaaaggctggttttattgatgtagaagcagaaatacattcagatggggaacagagtacagacacagatgaggagagttcttttatttgccgaggcttctgacaaaatgagtcctggtcccacccatcccacctggacatggcccagcagagggcggctatcaatggggtcattgggaaggaatcattgggggaggtcccaatgtgaaaggtggcccgaatttttgaattattccccctaaaaaggtggggatttcccttcctcccccaaaatgga

SEQ ID NO: 88314 - DNA, 534 bp, Homo Sapiens
caccaagttgtcgtgggagcccacggccaggtacgccccgtctggggagaagctgaccactgagatctgttcattgccgtctgtgtggatagccaccaggtcatgggtctccgtgtccagcagcagccatctgccagtcactgtacccacagccaggacagagccactggggtggaagccggctgagcgggcagggtcctcgatgatcctgctccacaggggctggtgggaatctgagctccatagatgcaccagcttatcctgcccgcaggtcacaaactgggcccgactggggtgtgtggccaggccccacagctcttccacatggccctggtggaaagggaggacagcaggaggagacagcagccctggccttttcccactcaacactaatgccagacaaatgctagatgagccccagcaactcaccctgccccagcgggacccagggaagacctttcccagtatgtctgaagggggcctcaattgggcatctgaacccatgccctggtgtgtgactcaaggcaaatcctg

SEQ ID NO: 88315 - DNA, 821 bp, Homo Sapiens
agtgcttataaactggatggccgagcacttgcccagcgcctgacctgcgccgcctggtcaccgggtacacgtacaccaagttgtcgtgggagcccacggccaggtacgccccgtctggggagaagctgaccactgagatctgttcattgccgtctgtgtggatagccaccaggtcatgggtctccgtgtccagcagcagccatctgccagtcactgtacccacagccaggacagagccactggggtggaagccggctgagcgggcagggtcctcgatgatcctgctccacaggggctggtgggaatctgagctccatagatgcaccagcttatcctgcccgcaggtcacaaactgggcccgactggggtgtgtggccaggccccacagctcttccacatggccctggaccagcagtgagaagcctgtgtgcacggagccctgcaggatggaattgcgggtggtccccacgtacagtgtgtctccgtggccctctgccacggtgcgcacagggccaaagtcctcagggacctccacttcctgcagcttgctgtagtcagaaccccagaggaccacccgccgatcacggccccctccagacaccagcgtcccgtcccgcagggcgcagagcccaaacacgccgccgtcgtgggcgcccagcaccgcctgtgtgatacggttcccaccttttgccccaaacatagaggttccccccagagtcccccgtgaccacgtcgccaccttccaaaaaggtcacacacagcacatacttcgtttactcatgtttgtcaacctcgtgccgatttaaacccagcctctctag

SEQ ID NO: 88316 - DNA, 889 bp, Homo Sapiens
  misc_feature (84)..(92): n is a, c, g, or t
ccccgttttcatcggagacctccggggagcggtgggggtggaggaatggtttctccccttttctgaactgaatactaagacccnnnnnnnnnctttgtcctttcctgacagcaaaaccaaagaagttatcttcagtgtggaggatggctccgtgaaaatgttcctgaggggccgccctgtgcccatgatgatcccagacgagctggcacccacctacagcctggacacacgctcggagctgccttcttgccggctcaagctggagtgggtctatggctaccgtggccgagactgccgggccaacctttatttgctgcccaccggggagatagtgtactttgtggcctccgtagccgtgctatacagcgtggaggagcagaggcagcgacactacctgggacacaacgatgacatcaaatgcttggccatccacccagatatggtcaccatcgccacgggacaggtggcgggaaccactaaggaagggaagccgctgccgccccacgtgcgcatctgggactcagtttccctctccaccttacacgtgctgggcttgggggtgtttgacagagccgtgtgctgtgtgggcttctccaaatctaatggaggcaacctgctgtgtgcagtggatgaatccaatgatcacatgctctcagtgtgggactggggccaaagagaccaaggggggtggatgtcaagtgctccaatgaggctgtattggtggccacctttccaccccactggacccccactgtgtcttatcacctggccggaaaatctcacattctacttctgggaaccttgggagggggggcaaccttgaagcaaagcggccaaggccctcttttgaaaaaacctggaaaaaaccccaagctttgggcctgtggtg

SEQ ID NO: 88317 - DNA, 535 bp, Homo Sapiens
  misc_feature (310)..(355): n is a, c, g, or t
agccagaattaagtattctgattaatgagggacctggagcattgtaggcttcggagcacctttttggctccacctactcctcaggaggaaaggcctgagtctgaggtttaatagatacagttttgttcctcctttccctgtaattacctggcctgagacactctcagactctgtccaccactcctgtccttcaactcctcccactgtcacctgaggataggctgtatctagattcacattctctacctcctactccagaagagtaggttgtagggcaggtgtcaaagaagagactcccaagctctagacnnnnnnnnnnnnnnnnnnnnnnnnnnnnnnnnnnnnnnnnnnnnnncatggggagtgtggctggtctgaactgagatatgctgtacgtgtaaaatacacaacagattcagagccttcatgtgaaaaaagaatgtaaaatttcttattaatactttttatattgattatgcatatgttgaagtgatactttttacataatgagttaaataaaatgattaaaattaaa

SEQ ID NO: 88318 - DNA, 879 bp, Homo Sapiens
ggcccagatgccgcgttggccacccagggtggcgcagcgccaacaggtcgttgccccaaagtctgcgcggtatctcttgcccattgggcaacaaccgtgttaacacggggatactctttaatcataccgcgagcatccgttggttcacaaccggcagcatcctttgccacacggggagcaatcggtgtcacaacggcatcatccttctccataacgggagcatctcttgccacaacgggcagcatccttcggtcataacggcagcatccttcgccacaagcggcagacatctggtcgtcacacggcaagcaatctgtcgtcacaacggcatcatcctttgccatacggcagcatccttcgcccaacggcagcatccttcgtcatagcgtcagcatcctttgccatagcggcaaggtggaaaccctgtccatccactgaggcgtgcatagactaaacatggccagtccaggcactggaatccaggccgtagaacggcgcccacggtcaaaaggaatgagaccctgatgcactgggcgacacagacgggcgacacagacttggagacatcatgctaagtgaaaagccaggcacacggagcggacggcgtgatcctgctcacgtgatgtgtcccgaatgggcacgtccagagggaagaagggagatggcgctgccggtgcccgggacgggggttgggagcgacggttgctggtttggggtttctttctggggtgaggaagtgttttgatattggccgattggtgatgtttgcatacctctgaatatgctaagacccacagaattgcacactttaaatggatgaattgtatggtatgggaattacacaattatgtctcattaaagcagttatttttaaaatcc

SEQ ID NO: 88319 - DNA, 146 bp, Homo Sapiens
aaacaacattcaaagacctacaaaataggacagggaacttgtatttagactatactgtctaaatgcaacgtatttatgctagttatttgtgtgttatagagaatatagtcatattgatatactttaagtcatttatgtacatcggg

SEQ ID NO: 88320 - DNA, 443 bp, Homo Sapiens
caaaaataattaagaaatggaatgttctgattgaaaattaccaagcatatgatgtatggatgatcaacttttgaagaatttgaaacaattagaaattagaaaacagaagcccacatcctttgaaacccatagtgcaggtgagcccagtgtaaagacaaggattcttaaatgaggaagagggaggcagacaatctgaaccagagagatggcatctgaaaaagactccgtcagcctttgctggctttgaagatgaaaaggagccatgagccaaggaattcaggcagcctctagaagccagcaaatgcgaggaaatggattctcccctagagcctccagaaaggaattctgttcagccaacaccttgattttagcccagtgagacccattttggacttctgccctcctctggaactgtaaaataataaatttgtgttgttttaaaa

SEQ ID NO: 88321 - DNA, 1148 bp, Homo Sapiens
  misc_feature (90)..(286): n is a, c, g, or t
  misc_feature (578)..(578): n is a, c, g, or t
ggaggccacgtcttcatttacctttatctctagtagccaaaagtcttgatttttatataactggaaaaaccacgcagcataatgcttatnnnnnnnnnnnnnnnnnnnnnnnnnnnnnnnnnnnnnnnnnnnnnnnnnnnnnnnnnnnnnnnnnnnnnnnnnnnnnnnnnnnnnnnnnnnnnnnnnnnnnnnnnnnnnnnnnnnnnnnnnnnnnnnnnnnnnnnnnnnnnnnnnnnnnnnnnnnnnnnnnnnnnnnnnnnnnnnnnnnnnnnnnnnnnnnnnnnnntgagcaccgttgagctttggtagaaaatggcaaaattacgatgtttttctcatttctggtgattggcttccgagtgttatttaaagagcggagtggagagggctctttgcagccctgcggtagtgtcttgtgctcaccaagaggctcacgggaaacatgtcctccaacatgaaggtgtttgctaagattccaaccaggacccagtcttgggccacagaacactgactgctccccaagcccctcgcagaacgcagggatatttttccttcagaacctgttgcatcagaatggngaaagcgagggctgagaatccagaagaggccgtgaactgttctggaaaagcgagggctttgcagtcagaccttcatatgcactttgttctatctgttgcgctctgcctaaatgaccacgggccagtgactttacctctctgatccctgctccttgcctagatagtggggatcacgtcgtagtgtatgtaaagaaccgggtgcgggacttggcacctgggaagtgtcttaatacatgtctgtcgagaaaaggaagggtctcgacgtgcggaaacaagacggatgccaggaaatacgtctgcccacctccacgcccctgacagcggaggctcctggaggtctggtgagaggccccacgtgctccagccccctccgctctgtgctgagctctgcctttaagagactgcagctcctgcctctaaaaagcctttcaaaattctttattaaattttcatggcgcataaagtcaaggttctgttacttggcctcagttgtcttggcaacttcataaaacgcaataataaaacgaagctgagtgttgctaaacacaggctcattgtataaacgaaaaa

SEQ ID NO: 88322 - DNA, 744 bp, Homo Sapiens
ccaagcccccagagagcattcaccctccaggtcagctccgatccttccatgtacattgagttggagaatgaagtgacagtgttggggggcgtgaagctgagccgcctgaagtgcaaccgtgaagggaaggagtgggagacggtactcaccagccggatcctcactctgcgggcagctgtgacgtggtgtgtgttcgcctgtaaaaaaaggatgctgtcagtgttctccacctgtggtcgcagtctcctctctcccatcctcctccctggggccagcaaggcagtcccaggcctgccgtctccagcacggccccaaggtggacactagcccctgctgctgcaggcgccatgctgcttcagcagtgacgattgagccatttgtgagagagaatccggaagcgttaggtattacagcagactgacctaagacctatgtaaaaggaaagctgttccaacacacggactatttttgtactagaatttgctaacttgtaatattgaatttcctttggccgataatcaggatttccctataagtcacttggacattggtcacttgtaggaaatttaaactctaattatgacagctacactgaaaaataattgtactgaaattaacttgtctatcttcatttggttttaatttttaaatgtttgtaaaaagagactgttttgggggaatggggcaaaggggtgggcgatttcttttgtaagtgtaaaataaatgaacacgcattgaatacca

SEQ ID NO: 88323 - DNA, 847 bp, Homo Sapiens
ttttgaagacatcgacacgggcgccactcgcccgtctgtgtatttaaatctatcagcttagcaccattgcaaagtcaagtgatttcaaagatagctacaaagttacaaatatatattatgagattattacaatgatattcagtttcatctgaactgtgatttaattttatttgaatttggaggcttgtaactgtttaatcctttcttattccgccacacaggaaaatgcctaagttctaacgttacacttaaaactgcactgtgataacacacggttgtacagaatgcttcagcagtatgtgtattttgaggtagacaggtaatatttattcatacacagctactcatagacccttatacagtgactctagaaaatgatttggatgaatagcaagcttaggtaactgagtaactcaaaccgtcctgggagttgatgggcttaaagaaagagatgaattttgaccaattcctaacaaagaacttgcttttgttttaaaaggccttacactgacaatcactcagatggaattaatatgcatgtttttctcatccctaagataaggtctcgagctgctttttatctaaaggaagcagaagaaaacagcgaaattcaagaaaaaaaatctccaaggtggttggcttcttggaaagcctgaatggtggccaaggaccacctgggctcccaaggagtggagggaggagggattcagttccacaggaaataaatgggaacagcccggtggagaagacaatgacaactgcaggacaacacctcaaccactccagaaaacagatccttgctcctccttctggccttttcatatttccaagttactgttttaaagga

SEQ ID NO: 88324 - DNA, 1544 bp, Homo Sapiens
tccagatcagcaggcacaggtgggcattgccaggtattttctgagcccctgcgggtttgaggccttgtttttagtgctgagagccagttgctgccctgagaagagaagacaacctccatctatttattgcttcctgagaactgacctggatgcggccctctgcagggcccagtcttcagtcctgtggtccctggactggtgggaacctgaactaggagtcctgggagagctgtggtgggaatatgggctggcactgctgcagggcaagaacattcatgtaggagcccgaggaccagcaggctgggaatggggagcaagtcacgtcagctctgtcattccccacagttaacaaattggcggggtgggaagtcctgagtgctccgtccctctagcatcactcctgagctgcgggagaggtggcccagagaacagcagagtcagttacacctgcagctcttgtctaaagtgattagatggccaccctcaccactgtccagtccagcagcagcctggctgccttgtcatggcctcctgggggcagaaggcgatgtggaccacgggatttgtagccagccagctcccaggccaacgcccaaagccctgatgacctggttcttctgaggccctcaacctggcatcttagggtatggtcaggcaacagggtgaccagctgtcctggtttcccaggacatggaactttcaatgctaaaactgggacagtacccagcaagtggggatggttggtcccctaccaggagagggcctggggctcttgcttcccgagaacgcctgtggcttgaagaaccttgactgcttggtcctcaggtatctacctcccaccttctcctcatctgtggagcaagccaactcagtgccccagaccccacctgatctgcatctttgtttgcatctccagagacacctgaggccccagagcttgaggcaaagccaggccgtccaaatcctgtgtgccgtggacgagtggccactttactactcctaaggctaagatgttgagagctcagaccactgctcagagcagtaatccctgctcagaatgctcccagttccctcgtccctgcccaggtctcttgtctcttgggaaggaactgataggtcgggccattgttgggccatcactgagcgctcagtatctcaagagactctgttcattctgctcgtatcccaaggcctggtttggtcaaactctgggcaagggtttcaggatgaggaggtcagaccggatgtccagagctacccgagttcatctgtgggtgttgggggcacgtgggggctgaagtcctgtgcaggctgcgctggccccactgcctgtgccctgggagttgggggttctcctttgttgcacaagcaggctcctttctctgatgtggccaccaaacgccaaggttttgaccagtaggccttggcaactccacacgtgtgtgcctggggaacccagcgcggcgttgacacctgggagcgctggaagaatggcaagtcaaggcatcacctatacttccgagcaaaccggcatttagaagacc

SEQ ID NO: 88325 - DNA, 1115 bp, Homo Sapiens
cattaggtgagatatagaacagtgggttaaaaaaagcaggctggtaccggtccggaattcccgggatatcgtcgacccacgctgtcgctcctcttcctctctctggacgcccggctcctccgcaccccctcccccgggggtcccgcggccttgctccctaccctcacctcaagacgaccatggacaccatcccagactggaagctacagctgctagcccggcgccggcaggaggaggcgtccgttcgaggccgagagaaagcagaacgggagcgcctgtcccagatgccagcctggaaacgagggctcctggagcgccgccgggccaagcttgggctgtcccctggggagcctagccctgtgctagggactgtagaggctggacctccagacccggatgagtctgcggtccttctggaggccatcgggccagtgcaccagaaccgattcatccggcaggagcggcagcagcagcagcagcaacaacaacggagtgaagagctgctagcagagagaaagcctgggcctctggaggcccgggagcggagacccagccctggggagatgcgggatcagagccccaagggaagagagtcaagagaagagagactaagtccgagggagaccagagagaggaggctggggatagggggagcccaagagttgagcctgaggcctctggaggctcgggactggaggcaaagcccaggacaggtgggagaccaggagctcccgactgtcagaggcatggaaatggaggctgagtcctggagaaactccagagcggagtctgagactagcagagtctcgagagcaaagccccaggagaaaagaggtggaaagtagactgagcccaggggaatctgcctaccagaagttgggcctgacagaggcccataaatggagacctgactccagagagtctcaggaacagagtttggtacaactggaggcaacagagtggaggctgaggtcaggagaagaaagacaagactactcggaagaatgtgggagaaaagaagagtggccagttccaggggtagctccaaaagagactgcagagctgtccgagaccctgacaagggaggcccaaggcaacagttctgcaggagtgga

SEQ ID NO: 88326 - DNA, 1357 bp, Homo Sapiens
  misc_feature (30)..(30): n is a, c, g, or t
  misc_feature (750)..(834): n is a, c, g, or t
gcatagtgaactatagaacagtgggtaaanaaaagcaggctggtaccggtccggaattcccgggatatcgtcgacccacgctgtcgagggcctggggctcttgcttcccgagaacgcctgtggcttgaagaaccttgactgcttggtcctcaggtatctacctcccaccttctcctcatctgtggagcaagccaactcagtgccccagaccccacctgatctgcatctttgtttgcatctccagagacacctgaggccccagagcttgaggcaaagccaggccgtccaaatcctgtgtgccgtggacgagtggccactttactactcctaaggctaagatgttgagagctcagaccactgctcagagcagtaatccctgctcagaatgctcccagttccctcgtccctgcccaggtctcttgtctcttgggaaggaactgataggtcgggccattgttgggccatcactgagcgctcagtatctcaagagactctgttcattctgctcgtatcccaaggcctggttggtcaaactctgggcaaagggttttcaggatgaggaggtcaagacaggatctccagagctaccgagttcatctgtgggtgtcgggggcaagtgggggctgaagtcctgtgcaggctgcgctggccccacctgccttgtgccctggagtggggtttctccttgtgaaagaagaggcatccttctctgatgtgcacaaacacaatgtatgaccagagccttgcaannnnnnnnnnnnnnnnnnnnnnnnnnnnnnnnnnnnnnnnnnnnnnnnnnnnnnnnnnnnnnnnnnnnnnnnnnnnnnnnnnnnncccgactcagaccctgcattttagcaagacccccagctgattcctataagcactttagagtttgagaagcaaggacctaggctggggatgtcctccgagcagagggtgaagtttctctcagttctctccctgccacttccagggatctgagcctgtgttcagcctcctccctaacccaccctgggagacacttggcctgttagattgttccagagtctgcatggcactcctgaagaagggagtgggacctgcagtcaccaggagatgagggttaggtgtgcccagccctccagacccggcctttctggttaacccctgcatgccaagctgcctgctgccccaggtcctcacctcaggcctttgaaggggcagcttctggaagttgttttctcctctgcttggagagtttgcccttgtctgtcttggaaagtgtgggcagccacagatgcccccaaatcagagctcacagtgagtgagcccctaagcttcagtctgcaataaagaatgcattggtttcatctgc

SEQ ID NO: 88327 - DNA, 814 bp, Homo Sapiens
acgcgcgccgggctggctctggccgctcagctcacccgatgccccgtgagccagccccgcgccagaagccgcggtggcaggaaggtttgatcaaacattaaataatcgtaatgtgttgcgacaatggcttatctcacaagtggaaaagaggacctcgcgagaattagaattcggctgctattttaaaaaatcaattaagcttgcggtcttttttgaaacagctcgaaaggactgcgtggctatcatcgtggcgctaagactgagatggcaataacaccgatggcagaactgtaccagtattaattgtcatcacctttatcatcccgctggccaccaaggccgttcgaatggggtgggaaaggctagttttagccaggatcagaagccccagttccaacttcacggacgaaaaactgcgaaagcctatcaacttgaaagatgagtagggatacttcacgcaggtgccaggtgctatcaggagaggccggcgcgtcggagcataggcagagggcactgatcgctgagtgagtcctgcgagcttgtggcgcactgttctctcacgtgcgctgccacgtgtatgatgaactggaccgaagtagtctcagtatcacatagatacacatatcgatacaatcacagcagttcgtgcctacagtctatttatgaaactgtaatcgaagttgatagcacttcagaacacgcattatacacaaatatcattagtttagtgatgtgtctcgagacattattttttagacctacagatgcacacgacctgtagctagatctgccgaccagagaaaatttagacatt

SEQ ID NO: 88328 - DNA, 507 bp, Homo Sapiens
  misc_feature (308)..(317): n is a, c, g, or t
ctgtccgcgatgtctgcatctgagggattaaaacgtagggtgggatgagctaaaacgttagcaatgtatttaaagacatggtcagcataactgaagaaaaagattatcagaacggaaaaatggggttcaaagagacgaaaggtgtcagaacatgtccaaccctagccaaggagagagagacaatatttgaaggacagggtcagggtagtaaattggcgtccctggccaacgtcattagcacaaatgggcactgggatcaaacttagtagccttgggtatattgaaaacatgccgtttctagacctggnnnnnnnnnngccgtgtttcagctcagaggctacccgagctgttctgatgaagcaagcggagcacctcagtttccaaaacccggaggtctgtaacgaaacgaacaagtaaaagacaaacctgatcgtttcctcccctgcttaaacagttttctctttctcttattgcctctagaataaagttcaatcctcctgcttcaaa

SEQ ID NO: 88329 - DNA, 487 bp, Homo Sapiens
actaagagaagtcaataagaaaacgataactcttgggagagtccaggagggctggagtcctggtccttggtcttggaaagactcggagaactgctagggagctgggagagaactgtgtggagccatactgggaacctggacccatctgcattttcacatatccaaaacagttccgttcccaagccacccaaatgtgtgagctctcactgcatttctgcttcattactctttgaaatgaaataaggacacagctgtacctcaatttaaatcagtgattgctcttcactctgattctctatggtgcctacaatctatgacaatcaagctgttccacatagaatgaattcttgctgcttttctaggactgtgcctccactagatggaaagttaagcattccatcaaataattgcaatggggatggttggtggttgtggttgctagtcttaatctaccattgaaataaacatttggactgattactcaaaa

SEQ ID NO: 88330 - DNA, 546 bp, Homo Sapiens
  misc_feature (100)..(139): n is a, c, g, or t
tctgatgggagctgaaaggatgagaggtgggcatctagatttagggaggctgttcaggctttgcaggtcccttacctgaacacatagaaaccctggagcnnnnnnnnnnnnnnnnnnnnnnnnnnnnnnnnnnnnnnnngcgggggatgggcacctgcatgaatgtggtagagaaaatggctctgctcagagggaagatacgcatagcaaggcagggaccagaggaatcacaggcgcctggagagcagccgggcaccgcctccagggacctgccggcttccctcagtcctccaggggcccagcactcttcctttaggccctgtgagcgtcccttgtcaggatacattctctcattttgctgaagctgatttgattgggtgtctgtttctcgcagccaaaagagctctgaatgaggaaagtgcttctgtgctaactccccgcgtctcctgaatttcagtcattcatgtacccgcctcgaaatttttgcaatatctgtgtaccaactgtccatttacttaataaagaagttttctttaaattaaaaaa

SEQ ID NO: 88331 - DNA, 581 bp, Homo Sapiens
  misc_feature (173)..(229): n is a, c, g, or t
  misc_feature (337)..(373): n is a, c, g, or t
  misc_feature (562)..(562): n is a, c, g, or t
ctagtgattctagtgaaggaaaaacaaaaagtgtacggcatgcgtatgtccacaaaccatatctttactcaaaatactatagtgattctgatgatgagcttactgtagaacaacgacgacagtccattgccaaagaaaaagaagagaggcttttaagaaggcaaatcaatagnnnnnnnnnnnnnnnnnnnnnnnnnnnnnnnnnnnnnnnnnnnnnnnnnnnnnnnnncaagggtcaaggcaggagtagtgtggacttagaagaatcatcaacaaagagtttggaacctaaagccgccagaattaaagaagtccttaaagaacggaaagttttagnnnnnnnnnnnnnnnnnnnnnnnnnnnnnnnnnnnnnttcaaggaatgttgaagagaactccaaaaagaaacagcaatatgaagaagattccaaagaaacccttaaaacaagtgagcattgtgaaaaggaaaaaatttcttcttcaaaggagctgaagcatgttcatgcaaaaagtgaaccaagtaaacctgcccggagactttcacaccctttgcatgtagttgncgaaaacaaaaatgaatcc

SEQ ID NO: 88332 - DNA, 1065 bp, Homo Sapiens
  misc_feature (26)..(26): n is a, c, g, or t
agggaatttggccctcgaggccaagnaattcggcacgaggcctcgtgccggcacgagggaaagcgatgccaacttaaatctttgctttgttggtctggtttttatttctttcttttcattttcccataattaaatgtgccatagtacaggttttacttccccatgtcaatcgcgagcaagtgaaaacaggagaaggggtgaccttgcgcttccactcattggtttgttttgtaaaaagcatttattgcagaaaaaatatgaggcttgctggtagtattcccaggtgacaaatgtgcacccaacaccctacagaaaagaagaaccataaaataattaattattccattgtaactcctgcctggaaaacatctgaaagaagtcactagattcagcccacattcaagatgagaaataccagaaggcagagaacactgaggctgttttagaggctgtcaaccccagggagacagacagcaaataagcaagcaaataaataaaaatggaaggtgataataagtgcaatgaaaagaaatgaagcagagtaaagaatcaagagtagcagttgaggggatgcttggatgttttcacaccactctgacacatggatggaaggttagaagacaacaaagaaatgggctgggaaggactccaaaagcagaatcagagattatatcattccttggaaatggagaaaaggatcaaaaaagctgaataaaaggcaaacatggaggaacagagtttggagcaataccctgacttacattcagtactgttaatggctccagcatcttgaaacaaaccaattttggattttcagccgctgtccaagatgacgtgaactccaggctattgactttcctctaccttcaatggaaattgtcatggagaattaagtttttgacaaatctacagcctatgtgcagggcttcttcctgggtgtaacaataaggaatttggaaactgtctctagttttggcctggagtcacactgcagcttgagaccctgtcatttccatcaagcttgaaaatatacatcttaataaactgcaatacttcttaaccctt

SEQ ID NO: 88333 - DNA, 631 bp, Homo Sapiens
tttttcgtgggtgctgcgttaggcagcactggccggcggaatccactggtttattaagtaaacatttgaagcctgagaaaccattgaggtggtgtggtgctttttgcacttgggagagttgatgaggccttgagagagtgttgtgggagccagctaagattgtgggggtagaggaaggttcccttagggagactgagaccagtgggagttaggtacccagttgggcgaataaaactttgacctaaaagtgaagggtttttcaggaaaaaatgctgtagattttgaaggaaattctaaaagagaggttaaagtgttttcgcacagaggcgtcatccttaaggcaaatgaaaagtttggagatcactctcttaaaatcacattcagctagtcacatgataccttatgtgtgatgtgctggaacatgccataaacaccacagaaattgatggcattgtcagctgttacacagtaggcttggcctctgggatcctgcagactctgtcgtgtggggtaacatgaagaatcgtttcccttgttgaaggtatactgatgttgtatgaacaggatgccctgaaatatacagcagtgtcccatggttgaccttaatgattttaaagtcaagtgagactta

SEQ ID NO: 88334 - DNA, 509 bp, Homo Sapiens
ttttagattatattggccatgtcaaagatgaaacagtattttttattcaacaaatgaaaattatagtcatttctcataacattccaatgaggctttttatgcaatggcatgtttcagtgataaaagttccagttatgtatctcgacgatgtgacacagtcacagtccctaaaggaggtcatcacagattttctcacacaaactcataaactgtcactctacctttgccagactatgaaagtaggcactaaaggaccaggcgataacttacaccaagttgcacctgacctactcctcccagaacaaatcataaagtacttgtgcaaatccgaagaattcatggacccggcaacatttataaacatgtataatagacccatacacatcactctggattctgaggtggtatggcctgctccttcacgtttctaggattgagagggataatgtgcccatgtctcttaaggagtttgtgctacttaaataaaaaaaacatttttaaagttaaaa

SEQ ID NO: 88335 - DNA, 413 bp, Homo Sapiens
gcgcggagttctcggctcgctccaggaagaggaaggcaaacgtgaccgtttttttgcaggatccagatgaagaaatggccaaaatcgacaggacggcgagggaccagtgtgggagccaggtaggtccgcccggggttgggcctctgtggaggtccttctccccctgggtcacatggggtttcatgctgtcttgtctcttgctggagacactctggtgagagtgaacttctctaatgcagccacagcccatatggcccagcactgtacctgtcagtgggcactggcctctgccagtcctgggattccaggaagcttggtgttcctgactggcaccgtctgagattacagatatgtgcctagcctggaagaaccagaatggacatcacagtattcagtcctccccttctgcccag

SEQ ID NO: 88336 - DNA, 904 bp, Homo Sapiens
  misc_feature (129)..(191): n is a, c, g, or t
  misc_feature (639)..(639): n is a, c, g, or t
  misc_feature (709)..(709): n is a, c, g, or t
ccaattctcatacaccccaccccccacacaaacggaggcaaaataaactaagtagcgaggcctgggtggcgtattcggcacgagggccagcgcggtgtagggggcaggcgcggatcccgccaccgccgnnnnnnnnnnnnnnnnnnnnnnnnnnnnnnnnnnnnnnnnnnnnnnnnnnnnnnnnnnnnnnnggactggagcgcgccgtccgccgcggacaagaccctggcctcaggccggagcagccccatcatgccgagggagcgcagggagcgggatgcgaaggagcgggacaccatgaaggaggacggcggcgcggagttctcggctcgctccaggaagaggaaggcaaacgtgaccgtttttttgcaggatccagatgaagaaatggccaaaatcgacaggacggcgagggaccagtgtgggagccagccttgggacaataatgcagtctgtgcagacccctgctccctgatccccacacctgacaaagaagatgatgaccgggtttacccaaactcaacgtgcaagcctcggattattgcaccatccagaggctccccgctgcctgtactgagctgggcaaatagagaaggaagtctggaaaatcatgttaaacaaggaaaagacatacttaangggatcagcacttttcttgagcaacaccctcttctgcagccaaaaatgcgagcatttcttctggattggntaatgggaggtgtgtgaagtctataaacttcacagggagaccctttacttggcacagatttctttgaccggattatgcgacacaagaaaatggtgtaaaaactttttacaggctaatgggaattaatctttattaattgcaccaaactggaggaaacattccccaaagttggaccattggggtagtaacagatgg

SEQ ID NO: 88337 - DNA, 586 bp, Homo Sapiens
gattacgaagagaggcccacaaacaagaaaaaaaggaaaaattgaagaatgaaaaggccttgcgtctcaccttgttggtgaaaaactgcaatggtttcaaaatcatcttgatccccaaaaaaagagatattcaaagaaagatgcttgtgaactaattgaaaggtacttaaatcgattcagcagtgagctggagcagattgagttacataacagtatcagggacaggcaggggaggcggcactgttcccgggagaccgtcatcaagcagacgatggagcgggagcgacagcagtttgagggatatggccttgagattccagacattctaaatgcaagtaatctgaaaacatttagggaatgggactttgatctgaagaaattaccaaacattaaaatgagaaaaatttgcgctaatgatgcaattcccaagacgtgcaagaggaaaactactataactgtagaccaagatttgggggaattggaactaaacgatgaatcaagtgattcagatgaggaaatgactgcagtggcctaattgtcttcacttgaattgaaaataaataatttgagagcttcaaattaaaaa

SEQ ID NO: 88338 - DNA, 383 bp, Homo Sapiens
gggattcctccctctatgcattatagctgatgtccaatggtacgggcagagaaaaagccaagcccgggaccctcgtgtgagccagcccggcctaatctgaccgcctcaacgccattctgagatcacctcactgcctctcatttgccttacccagacgcaccgtcaccctgcaccagctttggacctcagcactttttttctcctgtctccgcattccctcccccttgaaaacctgactgaggagacattctggaagtgttccggtcccactgtgtgtcccctggagctcttgacaataagagagccagacaccaatcctcaatggcaccttggtggctaccctctgccatgaaagaccctaaggccaggaatcacggaggccg

SEQ ID NO: 88339 - DNA, 597 bp, Homo Sapiens
cagactctaatgaaaagcatctgcaagtgattggctatgagaagatgattcatcatccacacttctcagtcacttctattgatcatgacatcatgctaatcaagctgaaaacagaggctgaactcaatgactatgtgaaattagccaacctgccctaccaaactatctctgaaaataccatgtgctctgtctctacctgaagctacaatgtgtgtgatatctacaaagagcccgattcactcaaaactgtgaacatccctgtaatctccaagcctcagtgtcgcgatgcctataaaacctacaacatcacggaaaatatgctgtgtgtgggcattgtgccaggaaggaggcagccctgcaaggaagtttctgctgccccggcaatctgcaatgggatgcttcaaggaatcctgtcttttgcggatggatgtgttttgagagctgatgttggcatctatgccaaaattttttactatataccctggattgaaaatgtaatccaaaataactgagctgtggcagttgtggaccatatgacacagcttgtccccatcgttcacctttagaattaaatataaattaactcctcaaaaaaaa

SEQ ID NO: 88340 - DNA, 449 bp, Homo Sapiens
aggccatggtagatgtgggcagggaactggagactccgggcccagtgggttcaacctcatgagggagtggagttgagatgctttggggatcagtgacacaacctcttacttggcttggggtgcaaacctagactccctgtcaccctggccttctcctctccaagagaaggagaactgtgggcatcgcagtggtgacacttcagttatcacaggctcagcagccaagtgaaaagatgatgttggaatttcctagatgattccattcatggattggccatgcagcagtccttagggatcccctcctaaaagtcacgatctacccaagaatccactgtgaatcgaccatccgccagtttctccaaacgttttaaagagcaatttgtattttcaacctgtctcacctcttggggataatgaattagacgagttgactacccactgtgtaaaaa

SEQ ID NO: 88341 - DNA, 574 bp, Homo Sapiens
gatctgtaaagatcatttaaatggagtgctcatctcattgaggagcagattaattttgcgtaagtactttgattatttaatatttgtaagaaaaaactttcattttcctacagaggaaaatagaacaattttagaagcaaggaacaatctcttttctaagtcttggaagctgtcagtgttgaggatgtaatctcctttgccatctttaattcacctaacttacactaggtgttctcttactgtctttaaaagcttcctgtattttattagtggtccttgaaaaactgtgaatgtttgggaattggtagaaaggcaaaaagtaggatattttgacctgactggaaagatggttgtgtttttattgccaggtaataagtgtgatcattgttgaacttcagctccagtgtctctccagaataagacattggcattcaaatgtctatatcttgttacttacaaaataaaaaacagattaattagtggcttttaaattgtagttatatcagtgtatatacacgaggggaactgtataacgacatactaaagggaacagattaaaataagtattattaat

SEQ ID NO: 88342 - DNA, 624 bp, Homo Sapiens
gcggccgcggtggcacttggacccgaggaggcggcactctaccgtcgcaggactctgcccttccccaagagaggaaccagaaggaggacctatcagcccttgaaattctaaaagtcatgtcccttgggtcagaattgttcagggatgtggccatagtcttctcccaagaagaatggcagtggttggcacctgctcagagggatttgtacagagacgtgatgttggagacctacagcaacctggtctcactgggtcttgccgtttccaaacctgatgtgatctccttcctagagcaaggcaaagagccctggatggtggagagagtggtgtctggaggcctgtgtccaggagctaaagggcagaggggcagagatgctggctgtgcttgctgtaaaagaacagaacagaaccccggtcaattatggaaaatgactgagtctggcctgtttttcatgcactaaacatgtgggaatcccactgttttttccagattatactgtgtatgtagacagtggagagggctaacctcattaagggtgcaagaggggctggttttacagggggcctctactacgaaggcctaatggttttgaaaatgaactcaaataaaagattattaccaaa

SEQ ID NO: 88343 - DNA, 666 bp, Homo Sapiens
ggggcgcacggcgaatccaccggtaccgtggtggaagcgcgccctgggctgccgggggcgcggccgcggtggcacttggacccgaggaggcggcagctctaccgtcgcaggactctgcccttccccaaggagaggaaccagaaggaggacctatcagcccttgaaattctaaaagtcatgtcccttgggtcagaattgttcagggatgtggccatagtcttctcccaagaagaatggcagtggttggcacctgctcagagggatttgtacagagacgtgatgttggagacctacagcaacctggtctcactgggtcttgccgtttccaaacctgatgtgatctccttcctagagcaaggcaaagagccctggatggtggagagagtggtgtctggaggcctgtgtccagtattggagtccagatatgataccaaggaattatttccaaagcagcatgtttatgaagtcgaatcaccccaatgggagataatggaaaagccttacaagttatgggccttgagtgttcaagtttccaagatggattgggaaatggaagaaaaccaggttttggacaggaccaaacaggggaaaatccccagaacaggaaccttttttccccattccaggaaatggaatcccttctccaggaaacccattgggaaaagg

SEQ ID NO: 88344 - DNA, 551 bp, Homo Sapiens
cggccgcggtggcacttggacccgaggaggcggcaggtgagaggttccggagctttccaggcgctctggggtccagcaggagctggtgcccgggccggttgggtctcaggcctgagaagaacgcagacgtctcgcctcatcgtcgctctgtggctttaccggcgtgagactacatttcccgccggccctcgcggcgtgcgctttctggcgccccctttctgcttccagcctcatagcccaggtgcatggaccccttagctctaccgtcgcaggactctgcccttccccaagagaggaaccagaaggaggacctatcagcccttgaaattctaaaagtcatgtcccttgggtcagaattgttcagggatgtggccatagtcttctcccaagaagaatggcagtggttggcacctgctcagagggatttgtacagagacgtgatgttggagacctacagcaacctggtctcactgggtcttgccgtttccaaacctgatgtgatctccttcctagagcaaagcaaaaagccctggatggtggagagaagtgtg

SEQ ID NO: 88345 - DNA, 599 bp, Homo Sapiens
gtgtgttctcaatgcccttaactcttcgactttcattctgagctgcccaacatttcctagttattagatttaatattaagaaagaaaatggaacactttatggaggtagtttttttctttcctgcccaataagaacaatctcaccttgtccttgatatatgatgatgttcaagggagaaatataaatccaagtgtcctgggtgaagttatctttttatattaagtagcaggtacttaggagaatcataagaattcatttagggctctcaggttgttatataatattactgaagagcaaattcagttgttaacctctgcccctgacttactttagtgggccactagaaacaataaaggtctaagatttaaaaaatatataaatcaaataaaaaggatgcataaatataattgacatatttaccctttacctatatttgatctgtattatgcattttaaatattactattcttttatgtgcttttatgttttatttatttagtctatatgcctaatacgcacatctagtgtatgtctctaagattaaaatctctagatggaccaaagcttcaacaataagattctaagattcagaagagcc

SEQ ID NO: 88346 - DNA, 451 bp, Homo Sapiens
cccattttggaactctgaagtatctataattgatctctatacatatctacaatctactgcttgtttctacttagactttgactccattactcattttgcctcacaaagtgagttggtactttgacaaaggttggaaaggacactagccacctgtgtgtgcactgaaatcatgtacgcttgaacatttggaattttatgtccagccataatccacttgcatatgcactttgtggaaactgtggtcttcagaactctggaagaatgagaatggcggagtggaaaagagtcctggatttgaagtaaacagatgagaattctaggtctgtacttcaccttaccattatctaacaatggacccctgaacaaatctctctgtctaacatgaggggcttgaagtagttctgtgatccccagtatatttttatcctattaaactgctgacttgaaaacc

SEQ ID NO: 88347 - DNA, 385 bp, Homo Sapiens
  misc_feature (35)..(35): n is a, c, g, or t
aagcgcagcagcccacggcggttgagtcgggcgcncaggtccgtccgcactctcgcgccctccgcgggcctcccaattttctcgcttgcaggtcgggaggtttccgggcggcacaatctctaggactctcctcccgcgctgctcaggggcatgtagcgcacgcagggcgcacactctcgcgcacccgcacgctcaccgagacacccgcacgcacccaccggcagcaccgagttttcagttcgaggcgccggacatgctgaagcccggagaccccggcggttcggccttcctcaaagtggacccagcctacctgcagcactggcagcaactcttccctcacggaggcgcaggcccgctcaagggcagcggcgccgcgggtctcctg

SEQ ID NO: 88348 - DNA, 408 bp, Homo Sapiens
ccaacagcagcagcttcaggagtatttgcatggcatgaggacacctccactctttgccctctagtgttaaactcaggcatcttttctgtaatgtgaaaggaaagcgtgttttcagcacaggtgacattctaaaattgggtcttccctgtgaagaagctgaggagataaacagcaagaataaattcacaaagccttgtaagagaagagcagagcgttttcatagacgggatgtggaggtcctggaagcacagcccagcagatgactcacctctggatggaatcaacacacaaagcagataaaaagctgaacattaaagaccacattgttaaagcagagagccaaattgttcctccaccattccctatcccagacttcacatctaacaaggttaatttgtccctataaaa

SEQ ID NO: 88349 - DNA, 405 bp, Homo Sapiens
catggcatgaggacacctccactctttgccctctagtgttaaactcaggcatcttttctgtaatgtgaaaggaaagcgtgttttcagcacaggtgacattctaaaattgggtcttccctgtgaagaaggttcgtatgaaaccagataactctttcatggccacagggtttgtgttgcttctaccaaagcagcatttcaggaaagtgccttcccagggccggccactcacagtggacttttcacctgcactcaccttcttccaatttgcaaagccctgcctcatcacatttgagaaggccttgtacttgagtaagttaaacagtcacgggctctgctgtctctgatctgacaataacaagcattatctactttggattcccagaataaaatcaggcactgagtaaa

SEQ ID NO: 88350 - DNA, 645 bp, Homo Sapiens
tttcaagagagaagaaggcatttaaataatattaatgtggatttttaagtaaaactcatataaaaataatttaagtcaatactggtaggagtctgggagaactttccttgggttcattacccaagcttgagaaacactgacacaatttgtttcagttttggagcacccgtgggctgtacagaaaattaatcttcccttgatcgaaatgtgtgaaagtacaaaatcacagagccccaagtttctttgtgagcctcaagtcaacaatgctcatttgcaggcctgctctcttcccatccctttagaagctccaaagcgctgagacccaacctccactttggcacctggaacagcccctggagttcgcctgggtcccatggcgatcagggcatcacggagagccgctgtgctccctgaccttccaaaacgaccgagaaaaaaatgctggcagggctggcggcccatgtccgtgggagcagtacttacacgaagaagggcatcagctggatgagggtctccttcttggggctggcagcgaactcggggaccatctggatgactttgttcatgacgctgcgcaggtaattctggagctgctttctccgttcctccacaaacttggcatccttgtttccaatggcctttttg

SEQ ID NO: 88351 - DNA, 708 bp, Homo Sapiens
  misc_feature (678)..(678): n is a, c, g, or t
gtctgtgactcttggttagggcaaatttcaaatccattataatacatacattgcagcaacactgagtttcttataataggtactatccaaagctttcttttttttacatgtatcacttaatcctcacaaccacctgaggattaataccatttacctgttttacagataaggaaaacaatcatttttcaattatgactatgcccccaaacactggtttggatggagccttcactggtatagagaatgaccttcttcccttagactagactctggctataataaaggatggtttaatcatcccctgaagcaatgcataagataatctgcaatgtatcttcacatactgtaccttatttgataggcaagagacccataaaggaagctgagcatggattatcagcttcatcacaaatctgaagaaactgacatttatgttatgttgccttacccaagttgggacatcagagcagcaactaaaatccaggtcttcttcctattacatgccgtaaaaggtattgtttctttccctcccctcaaaattttcagtcaaatgtcagcttttaggaagagccaatcactctgaactagaattgttctcttcacttaaaatttctcaagcctaacttctttttgggtcctacaagccgggaaaatacctcagaattggaaccacatgtntacagtataagaaatgacacaagtgtgact

SEQ ID NO: 88352 - DNA, 985 bp, Homo Sapiens
ccatacagatattttaatgctcacaagttatttttcgacggagatcaacattacattaacttgaatttagtttcattattaaattatgaaacaagatacagataaatcttataagcagagttctgattacttaacacagtgaaattgcaattccaagttacagagacattcacataaagatattcttgagctactaaataatggctaaatactgatgacaataagaattaatactttccacttatgacatttgtcaataacaactctgattaggtaaaaaataattaacatgatggtcatattataattctaaataaatacattattatgtttgccacaggagtaggtgtgtatgcgtgtgtgggtatatgtgcatgtgtgtgtattcagatggtactgaactcaagttggcttttaaaaaggaagagatcaggcatattactgtgcacttatgttatcagagtgatttatgtaatgctatgatgtcaaataaaacctagagtctagtcaattagagtaagcagagtacttgaatctgttgagtctgtttggtcatggaaaatgagttacctctaacaaaactggcttgttcccttcttccaatacgtaaacaacagagtgtgtctccatctgcttatttcccagtaacttttagatccatgtttctaaactgaatgcaaggtaattcccaaagagcacaaagggagctctgagctctggatctttggcaaaccttctacctcaatgactgtctcctctcagcaaccacactgaagtgttcctatcacagagcttctccacagtcatccaatttatcttcttaattgattactcctggatgagctatagagagtcatactctcctatttcccatcctgccatgtttctcaccttccttccacattcttggggatgggataaaaggaaaacagagaaggagaatttctgctgagtgaaaacaaaatgcaagtgggtaacaaaatga

SEQ ID NO: 88353 - DNA, 454 bp, Homo Sapiens
cagggcctgagcgggttctgtgcctggctgcccaccggctctctgacctggacctcgccgtcgctggcccctgaaatccatcacttttgtcggctgttctgtgacgccacaacgaggagccacctgggctctgctgacccttcgggattcgcggctagctgtgatgtgtccgccaagatctcttctcttgtctgtaaacaacttcactctcaaggaggcagctctggcctctcagcaggagctggggaggagtgactgaataactataggatttggtcttgatgggagaatcccagaagccaaatccacgcggtgaataagctgctgatcttccagagcacacatcccctagagattcttcccaatgctaatatgaaaggttacaaccataacccatcatcaggcccaaatatattacttactgaataaatacacaagttacaaaaacaaaaaa

SEQ ID NO: 88354 - DNA, 362 bp, Homo Sapiens
gagatttgagttttgttaccagagcagatctttgtcatcctggataatgtgcctgagaagaagaggtttaaggaagaaaacttgtgaacaccaatgtgcttgttagactcctttgcttgctccctgttatacacttgccactacacttctgacttagatgtggtactttgttagtatctgtgaggactgaaaatgagatcgaagagaaaaatccaatcaagcattaagtaatcatatttaaatggaaaatgggaagatactattaacgaattcaatggtggcttggtcctgatgacactcttcttgaattatacgacgttcttatctcttgcggggctgttgaaataatcaaatctttgtac

SEQ ID NO: 88355 - DNA, 611 bp, Homo Sapiens
caggaatatggaagacagggcacggtgcaccctgtgaccactgtcagcagtagcgacgtggagaaggcctacctggcctactgtacaccggggtctgacggccaggcagccaccttgaagttccaggccggaaagcacaactacgagttagatttcaaagccttcgttcagaaaaacctggtctatggcacaactaaaaaggtttgccgcagacccaaatacgtgtctccccaggatgtgacgaccatgcaaacctgttggaccagagtgggaattaccctgtgggtagaagcttcgtgatgcataattagaaggctgcctgttgtgatctgcgatgattctctggagaagacagactctgaaggcgagtctagacttgaagccaacccatccgtttgtcttttctgtggaatcattgagtcatagacttgaattttttaaatgttgaaataatgaaataacgcatggaattacaccaataaaaactcatgtattttagtatttgaatatcacggaataccaaaactctaaaaacagatattgcagtcactaatgggcgagcttcgtcagggtgagtttctttcagtcccaagatggctgccactagccaa

SEQ ID NO: 88356 - DNA, 933 bp, Homo Sapiens
  misc_feature (694)..(694): n is a, c, g, or t
  misc_feature (837)..(837): n is a, c, g, or t
gatttggtactggagtgatgagtttggttcttggcaggaatatggaagacagggcacggtgcaccctgtgaccactgtcagcagtagcgacgtggagaaggcctacctggcctactgtacaccggggtctgacggccaggcagccaccttgaagttccaggccggaaagcacaactacgagttagatttcaaagccttcgttcagaaaaacctggtctatggcacaactaaaaaggtttgccgcagacccaaatacgtgtctccccaggatgtgacgaccatgcaaacctgcaataccaagtttccaggcccgaagagcatcccagactattgggactcctctgccctgccagacccaggctttcagaagatcacccttagttcttcctcggaagagtatcagaaggtctggaacctctttaaccgcacgctgcctttctactttgttcagaagattgagcgagtacagaacctggccctctgggaagtctaccagtggccaaaaggacagatgcagaagcagaacggagggaaggccgtggacgagcggcagctgttccacggcaccagcgccatttttgtggacgccatctgcccgcagaactttgactggcgggtctgtggtgttcatggcacttcctacggcaaggggagctactgtgcccgagatgctgcatattccccacactacagncaatccgacacgcagacccacacgatgttcctggccccgggtgctggtgggcgaattcgtcaggggcaatgccctctttgtcccgtccgccggccaaaggagggctggaacaacgcccttctatgatagcttgcgtggaacanggtggtccgacccctcccatcttttgtggatctttggagaaacaccaaggtcctaccccagaggtatgttcatcccagtaccaccaccctccctcc

SEQ ID NO: 88357 - DNA, 935 bp, Homo Sapiens
  misc_feature (114)..(114): n is a, c, g, or t
  misc_feature (317)..(328): n is a, c, g, or t
aaagggttatatatatgtcctttagatcagtgtaacatgactgtgatcatcttacaaacaaaactcaaaaaatcaattcagagagcagcgtggccttggagaccacccacaccncaacacaattgtacgtactgggctttgctgtcaaggagtgagcaaatgagttcgttatcaaaggtcatatgttttcacagtcattcaaattatatcccaaaaacttttcttgtattctctatcttttgacttttttttcaaagaactgattgcacagtatacagaaatcctgttatactttactacttaaggtggagtctaannnnnnnnnnnnaatttatcagtgcttaaaaatcttcaaaatagcttagtgaggctcatgacagtgctggccccatggaaatgtagccttttgttgcgtttaaacactgtcacaccatctatgactgtcccattggtctgaagtgtagtggcaaactaagcatcctataagacaagctaaagcttgctttttgccagtcagttgaaagtcttgcatctcttcactgatgcactttctttaggtattgatagtcagaagcacaaagcatttattatgcattcaatcatgtagctaaacaaaaaactgaagtctcctgaagccatttaaaccagccgttccaaaatctcctgcgaccactttgttagtaccgtcaaaaactttcccaactataaatgaaagaataaatggtagtgctgctctccagatactaggcactgctccgtatttttgaacatttgatttaactaataactgtgtcaaaagcctcaaaaaaccctgaaattaattttccagctttactgtcaccagccagaagtaaaaatcttaatttgcctgttagctgattgctgttaaattttaaatttattttataaaaaacggttggacttctatcataaag

SEQ ID NO: 88358 - DNA, 420 bp, Homo Sapiens
gtctgtgcctgcatccatccttccatcctgtactccagcagcagccagggtggtctttcaaaaatgcaaagctgataatgttactcccctgctgtaaaccttccagcggtttcctattgccttcagaataaaatacgaatcatctggcctccatctatctctccaggctcatcctctctcaattttccatatccttcaggctgagctctgaaacttctcctggcagttcaagagagcgatggagggaatgctggggcacatctaaataaagcctccaagtgggagttcctgctcagctatgcatgagctctttgtgacttcatctcccagcctacaacttgtgaaataagcacgacttcactcagagcacagccagaaacatacaaactttccaaaaatatttgaatgttgacagcaaaa

SEQ ID NO: 88359 - DNA, 573 bp, Homo Sapiens
cctagcgcctcgtctttcgtcgccccgtgccctcacgccgccgggctctggccggcccgccctcggtccttgaaccccatttcggctcgtgccgtgcggatgcagctgccgggcctgggtttgggcattgagcgggaggaggaggaggagcggcggcgcctgggcggcatgcgatggggaactgctgctggacgcagtgcttcggactgcttcgcaaggaagcggggcggctgcagcgagtaggcggcggcggaggatccaagtattttagaacatgctcaagaggtgagcacttaacaatagagtttgagaatctagtagaaagtgatgaaggggagagcccaggaagcagtcataggcctcttactgaggaagaaattgttgacctaagagaaaggcattatgattccattgccgaaaaacaaaaagatcttgataagaaaattcaaaaagagttagccttacaagaagagaagttaagactagaagaagaagctgtatacgctgcacagcgtgaagcagccagggcagcaaagcagcgaaagctcttggagcaagaaaggcagagaattg

SEQ ID NO: 88360 - DNA, 519 bp, Homo Sapiens
ttttgatcgcttaatggttaaattcttcaacaaaataaatttattttcagaaatagctcctccttcaaagtcttcagaataccactcactgcttagtatttatagttgtgctggtttggagtgggatatggcgtcactttcagtgctgatcccaaaagggtgtcctccacccagatgactgtctgtaaatctccattctagaaacaaaccaagatagctggggttagaaaggtaaacactaaaaacattgaaggtaacagcacagaaatggggtgacaggtcaaatcaaggaaaacctagtctccttcaattgccaaagacaggaagaagcagtgcaaaagaattcacacatgaactcagcaaagcaaagagaacttcctgaagcccttcacttctgctgtaagtacagtatgtgttttaccttctctaatgtgccccattccctgagtgaggtccatttcctcaacgtgagctccagaaccatgatcttctttgccttcaatccccatatccaggcct

SEQ ID NO: 88361 - DNA, 514 bp, Homo Sapiens
gtgaaaaagccttcagaagggtttctatatcttaaagcctaagcagtgtattttgttgataccagcaattaaagttgaataggtaagaggtaagtctctgtgcatagaagctaatacctggatgtgaggtctagtggagagtgagtggacagtggtggggagggagtgatacagtgcatatactcgaaaactggtttctgtcattgtcattgtttggtactccctatgggagacattattaactgtctattaatacagataattatccctttcttttgctaacagaaccccaagcaataaatcctaatttgtttaagccaattatgatcagctgctggggatggccatggcacccggtctcataggggagtttctggagaaacattggttttcctgataaaaagggacagacacgggtaatatcatccctacatctttctttgtactttgttgaaaatatgagacctacaggtgtagtagacactcaaatcctgaagtagccagcatgagaaaa

SEQ ID NO: 88362 - DNA, 713 bp, Homo Sapiens
gacaagccccaccctcagcagaaggcaaacacctccaccttcctgggcctccttcaaccttcctgccttgtccatgaaaggatctgagagttggggcgaggaggttgtattagtctgttcttgcatttgtataaagaaatatctcatgttatcttctagaatttttatagtctcaggccttagatttaagtatttgatccatcttgagttgattcttgtataaggtgagagatgaggatccagtttcattctcctacatgtgacttgccagttatcccaggatggctggaaaagccaccatagaaattgaagtgtcatgtgtcatagagtcagacaggcgtcatgacagccattcacaatcgtggaaccttgagccgggcggttaacctgtgtaagccttggtttcttcatctgtaaaatgagggtaatgctatccactcttcagagccattgccagaaatatatgaatgaatgactccaaaatgtctcccatatttgcctcttcaaccgacgtttaattccctctttgctaacagggaaaatgtccctttactgcttaagggagagagaataaaggcggaagcaccaggttaagaaattctgatgttttcacgcattagctggtgctcctagctttctgatttccattttctagataaggctttaaggacccccttttccttaaaataataaacattcattctcatcataaa

SEQ ID NO: 88363 - DNA, 862 bp, Homo Sapiens
  misc_feature (228)..(228): n is a, c, g, or t
gtctcttattctagaatattccagtgggggtagggaaggagggatggatttggggtttcatttaaggactctgacaactggggtgcagctctgtggccagaagataaaatatcatcctctccatcacctatctgccaacactgcagatttctatctgctcatttaagagaaacagtacacagggagatagcattaatgcaaggcaggaaaggctttacattagcccanaaaaagaggggcttgaccatgttactcacacttacacttagcccagcagaaaagctgggcttatgtaccacttggtttctttctttgaccctagcatcctgaaaacatcacacacagtggaccacgctttgccctcagagtgactgctccgacccggaaggagaggtcaacgacccctcaggacacaaagggtttcttaggttgttctgcgcagtcacatggcttccagaaccagaacgttcagctcttaaagtctgcacagaagaactgatagaatctgctcctttcaatggaatctgtgactgtttgggaaggatgtgcatggagaagggtctgatgaggctcctgatccaggcggtccacgtgcgttcagtgtgtttggaccctaggcacctctgtctattgctcggtcttgcgtacatagtccatagcttggcatcagcacagatcgatgcttagtgagcacaattaagaaaccaaactatggaaaattaaggacagtaacaaaagtatcatcaacaaaaatcaagcattttcctctttttgaaacaagaaaagcgcatcgtagaaaccaagattctgtacaataccccaacattatatgtacataaaattatattaatcataaaaaaaa

SEQ ID NO: 88364 - DNA, 152 bp, Homo Sapiens
cctttaaaattggggtaatagcccatatcctccacatcgcagaaggttcatttttattggtccaaaggaagtatatgaaaacacttccaaaaaagtgtaggtgttatcagtatatcataccatgtgagagaaggtgtaaagcaacaaaagga

SEQ ID NO: 88365 - DNA, 483 bp, Homo Sapiens
ctgagcggggccagccttggctgagaactgctgctgctgccccgcaaactgtggggagttgaggcctgggttgctggtggtcatgcccgacgccatggggttgccgcctggattcatggggttgttggcattggccatagggttcccaaggacctggctctgggatgtgttggttactccccaaaccgtggtgaccacggaaagggagccgggaggctggttggtgttctgctgccaagggacagagtcataggggaacgacccatcactgtgcgacagagtgggtttcatggagctcatggagctgagagggggctgcatggggagtttcccagggggatcgctctggcggctcttctgatgtcggagcagcagcaggcggccgagctcttcgcaccaggaggacaacaaggctagaagttgcaccggtcgcgatcccgcccctggcgccctcgggggcttggggcccggccggcgccggcc

SEQ ID NO: 88366 - DNA, 681 bp, Homo Sapiens
cttagaggaccccggcactgcttcggattagggctgagcgggcagtcttggcataaactgctgctgctgcgcagaaagtgtgggagttgaggctggttgtggtggcatgccgacgcatgggtgccgctgatcatgggttgtggcttggcatagggttcccaaggacctggatctgggatgtgttggttactccccaaaccgtggtgaccacggaacagggatgccgggagactggttggtgtcctgcttgccaagggacacagtcataggggaacgacccatcactgtgcgaaagagtgggtttcagtggagctcatggagctaagagggggctgcatggggagtctcccagggggatcgctctggcggctcttctgatgtcggagcagcagcaggcggccgagctcttcgcaccaggaggacaacaaggcggcagacttcggggtgaacttgtctcggtttgcagcacacacagccagcagtctgtagccgaggtccaggtcaaagccttgctgggctgccacccgactgaccaccgtcaaacagcccatcaggctctgctcgaagggccgctggaaggcccgtgggtctccgcaccagtccagcagctccgtggcggcattgtggaagttggcaggattctgtaagtgctgcttgatgcactgcagtcggtcattggtc

SEQ ID NO: 88367 - DNA, 503 bp, Homo Sapiens
agggggtcttatgggggaaatgagtccctttattagtatcagggtaaatttctgaggatgtaggattgaaaagatataaactcaaagtatcccttccaagacaggaaacagcctggggaacagctggttcaagagtaataatagattccaattgtcagaaaatgtatacctatgatttgggcatcgttaaagagcatatccaacccactgaaattctagcaggcacttccctctttaacacctccatgcctctctgaggctgactttgtgtcctcctgggaggctgtctgagtcttcattctgtgattgatgaagtccacacctaactgactagaagctgagtgggcagcttcttgtgggccataatgtcatagtctctgagaacatcctgcagttcatggttctttctgcactgatcaatgcctaaaatttcacagataagatgtccagaggtggcttacacctgtaatccagcactttggcaggctgaagcaggaggatca

SEQ ID NO: 88368 - DNA, 667 bp, Homo Sapiens
  misc_feature (563)..(599): n is a, c, g, or t
tggacttcgggagcactgagtgctcctgcccaccaggcggcggcaagatcagctgccagttcatgctgtgcccggagctgccgcccaactgcatcgaggctgtagtggtggctgacagctgcccacagtgcggccaggtgggctgcgtccacgcgggccacaagtacgccgctggccacactgttcacctgccgccctgccgggcctgccactgccctgacgccggtggagagctcatctgctaccagctccccggttgccacgggaacttctcagatgccgaggagggtgaccccgagcgacactacgaagacccctacagctatgaccaggaggtggccgaggtggaagcagcaacagccctggggggtgaggtccaggcgggtgcagtccaggcaggcgcagggggccccccagctgcttctgggaggtgggagtcagccactgtccaccatccaggcaccccccctggccagctgtcctccccaggcccacagcggctgctgccctgggtcccccagccccagtgcaggccaaagctaggaaagtgaccgaggacagtnnnnnnnnnnnnnnnnnnnnnnnnnnnnnnnnnnnnntggctgtcactgagcagctggcagcaggtggccacaaggggctggatgggctgcccactacagcccca

SEQ ID NO: 88369 - DNA, 401 bp, Homo Sapiens
catttctttcccctaatcccaggtacctcatgtgtatttgaagtctgaactcgacgccttcctcgcctttccttcaccagggtaagtgacccatgctacataaagatttcctaacaagtgctgccttccactgtcagatcacagttcataaccacagccggcaaagctgtgcgagccgcagcctctggaggcccgggaactgctctcagcccgtctggtttgtctttcagtgaagtgaaggctgggtcagctccaccacctcgacctggggaatgtgtttttgggaaaaccaagtaagagcgggagggagtggtacagcagcactcagccctctgggatttagttcaggtgcgtttgagctcaaaggattttgtttttcacctgtctgcatgttcttaaaa

SEQ ID NO: 88370 - DNA, 550 bp, Homo Sapiens
taatataaaatacttgaggaacattcaaataagtagaaagcacataagggttgctttcaccttcattaagtctgctgaaacgggatttttcagaaaattgtcaattaataaatagtaactggtaactaaattcataaagtactttgaaagtttaacataaaggtcatcttaatagaatcactggggagaaggggaatttccctgcctttcctagtttgtataatcaaatgttaactcaataatagaaatgttttgtttcttttaaaagttatgggttgattattacctataaactatcaaaaaatattttaatttactatttctgaccaaaaataaataatacaagtactaaaatgctgcaaattaactataatattacctataaaactactgattactgtgaagtcaatagcaaaatgatccctgatttatgaatcctgtaaagtttttggtcaggtcatcttttaaatgatacaaaagtgttctgtaagtttccctttactataaacttctcaatcaatttattaatgtaaatatagtgtgaggaata

SEQ ID NO: 88371 - DNA, 939 bp, Homo Sapiens
  misc_feature (134)..(147): n is a, c, g, or t
  misc_feature (870)..(890): n is a, c, g, or t
gccctcccaatcgaaagagtccaggggggcccataagaaggggggcaaccttgctagggtagggcgttgtcctgggggccccatgccttcgggatgcccttcccgcctttacctgggatgggggggaaaccccnnnnnnnnnnnnnnttgaagcagcacccgttgtggtgggccatgcccgcctgtcacgggtgctgaaccagccccagagcctcttagtggagacagtggtggtggcccgggccctgaggggccgtggctttggccgccgcctcatggagggcctggaggtctttgctcgggcccggggcttccgcaagctgcatctcaccacccatgaccaggtgcacttctatacccaacttgggctaccagctgggtgagcctgtgcagggcctggtcttcaccagcagacggctgcctgccaccctgcttaatgccttccccacagccccctctccccggccacccaggaaggccccaaacctgactgcccaagctgccccaaggggtcccaagggacctccattgccaccaccccctcccctacctgagtgcctgaccatctcacccccagttccatcagggcccccttcaaaaagcctgctggagacacaatatcaaaatgtgagggggcgccccatattctggatggaaaaagacatctgaggccatccagggcaaggaactgtctttctggttcaatagactgccccgacagtctacaagcctcagcccactgaccatacctcagcccctagcccctggggggcagctttaacctgggcatgtttcctgggtaccagtggggccaggaggtggctctggctcagagccgtcagtgtggctgaataaaggctctcttgggtnnnnnnnnnnnnnnnnnnnnnctcgagcctcgtgccgaattagccacccaggcctcgctaccttaggacc

SEQ ID NO: 88372 - DNA, 1017 bp, Homo Sapiens
gggtgcaggcaccgtctgctggtgaagacccagccctgacaggctcacccagcttgtagcccaagtgggtaatagaagtgcaccgggtcatgggtggtgagaggcagcctgcggaagccccgggcccgagcagagaccttccaggccctcccatgagccggcggccaaagccacggcccctcaggccacgggccaccaccactggtctccactaagaggctctggggctggttcagcacccgtgacagccgggcatggcccaccacaacgggtgctgcttcaagtgtgggctgggggcttagcagcatcaggcagagggggaaggcatctgaggactggcccagggagtgcaggcgggaggtgcggctgcggggccactgatcattgatgaggtcagcacaagcatccaggagctcgggtcggcggtgcacaggctccagggtcaactcagccaggctaggagctggggtctcctctggctggtgttcaggatccagggtaagctcagttggaccaggattgaaggtcatctctggttggcatgtggaatccaggggcagctttggctggcacgcaggatccagagtcagctcagctgggctggtactcaggatcagctccatccggtgtgtagggtctagtgtaggggtcagcttggctgggccagggctcagagtcagctcttgcctatgcacaggatccaggttcagctgagtcaggctgggagccaaggtcacctgctgctaggttgcaggtggctcagtgccaggctggaggttaagaccccagtctccaggcagtagcatctcttcagaccacagtggctctcctcatgttgatgctggcctccgggatgttccgcgtcctagctccgcacagctgggtatctcactcagtcgccacctcggactcctcggtccgacaacgttggcccccagcggtgcggcggatgttctgcagccgtcgcgtcctgcggcacgccacggcgttctaaggcctcccagcacccgcgcgtcg

SEQ ID NO: 88373 - DNA, 486 bp, Homo Sapiens
tgggaagcaaagctgtggggatgccttcccctgtttctccaaagctgtcaccaggcaattcaggaaattattcatctggggccagtagtgcttctgcaagtggttctccagtgaccattccacagaagatccaccagatggcagccagctatgttcaggtcacatccaacttcctctatgccaccgaaatttgggaccaagctgaacagctttccaaagagcaaaaagaattctttgctgaactggataaagtaatgggccctctcatctttaatgcaagcatcatgacagatctagttcgttatacccggcagggaatagaactggctcgccaggatgccaagttgatatcatgaactgaacacattctcgttgcctctgattttctccacaacactgtgtcacatcacgaaggaaaactgccataacataccacctagtcgacactaagaatgaggaatagttttctcctcgttggttcaaaaa

SEQ ID NO: 88374 - DNA, 505 bp, Homo Sapiens
agagggctcctgagggcaaccctgagggttacccaggccccagcaccacctgggaggacatccctggtctccaagcctccctcttccctgcttagcatcaaagacctaaaggggttaggaaagttcttaaaagtgatgagcattttaactgttaggctgtggaccaccccgtgtctctggaggcactttttccagtcttcccttcatagcagccaactctacaatcccacaagacctggtcttttagggctgaccgtttgagattcttatagttagtttttatatttacagagagaggccatttataaggaaggcctttaactgttttgagaggggcatttgactctcccataaatcctgctcatttctgtctccctgctggtacccaaaaatacccggaagtagcccccagaccttaaatagttgaaaagggtgtcaggggtgggggaaggattgtgtgtgtgtcaagtgtgtaaaggaataaaccaaccctttgacagaaaaa

SEQ ID NO: 88375 - DNA, 515 bp, Homo Sapiens
cagctcccttacttaatttgttccaaaacaaaagttgactcaagtcaaaatgaaattgtgcacttgaaagaaaggaagttatctactaattttttaaatgtaaacatactttttatatagggatgtaactatctgagtacatgtattgccatttctctgctatatagtaatatttcttgacaccaatggtaatgtgtttgtttctttctcagcaccagatgtgtccatatgtatttaaacagtaggagcattgtttctaaattcatctatgctatgacatatataaacccattattattatgtttcactaaagttccagcactttagaaaagtttcagttcaaagtcattttggctcattcatttagataatactgaccattttgcactacaatttcaaaaggaacatgagaaatttggatttctttgaaagagtcaaatatgtaattacagaattgaaacactgtgttaattcacaaagtgatgtaaataataaacattaaaaatttccaaagt

SEQ ID NO: 88376 - DNA, 475 bp, Homo Sapiens
  misc_feature (27)..(27): n is a, c, g, or t
gtaaatccttagatttggttccaattntgtgacccatatcacttaagttcagactcagcaagaaaccaaatccagtcatgaaaagaaccacaccaacagtgcttggaatgaaatatgatgctatagctgttccagcagacatgatgaacattactaataaccgtaagtgggttgacatagatgagcctccaaggccgaactctaaaacctgctccattgcccataagagaagtgcatcgggtgggggcagagtcccaagtgcccacagaaagggtaaaaatacaaacaagatgtgtaaaatctgattcatgtgttctagagctggcatatttaccacaaacctcaagtcacccgagggaagagaagacgcgaaggcatcccagggaccgcatttttgcaggtaaacccgggctgggcgatccagccgggaggttggttagtgcccgaatgcggaggcagaaaagctgcggcggcc

SEQ ID NO: 88377 - DNA, 593 bp, Homo Sapiens
  misc_feature (529)..(529): n is a, c, g, or t
gttagccatggaaaccgagagctggcccgggcggggccgcggtgagctcgttattcggccgccgcagcttttctgcctccgcattcgggcactaaccaacctcccggcggaatcgcccagcccgggtttacctgcaaaaatgcggtccctgggatgccttcgcgtcttctcttccctcgggtgacttgagaaactgctgtgttacagaaaagcatgtgactttcagaataatcccgagtgaggatgagtccagatgtgcctctactgaatgattacaagcaggacttctttctgaagcgctttccacagactgttcttggaggccctcgattcaaattaggctattgtgcccctccttacatatatgttaatcaaattattctttttctaatgccatgggtttggggtggagtcggaacacttttgtaccagttaggcatcctgaaagactattatacagcagcactttcaggtggattaatgctttttactgcatttgtcatccagttcacaagtttatacgccaaanacaaatcaacaacagtagaaagaatactaaccacggatatcttagcagaggaggatgagcatga

SEQ ID NO: 88378 - DNA, 454 bp, Homo Sapiens
aatctcaagcttctagaaatttggcacactcaccaaagaactgaatactcctttgcagtcagaccatgtgttccagacaacataactagaaagatgtgagaaggcacttcatgtgggagataagccttgttttacttaatccactgagatgtcagagttaattgttacagcagcagcctgttgtataggctgactaacacatggtaactaacagaacactttggattcttgacaaaataagagcaagaaagcagcagcagaagcagaaatcagaggggcgagaaaccaaaagcaacagagcaagatctactctctacacatcgacatcctgctctcttccagggagagtaacctacatgaaccataccagtggttcccatccaggacagttcccactcacctccccatggacatttggaaatatctagagacatttttgcatatcacaaaatgc

SEQ ID NO: 88379 - DNA, 812 bp, Homo Sapiens
gtactcaaagagtctcatttctcttgtaggttacagtcccaccatttgttgatcctctgtttcaaagacagcaagaggtggatgaagagaggagaactggtcttcagtgtgagacaggtgctttgtgatcactgggcctcatttttttgagactgctaattgtccagtgatttctcactccttcaagagcaactggagttcttgaagagtgttgatttcgattttttatcttcctgtaggaaaacgacattccataaaagaacttgaagaaatagagaaggccaggctgcatgccagctcgccctacttcactttcacttcacactgtgtgattccaaaagagtggcataaagcctctgcaagagccaggagtaaaacttacaaatacacccctgaaaagctcatctatgcagacaaaaaacagaaaagaaaagagaaaaagacggccgacctaagtcaggctgcgtttgaaaggcagttcctttcctcaaagctcagccagaagaacaaagtgggtgaaagaaagggttttaggaaccagacagcagagaccccgttcctgggctgctggggacagccaacagcacaggggtccccagcctgtgggaaaaagagtgatgacagctgaggtgctggggcagcacctggcctccctgcagaaggtggccaggcagggccacccttggtactgaagcttcgtggacttgacttggcagtgtctgtacagcagttaaaatactctaaacatattttcttcctccagaagtggaaataaattgcaagaaatacccaaatcaaaaataaatataaaa

SEQ ID NO: 88380 - DNA, 536 bp, Homo Sapiens
gggacggagccgcggggcctgcgacttcccccggagctggcctgaggtattagctagagaagacattgatgaagcagtatgtgcaatattatttaaagaaaattccattgtgaaggttacagtcccaccatttgttgatcctctgtttcaaagacagcaagaggtggatgaagagaggagaactggtcttcagtgtgagacaggaaaacgacattccataaaagaacttgaagaaatagagaaggccaggctgcatgccagctcgccctacttcactttcacttcacactgtgtgattccaaaagagtggcataaagcctctgcaagagccaggagtaaaacttacaaatacaggtacagatgagcagaacaaacaaatatttgtttaacttgcaacttactttatttcctactgaagctcttgtaactagtcacacttttgtcttttagtagtttatagttttattattattatcatcacctttgtattatgaaatatatgtagaggacagaataaaacataaacagctaaaaaa

SEQ ID NO: 88381 - DNA, 543 bp, Homo Sapiens
ggtatcattcttctgagccctcttcatgtgcattgtcttggcatttaaagtaggagtttgtgtgtacatgaacacgagtatatgtacacatgtgtgatcttcccatttacatttaagatcctcgagcagtgtttttcagctttgggctcctctggtctctggggattacgaagaggtagtaatggcttcattacagcttatcacagggacactgctagagatgtaaaaatgagtgagacatggtccctatctataggaaattcagagtgtgggacgggctccagtcatagaaacagaatttcaatacggtatgctgagagctgtaatacagacacgcacaggatgcagctgtaggtgtgtgcgcttcaggaggtcttcttcagaaagtttatcactggtcacatgtttatcccacaacgggttttcacattttaattagaatgtcagctttttctcttggttggcatttttttcaactcagtatgatcattctagatgtttccccctgatgaaatttgattgacattttgtaattgatttaaa

SEQ ID NO: 88382 - DNA, 451 bp, Homo Sapiens
gatcctgtgaataaaatggcgcagacgtgcttgtgcggctttcctgctggagtccatgagcgtctcgaggatttggataggttgagcctttattgggctgtcaaggtgtcttcctagacctcatggtgtcactgaattggatccattataaccctccattcatctgcttggctctcgacagactcacaaatgtgctcagaggccaagtcaccctgtgtgctgccagcccggggcatgtgtgttcatgtcatgtcacgatctgttcagagtactgtcatcagcaacagagcatggctcggcacgcgggcaaaactgcaccaaccacgatgcatggacacagcacccatctagccctgacctggtggtttgtttgtgtccccttgctctgccctacccaaggaggatggggggttcagtgtgtaaaaaaataaagtctggactcatagataaa

SEQ ID NO: 88383 - DNA, 583 bp, Homo Sapiens
  misc_feature (488)..(496): n is a, c, g, or t
acttgattattgctgccctttataatttcctcttcaatgatatttcagcagtttccctcttggtcctagttttgtgcacatttttttgaatgtggttcagattaattatatttctctcactttcttagctggtcctattttttcacattctggcatgtggctatcaagttagattgctgtaggcatcatattgtcatggtaactactgaacctaatgatgcagatggatggcacatcagtataataaatgatggaaaacggttcctaaaaattcatccctttcataagaggggaagaatgagtgcctgatattgttaatacctccctttctacctcaggcctttgcaaattgatgttcacaagggtcactggagtgagagggaggaggggggcgtcttggaaatttccatttctcttttcaaacccaaaataggaatgactcttgctgtttgtcagatttgctgaaaattgctcctcacaaagaacannnnnnnnngtacatgtaattgtaaatacaggtttagtacgttaatgttctatagttctgatattgataataattaaacccagataattttatagc

SEQ ID NO: 88384 - DNA, 367 bp, Homo Sapiens
ggtgtatgtgaggctgaaagggaaggaggaacagggtctgggccgctgtgtgctctgccgtcatctctaagaaacaaccataccactgaatgctactgtgtacttacaaaccacactcatattcgtcacgtcatttcatcttcacccccacctccaaatgagtgccggcgttgactgggttttgtggtgatccttgtctggaatgaagaaagcctgccttgcgcagaggtgtttccctgcagaggggcttggagaagcagaagtggcagtatctgctatcttttacgtcagaggactgccaactggcagacttcccgcacgcctgtcttaaacccactactagatatttctgttaactgacaaaaaa

SEQ ID NO: 88385 - DNA, 524 bp, Homo Sapiens
ttttagaatgttacctttgttttgaatagaacttaattggaaagatattattttaatgattaacttgaaattttaacaattggttcacaagccaacatgccatgtgcctgtgcaatcaattccatgccatatatacactttttgtcagataaggaaaaggtaaaaatacagaatactacatggattatcaaggttaaatctattctttcttaacatgacaggaaagtaaagctttgacccgcaggggagactggagaggggaagttggcctgtctgttcccatttcaggagcaggctaagagtgtgtttctggaaacaaaactgtcagagtgaaggctcacaagaaatcagaaacaggacccagatctctacccaagggcttataacaaaggctcaaagcaggcttttttccaaaaatgtttttaattccaacatccatcttaatggcctactgtagcctaatttagccaatagctgttattctaaaaatggaagctaatgattccagctaaaaacaacgaagc

SEQ ID NO: 88386 - DNA, 495 bp, Homo Sapiens
cactcatatctggaaattcatgtgttctacaaccatgtagcaaagggccagcgtctccaccaactcatgagaactcgtttcaaggaactcgatgtttccggggaccaagcccgcccagggttcagaccgtgactccgcccccgggagaggcggaggagggaggtccgggccccggctcgcgccaactccgcccacgcagcccccggcgcggcccaagacgccgccgggccccgggtccgagcgctttccctcttccgggccatccgcccgcccctgcgccggctccggccctggccctggccctggcagcgcgcgagcggccccggggcggcgccaaagtcgacccaacaaactcccgcaaactccagcgcgagtggcagcgccaggcccggcccgcgaacgcagcggcgacagtccgcgggccgcaccagccccgacccgggccaggccgccgcccctccccccgccgcgtggcgccaacaaaaggcggccccg

SEQ ID NO: 88387 - DNA, 730 bp, Homo Sapiens
  misc_feature (328)..(338): n is a, c, g, or t
ggtattccctgtgagtacagggttaattatttacctctatttcacaaatgagataatgaagtgggatgaagtgcgaggttaagcaacttgcttgaagtcataggtagtaaatcgtggggccaattttaacccagacagaccactgactccagttcatgcttttgctgcctcacttttttaagtggtatttttaattaggaagaccatgctaaagatactttcaaggataaatgattattttctcacttcaattgttggtttaaaattagcataaataggtaaaaccagcatgctcaaacactgagctcaaacattaacattactaatnnnnnnnnnnngagtgactttaaaagtttctttctatccagggtttctcttgggatactcatatggtatattactggcttatatttcaaaattattttattcaacatgattgactttggccttttataatttacataaaacataattttcctcagttctgtaatccagattttccccattgagtaaataatacaattaaatttacatatggtaatttagacatttaataggatattgcataggtagaatactttgtcagtacttagttactacctatatgtatttttgtgttacttttcagtgatttaaagaaatctaacagaaatctgcttaaatttgttttaaatagtgaatatcctgcttgctatggaatgaataaacaggtaaatttgatatgaaaaaa

SEQ ID NO: 88388 - DNA, 1004 bp, Homo Sapiens
  misc_feature (977)..(977): n is a, c, g, or t
gggggcggccgcggagtatcctggagctgcagacagtgcgggcctgcgcccagtcccggctgtcctcgccgcgacccctcctcagccctgggcgcgcgcacgctggggccccgcggggctggccgcctagcgagcctgccggtcgaccccagccagcgcagcgacggggcgctgcctggcccaggcgcacacggaagtgcgcttctctgaagtagctttggaaagtagagaagaaaatccagtttgcttcttggagaacactggacagctgaataaatgcagtatctaaatataaaagaggactgcaatgccatggctttctgtgctaaaatgaggagctccaagaagactgaggtgaacctggaggcccctgagccaggggtggaagtgatcttctatctgtcggacagggagcccctccggctgggcagtggagagtacacagcagaggaactgtgcatcagggctgcacaggcatgccgtatctctcctctttgtcacaacctctttgccctgtatgacgagaacaccaagctctggtatgctccaaatcgcaccatcaccgttgatgacaagatgtccctccggctccactaccggatgaggttctatttcaccaattggcatggaaccaacgacaatgagcagtcagtgtggcgtcattctccaaagaagcagaagaatggctacgaggaaaaaacagattccagatgcaacccctctccttgatgccagctcactggagtatctggttgctcagggacagtatgcatttgtgaaatggcctggctcctaatcgagaaccccagaaccgaccaaggatggacatgatatttgagacgagctgctaggggatggctgtcctggcatcttacactatggcatgatgaagaagagcgcgtgggcagaactgcccaggacatcagctaaagcgaaacattcagaaccattgataatccatcgacggaggaactttnaccaggagcggataataagtttcaagg

SEQ ID NO: 88389 - DNA, 536 bp, Homo Sapiens
  misc_feature (19)..(19): n is a, c, g, or t
atctagttttctatcctanaatctacctcctgagtttgagtaagacttgaactagtttgcaaatatctgtgatcttcaccttgcctgcctgcaaagcccataagcaagttcagaagagacttctacttgtccaaagcaacatggagtaaagtgggtcaactagaattaaaatatgctccagccaaaggtgaccatggaaacctattgataaggctctggggtcagattcatctctgttcagacaactctagcggtgtgactctgagcaagtgttttttaacctaagttcctgcttcctcaactgcaaatgtaggaatggtaacatcttcctcaaagttgtatgctggggataacacatgaaggagatgcctgggccatataattatttaagaaatgttcatttctttcttgaactaccttctaccaactatttggtctgagtttatgaaactgtaaattttgtctaacatttgcctaacaaagcattattaccttgcttaaagaaacacacaatacattctaaaccaaaaataaaa

SEQ ID NO: 88390 - DNA, 586 bp, Homo Sapiens
agaacacaaaggttgaaccccttccctctcttaatttttgttttttacaagcagatttaaaattctggctcataatgtccttgattcaatggtaaaccattttgcctaaatggcagcatgttctaaatgtgagcgcgctcagcttttcaagctgctcccgagtgacagaaattgacaagctgtcattcaagaccttttggtggctgcctggggctctgtttgaattgtatctgtctgatactttaccatggagagtgaaaaatttgatcacatgccatgcttttaattttctaaagcaaatatgttggaaggagccaattaatgcaaagatggactgctggcctcatgcaactgatttaggggaagggttcgcctaaattaataaaagatctgaattatagatcttaacaaatacatagaatgtaaaggcttaaaaggaaactgagcagcagcaggcctggggttggcttttaagtatctatatttaactaatagacatgaatgttttgatttgatattagaaatgctagtgctggagtctctccccctactctggctcgagaggatgccctatctaaaaaacaaa

SEQ ID NO: 88391 - DNA, 792 bp, Homo Sapiens
tgagcatgacccacgtctacgaggacttgaggggccagatcgccatcccctcagtgttcgtgagcgaggccgcctcgcaggacctgcgggtcatcctgggctgcaacaagtcggcccacgcgctgctcctgcccgacgacccaccgtgccacgacctgggctgtcaccccgtgctgaccgtgtcatgagtgctgaactgtaccctggcactggtcgtatcagcctactttgtcctgaaccacctgtggctctggccccaggcctgctgacagccacagacggccggtgaagacgtctacctgccagaaggcccaggtccgcaccttcacgtggcacaacgacctgtgtgccatctgcctggatgagtacgaggagggcgaccaactcaagatcctgccctgctcccacacctaccactgcaaatgcattgacccctggttctcccaagccccccggcgctcctgccccgtgtgcaaacagtcggtggccgccacagaagacagctttgactccaccacctacagcttcagggacgaggacccctccctaccgggccaccggccccccatttgggccattcaagtccagctacgctcccggaggctggagctgctgggccgcgccagtccccactgccactgcagcaccacgtccctggaggcagagtataccactgtctcctcagcccctcctgaggcccctggtcagtaaagatctagggcagggaggggggtgcaatgaggaatgtttctggtctgaaaagaataaagtgggtttgaaagcggaaaaaaa

SEQ ID NO: 88392 - DNA, 598 bp, Homo Sapiens
aggaaatgaactctattaacttgagtgagcttaaaactagatccttccccagtcaagcctccaggtgagaattcaatcctggctggcacctggattgcagcttacagaagacccagctaaggccatgtctggactttaaatccacaggaactgcaagatggtatcagaagtgggacctgcagtggggcatctagcaacccccaggagcattgagtgaccaggcttgggacccaccgggcgcagggtgtccattgttctctcgaagcaactgagaattgtggatattcttcattattccatcatcatctcaaacctcttgggtatagtgtttgactactactgtgaccataaattccaataaaacctaggaaaaatgaaaccactaccattaactgaaaggaaggaagatgattccaagtcatgttatttccaaggaagcaacaataacttcactggacccctgctgatcttaaagtgcagcatgaaaaacagtcttggagacttctagagatgtccaaagtatgcctacggggagcaatagggataccaggagaatctgatggtagacgtatattaaaaaagctatttacatgttaaa

SEQ ID NO: 88393 - DNA, 868 bp, Homo Sapiens
cccagtcaagcctccaggtgagaattcaatcctggctggcacctggattgcagcttacagaagacccagctaaggccatgtttggactttaaatccacaggaactgcaagatggtatcagaagtgggacctgcagtggggcatctagcaacccccaggagcattgagtgaccaggcttgggacccaccgggcgcagggtgtccattgttctctcgaagcaactgagaattgtgggacccatgaaggagcatcaagctcagcctcagatattcttcattattccatcatcatctcaaacctcttgggtatagtgtttgactactactgtgaccataaattccaataaaacctaggaaaaatgaaaccactacattaactgaaagggaaggatttgacagcttcttttgggcatatcagaatcgccagcatcactactcttgcactgtgcggccattattaagtgaaataaggattacttgaacacaagcactgcaatgccgctacagtcaatgtgataacccagctggtgactaagtgaccaaggacggggagtatctacagcggggagactctggaaaaagggaggattcacatccagtgccactggggcagggcagaatgagagttcatcatgcaacaaagaatggcacagaatatacgacttgtgagtggattatctctggaattttctgttgactacatttgtactacagttgtatgtgggtaacaaactgtggaaagtgaaacttcgggtaagggggaggctaccgtagatagcccagtatttcttattttgtggatttgtttatctttctgctcacatccttttccttctgcattaccattttagtaaaaatagatagcatcc

SEQ ID NO: 88394 - DNA, 393 bp, Homo Sapiens
aggcgtgagaatccggaactggcaatgcactgtctcctattggtcaatgcaaaatgtttaatttgcatatataacacaaggcggggccctccggtgaggtcacgtggctatgaaccactgaagaagaccccggcgcaggggtgcggccggagctccagtggcgcaatcggttagcgcgcggtacttatatgacagtgcgagcggagcaatgccgaggttgtgagttcgatcctcacctggagcactttttttccccatcagtttttataaacttacacatctaataaaccaaccaaaacatctacatcacttaaatgaatgaacgtttctatctttggaattatggggctcaaaaaactcctagggctttggcaacggccctttgggtgttct

SEQ ID NO: 88395 - DNA, 637 bp, Homo Sapiens
agggcatgagaatcttaatattcttatacttccctttttgcatgcagtatgtctggaatatgtttataaaattttagcaaggggtgagatcaagggacaaaggtagagtggttatttaaagacaatcagaaatgaacttaaaagctgccctgcaaaaccaatcctttcctatcatgaagagtaccttcatattttctagagattgtctctgaaccgttgctacatagccataaatttctgtaaatcatgttggctatcagttcttgctattctcagagcactctatcatgtttttaggtgtatattgtgtattcaggatagcattaaaaagaactgatggcaaatgtattgactcacagtggaaacattcatttggatgaagaattagtggtttagcctttgaaatgaataccttgaatcatttcttctgattttctagtagtttattatctcaaatgattattatccccttcaaaaatactggtctgtactttggtgttgtggtttcatttttctggcattgatcaaatagcaaatacaaaataaagcatttctacatgtttgaggtggttgtttttaaaggggatatgtgtaatgcagattttctttattaataaaattttcataatctctgaaa

SEQ ID NO: 88396 - DNA, 462 bp, Homo Sapiens
  misc_feature (88)..(109): n is a, c, g, or t
caaacctagggtgatgtcattgttcgaagctgtcaccgccaagcctctggccttggggcgaggagagttggtgggattaaaaaatgannnnnnnnnnnnnnnnnnnnnnttagcagtctctaaagaggcgagtcaagggaaaatcctagcgggagaaaaatcacaaggggtggggggtgtctcagaaatattcttagctgggttcaactttcctcgtttttctaagttttaaaaaatcctctcttactatttttgctcatcaaaatgctgctgctttttcagagacagccttttttgagccattccctatttagtgttttgggtaattggctgttacagtatggaatttgtggcccaaaggcagcgtggtaagttagacactaggtgcacggtgccccattgttatgaagtgtggaaactgagacgctggactagtctgatgtatctgtttcttccaccaaa

SEQ ID NO: 88397 - DNA, 1173 bp, Homo Sapiens
tttcaagagtatggcactgttggcgtgtcattgcacattggaatctcattaatttccttgggcatattttacatggttgtgtcaagtggtgtggacatgcctgcaatcctgctgaaactcggatttaaagagtccctggtacagtcaaaaatggcagcaggcacaagtaccttcgtggtggcctatgcaatccacaagctgtttgcgccagtgagaatcagcattacgctagtctctgtgcccttgattgtcagatattttcgaaaagtgggattttttaaacctccagctgcaaacccttaatgaactcttcagtcgtacacactgaaaacctatttcttctaaattacatgatttggattggttttagggttttagggttgtagggtttcttttggagaggtagggggctaattgctatgttctcatggataaactttgccagcaaaaatcaggcttttgaacaattttaattttttgcctcataaattttgtgaatgctattcattatagggcttgtatatataatctaaaatgtcagcaaggcatcggagatgggttaacatctcaaaacaaaatagcctacaaatgttccttgtgggagactttggcgagggtctgtgggtaaaagcaccagggggttaatcttggctcagtttcctaaaaagcattgattaatttaactggcttttaaatatccccttccgctgatatttgttgtcagctgcctacagtttaatatgcagcgttcacaaaacagctgccagtgctacaattaatgaagcaaaacttaatatgtaatcacaatctaaattagcatcaatactttgacattcattacattggtttgggggaagaaaagtagttctggtatgtttcattgatccccagataccttccaatctggacatgatggggctgattccagatggtttttctgaaatttcattaaggtaggtcagcgtcatttgtctctgtttaggtaaaatataaaaaccctgcccagtagcagtggcatcgcttggttcctgatgcccatgttccagaggaattcggataccacaaacagctaagacaatctcagcttttcttagacaatcttctatctcaaacttcagacattccagaattgtcatgatgtttacactgtctgagttaaaaatcctgttcaaa

SEQ ID NO: 88398 - DNA, 867 bp, Homo Sapiens
tctgatatcatgagttgcattttacagaattacaaccgccccccagtgatggcattagccatccccattgcagtgaaattcctccacagaggcaacaaggaactgtgcaggaatatgtctaactacctgtctctggctgcaattaccaaggcagatctcctggctgatcacacggaagttatagtaaagagcatactccaaggtatggtgcgaaagttgagcttggggacatgttttgggagatatttaaaagtattttcatcaagcatttatggtttgtgggaagcaagacctagagtattagaagcaaattaatttctctgttttgctgccagttgacctgtgaacatgcaaaaggttacttaatctggctgtctgtgtcccttcccaaggcagatgaattacttagactcattaaaagaattgtaagcattcttccaaatctgtgtttctcagtttgaagaactgcatttccgtgcttctggtcacctgttcaactaccaactgtggagatcttatctctgtgtactgagtggaacacgtcactcagtggggtatgaaaaacctgtcttcatttgcttccaaaagcaagaaatgtcttttgttagataaaatacatcagaaaatgtgtaatgacttcttaaatgtgaacatgatttggataacaagcataaatactagcataaaaagccaaatagtacacctctgttaattgttacaacatttgaatgaataagaagctcaaattagttcatgcaaaatattctccttgtcttcttttattttctttggtttcagatcaatcaaaaaacatgtttttgaacttgaagtcagagaacaatacatgatattaattgatgtgcaaaa

SEQ ID NO: 88399 - DNA, 573 bp, Homo Sapiens
acttgagtattgggcatgttgtcccaatctcacagctaatacgcagcagggatttggtcaaatctgtgtgacaacaccacttcaccaccaattttagtatgaaaacctttaaaatacacagaaagttgaattctacagtaaactctcctacacccaccatctggatcctgtcattgaactatattatatttattacatatccatccatcactctatccatccatcaattcgccttgtttccaagtgaatacccaaagactacccaaaccagaaaaccagcaaaggccttctgcattcgcctggattaagttctgggagtagaggtgctattctacctcggtgatgcgaagaaaagccgcagcactgagcctgattgatgtgctttgcttaaagtttgcaaaattccataaacctgaaaattactgtcgattatgcaagatgacaattgcgtccaagcaggagtttcaaaaatcataaaagctagggggaagtccccatttctagactaaaattccgaagtcgagttccatgttttatattctaaataaaattgtggctatccaaggttaaaaa

SEQ ID NO: 88400 - DNA, 656 bp, Homo Sapiens
tttacacagagggatcttgaagcttatatttatgtcttatctcagcctggagcattaagtggcccaattaaccattaccgaaatatcttcagctgcctgcctctcaaacatcacatggtgaccactccaacactactactgtggggagagaatgacgcattcatggaggttgagatggctgaagtcacaaagatttatgttaaaaactatttcaggctaactattttgtcagaagccagtcattggcttcagcaagaccaacctgacatagtgaacaaattgatatggacatttctaaaagaagaaacaagaaaaaaagattgacttttctttatcttctatgaagggtctgtaatgaaatctctaaataatttttaaaaattgttcatcaacttctttatgttttattagaaaaaaactgttttaatgtgctttatcataaataaatatcctgacaaatggtattgaaaaaaatctgagatcatgtgaacatataatacaatgttgattttcttctggtgtattttgcacagacaagcatctgccttaaaatatatacacttgtacaaaaaggaagtttggagtaagtgcttccattttggtttcttgcttttttttactctgttaacatatggtgccttttacaaatgtatatt

SEQ ID NO: 88401 - DNA, 1376 bp, Homo Sapiens
  misc_feature (447)..(458): n is a, c, g, or t
ataggaatataacagtggtaaaaaaagcaggctggtaccggtcggaattcccgggatatcgtcgaccacgcgtccgccttagaatggcctcttgtagaaccctgtggtatagaggagtatggccactgccccactatttttattttcttatgtaagtttgcatatcagtcatgactagtgcctagaaagcaatgtgatggtcaggatctcatgacattatatttgagtttctttcagatcatttaggatactcttaatctcacttcatcaatcaaatattttttgagtgtatgctgtagctgaaagagtatgtacgtacgtataagactagagagatattaagtctcagtacacttcctgtgccatgttattcagctcactggtttacaaatataggttgtcttgtggttgtaggagcccactgtaacaatactgggcagcctttgnnnnnnnnnnnnaaatggcaacaatgcaaaagccaagaaagtataagggtcacaagtctaaacaatgaattcttcaacagggaaaacagctagcttgaaaacttgctgaaaaacacaacttgtgtttatggcatttagtaccttcaaataattggctttgcagatattggataccccattaaatctgacagtctcaaatttttcatctcttcaatcactagtcaagaaaaatataaaaacaacaaatacttccatatggagcatttttcagagttttctaacccagtcttatttttctagtcagtaaacatttgtaaaaatactgtttcactaatacttactgttaactgtcttgagagaaaagaaaaatatgagagaactattgtttggggaagttcaagtgatctttcaatatcattactaacttcttccactttttccagaatttgaatattaacgctaaaggtgtaagacttcagatttcaaattaatctttctatattttttaaatttacagaatattatataacccactgctgaaaaagaaaacaaatgattgttttagaagttaaagtcaatattgattttaaatataagtaatgaaggcatatttccaataactagtgatatggcatcgttgcattttacagtatcttcaaaaatacagaatttatagaataatttctcctcatttaatatttttcaaaatcaaagttatggtttcctcattttactaaaatcgtattctaattcttcattatagtaaatctatgagcaactccttacttcggttcctctgatttcaagggccatattttacaaaatcacaaggcactgtgaactattttgaagaaaacacaacattttaatacagattgacaggacctcttctgaagctagaacaatctatagttatacttcttcattata

SEQ ID NO: 88402 - DNA, 563 bp, Homo Sapiens
  misc_feature (31)..(31): n is a, c, g, or t
agtcagtaaggcctcggaagtcaagtcctgnaagttgggcttgcaatcattaggtggagatattgtttgttctgtgctcagaattccctggagtgagactcaggacaatattaaatccaatgaatcacgcagctttcaggagggcagggcagcacgctgcagagcagcactgaatgatggcttggcctggcgtccctggtggcagcagtggccgcaccaggcaccgtgttctcattcaacaaagactcagttttgatgtgaggactgtgaacatctccagaacaggagacatttggaagagcttgtgcccactggtatctgaaacttggctgctcattcttcagaaaccccttgtatcctgctatgattcctcagcaacaccatcacatggaaaagaaccaacaatgtgaagaaacgaatatggtgttcattttcaaactgaaaaaggaaataattacagttactatttacagtgtctggcttttcaagcttcatgctacaagcagctaactctttgtcaaacaattaattttgtttaaaataaataagtttatatatttaaa

SEQ ID NO: 88403 - DNA, 392 bp, Homo Sapiens
cggcacgaggtgcagctcagccacctcctcctctcaggtctgccagccatgaaacttctttacctgtttcttgccatccttctggccatagaagaaccagtgatatcaggcaaacgccacatccttcgatgcatgggtaacagtggaatttgtagggcctcttgcaaaaagaacgaacagccctacctctattgcagaaattgtcagtcctgctgcctccagtcctacatgaggataagcatttctggcaaagaggaaaataccgactggtcttatgagaagcagtggccaagactaccttgagtgctggtgattaccattctcaagctctctgggcacagagacctgctgtcaacccccctcattaaaattcatgtgcctgctaaaaaaaa

SEQ ID NO: 88404 - DNA, 517 bp, Homo Sapiens
  misc_feature (517)..(517): n is a, c, g, or t
actctcatttcatccacagtgacccaggcacccaattattgaatgcttttagaagtcttctcaaatgaatctctatgaacagcagtaataacggtctcaggtctgaagtccactgcggtcagccttccctggtggtgagctgctgtcagaacctccccactactcctctgggtggccccagtcttgtgcctatttccctctcgtggtcatcaagtctcgcccagtggaaattgacttccttgttctgagctgccccatggagaggccatgtgccaaagaattgagggtggcctccagccaacagccagcaaggaactgtggccttcggtgggaggaacagaatccaactaacaaccatatgagtgagcttggaagcagatgcttccccggttgagacctgagatgactgtagacccagttgacaccttgattgcagcctatgaaaggccctaaagcaggggacccagctaagccaaggccaggttcctgacccataggaactgtgagataataaaan

SEQ ID NO: 88405 - DNA, 470 bp, Homo Sapiens
  misc_feature (11)..(11): n is a, c, g, or t
  misc_feature (21)..(21): n is a, c, g, or t
  misc_feature (44)..(74): n is a, c, g, or t
agcaagattcntgagctcatntgcttcactctggtgctgttccnnnnnnnnnnnnnnnnnnnnnnnnnnnnnnncatttgtagttgacttgcttcctaaagtttgagactttccagtatttcgacctttaccttttccaggttcagaatcagagccactgccactatccacttgtaacagggcaaaacgagaagcggtggtgggaacagaactaagtactgctgaggccatcgtaaagatttttcttttaaaatacttctgtcaagaataatttctcattcatgaatgaaagccaaatttcacccataggctgttaaccgatgctccgaaacttattcgcaaagtacatagagaaagaaattgcgctgggcgaaacctaactcgggcagagaagcggcttcaaaaccgggcctcccgtgccgccggctcggccctcctctccctcctccccccgccgcaaaatctcccgc

SEQ ID NO: 88406 - DNA, 357 bp, Homo Sapiens
atgtgcctttgtcctcccggaccgctttgggaatgctaagctcagtttttgcctcacttcgggatacctcttccttggttatctgaagtgcatcagtgggtttttcaattacagtttcaattttggaccattcaatcttaggcattggaaggcctgtcacatctgcagggatgtggacaggctctcctgccttaaccttgatagtgtctcctcgaacactcagacgcaacttaatagttggaggcactgcaaagagaagagaaagaaaaacagtaacaaagtcataaggatgtttttttcaacttatgggataaaggcacactgtaaaatgcattaaaattattattatattcaaaa

SEQ ID NO: 88407 - DNA, 498 bp, Homo Sapiens
gctgaaaagaacaggattcaagtccagagttttcatcttcagcctgtgatctgtccagggacccttgggatctggggcttcctggcctggccagagctggagcccccacagggtaaggaagagagagtggaaggcagagtgtgatggggaggagggacaggaagacccttttaatgatgagggtaactatttcagttgtgagccttctagggccccaggctgggaggctcagaggactgaatctgggacctgtgttccccccggcaggcagggacaagatggcatggcaagcatgggggcggggtgggtggggagggatgctgcatttctcagctgggcagtaatcaatttaatggtcctttaaaatgtctgtgtattaaaaatttaagaataccacactttaatattaaatattcataaggtctagtatcttgataataatgtagatgttttaataacaatttttccccttcttaaaataaaatgaaagaaaaatga

SEQ ID NO: 88408 - DNA, 353 bp, Homo Sapiens
gaaaaatctgacatagctgacaccaatttgcttctaacttcacaagctaacaactacccttgcccattctggagcataggccaagctaactatgggaggaattagtctgtagtttaaccttaaagtagggatgataatagcccttcccaaaactaccccttcattgtttgaggactgacaccgcctttgtaaaactaatgaaaggcaacaaaattagaattatgggagaggcctgaattctgctaagatgtagccataaacaataaccaaccacggttccagaggtcagatttgtatcttccccacttgctcctgtagataacatcactatcattaaaaccttggttctgttt

SEQ ID NO: 88409 - DNA, 798 bp, Homo Sapiens
  misc_feature (109)..(229): n is a, c, g, or t
gaatgcagtgccatcatcatagctactgcagccttgaactcctgggcagaagcaattttcccacctcagcctgccaagtagctgggactgcaggtgtgtgccaccatgnnnnnnnnnnnnnnnnnnnnnnnnnnnnnnnnnnnnnnnnnnnnnnnnnnnnnnnnnnnnnnnnnnnnnnnnnnnnnnnnnnnnnnnnnnnnnnnnnnnnnnnnnnnnnnnnnnnnnnnnngtgtgagctcctgctcctggtcaagaatttagttttgtttgctagtggtgttcttggtatcttttcatatttgaggctttggtgctagtgctgaagtattacactcaccatccaaggttcacaggacttttgttttaatatggaacagatggaactgtttagttctgcatctttgcaggtatgcaaaatgtgcctaccaggactctgcttcatatccatggaaagcaagaagtaatccagtaaaactttgtctggctagaggctttgaaggaatggagtgttctggttgaattctattaacttggaagtatgaaggtgaaaaaaattcagaacttaaatttcctttgaatgcaatttgaaaatatagccaataattccacttttcttctctagtaagtttggacattctgatctacttggtgttttatgatagaacccctagtgtgcctgagacttactttgtgaagatacttttttaaaactttagctgtaagaggatgtaaatgactttgtatgagatcaagctggccgacaactaatacttgtaaatatactttttaaactaaaaa

SEQ ID NO: 88410 - DNA, 495 bp, Homo Sapiens
tggttccagttcaagacatacgggtgggaactcccactgggtatccactctgctttcttgggaaagcttcacggtatctttaggaaggaagcctgggattccacaccctggagatactggatctcttattctctatgcacttccttacacactttctcttccttcaagggcctctcagttgaggcactactccaccttaaatccaggtggccacattcagaagcactgtcacgctggcctctcagcaacatgctaacacagaaaaggaggctgtttatgagtcagctctgccaacaggattgcttcctaggaaaagtgcaaattgatttttttcctcctgttggtctgctgggggattggaggcagccacggacaattcattagcacatgtaggaaggccagggagaaaaataagctaagttgctctcatactagaaagcatttaggaagcaaacccataaacatggataattattgtgtgtccattaaaattat

SEQ ID NO: 88411 - DNA, 552 bp, Homo Sapiens
gaccctgcctctgactctgtgacctcagcacctgacttctgtctctcaggtcatctcccagtcagtaaaacatttgtgtgacgtgaggaggggcactgaagtgggtgatctttaaggccagatgtctctgtaaaagccttgactatcggaagcactgggctagggcagtgtagtacccagggggatgaggtgcatcagagcagcacctgctgaggccaagaacggaggtggctgctgccggcctccgggaggtccccttagggaagcatttcttcaggggtggcccagggacctccggcatcagggcctgcatggggattctgtgccagcccagccctgctaagtcccagccttgggaacctgaggagggtatctgcctatttttcttttaaacatgtttcttaggttattcactaaagtttgagaaccactgctttgtggctttgaaatgttcatttgaatttttctatgattactaagatttttgcccttaaggctctgtatataaacaacatactgtataaaataaactgggaatggcgtgaaaacagc

SEQ ID NO: 88412 - DNA, 606 bp, Homo Sapiens
  misc_feature (50)..(50): n is a, c, g, or t
  misc_feature (95)..(95): n is a, c, g, or t
  misc_feature (140)..(140): n is a, c, g, or t
aaaccttgggggcccaagggtgccatgaggtgctgctggagcacttcagngacttgcaggcacactgggttagcatgctggctgtcacctcctanctgcagggctctggtgctccttggcctgcggtacctcaaacagcnactggaaggggcttggaggggtcattgatgcgggaggagagaccaagggctatctctttcccagtgggctgaaagatatgctgaaaacagcatggctacagggaggggttgcctgcaggccagcacctgaggaggccccaccaggagaagcacctcccaaggaggatctatctgaggcctagaggcctggagcttggggtgaggaagagggagggatggacaagtctgaaaacctcacaactccttaccaaggctccaggttggggggatcgtaggattagaggggctaaggatagtcagcgagctggactggggtaagaaagaaaaccagatgtcctagggcctagcccttgtagtcagaaccaccagggaacagcaaagaacagagtgatgggaaagtgacatgagaaggcctggaggctgattctgatatagactcaataaagtttttggatggaagcaaaaa

SEQ ID NO: 88413 - DNA, 987 bp, Homo Sapiens
cccacgggtggcaatttcaaaaatggcctttccaaaatccagtggcttcgaaaaatgagttctgatggactgggccccgcagcatcaagcaggatatggaggaaaaggagaattgtcacctggagcagcgacaggttaaggttgaggagccttcgagaccatcagcgtcctggcagaactctgtgtctgagcggccaccctactcttacatggccatgatacaattcgccatcaacagcactgagaggaagcgcatgactttgaaagacatctatacgtggattgaggaccactttccctactttaagcacattgccaagccaggctggaagaactccatccgccacaacctttccctgcacgacatgtttgtccgggagacgtctgccaatggcaaggtctccttctggaccattcaccccagtgccaaccgctacttgacattggaccaggtgtttaagccactggacccagggtctccacaattgcccgagcacttggaatcacagcagaaacgaccgaatccagagctccgccggaacatgaccatcaaaaccgaactccccctgggcgcacggcggaagatgaagccactgctaccacgggtcagctcatacctggtgcctatccagttcccggtgaaccagtcactggtgttgcagccctcggtgaaggtgccattgcccctggcggcttccctcatgagctcagagcttgcccgccatagcaagcgagtccgcattgcccccaaggtgctgctagctgaggaggggatagctcctctttcttctgcaggaccagggaaagaggagaaactcctgtttggagaaaggttttctccttttgcttccagttcagactatcaaggaggaaagaaatccagccctgggggaggaaatgccaccacttagcggagacccatccaaaggtggaggagcccctccccttgggaaagaatgggcccctccccccggcccccaatcattc

SEQ ID NO: 88414 - DNA, 1000 bp, Homo Sapiens
aaacgaattgggctgccaagggcccagaaaacccggtgggctcccggggagcccgggcttggggaacgtcctatatctggagggagaaagagttgccaaaaggggacggagatgaggtctaagggttctgaactgaggagccctttgcggtgattcaaggggggggagcactttgcaagggagtggtgctgagatccatcagcccccagggggtcaggcaaggggtcagaggcaccctgggaggtttgtactgggctgaaatccagtcccccttactttggctgggggcgtgagcctccaggattcaggggttctggggaggacagatttgctcggggtggaggagatgggcagcgtttccttaatgggtgtcttaaaaggtcctcccacttcctgggagtagctgagctgggaggcagggtcagaggagtctgctgggaacgggagctctgcggcccagcgggaagtactgggcccctctgagaagagcagctccggctcatccacacagggaggcagtagatgctgtttcctccgagaccggctcctctccctcctctccctgtgttgaatcacaagcatttccgagacacaccgggttggggacctaagcccactgtaggacttcttgggtcttggggtgggagattgggacgaatcctcccaggagtgagatgattcctctttgaaagatggggccggggagggccactcttccaagggagggctctccactttgatgggtctcgctaagtgtggcatttcctccccaggctggatttcttcctccttgatagtctgaactggaagcaaaggagaaaacccttctccaaacaggagtttctcctctttccctggtcctgcagaagaaagaggagctatcccctcctcagctagcagcaccttgggggcaatgcggactcgcttgctatggcgggcaagctctgagctcatgagggaagccgccctcgtgccgaattcgccacccaggcctcgctac

SEQ ID NO: 88415 - DNA, 587 bp, Homo Sapiens
gcggccgctgactcggcgcagtggctctcggtgaaggaagagaccatcttcctgcacgacgggctgagccgggtcaccgacctggccgagctgcccagcgagatcctcggggccccagaggccgcggacaccgacctggagattttaacctttgagaccaagaacccgtcggaattagcagaacgtttgcgctctgtttgtgggaatcagagcaatgcctatgcccggctgctggaataccgcctgaatgccttgcgaggactgtggaatgcccagcgccagctggccttagaagaacagcatgaaagggaaagttcaggtggtatttaaatttttcttcagcccacaaactgaaaggaatcgagacatcattcgacggtcgggattgcttctttggcagttgttgatggctccaaaagatcaaatttgccctgaaattcagaaggaagtctgccttgccatcagctctggtttaaatatcttgtacccaggtgaaactgaaatcaataacttacttaaactggtcttaacagaaggagagagagacagtggactctcccagctacgggatgtgatcctaaccaacc

SEQ ID NO: 88416 - DNA, 540 bp, Homo Sapiens
caagacttcaactggtaaacttgatggtctttcttgctgtattaagttcaagtcttcatggtaaggttatccgggggccagaggaggttgagatctagttccatagccttcctgagacatgtcctgctgcggctggtacctctgctgggactgggacggcagatactgcgcctggggtgggaggtgcgggggctgcggctgctggctgtaatatggctgttggccctgctggcagtaaccactcacaccttgctgtccatactgaggtggcatctgctgctgagggtactgcattccggccatggccccgggagtccgaccctggatgccaattggataccgctgtgggcctggagggccataggaacctcctgggtacggactgctctgctgaggctgagaatgagggttactgcccatgccatacaactgaggtctcttcatcaccattggatccattgggctgccctgggatctgcccatggtcggtccgggggtgccggggctcatcgccgggtgactcctttgttgcgcggccgc

SEQ ID NO: 88417 - DNA, 486 bp, Homo Sapiens
tttggttagaatgactatgctgactcagggcatctttttcaaagctgccaacttcagaagaataattaatagattaaatttatccccagccctggatcttatggattccagaacgtttggtctggttgatagtctgaaaacattccgatacaactttcctgcctcatctcagggtctgtgttactttgacattcatgagcctttaaaagaaggatgcagaaaagtgactacatagcccaccaggaaactcatgtgaaagccacgaggaagagcctgttcccagagcctggacacaccaggatggtgattatcccatgtgcgttctgagaatacctgcccctgtgagccacaggccacacacagacgagtgtcccagcagcttctctccagattaggtcatttcctcacagagccttaccaagatatgcacttttagaccaacttagttctagaagaaatggtttttttctgttctaaatatattct

SEQ ID NO: 88418 - DNA, 614 bp, Homo Sapiens
cagaaatggtggttcacacaagtcaagttgtgaaatgagatctctggttgtttccacctcatcaaacaaacaggatgttcttaacaaggattctgggaagatgaaaggccatgagagaagactaggcaaagtcattcctgttctacaaactaagaccaggactaatgttccgacgttttcacagtcaaatctagaacagcagaagcagctttatctcaggagtgtcattgctcatatagaagacccagaggacactaaccaaggtatctcgggggagctttgtgccttgatggatcaagttcatcatatgcagcactcaaaatggcagcatccttcggacctcaccacgcgaaactacgcccgccgacagaaacatctgcaaagatacagtctgactcagtgggttgacaggaacatgcgaagccaccatcggttccagcgtctcccagacttctcgtacagttaatttgtgtcatcccatcagcaatgaaggtccctatccagggtcctgcttggagcagcatttcatgttcttttgctgttttgtgctttgccgattttggattttatttttcacaaaatttttatttaaaaaactcgtcaccttttggaaa

SEQ ID NO: 88419 - DNA, 427 bp, Homo Sapiens
aacctcagctcctgccctaggttctccaggtaggtgccctttctagagatatgaggacacactgaccataagattaaaatacttaatttggggagttttttcataagcatcttttggtggggctagagggtaggaataatttaaaataaattataatccttttttgaggctacctattaaaaaccatggattttggaaagtgggcattctgggagtcatttgaaagagaagagaaagacactggaacaaaccctgtctaaactgatggatgaaaaacatctgtgagctcctagtcaagggccaagagagttcaaagaatggtgacaaattaattgcaagttgtacatcctgtatttcaagaaagaggttattcaggcaaaccaaagatggagattcacctctccatggctcttttctgtacataaat

SEQ ID NO: 88420 - DNA, 736 bp, Homo Sapiens
  misc_feature (23)..(23): n is a, c, g, or t
  misc_feature (47)..(47): n is a, c, g, or t
  misc_feature (117)..(117): n is a, c, g, or t
ttacgcatcccaggaaactattngatcttgaatggctatgaccagtngcagaagagttccacagatgaggagggttgcttcctcacttccctgcagcccccatgacaggcatcctgnctgtggaatcacccacccagcaagcaacattctccctcagaaatactcactccgattggggcaatttcaccattcaccccggaatttctggtccagcagcgctggggagctatggagtattcctgttttgagatccagagtccctcctcttgtgcagattcacagagccagatcatggagtacattcataagatagaggctgaccttgaacacttaaagaaggtggaggaaagttacaccattctttgccaaaggctggctggatcagccctcacagacaagcactcagataaaagttagagccgcatgtcctggaggtgactgcaggttgttggatttggagtatcggccgtgtctcaccacatcctggctccagtgtggatgcagagagagtgtgacagaggatctgcctgtgaaccacctgggattagtcaagtcccaaggtgcccagagtgggactagttcttcacagtgtggcagctgcactaatctgtttgtgagggaatatccattccctcactctactctcctcactatcggaaattcattttgattcagaataaaaaccaaatgtatagagctttgggtgtaggatatgaaattgtacttagatttaaaa

SEQ ID NO: 88421 - DNA, 579 bp, Homo Sapiens
gcttgttcaagttcacatggcaggttcgtagctgataaagctcaatctagagaaaagtttcttttaaaaatgtattttcattctcttttattattttgttaaaataagagatatttcataaattaaaagacaaattatagattagaaaaagaagaacactcagcagcaagaaagccagccaccatgaggctaatacaggaaagtactcggtgaatggtgtgtctgtcactcagcacagtcattgacaacacttaaccattaattgcaagaaaacagcagttttatgcgagctttttttggcctgtctgctcagttaaatctttgtgaccacttctaatttttttctttgtgcagaggctgctttcctcttttcttctttagtccctcaaagtcatttaaacgtatatagatccttcttgacttacagtggggttaggtccagagagacacattgtaagtaaaaaaatctgaagtcaaaaatgcatgatattttcaaattataatgtttatctagagatagccccatcataagtcaaggagtgtagtgaatacatatcaattttgctccattgtaaagtc

SEQ ID NO: 88422 - DNA, 461 bp, Homo Sapiens
  misc_feature (20)..(20): n is a, c, g, or t
tctgtgccagggatactacncagctattcactcccattctcacagccactcctgtccgagccgaggatgtttgcgccttttccttcccctgtcttgcccagcaacctttcgcggggcatgtctatctatccaggctacatgtccccacatgcaggctacccagctggtggccccctacggtcccaggtgcctccatttgactctcatgaggttgccgaggttgggttcagctccaatgatgatgaggataaagacgatgatgtgatagaggtcactgggaaatagctagggagcccctccccacctcacttggggcccccagcaggttgcccaccaagctggaaggcagtgatttagaccttttgagaataggacacttggcaggagggaaaaggaagaggacaaaggagggtggttggccaaagtggcagagctctgttgctgtttaacaaaagaggcaa

SEQ ID NO: 88423 - DNA, 1372 bp, Homo Sapiens
  misc_feature (147)..(190): n is a, c, g, or t
  misc_feature (703)..(703): n is a, c, g, or t
  misc_feature (1039)..(1070): n is a, c, g, or t
ggcaggattcgaggccgggcgttaatcggcacgaaggggggcacgtatgatcggcaggacaccctgataggaagaggggaagcagaaatccaagcaccaccaaacacagtgtatgaaggggggcggtcatcatttcacttgtcaggnnnnnnnnnnnnnnnnnnnnnnnnnnnnnnnnnnnnnnnnnnnncaggagcggcagatggggagacaacgtgctctttgttttgtgtctcttatggatgtccccagcagagaggtttgcagtcccaagcggtgtctctcctgccccttggacacgctcagtggggcagaggcagtacctgggcaagctggcggctggggtcccagcagctgccaggagcacggctctgtccccagcctgggaaagcccctgcccctcctctccctcatcaaggacacgggcctgtccacaggcttctgagcagcgagcctgctagtggccgaaccagaaccaattattttcatccttgtcttattcccttcctgccagcccctgccattgtagcgtctttcttttttggccatctgctcctggatctccctgagatgggcttcccaagggctgccggggcagccccctcacagtattgctcacccagtgccctctcccctcagctctccccgtgcctgccctggtgacatcaggtttttcccggacttagaaaaccagctcagcacntgcctgctcccatcctgtgtgttaagctctgctattaggccagcaagcggggatgtccctgggagggacatgcttagcagtccccttcccttccaagaaggattcggtccgtcataacccaaggtaccattcctaggctgacacctaactcttctttcatttcttctacaactcatacactcgtatgatacttcgaccacttgttcttagctcaatgagcatgtttagactttaacataagctaattttctaaactacaaaggtttaaatgaacaagagaagcattctcattggaaatttagcattgtagtgctttgagagagaaaggactcctgnnnnnnnnnnnnnnnnnnnnnnnnnnnnnnnntgtattttatgttatatataaatatattattacttgtaaatataaagacgttttataagcatcattatttatgtattgtgcaatgtgtataaacaagaaaaataaagaaaagatgcactttgctttaatataaatgcaaataacaaatgccaaattaaaaaagataaacacaagattggcgtttttttctatgggtgttatcacctagctgaatgtttttccaaaggagtttatgttccattaaacgatttttaaaatgtacactcgagcacgccgacgaaccccaaaaccctaaaacttgt

SEQ ID NO: 88424 - DNA, 975 bp, Homo Sapiens
  misc_feature (54)..(79): n is a, c, g, or t
  misc_feature (742)..(778): n is a, c, g, or t
aggtcaaggggaatagttatcccaatactaacttctcagtttattttcagggtnnnnnnnnnnnnnnnnnnnnnnnnnnttgtagggatcgttagggattcctgtgatggaccttgggcactaaattcaatattgcgttgtggagatgccctttcctcaattgcttttttccacaatcccaaatactgtcaagaaaccgtatcttacatccctaaagtcagcgaagattcttagattgttttctgagcattgggttgttcaaaagtaaagatgatgtgaatcacttcagaaacaggttgtgtcattcctttggaagcagagggttgccctttgtctctgtgtgagatggtgctaggcctatcgcgtgctcaggctttgatgaagcagagtcatcacattggtgcaccaaagctgaattcatttcatgccctaattcaggagcaattgcatctaataccatcagattggtcggtctggaagggagcctaacgattacttagtctagcttcctcactttgcagggaactgaggactccagaggtgcagggacctgcctaatgtcttagcctgttggggacagaggcattgctcatgaatctaaacaacttctcaaagatgtttggggctggaagcacagcatgttgactaaggaaaaagagcagtcaattttcttcaatttgtggttatggcaaaaaataacattgcccagacagcaggtgacctaatttggcacctacttttnnnnnnnnnnnnnnnnnnnnnnnnnnnnnnnnnnnnnttccctaataatgcagatattcaggtccagatgtatgtctgccttgcctcgagaaatttggtagctaaaaatatccaaaattcattttagccaatacttgcaactctgcttacttgattatttgttaacacagagcattgatttataatgtgcatgtcccctttatcctattaagaattaaaactgaaattaccaaa

SEQ ID NO: 88425 - DNA, 435 bp, Homo Sapiens
cagggtggcagaaaagggaaaagaaactctgaatccgaccagtgtagagccatcactggatctttactcatgaaggaaaataatctggtgaggctctcctgaactagcaaacacttcgaatatgacggactactgcgtctgccacatcctgccagacagctctgactgcagttgattgccatactccttcaccttaataagaaaactactgaaaagagcagaaaatggcccagctcctgcatctctcatgcaaaacatctgtcagcacctctgggtatctttcccactcctgctcctgtaaattttgctagtcattctatagagtagatgaataccacctggctggtggcaaggacaaatagaatggtatggactgaaggccctcgggcagtccctccataaataaaaactaggctcagttattcaaactgcaaa

SEQ ID NO: 88426 - DNA, 499 bp, Homo Sapiens
tttaattttaaacacaaatctcaaataaataggacataattattatcatatacaatattttgccatcagaacactaagctatgtaaagatcattgctgtctactcaaatcaagtctaaagatatgacaaaggaactctatgtataacctggctttcctcataggaaaggtatagtcacatgtttccctcatgatgagcactgggaatttatttcatcctttatcatttaaaaacattatggctaatatattaacagtttttgtttgtttgtttgatagtagtgggctcagatggtctgatttggggtaagacaccagttgggggatggagaagtgttgtatacagagcataagggaggttagcaaagcccccaaatctctcaaaatttcatgcctcttaaataaagacaccaagtaaccaaaaaggaaaaaataattgtgcctcaacatatcactcaggaaacctgctttcctgcttcttaaaaggagtatatagtcat

SEQ ID NO: 88427 - DNA, 842 bp, Homo Sapiens
  misc_feature (794)..(794): n is a, c, g, or t
ttttttagtctccaatttactttattcctgtccaacaatacagccaggtctgtgaaagcaaattcaaggtgcaaacatgaatttgttaccagttccatattctaacaaataacttcttgccatttcacttagagaaacgtggggttctctgcatctccaaactaaaggaatcaggaaagaccccattgtctttgtttgcaggtctacttaggagcaaagtgtcatctaccttacaaatggacaactgtgtacacattcacagagacactctctgacatgagtctattaatttgctaattttatagaagttgcaaatgcagatggaagtagagaggctcctgtcagctacccagccaaaaccgcagatctaccaaaaatctgcatttaatacacttcatgtattcggagtcatgcaaaaaacaaacactgcagggaatgctgcataaccaagtacagaaatcactccatactcccagcctttcaccatcagctaagtctactcctggaatccttcctaactgcacctagcactgtgtgttttggaagctgactataaatcagtgaaagatcatcattagactgtacatggagtacctcaaagcagaacgtaccctgttccaagagacttggataaacccaggtaccccacttgtggggaaagatcagaggcagcattccccagccaactgtatccagctttattaaagatactttccattaacaatcatggtattcaggcaggacatgggcaggacatcgttacagtatacaacaacttttcaacttccttcttncaatgactaccaaaaatcagaaaagcactattaaaccccatgaagtct

SEQ ID NO: 88428 - DNA, 578 bp, Homo Sapiens
aaggagaatttcctaagaaatgcacatgtgcaacaagtatagatttaacagctatataaccttccttgggtagcagtaattagcaaggcaaccatcacctaaaatttgtagtcaacacaagctgaagcatgctcattaatcaatagtaagggagagtcccacaaacctgggatgggaactatgtggagaaaggcagaaatggaaaaaactagacaaaagaagcccagaccgaggtgttgataacaaaacactgcctactgatctgcatgagacactcccatctcagagtctacttccctgaagaactcaaccaagtaacaactcgtactaggaacaattcaaagcagcaggagattcataggaatttggaaaatatgcttatttaccatcaagctagcaataggatcctaatatttaatttgatgggtacagatagactctggtacaaaatggtagtctagttgttaaaagttccactagtgtgtattggaatggtgcatagtagtggaaaagaatgcactggctggtgcgttatgtcaatggtttgataaccatgaaaaaaacagttaattataaaa

SEQ ID NO: 88429 - DNA, 592 bp, Homo Sapiens
tcaatagctcaaatcaatttcagtgcctttatcacttgaattattaacttaatttgactcttaatgtgtatatgttcttagattagaataatgcaacttcgagtatgctttaatatttcaatattcaagttacaaatgtataaggcagttagaaataatacagtcacatgtcacttaatgatagggaaacattctgagaaatgcattgtaaggtgactttattgtgtgaacatcatggagtgcacttatacaaacctagatgggacacctatgacccacccaggccagatggtacagcctgttgctcctgggccacacacctgtacagcatgtgactgcactgaataccgcaggcaattgtaacacagtggtgagtatttgtgtttacaaacataggaaaggtacagtaaaactatggtattacaatgttatgggaccaccgtcatgtaagtggtatgtctttgacagaaacatggttacgtggttcatgactgtatattcactggaagatagtcaagactaaagacacattagagcaaattgacccccccaacatgtgattattgtccaattaaagacagttgatttaagt

SEQ ID NO: 88430 - DNA, 626 bp, Homo Sapiens
ggcaggatcaaaagcagctcctgcatggggacgccgtgtcctcctgctgttatcatagtatgccctgtgctcccaggaggaggctgaggtcataaagggcattgtggcacctaccttgatttctcttggatcactcattctgagggaagatagctgccatgttgggaggacgtgcaagcagccctgtgaagaggtcaacacaggggggaactgaagccccttccgaacagctagcaccaacttgccagccatgtaaagtgattcaccttggaaacagatcctccagcctcagccaagccttcagatgcaacctcatgacagactctgaaccagaaacacacacgccaagctgctgacccacagactttgtgagagatcataaacatttactgttgttctaagacactgttttagggtgctttgttgtacaacaatagcttactgaaaatacagagagcctagcacagtgcctgcatgtggtcatcactcaatggttgagcgagtgaatcttgcttagtattgaacactcccactgacagctaactgtaccatctctcaaaacaattcattctatctttgggcaattctgttaaagattattagaattaaattggatctttctcaaa

SEQ ID NO: 88431 - DNA, 506 bp, Homo Sapiens
tttggtatcaccattacttctcctaaagtcacgacataatatcacctacagcagaaatgaggacttcagtggaattgacatctccttccatcaagcgcatttgcagtccatctttagcaggacctctctctaatggctaaggctaggcagaagaatttgaagacagtctggtttccattttcctaatgcagcctggcccaagagccaggactcccataagactagtctactgtgggagtcagggtcttttccacgtgtggaggctagtgtttgatgctggacggcctggagtaaagggcgaaggggagaaggtaaccaaccaggctggcctcgggattcgcagaggagggctggggctttgacttctgcagggaggtgagcagtgtggccaagggctactcaaggaacgcctctgcgagaattcagactgtggttgagcgcacaaagcaagagtgtgcgaagaaaagttaacgcctctcccagctgaccccaaaatctgctaatct

SEQ ID NO: 88432 - DNA, 568 bp, Homo Sapiens
ctgttcgtagttgttcatagtctaataccagattatcatagtcagcacgaagagagttcaactcactttctatattctcctgatttagtagctttgttgctggattccattctatctcacttaatgtatcaagagtgttactgaaaacatcagactctgaacagacagattcatcaatttctcgtaataaatttatagaaagcttatgtgtttttgttgttatatttgttggtatattaaattgatctgcatagtttgagttcttcattttgttaattttgccaaggcaccaagtaactcttcgttttcttttagcctttaattcctgttgcaacgtgagggaagaagaggtcaccagcatccgtgttaagttttcaattttctcattctgtactttctgaagcaaatctttttcttccaaaagttgggccaattggtctttttccattgcctgagcccgcgtctctaaagaaacctcctctaattgttttttaagatccattatttcttttctataccttttcaggagagcttcatcagttgatacctcattaacataaggagtatt

SEQ ID NO: 88433 - DNA, 431 bp, Homo Sapiens
taatgcatttccatgtctgtatgtccgtgcttagcttattctatcaatcacggaagaggcagtcaaggaggaaggagagacattaggagccgataaatgcatctgatcagaaatcagcagacagaattaccaaagtgtatctggtgctgaatgactgggggacaagcagaagtggaagagatctttctgcaacaggatattcttctagtcttctgagtttctggtctttgacaggcaattctggttggctgtggctggaatccacatgctgatagataggaatttgtgcttacaaagcaggagaattaaaaagacgctttcctctcctcttccctcctgtcttctccgttctttttacaatcatcttacacgcacagcctgagacagctggcatagtttttggaattatagtattgatatttccaaacgtg

SEQ ID NO: 88434 - DNA, 660 bp, Homo Sapiens
  misc_feature (21)..(21): n is a, c, g, or t
  misc_feature (23)..(23): n is a, c, g, or t
  misc_feature (119)..(119): n is a, c, g, or t
gacacagatgctcgtatgccntntgtcaagaaaccatttatggtctctagaatagacaagatggtggtgagtgccattgtggacacctgaaagacagcgtttcctcgctctgaacccangagccccacagaggagctgagtgaggccgagaccgaaagcaagccccagacagaaggcaagaaggctagcaagtctaggctgaggttctcatccagtaaaatttctccagcactaagtgtgactgaagcacaagacaagattctttattgtctccaggaaggcaatgtggagtctgagactctatccatgtctgcgatggaatcttttattgaaaaacagacaaagttactggaaatgcagccaacaaaagccccagaaaaagatcctgaacaacctcccaaaggacgtgtggacagttgcgtgtcagatgcagccgtgccagcccaagaccccagcaacagcgatccagctgagcatgccatgtgttgaactccagtgttggaggtgctgtgttggggcacaaagatgagtagtacatagttgccacagcggaatcaagcagcagaacagggcacaaacacaggaagttctaatccagcaggatgagatcatgctgataatattgataactcattaaacttatttttggcatgctttggc

SEQ ID NO: 88435 - DNA, 557 bp, Homo Sapiens
gcacaagacaagattctttatgtctcccaggaaggcaatgtgaagtctgagactctatccatgtctgcgatggaatcttttattgaaaaacagacaaagttactggaaatgcagccaacaaaagccccagaaaaagatcctgaacaacctcccaaaggacgtgtggacagttgcgtgtcagatgcagccgtgccagcccaagaccccagcaacagcgatccaggaacagagacagagttagctgacacagccctggatctgctcctcttgctactaacagaacagtggaaatggctatgtaccgaaaacatgcaaaagtttcttcgtcttatctttgggaccctagttcaaagagttctagggttctgcagaagtgcttctgaagccaacttagaagctcagggaaaactgagtggaccatgacccaaccacagaagttacactttgatcagtttaatatactggggctctaggtaacgctttgtttgaaaaggggctccactctgtttaaaatatgcatttatttctttatattaaaattccacctcctttcttaa

SEQ ID NO: 88436 - DNA, 696 bp, Homo Sapiens
  misc_feature (94)..(145): n is a, c, g, or t
gcctcaccttcattcagtgcttctaccacctcccaatcggtcaatttatcgcaacagctgcgctcatgcgaaaaaatccttaaaacatacccannnnnnnnnnnnnnnnnnnnnnnnnnnnnnnnnnnnnnnnnnnnnnnnnnnnaatttttatttaaataaaaaagaaagctcgaatcccaagccaatatgtgtatatcaaatccttgaccagccaggtctgtagggcataatcaaattcaatgtgaaatagtatataaacacggtgccttgactgggcaaattaaataattgctactcaaaagagtgttctgtttggactctcctactggtaggcaatggcaggactgtattacccttcccacccccaccacccatttgtttaagttaacagtatgatggacacagagcttagactgaggttgttatgacctcagcaggagttaagggttaagaaaataagaaacaagaaaaatataaactcttgtttttactcaaccaaagcaatgtagtaacttattacataaccagtgctttctaatttagtagtaaaatacagaaagggaaactgaaaaaatcaggcaaatagaggaatggagagggcaactatatcaaacagtccccactaaacacgttttatagggtcttagttaattaagcacagacacatggcatcagaatatgtgcagcagaatt

SEQ ID NO: 88437 - DNA, 481 bp, Homo Sapiens
ccaaatacattctttattggatcacaactggtatatgcaacagtgataaaagtttaagtgagggtatgtgaggttaaagcacctagaccttcaagtatctttaaggctaaagcccaaggaaaaagtcttttgatttggcaagaggatactcctgggtggggggagaaaggcaggctcagaaggaaaagacaacagcctcatataaatatgacaacagttataatctgagcctttggagagcttgaagttctaatgaaagggttggctggctgctggcatagaggatgtctgtgtcagcaggggcagaaagggttttgtatacagaggaaacagacaggacgtggatgagttggaagcaccgagagcaagatcacagagttatgagaaccaaggggaaagtaaagagctttgctttgaagacacagaggattccttttttagactggaaggaaaaaggaggagctaattggaaaaatacaag

SEQ ID NO: 88438 - DNA, 409 bp, Homo Sapiens
agtagacatcataaatgcttggtacaattgccagatttagggaataaaaaatttttaaagtacagtgttgaagaatggggcatgtcatgaagacattcagcaaagaagcaatcttggcaaggtggagaagtgggaagcaatggggagagaaagggagatgcccagagcaggaattctcaatgtgtggtccctaggccaacagcatcagcacatcttgccctcaccagacctactgaatccgaaactcccagcgcaaggcccagcagtcttcaacaagccctccaggggtctttggtgcatgctcaagtttgagaaccataggctttgccacggttaaaaagatgttttaatggactggtctcctcctaacctctgaggtgctctcatattccctccaaaagtaaagaga

SEQ ID NO: 88439 - DNA, 527 bp, Homo Sapiens
actcttcatgaagcaaacaattctagcttcttattagttccagagaaactacccaacccccctacagaactacacagtcacagagtgaagaaagctgatagtattggtgatatcctaggtgatatcatcatccaatgggtctgggcaaacttcatcatgggaaatggagggaaatggagaaatttcagttattgagaaaaagcataaggaaatggacctatttaacagtgttgaaggtatttccaggcttgtctttgtctccggatcctgttttttctctgtttatgtagtattattgtagaaactggaggacgtggaaaccagtgacttaatttgcttcatataatgcagttttgttaaggcatttgataatattcactcagcttctcctagcagtttacaatgtccagcaggagcttgaggcccttcattaggcaaaggtctatggctcttcacaatttatcagaaacacagcagactctgctcagctatgcagaccaccacttgcttgcattaatgcctaccct

SEQ ID NO: 88440 - DNA, 643 bp, Homo Sapiens
ggcgggtcctgcgctggtgaggttgcttaggcggggtttctcgcctccggtcacaatgggacctctgtaccgcgctgggcttgttggcctgcgattagcacacacccatccctgggaactgctagtctggaaagcggggctgcttctccgggatgagcccgagccctgccaagcccctcaaggcattgaagctttagctcaccttatccgaatggtcattgggcatctggacttgagttaacgactgaatttttctgggaagcaagggacacgttctaaaataaccccaggatcactctccgaacttggcctgagtctaggcaagcagtgttactcggtcgccttgatcttggagctgctgtgtactggggacctcatactagttgggttaactatattcccattagcagtacgcgggatcgcagtactcgggacaagctgagttcagctgctatgagtaacacgatctggaaagacagcgctagcaaggaatgaggagtgatacagtgactggaggctaagagataatgtctgcaagtcacctaaaaccattgcagacacagggagattgatggatttggaggacttctggttgtgaagactctgacgattgctaaagagttaagtgaaatactaaaaaaaa

SEQ ID NO: 88441 - DNA, 626 bp, Homo Sapiens
cccggctgggggaactaaactttcatcctccatctcccggtcccggacggccccctagaacgcgggcaagagtccgtgtgagaaccgggacacctgtcctgttgaaaagggggacgcaaaagctgaaaatgcccggaaggatatggcttccttgaactgcgggacgtgtagctgcagctgtggggtggaccatggaaacagctccatcagaagtaccagggaggactctgacaggcctggcctggatcagcaggaagaagagatggaagcaacgccatggaccttcacgtccttcagagtggaccataggggctggcagctgaagaaggtgacttggcccctctctagagggtgaacgcaggatcaattcaaggccatgaagtggatgcagctgggagagcctgcttggtgcttttaaacctcaacatgtcaaccgcaaatacctcaaacactgctcacaccgtggtaaaatctagttgcgaaacctgtcccgtggcagccttctccatcccaggtgcccaggccccatctcctgggagcaggcagctctccccaccccgattcatgtccctcctacagcccaaggcaactccctgccaccttggtgaatgaagcacatcatgctg

SEQ ID NO: 88442 - DNA, 474 bp, Homo Sapiens
cgcgaaccccaaattctcacacgcaccccataacgttccgccggctcccaggcccggctgggggaactaaactttcatcctccatctcccggtcccggacggccccctagaacgcgggcaaggtatctaggccgacggcccctcatggggacccaggccttcttactcttttgggggtacattcaaggcttagaggccaccccagacaccatctccggaagagtgacgtcggaggacgagggggcaacggaaaggtcaaaaagatctctgatggatttgttgactcctctgtgggagaaaggcttggtctactgcaggtgttaacgctaagccaggctggagctgcggacgtcagtttcctcagctccccgctgttcgcttcgaacgtgacctcgacgtctgctctccccttccctttagctgacaatgtgacagtgcttgaataaaagtcagtctgacaggaacggtaaaaaa

SEQ ID NO: 88443 - DNA, 365 bp, Homo Sapiens
  misc_feature (159)..(304): n is a, c, g, or t
aaatagacacaccagtatgctagatgctgatgcagttcaggaaatgctaccccaaaatatggcccctcagcatactgagtattttaagcagaagacaattaaggaaaaccacaaaaacagaaaggtccctctgaccttctcccaccctctctctcttgnnnnnnnnnnnnnnnnnnnnnnnnnnnnnnnnnnnnnnnnnnnnnnnnnnnnnnnnnnnnnnnnnnnnnnnnnnnnnnnnnnnnnnnnnnnnnnnnnnnnnnnnnnnnnnnnnnnnnnnnnnnnnnnnnnnnnnnnnnnnnnnnnnatacaactgtccatcattcattaaacctaaccacaaaagtagttttcactcggtttttgag

SEQ ID NO: 88444 - DNA, 533 bp, Homo Sapiens
gtcaggatctcttgtactagaaatgggtcagaggtggggggatagaagttgattggatgaacaggggctgtctaagctcccagtggtcaggggatggccaatgcaggagaaaggtcagggtcaggactgcttggaagtacccgatatagccaaggaattagtccaggagatgtgagcctgggcaaatcagttttacttttcagtttaacctttcatgtccctggctctgagctaggcaccgaagtgggaagaggcaatgcaggagcggtggtaggaggctgcccctacaagatgtgtgcaagatgggaggtgacccaggcctgagtggggctgagggtagactactctgttagggattctggaattgatccttaattgaatccccaagaagtcctccactgctggcaaggtcaccaagtttgcagcaaaagccagcaagaaatgaagcccaccctcctctttgcagtgtcctcagctcctccttcccccccaataactaaacattcaatgaatgtatgtatttcctaaataaa

SEQ ID NO: 88445 - DNA, 1264 bp, Homo Sapiens
  misc_feature (63)..(97): n is a, c, g, or t
  misc_feature (898)..(913): n is a, c, g, or t
  misc_feature (920)..(921): n is a, c, g, or t
  misc_feature (989)..(1129): n is a, c, g, or t
  misc_feature (1224)..(1224): n is a, c, g, or t
  misc_feature (1226)..(1226): n is a, c, g, or t
tctatgggccatgctgtcgagcgaacgacgagcgcagcgagtagtgagcgaggaagcggccgnnnnnnnnnnnnnnnnnnnnnnnnnnnnnnnnnnncagtcgacggtaccggacatatgcccgggaattcggccattacggccggggagtgcagcgcagccgcggggagcgaggagcgcgcggagccggccatgggcaagtcagcttccaaacagtttcataatgaggtcctgaaggcccacaatgagtaccggcagaagcacggcgtccccccactgaagctctgcaagaacctcaaccgggaggctcaacagtattctgaggccctggccagcacgaggatcctcaagcacagcccggagtccagccgtggccagtgtggggagaaccttgcatgggcatcctatgatcagacaggaaaggaggtggctgatagatggtacagtgaaatcaagaactataacttccagcagcctggcttcacctcggggactggacacttcacggccatggtatggaagaacaccaagaagatgggcgtggggaaggcgtccgcaagtgacgggtcctcctttgtggtggccagatacttcccagcggggaatgttgtcaatgagggcttcttcgaagaaaacgtcctgccgccgaagaagtaacttgttaaatgtaatgggaaggtggcagacttaagaacgtggatatgaagtgcctagaaccaccacaacctggctgtgcgtctgtccctgtgggtgtatgtgcttgtgtgtgtgatgcatgtgagcgtctctggcacacacacttggacatacagttctgtgtgcgctcattcttattacaggagtgagcaaaggaagcatttaccccgaatggttacctagaccacgattatttggattnnnnnnnnnnnnnnnnaatccgnntttttttctttcatcttcgggggcttccctgacgaaacgcgtggtgggcggttgcgtaagaacaaaannnnnnnnnnnnnnnnnnnnnnnnnnnnnnnnnnnnnnnnnnnnnnnnnnnnnnnnnnnnnnnnnnnnnnnnnnnnnnnnnnnnnnnnnnnnnnnnnnnnnnnnnnnnnnnnnnnnnnnnnnnnnnnnnnnnnnnnnnnnntgtggtggcgagtgcgtgggtggggaggcgacagcggatggggaggagagcgcatggggcgccgaagaagatggatggtgcttggggaagggtgngngagatgcggaagtggatgcgcatgagtggggatgggac

SEQ ID NO: 88446 - DNA, 335 bp, Homo Sapiens
ggagaaacatctgctagtggaataaaatactttgttttgctctgaagagactgaaattgttcaggcttattatggctcatagattacagagaatgatgctagttacatgccaatgaactatttttactctttttatatgaaatgtaaaaatttgtaggggttctggtgatggtggtacctcttattaccttatgtaaaacacttgaacagcctcatcaatattgccgtcatctgtttaacactcccagtatattttctcaatgtctgtttacttaaaattttgtggagtgacataattaataagcaataaagtctgaattatacacagcgaaaaa

SEQ ID NO: 88447 - DNA, 432 bp, Homo Sapiens
  misc_feature (128)..(156): n is a, c, g, or t
ctggcccagggaatccagccatgacccccaccccttctgccaaagtattcttaggtgccagtctggtaactgaactccctctggaggcaggcttgagggaggattcctcagggttcccttgaaagctnnnnnnnnnnnnnnnnnnnnnnnnnnnnntggagaggcagcattgcacagtgaaagaattctggatatctcaggagccccgaaattctagctctgactttgctgtttccagtggtatgaccttggagaagtcacttatcctcttggagcctcagtttcctcatctgcagaataatgactgacttgtctaattcgtagggatgtgaggttctgctgaggaaatgggtatgaatgtgccttgaacacaaagctctgtcaataagtgatacatgttttttattccaataaattgtcaagaccacagga

SEQ ID NO: 88448 - DNA, 392 bp, Homo Sapiens
tagaaaggaaaatttaagtaagataccagcttcagaataggagctagggtctagagaaatggagcacattgtaactggctgacaacagtggcccaggaaaaccacagtaacttaatttgaaacttaatttgcttcccttgttttaatgactttttaatatttaaagatgttttctaaacctctaatcctcaaaacaaaaattggaagtaaactgattttcattcagtgaactgccatttagaagtgataggggtttacatactttgtaccattagttaacgcctaagctaaaagtataatatccagtttccctatgatctcaagtttatggaaagtagcctttcttttggcagcgtaaacaagcagttacattaaacacgtaaagataatgc

SEQ ID NO: 88449 - DNA, 582 bp, Homo Sapiens
  misc_feature (49)..(49): n is a, c, g, or t
cccaaaaaatcgaagcagacaaaaaaaggcactttttcagaacatcaanattcctaatgaagaagaggagaagataatggggaaatttgacatttgatataaatttatatttgttatgtgtatgtttgttaatgcaactggaatatttgacttaggtgagtatcagttaacatccttgtatttatatagtgacatcaaaataaatgcaatcatcttgaactttgatgttaagggagattttgaaaaaatatttagttatttcaaattcatattggttcaaaagtatcagtttctgctgaataatatttttaatttcaaaagggttttgttccctctgtgctccattctgaggctcaagagcttaatgcaagtatgttttctgagttaaaataacacttttagatgagaaaaagcttgtatcatacagggctataatataaataaaaaaattgtatgtatgcaaaatttatcatattttctaccccttaaaaaattaagttagaaataagcttattttcttgcacatcaatatttttctgttggtaaagaggacacactttctattagattgttaataacatc

SEQ ID NO: 88450 - DNA, 926 bp, Homo Sapiens
tgcggccgctggacatgggaaagcggaaccaccaaaaggagtgatgatcaacgatctcatgataaatctggatgctagttctcatgcctcaggacatcctactgggaacgacacaccagctcctgggatcagactttcatctacttaggacccctctttgcccagactactaaagccagtcttcactagccacgaatggctacccaaaggaaacacttggtgaaagattttaatccttacattacctgctatatctgtaaagggtatctgatcaagccaacaacagtgacggaatgcctccatacatctgcagaatcctactggatgtccacttggatgtcctgaagccacctgaaactcagcatatctacgaatgatcaaatgggatgccagcactcagttatccaagcaagaaatatgctccatgcttgactctttaccctcactaacaaaactgggcaaagtcctgctggtctctctctttaatacttctcaaatctgtccctttagtttcatccctctgttactgttctcattcagattcttattacatctcaccaaagccactgcagcacattcttaactgtgtccaagtggtaataattaaaaacagcttactgtctttatcattatcactcttaacccaccctaaaatttcctaaaggtatcccgttgacctcaggatacattaaagctacttagtggtgactggtttctgcctaccacttcctcccctaccacctaacactcacacatacaaatacttggttcaactgtttgctctccttgaaatgaatgcctcctctgtgcccagctagcagttacccatcctttaaaactcatcccctctaagatgtgccctaccacctgcagatttgggttaagtgtctcaataaaatcttaaatgaataaatagaatggctaaa

SEQ ID NO: 88451 - DNA, 333 bp, Homo Sapiens
acatctcaccaaagccactgcagcacattcttaactgtgtccaagtggtaataattaaaaacagcttactgtctttatcattatcactcttaacccaccctaaaatttcctaaaggtatcccgttgacctcaggatacattaaagctacttagtggtgactggtttctgcctaccacttcctcccctaccacctaacactcacacatacaaatacttggttctctgtgcccagctagcagttacccatcctttaaaactcatcccactctaagatgtgccctaccacctgcagatttgggttaagtgtctcaataaaatcttaaatgaataaa
